United States Patent Application Publication US 2011/0183924 A1 - sequence listing, part 180

SEQ ID NO: 442613 - DNA, 6828 bp, Homo sapiens
gcggagtagcaggagtttgcaagctgcttcattaacttggagccagtggaatgtctgggatcgtctgtgatttggaaaccggtggcagaatgttcccgcgtttctggtcctcatcagtcagaaaatgagttccgaggtgagctgttaaatcagaggtggacacacggaggcaaggccagcagctgcaggacctcaagacacctgggcagacactgcaagatgagcttagaaaatgaagacaagcgagctcgcacccgatccaaggccctgcgaggacccccagagaccacagctgcagacctcagctgccccaccccaggatgcacaggctcagggcacgtccggggcaagtactccaggcaccgaagtttacagagctgccccctggccaagaagaggaagctggagggcgctgaggctgagcacctggtgtccaagaggaagtcacaccccctgaagctggctctggacgagggctatggtgtggacagcgacggcagtgaggacactgaggtgaaggacgcctctgtttcggatgaatcggaaggaactctggagggggccgaggctgagacgtcaggacaggacgagattcatcgccccgagacagctgaagatccttcaagagctgagaagcgtgagatcaagtgtccaacaccaggctgtgatggcactggccacgttaccgggttgtaccctcaccaccgcagcctttctggctgtccccacaaggataggatccccccagagatcttagccatgcatgagaacgtgctgaagtgccccactcctggctgcacaggccagggtcacgtgaacagcaaccgcaacacgcacagaagtttgtctgggtgtcccattgctgccgccgaaaaattagccaaatcccatgagaagcagcagccgcagacaggagatccttccaagagtagctccaattccgatcggatcctcaggcccatgtgcttcgtgaagcagctcgaggtccctccatatgggagctaccggcccaacgtggcccccgccacacccagggccaacttggccaaggagctggagaagttctccaaggtcacctttgactacgcaagtttcgatgctcaggtttttggcaaacgcatgcttgccccaaagattcagaccagcgaaacctcacctaaagcctttcaatccaaacctttcccaaaggcctcttcccccaggcacagcccctccagtagttatgtgaggagcacttcatcctcttctgcaggctttgactactcgcaggacgccgaggctgcacacatggctgccactgccatcctgaacctctccacgcgctgctgggagatgcctgagaacctcagcacgaagccacaggacctccccagcaagtctgtggatatcgaggtagacgaaaatggaaccctggacttgagcatgcacaaacaccgcaaacgagaaaatgctttccccagcagcagcagctgcagcagcagccccggtgtgaagtctcccgacgcctcccagcgccacagcagcaccagcgcccccagcagctccatgacctctccccagtccagccaggcctcccgccaggacgagtgggaccggcccctggactacaccaagcctagccgcctgagagaggaggaacctgaggagtcagagccagcagcccattcttttgcttcttctgaagcagatgaccaggaagtgtcggaagagaattttgaggagcggaagtatccgggggaagtcaccctgaccaactttaagctgaagtttctctccaaggacataaagaaggagctgctcacctgtcccacccctggctgtgacggcagcggccacatcaccgggaactacgcctcccaccgcagcctctctggttgccctcttgctgacaagagcctcagaaacctcatggctgcccactctgctgacctcaagtgccccacgcccggctgtgacggctctggccacatcacagggaactacgcttcacaccggagcttgtccggctgccctcgtgcaaagaaaagtggagtcaaggtggcacccaccaaggacgacaaggaggaccccgagctgatgaagtgcccagttccaggctgtgtggggctcggtcacatcagcgggaaatacgcctctcacaggagcgcatccggctgcccactggccgcccgcaggcagaaggaagggtccctcaatggctcgtcattctcctggaagtccctgaagaatgaaggaccgacctgccccaccccgggctgtgacggctctggccacgccaatgggagtttcctcacccaccggagtttgtcaggctgtcccagagcaacctttgctggaaagaagggaaaactgtcaggggatgaggtcctcagtccaaagttcaagactagcgacgtgttggagaatgatgaggagatcaagcagctgaaccaggagatccgagacctgaacgagtccaactcggagatggaggctgccatggtgcagctgcagtcccagatctcctccatggagaagaacctgaagaacatcgaggaggagaacaagctcattgaggagcagaatgaagccctgtttctggagctgtccggcctgagccaggccctcatccaaagtctcgccaatatccgccttccgcacatggagccaatatgcgaacagaatttcgatgcctatgtgagcaccctcaccgacatgtactccaaccaggacccggagaacaaggacctcctggagagcatcaagcaggctgtgaggggcatccaggtctaggccgtgtggtacccagaagtgtcccagcccaccacaccgtttacctccctcgccctgccccgcaccgtggggatgcccaactcacagtgacttcccgtttggggcccggtgtggccgcgggcgggtttatccaaagggatggctggaaattggccgctcccacgaggctccctccaggcttggggccgtggtggccctatctgtgtgcataggggcactgaagaattacaaagtgatttatttttgttttctgaaagaaatctgaagagcagctcaaagtctccagtggaagctcatggacaaggttctcagtattgcctaagtgtaatcttgaacatgggcggtgctgtgagtgctggtgaagacaatgatgagctgatagataatttgaaagaagcacagtatatccggactgagctggtagagcaggctttcagagctatcgatcgtgcagactattatcttgaagaatttaaagaaaatgcttataaagacttggcatggaagcatggaaacattcacctctcagccccgtgcatctactcggaggtgatggaagccctagatctgcagcctggactctcgtttctgaacctgggcagtggcactgggtatctcagctccatggtgggcctcattctaggtccttttggtgtgaaccatggggtggaacttcactcagatgtgatagagtatgcaaagcagaaactggacttcttcatcagaacaagtgatagttttgacaagtttgacttctgtgaaccttcctttgttactgggaattgcctggagatttctccggattgttctcagtatgatcgtgtatactgtggggctggcgtgcagaaagagcatgaagagtacatgaagaatcttctcaaagtgggagggatccttgtcatgccactggaagagaagttgactaagataacacgcacaggtccttcagcttgggaaaccaaaaagattcttgctgtttcttttgctcctctgatccagccctgccattcagagtcaggaaaatcaagacttgtccagttaccaccagtggcagttcgcagcctccaggacttggctcgcatcgccatccggggcaccattaaaaagattattcatcaggaaactgtgagcaaaaacggaaacggactaaagaacacccccaggtttaaacgaaggagagttcgccgccgtcgaatggaaacgattgtctttttggacaaagaagtctttgccagtcggatttccaacccctcagatgacaacagctgtgaagacttggaagaggaacggagggaagaagaagagaagaccccgccggaaacaaagccagaccccccagtgaacttcctacgccagaaggtcctgagcctccctctgccagatcccctgaaatactacttgctttattacagagaaaaataagtctcctgtttgaaagggggaaataggaagagcagattgctgagtgtgaagttcgtgctgcctgtgtgctgttgaagggtcacctggaggcagacgttgtggggaagggaactgctgggctcatccacaccatggttttcttctagttcctgattgacctctaaaattctattcagttgtatgatttgtttacatagttccacaagaccttcattgcatagaagattgttttcccaaagtggagagaatcttcatagagaaaaagagaaggctgtttctttttcggctctgacgaaacactgaagtctgcgtaagagagactgtttgatgaccgtccctcatgcaacatgcacggtactcactaaaaatgaaaactgaagtggaaactaacctgtgttgcttataaagtgtgaaagcacaagcttataaatgtataaaatcttttctgggtgtgacgcacctgcgtccaagtttgaatttttatgatatgtaccacttaattactggcactgagtatcactgaatttcttagttttctagtggggaaacattattgagaagccctcccttattttaagtaagttgattaaatcttatgtgagttgccagttgtaatttttcaaaggaaaaattttgatggggtggaggaatgaattgccagataatctttctggaattccgagagaattccaaagagggtttttttttttttttttaggacatcttttgatacctttaaaagaaccactgtcaagtaatccttaaaagaatatcttggaaaaggaaacagattttttcctgtgtgtaagcaataagtgaagttacatttgccctaaccctagggatgattctttacccagttttaaagcccatcatggtattctaaggtgttgacaccctccatcctcagagcaggtcgaaaatattaaatagactggggactctatgatgggcagcctgtgctttttgacttcagtttgctatttttctgtgatcacattagtactgattcatagattctatcttttataattctggagaaaaagatttgttagttttgtaatttttttgtaagaccaaatgtatgtattttagtagctccattgcatgagaagagtgtaactcacactgacttgtgatatcagccttctctgggccttgtgtgtggagagctttctatcttaccaagtggtagggctaaaagaacaacagcctttttggtagtcacatagcagaatgatcagagttacattgcttattccaaaacattggttctttttaaaacatttttttttacccaaagaaaagaataatagaaattactaacaataaatataaattcagagtgttgatataggattcagtatccagagtttatttttaatcttaatcctcagcttcttgggagttgctgggcttcagtgtctctgtggtttcaccagcttagcttgagctctggttattttggatcttttctgctttttttaagtaactgagtcatttttaccacacagtccagtttgcatgtatagctaggaaacatgtattgctctagattgggcagtttaagtcattttaaagaaagttagttcatagttgttgccttttaactcatagtcaagcttcagtctttcaaagagaaatgtgtgattttcatttacttgctgatattttgtagtttggagatccttgtgggcattattctaactgatacgtagacacttacttggaaatttttggacattatattaaatgagtgctatctgtgaaattggttatattaggtggcttgactaatgttttttctataattgtatatggactgcatttttaaaaaaaccgcatttgcctttatgctagattgtaaaaaattatattagaatgcataagacatgtttttccttcatatgctagacttttcctagcatttcgtatttctgtgttgtcagtgtgtgatttttaaaccggaatttggtttaaaaaaaatctggtggtaatatatgtgagaaatactttggtgtttaccttatgaaaataaaggattgtaagtaaagtttcctgcgcaccttataccagaattcagtataatacactactttctgttttcaaacagataaatcataatatagtctgtattatctgtaagatctgtcttgtaaaccacattcttgacaactatttgcttttgagtagtttgtattttaatatgtgacttttgtcttgaaaagtagtaaagccatagacttgtgcaaaacaagtttcaagtttatagatattaagtttgtaatgtgagcatcaaatgtgtatgtaaaaatactttttaccagtctggaacttgggaaaatccagggaatttgaaacatagattttaatgagctggtaaacacaaatcatgtcaataaaggtagtcaggatattttatccttagcattgcttctgcatcctgtgtaggattccaattcttgaatatgttcttttcaaaatcttaagaaaagaaccttttttctttattaacatcatgtgtttactttcagcaaatatttgtattactgcttgattctgtgacagtcacaatagatgtagagaaggcattatttttcattaataaatgtgaaattggaatggaaaaatgga

SEQ ID NO: 442614 - DNA, 7213 bp, Homo sapiens
gcggagtagcaggagtttgcaagctgcttcattaacttggagccagtggaatgtctgggatcgtctgtgatttggaaaccggtggcagaatgttcccgcgtttctggtcctcatcagtcagaaaatgagttccgaggtgagctgttaaatcagaggtggacacacggaggcaaggccagcagctgcaggacctcaagacacctgggcagacactgcaagatgagcttagaaaatgaagacaagcgagctcgcacccgatccaaggccctgcgaggacccccagagaccacagctgcagacctcagctgccccaccccaggatgcacaggctcagggcacgtccggggcaagtactccaggcaccgaagtttacagagctgccccctggccaagaagaggaagctggagggcgctgaggctgagcacctggtgtccaagaggaagtcacaccccctgaagctggctctggacgagggctatggtgtggacagcgacggcagtgaggacactgaggtgaaggacgcctctgtttcggatgaatcggaaggaactctggagggggccgaggctgagacgtcaggacaggacgagattcatcgccccgagacagctgaaggaaggagccccgtcaagtcccattttggatccaaccccatcggcagcgccactgcctcctccaagggcagctacagcagctaccagggaatcatcgcaacttctctcctgaacttgggtcaaattgctgaagagaccctggtggaagaggacttgggccaggcggccaagccaggtcctggcattgtgcacctgcttcaggaggctgcagagggagctgccagcgaggagggtgaaaagggcctcttcatccagccagaggatgccgaggaggtcgtcgaagtcaccaccgagcgctcccaggacctgtgtccccagtccctggaggatgcagccagtgaggagtccagcaagcagaaaggcatcctgagtcacgaagaggaggacgaggaggaggaggaggaggaagaggaggaggaggaggatgaagaagaggaagaggaagaggaggaggaagaggaagaggaggaggaggaagaggaagaggaggaggaagaggaagaggaagaggaggaggaggaggcagctcctgatgtgatctttcaggaagacacctctcacacctctgcccagaaggcccctgagctccggggcccagaatcacccagtcccaagcctgagtactctgttattgtggaggtccgctcggatgatgacaaggacgaggacacccactcccggaagtcaacagtcactgacgagtcggagatgcaggacatgatgacccggggaaacctgggcctcctggagcaggccatcgccctgaaggctgaacagatccttcaagagctgagaagcgtgagatcaagtgtccaacaccaggctgtgatggcactggccacgttaccgggttgtaccctcaccaccgcagcctttctggctgtccccacaaggataggatccccccagagatcttagccatgcatgagaacgtgctgaagtgccccactcctggctgcacaggccagggtcacgtgaacagcaaccgcaacacgcacagaagtttgtctgggtgtcccattgctgccgccgaaaaattagccaaatcccatgagaagcagcagccgcagacaggagatccttccaagagtagctccaattccgatcggatcctcaggcccatgtgcttcgtgaagcagctcgaggtccctccatatgggagctaccggcccaacgtggcccccgccacacccagggccaacttggccaaggagctggagaagttctccaaggtcacctttgactacgcaagtttcgatgctcaggtttttggcaaacgcatgcttgccccaaagattcagaccagcgaaacctcacctaaagcctttcaatccaaacctttcccaaaggcctcttcccccaggcacagcccctccagtagttatgtgaggagcacttcatcctcttctgcaggctttgactactcgcaggacgccgaggctgcacacatggctgccactgccatcctgaacctctccacgcgctgctgggagatgcctgagaacctcagcacgaagccacaggacctccccagcaagtctgtggatatcgaggtagacgaaaatggaaccctggacttgagcatgcacaaacaccgcaaacgagaaaatgctttccccagcagcagcagctgcagcagcagccccggtgtgaagtctcccgacgcctcccagcgccacagcagcaccagcgcccccagcagctccatgacctctccccagtccagccaggcctcccgccaggacgagtgggaccggcccctggactacaccaagcctagccgcctgagagaggaggaacctgaggagtcagagccagcagcccattcttttgcttcttctgaagcagatgaccaggaagtgtcggaagagaattttgaggagcggaagtatccgggggaagtcaccctgaccaactttaagctgaagtttctctccaaggacataaagaaggagctgctcacctgtcccacccctggctgtgacggcagcggccacatcaccgggaactacgcctcccaccgcagcctctctggttgccctcttgctgacaagagcctcagaaacctcatggctgcccactctgctgacctcaagtgccccacgcccggctgtgacggctctggccacatcacagggaactacgcttcacaccggagcttgtccggctgccctcgtgcaaagaaaagtggagtcaaggtggcacccaccaaggacgacaaggaggaccccgagctgatgaagtgcccagttccaggctgtgtggggctcggtcacatcagcgggaaatacgcctctcacaggagcgcatccggctgcccactggccgcccgcaggcagaaggaagggtccctcaatggctcgtcattctcctggaagtccctgaagaatgaaggaccgacctgccccaccccgggctgtgacggctctggccacgccaatgggagtttcctcacccaccggagtttgtcaggctgtcccagagcaacctttgctggaaagaagggaaaactgtcaggggatgaggtcctcagtccaaagttcaagactagcgacgtgttggagaatgatgaggagatcaagcagctgaaccaggagatccgagacctgaacgagtccaactcggagatggaggctgccatggtgcagctgcagtcccagatctcctccatggagaagaacctgaagaacatcgaggaggagaacaagctcattgaggagcagaatgaagccctgtttctggagctgtccggcctgagccaggccctcatccaaagtctcgccaatatccgccttccgcacatggagccaatatgcgaacagaatttcgatgcctatgtgagcaccctcaccgacatgtactccaaccaggacccggagaacaaggacctcctggagagcatcaagcaggctgtgaggggcatccaggtctaggccgtgtggtacccagaagtgtcccagcccaccacaccgtttacctccctcgccctgccccgcaccgtggggatgcccaactcacagtgacttcccgtttggggcccggtgtggccgcgggcgggtttatccaaagggatggctggaaattggccgctcccacgaggctccctccaggcttggggccgtggtggccctatctgtgtgcataggggcactgaagaattacaaagtgatttatttttgttttctgaaagaaatctgaagagcagctcaaagtctccagtggaagctcatggacaaggttctcagtattgcctaagtgtaatcttgaacatgggcggtgctgtgagtgctggtgaagacaatgatgagctgatagataatttgaaagaagcacagtatatccggactgagctggtagagcaggctttcagagctatcgatcgtgcagactattatcttgaagaatttaaagaaaatgcttataaagacttggcatggaagcatggaaacattcacctctcagccccgtgcatctactcggaggtgatggaagccctagatctgcagcctggactctcgtttcttttgctcctctgatccagccctgccattcagagtcaggaaaatcaagacttgtccagttaccaccagtggcagttcgcagcctccaggacttggctcgcatcgccatccggggcaccattaaaaagattattcatcaggaaactgtgagcaaaaacggaaacggactaaagaacacccccaggtttaaacgaaggagagttcgccgccgtcgaatggaaacgattgtctttttggacaaagaagtctttgccagtcggatttccaacccctcagatgacaacagctgtgaagacttggaagaggaacggagggaagaagaagagaagaccccgccggaaacaaagccagaccccccagtgaacttcctacgccagaaggtcctgagcctccctctgccagatcccctgaaatactacttgctttattacagagaaaaataagtctcctgtttgaaagggggaaataggaagagcagattgctgagtgtgaagttcgtgctgcctgtgtgctgttgaagggtcacctggaggcagacgttgtggggaagggaactgctgggctcatccacaccatggttttcttctagttcctgattgacctctaaaattctattcagttgtatgatttgtttacatagttccacaagaccttcattgcatagaagattgttttcccaaagtggagagaatcttcatagagaaaaagagaaggctgtttctttttcggctctgacgaaacactgaagtctgcgtaagagagactgtttgatgaccgtccctcatgcaacatgcacggtactcactaaaaatgaaaactgaagtggaaactaacctgtgttgcttataaagtgtgaaagcacaagcttataaatgtataaaatcttttctgggtgtgacgcacctgcgtccaagtttgaatttttatgatatgtaccacttaattactggcactgagtatcactgaatttcttagttttctagtggggaaacattattgagaagccctcccttattttaagtaagttgattaaatcttatgtgagttgccagttgtaatttttcaaaggaaaaattttgatggggtggaggaatgaattgccagataatctttctggaattccgagagaattccaaagagggtttttttttttttttttaggacatcttttgatacctttaaaagaaccactgtcaagtaatccttaaaagaatatcttggaaaaggaaacagattttttcctgtgtgtaagcaataagtgaagttacatttgccctaaccctagggatgattctttacccagttttaaagcccatcatggtattctaaggtgttgacaccctccatcctcagagcaggtcgaaaatattaaatagactggggactctatgatgggcagcctgtgctttttgacttcagtttgctatttttctgtgatcacattagtactgattcatagattctatcttttataattctggagaaaaagatttgttagttttgtaatttttttgtaagaccaaatgtatgtattttagtagctccattgcatgagaagagtgtaactcacactgacttgtgatatcagccttctctgggccttgtgtgtggagagctttctatcttaccaagtggtagggctaaaagaacaacagcctttttggtagtcacatagcagaatgatcagagttacattgcttattccaaaacattggttctttttaaaacatttttttttacccaaagaaaagaataatagaaattactaacaataaatataaattcagagtgttgatataggattcagtatccagagtttatttttaatcttaatcctcagcttcttgggagttgctgggcttcagtgtctctgtggtttcaccagcttagcttgagctctggttattttggatcttttctgctttttttaagtaactgagtcatttttaccacacagtccagtttgcatgtatagctaggaaacatgtattgctctagattgggcagtttaagtcattttaaagaaagttagttcatagttgttgccttttaactcatagtcaagcttcagtctttcaaagagaaatgtgtgattttcatttacttgctgatattttgtagtttggagatccttgtgggcattattctaactgatacgtagacacttacttggaaatttttggacattatattaaatgagtgctatctgtgaaattggttatattaggtggcttgactaatgttttttctataattgtatatggactgcatttttaaaaaaaccgcatttgcctttatgctagattgtaaaaaattatattagaatgcataagacatgtttttccttcatatgctagacttttcctagcatttcgtatttctgtgttgtcagtgtgtgatttttaaaccggaatttggtttaaaaaaaatctggtggtaatatatgtgagaaatactttggtgtttaccttatgaaaataaaggattgtaagtaaagtttcctgcgcaccttataccagaattcagtataatacactactttctgttttcaaacagataaatcataatatagtctgtattatctgtaagatctgtcttgtaaaccacattcttgacaactatttgcttttgagtagtttgtattttaatatgtgacttttgtcttgaaaagtagtaaagccatagacttgtgcaaaacaagtttcaagtttatagatattaagtttgtaatgtgagcatcaaatgtgtatgtaaaaatactttttaccagtctggaacttgggaaaatccagggaatttgaaacatagattttaatgagctggtaaacacaaatcatgtcaataaaggtagtcaggatattttatccttagcattgcttctgcatcctgtgtaggattccaattcttgaatatgttcttttcaaaatcttaagaaaagaaccttttttctttattaacatcatgtgtttactttcagcaaatatttgtattactgcttgattctgtgacagtcacaatagatgtagagaaggcattatttttcattaataaatgtgaaattggaatggaaaaatgga

SEQ ID NO: 442615 - DNA, 3954 bp, Homo sapiens
aggcgcagaggcggcggcggcggcggcggcggcggatgtttacggcggccgaggttggagcggcgctgctcggccgcggacacacgagggacgcgcccgaggagctgcaggtggcagcccaggcggtccgaacccgtcggccggccgagcctggaggtagagccgccgccgccgccgccgcccctcggtccggcctgcggcgagcgggtgtattgcctaagtgtaatcttgaacatgggcggtgctgtgagtgctggtgaagacaatgatgagctgatagataatttgaaagaagcacagtatatccggactgagctggtagagcaggctttcagagctatcgatcgtgcagactattatcttgaagaatttaaagaaaatgcttataaagacttggcatggaagcatggaaacattcacctctcagccccgtgcatctactcggaggtgatggaagccctagatctgcagcctggactctcgtttctgaacctgggcagtggcactgggtatctcagctccatggtgggcctcattctaggtccttttggtgtgaaccatggggtggaacttcactcagatgtgatagagtatgcaaagcagaaactggacttcttcatcagaacaagtgatagttttgacaagtttgacttctgtgaaccttcctttgttactgggaattgcctggagatttctccggattgttctcagtatgatcgtgtatactgtggggctggcgtgcagaaagagcatgaagagtacatgaagaatcttctcaaagtgggagggatccttgtcatgccactggaagagaagttgactaagataacacgcacaggtccttcagcttgggaaaccaaaaagattcttgctgtttcttttgctcctctgatccagccctgccattcagagtcaggaaaatcaagacttgtccagttaccaccagtggcagttcgcagcctccaggacttggctcgcatcgccatccggggcaccattaaaaagattattcatcaggaaactgtgagcaaaaacggaaacggactaaagaacacccccaggtttaaacgaaggagagttcgccgccgtcgaatggaaacgattgtctttttggacaaagaagtctttgccagtcggatttccaacccctcagatgacaacagctgtgaagacttggaagaggaacggagggaagaagaagagaagaccccgccggaaacaaagccagaccccccagtgaacttcctacgccagaaggtcctgagcctccctctgccagatcccctgaaatactacttgctttattacagagaaaaataagtctcctgtttgaaagggggaaataggaagagcagattgctgagtgtgaagttcgtgctgcctgtgtgctgttgaagggtcacctggaggcagacgttgtggggaagggaactgctgggctcatccacaccatggttttcttctagttcctgattgacctctaaaattctattcagttgtatgatttgtttacatagttccacaagaccttcattgcatagaagattgttttcccaaagtggagagaatcttcatagagaaaaagagaaggctgtttctttttcggctctgacgaaacactgaagtctgcgtaagagagactgtttgatgaccgtccctcatgcaacatgcacggtactcactaaaaatgaaaactgaagtggaaactaacctgtgttgcttataaagtgtgaaagcacaagcttataaatgtataaaatcttttctgggtgtgacgcacctgcgtccaagtttgaatttttatgatatgtaccacttaattactggcactgagtatcactgaatttcttagttttctagtggggaaacattattgagaagccctcccttattttaagtaagttgattaaatcttatgtgagttgccagttgtaatttttcaaaggaaaaattttgatggggtggaggaatgaattgccagataatctttctggaattccgagagaattccaaagagggtttttttttttttttttaggacatcttttgatacctttaaaagaaccactgtcaagtaatccttaaaagaatatcttggaaaaggaaacagattttttcctgtgtgtaagcaataagtgaagttacatttgccctaaccctagggatgattctttacccagttttaaagcccatcatggtattctaaggtgttgacaccctccatcctcagagcaggtcgaaaatattaaatagactggggactctatgatgggcagcctgtgctttttgacttcagtttgctatttttctgtgatcacattagtactgattcatagattctatcttttataattctggagaaaaagatttgttagttttgtaatttttttgtaagaccaaatgtatgtattttagtagctccattgcatgagaagagtgtaactcacactgacttgtgatatcagccttctctgggccttgtgtgtggagagctttctatcttaccaagtggtagggctaaaagaacaacagcctttttggtagtcacatagcagaatgatcagagttacattgcttattccaaaacattggttctttttaaaacatttttttttacccaaagaaaagaataatagaaattactaacaataaatataaattcagagtgttgatataggattcagtatccagagtttatttttaatcttaatcctcagcttcttgggagttgctgggcttcagtgtctctgtggtttcaccagcttagcttgagctctggttattttggatcttttctgctttttttaagtaactgagtcatttttaccacacagtccagtttgcatgtatagctaggaaacatgtattgctctagattgggcagtttaagtcattttaaagaaagttagttcatagttgttgccttttaactcatagtcaagcttcagtctttcaaagagaaatgtgtgattttcatttacttgctgatattttgtagtttggagatccttgtgggcattattctaactgatacgtagacacttacttggaaatttttggacattatattaaatgagtgctatctgtgaaattggttatattaggtggcttgactaatgttttttctataattgtatatggactgcatttttaaaaaaaccgcatttgcctttatgctagattgtaaaaaattatattagaatgcataagacatgtttttccttcatatgctagacttttcctagcatttcgtatttctgtgttgtcagtgtgtgatttttaaaccggaatttggtttaaaaaaaatctggtggtaatatatgtgagaaatactttggtgtttaccttatgaaaataaaggattgtaagtaaagtttcctgcgcaccttataccagaattcagtataatacactactttctgttttcaaacagataaatcataatatagtctgtattatctgtaagatctgtcttgtaaaccacattcttgacaactatttgcttttgagtagtttgtattttaatatgtgacttttgtcttgaaaagtagtaaagccatagacttgtgcaaaacaagtttcaagtttatagatattaagtttgtaatgtgagcatcaaatgtgtatgtaaaaatactttttaccagtctggaacttgggaaaatccagggaatttgaaacatagattttaatgagctggtaaacacaaatcatgtcaataaaggtagtcaggatattttatccttagcattgcttctgcatcctgtgtaggattccaattcttgaatatgttcttttcaaaatcttaagaaaagaaccttttttctttattaacatcatgtgtttactttcagcaaatatttgtattactgcttgattctgtgacagtcacaatagatgtagagaaggcattatttttcattaataaatgtgaaattggaatggaaaaatgga

SEQ ID NO: 442616 - DNA, 3160 bp, Homo sapiens
tctcattttgtctctgggatagttgactaagataacacgcacaggtccttcagcttgggaaaccaaaaagattcttgctgtttcttttgctcctctgatccagccctgccattcagagtcaggaaaatcaagacttgtccagttaccaccagtggcagttcgcagcctccaggacttggctcgcatcgccatccggggcaccattaaaaagattattcatcaggaaactgtgagcaaaaacggaaacggactaaagaacacccccaggtttaaacgaaggagagttcgccgccgtcgaatggaaacgattgtctttttggacaaagaagtctttgccagtcggatttccaacccctcagatgacaacagctgtgaagacttggaagaggaacggagggaagaagaagagaagaccccgccggaaacaaagccagaccccccagtgaacttcctacgccagaaggtcctgagcctccctctgccagatcccctgaaatactacttgctttattacagagaaaaataagtctcctgtttgaaagggggaaataggaagagcagattgctgagtgtgaagttcgtgctgcctgtgtgctgttgaagggtcacctggaggcagacgttgtggggaagggaactgctgggctcatccacaccatggttttcttctagttcctgattgacctctaaaattctattcagttgtatgatttgtttacatagttccacaagaccttcattgcatagaagattgttttcccaaagtggagagaatcttcatagagaaaaagagaaggctgtttctttttcggctctgacgaaacactgaagtctgcgtaagagagactgtttgatgaccgtccctcatgcaacatgcacggtactcactaaaaatgaaaactgaagtggaaactaacctgtgttgcttataaagtgtgaaagcacaagcttataaatgtataaaatcttttctgggtgtgacgcacctgcgtccaagtttgaatttttatgatatgtaccacttaattactggcactgagtatcactgaatttcttagttttctagtggggaaacattattgagaagccctcccttattttaagtaagttgattaaatcttatgtgagttgccagttgtaatttttcaaaggaaaaattttgatggggtggaggaatgaattgccagataatctttctggaattccgagagaattccaaagagggtttttttttttttttttaggacatcttttgatacctttaaaagaaccactgtcaagtaatccttaaaagaatatcttggaaaaggaaacagattttttcctgtgtgtaagcaataagtgaagttacatttgccctaaccctagggatgattctttacccagttttaaagcccatcatggtattctaaggtgttgacaccctccatcctcagagcaggtcgaaaatattaaatagactggggactctatgatgggcagcctgtgctttttgacttcagtttgctatttttctgtgatcacattagtactgattcatagattctatcttttataattctggagaaaaagatttgttagttttgtaatttttttgtaagaccaaatgtatgtattttagtagctccattgcatgagaagagtgtaactcacactgacttgtgatatcagccttctctgggccttgtgtgtggagagctttctatcttaccaagtggtagggctaaaagaacaacagcctttttggtagtcacatagcagaatgatcagagttacattgcttattccaaaacattggttctttttaaaacatttttttttacccaaagaaaagaataatagaaattactaacaataaatataaattcagagtgttgatataggattcagtatccagagtttatttttaatcttaatcctcagcttcttgggagttgctgggcttcagtgtctctgtggtttcaccagcttagcttgagctctggttattttggatcttttctgctttttttaagtaactgagtcatttttaccacacagtccagtttgcatgtatagctaggaaacatgtattgctctagattgggcagtttaagtcattttaaagaaagttagttcatagttgttgccttttaactcatagtcaagcttcagtctttcaaagagaaatgtgtgattttcatttacttgctgatattttgtagtttggagatccttgtgggcattattctaactgatacgtagacacttacttggaaatttttggacattatattaaatgagtgctatctgtgaaattggttatattaggtggcttgactaatgttttttctataattgtatatggactgcatttttaaaaaaaccgcatttgcctttatgctagattgtaaaaaattatattagaatgcataagacatgtttttccttcatatgctagacttttcctagcatttcgtatttctgtgttgtcagtgtgtgatttttaaaccggaatttggtttaaaaaaaatctggtggtaatatatgtgagaaatactttggtgtttaccttatgaaaataaaggattgtaagtaaagtttcctgcgcaccttataccagaattcagtataatacactactttctgttttcaaacagataaatcataatatagtctgtattatctgtaagatctgtcttgtaaaccacattcttgacaactatttgcttttgagtagtttgtattttaatatgtgacttttgtcttgaaaagtagtaaagccatagacttgtgcaaaacaagtttcaagtttatagatattaagtttgtaatgtgagcatcaaatgtgtatgtaaaaatactttttaccagtctggaacttgggaaaatccagggaatttgaaacatagattttaatgagctggtaaacacaaatcatgtcaataaaggtagtcaggatattttatccttagcattgcttctgcatcctgtgtaggattccaattcttgaatatgttcttttcaaaatcttaagaaaagaaccttttttctttattaacatcatgtgtttactttcagcaaatatttgtattactgcttgattctgtgacagtcacaatagatgtagagaaggcattatttttcattaataaatgtgaaattggaatggaaaaatgga

SEQ ID NO: 442617 - DNA, 3846 bp, Homo sapiens
aggcgcagaggcggcggcggcggcggcggcggcggatgtttacggcggccgaggttggagcggcgctgctcggccgcggacacacgagggacgcgcccgaggagctgcaggtggcagcccaggcggtccgaacccgtcggccggccgagcctggagtattgcctaagtgtaatcttgaacatgggcggtgctgtgagtgctggtgaagacaatgatgagctgatagataatttgaaagaagcacagtatatccggactgagctggtagagcaggctttcagagctatcgatcgtgcagactattatcttgaagaatttaaagaaaatgcttataaagacttggcatggaagcatggaaacattcacctctcagccccgtgcatctactcggaggtgatggaagccctagatctgcagcctggactctcgtttctgaacctgggcagtggcactgggtatctcagctccatggtgggcctcattctaggtccttttggtgtgaaccatggggtggaacttcactcagatgtgatagagtatgcaaagcagaaactggacttcttcatcagaacaagtgatagttttgacaagtttgacttctgtgaaccttcctttgttactgggaattgcctggagatttctccggattgttctcagtatgatcgtgtatactgtggggctggcgtgcagaaagagcatgaagagtacatgaagaatcttctcaaagtgggagggatccttgtcatgccactggaagagaagttgactaagataacacgcacaggtccttcagcttgggaaaccaaaaagattcttgctgtttcttttgctcctctgatccagccctgccattcagagtcaggaaaatcaagacttgtccagttaccaccagtggcagttcgcagcctccaggacttggctcgcatcgccatccggggcaccattaaaaagattattcatcaggaaactgtgagcaaaaacggaaacggactaaagaacacccccaggtttaaacgaaggagagttcgccgccgtcgaatggaaacgattgtctttttggacaaagaagtctttgccagtcggatttccaacccctcagatgacaacagctgtgaagacttggaagaggaacggagggaagaagaagagaagaccccgccggaaacaaagccagaccccccagtgaacttcctacgccagaaggtcctgagcctccctctgccagatcccctgaaatactacttgctttattacagagaaaaataagtctcctgtttgaaagggggaaataggaagagcagattgctgagtgtgaagttcgtgctgcctgtgtgctgttgaagggtcacctggaggcagacgttgtggggaagggaactgctgggctcatccacaccatggttttcttctagttcctgattgacctctaaaattctattcagttgtatgatttgtttacatagttccacaagaccttcattgcatagaagattgttttcccaaagtggagagaatcttcatagagaaaaagagaaggctgtttctttttcggctctgacgaaacactgaagtctgcgtaagagagactgtttgatgaccgtccctcatgcaacatgcacggtactcactaaaaatgaaaactgaagtggaaactaacctgtgttgcttataaagtgtgaaagcacaagcttataaatgtataaaatcttttctgggtgtgacgcacctgcgtccaagtttgaatttttatgatatgtaccacttaattactggcactgagtatcactgaatttcttagttttctagtggggaaacattattgagaagccctcccttattttaagtaagttgattaaatcttatgtgagttgccagttgtaatttttcaaaggaaaaattttgatggggtggaggaatgaattgccagataatctttctggaattccgagagaattccaaagagggtttttttttttttttttaggacatcttttgatacctttaaaagaaccactgtcaagtaatccttaaaagaatatcttggaaaaggaaacagattttttcctgtgtgtaagcaataagtgaagttacatttgccctaaccctagggatgattctttacccagttttaaagcccatcatggtattctaaggtgttgacaccctccatcctcagagcaggtcgaaaatattaaatagactggggactctatgatgggcagcctgtgctttttgacttcagtttgctatttttctgtgatcacattagtactgattcatagattctatcttttataattctggagaaaaagatttgttagttttgtaatttttttgtaagaccaaatgtatgtattttagtagctccattgcatgagaagagtgtaactcacactgacttgtgatatcagccttctctgggccttgtgtgtggagagctttctatcttaccaagtggtagggctaaaagaacaacagcctttttggtagtcacatagcagaatgatcagagttacattgcttattccaaaacattggttctttttaaaacatttttttttacccaaaggattcagtatccagagtttatttttaatcttaatcctcagcttcttgggagttgctgggcttcagtgtctctgtggtttcaccagcttagcttgagctctggttattttggatcttttctgctttttttaagtaactgagtcatttttaccacacagtccagtttgcatgtatagctaggaaacatgtattgctctagattgggcagtttaagtcattttaaagaaagttagttcatagttgttgccttttaactcatagtcaagcttcagtctttcaaagagaaatgtgtgattttcatttacttgctgatattttgtagtttggagatccttgtgggcattattctaactgatacgtagacacttacttggaaatttttggacattatattaaatgagtgctatctgtgaaattggttatattaggtggcttgactaatgttttttctataattgtatatggactgcatttttaaaaaaaccgcatttgcctttatgctagattgtaaaaaattatattagaatgcataagacatgtttttccttcatatgctagacttttcctagcatttcgtatttctgtgttgtcagtgtgtgatttttaaaccggaatttggtttaaaaaaaatctggtggtaatatatgtgagaaatactttggtgtttaccttatgaaaataaaggattgtaagtaaagtttcctgcgcaccttataccagaattcagtataatacactactttctgttttcaaacagataaatcataatatagtctgtattatctgtaagatctgtcttgtaaaccacattcttgacaactatttgcttttgagtagtttgtattttaatatgtgacttttgtcttgaaaagtagtaaagccatagacttgtgcaaaacaagtttcaagtttatagatattaagtttgtaatgtgagcatcaaatgtgtatgtaaaaatactttttaccagtctggaacttgggaaaatccagggaatttgaaacatagattttaatgagctggtaaacacaaatcatgtcaataaaggtagtcaggatattttatccttagcattgcttctgcatcctgtgtaggattccaattcttgaatatgttcttttcaaaatcttaagaaaagaaccttttttctttattaacatcatgtgtttactttcagcaaatatttgtattactgcttgattctgtgacagtcacaatagatgtagagaaggcattatttttcattaataaatgtgaaattggaatggaaaaatgga

SEQ ID NO: 442618 - DNA, 7584 bp, Homo sapiens
gcggagtagcaggagtttgcaagctgcttcattaacttggagccagtggaatgtctgggatcgtctgtgatttggaaaccggtggcagaatgttcccgcgtttctggtcctcatcagtcagaaaatgagttccgaggtgagctgttaaatcagaggtggacacacggaggcaaggccagcagctgcaggacctcaagacacctgggcagacactgcaagatgagcttagaaaatgaagacaagcgagctcgcacccgatccaaggccctgcgaggacccccagagaccacagctgcagacctcagctgccccaccccaggatgcacaggctcagggcacgtccggggcaagtactccaggcaccgaagtttacagagctgccccctggccaagaagaggaagctggagggcgctgaggctgagcacctggtgtccaagaggaagtcacaccccctgaagctggctctggacgagggctatggtgtggacagcgacggcagtgaggacactgaggtgaaggacgcctctgtttcggatgaatcggaaggaactctggagggggccgaggctgagacgtcaggacaggacgagattcatcgccccgagacagctgaaggaaggagccccgtcaagtcccattttggatccaaccccatcggcagcgccactgcctcctccaagggcagctacagcagctaccagggaatcatcgcaacttctctcctgaacttgggtcaaattgctgaagagaccctggtggaagaggacttgggccaggcggccaagccaggtcctggcattgtgcacctgcttcaggaggctgcagagggagctgccagcgaggagggtgaaaagggcctcttcatccagccagaggatgccgaggaggtcgtcgaagtcaccaccgagcgctcccaggacctgtgtccccagtccctggaggatgcagccagtgaggagtccagcaagcagaaaggcatcctgagtcacgaagaggaggacgaggaggaggaggaggaggaagaggaggaggaggaggatgaagaagaggaagaggaagaggaggaggaagaggaagaggaggaggaggaagaggaagaggaggaggaagaggaagaggaagaggaggaggaggaggcagctcctgatgtgatctttcaggaagacacctctcacacctctgcccagaaggcccctgagctccggggcccagaatcacccagtcccaagcctgagtactctgttattgtggaggtccgctcggatgatgacaaggacgaggacacccactcccggaagtcaacagtcactgacgagtcggagatgcaggacatgatgacccggggaaacctgggcctcctggagcaggccatcgccctgaaggctgaacaggtgcgcacagtctgcgagccgggctgcccgcctgccgagcagagccagctgggcctgggagagccagggaaggcagcaaagcccctggacactgtgcggaagagttactacagtaaagatccttcaagagctgagaagcgtgagatcaagtgtccaacaccaggctgtgatggcactggccacgttaccgggttgtaccctcaccaccgcagcctttctggctgtccccacaaggataggatccccccagagatcttagccatgcatgagaacgtgctgaagtgccccactcctggctgcacaggccagggtcacgtgaacagcaaccgcaacacgcacagaagtttgtctgggtgtcccattgctgccgccgaaaaattagccaaatcccatgagaagcagcagccgcagacaggagatccttccaagagtagctccaattccgatcggatcctcaggcccatgtgcttcgtgaagcagctcgaggtccctccatatgggagctaccggcccaacgtggcccccgccacacccagggccaacttggccaaggagctggagaagttctccaaggtcacctttgactacgcaagtttcgatgctcaggtttttggcaaacgcatgcttgccccaaagattcagaccagcgaaacctcacctaaagcctttcaatgctttgactactcgcaggacgccgaggctgcacacatggctgccactgccatcctgaacctctccacgcgctgctgggagatgcctgagaacctcagcacgaagccacaggacctccccagcaagtctgtggatatcgaggtagacgaaaatggaaccctggacttgagcatgcacaaacaccgcaaacgagaaaatgctttccccagcagcagcagctgcagcagcagccccggtgtgaagtctcccgacgcctcccagcgccacagcagcaccagcgcccccagcagctccatgacctctccccagtccagccaggcctcccgccaggacgagtgggaccggcccctggactacaccaagcctagccgcctgagagaggaggaacctgaggagtcagagccagcagcccattcttttgcttcttctgaagcagatgaccaggaagtgtcggaagagaattttgaggagcggaagtatccgggggaagtcaccctgaccaactttaagctgaagtttctctccaaggacataaagaaggagctgctcacctgtcccacccctggctgtgacggcagcggccacatcaccgggaactacgcctcccaccgcagcctctctggttgccctcttgctgacaagagcctcagaaacctcatggctgcccactctgctgacctcaagtgccccacgcccggctgtgacggctctggccacatcacagggaactacgcttcacaccggagcttgtccggctgccctcgtgcaaagaaaagtggagtcaaggtggcacccaccaaggacgacaaggaggaccccgagctgatgaagtgcccagttccaggctgtgtggggctcggtcacatcagcgggaaatacgcctctcacaggagcgcatccggctgcccactggccgcccgcaggcagaaggaagggtccctcaatggctcgtcattctcctggaagtccctgaagaatgaaggaccgacctgccccaccccgggctgtgacggctctggccacgccaatgggagtttcctcacccaccggagtttgtcaggctgtcccagagcaacctttgctggaaagaagggaaaactgtcaggggatgaggtcctcagtccaaagttcaagactagcgacgtgttggagaatgatgaggagatcaagcagctgaaccaggagatccgagacctgaacgagtccaactcggagatggaggctgccatggtgcagctgcagtcccagatctcctccatggagaagaacctgaagaacatcgaggaggagaacaagctcattgaggagcagaatgaagccctgtttctggagctgtccggcctgagccaggccctcatccaaagtctcgccaatatccgccttccgcacatggagccaatatgcgaacagaatttcgatgcctatgtgagcaccctcaccgacatgtactccaaccaggacccggagaacaaggacctcctggagagcatcaagcaggctgtgaggggcatccaggtctaggccgtgtggtacccagaagtgtcccagcccaccacaccgtttacctccctcgccctgccccgcaccgtggggatgcccaactcacagtgacttcccgtttggggcccggtgtggccgcgggcgggtttatccaaagggatggctggaaattggccgctcccacgaggctccctccaggcttggggccgtggtggccctatctgtgtgcataggggcactgaagaattacaaagtgatttatttttgttttctgaaagaaatctgaagagcagctcaaagtctccagtggaagctcatggacaaggttctcagtattgcctaagtgtaatcttgaacatgggcggtgctgtgagtgctggtgaagacaatgatgagctgatagataatttgaaagaagcacagtatatccggactgagctggtagagcaggctttcagagctatcgatcgtgcagactattatcttgaagaatttaaagaaaatgcttataaagacttggcatggaagcatggaaacattcacctctcagccccgtgcatctactcggaggtgatggaagccctagatctgcagcctggactctcgtttctgaacctgggcagtggcactgggtatctcagctccatggtgggcctcattctaggtccttttggtgtgaaccatggggtggaacttcactcagatgtgatagagtatgcaaagcagaaactggacttcttcatcagaacaagtgatagttttgacaagtttgacttctgtgaaccttcctttgttactgggaattgcctggagatttctccggattgttctcagtatgatcgtgtatactgtggggctggcgtgcagaaagagcatgaagagtacatgaagaatcttctcaaagtgggagggatccttgtcatgccactggaagagaagttgactaagataacacgcacaggtccttcagcttgggaaaccaaaaagattcttgctgtttcttttgctcctctgatccagccctgccattcagagtcaggaaaatcaagacttgtccagttaccaccagtggcagttcgcagcctccaggacttggctcgcatcgccatccggggcaccattaaaaagattattcatcaggaaactgtgagcaaaaacggaaacggactaaagaacacccccaggtttaaacgaaggagagttcgccgccgtcgaatggaaacgattgtctttttggacaaagaagtctttgccagtcggatttccaacccctcagatgacaacagctgtgaagacttggaagaggaacggagggaagaagaagagaagaccccgccggaaacaaagccagaccccccagtgaacttcctacgccagaaggtcctgagcctccctctgccagatcccctgaaatactacttgctttattacagagaaaaataagtctcctgtttgaaagggggaaataggaagagcagattgctgagtgtgaagttcgtgctgcctgtgtgctgttgaagggtcacctggaggcagacgttgtggggaagggaactgctgggctcatccacaccatggttttcttctagttcctgattgacctctaaaattctattcagttgtatgatttgtttacatagttccacaagaccttcattgcatagaagattgttttcccaaagtggagagaatcttcatagagaaaaagagaaggctgtttctttttcggctctgacgaaacactgaagtctgcgtaagagagactgtttgatgaccgtccctcatgcaacatgcacggtactcactaaaaatgaaaactgaagtggaaactaacctgtgttgcttataaagtgtgaaagcacaagcttataaatgtataaaatcttttctgggtgtgacgcacctgcgtccaagtttgaatttttatgatatgtaccacttaattactggcactgagtatcactgaatttcttagttttctagtggggaaacattattgagaagccctcccttattttaagtaagttgattaaatcttatgtgagttgccagttgtaatttttcaaaggaaaaattttgatggggtggaggaatgaattgccagataatctttctggaattccgagagaattccaaagagggtttttttttttttttttaggacatcttttgatacctttaaaagaaccactgtcaagtaatccttaaaagaatatcttggaaaaggaaacagattttttcctgtgtgtaagcaataagtgaagttacatttgccctaaccctagggatgattctttacccagttttaaagcccatcatggtattctaaggtgttgacaccctccatcctcagagcaggtcgaaaatattaaatagactggggactctatgatgggcagcctgtgctttttgacttcagtttgctatttttctgtgatcacattagtactgattcatagattctatcttttataattctggagaaaaagatttgttagttttgtaatttttttgtaagaccaaatgtatgtattttagtagctccattgcatgagaagagtgtaactcacactgacttgtgatatcagccttctctgggccttgtgtgtggagagctttctatcttaccaagtggtagggctaaaagaacaacagcctttttggtagtcacatagcagaatgatcagagttacattgcttattccaaaacattggttctttttaaaacatttttttttacccaaagaaaagaataatagaaattactaacaataaatataaattcagagtgttgatataggattcagtatccagagtttatttttaatcttaatcctcagcttcttgggagttgctgggcttcagtgtctctgtggtttcaccagcttagcttgagctctggttattttggatcttttctgctttttttaagtaactgagtcatttttaccacacagtccagtttgcatgtatagctaggaaacatgtattgctctagattgggcagtttaagtcattttaaagaaagttagttcatagttgttgccttttaactcatagtcaagcttcagtctttcaaagagaaatgtgtgattttcatttacttgctgatattttgtagtttggagatccttgtgggcattattctaactgatacgtagacacttacttggaaatttttggacattatattaaatgagtgctatctgtgaaattggttatattaggtggcttgactaatgttttttctataattgtatatggactgcatttttaaaaaaaccgcatttgcctttatgctagattgtaaaaaattatattagaatgcataagacatgtttttccttcatatgctagacttttcctagcatttcgtatttctgtgttgtcagtgtgtgatttttaaaccggaatttggtttaaaaaaaatctggtggtaatatatgtgagaaatactttggtgtttaccttatgtacactactttctgttttcaaacagataaatcataatatagtctgtattatctgtaagatctgtcttgtaaaccacattcttgacaactatttgcttttgagtagtttgtattttaatatgtgacttttgtcttgaaaagtagtaaagccatagacttgtgcaaaacaagtttcaagtttatagatattaagtttgtaatgtgagcatcaaatgtgtatgtaaaaatactttttaccagtctggaacttgggaaaatccagggaatttgaaacatagattttaatgagctggtaaacacaaatcatgtcaataaaggtagtcaggatattttatccttagcattgcttctgcatcctgtgtaggattccaattcttgaatatgttcttttcaaaatcttaagaaaagaaccttttttctttattaacatcatgtgtttactttcagcaaatatttgtattactgcttgattctgtgacagtcacaatagatgtagagaaggcattatttttcattaataaatgtgaaattggaatggaaaaatgga

SEQ ID NO: 442619 - DNA, 2210 bp, Homo sapiens
aggcgcagaggcggcggcggcggcggcggcggcggatgtttacggcggccgaggttggagcggcgctgctcggccgcggacacacgagggacgcgcccgaggagctgcaggtggcagcccaggcggtccgaacccgtcggccggccgagcctggagtattgcctaagtgtaatcttgaacatgggcggtgctgtgagtgctggtgaagacaatgatgagctgatagataatttgaaagaagcacagtatatccggactgagctggtagagcaggctttcagagctatcgatcgtgcagactattatcttgaagaatttaaagaaaatgcttataaagacttggcatggaagcatggaaacattcacctctcagccccgtgcatctactcggaggtgatggaagccctagatctgcagcctggactctcgtttctgaacctgggcagtggcactgggtatctcagctccatggtgggcctcattctaggtccttttggtgtgaaccatggggtggaacttcactcagatgtgatagagtatgcaaagcagaaactggacttcttcatcagaacaagtgatagttttgacaagtttgacttctgtgaaccttcctttgttactgggaattgcctggagatttctccggattgttctcagtatgatcgtgtatactgtggggctggcgtgcagaaagagcatgaagagtacatgaagaatcttctcaaagtgggagggatccttgtcatgccactggaagagaagttgactaagataacacgcacaggtccttcagcttgggaaaccaaaaagattcttgctgtttcttttgctcctctgatccagccctgccattcagagtcaggaaaatcaagacttgtccagttaccaccagtggcagttcgcagcctccaggacttggctcgcatcgccatccggggcaccattaaaaagattattcatcaggaaactgtgagcaaaaacggaaacggactaaagaacacccccaggtttaaacgaaggagagttcgccgccgtcgaatggaaacgattgtctttttggacaaagaagtctttgccagtcggatttccaacccctcagatgacaacagctgtgaagacttggaagaggaacggagggaagaagaagagaagaccccgccggaaacaaagccagaccccccagtgaacttcctacgccagaaggtcctgagcctccctctgccagatcccctgaaatactacttgctttattacagagaaaaataagtctcctgtttgaaagggggaaataggaagagcagattgctgagtgtgaagttcgtgctgcctgtgtgctgttgaagggtcacctggaggcagacgttgtggggaagggaactgctgggctcatccacaccatggttttcttctagttcctgattgacctctaaaattctattcagttgtatgatttgtttacatagttccacaagaccttcattgcatagaagattgttttcccaaagtggagagaatcttcatagagaaaaagagaaggctgtttctttttcggctctgacgaaacactgaagtctgcgtaagagagactgtttgatgaccgtccctcatgcaacatgcacggtactcactaaaaatgaaaactgaagtggaaactaacctgtgttgcttataaagtgtgaaagcacaagcttataaatgtataaaatcttttctgggtgtgacgcacctgcgtccaagtttgaatttttatgatatgtaccacttaattactggcactgagtatcactgaatttcttagttttctagtggggaaacattattgagaagccctcccttattttaagtaagttgattaaatcttatgtgagttgccagttgtaatttttcaaaggaaaaattttgatggggtggaggaatgaattgccagataatctttctggaattccgagagaattccaaagagggtttttttttttttttttaggacatcttttgatacctttaaaagaaccactgtcaagtaatccttaaaagaatatcttggaaaaggaaacagattttttcctgtgtgtaagcaataagtgaagttacatttgccctaaccctagggatgattctttacccaagttgccatcaggtatctacgggtggaactctctagacggtgcacttcatgacgggactcgatggaccgggttagaccgaggctg

SEQ ID NO: 442620 - DNA, 958 bp, Homo sapiens
aggcgcagaggcggcggcggcggcggcggcggcggatgtttacggcggccgaggttggagcggcgctgctcggccgcggacacacgagggacgcgcccgaggagctgcaggtggcagcccaggcggtccgaacccgtcggccggccgagcctggagtattgcctaagtgtaatcttgaacatgggcggtgctgtgagtgctggtgaagacaatgatgagctgatagataatttgaaagaagcacagtatatccggactgagctggtagagcaggctttcagagctatcgatcgtgcagactattatcttgaagaatttaaagaaaatgcttataaagacttggcatggaagcatggaaacattcacctctcagccccgtgcatctactcggaggtgatggaagccctagatctgcagcctggactctcgtttctgaacctgggcagtggcactgggtatctcagctccatggtgggcctcattctaggtccttttggtgtgaaccatggggtggaacttcactcagatgtgatagagtatgcaaagcagaaactggacttcttcatcagaacaagtgatagttttgacaagtttgacttctgtgaaccttcctttgttactgggaattgcctggagatttctccggattgttctcagtatgatcgtgtatactgtggggctggcgtgcagaaagagcatgaagagtacatgaagaatcttctcaaagtgggagggatccttgtcatgccactggaagagaagttgactaagataacacgcacaggtccttcagcttgggaaaccaaaaagattcttgctgtttcttttgctcctctgatccagccctgccattcagagtcaggaaaatcaagacttgtccagttacggtctccctcttttgtccaaggctggagtgtggtagtgctatcacagctgactgcagcctcaaccttccagg

SEQ ID NO: 442621 - DNA, 2994 bp, Homo sapiens
gcggagtagcaggagtttgcaagctgcttcattaacttggagccagtggaatgtctgggatcgtctgtgatttggaaaccggtggcagaatgttcccgcgtttctggtcctcatcagtcagaaaatgagttccgaggtgagctgttaaatcagaggtggacacacggaggcaaggccagcagctgcaggacctcaagacacctgggcagacactgcaagatgagcttagaaaatgaagacaagcgagctcgcacccgatccaaggccctgcgaggacccccagagaccacagctgcagacctcagctgccccaccccaggatgcacaggctcagggcacgtccggggcaagtactccaggcaccgaagtttacagagctgccccctggccaagaagaggaagctggagggcgctgaggctgagcacctggtgtccaagaggaagtcacaccccctgaagctggctctggacgagggctatggtgtggacagcgacggcagtgaggacactgaggtgaaggacgcctctgtttcggatgaatcggaaggaactctggagggggccgaggctgagacgtcaggacaggacgagattcatcgccccgagacagctgaaggaaggagccccgtcaagtcccattttggatccaaccccatcggcagcgccactgcctcctccaagggcagctacagcagctaccagggaatcatcgcaacttctctcctgaacttgggtcaaattgctgaagagaccctggtggaagaggacttgggccaggcggccaagccaggtcctggcattgtgcacctgcttcaggaggctgcagagggagctgccagcgaggagggtgaaaagggcctcttcatccagccagaggatgccgaggaggtcgtcgaagtcaccaccgagcgctcccaggacctgtgtccccagtccctggaggatgcagccagtgaggagtccagcaagcagaaaggcatcctgagtcacgaagaggaggacgaggaggaggaggaggaggaagaggaggaggaggaggatgaagaagaggaagaggaagaggaggaggaagaggaagaggaggaggaggaagaggaagaggaggaggaagaggaagaggaagaggaggaggaggaggcagctcctgatgtgatctttcaggaagacacctctcacacctctgcccagaaggcccctgagctccggggcccagaatcacccagtcccaagcctgagtactctgttattgtggaggtccgctcggatgatgacaaggacgaggacacccactcccggaagtcaacagtcactgacgagtcggagatgcaggacatgatgacccggggaaacctgggcctcctggagcaggccatcgccctgaaggctgaacagatccttcaagagctgagaagcgtgagatcaagtgtccaacaccaggctgtgatggcactggccacgttaccgggttgtaccctcaccaccgcagcctttctggctgtccccacaaggataggatccccccagagatcttagccatgcatgagaacgtgctgaagtgccccactcctggctgcacaggccagggtcacgtgaacagcaaccgcaacacgcacagaagtttgtctgggtgtcccattgctgccgccgaaaaattagccaaatcccatgagaagcagcagccgcagacaggagatccttccaagagtagctccaattccgatcggatcctcaggcccatgtgcttcgtgaagcagctcgaggtccctccatatgggagctaccggcccaacgtggcccccgccacacccagggccaacttggccaaggagctggagaagttctccaaggtcacctttgactacgcaagtttcgatgctcaggtttttggcaaacgcatgcttgccccaaagattcagaccagcgaaacctcacctaaagcctttcaatccaaacctttcccaaaggcctcttcccccaggcacagcccctccagtagttatgtgaggagcacttcatcctcttctgcaggctttgactactcgcaggacgccgaggctgcacacatggctgccactgccatcctgaacctctccacgcgctgctgggagatgcctgagaacctcagcacgaagccacaggacctccccagcaagtctgtggatatcgaggtagacgaaaatggaaccctggacttgagcatgcacaaacaccgcaaacgagaaaatgctttccccagcagcagcagctgcagcagcagccccggtgtgaagtctcccgacgcctcccagcgccacagcagcaccagcgcccccagcagctccatgacctctccccagtccagccaggcctcccgccaggacgagtgggaccggcccctggactacaccaagcctagccgcctgagagaggaggaacctgaggagtcagagccagcagcccattcttttgcttcttctgaagcagatgaccaggaagtgtcggaagagaattttgaggagcggaagtatccgggggaagtcaccctgaccaactttaagctgaagtttctctccaaggacataaagaaggagctgctcacctgtcccacccctggctgtgacggcagcggccacatcaccgggaactacgcctcccaccgcagcctctctggttgccctcttgctgacaagagcctcagaaacctcatggctgcccactctgctgacctcaagtgccccacgcccggctgtgacggctctggccacatcacagggaactacgcttcacaccggagcttgtccggctgccctcgtgcaaagaaaagtggagtcaaggtggcacccaccaaggacgacaaggaggaccccgagctgatgaagtacgttgggccatgctggctctttcattgcattgcggaattgagattttcgtgtgttttataatgtaaaaaaactcctactagattcccttttcattaatacaacgggtcacctaactgaccaacgccaactttcg

SEQ ID NO: 442622 - DNA, 567 bp, Homo sapiens
ctcagagcgtctcgtgtccaagctcctggaaacctggtggcagctagtggaatgcctgccgtggggagcggtctgggagactctggcgctagaagtcttgctcttatgtatacacagtctttaattgaacactcgtaaaactgtaatgagccatttatttatttgaatggggcgagttattaattttcagcaaactgcaggcagccattctgaggtgaatcgtctggagacattctgctccccagggtgaaggtctgcgacaggctctgagatctgagcccatcgcctgatgtggccttgcctttttatttcccctcagctgccccaccccaggatgcacaggctcagggcacgtccggggcaagtactccaggcaccgaaggtaagaggacccttggatctcacggagattcctgggcggtagatttggagcccctgcccactctgcagatggagaactttccatctttttccatggctcccaaggccaggctgctgacccttctgcgaggcagcgacctcccactctagcgtggagatctgtgtggccatgggcgtgccatgtgg

SEQ ID NO: 442623 - DNA, 576 bp, Homo sapiens
tagagacggggtttcaccatgttggccaggctgttcttgaactcctgacctcaggtgatccaactgcctcggcctcccaaagtgctgggattacagtcatgacccaccgcacccggcctaaatttgaatttcaaataaacgtcaaataacttttagtattgttgtttaccttaatttccaattgaactgggattttttttccttctaaatctggcatctctgggtggggcaggggatgaggtgggtgttgacaaaagataatctattattttcagaattcagaatttcaaattggtatctgtttagaacttctattgttctgctcttacctttaacataaatcgctctttttaaacatttttaattatagtattgcctaagtgtaatcttgaacatgggcggtgctgtgagtgctggtgaagacaatgatgagctgatagataatttgaaagaagcacagtatatccggactgagctggtagagcaggctttcagagctatcgatcgtgcagactattatcttgaagaatttaaagaaaatgcttataaagacttggcatggaagcatggaaacat

SEQ ID NO: 442624 - DNA, 644 bp, Homo sapiens
acaaacaggtgaggcctgtgtcagttccatttgcaaatacatgtttcttctttagttcattagtaagacctgaacacttggtttgtctccattttcaaatgattctttaaaagtttgtgagcagagaagcccaggcctcaagtatttacgatgtggtgagccgtgatactgtgatgagacttcaaaactttgtgaatgtctgtagttacacatgttaagtcagacgtgttacagttggtagaagtgaacagatgagcaagagttcttactctggttctacatgttttcttattcttaaaccttttaggtccttttggtgtgaaccatggggtggaacttcactcagatgtgatagagtatgcaaagcagaaactggacttcttcatcagaacaagtgatagttttgacaagtaagatgaaatactatccattggctcagatgatgtgaactgtaattttacaaagttttgatcagatagaaagaaatcatgtggtaggaaacataattaaactgtggtgggatgattctatgtgcctgttctaattttcagaaaagattctgtgttttgagggttttagggtatttcaaactgttacacatacataaggtgttcatttgctcaatattcatgtttcctgttgaa

SEQ ID NO: 442625 - DNA, 7641 bp, Homo sapiens
gcggagtagcaggagtttgcaagctgcttcattaacttggagccagtggaatgtctgggatcgtctgtgatttggaaaccggtggcagaatgttcccgcgtttctggtcctcatcagtcagaaaatgagttccgaggtgagctgttaaatcagaggtggacacacggaggcaaggccagcagctgcaggacctcaagacacctgggcagacactgcaagatgagcttagaaaatgaagacaagcgagctcgcacccgatccaaggccctgcgaggacccccagagaccacagctgcagacctcagctgccccaccccaggatgcacaggctcagggcacgtccggggcaagtactccaggcaccgaagtttacagagctgccccctggccaagaagaggaagctggagggcgctgaggctgagcacctggtgtccaagaggaagtcacaccccctgaagctggctctggacgagggctatggtgtggacagcgacggcagtgaggacactgaggtgaaggacgcctctgtttcggatgaatcggaaggaactctggagggggccgaggctgagacgtcaggacaggacgagattcatcgccccgagacagctgaaggaaggagccccgtcaagtcccattttggatccaaccccatcggcagcgccactgcctcctccaagggcagctacagcagctaccagggaatcatcgcaacttctctcctgaacttgggtcaaattgctgaagagaccctggtggaagaggacttgggccaggcggccaagccaggtcctggcattgtgcacctgcttcaggaggctgcagagggagctgccagcgaggagggtgaaaagggcctcttcatccagccagaggatgccgaggaggtcgtcgaagtcaccaccgagcgctcccaggacctgtgtccccagtccctggaggatgcagccagtgaggagtccagcaagcagaaaggcatcctgagtcacgaagaggaggacgaggaggaggaggaggaggaagaggaggaggaggaggatgaagaagaggaagaggaagaggaggaggaagaggaagaggaggaggaggaagaggaagaggaggaggaagaggaagaggaagaggaggaggaggaggcagctcctgatgtgatctttcaggaagacacctctcacacctctgcccagaaggcccctgagctccggggcccagaatcacccagtcccaagcctgagtactctgttattgtggaggtccgctcggatgatgacaaggacgaggacacccactcccggaagtcaacagtcactgacgagtcggagatgcaggacatgatgacccggggaaacctgggcctcctggagcaggccatcgccctgaaggctgaacaggtgcgcacagtctgcgagccgggctgcccgcctgccgagcagagccagctgggcctgggagagccagggaaggcagcaaagcccctggacactgtgcggaagagttactacagtaaagatccttcaagagctgagaagcgtgagatcaagtgtccaacaccaggctgtgatggcactggccacgttaccgggttgtaccctcaccaccgcagcctttctggctgtccccacaaggataggatccccccagagatcttagccatgcatgagaacgtgctgaagtgccccactcctggctgcacaggccagggtcacgtgaacagcaaccgcaacacgcacagaagtttgtctgggtgtcccattgctgccgccgaaaaattagccaaatcccatgagaagcagcagccgcagacaggagatccttccaagagtagctccaattccgatcggatcctcaggcccatgtgcttcgtgaagcagctcgaggtccctccatatgggagctaccggcccaacgtggcccccgccacacccagggccaacttggccaaggagctggagaagttctccaaggtcacctttgactacgcaagtttcgatgctcaggtttttggcaaacgcatgcttgccccaaagattcagaccagcgaaacctcacctaaagcctttcaatgctttgactactcgcaggacgccgaggctgcacacatggctgccactgccatcctgaacctctccacgcgctgctgggagatgcctgagaacctcagcacgaagccacaggacctccccagcaagtctgtggatatcgaggtagacgaaaatggaaccctggacttgagcatgcacaaacaccgcaaacgagaaaatgctttccccagcagcagcagctgcagcagcagccccggtgtgaagtctcccgacgcctcccagcgccacagcagcaccagcgcccccagcagctccatgacctctccccagtccagccaggcctcccgccaggacgagtgggaccggcccctggactacaccaagcctagccgcctgagagaggaggaacctgaggagtcagagccagcagcccattcttttgcttcttctgaagcagatgaccaggaagtgtcggaagagaattttgaggagcggaagtatccgggggaagtcaccctgaccaactttaagctgaagtttctctccaaggacataaagaaggagctgctcacctgtcccacccctggctgtgacggcagcggccacatcaccgggaactacgcctcccaccgcagcctctctggttgccctcttgctgacaagagcctcagaaacctcatggctgcccactctgctgacctcaagtgccccacgcccggctgtgacggctctggccacatcacagggaactacgcttcacaccggagcttgtccggctgccctcgtgcaaagaaaagtggagtcaaggtggcacccaccaaggacgacaaggaggaccccgagctgatgaagtgcccagttccaggctgtgtggggctcggtcacatcagcgggaaatacgcctctcacaggagcgcatccggctgcccactggccgcccgcaggcagaaggaagggtccctcaatggctcgtcattctcctggaagtccctgaagaatgaaggaccgacctgccccaccccgggctgtgacggctctggccacgccaatgggagtttcctcacccaccggagtttgtcaggctgtcccagagcaacctttgctggaaagaagggaaaactgtcaggggatgaggtcctcagtccaaagttcaagactagcgacgtgttggagaatgatgaggagatcaagcagctgaaccaggagatccgagacctgaacgagtccaactcggagatggaggctgccatggtgcagctgcagtcccagatctcctccatggagaagaacctgaagaacatcgaggaggagaacaagctcattgaggagcagaatgaagccctgtttctggagctgtccggcctgagccaggccctcatccaaagtctcgccaatatccgccttccgcacatggagccaatatgcgaacagaatttcgatgcctatgtgagcaccctcaccgacatgtactccaaccaggacccggagaacaaggacctcctggagagcatcaagcaggctgtgaggggcatccaggtctaggccgtgtggtacccagaagtgtcccagcccaccacaccgtttacctccctcgccctgccccgcaccgtggggatgcccaactcacagtgacttcccgtttggggcccggtgtggccgcgggcgggtttatccaaagggatggctggaaattggccgctcccacgaggctccctccaggcttggggccgtggtggccctatctgtgtgcataggggcactgaagaattacaaagtgatttatttttgttttctgaaagaaatctgaagagcagctcaaagtctccagtggaagctcatggacaaggttctcagtattgcctaagtgtaatcttgaacatgggcggtgctgtgagtgctggtgaagacaatgatgagctgatagataatttgaaagaagcacagtatatccggactgagctggtagagcaggctttcagagctatcgatcgtgcagactattatcttgaagaatttaaagaaaatgcttataaagacttggcatggaagcatggaaacattcacctctcagccccgtgcatctactcggaggtgatggaagccctagatctgcagcctggactctcgtttctgaacctgggcagtggcactgggtatctcagctccatggtgggcctcattctaggtccttttggtgtgaaccatggggtggaacttcactcagatgtgatagagtatgcaaagcagaaactggacttcttcatcagaacaagtgatagttttgacaagtttgacttctgtgaaccttcctttgttactgggaattgcctggagatttctccggattgttctcagtatgatcgtgtatactgtggggctggcgtgcagaaagagcatgaagagtacatgaagaatcttctcaaagtgggagggatccttgtcatgccactggaagagaagttgactaagataacacgcacaggtccttcagcttgggaaaccaaaaagattcttgctgtttcttttgctcctctgatccagccctgccattcagagtcaggaaaatcaagacttgtccagttaccaccagtggcagttcgcagcctccaggacttggctcgcatcgccatccggggcaccattaaaaagattattcatcaggaaactgtgagcaaaaacggaaacggactaaagaacacccccaggtttaaacgaaggagagttcgccgccgtcgaatggaaacgattgtctttttggacaaagaagtctttgccagtcggatttccaacccctcagatgacaacagctgtgaagacttggaagaggaacggagggaagaagaagagaagaccccgccggaaacaaagccagaccccccagtgaacttcctacgccagaaggtcctgagcctccctctgccagatcccctgaaatactacttgctttattacagagaaaaataagtctcctgtttgaaagggggaaataggaagagcagattgctgagtgtgaagttcgtgctgcctgtgtgctgttgaagggtcacctggaggcagacgttgtggggaagggaactgctgggctcatccacaccatggttttcttctagttcctgattgacctctaaaattctattcagttgtatgatttgtttacatagttccacaagaccttcattgcatagaagattgttttcccaaagtggagagaatcttcatagagaaaaagagaaggctgtttctttttcggctctgacgaaacactgaagtctgcgtaagagagactgtttgatgaccgtccctcatgcaacatgcacggtactcactaaaaatgaaaactgaagtggaaactaacctgtgttgcttataaagtgtgaaagcacaagcttataaatgtataaaatcttttctgggtgtgacgcacctgcgtccaagtttgaatttttatgatatgtaccacttaattactggcactgagtatcactgaatttcttagttttctagtggggaaacattattgagaagccctcccttattttaagtaagttgattaaatcttatgtgagttgccagttgtaatttttcaaaggaaaaattttgatggggtggaggaatgaattgccagataatctttctggaattccgagagaattccaaagagggtttttttttttttttttaggacatcttttgatacctttaaaagaaccactgtcaagtaatccttaaaagaatatcttggaaaaggaaacagattttttcctgtgtgtaagcaataagtgaagttacatttgccctaaccctagggatgattctttacccagttttaaagcccatcatggtattctaaggtgttgacaccctccatcctcagagcaggtcgaaaatattaaatagactggggactctatgatgggcagcctgtgctttttgacttcagtttgctatttttctgtgatcacattagtactgattcatagattctatcttttataattctggagaaaaagatttgttagttttgtaatttttttgtaagaccaaatgtatgtattttagtagctccattgcatgagaagagtgtaactcacactgacttgtgatatcagccttctctgggccttgtgtgtggagagctttctatcttaccaagtggtagggctaaaagaacaacagcctttttggtagtcacatagcagaatgatcagagttacattgcttattccaaaacattggttctttttaaaacatttttttttacccaaagaaaagaataatagaaattactaacaataaatataaattcagagtgttgatataggattcagtatccagagtttatttttaatcttaatcctcagcttcttgggagttgctgggcttcagtgtctctgtggtttcaccagcttagcttgagctctggttattttggatcttttctgctttttttaagtaactgagtcatttttaccacacagtccagtttgcatgtatagctaggaaacatgtattgctctagattgggcagtttaagtcattttaaagaaagttagttcatagttgttgccttttaactcatagtcaagcttcagtctttcaaagagaaatgtgtgattttcatttacttgctgatattttgtagtttggagatccttgtgggcattattctaactgatacgtagacacttacttggaaatttttggacattatattaaatgagtgctatctgtgaaattggttatattaggtggcttgactaatgttttttctataattgtatatggactgcatttttaaaaaaaccgcatttgcctttatgctagattgtaaaaaattatattagaatgcataagacatgtttttccttcatatgctagacttttcctagcatttcgtatttctgtgttgtcagtgtgtgatttttaaaccggaatttggtttaaaaaaaatctggtggtaatatatgtgagaaatactttggtgtttaccttatgaaaataaaggattgtaagtaaagtttcctgcgcaccttataccagaattcagtataatacactactttctgttttcaaacagataaatcataatatagtctgtattatctgtaagatctgtcttgtaaaccacattcttgacaactatttgcttttgagtagtttgtattttaatatgtgacttttgtcttgaaaagtagtaaagccatagacttgtgcaaaacaagtttcaagtttatagatattaagtttgtaatgtgagcatcaaatgtgtatgtaaaaatactttttaccagtctggaacttgggaaaatccagggaatttgaaacatagattttaatgagctggtaaacacaaatcatgtcaataaaggtagtcaggatattttatccttagcattgcttctgcatcctgtgtaggattccaattcttgaatatgttcttttcaaaatcttaagaaaagaaccttttttctttattaacatcatgtgtttactttcagcaaatatttgtattactgcttgattctgtgacagtcacaatagatgtagagaaggcattatttttcattaataaatgtgaaattggaatggaaaaatgga

SEQ ID NO: 442626 - DNA, 7604 bp, Homo sapiens
gcggagtagcaggagtttgcaagctgcttcattaacttggagccagtggaatgtctgggatcgtctgtgatttggaaaccggtggcagaatgttcccgcgtttctggtcctcatcagtcagaaaatgagttccgaggtgagctgttaaatcagaggtggacacacggaggcaaggccagcagctgcaggacctcaagacacctgggcagacactgcaagatgagcttagaaaatgaagacaagcgagctcgcacccgatccaaggccctgcgaggacccccagagaccacagctgcagacctcagctgccccaccccaggatgcacaggctcagggcacgtccggggcaagtactccaggcaccgaagtttacagagctgccccctggccaagaagaggaagctggagggcgctgaggctgagcacctggtgtccaagaggaagtcacaccccctgaagctggctctggacgagggctatggtgtggacagcgacggcagtgaggacactgaggtgaaggacgcctctgtttcggatgaatcggaaggaactctggagggggccgaggctgagacgtcaggacaggacgagattcatcgccccgagacagctgaaggaaggagccccgtcaagtcccattttggatccaaccccatcggcagcgccactgcctcctccaagggcagctacagcagctaccagggaatcatcgcaacttctctcctgaacttgggtcaaattgctgaagagaccctggtggaagaggacttgggccaggcggccaagccaggtcctggcattgtgcacctgcttcaggaggctgcagagggagctgccagcgaggagggtgaaaagggcctcttcatccagccagaggatgccgaggaggtcgtcgaagtcaccaccgagcgctcccaggacctgtgtccccagtccctggaggatgcagccagtgaggagtccagcaagcagaaaggcatcctgagtcacgaagaggaggacgaggaggaggaggaggaggaagaggaggaggaggaggatgaagaagaggaagaggaagaggaggaggaagaggaagaggaggaggaggaagaggaagaggaggaggaagaggaagaggaagaggaggaggaggaggcagctcctgatgtgatctttcaggaagacacctctcacacctctgcccagaaggcccctgagctccggggcccagaatcacccagtcccaagcctgagtactctgttattgtggaggtccgctcggatgatgacaaggacgaggacacccactcccggaagtcaacagtcactgacgagtcggagatgcaggacatgatgacccggggaaacctgggcctcctggagcaggccatcgccctgaaggctgaacagatccttcaagagctgagaagcgtgagatcaagtgtccaacaccaggctgtgatggcactggccacgttaccgggttgtaccctcaccaccgcagcctttctggctgtccccacaaggataggatccccccagagatcttagccatgcatgagaacgtgctgaagtgccccactcctggctgcacaggccagggtcacgtgaacagcaaccgcaacacgcacagaagtttgtctgggtgtcccattgctgccgccgaaaaattagccaaatcccatgagaagcagcagccgcagacaggagatccttccaagagtagctccaattccgatcggatcctcaggcccatgtgcttcgtgaagcagctcgaggtccctccatatgggagctaccggcccaacgtggcccccgccacacccagggccaacttggccaaggagctggagaagttctccaaggtcacctttgactacgcaagtttcgatgctcaggtttttggcaaacgcatgcttgccccaaagattcagaccagcgaaacctcacctaaagcctttcaatccaaacctttcccaaaggcctcttcccccaggcacagcccctccagtagttatgtgaggagcacttcatcctcttctgcaggctttgactactcgcaggacgccgaggctgcacacatggctgccactgccatcctgaacctctccacgcgctgctgggagatgcctgagaacctcagcacgaagccacaggacctccccagcaagtctgtggatatcgaggtagacgaaaatggaaccctggacttgagcatgcacaaacaccgcaaacgagaaaatgctttccccagcagcagcagctgcagcagcagccccggtgtgaagtctcccgacgcctcccagcgccacagcagcaccagcgcccccagcagctccatgacctctccccagtccagccaggcctcccgccaggacgagtgggaccggcccctggactacaccaagcctagccgcctgagagaggaggaacctgaggagtcagagccagcagcccattcttttgcttcttctgaagcagatgaccaggaagtgtcggaagagaattttgaggagcggaagtatccgggggaagtcaccctgaccaactttaagctgaagtttctctccaaggacataaagaaggagctgctcacctgtcccacccctggctgtgacggcagcggccacatcaccgggaactacgcctcccaccgcagcctctctggttgccctcttgctgacaagagcctcagaaacctcatggctgcccactctgctgacctcaagtgccccacgcccggctgtgacggctctggccacatcacagggaactacgcttcacaccggagcttgtccggctgccctcgtgcaaagaaaagtggagtcaaggtggcacccaccaaggacgacaaggaggaccccgagctgatgaagtgcccagttccaggctgtgtggggctcggtcacatcagcgggaaatacgcctctcacaggagcgcatccggctgcccactggccgcccgcaggcagaaggaagggtccctcaatggctcgtcattctcctggaagtccctgaagaatgaaggaccgacctgccccaccccgggctgtgacggctctggccacgccaatgggagtttcctcacccaccggagtttgtcaggctgtcccagagcaacctttgctggaaagaagggaaaactgtcaggggatgaggtcctcagtccaaagttcaagactagcgacgtgttggagaatgatgaggagatcaagcagctgaaccaggagatccgagacctgaacgagtccaactcggagatggaggctgccatggtgcagctgcagtcccagatctcctccatggagaagaacctgaagaacatcgaggaggagaacaagctcattgaggagcagaatgaagccctgtttctggagctgtccggcctgagccaggccctcatccaaagtctcgccaatatccgccttccgcacatggagccaatatgcgaacagaatttcgatgcctatgtgagcaccctcaccgacatgtactccaaccaggacccggagaacaaggacctcctggagagcatcaagcaggctgtgaggggcatccaggtctaggccgtgtggtacccagaagtgtcccagcccaccacaccgtttacctccctcgccctgccccgcaccgtggggatgcccaactcacagtgacttcccgtttggggcccggtgtggccgcgggcgggtttatccaaagggatggctggaaattggccgctcccacgaggctccctccaggcttggggccgtggtggccctatctgtgtgcataggggcactgaagaattacaaagtgatttatttttgttttctgaaagaaatctgaagagcagctcaaagtctccagtggaagctcatggacaaggttctcagtattgcctaagtgtaatcttgaacatgggcggtgctgtgagtgctggtgaagacaatgatgagctgatagataatttgaaagaagcacagtatatccggactgagctggtagagcaggctttcagagctatcgatcgtgcagactattatcttgaagaatttaaagaaaatgcttataaagacttggcatggaagcatggaaacattcacctctcagccccgtgcatctactcggaggtgatggaagccctagatctgcagcctggactctcgtttctgaacctgggcagtggcactgggtatctcagctccatggtgggcctcattctaggtccttttggtgtgaaccatggggtggaacttcactcagatgtgatagagtatgcaaagcagaaactggacttcttcatcagaacaagtgatagttttgacaagtttgacttctgtgaaccttcctttgttactgggaattgcctggagatttctccggattgttctcagtatgatcgtgtatactgtggggctggcgtgcagaaagagcatgaagagtacatgaagaatcttctcaaagtgggagggatccttgtcatgccactggaagagaagttgactaagataacacgcacaggtccttcagcttgggaaaccaaaaagattcttgctgtttcttttgctcctctgatccagccctgccattcagagtcaggaaaatcaagacttgtccagttaccaccagtggcagttcgcagcctccaggacttggctcgcatcgccatccggggcaccattaaaaagattattcatcaggaaactgtgagcaaaaacggaaacggactaaagaacacccccaggtttaaacgaaggagagttcgccgccgtcgaatggaaacgattgtctttttggacaaagaagtctttgccagtcggatttccaacccctcagatgacaacagctgtgaagacttggaagaggaacggagggaagaagaagagaagaccccgccggaaacaaagccagaccccccagtgaacttcctacgccagaaggtcctgagcctccctctgccagatcccctgaaatactacttgctttattacagagaaaaataagtctcctgtttgaaagggggaaataggaagagcagattgctgagtgtgaagttcgtgctgcctgtgtgctgttgaagggtcacctggaggcagacgttgtggggaagggaactgctgggctcatccacaccatggttttcttctagttcctgattgacctctaaaattctattcagttgtatgatttgtttacatagttccacaagaccttcattgcatagaagattgttttcccaaagtggagagaatcttcatagagaaaaagagaaggctgtttctttttcggctctgacgaaacactgaagtctgcgtaagagagactgtttgatgaccgtccctcatgcaacatgcacggtactcactaaaaatgaaaactgaagtggaaactaacctgtgttgcttataaagtgtgaaagcacaagcttataaatgtataaaatcttttctgggtgtgacgcacctgcgtccaagtttgaatttttatgatatgtaccacttaattactggcactgagtatcactgaatttcttagttttctagtggggaaacattattgagaagccctcccttattttaagtaagttgattaaatcttatgtgagttgccagttgtaatttttcaaaggaaaaattttgatggggtggaggaatgaattgccagataatctttctggaattccgagagaattccaaagagggtttttttttttttttttaggacatcttttgatacctttaaaagaaccactgtcaagtaatccttaaaagaatatcttggaaaaggaaacagattttttcctgtgtgtaagcaataagtgaagttacatttgccctaaccctagggatgattctttacccagttttaaagcccatcatggtattctaaggtgttgacaccctccatcctcagagcaggtcgaaaatattaaatagactggggactctatgatgggcagcctgtgctttttgacttcagtttgctatttttctgtgatcacattagtactgattcatagattctatcttttataattctggagaaaaagatttgttagttttgtaatttttttgtaagaccaaatgtatgtattttagtagctccattgcatgagaagagtgtaactcacactgacttgtgatatcagccttctctgggccttgtgtgtggagagctttctatcttaccaagtggtagggctaaaagaacaacagcctttttggtagtcacatagcagaatgatcagagttacattgcttattccaaaacattggttctttttaaaacatttttttttacccaaagaaaagaataatagaaattactaacaataaatataaattcagagtgttgatataggattcagtatccagagtttatttttaatcttaatcctcagcttcttgggagttgctgggcttcagtgtctctgtggtttcaccagcttagcttgagctctggttattttggatcttttctgctttttttaagtaactgagtcatttttaccacacagtccagtttgcatgtatagctaggaaacatgtattgctctagattgggcagtttaagtcattttaaagaaagttagttcatagttgttgccttttaactcatagtcaagcttcagtctttcaaagagaaatgtgtgattttcatttacttgctgatattttgtagtttggagatccttgtgggcattattctaactgatacgtagacacttacttggaaatttttggacattatattaaatgagtgctatctgtgaaattggttatattaggtggcttgactaatgttttttctataattgtatatggactgcatttttaaaaaaaccgcatttgcctttatgctagattgtaaaaaattatattagaatgcataagacatgtttttccttcatatgctagacttttcctagcatttcgtatttctgtgttgtcagtgtgtgatttttaaaccggaatttggtttaaaaaaaatctggtggtaatatatgtgagaaatactttggtgtttaccttatgaaaataaaggattgtaagtaaagtttcctgcgcaccttataccagaattcagtataatacactactttctgttttcaaacagataaatcataatatagtctgtattatctgtaagatctgtcttgtaaaccacattcttgacaactatttgcttttgagtagtttgtattttaatatgtgacttttgtcttgaaaagtagtaaagccatagacttgtgcaaaacaagtttcaagtttatagatattaagtttgtaatgtgagcatcaaatgtgtatgtaaaaatactttttaccagtctggaacttgggaaaatccagggaatttgaaacatagattttaatgagctggtaaacacaaatcatgtcaataaaggtagtcaggatattttatccttagcattgcttctgcatcctgtgtaggattccaattcttgaatatgttcttttcaaaatcttaagaaaagaaccttttttctttattaacatcatgtgtttactttcagcaaatatttgtattactgcttgattctgtgacagtcacaatagatgtagagaaggcattatttttcattaataaatgtgaaattggaatggaaaaatgga

SEQ ID NO: 442627 - DNA, 3764 bp, Homo sapiens
aggcgcagaggcggcggcggcggcggcggcggcggatgtttacggcggccgaggttggagcggcgctgctcggccgcggacacacgagggacgcgcccgaggagctgcaggtggcagcccaggcggtccgaacccgtcggccggccgagcctggagtattgcctaagtgtaatcttgaacatgggcggtgctgtgagtgctggtgaagacaatgatgagctgatagataatttgaaagaagcacagtatatccggactgagctggtagagcaggctttcagagctatcgatcgtgcagactattatcttgaagaatttaaagaaaatgcttataaagacttggcatggaagcatggaaacattcacctctcagccccgtgcatcactcagatgtgatagagtatgcaaagcagaaactggacttcttcatcagaacaagtgatagttttgacaagtttgacttctgtgaaccttcctttgttactgggaattgcctggagatttctccggattgttctcagtatgatcgtgtatactgtggggctggcgtgcagaaagagcatgaagagtacatgaagaatcttctcaaagtgggagggatccttgtcatgccactggaagagaagttgactaagataacacgcacaggtccttcagcttgggaaaccaaaaagattcttgctgtttcttttgctcctctgatccagccctgccattcagagtcaggaaaatcaagacttgtccagttaccaccagtggcagttcgcagcctccaggacttggctcgcatcgccatccggggcaccattaaaaagattattcatcaggaaactgtgagcaaaaacggaaacggactaaagaacacccccaggtttaaacgaaggagagttcgccgccgtcgaatggaaacgattgtctttttggacaaagaagtctttgccagtcggatttccaacccctcagatgacaacagctgtgaagacttggaagaggaacggagggaagaagaagagaagaccccgccggaaacaaagccagaccccccagtgaacttcctacgccagaaggtcctgagcctccctctgccagatcccctgaaatactacttgctttattacagagaaaaataagtctcctgtttgaaagggggaaataggaagagcagattgctgagtgtgaagttcgtgctgcctgtgtgctgttgaagggtcacctggaggcagacgttgtggggaagggaactgctgggctcatccacaccatggttttcttctagttcctgattgacctctaaaattctattcagttgtatgatttgtttacatagttccacaagaccttcattgcatagaagattgttttcccaaagtggagagaatcttcatagagaaaaagagaaggctgtttctttttcggctctgacgaaacactgaagtctgcgtaagagagactgtttgatgaccgtccctcatgcaacatgcacggtactcactaaaaatgaaaactgaagtggaaactaacctgtgttgcttataaagtgtgaaagcacaagcttataaatgtataaaatcttttctgggtgtgacgcacctgcgtccaagtttgaatttttatgatatgtaccacttaattactggcactgagtatcactgaatttcttagttttctagtggggaaacattattgagaagccctcccttattttaagtaagttgattaaatcttatgtgagttgccagttgtaatttttcaaaggaaaaattttgatggggtggaggaatgaattgccagataatctttctggaattccgagagaattccaaagagggtttttttttttttttttaggacatcttttgatacctttaaaagaaccactgtcaagtaatccttaaaagaatatcttggaaaaggaaacagattttttcctgtgtgtaagcaataagtgaagttacatttgccctaaccctagggatgattctttacccagttttaaagcccatcatggtattctaaggtgttgacaccctccatcctcagagcaggtcgaaaatattaaatagactggggactctatgatgggcagcctgtgctttttgacttcagtttgctatttttctgtgatcacattagtactgattcatagattctatcttttataattctggagaaaaagatttgttagttttgtaatttttttgtaagaccaaatgtatgtattttagtagctccattgcatgagaagagtgtaactcacactgacttgtgatatcagccttctctgggccttgtgtgtggagagctttctatcttaccaagtggtagggctaaaagaacaacagcctttttggtagtcacatagcagaatgatcagagttacattgcttattccaaaacattggttctttttaaaacatttttttttacccaaagaaaagaataatagaaattactaacaataaatataaattcagagtgttgatataggattcagtatccagagtttatttttaatcttaatcctcagcttcttgggagttgctgggcttcagtgtctctgtggtttcaccagcttagcttgagctctggttattttggatcttttctgctttttttaagtaactgagtcatttttaccacacagtccagtttgcatgtatagctaggaaacatgtattgctctagattgggcagtttaagtcattttaaagaaagttagttcatagttgttgccttttaactcatagtcaagcttcagtctttcaaagagaaatgtgtgattttcatttacttgctgatattttgtagtttggagatccttgtgggcattattctaactgatacgtagacacttacttggaaatttttggacattatattaaatgagtgctatctgtgaaattggttatattaggtggcttgactaatgttttttctataattgtatatggactgcatttttaaaaaaaccgcatttgcctttatgctagattgtaaaaaattatattagaatgcataagacatgtttttccttcatatgctagacttttcctagcatttcgtatttctgtgttgtcagtgtgtgatttttaaaccggaatttggtttaaaaaaaatctggtggtaatatatgtgagaaatactttggtgtttaccttatgaaaataaaggattgtaagtaaagtttcctgcgcaccttataccagaattcagtataatacactactttctgttttcaaacagataaatcataatatagtctgtattatctgtaagatctgtcttgtaaaccacattcttgacaactatttgcttttgagtagtttgtattttaatatgtgacttttgtcttgaaaagtagtaaagccatagacttgtgcaaaacaagtttcaagtttatagatattaagtttgtaatgtgagcatcaaatgtgtatgtaaaaatactttttaccagtctggaacttgggaaaatccagggaatttgaaacatagattttaatgagctggtaaacacaaatcatgtcaataaaggtagtcaggatattttatccttagcattgcttctgcatcctgtgtaggattccaattcttgaatatgttcttttcaaaatcttaagaaaagaaccttttttctttattaacatcatgtgtttactttcagcaaatatttgtattactgcttgattctgtgacagtcacaatagatgtagagaaggcattatttttcattaataaatgtgaaattggaatggaaaaatgga

SEQ ID NO: 442628 - DNA, 4162 bp, Homo sapiens
gtgtattatatttggttaatttggagattgctctggggaataggttatgggactaggagtagggttaggatgagtgggaagaagtaagagaggaacttaagttgaattatgccttttttgggttgaggtgatgatggaggtggagatttggttctgtgaaattgttttaggttatagcttttctagtcaggctaggtctaggaggagtaggggcaggttttggtgagtgttttagtggggttagcgatggaggtaggaatggtgctgtgggtgaaagagtgggatgaggtgggtgttgacaaaagataatctattattttcagaattcagaatttcaaattggtatctgtttagaacttctattgttctgctcttacctttaacataaatcgctctttttaaacatttttaattatagtattgcctaagtgtaatcttgaacatgggcggtgctgtgagtgctggtgaagacaatgatgagctgatagataatttgaaagaagcacagtatatccggactgagctggtagagcaggctttcagagctatcgatcgtgcagactattatcttgaagaatttaaagaaaatgcttataaagacttggcatggaagcatggaaacattcacctctcagccccgtgcatctactcggaggtgatggaagccctagatctgcagcctggactctcgtttctgaacctgggcagtggcactgggtatctcagctccatggtgggcctcattctaggtccttttggtgtgaaccatggggtggaacttcactcagatgtgatagagtatgcaaagcagaaactggacttcttcatcagaacaagtgatagttttgacaagtttgacttctgtgaaccttcctttgttactgggaattgcctggagatttctccggattgttctcagtatgatcgtgtatactgtggggctggcgtgcagaaagagcatgaagagtacatgaagaatcttctcaaagtgggagggatccttgtcatgccactggaagagaagttgactaagataacacgcacaggtccttcagcttgggaaaccaaaaagattcttgctgtttcttttgctcctctgatccagccctgccattcagagtcaggaaaatcaagacttgtccagttaccaccagtggcagttcgcagcctccaggacttggctcgcatcgccatccggggcaccattaaaaagattattcatcaggaaactgtgagcaaaaacggaaacggactaaagaacacccccaggtttaaacgaaggagagttcgccgccgtcgaatggaaacgattgtctttttggacaaagaagtctttgccagtcggatttccaacccctcagatgacaacagctgtgaagacttggaagaggaacggagggaagaagaagagaagaccccgccggaaacaaagccagaccccccagtgaacttcctacgccagaaggtcctgagcctccctctgccagatcccctgaaatactacttgctttattacagagaaaaataagtctcctgtttgaaagggggaaataggaagagcagattgctgagtgtgaagttcgtgctgcctgtgtgctgttgaagggtcacctggaggcagacgttgtggggaagggaactgctgggctcatccacaccatggttttcttctagttcctgattgacctctaaaattctattcagttgtatgatttgtttacatagttccacaagaccttcattgcatagaagattgttttcccaaagtggagagaatcttcatagagaaaaagagaaggctgtttctttttcggctctgacgaaacactgaagtctgcgtaagagagactgtttgatgaccgtccctcatgcaacatgcacggtactcactaaaaatgaaaactgaagtggaaactaacctgtgttgcttataaagtgtgaaagcacaagcttataaatgtataaaatcttttctgggtgtgacgcacctgcgtccaagtttgaatttttatgatatgtaccacttaattactggcactgagtatcactgaatttcttagttttctagtggggaaacattattgagaagccctcccttattttaagtaagttgattaaatcttatgtgagttgccagttgtaatttttcaaaggaaaaattttgatggggtggaggaatgaattgccagataatctttctggaattccgagagaattccaaagagggtttttttttttttttttaggacatcttttgatacctttaaaagaaccactgtcaagtaatccttaaaagaatatcttggaaaaggaaacagattttttcctgtgtgtaagcaataagtgaagttacatttgccctaaccctagggatgattctttacccagttttaaagcccatcatggtattctaaggtgttgacaccctccatcctcagagcaggtcgaaaatattaaatagactggggactctatgatgggcagcctgtgctttttgacttcagtttgctatttttctgtgatcacattagtactgattcatagattctatcttttataattctggagaaaaagatttgttagttttgtaatttttttgtaagaccaaatgtatgtattttagtagctccattgcatgagaagagtgtaactcacactgacttgtgatatcagccttctctgggccttgtgtgtggagagctttctatcttaccaagtggtagggctaaaagaacaacagcctttttggtagtcacatagcagaatgatcagagttacattgcttattccaaaacattggttctttttaaaacatttttttttacccaaagaaaagaataatagaaattactaacaataaatataaattcagagtgttgatataggattcagtatccagagtttatttttaatcttaatcctcagcttcttgggagttgctgggcttcagtgtctctgtggtttcaccagcttagcttgagctctggttattttggatcttttctgctttttttaagtaactgagtcatttttaccacacagtccagtttgcatgtatagctaggaaacatgtattgctctagattgggcagtttaagtcattttaaagaaagttagttcatagttgttgccttttaactcatagtcaagcttcagtctttcaaagagaaatgtgtgattttcatttacttgctgatattttgtagtttggagatccttgtgggcattattctaactgatacgtagacacttacttggaaatttttggacattatattaaatgagtgctatctgtgaaattggttatattaggtggcttgactaatgttttttctataattgtatatggactgcatttttaaaaaaaccgcatttgcctttatgctagattgtaaaaaattatattagaatgcataagacatgtttttccttcatatgctagacttttcctagcatttcgtatttctgtgttgtcagtgtgtgatttttaaaccggaatttggtttaaaaaaaatctggtggtaatatatgtgagaaatactttggtgtttaccttatgaaaataaaggattgtaagtaaagtttcctgcgcaccttataccagaattcagtataatacactactttctgttttcaaacagataaatcataatatagtctgtattatctgtaagatctgtcttgtaaaccacattcttgacaactatttgcttttgagtagtttgtattttaatatgtgacttttgtcttgaaaagtagtaaagccatagacttgtgcaaaacaagtttcaagtttatagatattaagtttgtaatgtgagcatcaaatgtgtatgtaaaaatactttttaccagtctggaacttgggaaaatccagggaatttgaaacatagattttaatgagctggtaaacacaaatcatgtcaataaaggtagtcaggatattttatccttagcattgcttctgcatcctgtgtaggattccaattcttgaatatgttcttttcaaaatcttaagaaaagaaccttttttctttattaacatcatgtgtttactttcagcaaatatttgtattactgcttgattctgtgacagtcacaatagatgtagagaaggcattatttttcattaataaatgtgaaattggaatggaaaaatgga

SEQ ID NO: 442629 - DNA, 6793 bp, Homo sapiens
gcggagtagcaggagtttgcaagctgcttcattaacttggagccagtggaatgtctgggatcgtctgtgatttggaaaccggtggcagaatgttcccgcgtttctggtcctcatcagtcagaaaatgagttccgaggtgagctgttaaatcagaggtggacacacggaggcaaggccagcagctgcaggacctcaagacacctgggcagacactgcaagatgagcttagaaaatgaagacaagcgagctcgcacccgatccaaggccctgcgaggacccccagagaccacagctgcagacctcagctgccccaccccaggatgcacaggctcagggcacgtccggggcaagtactccaggcaccgaagtttacagagctgccccctggccaagaagaggaagctggagggcgctgaggctgagcacctggtgtccaagaggaagtcacaccccctgaagctggctctggacgagggctatggtgtggacagcgacggcagtgaggacactgaggtgaaggacgcctctgtttcggatgaatcggaaggaactctggagggggccgaggctgagacgtcaggacaggacgagattcatcgccccgagacagctgaaggaaggagccccgtcaagtcccattttggatccaaccccatcggcagcgccactgcctcctccaagggcagctacagcagctaccagggaatcatcgcaacttctctcctgaacttgggtcaaattgctgaagagaccctggtggaagaggacttgggccaggcggccaagccaggtcctggcattgtgcacctgcttcaggaggctgcagagggagctgccagcgaggagggtgaaaagggcctcttcatccagccagaggatgccgaggaggtcgtcgaagtcaccaccgagcgctcccaggacctgtgtccccagtccctggaggatgcagccagtgaggagtccagcaagcagaaaggcatcctgagtcacgaagaggaggacgaggaggaggaggaggaggaagaggaggaggaggaggatgaagaagaggaagaggaagaggaggaggaagaggaagaggaggaggaggaagaggaagaggaggaggaagaggaagaggaagaggaggaggaggaggcagctcctgatgtgatctttcaggaagacacctctcacacctctgcccagaaggcccctgagctccggggcccagaatcacccagtcccaagcctgagtactctgttattgtggaggtccgctcggatgatgacaaggacgaggacacccactcccggaagtcaacagtcactgacgagtcggagatgcaggacatgatgacccggggaaacctgggcctcctggagcaggccatcgccctgaaggctgaacagatccttcaagagctgagaagcgtgagatcaagtgtccaacaccaggctgtgatggcactggccacgttaccgggttgtaccctcaccaccgcagcctttctggctgtccccacaaggataggatccccccagagatcttagccatgcatgagaacgtgctgaagtgccccactcctggctgcacaggccagggtcacgtgaacagcaaccgcaacacgcacagaagtttgtctgggtgtcccattgctgccgccgaaaaattagccaaatcccatgagaagcagcagccgcagacaggagatccttccaagagtagctccaattccgatcggatcctcaggcccatgtgcttcgtgaagcagctcgaggtccctccatatgggagctaccggcccaacgtggcccccgccacacccagggccaacttggccaaggagctggagaagttctccaaggtcacctttgactacgcaagtttcgatgctcaggtttttggcaaacgcatgcttgccccaaagattcagaccagcgaaacctcacctaaagcctttcaatccaaacctttcccaaaggcctcttcccccaggcacagcccctccagtagttatgtgaggagcacttcatcctcttctgcaggctttgactactcgcaggacgccgaggctgcacacatggctgccactgccatcctgaacctctccacgcgctgctgggagatgcctgagaacctcagcacgaagccacaggacctccccagcaagtctgtggatatcgaggtagacgaaaatggaaccctggacttgagcatgcacaaacaccgcaaacgagaaaatgctttccccagcagcagcagctgcagcagcagccccggtgtgaagtctcccgacgcctcccagcgccacagcagcaccagcgcccccagcagctccatgacctctccccagtccagccaggcctcccgccaggacgagtgggaccggcccctggactacaccaagcctagccgcctgagagaggaggaacctgaggagtcagagccagcagcccattcttttgcttcttctgaagcagatgaccaggaagtgtcggaagagaattttgaggagcggaagtatccgggggaagtcaccctgaccaactttaagctgaagtttctctccaaggacataaagaaggagctgctcacctgtcccacccctggctgtgacggcagcggccacatcaccgggaactacgcctcccaccgcagcctctctggttgccctcttgctgacaagagcctcagaaacctcatggctgcccactctgctgacctcaagtgccccacgcccggctgtgacggctctggccacatcacagggaactacgcttcacaccggagcttgtccggctgccctcgtgcaaagaaaagtggagtcaaggtggcacccaccaaggacgacaaggaggaccccgagctgatgaagtgcccagttccaggctgtgtggggctcggtcacatcagcgggaaatacgcctctcacaggagcgcatccggctgcccactggccgcccgcaggcagaaggaagggtccctcaatggctcgtcattctcctggaagtccctgaagaatgaaggaccgacctgccccaccccgggctgtgacggctctggccacgccaatgggagtttcctcacccaccggagtttgtcaggctgtcccagagcaacctttgctggaaagaagggaaaactgtcaggggatgaggtcctcagtccaaagttcaagactagcgacgtgttggagaatgatgaggagatcaagcagctgaaccaggagatccgagacctgaacgagtccaactcggagatggaggctgccatggtgcagctgcagtcccagatctcctccatggagaagaacctgaagaacatcgaggaggagaacaagctcattgaggagcagaatgaagccctgtttctggagctgtccggcctgagccaggccctcatccaaagtctcgccaatatccgccttccgcacatggagccaatatgcgaacagaatttcgatgcctatgtgagcaccctcaccgacatgtactccaaccaggacccggagaacaaggacctcctggagagcatcaagcaggctgtgaggggcatccaggtctaggccgtgtggtacccagaagtgtcccagcccaccacaccgtttacctccctcgccctgccccgcaccgtggggatgcccaactcacagtgacttcccgtttggggcccggtgtggccgcgggcgggtttatccaaagggatggctggaaattggccgctcccacgaggctccctccaggcttggggccgtggtggccctatctgtgtgcataggggcactgaagaattacaaagtgatttatttttgttttctgaaagaaatctgaagagcagctcaaagtctccagtggaagctcatggacaaggttctcagtattgcctaagtgtaatcttgaacatgggcggtgctgtgagtgctggtgaaggagagttcgccgccgtcgaatggaaacgattgtctttttggacaaagaagtctttgccagtcggatttccaacccctcagatgacaacagctgtgaagacttggaagaggaacggagggaagaagaagagaagaccccgccggaaacaaagccagaccccccagtgaacttcctacgccagaaggtcctgagcctccctctgccagatcccctgaaatactacttgctttattacagagaaaaataagtctcctgtttgaaagggggaaataggaagagcagattgctgagtgtgaagttcgtgctgcctgtgtgctgttgaagggtcacctggaggcagacgttgtggggaagggaactgctgggctcatccacaccatggttttcttctagttcctgattgacctctaaaattctattcagttgtatgatttgtttacatagttccacaagaccttcattgcatagaagattgttttcccaaagtggagagaatcttcatagagaaaaagagaaggctgtttctttttcggctctgacgaaacactgaagtctgcgtaagagagactgtttgatgaccgtccctcatgcaacatgcacggtactcactaaaaatgaaaactgaagtggaaactaacctgtgttgcttataaagtgtgaaagcacaagcttataaatgtataaaatcttttctgggtgtgacgcacctgcgtccaagtttgaatttttatgatatgtaccacttaattactggcactgagtatcactgaatttcttagttttctagtggggaaacattattgagaagccctcccttattttaagtaagttgattaaatcttatgtgagttgccagttgtaatttttcaaaggaaaaattttgatggggtggaggaatgaattgccagataatctttctggaattccgagagaattccaaagagggtttttttttttttttttaggacatcttttgatacctttaaaagaaccactgtcaagtaatccttaaaagaatatcttggaaaaggaaacagattttttcctgtgtgtaagcaataagtgaagttacatttgccctaaccctagggatgattctttacccagttttaaagcccatcatggtattctaaggtgttgacaccctccatcctcagagcaggtcgaaaatattaaatagactggggactctatgatgggcagcctgtgctttttgacttcagtttgctatttttctgtgatcacattagtactgattcatagattctatcttttataattctggagaaaaagatttgttagttttgtaatttttttgtaagaccaaatgtatgtattttagtagctccattgcatgagaagagtgtaactcacactgacttgtgatatcagccttctctgggccttgtgtgtggagagctttctatcttaccaagtggtagggctaaaagaacaacagcctttttggtagtcacatagcagaatgatcagagttacattgcttattccaaaacattggttctttttaaaacatttttttttacccaaagaaaagaataatagaaattactaacaataaatataaattcagagtgttgatataggattcagtatccagagtttatttttaatcttaatcctcagcttcttgggagttgctgggcttcagtgtctctgtggtttcaccagcttagcttgagctctggttattttggatcttttctgctttttttaagtaactgagtcatttttaccacacagtccagtttgcatgtatagctaggaaacatgtattgctctagattgggcagtttaagtcattttaaagaaagttagttcatagttgttgccttttaactcatagtcaagcttcagtctttcaaagagaaatgtgtgattttcatttacttgctgatattttgtagtttggagatccttgtgggcattattctaactgatacgtagacacttacttggaaatttttggacattatattaaatgagtgctatctgtgaaattggttatattaggtggcttgactaatgttttttctataattgtatatggactgcatttttaaaaaaaccgcatttgcctttatgctagattgtaaaaaattatattagaatgcataagacatgtttttccttcatatgctagacttttcctagcatttcgtatttctgtgttgtcagtgtgtgatttttaaaccggaatttggtttaaaaaaaatctggtggtaatatatgtgagaaatactttggtgtttaccttatgaaaataaaggattgtaagtaaagtttcctgcgcaccttataccagaattcagtataatacactactttctgttttcaaacagataaatcataatatagtctgtattatctgtaagatctgtcttgtaaaccacattcttgacaactatttgcttttgagtagtttgtattttaatatgtgacttttgtcttgaaaagtagtaaagccatagacttgtgcaaaacaagtttcaagtttatagatattaagtttgtaatgtgagcatcaaatgtgtatgtaaaaatactttttaccagtctggaacttgggaaaatccagggaatttgaaacatagattttaatgagctggtaaacacaaatcatgtcaataaaggtagtcaggatattttatccttagcattgcttctgcatcctgtgtaggattccaattcttgaatatgttcttttcaaaatcttaagaaaagaaccttttttctttattaacatcatgtgtttactttcagcaaatatttgtattactgcttgattctgtgacagtcacaatagatgtagagaaggcattatttttcattaataaatgtgaaattggaatggaaaaatgga

SEQ ID NO: 442630 - DNA, 4590 bp, Homo sapiens
  misc_feature (3230)..(3230): n is a, c, g, or t
gcggagtagcaggagtttgcaagctgcttcattaacttggagccagtggaatgtctgggatcgtctgtgatttggaaaccggtggcagaatgttcccgcgtttctggtcctcatcagtcagaaaatgagttccgaggtgagctgttaaatcagaggtggacacacggaggcaaggccagcagctgcaggacctcaagacacctgggcagacactgcaagatgagcttagaaaatgaagacaagcgagctcgcacccgatccaaggccctgcgaggacccccagagaccacagctgcagacctcagctgccccaccccaggatgcacaggctcagggcacgtccggggcaagtactccaggcaccgaagtttacagagctgccccctggccaagaagaggaagctggagggcgctgaggctgagcacctggtgtccaagaggaagtcacaccccctgaagctggctctggacgagggctatggtgtggacagcgacggcagtgaggacactgaggtgaaggacgcctctgtttcggatgaatcggaaggaactctggagggggccgaggctgagacgtcaggacaggacgagattcatcgccccgagacagctgaagatccttcaagagctgagaagcgtgagatcaagtgtccaacaccaggctgtgatggcactggccacgttaccgggttgtaccctcaccaccgcagcctttctggctgtccccacaaggataggatccccccagagatcttagccatgcatgagaacgtgctgaagtgccccactcctggctgcacaggccagggtcacgtgaacagcaaccgcaacacgcacagaagtttgtctgggtgtcccattgctgccgccgaaaaattagccaaatcccatgagaagcagcagccgcagacaggagatccttccaagagtagctccaattccgatcggatcctcaggcccatgtgcttcgtgaagcagctcgaggtccctccatatgggagctaccggcccaacgtggcccccgccacacccagggccaacttggccaaggagctggagaagttctccaaggtcacctttgactacgcaagtttcgatgctcaggtttttggcaaacgcatgcttgccccaaagattcagaccagcgaaacctcacctaaagcctttcaatccaaacctttcccaaaggcctcttcccccaggcacagcccctccagtagttatgtgaggagcacttcatcctcttctgcaggctttgactactcgcaggacgccgaggctgcacacatggctgccactgccatcctgaacctctccacgcgctgctgggagatgcctgagaacctcagcacgaagccacaggacctccccagcaagtctgtggatatcgaggtagacgaaaatggaaccctggacttgagcatgcacaaacaccgcaaacgagaaaatgctttccccagcagcagcagctgcagcagcagccccggtgtgaagtctcccgacgcctcccagcgccacagcagcaccagcgcccccagcagctccatgacctctccccagtccagccaggcctcccgccaggacgagtgggaccggcccctggactacaccaagcctagccgcctgagagaggaggaacctgaggagtcagagccagcagcccattcttttgcttcttctgaagcagatgaccaggaagtgtcggaagagaattttgaggagcggaagtatccgggggaagtcaccctgaccaactttaagctgaagtttctctccaaggacataaagaaggagctgctcacctgtcccacccctggctgtgacggcagcggccacatcaccgggaactacgcctcccaccgcagcctctctggttgccctcttgctgacaagagcctcagaaacctcatggctgcccactctgctgacctcaagtgccccacgcccggctgtgacggctctggccacatcacagggaactacgcttcacaccggagcttgtccggctgccctcgtgcaaagaaaagtggagtcaaggtggcacccaccaaggacgacaaggaggaccccgagctgatgaagtgcccagttccaggctgtgtggggctcggtcacatcagcgggaaatacgcctctcacaggagcgcatccggctgcccactggccgcccgcaggcagaaggaagggtccctcaatggctcgtcattctcctggaagtccctgaagaatgaaggaccgacctgccccaccccgggctgtgacggctctggccacgccaatgggagtttcctcacccaccggagtttgtcaggctgtcccagagcaacctttgctggaaagaagggaaaactgtcaggggatgaggtcctcagtccaaagttcaagactagcgacgtgttggagaatgatgaggagatcaagcagctgaaccaggagatccgagacctgaacgagtccaactcggagatggaggctgccatggtgcagctgcagtcccagatctcctccatggagaagaacctgaagaacatcgaggaggagaacaagctcattgaggagcagaatgaagccctgtttctggagctgtccggcctgagccaggccctcatccaaagtctcgccaatatccgccttccgcacatggagccaatatgcgaacagaatttcgatgcctatgtgagcaccctcaccgacatgtactccaaccaggacccggagaacaaggacctcctggagagcatcaagcaggctgtgaggggcatccaggtctaggccgtgtggtacccagaagtgtcccagcccaccacaccgtttacctccctcgccctgccccgcaccgtggggatgcccaactcacagtgacttcccgtttggggcccggtgtggccgcgggcgggtttatccaaagggatggctggaaattggccgctcccacgaggctccctccaggcttggggccgtggtggccctatctgtgtgcataggggcactgaagaattacaaagtgatttatttttgttttctgaaagaaatctgaagagcagctcaaagtctccagtggaagctcatggacaaggttctcagggaagttttggagtttgcaaccacagtattcctttgtctgtcgaggctgggagggtagccgtgagcgtggtgggtgggtggtgtgagtggcatcttggcctggaggacacgcctggggcagcgtgtctgtgctcagtgagggccgntgaagaaagtgcgttttctgttttcatttaattcagttttgtgttaagggtggaacaaagctctgttctagagggaaagttaggaataggcctcccagaggatactccagacagttgacaagcatcgcagcccctgtcaggtcaaggaattttaacctgggagactcctgaaaatcagcctaatgtctgggggcagctggcgctgaggctgtgcagatgtgtatggccttgggtcacagctccctactggggctgcagcctttagaccctgggtctgggatccacgtctagggaccactctggcttctgtgcatccacccaggcccccgacccatcactgccacattctccgggtcatggccgagcttgacctctgcatccatggtgacggaggtggcaatgacatcatcaaggtcagagggtaaattcctaacaggagaccacaaaggtttcacttcttttagatccatccaatatgcgaaaaaagggtacattttaatttaatgtgttaaaaacacaatgtccctaccgtgtaaatagaatccaagtcaattgtgactgcaattccaagttagtatttaaaaatagagaaattgcacttcctggaaaaaattaaaaagtagttagtttaattattctgtaaattatttaattttgtcaagatgtaagtatttatattcacagcctcttatgttaacgtttgctatttatttaacatttttatttattaattttatactatttcaactagaccccacaccagggcaccctaagaggggaaaaaagtgaattcaaagcaaaaataactatttgactataatataggccacaaaaaatcttgatataactcctagttataattttgatgcaaccaagttattttttatatattttgttatttattcttttaataatggaatttttttaaaaagtattttgtaactgaggaattttgataatttggggattttgttttcccttggtctaatggagagaaagacattttggttttctttttccattttgggttccttttgtttcaggcacggataacagcaaatggaattctgtatttattattatttaagtgtagcgcagatgtgtgtgcttgggcgtgtttctcgtgtcgcgtttgcgtgtcggctcttgcggtggagtcctgttgctgtgagggagtgctggccgcaggcagcctcgagtcaccgccaggctcacaggctgtgccacccgtccctccgacagctccaatactgtgaccctccttcctcaggaagcgcgttgaacccacagcactccgtggtgtgtttgcagggtgatttcctaataaaagtccactctgactgtgaaaaaaatgctgtgg

SEQ ID NO: 442631 - DNA, 1603 bp, Homo sapiens
aggcgcagaggcggcggcggcggcggcggcggcggatgtttacggcggccgaggttggagcggcgctgctcggccgcggacacacgagggacgcgcccgaggagctgcaggtggcagcccaggcggtccgaacccgtcggccggccgagcctggagtattgcctaagtgtaatcttgaacatgggcggtgctgtgagtgctggtgaagacaatgatgagctgatagataatttgaaagaagcacagtatatccggactgagctggtagagcaggctttcagagctatcgatcgtgcagactattatcttgaagaatttaaagaaaatgcttataaagacttggcatggaagcatggaaacattcacctctcagccccgtgcatctactcggaggtgatggaagccctagatctgcagcctggactctcgtttctgaacctgggcagtggcactgggtatctcagctccatggtgggcctcattctaggtccttttggtgtgaaccatggggtggaacttcactcagatgtgatagagtatgcaaagcagaaactggacttcttcatcagaacaagtgatagttttgacaagtttgacttctgtgaaccttcctttgttactgggaattgcctggagatttctccggattgttctcagtatgatcgtgtatactgtggggctggcgtgcagaaagagcatgaagagtacatgaagaatcttctcaaagtgggagggatccttgtcatgccactggaagagaagttgactaagataacacgcacaggtccttcagcttgggaaaccaaaaagattcttgctgtttcttttgctcctctgatccagccctgccattcagagtcaggaaaatcaagacttgtccagttacgtaagtataccaatctttacttattttatcttttagatcttttctctctggttagattttaaaaggaaacaaaatttacaacaaaccttttgatattaaaaagcaccactcccatgctgaaactgtaaaattctacaagcaatttcaggcattataaaaattataatctatttttaacctatttcaggtaattttagccgtcttttaaatctacaaagagctgttgccggtcacaccattgaaagccgaggacgcacataaaagggagctcattttgccatgtgggagacttagcctatttgcccgcctccactgggaggggcttacagaaagagccatcagccagagggctcctacagagtcatggggcttctgctccccagggcgccaagcgcctgctgcctcatgggtagacaaggttagagaacacattccagctaatctgctggggtgtggataggagactttccgtggaaccttacacagccgagcctttgtgtttcactatttcaggatgcaaactgagcaaggaactgataccagggccagcacgacagcaaaacctcctaatgttttaaaatttaaacggctcacacagaaatgagagttccaattgattttatttaaaataaaactatcaggatgctctctgatcatttagaaaatttggaaaatgcaaaaaataataggaagggaaaagttttgcatagtcttaca

SEQ ID NO: 442632 - DNA, 1171 bp, Homo sapiens
aggcgcagaggcggcggcggcggcggcggcggcggatgtttacggcggccgaggttggagcggcgctgctcggccgcggacacacgagggacgcgcccgaggagctgcaggtggcagcccaggcggtccgaacccgtcggccggccgagcctggagtattgcctaagtgtaatcttgaacatgggcggtgctgtgagtgctggtgaagacaatgatgagctgatagataatttgaaagaagcacagtatatccggactgagctggtagagcaggctttcagagctatcgatcgtgcagactattatcttgaagaatttaaagaaaatgcttataaagacttggcatggaagcatggaaacattcacctctcagccccgtgcatctactcggaggtgatggaagccctagatctgcagcctggactctcgtttctgaacctgggcagtggcactgggtatctcagctccatggtgggcctcattctaggtccttttggtgtgaaccatggggtggaacttcactcagatgtgatagagtatgcaaagcagaaactggacttcttcatcagaacaagtgatagttttgacaagtttgacttctgtgaaccttcctttgttactgggaattgcctggagatttctccggattgttctcagtatgatcgtgtatactgtggggctggcgtgcagaaagagcatgaagagtacatgaagaatcttctcaaagtgggagggatccttgtcatgccactggaagagaaggtcagattcccttcataactgacatttctgcacactgtgtgccaaggtctgttctgggcagtgtacggatacttactcttttaacaatttcctgcatttcacaaatgaggaaacagaggcagggacaggtgagggagatgcagggtcacgcacatgccctagctggggccagaagctgactcaggtgggtgcttcagagcctgcacgtgaaacgcttttctccaccttccttctctgtctctctctttttccttcttctgtcccttccccctcacctccctcttccttccccttctccttccccccagctgttctgagttttaattctaattgttaatctattataattgttctgctgttagaattatatataaaatagagtcattctattctcatcattagtctaatt

SEQ ID NO: 442633 - DNA, 1104 bp, Homo sapiens
ccccacaccccccccccccccacccccccccaacttaaggctaggtacgagctggtggtgcagccgcccgttgccagttctgcgcgtgtgagtctctttcgccttgctccgggctttcttcgctcgcagcgcggcagggttatcaccagatctgggctttccccttcttgccgtcaggtgctacggccacgtggcccgcggcttcccgctcgcgcagtctggcagcccggagccttccgcggtcccccgcccgcccggggcccaacgacgccctactgggcgagcacgatttccgaggacagggggtccgggcccagcgctttcgattctcggaggagccgggtccgggggccgacggggctgtcctggaggtccacgtcccgcaggtgcgtgcagcagcacccgccaggaggcgcctgagattggagctggagtgagccttccaggaattttggctgccaaatgtggtgcagaagtaatactgtcagacagctcagaactgcctcactgtctggaagtctgtcggcaaagctgccaaatgaataacctgccacatctgcaggtggtaggactaacatggggtcatatatcttgggatcttctggctctaccaccacaagatattatccttgcatctgatgtgttctttgaaccagaagattttgaagacattttggctacaatatattttttgatgcacaagaatcccaaggtccaattgtggtctacttatcaagttaggagtgctgactggtcacttgaagctttactctacaaatgggatatgaaatgtgtccacattcctcttgagtcttttgatgcagacaaagaagatatagcagaatctacccttccaggaagacatacagttgaaatgctggtcatttcctttgcaaaggacagtctctgaattatacctacaacctgttctgggacagtatcaatactgatgagcaacctggcacacaaactatgagcagaccacttcagcttgagaatgcagtgggtctgaagatggtcaagtctgtttgccttagattttgatgtcacctagacaacacttaaactcatatgaaacaaaaattaaaatacgtattacaagta

SEQ ID NO: 442634 - DNA, 1174 bp, Homo sapiens
ccccacaccccccccccccccacccccccccaacttaaggctaggtacgagctggtggtgcagccgcccgttgccagttctgcgcgtgtgagtctctttcgccttgctccgggctttcttcgctcgcagcgcggcagggttatcaccagatctgggctttccccttcttgccgtcaggtgctacggccacgtggcccgcggcttcccgctcgcgcagtctggcagcccggagccttccgcggtcccccgcccgcccggggcccaacgacgccctactgggcgagcacgatttccgaggacagggggtccgggcccagcgctttcgattctcggaggagccgggtccgggggccgacggggctgtcctggaggtccacgtcccgcaggtcctgcatctccagtatggaatgtatgtttggccctgtgctgtggtcctggcccagtacctttggtttcacagaagatctctgccaggcaaggccatcttagagattggagctggagtgagccttccaggaattttggctgccaaatgtggtgcagaagtaatactgtcagacagctcagaactgcctcactgtctggaagtctgtcggcaaagctgccaaatgaataacctgccacatctgcaggtggtaggactaacatggggtcatatatcttgggatcttctggctctaccaccacaagatattatccttgcatctgatgtgttctttgaaccagaagattttgaagacattttggctacaatatattttttgatgcacaagaatcccaaggtccaattgtggtctacttatcaagttaggagtgctgactggtcacttgaagctttactctacaaatgggatatgaaatgtgtccacattcctcttgagtcttttgatgcagacaaagaagatatagcagaatctacccttccaggaagacatacagttgaaatgctggtcatttcctttgcaaaggacagtctctgaattatacctacaacctgttctgggacagtatcaatactgatgagcaacctggcacacaaactatgagcagaccacttcagcttgagaatgcagtgggtctgaagatggtcaagtctgtttgccttagattttgatgtcacctagacaacacttaaactcatatgaaacaaaaattaaaatacgtattacaagta

SEQ ID NO: 442635 - DNA, 1069 bp, Homo sapiens
ccccacaccccccccccccccacccccccccaacttaaggctaggtacgagctggtggtgcagccgcccgttgccagttctgcgcgtgtgagtctctttcgccttgctccgggctttcttcgctcgcagcgcggcagggttatcaccagatctgggctttccccttcttgccgtcaggtgctacggccacgtggcccgcggcttcccgctcgcgcagtctggcagcccggagccttccgcggtcccccgcccgcccggggcccaacgacgccctactgggcgagcacgatttccgaggacagggggtccgggcccagcgctttcgattctcggaggagccgggtccgggggccgacggggctgtcctggaggtccacgtcccgcagattggagctggagtgagccttccaggaattttggctgccaaatgtggtgcagaagtaatactgtcagacagctcagaactgcctcactgtctggaagtctgtcggcaaagctgccaaatgaataacctgccacatctgcaggtggtaggactaacatggggtcatatatcttgggatcttctggctctaccaccacaagatattatccttgcatctgatgtgttctttgaaccagaagattttgaagacattttggctacaatatattttttgatgcacaagaatcccaaggtccaattgtggtctacttatcaagttaggagtgctgactggtcacttgaagctttactctacaaatgggatatgaaatgtgtccacattcctcttgagtcttttgatgcagacaaagaagatatagcagaatctacccttccaggaagacatacagttgaaatgctggtcatttcctttgcaaaggacagtctctgaattatacctacaacctgttctgggacagtatcaatactgatgagcaacctggcacacaaactatgagcagaccacttcagcttgagaatgcagtgggtctgaagatggtcaagtctgtttgccttagattttgatgtcacctagacaacacttaaactcatatgaaacaaaaattaaaatacgtattacaagta

SEQ ID NO: 442636 - DNA, 1112 bp, Homo sapiens
tggagatggagtctcgctctgtcacccagacgagtgcagtggcacaatctcagctcactgcaacagcctggagaacagagcaagactccgtctcaaaaaaataaaacaaaactgaaaatcatggcagaggaatcaagtgccccaaaactacttctgtgtgcatagcaattaactgccagttacgatacatggccctttaatattgaaattgaaggttaagcttttaccttttagcagagtagattcataaggaatgtacttttgtcatgtttatagtaatgttcagttacggtacattttatacaaatccagaaagactgactctatgcttatttaaaaatgcaagaatataatgaaaaagtactaagattcccaattatttgcagttccaagtataattgtgaaatgccatctttcataacttattagattggagctggagtgagccttccaggaattttggctgccaaatgtggtgcagaagtaatactgtcagacagctcagaactgcctcactgtctggaagtctgtcggcaaagctgccaaatgaataacctgccacatctgcaggtggtaggactaacatggggtcatatatcttgggatcttctggctctaccaccacaagatattatccttgcatctgatgtgttctttgaaccagaagattttgaagacattttggctacaatatattttttgatgcacaagaatcccaaggtccaattgtggtctacttatcaagttaggagtgctgactggtcacttgaagctttactctacaaatgggatatgaaatgtgtccacattcctcttgagtcttttgatgcagacaaagaagatatagcagaatctacccttccaggaagacatacagttgaaatgctggtcatttcctttgcaaaggacagtctctgaattatacctacaacctgttctgggacagtatcaatactgatgagcaacctggcacacaaactatgagcagaccacttcagcttgagaatgcagtgggtctgaagatggtcaagtctgtttgccttagattttgatgtcacctagacaacacttaaactcatatgaaacaaaaattaaaatacgtattacaagta

SEQ ID NO: 442637 - DNA, 1248 bp, Homo sapiens
ccccacaccccccccccccccacccccccccaacttaaggctaggtacgagctggtggtgcagccgcccgttgccagttctgcgcgtgtgagtctctttcgccttgctccgggctttcttcgctcgcagcgcggcagggttatcaccagatctgggctttccccttcttgccgtcaggtgctacggccacgtggcccgcggcttcccgctcgcgcagtctggcagcccggagccttccgcggtcccccgcccgcccggggcccaacgacgccctactgggcgagcacgatttccgaggacagggggtccgggcccagcgctttcgattctcggaggagccgggtccgggggccgacggggctgtcctggaggtccacgtcccgcaggtgcgtgcagcagcacccgccaggaggcgcctgaggtcaggagcggatgtcggctgacttggctgggttcctgagggaccgggggtgcggacgctcagctgcgcagcttcctgctttaggttgacccccggagcaaaaacgtcggatatgaagcccttcggtgcattaaatgtctctcaattggagctggagtgagccttccaggaattttggctgccaaatgtggtgcagaagtaatactgtcagacagctcagaactgcctcactgtctggaagtctgtcggcaaagctgccaaatgaataacctgccacatctgcaggtggtaggactaacatggggtcatatatcttgggatcttctggctctaccaccacaagatattatccttgcatctgatgtgttctttgaaccagaagattttgaagacattttggctacaatatattttttgatgcacaagaatcccaaggtccaattgtggtctacttatcaagttaggagtgctgactggtcacttgaagctttactctacaaatgggatatgaaatgtgtccacattcctcttgagtcttttgatgcagacaaagaagatatagcagaatctacccttccaggaagacatacagttgaaatgctggtcatttcctttgcaaaggacagtctctgaattatacctacaacctgttctgggacagtatcaatactgatgagcaacctggcacacaaactatgagcagaccacttcagcttgagaatgcagtgggtctgaagatggtcaagtctgtttgccttagattttgatgtcacctagacaacacttaaactcatatgaaacaaaaattaaaatacgtattacaagta

SEQ ID NO: 442638 - DNA, 1048 bp, Homo sapiens
ccccacaccccccccccccccacccccccccaacttaaggctaggtacgagctggtggtgcagccgcccgttgccagttctgcgcgtgtgagtctctttcgccttgctccgggctttcttcgctcgcagcgcggcagggttatcaccagatctgggctttccccttcttgccgtcaggtgctacggccacgtggcccgcggcttcccgctcgcgcagtctggcagcccggagccttccgcggtcccccgcccgcccggggcccaacgacgccctactgggcgagcacgatttccgaggacagggggtcctggcccagtacctttggtttcacagaagatctctgccaggcaaggccatcttagagattggagctggagtgagccttccaggaattttggctgccaaatgtggtgcagaagtaatactgtcagacagctcagaactgcctcactgtctggaagtctgtcggcaaagctgccaaatgaataacctgccacatctgcaggtggtaggactaacatggggtcatatatcttgggatcttctggctctaccaccacaagatattatccttgcatctgatgtgttctttgaaccagaagattttgaagacattttggctacaatatattttttgatgcacaagaatcccaaggtccaattgtggtctacttatcaagttaggagtgctgactggtcacttgaagctttactctacaaatgggatatgaaatgtgtccacattcctcttgagtcttttgatgcagacaaagaagatatagcagaatctacccttccaggaagacatacagttgaaatgctggtcatttcctttgcaaaggacagtctctgaattatacctacaacctgttctgggacagtatcaatactgatgagcaacctggcacacaaactatgagcagaccacttcagcttgagaatgcagtgggtctgaagatggtcaagtctgtttgccttagattttgatgtcacctagacaacacttaaactcatatgaaacaaaaattaaaatacgtattacaagta

SEQ ID NO: 442639 - DNA, 1189 bp, Homo sapiens
tggagatggagtctcgctctgtcacccagacgagtgcagtggcacaatctcagctcactgcaacagcctggagaacagagcaagactccgtctcaaaaaaataaaacaaaactgaaaatcatggcagaggaatcaagtgccccaaaactacttctgtgtgcatagcaattaactgccagttacgatacatggccctttaatattgaaattgaaggttaagcttttaccttttagcagagtagattcataaggaatgtacttttgtcatgtttatagtaatgttcagttacggtacattttatacaaatccagaaagactgactctatgcttatttaaaaatgcaagaatataatgaaaaagtactaagattcccaattatttgcagttccaagtataattgtgaaatgccatctttcataacttattagattggagctggagtgagccttccaggaattttggctgccaaatgtggtgcagaagtaatactgtcagacagctcagaactgcctcactgtctggaagtctgtcggcaaagctgccaaatgaataacctgccacatctgcaggtggtaggactaacatggggtcatatatcttgggatcttctggctctaccaccacaagatattatccttgcatctgatgtgttctttgaaccagaaggtaagcttttttggctcaatagtacatttggccagtgatgctatatgaaaatctattcataaatcctttctcctcagattttgaagacattttggctacaatatattttttgatgcacaagaatcccaaggtccaattgtggtctacttatcaagttaggagtgctgactggtcacttgaagctttactctacaaatgggatatgaaatgtgtccacattcctcttgagtcttttgatgcagacaaagaagatatagcagaatctacccttccaggaagacatacagttgaaatgctggtcatttcctttgcaaaggacagtctctgaattatacctacaacctgttctgggacagtatcaatactgatgagcaacctggcacacaaactatgagcagaccacttcagcttgagaatgcagtgggtctgaagatggtcaagtctgtttgccttagattttgatgtcacctagacaacacttaaactcatatgaaacaaaaattaaaatacgtattacaagta

SEQ ID NO: 442640 - DNA, 831 bp, Homo sapiens
ccccacaccccccccccccccacccccccccaacttaaggctaggtacgagctggtggtgcagccgcccgttgccagttctgcgcgtgtgagtctctttcgccttgctccgggctttcttcgctcgcagcgcggcagggttatcaccagatctgggctttccccttcttgccgtcaggtgctacggccacgtggcccgcggcttcccgctcgcgcagtctggcagcccggagccttccgcggtcccccgcccgcccggggcccaacgacgccctactgggcgagcacgatttccgaggacagggggtccgggcccagcgctttcgattctcggaggagccgggtccgggggccgacggggctgtcctggaggtccacgtcccgcagattttgaagacattttggctacaatatattttttgatgcacaagaatcccaaggtccaattgtggtctacttatcaagttaggagtgctgactggtcacttgaagctttactctacaaatgggatatgaaatgtgtccacattcctcttgagtcttttgatgcagacaaagaagatatagcagaatctacccttccaggaagacatacagttgaaatgctggtcatttcctttgcaaaggacagtctctgaattatacctacaacctgttctgggacagtatcaatactgatgagcaacctggcacacaaactatgagcagaccacttcagcttgagaatgcagtgggtctgaagatggtcaagtctgtttgccttagattttgatgtcacctagacaacacttaaactcatatgaaacaaaaattaaaatacgtattacaagta

SEQ ID NO: 442641 - DNA, 1125 bp, Homo sapiens
ccccacaccccccccccccccacccccccccaacttaaggctaggtacgagctggtggtgcagccgcccgttgccagttctgcgcgtgtgagtctctttcgccttgctccgggctttcttcgctcgcagcgcggcagggttatcaccagatctgggctttccccttcttgccgtcaggtgctacggccacgtggcccgcggcttcccgctcgcgcagtctggcagcccggagccttccgcggtcccccgcccgcccggggcccaacgacgccctactgggcgagcacgatttccgaggacagggggtccgggcccagcgctttcgattctcggaggagccgggtccgggggccgacggggctgtcctggaggtccacgtcccgcaggtgcgtgcagcagcacccgccaggaggcgcctgagattggagctggagtgagccttccaggaattttggctgccaaatgtggtgcagaagtaatactgtcagacagctcagaactgcctcactgtctggaagtctgtcggcaaagctgccaaatgaataacctgccacatctgcaggtggtaggactaacatggggtcatatatcttgggatcttctggctctaccaccacaagatattatccttgcatctgatgtgttctttgaaccagaagattttgaagacattttggctacaatatattttttgatgcacaagaatcccaaggtccaattgtggtctacttatcaagttaggagtgctgactggtcacttgaagctttactctacaaatgggatatgaaatgtgtccacattcctcttgagtcttttgatgcagacaaagaagatatagcagaatctacccttccaggaagacatacagttgaaatgctggtcatttcctttgcaaaggacagtctctgaattatacctacaacctgttctgggacagtatcaatactgatgagcaacctggcacacaaactatgagcagaccacttcagcttgagaatgcagtgggtctgaagatggtcaagtctgtttgccttagattttgatgtcacctagacaacacttaaactcatatgaaacaaaaattaaaatacgtattacaagtatagagatgaaaaaaaagtttg

SEQ ID NO: 442642 - DNA, 1255 bp, Homo sapiens
tggagatggagtctcgctctgtcacccagacgagtgcagtggcacaatctcagctcactgcaacagcctggagaacagagcaagactccgtctcaaaaaaataaaacaaaactgaaaatcatggcagaggaatcaagtgccccaaaactacttctgtgtgcatagcaattaactgccagttacgatacatggccctttaatattgaaattgaaggttaagcttttaccttttagcagagtagattcataaggaatgtacttttgtcatgtttatagtaatgttcagttacggtacattttatacaaatccagaaagactgactctatgcttatttaaaaatgcaagaatataatgaaaaagtactaagattcccaattatttgcagttccaagtataattgtgaaatgccatctttcataacttattagattggagctggagtgagccttccaggaattttggctgccaaatgtggtgcagaagtaatactgtcagacagctcagaactgcctcactgtctggaagtctgtcggcaaagctgccaaatgaataacctgccacatctgcaggtggtaggactaacatggggtcatatatcttgggatcttctggctctaccaccacaagatattatccttgcatctgatgtgttctttgaaccagaagattttgaagacattttggctacaatatattttttgatgcacaagaatcccaaggtccaattgtggtctacttatcaagttaggaggcaagtatggatgacccttactttttatatgtaacttaagccttactctaccctacccatgcgatacataatttaagaatagaatacatctgaagcaaaacagaaaaggcatgactttaaaagaacaactttttttttttaagtgctgactggtcacttgaagctttactctacaaatgggatatgaaatgtgtccacattcctcttgagtcttttgatgcagacaaagaagatatagcagaatctacccttccaggaagacatacagttgaaatgctggtcatttcctttgcaaaggacagtctctgaattatacctacaacctgttctgggacagtatcaatactgatgagcaacctggcacacaaactatgagcagaccacttcagcttgagaatgcagtgggtctgaagatggtcaagtctgtttgccttagattttgatgtcacctagacaacacttaaactcatatgaaacaaaaattaaaatacgtattacaagta

SEQ ID NO: 442643 - DNA, 1209 bp, Homo sapiens
ccccacaccccccccccccccacccccccccaacttaaggctaggtacgagctggtggtgcagccgcccgttgccagttctgcgcgtgtgagtctctttcgccttgctccgggctttcttcgctcgcagcgcggcagggttatcaccagatctgggctttccccttcttgccgtcaggtgctacggccacgtggcccgcggcttcccgctcgcgcagtctggcagcccggagccttccgcggtcccccgcccgcccggggcccaacgacgccctactgggcgagcacgatttccgaggacagggggtccgggcccagcgctttcgattctcggaggagccgggtccgggggccgacggggctgtcctggaggtccacgtcccgcaggtgcgtgcagcagcacccgccaggaggcgcctgaggtcctgcatctccagtatggaatgtatgtttggccctgtgctgtggtcctggcccagtacctttggtttcacagaagatctctgccaggcaaggccatcttagagattggagctggagtgagccttccaggaattttggctgccaaatgtggtgcagaagtaatactgtcagacagctcagaactgcctcactgtctggaagtctgtcggcaaagctgccaaatgaataacctgccacatctgcaggtggtaggactaacatggggtcatatatcttgggatcttctggctctaccaccacaagatattatccttgcatctgatgtgttctttgaaccagaagattttgaagacattttggctacaatatattttttgatgcacaagaatcccaaggtccaattgtggtctacttatcaagttaggagtgctgactggtcacttgaagctttactctacaaatgggatatgaaatgtgtccacattcctcttgagtcttttgatgcagacaaagaagatatagcagaatctacccttccaggaagacatacagttgaaatgctggtcatttcctttgcaaaggacagtctctgaattatacctacaacctgttctgggacagtatcaatactgatgagcaacctggcacacaaactatgagcagaccacttcagcttgagaatgcagtgggtctgaagatggtcaagtctgtttgccttagattttgatgtcacctagacaacacttaaactcatatgaaacaaaaattaaaatacgtattacaagta

SEQ ID NO: 442644 - DNA, 875 bp, Homo sapiens
ccccacaccccccccccccccacccccccccaacttaaggctaggtacgagctggtggtgcagccgcccgttgccagttctgcgcgtgtcctgcatctccagtatggaatgtatgtttggccctgtgctgtggtcctggcccagtacctttggtttcacagaagatctctgccaggcaaggccatcttagagattggagctggagtgagccttccaggaattttggctgccaaatgtggtgcagaagtaatactgtcagacagctcagaactgcctcactgtctggaagtctgtcggcaaagctgccaaatgaataacctgccacatctgcaggtggtaggactaacatggggtcatatatcttgggatcttctggctctaccaccacaagatattatccttgcatctgatgtgttctttgaaccagaagattttgaagacattttggctacaatatattttttgatgcacaagaatcccaaggtccaattgtggtctacttatcaagttaggagtgctgactggtcacttgaagctttactctacaaatgggatatgaaatgtgtccacattcctcttgagtcttttgatgcagacaaagaagatatagcagaatctacccttccaggaagacatacagttgaaatgctggtcatttcctttgcaaaggacagtctctgaattatacctacaacctgttctgggacagtatcaatactgatgagcaacctggcacacaaactatgagcagaccacttcagcttgagaatgcagtgggtctgaagatggtcaagtctgtttgccttagattttgatgtcacctagacaacacttaaactcatatgaaacaaaaattaaaatacgtattacaagta

SEQ ID NO: 442645 - DNA, 1421 bp, Homo sapiens
ccccacaccccccccccccccacccccccccaacttaaggctaggtacgagctggtggtgcagccgcccgttgccagttctgcgcgtgtgagtctctttcgccttgctccgggctttcttcgctcgcagcgcggcagggttatcaccagatctgggctttccccttcttgccgtcaggtgctacggccacgtggcccgcggcttcccgctcgcgcagtctggcagcccggagccttccgcggtcccccgcccgcccggggcccaacgacgccctactgggcgagcacgatttccgaggacagggggtccgggcccagcgctttcgattctcggaggagccgggtccgggggccgacggggctgtcctggaggtccacgtcccgcaggtgcgtgcagcagcacccgccaggaggcgcctgaggtcaggagcggatgtcggctgacttggctgggttcctgagggaccgggggtgcggacgctcagctgcgcagcttcctgctttaggttgacccccggagcaaaaacgtcggatatgaagcccttcggtgcattaaatgtctctcagtaagaattttggagaccctgccaagaagtgaccctggtcactatgttggtcaggctggtctcgaactgtaagcttaagtgatcctcctgcctcggcctcccaaagtgctaggattacaggcatgagccactgcgccgggccggctttctccacatcgaatctttcctgccagattggagctggagtgagccttccaggaattttggctgccaaatgtggtgcagaagtaatactgtcagacagctcagaactgcctcactgtctggaagtctgtcggcaaagctgccaaatgaataacctgccacatctgcaggtggtaggactaacatggggtcatatatcttgggatcttctggctctaccaccacaagatattatccttgcatctgatgtgttctttgaaccagaagattttgaagacattttggctacaatatattttttgatgcacaagaatcccaaggtccaattgtggtctacttatcaagttaggagtgctgactggtcacttgaagctttactctacaaatgggatatgaaatgtgtccacattcctcttgagtcttttgatgcagacaaagaagatatagcagaatctacccttccaggaagacatacagttgaaatgctggtcatttcctttgcaaaggacagtctctgaattatacctacaacctgttctgggacagtatcaatactgatgagcaacctggcacacaaactatgagcagaccacttcagcttgagaatgcagtgggtctgaagatggtcaagtctgtttgccttagattttgatgtcacctagacaacacttaaactcatatgaaacaaaaattaaaatacgtattacaagta

SEQ ID NO: 442646 - DNA, 1286 bp, Homo sapiens
ccccacaccccccccccccccacccccccccaacttaaggctaggtacgagctggtggtgcagccgcccgttgccagttctgcgcgtgtgagtctctttcgccttgctccgggctttcttcgctcgcagcgcggcagggttatcaccagatctgggctttccccttcttgccgtcaggtgctacggccacgtggcccgcggcttcccgctcgcgcagtctggcagcccggagccttccgcggtcccccgcccgcccggggcccaacgacgccctactgggcgagcacgatttccgaggacagggggtccgggcccagcgctttcgattctcggaggagccgggtccgggggccgacggggctgtcctggaggtccacgtcccgcaggtgcgtgcagcagcacccgccaggaggcgcctgaggtcctgcatctccagtatggaatgtatgtttggccctgtgctgtggtcctggcccagtacctttggtttcacagaagatctctgccaggcaaggccatcttagagattggagctggagtgagccttccaggaattttggctgccaaatgtggtgcagaagtaatactgtcagacagctcagaactgcctcactgtctggaagtctgtcggcaaagctgccaaatgaataacctgccacatctgcaggtggtaggactaacatggggtcatatatcttgggatcttctggctctaccaccacaagatattatccttgcatctgatgtgttctttgaaccagaaggtaagcttttttggctcaatagtacatttggccagtgatgctatatgaaaatctattcataaatcctttctcctcagattttgaagacattttggctacaatatattttttgatgcacaagaatcccaaggtccaattgtggtctacttatcaagttaggagtgctgactggtcacttgaagctttactctacaaatgggatatgaaatgtgtccacattcctcttgagtcttttgatgcagacaaagaagatatagcagaatctacccttccaggaagacatacagttgaaatgctggtcatttcctttgcaaaggacagtctctgaattatacctacaacctgttctgggacagtatcaatactgatgagcaacctggcacacaaactatgagcagaccacttcagcttgagaatgcagtgggtctgaagatggtcaagtctgtttgccttagattttgatgtcacctagacaacacttaaactcatatgaaacaaaaattaaaatacgtattacaagta

SEQ ID NO: 442647 - DNA, 982 bp, Homo sapiens
tgtgcccatcacttccggtcgcgccagccgcccgttgccagttctgcgcgtgtcctgcatctccagtatggaatgtatgtttggccctgtgctgtggtcctggcccagtacctttggtttcacagaagatctctgccaggcaaggccatcttagagattggagctggagtgagccttccaggaattttggctgccaaatgtggtgcagaagtaatactgtcagacagctcagaactgcctcactgtctggaagtctgtcggcaaagctgccaaatgaataacctgccacatctgcaggtggtaggactaacatggggtcatatatcttgggatcttctggctctaccaccacaagatattatccttgcatctgatgtgttctttgaaccagaagattttgaagacattttggctacaatatattttttgatgcacaagaatcccaaggtccaattgtggtctacttatcaagttaggaggcaagtatggatgacccttactttttatatgtaacttaagccttactctaccctacccatgcgatacataatttaagaatagaatacatctgaagcaaaacagaaaaggcatgactttaaaagaacaactttttttttttaagtgctgactggtcacttgaagctttactctacaaatgggatatgaaatgtgtccacattcctcttgagtcttttgatgcagacaaagaagatatagcagaatctacccttccaggaagacatacagttgaaatgctggtcatttcctttgcaaaggacagtctctgaattatacctacaacctgttctgggacagtatcaatactgatgagcaacctggcacacaaactatgagcagaccacttcagcttgagaatgcagtgggtctgaagatggtcaagtctgtttgccttagattttgatgtcacctagacaacacttaaactcatatgaaacaaaaattaaaatacgtattacaagta

SEQ ID NO: 442648 - DNA, 1127 bp, Homo sapiens
agaagtattgcgccgttggtgattacggaagaaccaggagtttggcgtgaccatggtgagagaagacggtccaagaagggacgttatcaggccactttttgggtggagaaggaggggaagcaaaagaaaacaaggaagtatgcgaccatgaagcgaatgcttagtctcagagatcagaggcttaaagaaaaggatagattaaaacctaaaaagaaagaaaagaaggatcccagcgcattaaaggaaagagaagttccccaacacccttcctgcttatttttccaatataatacacagctgggcccaccttaccacatcctcgttgataccaactttatcaacttttccataaaagccaaactggacttagtgcagtcaatgatggactgtctgtatgccaagtgtatcccatgtataaccgattgtgtaatggctgaaattgagaaattggggcagaagtatcgagtggctctaaggattgccaaggatccaagatttgaacgattaccatgtacacacaaaggaacctatgcagatgactgcttagtacagagagtaactcagcataagtgttacattgtggccacagttgaccgggacctgaaaagaagaatccgtaagattcctggagttcctatcatgtacatttctaaccatagatacaacattgaacggatgccagatgattatggagcccctcgattctaattcttacaagacacagttcctctgcctttcttcgaccaactttctcttgttgccagttcattacacaaaatgtagcgggatttttaaggaatcagagagaactgtctcaaaaaaaaaaaaaaaaattaatgatggtcaaagggtataaaatctcagacaggaagaatatgttttatgctttttttgagttctgttgtacagtgtggtgcctatacttaataatggggtattatacatttcaaaattgatgttctcatcacagaaatgtatttgaagtattgcatatgttaactagcttgatttaactattccatattgtatccacaatttatgatatcactttgtaacccatacatttatacaattataaattgtcaatttacaataaaaaatttttgttgcgtctttttagaaatcag

SEQ ID NO: 442649 - DNA, 1635 bp, Homo sapiens
agaagtattgcgccgttggtgattacggaagaaccaggagtttggcgtgaccatggtgagagaagacggtccaagaagggacgttatcaggccactttttgggtggagaaggaggtagtcagaccgtggccaaatttccttcacattatcctagcatattttcattctggtcttagctcttaaacttctccaagcggtgactgttatgctttacagagtggggaagagggtctgggttatttgaggcaagaagggaaggcaatagacaagagaaaagaagagactttaaaagatgccgtgtgtttccaacttttttaattctaaaatttctgtttcaaggggaagcaaaagaaaacaaggaagtatgcgaccatgaagcgaatgcttagtctcagagatcagaggctgtgagtgtctggaatcaactgcccagggatattctaataagagtctagagaggataagtagtaaaaatgtttgttgttattattttgttttttgcttattatcgtgtcttagatttatatagcatgagatagccagtgtttaacagtaatttagctgctgagcgatcacactgggaaaggcgttgggaattaaacatttcttaagtgttcactttttctaccgttatatgctttgtctgccatatcgcatttaaacctcatgtcagttcggtgaagtccgtatagttctctttatgtttttaccattacactactacattcccctggggtggggcgaggggagtgtttcttgttgaaagatggcaaggttagagaccttgtttgtctggcgtttccagtgcctggtactcaaatatttttgtcagagaaaatgggaaaactccaagatatctccattttataagtcttactaatataagaatccaaatcactgtggaagaagaaagtgaagtgaaattccctagtatgaagaggatcaaagcggtgtccctgcttaagtgtagaataagcatagctattaaataaagactgatcttcactgagtttaagagtctcagaaagccgggcgcagtggctcacgcctgtaatcccagcactttgggaggctgaggcgggtggatcacctgaggtgaggagttcaaaaccagcctggccaacacggtgaaaccctgtctccactaaaaacacaaaaaagagtctcagaataagagaatagtcgttaaaaccttcagaattattattctcagcctttagtgtggatgtattgtgtaatttttaggaatgacactccattaataataatttctttctagttaagggttaagttctgtatatgcgtttttacattttagccctttataagaagcatatggggtaatacttttcccccaaaagttaaagcatctgaatcttcagaagataactgtcacccttttacccattgcttggaagtggattgtgatccttgatgtgagagattctgactaaaaaataaatatagtataatcagcttttatttactcattaacaattcttatgcattattggcattactggttaattctgatacttccaggtactgtgctttgcactagagttatttgctcagaaagagtatgctgatattaacatgaggatatcacaaagtaggatttcttcagtagaccaa

SEQ ID NO: 442650 - DNA, 1667 bp, Homo sapiens
agaagtattgcgccgttggtgattacggaagaaccaggagtttggcgtgaccatggggaagcaaaagaaaacaaggaagtatgcgaccatgaagcgaatgcttagtctcagagatcagaggcttaaagaaaaggatagattaaaacctaaaaagaaagaaaagaaggatcccagcgcattaaaggaaagagaagttccccaacacccttcctgcttatttttccaatataatacacagctgggcccaccttaccacatcctcgttgataccaactttatcaacttttccataaaagccaaactggacttagtgcagtcaatgatggactgtctgtatgccaagtgtatcccatgtataaccgattgtgtaatggctgaaattgagaaattggggcagaagtatcgagtggctctaaggattgccaaggatccaagatttgaacgattaccatgtacacacaaaggaacctatgcagatgactgcttagtacagagagtaactcagcataagtgttacattgtggccacagttgaccgggacctgaaaagaagaatccgtaagattcctggagttcctatcatgtacatttctaaccatagatacaacattgaacggatgccagatgattatggagcccctcgattctaattcttacaagacacagttcctctgcctttcttcgaccaactttctcttgttgccagttcattacacaaaatgtagcgggatttttaaggaatcagagagactgatggagttcagggagatatttattatttaggtgcaccagcccagtcagattaacatccaaaggactgaaccctgaacagagttaagttaccttttaagcattttgtggggccgcgggggttggggggaatctgtgcagggggaagcatattacagaagcaagaaagacagttattcaattaactgagacatgcattacatcatttcttacttttcaaggaaaatcatgttttacgacttgagtttatctgtctagttaccttgcagctgcacagctagagaaacagggtatttacaatgcctgggaaaggaggagagataaggctcactagccacagaaaaacaggcagttaatttttaaaggactccagctctttctctttctcacggggaattggattttcttacatgcaactgaatttctgcttacacatttttaaatttcttttaattgcttttccaatgcaatagcatgaattattattctgttgacctatttgccttactatgagctgagggtagttcaatatgctcactctttttttttttttttcttgagatgaagttttgctcttccagcctgggtgacggagtgagactgtctcaaaaaaaaaaaaaaaaattaatgatggtcaaagggtataaaatctcagacaggaagaatatgttttatgctttttttgagttctgttgtacagtgtggtgcctatacttaataatggggtattatacatttcaaaattgatgttctcatcacagaaatgtatttgaagtattgcatatgttaactagcttgatttaactattccatattgtatccacaatttatgatatcactttgtaacccatacatttatacaattataaattgtcaatttacaataaaaaatttttgttgcgtctttttagaaatcag

SEQ ID NO: 442651 - DNA, 1653 bp, Homo sapiens
agaagtattgcgccgttggtgattacggaagaaccaggagtttggcgtgaccatggggaagcaaaagaaaacaaggaagtatgcgaccatgaagcgaatgcttagtctcagagatcagaggcttaaagaaaaggatagattaaaacctaaaaagaaagaaaagaaggatcccagcgcattaaaggaaagagaagttccccaacacccttcctgcttatttttccaatataatacacagctgggcccaccttaccacatcctcgttgataccaactttatcaacttttccataaaagccaaactggacttagtgcagtcaatgatggactgtctgtatgccaagtgtatcccatgtataaccgattgtgtaatggctgaaattgagaaattggggcagaagtatcgagtggctctaaggattgccaaggatccaagatttgaacgattaccatgtacacacaaaggaacctatgcagatgactgcttagtacagagagtaactcagcataagtgttacattgtggccacagttgaccgggacctgaaatacaacattgaacggatgccagatgattatggagcccctcgattctaattcttacaagacacagttcctctgcctttcttcgaccaactttctcttgttgccagttcattacacaaaatgtagcgggatttttaaggaatcagagagactgatggagttcagggagatatttattatttaggtgcaccagcccagtcagattaacatccaaaggactgaaccctgaacagagttaagttaccttttaagcattttgtggggccgcgggggttggggggaatctgtgcagggggaagcatattacagaagcaagaaagacagttattcaattaactgagacatgcattacatcatttcttacttttcaaggaaaatcatgttttacgacttgagtttatctgtctagttaccttgcagctgcacagctagagaaacagggtatttacaatgcctgggaaaggaggagagataaggctcactagccacagaaaaacaggcagttaatttttaaaggactccagctctttctctttctcacggggaattggattttcttacatgcaactgaatttctgcttacacatttttaaatttcttttaattgcttttccaatgcaatagcatgaattattattctgttgacctatttgccttactatgagctgagggcaggagaacctcttgaacccaggaggtggaggttgcagtgagctgagattgcgccactgcagcctgggcgccgagatagcgccattgcattccattccagcctgggtgacggagtgagactgtctcaaaaaaaaaaaaaaaaattaatgatggtcaaagggtataaaatctcagacaggaagaatatgttttatgctttttttgagttctgttgtacagtgtggtgcctatacttaataatggggtattatacatttcaaaattgatgttctcatcacagaaatgtatttgaagtattgcatatgttaactagcttgatttaactattccatattgtatccacaatttatgatatcactttgtaacccatacatttatacaattataaattgtcaatttacaataaaaaatttttgttgcgtctttttagaaatcag

SEQ ID NO: 442652 - DNA, 958 bp, Homo sapiens
agaagtattgcgccgttggtgattacggaagaaccaggagtttggcgtgaccatggggaagcaaaagaaaacaaggaagtatgcgaccatgaagcgaatgcttagtctcagagatcagaggcttaaagaaaaggatagattaaaacctaaaaagaaagaaaagaaggatcccagcgcattaaaggaaagagaagttccccaacacccttcctgcttatttttccaatataatacacagctgggcccaccttaccacatcctcgttgataccaactttatcaacttttccataaaagccaaactggacttagtgcagtcaatgatggactgtctgtatgccaagtgtatcccatgtataaccgattgtgtaatggctgaaattgagaaattggggcagaagtatcgagtggctctaaggattgccaaggatccaagatttgaacgattaccatgtacacacaaaggaacctatgcagatgactgcttagtacagagagtaactcagcataagtgttacattgtggccacagttgaccgggacctgaaaagaagaatccgtaagattcctggagttcctatcatgtacatttctaaccataggtgagaaatttcccttggagaagggaatagaaatatataattgatatcaattgaaaatgaggataagtgataaggttataaaggatttgaaagaaattattgtatcaaatgtttacatagttatatttgaagaaatgagacaaagcaagagcaagagcaaaagagagagataggatttaaggaatgaggcaaacatttaaattgttagagtaagattactggaagaaatagacgtattgttttaaataaaagcagtaatttaaatcaagctaatctttttggccagaaatacctgttttgaaagatttttttttattaacacttcatctgagaaatggaaagcttatttaaaaaaaaa

SEQ ID NO: 442653 - DNA, 649 bp, Homo sapiens
agaagtattgcgccgttggtgattacggaagaaccaggagtttggcgtgaccatggggaagcaaaagaaaacaaggaagtatgcgaccatgaagcgaatgcttagtctcagagatcagaggcttaaagaaaaggatagattaaaacctaaaaagaaagaaaagaaggatcccagcgcattaaaggaaagagaagttccccaacacccttcctgcttatttttccaatataatacacagctgggcccaccttaccacatcctcgttgataccaactttatcaacttttccataaaagccaaactggacttagtgcagtcaatgatggactgtctgtatgccaagtgtatcccatgtataaccgattgtgtaatggctgaaattgagaaattggggcagaagtatcgagtggctctaaggattgccaaggatccaagatttgaacgattaccatgtacacacaaaggaacctatgcagatgactgcttagtacagagagtaactcaggtattatcagttcataactgtttactttgtgcttaaaaaaaaaaaatgtaaactattatctcctgaatgttcatggtcagtaaaacatctaggaatatacattatggttaaattaaaaaaaaattgcatagcattccttcataa

SEQ ID NO: 442654 - DNA, 1707 bp, Homo sapiens
agaagtattgcgccgttggtgattacggaagaaccaggagtttggcgtgaccatggggaagcaaaagaaaacaaggaagtatgcgaccatgaagcgaatgcttagtctcagagatcagaggcttaaagaaaaggatagattaaaacctaaaaagaaagaaaagaaggatcccagcgcattaaaggaaagagaagttccccaacacccttcctgcttatttttccaatataatacacagctgggcccaccttaccacatcctcgttgataccaactttatcaacttttccataaaagccaaactggacttagtgcagtcaatgatggactgtctgtatgccaagtgtatcccatgtataaccgattgtgtaatggctgaaattgagaaattggggcagaagtatcgagtggctctaaggattgccaaggatccaagatttgaacgattaccatgtacacacaaaggaacctatgcagatgactgcttagtacagagagtaactcagcataagtgttacattgtggccacagttgaccgggacctgaaaagaagaatccgtaagattcctggagttcctatcatgtacatttctaaccatagatacaacattgaacggatgccagatgattatggagcccctcgattctaattcttacaagacacagttcctctgcctttcttcgaccaactttctcttgttgccagttcattacacaaaatgtagcgggatttttaaggaatcagagagactgatggagttcagggagatatttattatttaggtgcaccagcccagtcagattaacatccaaaggactgaaccctgaacagagttaagttaccttttaagcattttgtggggccgcgggggttggggggaatctgtgcagggggaagcatattacagaagcaagaaagacagttattcaattaactgagacatgcattacatcatttcttacttttcaaggaaaatcatgttttacgacttgagtttatctgtctagttaccttgcagctgcacagctagagaaacagggtatttacaatgcctgggaaaggaggagagataaggctcactagccacagaaaaacaggcagttaatttttaaaggactccagctctttctctttctcacggggaattggattttcttacatgcaactgaatttctgcttacacatttttaaatttcttttaattgcttttccaatgcaatagcatgaattattattctgttgacctatttgccttactatgagctgagggcaggagaacctcttgaacccaggaggtggaggttgcagtgagctgagattgcgccactgcagcctgggcgccgagatagcgccattgcattccattccagcctgggtgacggagtgagactgtctcaaaaaaaaaaaaaaaaattaatgatggtcaaagggtataaaatctcagacaggaagaatatgttttatgctttttttgagttctgttgtacagtgtggtgcctatacttaataatggggtattatacatttcaaaattgatgttctcatcacagaaatgtatttgaagtattgcatatgttaactagcttgatttaactattccatattgtatccacaatttatgatatcactttgtaacccatacatttatacaattataaattgtcaatttacaataaaaaatttttgttgcgtctttttagaaatcag

SEQ ID NO: 442655 - DNA, 1367 bp, Homo sapiens
agaagtattgcgccgttggtgattacggaagaaccaggagtttggcgtgaccatggggaagcaaaagaaaacaaggaagtatgcgaccatgaagcgaatgcttagtctcagagatcagaggcttaaagaaaaggatagattaaaacctaaaaagaaagaaaagaaggatcccagcgcattaaaggaaagagaagttccccaacacccttcctgcttatttttccaatataatacacagctgggcccaccttaccacatcctcgttgataccaactttatcaacttttccataaaagccaaactggacttagtgcagtcaatgatggactgtctgtatgccaagtgtatcccatgtataaccgattgtgtaatggctgaaattgagaaattggggcagaagtatcgagtggctctaaggattgccaaggatccaagatttgaacgattaccatgtacacacaaaggaacctatgcagatgactgcttagtacagagagtaactcagcataagtgttacattgtggccacagttgaccgggacctgaaaagaagaatccgtaagattcctggagttcctatcatgtacatttctaaccatagatacaacattgaacggatgccagatgattatggagcccctcgattctaattcttacaagacacagttcctctgcctttcttcgaccaactttctcttgttgccagttcattacacaaaatgtagcgggatttttaaggaatcagagagactgatggagttcagggagatatttattatttaggtgcaccagcccagtcagattaacatccaaaggactgaaccctgaacagagttaagttaccttttaagcattttgtggggccgcgggggttggggggaatctgtgcagggggaagcatattacagaagcaagaaagacagttattcaattaactgagacatgcattacatcatttcttacttttcaaggaaaatcatgttttacgacttgagtttatctgtctagttaccttgcagctgcacttccagcctgggtgacggagtgagactgtctcaaaaaaaaaaaaaaaaattaatgatggtcaaagggtataaaatctcagacaggaagaatatgttttatgctttttttgagttctgttgtacagtgtggtgcctatacttaataatggggtattatacatttcaaaattgatgttctcatcacagaaatgtatttgaagtattgcatatgttaactagcttgatttaactattccatattgtatccacaatttatgatatcactttgtaacccatacatttatacaattataaattgtcaatttacaataaaaaatttttgttgcgtctttttagaaatcag

SEQ ID NO: 442656 - DNA, 1639 bp, Homo sapiens
gacggaagaaccaggagtttggcgtgaccatggggaagcaaaagaaaacaaggaataaagaaaaggatagattaaaacctaaaaagaaagaaaagaaggatcccagcgcattaaaggaaagagaagttccccaacacccttcctgcttatttttccaatataatacacagctgggcccaccttaccacatcctcgttgataccaactttatcaacttttccataaaagccaaactggacttagtgcagtcaatgatggactgtctgtatgccaagtgtatcccatgtataaccgattgtgtaatggctgaaattgagaaattggggcagaagtatcgagtggctctaaggattgccaaggatccaagatttgaacgattaccatgtacacacaaaggaacctatgcagatgactgcttagtacagagagtaactcagcataagtgttacattgtggccacagttgaccgggacctgaaaagaagaatccgtaagattcctggagttcctatcatgtacatttctaaccatagatacaacattgaacggatgccagatgattatggagcccctcgattctaattcttacaagacacagttcctctgcctttcttcgaccaactttctcttgttgccagttcattacacaaaatgtagcgggatttttaaggaatcagagagactgatggagttcagggagatatttattatttaggtgcaccagcccagtcagattaacatccaaaggactgaaccctgaacagagttaagttaccttttaagcattttgtggggccgcgggggttggggggaatctgtgcagggggaagcatattacagaagcaagaaagacagttattcaattaactgagacatgcattacatcatttcttacttttcaaggaaaatcatgttttacgacttgagtttatctgtctagttaccttgcagctgcacagctagagaaacagggtatttacaatgcctgggaaaggaggagagataaggctcactagccacagaaaaacaggcagttaatttttaaaggactccagctctttctctttctcacggggaattggattttcttacatgcaactgaatttctgcttacacatttttaaatttcttttaattgcttttccaatgcaatagcatgaattattattctgttgacctatttgccttactatgagctgagggcaggagaacctcttgaacccaggaggtggaggttgcagtgagctgagattgcgccactgcagcctgggcgccgagatagcgccattgcattccattccagcctgggtgacggagtgagactgtctcaaaaaaaaaaaaaaaaattaatgatggtcaaagggtataaaatctcagacaggaagaatatgttttatgctttttttgagttctgttgtacagtgtggtgcctatacttaataatggggtattatacatttcaaaattgatgttctcatcacagaaatgtatttgaagtattgcatatgttaactagcttgatttaactattccatattgtatccacaatttatgatatcactttgtaacccatacatttatacaattataaattgtcaatttacaataaaaaatttttgttgcgtctttttagaaatcag

SEQ ID NO: 442657 - DNA, 1279 bp, Homo sapiens
gtccgacccctaataatgagagcccactggacataactacggggtaagtatcctcccattaaaaccaacctagaaattgtcaggaagctcaagttgttaatgggagaaaacaacctggaaacggagaggatgccatcccataaagaagaaaggtggaagaagcggtatgaggtcgttaatggaaagctgacaaacacagggactgtcaaaatgcttcctccactcgaaacacctctcttttctggcagtgcctacttcgtggtcagtagggagtatgtggggtatgtactacagaatgaaaaaatccaaaagttgatggagtgggcacaagacacatacagccctgatgagtatctctgggccaccatccaaaggattcctgaagtcccgggctcactccctgccagccataagtatgatctgtctgacatgcaagcagttgccaggtttgtcaagtggcagtactttgagggtgatgtttccaagggtgctccctacccgccctgcgatggagtccatgtgcgctcagtgtgcattttcggagctggtgacttgaactggatgctgcgcaaacaccacttgtttgccaataagtttgacgtggatgttgacctctttgccatccagtgtttggatgagcatttgagacacaaagctttggagacattaaaacactgaccattacgggcaattttatgaacaagaagaaggatacacaaaacgtacccttatctgtttccccttccttgtcagcgtcgggaagatggtatgaagtcctctttggggcagggactctagtagatcttcttgtcagagaagctgcatggtttctgcagagcacagttagctagaaaggtgatagcattaaatgttcatctagagttaatagtgggaggagtaaaggtagccttgaggccagagcaggtagcaaggcattgtggaaagaggggaccagggtggctggggaagaggccgatgcataaagtcagcctgttcaaagtgctcagggacttagcaaaatgagaagatgtgacctgtgccaaaactattttgagaattttaaatgtgaccatttttctggtatgaataaacttacagcaacaaataatcaaagatacaattaatctgatattatatttgttgaaatagaaatttgattgtactataaatgatttttgtaaataatttatattctgctctaatactgtactgtgtagtgtgtctccgtatgtcatctcagggagcttaaaatgggcttgatttaacattgaaaaaaaat

SEQ ID NO: 442658 - DNA, 2179 bp, Homo sapiens
agatttctttaaagactcgtgcagcacatcattatcgctggatgcccggacatgtaatacacctgacagcatgtgaagtgctcagaatggggcaggatgtcacctggaatcagcactaagtgattcagactttccttacttttaaatgtgctgctcttcatttcaagatgccgttgcagctctgataaatgcaaactgacaaccttcaaggccacgacggagggaaaatcattggtgcttggagcatagaagactgcccttcacaaaggaaatccctgattattgtttgaaatgctgaggacgttgctgcgaaggagacttttttcttatcccaccaaatactactttatggttcttgttttatccctaatcaccttctccgttttaaggattcatcaaaagcctgaatttgtaagtgtcagacacttggagcttgctggggagaatcctagtagtgatattaattgcaccaaagttttacagggtgatgtaaatgaaatccaaaaggtaaagcttgagatcctaacagtgaaatttaaaaagcgccctcggtggacacctgacgactatataaacatgaccagtgactgttcttctttcatcaagagacgcaaatatattgtagaaccccttagtaaagaagaggcggagtttccaatagcatattctatagtggttcatcacaagattgaaatgcttgacaggctgctgagggccatctatatgcctcagaatttctattgcattcatgtggacacaaaatccgaggattcctatttagctgcagtgatgggcatcgcttcctgttttagtaatgtctttgtggccagccgattggagagtgtggtttatgcatcgtggagccgggttcaggctgacctcaactgcatgaaggatctctatgcaatgagtgcaaactggaagtacttgataaatctttgtggtatggattttcccattaaaaccaacctagaaattgtcaggaagctcaagttgttaatgggagaaaacaacctggaaacggagaggatgccatcccataaagaagaaaggtggaagaagcggtatgaggtcgttaatggaaagctgacaaacacagggactgtcaaaatgcttcctccactcgaaacacctctcttttctggcagtgcctacttcgtggtcagtagggagtatgtggggtatgtactacagaatgaaaaaatccaaaagttgatggagtgggcacaagacacatacagccctgatgagtatctctgggccaccatccaaaggattcctgaagtcccgggctcactccctgccagccataagtatgatctgtctgacatgcaagcagttgccaggtttgtcaagtggcagtactttgagggtgatgtttccaagggtgctccctacccgccctgcgatggagtccatgtgcgctcagtgtgcattttcggagctggtgacttgaactggatgctgcgcaaacaccacttgtttgccaataagtttgacgtggatgttgacctctttgccatccagtgtttggatgagcatttgagacacaaagctttggagacattaaaacactgaccattacgggcaattttatgaacaagaagaaggatacacaaaacgtacccttatctgtttccccttccttgtcagcgtcgggaagatggtatgaagtcctctttggggcagggactctagtagatcttcttgtcagagaagctgcatggtttctgcagagcacagttagctagaaaggtgatagcattaaatgttcatctagagttaatagtgggaggagtaaaggtagccttgaggccagagcaggtagcaaggcattgtggaaagaggggaccagggtggctggggaagaggccgatgcataaagtcagcctgttcaaagtgctcagggacttagcaaaatgagaagatgtgacctgtgccaaaactattttgagaattttaaatgtgaccatttttctggtatgaataaacttacagcaacaaataatcaaagatacaattaatctgatattatatttgttgaaatagaaatttgattgtactataaatgatttttgtaaataatttatattctgctctaatactgtactgtgtagtgtgtctccgtatgtcatctcagggagcttaaaatgggcttgatttaacattgaaaaaaaat

SEQ ID NO: 442659 - DNA, 2358 bp, Homo sapiens
agatttctttaaagactcgtgcagcacatcattatcgctggatgcccggacatgtaatacacctgacagcatgtgaagtgctcagaatggggcaggatgtcacctggaatcagcactaagtgattcagactttccttacttttaaatgggctgctgacaccagctaatggacattaaaacatgtcaggaggaacttaaattactaacgatttcaagaacaaggggtggtaattctggcacagtgtcagaaactcatcaactatagactgttcaatcattattgcctaggcgtccaactatggttttgcacctcaacataccaaagagtgctgctcttcatttcaagatgccgttgcagctctgataaatgcaaactgacaaccttcaaggccacgacggagggaaaatcattggtgcttggagcatagaagactgcccttcacaaaggaaatccctgattattgtttgaaatgctgaggacgttgctgcgaaggagacttttttcttatcccaccaaatactactttatggttcttgttttatccctaatcaccttctccgttttaaggattcatcaaaagcctgaatttgtaagtgtcagacacttggagcttgctggggagaatcctagtagtgatattaattgcaccaaagttttacagggtgatgtaaatgaaatccaaaaggtaaagcttgagatcctaacagtgaaatttaaaaagcgccctcggtggacacctgacgactatataaacatgaccagtgactgttcttctttcatcaagagacgcaaatatattgtagaaccccttagtaaagaagaggcggagtttccaatagcatattctatagtggttcatcacaagattgaaatgcttgacaggctgctgagggccatctatatgcctcagaatttctattgcattcatgtggacacaaaatccgaggattcctatttagctgcagtgatgggcatcgcttcctgttttagtaatgtctttgtggccagccgattggagagtgtggtttatgcatcgtggagccgggttcaggctgacctcaactgcatgaaggatctctatgcaatgagtgcaaactggaagtacttgataaatctttgtggtatggattttcccattaaaaccaacctagaaattgtcaggaagctcaagttgttaatgggagaaaacaacctggaaacggagaggatgccatcccataaagaagaaaggtggaagaagcggtatgaggtcgttaatggaaagctgacaaacacagggactgtcaaaatgcttcctccactcgaaacacctctcttttctggcagtgcctacttcgtggtcagtagggagtatgtggggtatgtactacagaatgaaaaaatccaaaagttgatggagtgggcacaagacacatacagccctgatgagtatctctgggccaccatccaaaggattcctgaagtcccgggctcactccctgccagccataagtatgatctgtctgacatgcaagcagttgccaggtttgtcaagtggcagtactttgagggtgatgtttccaagggtgctccctacccgccctgcgatggagtccatgtgcgctcagtgtgcattttcggagctggtgacttgaactggatgctgcgcaaacaccacttgtttgccaataagtttgacgtggatgttgacctctttgccatccagtgtttggatgagcatttgagacacaaagctttggagacattaaaacactgaccattacgggcaattttatgaacaagaagaaggatacacaaaacgtacccttatctgtttccccttccttgtcagcgtcgggaagatggtatgaagtcctctttggggcagggactctagtagatcttcttgtcagagaagctgcatggtttctgcagagcacagttagctagaaaggtgatagcattaaatgttcatctagagttaatagtgggaggagtaaaggtagccttgaggccagagcaggtagcaaggcattgtggaaagaggggaccagggtggctggggaagaggccgatgcataaagtcagcctgttcaaagtgctcagggacttagcaaaatgagaagatgtgacctgtgccaaaactattttgagaattttaaatgtgaccatttttctggtatgaataaacttacagcaacaaataatcaaagatacaattaatctgatattatatttgttgaaatagaaatttgattgtactataaatgatttttgtaaataatttatattctgctctaatactgtactgtgtagtgtgtctccgtatgtcatctcagggagcttaaaatgggcttgatttaacattgaaaaaaaat

SEQ ID NO: 442660 - DNA, 1661 bp, Homo sapiens
agttccaagtagcataatatactcaggagtttaaaatcatttaacattcaaggaaatacaccaccaggagcaaaagatcaacagtcagaaaagtcagacccataaagacttcagaatacatgatattgcatgtttaatatatttaatccaataaaagaagtgggtgataagatgagggccttcaaaaaataggtgtatttgagagcttttttggaggttctagcaggggagtgcagctactcatataccctggaccaaagaccgctcctcctctattggaggtggtcgtcctcttcgaccaagcgcacagcttcaggagggacgcacatggagcggtgagggaagaaggggacaccacctagccatccagatcagctaaccaaccctggtgattgatggagtgacagatggtgcagccacatcaccctcacatccaaaaaaataggtgtatttgaaaaagaaccaaaaagaggccgggtgcagtggctcacacctataatcccagcactttgggaggccaaggcaggcggattatttgaggtcaggagttcaagcccagcttggccaacatggtgaaaccctgtctttactaaaaatacaaaagtcaattgggtgtggtggcacatgcctgtaatcccagctactcaggaggctgaggcataagaatcgcttgagcctgggaggcagaggttgcagttagccaacctccgcctcccaggctcaagtgaggcctgcaccagagtgagactctgtctttaaaaaataaaagagtttgtagaacttaaaagtataatcattgaaattaaaaattcatttcaggccgggtgcagtggctcatgcctgtaatcctagcaatttgggaggccaaggcaggcagatcacttgaggtcaggagttcatgaccagcctggccaacatagtgaaaccccatctctactaaaaatacaaaaattagctggaaatcacttgaacccaggaggcggaggttgcagtgagccaagattgtgccactgcacaccagcctgggtgacagagtgagactccatctcaaaaaaaaaagaagaaattaaaaattcagtggacacgttaaacagattaaatgcagctgaagagagaattagtgaaatggaagataaatctagaaaattattcacagtgcaacacagaaaaatggaaaagtagaaaatataagggaaagttgagaggcgtggaggttacagaggagagttctagcaaaagataattaagagaatggggcaaaagcaataactgaagagataagagcacagcattttccagaatcaaagacataacatttttagattaaggaaacacagtaaatcccaaactggataaaagcattattttatttgcaaatagcatgattgtgtatgtagaaaatcctaatgaatctacaaaaaagctactagaactaataatttagcaagatcacaagaatacaaggtcaacatacaaaattaaattgtatttctatatatatgcagtggacaattggaaaaatgatttttaaaatcaaataccagctggatgcgtacttcacgcttgtaatcccagcactttgggaggccgaggtgggtagatcacttgagcccaggaatttgagactagcctgggcaagatggcaaaaccgtctctacaat

SEQ ID NO: 442661 - DNA, 1235 bp, Homo sapiens
ctcaaaaaaaaaaaaaaaaaaagaattgagtaagtggaattttgactggagctgctcctgaaagtattgaaagagtcattgctaatggtgggctcttgctagaccagggtcaagtccacttttgctgcctctcaggttgtggaattctccttgatcacttctgcaattcatttccttgccaaatctcagccaagcatcaccccaaggtctgtaagtagcagagatcggagctgctgggtctggctttgctgaggccggtgtcgctgtcagaacaggcacgccaagatcttggctgggtccctcacaggccagatgaatggtgtgaagaaaccttcctgccttattcagactggcgcggaggtctcaatgaggcgaggcatttgtccattatggggatgaatcgtgctctcagaagagaatcctgtcattgaggttttgtttcaatagtcctctctttttctccagagaactgttgtctcattgttaataatagcagcgtggctttttcagatgctggttggtggctgctgtacattttaaaaatggaatctcatggttgtgtctcttaaggaagcttttcaagaactttactggcaccagaggttatcagagtttgaagtttgggtgcctagtgtctcacagtgtttaagcactaatgttctgggtcagttaggtgtgagtacaaatcccatctcagctcattctgagagggaccttggctaattgctttctcctctccaagcctcagtttccacatctctaaaatcggcctgcaagtagtgtgtgcctaaggttgttgtaagtttcaatgaactcgaatgcggctgagtgcctgagagcacctgttgctgtgggtatcatcaccgtgtgtgttttctgtcttctcatccacttttctttgtgcagtctgcacacacaccattaaaggctgatgacagcatttttacgaattgcaaacagaggccagcgcggtggctcccagcactttgggaggccgaggcaggtggatcacgaggtcaggagttcgagaacagcctggccaggatggtgaaaccccgtctctactaaaaatgcaaaaattagctgggtgtggtggcatgccccctgtaatcccagctactcaggaggctgaggcagagaattgcttaaaaacccaggaggtggaggttgcagtgagctgagaatcgtgccagtgcactccagcctgggtgacagagcaagatcttctgtctcgg

SEQ ID NO: 442662 - DNA, 1227 bp, Homo sapiens
  misc_feature (1199)..(1199): n is a, c, g, or t
ctcaaaaaaaaaaaaaaaaaaagaattgagtaagtggaattttgactggagctgctcctgaaagtattgaaagagtcattgctaatggtgggctcttgctagaccagggtcaagtccacttttgctgcctctcaggttgtggaattctccttgatcacttctgcaattcatttccttgccaaatctcagccaagcatcaccccaaggtctgtaagtagcagagatcggagctgctgggtctggctttgctgaggccggtgtcgctgtcagaacaggcacgccaagatcttggctgggtccctcacaggccagatgaatggtgtgaagaaaccttcctgccttattcagactggcgcggaggtctcaatgaggcgaggcatttgtccattatggggatgaatcgtgctctcagaagagaatcctgtcattgaggttttgtttcaatagtcctctctttttctccagagaactgttgtctcattgttaataatagcagcgtggctttttcagatgctggttggtggctgctgtacattttaaaaatggaatctcatggttgtgtctcttaaggaagcttttcaagaactttactggcaccagaggttatcagagtttgaagtttgggtgcctagtgtctcacagtgtttaagcactaatgttctgggtcagttaggtgtgagtacaaatcccatctcagctcattctgagagggaccttggctaattgctttctcctctccaagcctcagtttccacatctctaaaatcggcctgcaagtagtgtgtgcctaaggttgttgtaagtttcaatgaactcgaatgcggctgagtgcctgagagcacctgttgctgtgggtatcatcaccgtgtgtgttttctgtcttctcatccacttttctttgtgcagtctgcacacacaccattaaaggctgatgacagcatttttacgaattgcaaacagaggccagcgcggtggctcccagcactttgggaggccgaggcaggtggatcacgaggtcaggagttcgagaacagcctggccaggatggtgaaaccccgtctctactaaaaatgcaaaaattagctgggtgtggtggcatgccccctgtaatcccagctactcaggaggctgaggcagaagatcccgctccgtcacccaggctggaggcactggacgacctcagctcactgcaacctccnacactcgggtctttaagcaattctctgg

SEQ ID NO: 442663 - DNA, 1185 bp, Homo sapiens
cggcacgagccccaaacccactccaccttactaccagacaaccttagccaaaccatttacccagataaagtataggcgatagaaattgaaacctggcgcaatagatatagtaccgcaagggaaagatgaaaaattataaccaagcatcaccccaaggtctgtaagtagcagagatcggagctgctgggtctggctttgctgaggccggtgtcgctgtcagaacaggcacgccaagatcttggctgggtccctcacaggccagatgaatggtgtgaagaaaccttcctgccttattcagactggcgcggaggtctcaatgaggcgaggcatttgtccattatggggatgaatcgtgctctcagaagagaatcctgtcattgaggttttgtttcaatagtcctctctttttctccagagaactgttgtctcattgttaataatagcagcgtggctttttcagatgctggttggtggctgctgtacattttaaaaatggaatctcatggttgtgtctcttaaggaagcttttcaagaactttactggcaccagaggttatcagagtttgaagtttgggtgcctagtgtctcacagtgtttaagcactaatgttctgggtcagttaggtgtgagtacaaatcccatctcagctcattctgagagggaccttggctaattgctttctcctctccaagcctcagtttccacatctctaaaatcggcctgcaagtagtgtgtgcctaaggttgttgtaagtttcaatgaactcgaatgcggctgagtgcctgagagcacctgttgctgtgggtatcatcaccgtgtgtgttttctgtcttctcatccacttttctttgtgcagtctgcacacacaccattaaaggctgatgacagcatttttacgaattgcaaacagaggccagcgcggtggctcccagcactttgggaggccgaggcaggtggatcacgaggtcaggagttcgagaacagcctggccaggatggtgaaaccccgtctctactaaaaatgcaaaaattagctgggtgtggtggcatgccccctgtaatcccagctactcaggaggctgaggcagagaattgcttaaaaacccaggaggtggaggttgcagtgagctgagaatcgtgccagtgcactccagcctgggtgacagagcaagatcttctgtctcgg

SEQ ID NO: 442664 - DNA, 2177 bp, Homo sapiens
aagatttgttttgcaaggtttgtggagagctgatgcggtagtgaggctaagacgaggggtatttacttgctacttacattgagtccactaacatctgcagcactttgcttgcattatccacgcaattatcacgggaaacctataaaataagtattcctctcctcattttacaaatagggaagcagataagatttagaaaatttcccaaactcacacaattattaaatgacagaactaggactcaaacccaggttttattaattttagagacatgtttttaaccacttggacactgccaaccatggaattgttggtatgaaaaaaacgtactcttgagttatattatccatggtcttaatatcagagaagtgcagttgagtcgctattaaagaatatggtaaaattataaaatggatactatacaaaggtataaaaatattataaatacttatgtttggggtaaaaggatcaaagtagccatgctcagtggaagggtaaggaactcttagcagagattgattaattgggagataattgattaattgggagttgattgattaattgggatttattaatttgggagtaggtaggaagataggaagttgtataaaataagggagagataacttagtacctggaaaaaaagaaatggaaataggtagaagctaagagttcaattaaaaaaaaggaataaaagatattggaagggaacgatgaatgtagcatggaagatccaagatgatgggagttcaggggctaattacagctatggggaaaaagtaatgtataagctggaagccagagataagagccatgtaaatgaagaagttgggccccaataggaaagaattataaggactagaaggagcaggagccatgtggaaaaatatcatgtagtacttttaagcttgatctgtcatctgtagcaaaaccagcatgcttgagtactgaattgacctgactgaactatgttgaaatgtactgtggttttatatccatatgcacttggtctgtggagttgtgggaaaagcatcagtgagtaggaagcccaaggatttgggtcaagtattaaatatgctatttactgtctagctatgtgaccttatataagtcacttgtggtctctgagccttcatgtattcatccataagatgagttgttgtttatattaaatgggatgtggtatgttaaagagctgaatgcatagtgatacagaattactttctgtaatactattttttaaatattttaaatgaaaaattaatgaacttataaattaaaagattcaaaagggataaaaaggtatacaatgaaaagcaattctccttcccaccagtaactctgtcctactccttaggacattcaccataaacagatatcctgaattcttctagaaatattatatataaaatcttatatttcttatgtttcttttttactattttaaaggggataaactaaactttgctttttttcatataataatatattctggagatcattttctaaaagcacatgtaaacatacctcattattataaaggtttgaaaatatcaatttatttgacctgtcccctctcgatagataattagattgtatccatccctttggttattaccaacagacactaatcacttatcatgtacatatagcctgttttttagcattgttagacaaagtaggcatattcctttccatccaagaactcataacctagtaattgtagttggctgatagctcattgcccatacacaaggatctaacacaacctcttgaataaacatcccccttattcagaaatgccttttcctatttccatattgcaactttgcttacaaatttccaatctgtctttctgtttacagaagatatacaaaattccttttgtatgatctctttatatctcttgattttcttttgtgtttgctaccaaagggcctgcacatagtgagaagattgtgcatgatctgtgagctctaccacacctggaattaggaatcaccaatatgagaaaaaaaattggaggtacaaataacattatcatatgtaattggcatataaattacagatgtatctatgactaaaaaccctgtggatataaaccaaatgcagataaatataataaaatatataaaaatataatcaaataatgatagtgctattcaaatacttcaaat

SEQ ID NO: 442665 - DNA, 1321 bp, Homo sapiens
  misc_feature (48)..(48): n is a, c, g, or t
  misc_feature (50)..(50): n is a, c, g, or t
ggctcctggctcctgtttgacaagttactgttacacgtgtttgtttantnacagactctttctcaaaagtataaggcgaagtggtaacagtaacttgtcaaacaggagccaggagcagagaaacacgtgtaacacaaatagtaactatacatggaggtctagccctcgccttttttttttctttttttcttttttaatggagatcattctataccagcatgtaagtagcaaggaacctcattctttttttggctgcctaaaatttttttgaatagatataacataattgatttaatctgctactggtgaatgcttaggttgttcttttgctattacagtgataacttcaatcctaatgttattaagcatatcgattcagggtatagctataagatgaagtcctaaaagtataatttagactaaatacaaatacccatttcgctagctgttttgtttcagaggacttgttgagcagcttcactaataatgccatttttgaagacatggcaggttcagaatcaataaactggaagaattgttcagagcatcttttttcagacagtgatgacattgattctgtatatgataaagtgattctgcttctctttgacaacttgcatctctcctacatggaagtaagttttattcctgtcaatgttgtctttgtgtgtgacagattaggattaaattatggtttgacttttcctagcagcgtgatccatgggcaagtggcttatttttttttttttttttgagacagagtctcactctgctgcccaggctggagtgcagtggcacagtcttggctcactgcaactcctgcctcccggtccaagtgattctcgtgctgcagcttctcaagtagctggcatcaccaccacacctggctaatttttgtatttttagtaacgacgaggtttcaccatgttggcaaagctggtctcaaattcctggcctcaagtgatctgcccacttcagcctcccaaagtgttgggattacaggcgtgagccactgcgcccggcttttttaaacttttagattcatttaataggtaaattgcatgtcacgggtttgtagcttattctttcagaaactcttgcattatctgtagacgtggacgtaaatatccacctcatagggttttcataaaaaataattgagataatgtatgtaatgtttcacagtgctttgcagactatctaataaatagtagctattagtacaaaaaaaacaaaacaaacacacaaacaccaaaaaaaggggggggggcaaaaaaacccgcgggggggcccatagcgccccgtttttgacaaaggggcc

SEQ ID NO: 442666 - DNA, 551 bp, Homo sapiens
ggcgtggcgtgacccggaagtcgacgaggggttccgccccccccgcgcatggggaggtaggctcggaccggcccgcggagctgctgcagtccttcgcgccctcctcgccctccccaccgacatcatgctccagttcctgcttggatttacactgggcaacgtggttggaatgtatctggctcagaactatgatataccaaacctggctaaaaaacttgaagaaattaaaaaggacttggatgccaagaagaaaccccctagtgcatgagactgcctccagcactgccttcaggatatactgattctactgctcttgagggcctcgtttactatctgaaccaaaagcttttgttttcgtctccagcctcagcacttctcttctttgctagaccctgtgttttttgctttaaagcaagcaaaatggggccccaatttgagaactacccgacatttccaacatactcacctcttcccataatccctttccaactgcatgggaggttctaagactggaattatggtgctagattagtaaacatgacttttaatga

SEQ ID NO: 442667 - DNA, 2613 bp, Homo sapiens
ggcgtggcgtgacccggaagtcgacgaggggttccgccccccccgcgcatggggaggtaggctcggaccggcccgcggagctgctgcagtccttcgcgccctcctcgccctccccaccgacatcatgctccagttcctgcttggatttacactgggcaacgtggttggaatgtatctggctcagaactatgatataccaaacctggctaaaaaacttgaagaaattaaaaaggacttggatgccaagaagaaaccccctagtgcatgagactgcctccagcactgccttcaggatatactgattctactgctcttgagggcctcgtttactatctgaaccaaaagcttttgttttcgtctccagcctcagcacttctcttctttgctagaccctgtgttttttgctttaaagcaagcaaaatggggccccaatttgagaactacccgacatttccaacatactcacctcttcccataatccctttccaactgcatgggaggttctaagactggaattatggtgctagattagtaaacatgacttttaatgagtagtgtcttctttatcgtttgcgatttttactaccttttttcaaaagaaaaattgatgagtttgtatagctggtcagatacaaataatagtgacttcacagtttagtaattataatgggtacttgttaaacatttggtactaaattatgttgctgcaaagtaattaaaattagtatctagagctagtttctggtgaattattcatttattttgtactgttgttaggcagctctgtagttgctaatttaaccaataagtcaatttgctattcatgaagaaacgattctgagaatcctgtcaggaattggggaatgaaaaaatacacaaaataatggtctttgtcccagtagagttcatagtctatttagtgtgcatgtttttccttaatgatgtatttgatctgacttttttccttctcaaaagaatcatacttgggattacaggtacatttgatgttatatgatggataagtgaaaagtttttaaaggagattttataccttttcacattaaaaaaggtatttatattattactttgtagtgattgtcttaagaaaaaatatagcccaaatgtatagtaaaatcagcagctcaagaagaatttctgcttctctttgtagttgatgctttgttttttcctgcagtcagaaattccttgtatttgtcaaatgtataatcagcttgtattgtttttaaattaaaaaaaaatttgaataattaacttttgccatgggacaagatacaaaagtaatttcatataaagggcctctcccacccctgttctctggctcctggctcctgtttgacaagttactgttaccacttcgccttatacttttgagaaagagtctgtgcctaaacaaacacgtgtaacacaaatagtaactatacatggaggtctagccctcgccttttttttttctttttttcttttttaatggagatcattctataccagcatgtaagtagcaaggaacctcattctttttttggctgcctaaaatttttttgaatagatataacataattgatttaatctgctactggtgaatgcttaggttgttcttttgctattacagtgataacttcaatcctaatgttattaagcatatcgattcagggtatagctataagatgaagtcctaaaagtataatttagactaaatacaaatacccatttcgctagctgttttgtttcagaggacttgttgagcagcttcactaataatgccatttttgaagacatggcaggttcagaatcaataaactggaagaattgttcagagcatcttttttcagacagtgatgacattgattctgtatatgataaagtgattctgcttctctttgacaacttgcatctctcctacatggaagtaagttttattcctgtcaatgttgtctttgtgtgtgacagattaggattaaattatggtttgacttttcctagcagcgtgatccatgggcaagtggcttatttttttttttttttttgagacagagtctcactctgctgcccaggctggagtgcagtggcacagtcttggctcactgcaactcctgcctcccggtccaagtgattctcgtgctgcagcttctcaagtagctggcatcaccaccacacctggctaatttttgtatttttagtaacgacgaggtttcaccatgttggcaaagctggtctcaaattcctggcctcaagtgatctgcccacttcagcctcccaaagtgttgggattacaggcgtgagccactgcgcccggcttttttaaacttttagattcatttaataggtaaattgcatgtcacgggtttgtagcttattctttcagaaactcttgcattatctgtagacgtggacgtaaatatccacctcatagggttttcataaaaaataattgagataatgtatgtaatgtttcacagtgctttgcagactatctaataaatagtagctattagtacaaaaaaaacaaaacaaacacacaaacaccaaaaaaaggggggggggcaaaaaaacccgcgggggggcccatagcgccccgtttttgacaaaggggcc

SEQ ID NO: 442668 - DNA, 963 bp, Homo sapiens
  misc_feature (817)..(818): n is a, c, g, or t
ggcgtggcgtgacccggaagtcgacgaggggttccgccccccccgcgcatggggaggtaggctcggaccggcccgcggagctgctgcagtccttcgcgccctcctcgccctccccaccgacatcatgctccagttcctgcttggatttacactgggcaacgtggttggaatgtatctggctcagaactatgatataccaaacctggctaaaaaacttgaagaaattaaaaaggacttggatgccaagaagaaaccccctagtgcatgagactgcctccagcactgccttcaggatatactgattctactgctcttgagggcctcgtttactatctgaaccaaaagcttttgttttcgtctccagcctcagcacttctcttctttgctagaccctgtgttttttgctttaaagcaagcaaaatggggccccaatttgagaactacccgacatttccaacatactcacctcttcccataatccctttccaactgcatgggaggttctaagactggaattatggtgctagattagtaaacatgacttttaatgagtagtgtcttctttatcgtttgcgatttttactaccttttttcaaaagaaaaattgatgagtttgtatagctggtcagatacaaataatagtgacttcacagtttagtaattataatgggtacttgttaaacatttggtactaaattatgttgctgcaaagtaattaaaattagtatctagagctagtttctggtgaattattcatttattttgtactgttgttaggcagctctgtagttgctaatttaaccaataagtcaattgnntcatgagaacgttctggatctggggattggggatgaaatcccaatatggttggccgaagtcaacaaggggggtgccaggaaagaagagtccaaaaaggaaggaagggtgagagaaagggtaaaaatttagggtggaggaaaaaag

SEQ ID NO: 442669 - DNA, 2563 bp, Homo sapiens
gaccggcccgcggagccccctttttggggcccttggcagtccttcgcgccctcctcgccctccccaccgacatcatgctccagttcctgcttggatttacactgggcaacgtggttggaatgtatctggctcagaactatgatataccaaacctggctaaaaaacttgaagaaattaaaaaggacttggatgccaagaagaaaccccctagtgcatgagactgcctccagcactgccttcaggatatactgattctactgctcttgagggcctcgtttactatctgaaccaaaagcttttgttttcgtctccagcctcagcacttctcttctttgctagaccctgtgttttttgctttaaagcaagcaaaatggggccccaatttgagaactacccgacatttccaacatactcacctcttcccataatccctttccaactgcatgggaggttctaagactggaattatggtgctagattagtaaacatgacttttaatgagtagtgtcttctttatcgtttgcgatttttactaccttttttcaaaagaaaaattgatgagtttgtatagctggtcagatacaaataatagtgacttcacagtttagtaattataatgggtacttgttaaacatttggtactaaattatgttgctgcaaagtaattaaaattagtatctagagctagtttctggtgaattattcatttattttgtactgttgttaggcagctctgtagttgctaatttaaccaataagtcaatttgctattcatgaagaaacgattctgagaatcctgtcaggaattggggaatgaaaaaatacacaaaataatggtctttgtcccagtagagttcatagtctatttagtgtgcatgtttttccttaatgatgtatttgatctgacttttttccttctcaaaagaatcatacttgggattacaggtacatttgatgttatatgatggataagtgaaaagtttttaaaggagattttataccttttcacattaaaaaaggtatttatattattactttgtagtgattgtcttaagaaaaaatatagcccaaatgtatagtaaaatcagcagctcaagaagaatttctgcttctctttgtagttgatgctttgttttttcctgcagtcagaaattccttgtatttgtcaaatgtataatcagcttgtattgtttttaaattaaaaaaaaatttgaataattaacttttgccatgggacaagatacaaaagtaatttcatataaagggcctctcccacccctgttctctggctcctggctcctgtttgacaagttactgttaccacttcgccttatacttttgagaaagagtctgtgcctaaacaaacacgtgtaacacaaatagtaactatacatggaggtctagccctcgccttttttttttctttttttcttttttaatggagatcattctataccagcatgtaagtagcaaggaacctcattctttttttggctgcctaaaatttttttgaatagatataacataattgatttaatctgctactggtgaatgcttaggttgttcttttgctattacagtgataacttcaatcctaatgttattaagcatatcgattcagggtatagctataagatgaagtcctaaaagtataatttagactaaatacaaatacccatttcgctagctgttttgtttcagaggacttgttgagcagcttcactaataatgccatttttgaagacatggcaggttcagaatcaataaactggaagaattgttcagagcatcttttttcagacagtgatgacattgattctgtatatgataaagtgattctgcttctctttgacaacttgcatctctcctacatggaagtaagttttattcctgtcaatgttgtctttgtgtgtgacagattaggattaaattatggtttgacttttcctagcagcgtgatccatgggcaagtggcttatttttttttttttttttgagacagagtctcactctgctgcccaggctggagtgcagtggcacagtcttggctcactgcaactcctgcctcccggtccaagtgattctcgtgctgcagcttctcaagtagctggcatcaccaccacacctggctaatttttgtatttttagtaacgacgaggtttcaccatgttggcaaagctggtctcaaattcctggcctcaagtgatctgcccacttcagcctcccaaagtgttgggattacaggcgtgagccactgcgcccggcttttttaaacttttagattcatttaataggtaaattgcatgtcacgggtttgtagcttattctttcagaaactcttgcattatctgtagacgtggacgtaaatatccacctcatagggttttcataaaaaataattgagataatgtatgtaatgtttcacagtgctttgcagactatctaataaatagtagctattagtacaaaaaaaacaaaacaaacacacaaacaccaaaaaaaggggggggggcaaaaaaacccgcgggggggcccatagcgccccgtttttgacaaaggggcc

SEQ ID NO: 442670 - DNA, 2509 bp, Homo sapiens
gaccggcccgcggagccccctttttggggcccttggcagtccttcgcgccctcctcgccctccccaccgacatcatgctccagttcctgataccaaacctggctaaaaaacttgaagaaattaaaaaggacttggatgccaagaagaaaccccctagtgcatgagactgcctccagcactgccttcaggatatactgattctactgctcttgagggcctcgtttactatctgaaccaaaagcttttgttttcgtctccagcctcagcacttctcttctttgctagaccctgtgttttttgctttaaagcaagcaaaatggggccccaatttgagaactacccgacatttccaacatactcacctcttcccataatccctttccaactgcatgggaggttctaagactggaattatggtgctagattagtaaacatgacttttaatgagtagtgtcttctttatcgtttgcgatttttactaccttttttcaaaagaaaaattgatgagtttgtatagctggtcagatacaaataatagtgacttcacagtttagtaattataatgggtacttgttaaacatttggtactaaattatgttgctgcaaagtaattaaaattagtatctagagctagtttctggtgaattattcatttattttgtactgttgttaggcagctctgtagttgctaatttaaccaataagtcaatttgctattcatgaagaaacgattctgagaatcctgtcaggaattggggaatgaaaaaatacacaaaataatggtctttgtcccagtagagttcatagtctatttagtgtgcatgtttttccttaatgatgtatttgatctgacttttttccttctcaaaagaatcatacttgggattacaggtacatttgatgttatatgatggataagtgaaaagtttttaaaggagattttataccttttcacattaaaaaaggtatttatattattactttgtagtgattgtcttaagaaaaaatatagcccaaatgtatagtaaaatcagcagctcaagaagaatttctgcttctctttgtagttgatgctttgttttttcctgcagtcagaaattccttgtatttgtcaaatgtataatcagcttgtattgtttttaaattaaaaaaaaatttgaataattaacttttgccatgggacaagatacaaaagtaatttcatataaagggcctctcccacccctgttctctggctcctggctcctgtttgacaagttactgttaccacttcgccttatacttttgagaaagagtctgtgcctaaacaaacacgtgtaacacaaatagtaactatacatggaggtctagccctcgccttttttttttctttttttcttttttaatggagatcattctataccagcatgtaagtagcaaggaacctcattctttttttggctgcctaaaatttttttgaatagatataacataattgatttaatctgctactggtgaatgcttaggttgttcttttgctattacagtgataacttcaatcctaatgttattaagcatatcgattcagggtatagctataagatgaagtcctaaaagtataatttagactaaatacaaatacccatttcgctagctgttttgtttcagaggacttgttgagcagcttcactaataatgccatttttgaagacatggcaggttcagaatcaataaactggaagaattgttcagagcatcttttttcagacagtgatgacattgattctgtatatgataaagtgattctgcttctctttgacaacttgcatctctcctacatggaagtaagttttattcctgtcaatgttgtctttgtgtgtgacagattaggattaaattatggtttgacttttcctagcagcgtgatccatgggcaagtggcttatttttttttttttttttgagacagagtctcactctgctgcccaggctggagtgcagtggcacagtcttggctcactgcaactcctgcctcccggtccaagtgattctcgtgctgcagcttctcaagtagctggcatcaccaccacacctggctaatttttgtatttttagtaacgacgaggtttcaccatgttggcaaagctggtctcaaattcctggcctcaagtgatctgcccacttcagcctcccaaagtgttgggattacaggcgtgagccactgcgcccggcttttttaaacttttagattcatttaataggtaaattgcatgtcacgggtttgtagcttattctttcagaaactcttgcattatctgtagacgtggacgtaaatatccacctcatagggttttcataaaaaataattgagataatgtatgtaatgtttcacagtgctttgcagactatctaataaatagtagctattagtacaaaaaaaacaaaacaaacacacaaacaccaaaaaaaggggggggggcaaaaaaacccgcgggggggcccatagcgccccgtttttgacaaaggggcc

SEQ ID NO: 442671 - DNA, 2397 bp, Homo sapiens
actatctgaaccaaaagcagtagaatcagtatatcctgaaggcagtgctggaggcagtctcatgcactgccttcaggatatactgattctactgctcttgagggcctcgtttactatctgaaccaaaagcttttgttttcgtctccagcctcagcacttctcttctttgctagaccctgtgttttttgctttaaagcaagcaaaatggggccccaatttgagaactacccgacatttccaacatactcacctcttcccataatccctttccaactgcatgggaggttctaagactggaattatggtgctagattagtaaacatgacttttaatgagtagtgtcttctttatcgtttgcgatttttactaccttttttcaaaagaaaaattgatgagtttgtatagctggtcagatacaaataatagtgacttcacagtttagtaattataatgggtacttgttaaacatttggtactaaattatgttgctgcaaagtaattaaaattagtatctagagctagtttctggtgaattattcatttattttgtactgttgttaggcagctctgtagttgctaatttaaccaataagtcaatttgctattcatgaagaaacgattctgagaatcctgtcaggaattggggaatgaaaaaatacacaaaataatggtctttgtcccagtagagttcatagtctatttagtgtgcatgtttttccttaatgatgtatttgatctgacttttttccttctcaaaagaatcatacttgggattacaggtacatttgatgttatatgatggataagtgaaaagtttttaaaggagattttataccttttcacattaaaaaaggtatttatattattactttgtagtgattgtcttaagaaaaaatatagcccaaatgtatagtaaaatcagcagctcaagaagaatttctgcttctctttgtagttgatgctttgttttttcctgcagtcagaaattccttgtatttgtcaaatgtataatcagcttgtattgtttttaaattaaaaaaaaatttgaataattaacttttgccatgggacaagatacaaaagtaatttcatataaagggcctctcccacccctgttctctggctcctggctcctgtttgacaagttactgttaccacttcgccttatacttttgagaaagagtctgtgcctaaacaaacacgtgtaacacaaatagtaactatacatggaggtctagccctcgccttttttttttctttttttcttttttaatggagatcattctataccagcatgtaagtagcaaggaacctcattctttttttggctgcctaaaatttttttgaatagatataacataattgatttaatctgctactggtgaatgcttaggttgttcttttgctattacagtgataacttcaatcctaatgttattaagcatatcgattcagggtatagctataagatgaagtcctaaaagtataatttagactaaatacaaatacccatttcgctagctgttttgtttcagaggacttgttgagcagcttcactaataatgccatttttgaagacatggcaggttcagaatcaataaactggaagaattgttcagagcatcttttttcagacagtgatgacattgattctgtatatgataaagtgattctgcttctctttgacaacttgcatctctcctacatggaagtaagttttattcctgtcaatgttgtctttgtgtgtgacagattaggattaaattatggtttgacttttcctagcagcgtgatccatgggcaagtggcttatttttttttttttttttgagacagagtctcactctgctgcccaggctggagtgcagtggcacagtcttggctcactgcaactcctgcctcccggtccaagtgattctcgtgctgcagcttctcaagtagctggcatcaccaccacacctggctaatttttgtatttttagtaacgacgaggtttcaccatgttggcaaagctggtctcaaattcctggcctcaagtgatctgcccacttcagcctcccaaagtgttgggattacaggcgtgagccactgcgcccggcttttttaaacttttagattcatttaataggtaaattgcatgtcacgggtttgtagcttattctttcagaaactcttgcattatctgtagacgtggacgtaaatatccacctcatagggttttcataaaaaataattgagataatgtatgtaatgtttcacagtgctttgcagactatctaataaatagtagctattagtacaaaaaaaacaaaacaaacacacaaacaccaaaaaaaggggggggggcaaaaaaacccgcgggggggcccatagcgccccgtttttgacaaaggggcc

SEQ ID NO: 442672 - DNA, 2004 bp, Homo sapiens
  misc_feature (9)..(9): n is a, c, g, or t
tgccagcantatgattcttttgagaaggaaaaaagtcagatcaaatacatcattaaggaaaaacatgcacactaaatagactatgaactctactgggacaaagtaattaaaattagtatctagagctagtttctggtgaattattcatttattttgtactgttgttaggcagctctgtagttgctaatttaaccaataagtcaatttgctattcatgaagaaacgattctgagaatcctgtcaggaattggggaatgaaaaaatacacaaaataatggtctttgtcccagtagagttcatagtctatttagtgtgcatgtttttccttaatgatgtatttgatctgacttttttccttctcaaaagaatcatacttgggattacaggtacatttgatgttatatgatggataagtgaaaagtttttaaaggagattttataccttttcacattaaaaaaggtatttatattattactttgtagtgattgtcttaagaaaaaatatagcccaaatgtatagtaaaatcagcagctcaagaagaatttctgcttctctttgtagttgatgctttgttttttcctgcagtcagaaattccttgtatttgtcaaatgtataatcagcttgtattgtttttaaattaaaaaaaaatttgaataattaacttttgccatgggacaagatacaaaagtaatttcatataaagggcctctcccacccctgttctctggctcctggctcctgtttgacaagttactgttaccacttcgccttatacttttgagaaagagtctgtgcctaaacaaacacgtgtaacacaaatagtaactatacatggaggtctagccctcgccttttttttttctttttttcttttttaatggagatcattctataccagcatgtaagtagcaaggaacctcattctttttttggctgcctaaaatttttttgaatagatataacataattgatttaatctgctactggtgaatgcttaggttgttcttttgctattacagtgataacttcaatcctaatgttattaagcatatcgattcagggtatagctataagatgaagtcctaaaagtataatttagactaaatacaaatacccatttcgctagctgttttgtttcagaggacttgttgagcagcttcactaataatgccatttttgaagacatggcaggttcagaatcaataaactggaagaattgttcagagcatcttttttcagacagtgatgacattgattctgtatatgataaagtgattctgcttctctttgacaacttgcatctctcctacatggaagtaagttttattcctgtcaatgttgtctttgtgtgtgacagattaggattaaattatggtttgacttttcctagcagcgtgatccatgggcaagtggcttatttttttttttttttttgagacagagtctcactctgctgcccaggctggagtgcagtggcacagtcttggctcactgcaactcctgcctcccggtccaagtgattctcgtgctgcagcttctcaagtagctggcatcaccaccacacctggctaatttttgtatttttagtaacgacgaggtttcaccatgttggcaaagctggtctcaaattcctggcctcaagtgatctgcccacttcagcctcccaaagtgttgggattacaggcgtgagccactgcgcccggcttttttaaacttttagattcatttaataggtaaattgcatgtcacgggtttgtagcttattctttcagaaactcttgcattatctgtagacgtggacgtaaatatccacctcatagggttttcataaaaaataattgagataatgtatgtaatgtttcacagtgctttgcagactatctaataaatagtagctattagtacaaaaaaaacaaaacaaacacacaaacaccaaaaaaaggggggggggcaaaaaaacccgcgggggggcccatagcgccccgtttttgacaaaggggcc

SEQ ID NO: 442673 - DNA, 421 bp, Homo sapiens
gaccggcccgcggagccccctttttggggcccttggcagtccttcgcgccctcctcgccctccccaccgacatcatgctccagttcctgggtgagtggagctgccgaagagcggggcccgctgcctggggcgtgcctcggaccccatttcccccttgaggattgccgaccccgccgacccggcctgggcgtgggtccagcggtcccttcgtcccccgcgcctggtcgtcgcctcgcagggcggccgttttcttcctgcctccccagaaaatccctttgccaatatttttctgcagccatccaagtccctaaaactttgaggtgtcagagagtgtgcgtttccagagcttcttattgtgtgccgcgccccgcgctcattgtgcaatctttgtattaaagcttgtgtggtccttgatgaaaat

SEQ ID NO: 442674 - DNA, 501 bp, Homo sapiens
gaccggcccgcggagccccctttttggggcccttggcagtccttcgcgccctcctcgccctccccaccgacatcatgctccagttcctgcttggatttacactgggcaacgtggttggaatgtatctggctcagaactatgatataccaaacctggctaaaaaacttgaagaaattaaaaaggacttggatgccaagaagaaaccccctagtgcatgagactgcctccagcactgccttcaggatatactgattctactgctcttgagggcctcgtttactatctgaaccaaaagcttttgttttcgtctccagcctcagcacttctcttctttgctagaccctgtgttttttgctttaaagcaagcaaaatggggccccaatttgagaactacccgacatttccaacatactcacctcttcccataatccctttccaactgcatgggaggttctaagactggaattatggtgctagattagtaaacatgacttttaatga

SEQ ID NO: 442675 - DNA, 2620 bp, Homo sapiens
aattcgcggccgcgtcgacacggctgcgcagaagacgacagaaggggccccgcgcatggggaggtaggctcggaccggcccgcggagctgctgcagtccttcgcgccctcctcgccctccccaccgacatcatgctccagttcctgcttggatttacactgggcaacgtggttggaatgtatctggctcagaactatgatataccaaacctggctaaaaaacttgaagaaattaaaaaggacttggatgccaagaagaaaccccctagtgcatgagactgcctccagcactgccttcaggatatactgattctactgctcttgagggcctcgtttactatctgaaccaaaagcttttgttttcgtctccagcctcagcacttctcttctttgctagaccctgtgttttttgctttaaagcaagcaaaatggggccccaatttgagaactacccgacatttccaacatactcacctcttcccataatccctttccaactgcatgggaggttctaagactggaattatggtgctagattagtaaacatgacttttaatgagtagtgtcttctttatcgtttgcgatttttactaccttttttcaaaagaaaaattgatgagtttgtatagctggtcagatacaaataatagtgacttcacagtttagtaattataatgggtacttgttaaacatttggtactaaattatgttgctgcaaagtaattaaaattagtatctagagctagtttctggtgaattattcatttattttgtactgttgttaggcagctctgtagttgctaatttaaccaataagtcaatttgctattcatgaagaaacgattctgagaatcctgtcaggaattggggaatgaaaaaatacacaaaataatggtctttgtcccagtagagttcatagtctatttagtgtgcatgtttttccttaatgatgtatttgatctgacttttttccttctcaaaagaatcatacttgggattacaggtacatttgatgttatatgatggataagtgaaaagtttttaaaggagattttataccttttcacattaaaaaaggtatttatattattactttgtagtgattgtcttaagaaaaaatatagcccaaatgtatagtaaaatcagcagctcaagaagaatttctgcttctctttgtagttgatgctttgttttttcctgcagtcagaaattccttgtatttgtcaaatgtataatcagcttgtattgtttttaaattaaaaaaaaatttgaataattaacttttgccatgggacaagatacaaaagtaatttcatataaagggcctctcccacccctgttctctggctcctggctcctgtttgacaagttactgttaccacttcgccttatacttttgagaaagagtctgtgcctaaacaaacacgtgtaacacaaatagtaactatacatggaggtctagccctcgccttttttttttctttttttcttttttaatggagatcattctataccagcatgtaagtagcaaggaacctcattctttttttggctgcctaaaatttttttgaatagatataacataattgatttaatctgctactggtgaatgcttaggttgttcttttgctattacagtgataacttcaatcctaatgttattaagcatatcgattcagggtatagctataagatgaagtcctaaaagtataatttagactaaatacaaatacccatttcgctagctgttttgtttcagaggacttgttgagcagcttcactaataatgccatttttgaagacatggcaggttcagaatcaataaactggaagaattgttcagagcatcttttttcagacagtgatgacattgattctgtatatgataaagtgattctgcttctctttgacaacttgcatctctcctacatggaagtaagttttattcctgtcaatgttgtctttgtgtgtgacagattaggattaaattatggtttgacttttcctagcagcgtgatccatgggcaagtggcttatttttttttttttttttgagacagagtctcactctgctgcccaggctggagtgcagtggcacagtcttggctcactgcaactcctgcctcccggtccaagtgattctcgtgctgcagcttctcaagtagctggcatcaccaccacacctggctaatttttgtatttttagtaacgacgaggtttcaccatgttggcaaagctggtctcaaattcctggcctcaagtgatctgcccacttcagcctcccaaagtgttgggattacaggcgtgagccactgcgcccggcttttttaaacttttagattcatttaataggtaaattgcatgtcacgggtttgtagcttattctttcagaaactcttgcattatctgtagacgtggacgtaaatatccacctcatagggttttcataaaaaataattgagataatgtatgtaatgtttcacagtgctttgcagactatctaataaatagtagctattagtacaaaaaaaacaaaacaaacacacaaacaccaaaaaaaggggggggggcaaaaaaacccgcgggggggcccatagcgccccgtttttgacaaaggggcc

SEQ ID NO: 442676 - DNA, 2749 bp, Homo sapiens
aattcgcggccgcgtcgacacggctgcgcagaagacgacagaaggggccccgcgcatggggaggtaggctcggaccggcccgcggagctgctgcagtccttcgcgccctcctcgccctccccaccgacatcatgctccagttcctggtgctgggatttacacggggcaacgtggtttggaagtgtatcgtggctcagaacctatgtatatacccaaaaaccggtgggtctttaaaaaaaaaaaccttttgcaagaaggaaaacacttttttcaaccacacgacgggggcacccttgtggcgaagtttggccccataagggaagacgggaaaaaagccgctcccttaaaggtgggccatttgacgcacctggcccttcccaggcaactgtggcccttttaccagggggacttacttacctgtggattttcataaccgtgggcctccttttggcagggcctcgtttactatctgaaccaaaagcttttgttttcgtctccagcctcagcacttctcttctttgctagaccctgtgttttttgctttaaagcaagcaaaatggggccccaatttgagaactacccgacatttccaacatactcacctcttcccataatccctttccaactgcatgggaggttctaagactggaattatggtgctagattagtaaacatgacttttaatgagtagtgtcttctttatcgtttgcgatttttactaccttttttcaaaagaaaaattgatgagtttgtatagctggtcagatacaaataatagtgacttcacagtttagtaattataatgggtacttgttaaacatttggtactaaattatgttgctgcaaagtaattaaaattagtatctagagctagtttctggtgaattattcatttattttgtactgttgttaggcagctctgtagttgctaatttaaccaataagtcaatttgctattcatgaagaaacgattctgagaatcctgtcaggaattggggaatgaaaaaatacacaaaataatggtctttgtcccagtagagttcatagtctatttagtgtgcatgtttttccttaatgatgtatttgatctgacttttttccttctcaaaagaatcatacttgggattacaggtacatttgatgttatatgatggataagtgaaaagtttttaaaggagattttataccttttcacattaaaaaaggtatttatattattactttgtagtgattgtcttaagaaaaaatatagcccaaatgtatagtaaaatcagcagctcaagaagaatttctgcttctctttgtagttgatgctttgttttttcctgcagtcagaaattccttgtatttgtcaaatgtataatcagcttgtattgtttttaaattaaaaaaaaatttgaataattaacttttgccatgggacaagatacaaaagtaatttcatataaagggcctctcccacccctgttctctggctcctggctcctgtttgacaagttactgttaccacttcgccttatacttttgagaaagagtctgtgcctaaacaaacacgtgtaacacaaatagtaactatacatggaggtctagccctcgccttttttttttctttttttcttttttaatggagatcattctataccagcatgtaagtagcaaggaacctcattctttttttggctgcctaaaatttttttgaatagatataacataattgatttaatctgctactggtgaatgcttaggttgttcttttgctattacagtgataacttcaatcctaatgttattaagcatatcgattcagggtatagctataagatgaagtcctaaaagtataatttagactaaatacaaatacccatttcgctagctgttttgtttcagaggacttgttgagcagcttcactaataatgccatttttgaagacatggcaggttcagaatcaataaactggaagaattgttcagagcatcttttttcagacagtgatgacattgattctgtatatgataaagtgattctgcttctctttgacaacttgcatctctcctacatggaagtaagttttattcctgtcaatgttgtctttgtgtgtgacagattaggattaaattatggtttgacttttcctagcagcgtgatccatgggcaagtggcttatttttttttttttttttgagacagagtctcactctgctgcccaggctggagtgcagtggcacagtcttggctcactgcaactcctgcctcccggtccaagtgattctcgtgctgcagcttctcaagtagctggcatcaccaccacacctggctaatttttgtatttttagtaacgacgaggtttcaccatgttggcaaagctggtctcaaattcctggcctcaagtgatctgcccacttcagcctcccaaagtgttgggattacaggcgtgagccactgcgcccggcttttttaaacttttagattcatttaataggtaaattgcatgtcacgggtttgtagcttattctttcagaaactcttgcattatctgtagacgtggacgtaaatatccacctcatagggttttcataaaaaataattgagataatgtatgtaatgtttcacagtgctttgcagactatctaataaatagtagctattagtacaaaaaaaacaaaacaaacacacaaacaccaaaaaaaggggggggggcaaaaaaacccgcgggggggcccatagcgccccgtttttgacaaaggggcc

SEQ ID NO: 442677 - DNA, 4062 bp, Homo sapiens
agcggggcattgtgggaagcgcccgcgctttcggcgggttccgttaaaatggcgccctggtggccggcggcgcccgcgccttagcctgtcaggagcagggagcttgcggggcgcaggaagggcgcgggccgcggtccctgcgcgtgcggcggcagtggcggctctgcccggaccaccgtgcacggctccgggcgaggatggcgaccccggaccagaagtcgccgaacgttctgctgcagaacctgtgctgcaggatcctgggcaggagcgaagctgatgtagcccagcagttccagtatgctgtgcgggtgattggcagcaacttcgccccaactgttgaaagagatgaatttttagtagctgaaaaaatcaagaaagagcttattcgacaacgaagagaagcagatgctgcattattttcagaactccacagaaaacttcattcacagggagttttgaaaaataaatggtcaatactctacctcttgctgagcctcagtgaggacccacgcaggcagccaagcaaggtttctagctatgctacgttatttgctcaggccttaccaagagatgcccactcaaccccttactactatgccaggcctcagacccttcccctgagctaccaagatcggagtgcccagtcagcccagagctccggcagcgtgggcagcagtggcatcagcagcattggcctgtgtgccctcagtggccccgcgcctgcgccacaatctctcctcccaggacagtctaatcaagctccaggagtaggagattgccttcgacagcagttggggtcacgactcgcatggactttaactgcaaatcagccttcttcacaagccactacctcaaaaggtgtccccagtgctgtgtctcgcaacatgacaaggtccaggagagaaggggatacgggtggtactatggaaattacagaagcagctctggtaagggacattttgtacgtctttcagggcatagatggcaaaaacatcaaaatgaacaacactgaaaattgttacaaagtagaaggaaaggcaaatctaagtaggtctttgagagacacagcagtcaggctttctgagttgggatggttgcataataaaatcagaagatacacggaccagaggagcctggaccgctcattcggactcgtcgggcagagcttttgtgctgccttgcaccaggaactcagagaatactatcgattgctctctgttttacattctcagctacaactagaggatgaccagggtgtgaatttgggacttgagagtagtttaacacttcggcgcctcctggtttggacctatgatcccaaaatacgactgaagacccttgcggccctagtggaccactgccaaggaaggaaaggaggtgagctggcctcagctgtccacgcctacacaaaaacaggagacccgtacatgcggtctctggtgcagcacatcctcagcctcgtgtctcatcctgttttgagcttcctgtaccgctggatatatgatggggagcttgaggacacttaccacgaattttttgtagcatcagatccaacagttaaaacagatcgactgtggcacgacaagtatactttgaggaaatcgatgattccttcgtttatgacgatggatcagtctaggaaggtccttttgataggaaaatcaataaatttcttgcaccaagtttgtcatgatcagactcccactacaaagatgatagctgtgaccaagtctgcagagtcaccccaggacgctgcagacctattcacagacttggaaaatgcatttcaggggaagattgatgctgcttattttgagaccagcaaatacctgttggatgttctcaataaaaagtacagcttgctggaccacatgcaggcaatgaggcggtacctgcttcttggtcaaggagactttataaggcacttaatggacttgctaaaaccagaacttgtccgtccagctacgactttgtatcagcataacttgactggaattctagaaaccgctgtcagagccaccaacgcacagtttgacagtcctgagatcctgcgaaggctggacgtgcggctgctggaggtctctccaggtgacactggatgggatgtcttcagcctcgattatcatgttgacggaccaattgcaactgtgtttactcgagaatgtatgagccactacctaagagtatttaacttcctctggagggcgaagcggatggaatacatcctcactgacatacggaagggacacatgtgcaatgcaaagctcctgagaaacatgccagagttctccggggtgctgcaccagtgtcacattttggcctctgagatggtccatttcattcatcagatgcagtattacatcacatttgaggtgcttgaatgttcttgggatgagctttggaacaaagtccagcaggcccaggatttggatcacatcattgctgcacacgaggtgttcttagacaccatcatctcccgctgcctgctggacagtgactccagggcacttttaaatcaacttagagctgtgtttgatcaaattattgaacttcagaatgctcaagatgcaatatacagagctgctctggaagaattgcagagacgattacagtttgaagagaaaaagaaacagcgtgaaattgagggccagtggggagtgacggcagcagaggaagaggaggaaaataagaggattggagaatttaaagaatctataccaaaaatgtgctcacagttgcgaatattgacccatttctaccagggtatcgtgcagcagtttttggtgttactgacgaccagctctgacgagagtcttcggtttcttagcttcaggctggacttcaacgagcattacaaagccagggagcccaggctccgtgtgtctctgggtaccagggggcggcgcagctcccacacgtgaagctcgcggtcctcccagggagctgcgggtgatgttcgttgcactgctagacacgaaattcccattgacgtcctgcaggaactgcatgctgcaggtgtcctgcccttccgcccacgagtgcgccatgtttcagcggagcggcgtgtgggagaagccacgtcgtgtttcacatgtcggagtcgaatgcatttgtaaatccctaagtcaagtaggctggctgcactgttcacatttgtctctaaaagtcttcatcgctaaaagataccataatttgctgaggcttcttaagctttctatgttataatttatatttgtcactttaaaaaatccatttcttttagaaaaaattagggtgataggatattcattagttaagatggtaacgtcattgctatttttttaacatcctctttagaggtaatttttgttaacataaccaaaaattaaattgaaacaaaatgtcccaactaagaaaatatatagagcattttatttttttttagtgttgtaaaatattaacctctgtgagatcctttgtatcttaatgcattacctttacacatatttattcttattttctctcctttcagagtttacatttttatatttaatttactatttcagatttttaaaatagtatagaaaaaagtaggagtgatagagaacaaaaatactcttatacagtgcaacccaaataccgcgaatgcatcagctaaagcagcgtgtaaataggagtgatgagaaagttaatggagtattttattttcaaagttcctgataagcattggaaagaaatcgacatggataatgaagatttcctttttccttgcctattttttcattgtaaatatttatatactactgaccaagatgttggggtgggggggattgttttttgtaaaaatgtcattatcaggtcacataaatctgcctttatgttgcataagtgaaaatttagaaaattaaaagcaattatctttcaaaaaaaaaaacagggggggttaaaattccgaggggcaggtaggtaccagtttgtaaagggcctagggggttaagaagagggggggtaaagggggggaaggtgattggagacctctggggaatggaacacaaaaggagaatgtattgaaatcgtgatgta

SEQ ID NO: 442678 - DNA, 2495 bp, Homo sapiens
agcggggcattgtgggaagcgcccgcgctttcggcgggttccgttaaaatggcgccctggtggccggcggcgcccgcgccttagcctgtcaggagcagggagcttgcggggcgcaggaagggcgcgggccgcggtccctgcgcgtgcggcggcagtggcggctctgcccggaccaccgtgcacggctccgggcgaggatggcgaccccggaccagaagtcgccgaacgttctgctgcagaacctgtgctgcaggatcctgggcaggagcgaagctgatgtagcccagcagttccagtatgctgtgcgggtgattggcagcaacttcgccccaactgttgaaagagatgaatttttagtagctgaaaaaatcaagaaagagcttattcgacaacgaagagaagcagatgctgcattattttcagaactccacagaaaacttcattcacagggagttttgaaaaataaatggtcaatactctacctcttgctgagcctcagtgaggacccacgcaggcagccaagcaaggtttctagctatgctacgttatttgctcaggccttaccaagagatgcccactcaaccccttactactatgccaggcctcagacccttcccctgagctaccaagatcggagtgcccagtcagcccagagctccggcagcgtgggcagcagtggcatcagcagcattggcctgtgtgccctcagtggccccgcgcctgcgccacaatctctcctcccaggacagtctaatcaagctccaggagtaggagattgccttcgacagcagttggggtcacgactcgcatggactttaactgcaaatcagccttcttcacaagccactacctcaaaaggtgtccccagtgctgtgtctcgcaacatgacaaggtccaggagagaaggggatacgggtggtactatggaaattacagaagcagctctggtaagggacattttgtacgtctttcagggcatagatggcaaaaacatcaaaatgaacaacactgaaaattgttacaaagtagaaggaaaggcaaatctaagtaggtctttgagagacacagcagtcaggctttctgagttgggatggttgcataataaaatcagaagatacacggaccagaggagcctggaccgctcattcggactcgtcgggcagagcttttgtgctgccttgcaccaggaactcagagaatactatcgattgctctctgttttacattctcagctacaactagaggatgaccagggtgtgaatttgggacttgagagtagtttaacacttcggcgcctcctggtttggacctatgatcccaaaatacgactgaagacccttgcggccctagtggaccactgccaaggtcccacgcgcgtctttcccacgcacgtctttcccacgcgcgactttcccacgcgcgactttcccacgcacgtctttcccacgcgcgtctttcccacgcgcgtctggcactcgctttgtttcagaactcgtttgtagggtgcgccatccaggcttgcttttgtgtcctgcccgtttttgtccttaatggccgtgttgattcgataggaatcgacagatgggagccaagaggggacgtaaccacttgccagtgtggcccagtatttatatggtagaagctcgggctggcattgagatggaggtgggaaagaggagggtgtctcgtgtttaaagatttctctcttgtgtggtccttggttatggctccccatggtgcttgctgctcccttggtcgcctttccttgcattttgctttttgcctttagtccttctgcagtcagggaccatgttggtgactctcggtcagatgttcccatatttgcatgtcttgctttggcctctctggctctaggttctgtattgctagttgctttctgacattttttctcattgtttgtgctaccttggccaagaacctctttgccttctccctcgtttgtaacattgagatcctagtagcagttacttcttagggttgttaggatgacatgagatgggcgagttggccatctgccacacaagagttcccttctcactgccatcctctgcccagggtgttccccagaatctgcagggccccattggtcatcttgctgtctgcacaccttcctctctcacctcttggcacttccctcaaaaaagagagaagtggagcacagtaaataaacgccagcgttttctccagttcccagcacctctccggaactggatcccccaaactcctctgtcactttctgtgtccagcgggcccctggggtccttcactgtcttcactctgctcagcctgtgcgcttggccttggtgctgtagggactgttataagagctgctgtccgatccccatattcaatctcacagccccactttgtgtacacacaccagagccatcttcttaaaatcagatcctgtcactcctctccctaaaatctaccagtggtctaataaaatcttgaatttttagcataaaaaaaaa

SEQ ID NO: 442679 - DNA, 4008 bp, Homo sapiens
agcggggcattgtgggaagcgcccgcgctttcggcgggttccgttaaaatggcgccctggtggccggcggcgcccgcgccttagcctgtcaggagcagggagcttgcggggcgcaggaagggcgcgggccgcggtccctgcgcgtgcggcggcagtggcggctctgcccggaccaccgtgcacggctccgggcgaggatggcgaccccggaccagaagtcgccgaacgttctgctgcagaacctgtgctgcaggatcctgggcaggagcgaagctgatgtagcccagcagttccagtatgctgtgcgggtgattggcagcaacttcgccccaactgttgaaagagatgaatttttagtagctgaaaaaatcaagaaagagcttattcgacaacgaagagaagcagatgctgcattattttcagaactccacagaaaacttcattcacagggagttttgaaaaataaatggtcaatactctacctcttgctgagcctcagtgaggacccacgcaggcagccaagcaaggtttctagctatgctacgttatttgctcaggccttaccaagagatgcccactcaaccccttactactatgccaggcctcagacccttcccctgagctaccaagatcggagtgcccagtcagcccagagctccggcagcgtgggcagcagtggcatcagcagcattggcctgtgtgccctcagtggccccgcgcctgcgccacaatctctcctcccaggacagtctaatcaagctccaggagtaggagattgccttcgacagcagttggggtcacgactcgcatggactttaactgcaaatcagccttcttcacaagccactacctcaaaaggtgtccccagtgctgtgtctcgcaacatgacaaggtccaggagagaaggggatacgggtggtactatggaaattacagaagcagctctggtaagggacattttgtacgtctttcagggcatagatggcaaaaacatcaaaatgaacaacactgaaaattgttacaaagtagaaggaaaggcaaatctaagtaggtctttgagagacacagcagtcaggctttctgagttgggatggttgcataataaaatcagaagatacacggaccagaggagcctggaccgctcattcggactcgtcgggcagagcttttgtgctgccttgcaccaggaactcagagaatactatcgattgctctctgttttacattctcagctacaactagaggatgaccagggtgtgaatttgggacttgagagtagtttaacacttcggcgcctcctggtttggacctatgatcccaaaatacgactgaagacccttgcggccctagtggaccactgccaaggaaggaaaggaggtgagctggcctcagctgtccacgcctacacaaaaacaggagacccgtacatgcggtctctggtgcagcacatcctcagcctcgtgtctcatcctgttttgagcttcctgtaccgctggatatatgatggggagcttgaggacacttaccacgaattttttgtagcatcagatccaacagttaaaacagatcgactgtggcacgacaagtatactttgaggaaatcgatgattccttcgtttatgacgatggatcagtctaggaaggtccttttgataggaaaatcaataaatttcttgcaccaagtttgtcatgatcagactcccactacaaagatgatagctgtgaccaagtctgcagagtcaccccaggacgctgcagacctattcacagacttggaaaatgcatttcaggggaagattgatgctgcttattttgagaccagcaaatacctgttggatgttctcaataaaaagtacagcttgctggaccacatgcaggcaatgaggcggtacctgcttcttggtcaaggagactttataaggcacttaatggacttgctaaaaccagaacttgtccgtccagctacgactttgtatcagcataacttgactggaattctagaaaccgctgtcagagccaccaacgcacagtttgacagtcctgagatcctgcgaaggctggacgtgcggctgctggaggtctctccaggtgacactggatgggatgtcttcagcctcgattatcatgttgacggaccaattgcaactgtgtttactcgagaatgtatgagccactacctaagagtatttaacttcctctggagggcgaagcggatggaatacatcctcactgacatacggaagggacacatgtgcaatgcaaagctcctgagaaacatgccagagttctccggggtgctgcaccagtgtcacattttggcctctgagatggtccatttcattcatcagatgcagtattacatcacatttgaggtgcttgaatgttcttgggatgagctttggaacaaagtccagcaggcccaggatttggatcacatcattgctgcacacgaggtgttcttagacaccatcatctcccgctgcctgctggacagtgactccagggcacttttaaatcaacttagagctgtgtttgatcaaattattgaacttcagaatgctcaagatgcaatatacagagctgctctggaagaattgcagagacgattacagtttgaagagaaaaagaaacagcgtgaaattgagggccagtggggagtgacggcagcagaggaagaggaggaaaataagaggattggagaatttaaagaatctataccaaaaatgtgctcacagttgcgaatattgacccatttctaccagggtatcgtgcagcagtttttggtgttactgacgaccagctctgacgagagtcttcggtttcttagcttcaggctggacttcaacgagcattacaaagccagggagcccaggctccgtgtgtctctgggtaccagggggcggcgcagctcccacacgtgaagctcgcggtcctcccagggagctgcgggtgatgttcgttgcactgctagacacgaaattcccattgacgtcctgcaggaactgcatgctgcaggtgtcctgcccttccgcccacgagtgcgccatgtttcagcggagcggcgtgtgggagaagccacgtcgtgtttcacatgtcggagtcgaatgcatttgtaaatccctaagtcaagtaggctggctgcactgttcacatttgtctctaaaagtcttcatcgctaaaagataccataatttgctgaggcttcttaagctttctatgttataatttatatttgtcactttaaaaaatccatttcttttagaaaaaattagggtgataggatattcattagttaagatggtaacgtcattgctatttttttaacatcctctttagaggtaatttttgttaacataaccaaaaattaaattgaaacaaaatgtcccaactaagaaaatatatagagcattttatttttttttagtgttatatttattcttattttctctcctttcagagtttacatttttatatttaatttactatttcagatttttaaaatagtatagaaaaaagtaggagtgatagagaacaaaaatactcttatacagtgcaacccaaataccgcgaatgcatcagctaaagcagcgtgtaaataggagtgatgagaaagttaatggagtattttattttcaaagttcctgataagcattggaaagaaatcgacatggataatgaagatttcctttttccttgcctattttttcattgtaaatatttatatactactgaccaagatgttggggtgggggggattgttttttgtaaaaatgtcattatcaggtcacataaatctgcctttatgttgcataagtgaaaatttagaaaattaaaagcaattatctttcaaaaaaaaaaacagggggggttaaaattccgaggggcaggtaggtaccagtttgtaaagggcctagggggttaagaagagggggggtaaagggggggaaggtgattggagacctctggggaatggaacacaaaaggagaatgtattgaaatcgtgatgta

SEQ ID NO: 442680 - DNA, 4033 bp, Homo sapiens
agcggggcattgtgggaagcgcccgcgctttcggcgggttccgttaaaatggcgccctggtggccggcggcgcccgcgccttagcctgtcaggagcagggagcttgcggggcgcaggaagggcgcgggccgcggtccctgcgcgtgcggcggcagtggcggctctgcccggaccaccgtgcacggctccgggcgaggatggcgaccccggaccagaagtcgccgaacgttctgctgcagaacctgtgctgcaggatcctgggcaggagcgaagctgatgtagcccagcagttccagtatgctgtgcgggtgattggcagcaacttcgccccaactgttgaaagagatgaatttttagtagctgaaaaaatcaagaaagagcttattcgacaacgaagagaagcagatgctgcattattttcagaactccacagaaaacttcattcacagggagttttgaaaaataaatggtcaatactctacctcttgctgagcctcagtttctagctatgctacgttatttgctcaggccttaccaagagatgcccactcaaccccttactactatgccaggcctcagacccttcccctgagctaccaagatcggagtgcccagtcagcccagagctccggcagcgtgggcagcagtggcatcagcagcattggcctgtgtgccctcagtggccccgcgcctgcgccacaatctctcctcccaggacagtctaatcaagctccaggagtaggagattgccttcgacagcagttggggtcacgactcgcatggactttaactgcaaatcagccttcttcacaagccactacctcaaaaggtgtccccagtgctgtgtctcgcaacatgacaaggtccaggagagaaggggatacgggtggtactatggaaattacagaagcagctctggtaagggacattttgtacgtctttcagggcatagatggcaaaaacatcaaaatgaacaacactgaaaattgttacaaagtagaaggaaaggcaaatctaagtaggtctttgagagacacagcagtcaggctttctgagttgggatggttgcataataaaatcagaagatacacggaccagaggagcctggaccgctcattcggactcgtcgggcagagcttttgtgctgccttgcaccaggaactcagagaatactatcgattgctctctgttttacattctcagctacaactagaggatgaccagggtgtgaatttgggacttgagagtagtttaacacttcggcgcctcctggtttggacctatgatcccaaaatacgactgaagacccttgcggccctagtggaccactgccaaggaaggaaaggaggtgagctggcctcagctgtccacgcctacacaaaaacaggagacccgtacatgcggtctctggtgcagcacatcctcagcctcgtgtctcatcctgttttgagcttcctgtaccgctggatatatgatggggagcttgaggacacttaccacgaattttttgtagcatcagatccaacagttaaaacagatcgactgtggcacgacaagtatactttgaggaaatcgatgattccttcgtttatgacgatggatcagtctaggaaggtccttttgataggaaaatcaataaatttcttgcaccaagtttgtcatgatcagactcccactacaaagatgatagctgtgaccaagtctgcagagtcaccccaggacgctgcagacctattcacagacttggaaaatgcatttcaggggaagattgatgctgcttattttgagaccagcaaatacctgttggatgttctcaataaaaagtacagcttgctggaccacatgcaggcaatgaggcggtacctgcttcttggtcaaggagactttataaggcacttaatggacttgctaaaaccagaacttgtccgtccagctacgactttgtatcagcataacttgactggaattctagaaaccgctgtcagagccaccaacgcacagtttgacagtcctgagatcctgcgaaggctggacgtgcggctgctggaggtctctccaggtgacactggatgggatgtcttcagcctcgattatcatgttgacggaccaattgcaactgtgtttactcgagaatgtatgagccactacctaagagtatttaacttcctctggagggcgaagcggatggaatacatcctcactgacatacggaagggacacatgtgcaatgcaaagctcctgagaaacatgccagagttctccggggtgctgcaccagtgtcacattttggcctctgagatggtccatttcattcatcagatgcagtattacatcacatttgaggtgcttgaatgttcttgggatgagctttggaacaaagtccagcaggcccaggatttggatcacatcattgctgcacacgaggtgttcttagacaccatcatctcccgctgcctgctggacagtgactccagggcacttttaaatcaacttagagctgtgtttgatcaaattattgaacttcagaatgctcaagatgcaatatacagagctgctctggaagaattgcagagacgattacagtttgaagagaaaaagaaacagcgtgaaattgagggccagtggggagtgacggcagcagaggaagaggaggaaaataagaggattggagaatttaaagaatctataccaaaaatgtgctcacagttgcgaatattgacccatttctaccagggtatcgtgcagcagtttttggtgttactgacgaccagctctgacgagagtcttcggtttcttagcttcaggctggacttcaacgagcattacaaagccagggagcccaggctccgtgtgtctctgggtaccagggggcggcgcagctcccacacgtgaagctcgcggtcctcccagggagctgcgggtgatgttcgttgcactgctagacacgaaattcccattgacgtcctgcaggaactgcatgctgcaggtgtcctgcccttccgcccacgagtgcgccatgtttcagcggagcggcgtgtgggagaagccacgtcgtgtttcacatgtcggagtcgaatgcatttgtaaatccctaagtcaagtaggctggctgcactgttcacatttgtctctaaaagtcttcatcgctaaaagataccataatttgctgaggcttcttaagctttctatgttataatttatatttgtcactttaaaaaatccatttcttttagaaaaaattagggtgataggatattcattagttaagatggtaacgtcattgctatttttttaacatcctctttagaggtaatttttgttaacataaccaaaaattaaattgaaacaaaatgtcccaactaagaaaatatatagagcattttatttttttttagtgttgtaaaatattaacctctgtgagatcctttgtatcttaatgcattacctttacacatatttattcttattttctctcctttcagagtttacatttttatatttaatttactatttcagatttttaaaatagtatagaaaaaagtaggagtgatagagaacaaaaatactcttatacagtgcaacccaaataccgcgaatgcatcagctaaagcagcgtgtaaataggagtgatgagaaagttaatggagtattttattttcaaagttcctgataagcattggaaagaaatcgacatggataatgaagatttcctttttccttgcctattttttcattgtaaatatttatatactactgaccaagatgttggggtgggggggattgttttttgtaaaaatgtcattatcaggtcacataaatctgcctttatgttgcataagtgaaaatttagaaaattaaaagcaattatctttcaaaaaaaaaaacagggggggttaaaattccgaggggcaggtaggtaccagtttgtaaagggcctagggggttaagaagagggggggtaaagggggggaaggtgattggagacctctggggaatggaacacaaaaggagaatgtattgaaatcgtgatgta

SEQ ID NO: 442681 - DNA, 3037 bp, Homo sapiens
ttagtatgtctcaagtagaaaaggcatgaaaagtcatgtgaactttagattgtgtagccggcaattttttgctactttttgtttctgaaaaattcctcagcagtcctaaagagaagagtgactcacacacttgtgtaaagccagggttggagtctggacctcctggtttctgaatcatgacatgttactgctgcttctaggtccaaagtggtattaactgtaagaaaacaaatgctctttatctcaattacttgggcgtctttggttggtgagaagtgactggtgtgtactatgagtgtaaatgtggatgtttttgtgtattttcctccatttctcccaggaaggaaaggaggtgagctggcctcagctgtccacgcctacacaaaaacaggagacccgtacatgcggtctctggtgcagcacatcctcagcctcgtgtctcatcctgttttgagcttcctgtaccgctggatatatgatggggagcttgaggacacttaccacgaattttttgtagcatcagatccaacagttaaaacagatcgactgtggcacgacaagtatactttgaggaaatcgatgattccttcgtttatgacgatggatcagtctaggaaggtccttttgataggaaaatcaataaatttcttgcaccaagtttgtcatgatcagactcccactacaaagatgatagctgtgaccaagtctgcagagtcaccccaggacgctgcagacctattcacagacttggaaaatgcatttcaggggaagattgatgctgcttattttgagaccagcaaatacctgttggatgttctcaataaaaagtacagcttgctggaccacatgcaggcaatgaggcggtacctgcttcttggtcaaggagactttataaggcacttaatggacttgctaaaaccagaacttgtccgtccagctacgactttgtatcagcataacttgactggaattctagaaaccgctgtcagagccaccaacgcacagtttgacagtcctgagatcctgcgaaggctggacgtgcggctgctggaggtctctccaggtgacactggatgggatgtcttcagcctcgattatcatgttgacggaccaattgcaactgtgtttactcgagaatgtatgagccactacctaagagtatttaacttcctctggagggcgaagcggatggaatacatcctcactgacatacggaagggacacatgtgcaatgcaaagctcctgagaaacatgccagagttctccggggtgctgcaccagtgtcacattttggcctctgagatggtccatttcattcatcagatgcagtattacatcacatttgaggtgcttgaatgttcttgggatgagctttggaacaaagtccagcaggcccaggatttggatcacatcattgctgcacacgaggtgttcttagacaccatcatctcccgctgcctgctggacagtgactccagggcacttttaaatcaacttagagctgtgtttgatcaaattattgaacttcagaatgctcaagatgcaatatacagagctgctctggaagaattgcagagacgattacagtttgaagagaaaaagaaacagcgtgaaattgagggccagtggggagtgacggcagcagaggaagaggaggaaaataagaggattggagaatttaaagaatctataccaaaaatgtgctcacagttgcgaatattgacccatttctaccagggtatcgtgcagcagtttttggtgttactgacgaccagctctgacgagagtcttcggtttcttagcttcaggctggacttcaacgagcattacaaagccagggagcccaggctccgtgtgtctctgggtaccagggggcggcgcagctcccacacgtgaagctcgcggtcctcccagggagctgcgggtgatgttcgttgcactgctagacacgaaattcccattgacgtcctgcaggaactgcatgctgcaggtgtcctgcccttccgcccacgagtgcgccatgtttcagcggagcggcgtgtgggagaagccacgtcgtgtttcacatgtcggagtcgaatgcatttgtaaatccctaagtcaagtaggctggctgcactgttcacatttgtctctaaaagtcttcatcgctaaaagataccataatttgctgaggcttcttaagctttctatgttataatttatatttgtcactttaaaaaatccatttcttttagaaaaaattagggtgataggatattcattagttaagatggtaacgtcattgctatttttttaacatcctctttagaggtaatttttgttaacataaccaaaaattaaattgaaacaaaatgtcccaactaagaaaatatatagagcattttatttttttttagtgttgtaaaatattaacctctgtgagatcctttgtatcttaatgcattacctttacacatatttattcttattttctctcctttcagagtttacatttttatatttaatttactatttcagatttttaaaatagtatagaaaaaagtaggagtgatagagaacaaaaatactcttatacagtgcaacccaaataccgcgaatgcatcagctaaagcagcgtgtaaataggagtgatgagaaagttaatggagtattttattttcaaagttcctgataagcattggaaagaaatcgacatggataatgaagatttcctttttccttgcctattttttcattgtaaatatttatatactactgaccaagatgttggggtgggggggattgttttttgtaaaaatgtcattatcaggtcacataaatctgcctttatgttgcataagtgaaaatttagaaaattaaaagcaattatctttcaaaaaaaaaaacagggggggttaaaattccgaggggcaggtaggtaccagtttgtaaagggcctagggggttaagaagagggggggtaaagggggggaaggtgattggagacctctggggaatggaacacaaaaggagaatgtattgaaatcgtgatgta

SEQ ID NO: 442682 - DNA, 2751 bp, Homo sapiens
aacttgtttttgttatactttagttttaaaagtttaggaaatacatagttcaatttagagagatttctgtgtttcatacaagttttattgtataaataggtaagactccctgtgtctggagaacttggctttctagaataacttactctttgatgttgctgttggttaatattttgccataaatatcactcttgaacatttccatgcccctttgctttcagttttttgtagcatcagatccaacagttaaaacagatcgactgtggcacgacaagtatactttgaggaaatcgatgattccttcgtttatgacgatggatcagtctaggaaggtccttttgataggaaaatcaataaatttcttgcaccaagtttgtcatgatcagactcccactacaaagatgatagctgtgaccaagtctgcagagtcaccccaggacgctgcagacctattcacagacttggaaaatgcatttcaggggaagattgatgctgcttattttgagaccagcaaatacctgttggatgttctcaataaaaagtacagcttgctggaccacatgcaggcaatgaggcggtacctgcttcttggtcaaggagactttataaggcacttaatggacttgctaaaaccagaacttgtccgtccagctacgactttgtatcagcataacttgactggaattctagaaaccgctgtcagagccaccaacgcacagtttgacagtcctgagatcctgcgaaggctggacgtgcggctgctggaggtctctccaggtgacactggatgggatgtcttcagcctcgattatcatgttgacggaccaattgcaactgtgtttactcgagaatgtatgagccactacctaagagtatttaacttcctctggagggcgaagcggatggaatacatcctcactgacatacggaagggacacatgtgcaatgcaaagctcctgagaaacatgccagagttctccggggtgctgcaccagtgtcacattttggcctctgagatggtccatttcattcatcagatgcagtattacatcacatttgaggtgcttgaatgttcttgggatgagctttggaacaaagtccagcaggcccaggatttggatcacatcattgctgcacacgaggtgttcttagacaccatcatctcccgctgcctgctggacagtgactccagggcacttttaaatcaacttagagctgtgtttgatcaaattattgaacttcagaatgctcaagatgcaatatacagagctgctctggaagaattgcagagacgattacagtttgaagagaaaaagaaacagcgtgaaattgagggccagtggggagtgacggcagcagaggaagaggaggaaaataagaggattggagaatttaaagaatctataccaaaaatgtgctcacagttgcgaatattgacccatttctaccagggtatcgtgcagcagtttttggtgttactgacgaccagctctgacgagagtcttcggtttcttagcttcaggctggacttcaacgagcattacaaagccagggagcccaggctccgtgtgtctctgggtaccagggggcggcgcagctcccacacgtgaagctcgcggtcctcccagggagctgcgggtgatgttcgttgcactgctagacacgaaattcccattgacgtcctgcaggaactgcatgctgcaggtgtcctgcccttccgcccacgagtgcgccatgtttcagcggagcggcgtgtgggagaagccacgtcgtgtttcacatgtcggagtcgaatgcatttgtaaatccctaagtcaagtaggctggctgcactgttcacatttgtctctaaaagtcttcatcgctaaaagataccataatttgctgaggcttcttaagctttctatgttataatttatatttgtcactttaaaaaatccatttcttttagaaaaaattagggtgataggatattcattagttaagatggtaacgtcattgctatttttttaacatcctctttagaggtaatttttgttaacataaccaaaaattaaattgaaacaaaatgtcccaactaagaaaatatatagagcattttatttttttttagtgttgtaaaatattaacctctgtgagatcctttgtatcttaatgcattacctttacacatatttattcttattttctctcctttcagagtttacatttttatatttaatttactatttcagatttttaaaatagtatagaaaaaagtaggagtgatagagaacaaaaatactcttatacagtgcaacccaaataccgcgaatgcatcagctaaagcagcgtgtaaataggagtgatgagaaagttaatggagtattttattttcaaagttcctgataagcattggaaagaaatcgacatggataatgaagatttcctttttccttgcctattttttcattgtaaatatttatatactactgaccaagatgttggggtgggggggattgttttttgtaaaaatgtcattatcaggtcacataaatctgcctttatgttgcataagtgaaaatttagaaaattaaaagcaattatctttcaaaaaaaaaaacagggggggttaaaattccgaggggcaggtaggtaccagtttgtaaagggcctagggggttaagaagagggggggtaaagggggggaaggtgattggagacctctggggaatggaacacaaaaggagaatgtattgaaatcgtgatgta

SEQ ID NO: 442683 - DNA, 1505 bp, Homo sapiens
accatgataaacgacatatcatgaataagttgcaactacgctgtctcactgcggactaaccccagctcactgtccctaattggtgggtgagagcaatgcagggcttggatgaatgctgcgttcacattgaaggagtgccaactagaggggttctgtgctcgaattctgtcccatggtcatagtatgtgacctagttgtttaccagggtatcgtgcagcagtttttggtgttactgacgaccagctctgacgagagtcttcggtttcttagcttcaggctggacttcaacgagcattacaaagccagggagcccaggctccgtgtgtctctgggtaccagggggcggcgcagctcccacacgtgaagctcgcggtcctcccagggagctgcgggtgatgttcgttgcactgctagacacgaaattcccattgacgtcctgcaggaactgcatgctgcaggtgtcctgcccttccgcccacgagtgcgccatgtttcagcggagcggcgtgtgggagaagccacgtcgtgtttcacatgtcggagtcgaatgcatttgtaaatccctaagtcaagtaggctggctgcactgttcacatttgtctctaaaagtcttcatcgctaaaagataccataatttgctgaggcttcttaagctttctatgttataatttatatttgtcactttaaaaaatccatttcttttagaaaaaattagggtgataggatattcattagttaagatggtaacgtcattgctatttttttaacatcctctttagaggtaatttttgttaacataaccaaaaattaaattgaaacaaaatgtcccaactaagaaaatatatagagcattttatttttttttagtgttgtaaaatattaacctctgtgagatcctttgtatcttaatgcattacctttacacatatttattcttattttctctcctttcagagtttacatttttatatttaatttactatttcagatttttaaaatagtatagaaaaaagtaggagtgatagagaacaaaaatactcttatacagtgcaacccaaataccgcgaatgcatcagctaaagcagcgtgtaaataggagtgatgagaaagttaatggagtattttattttcaaagttcctgataagcattggaaagaaatcgacatggataatgaagatttcctttttccttgcctattttttcattgtaaatatttatatactactgaccaagatgttggggtgggggggattgttttttgtaaaaatgtcattatcaggtcacataaatctgcctttatgttgcataagtgaaaatttagaaaattaaaagcaattatctttcaaaaaaaaaaacagggggggttaaaattccgaggggcaggtaggtaccagtttgtaaagggcctagggggttaagaagagggggggtaaagggggggaaggtgattggagacctctggggaatggaacacaaaaggagaatgtattgaaatcgtgatgta

SEQ ID NO: 442684 - DNA, 1583 bp, Homo sapiens
agcggggcattgtgggaagcgcccgcgctttcggcgggttccgttaaaatggcgccctggtggccggcggcgcccgcgccttagcctgtcaggagcagggagcttgcggggcgcaggaagggcgcgggccgcggtccctgcgcgtgcggcggcagtggcggctctgcccggaccaccgtgcacggctccgggcgaggatggcgaccccggaccagaagtcgccgaacgttctgctgcagaacctgtgctgcaggatcctgggcaggagcgaagctgatgtagcccagcagttccagtatgctgtgcgggtgattggcagcaacttcgccccaactgttgaaagagatgaatttttagtagctgaaaaaatcaagaaagagcttattcgacaacgaagagaagcagatgctgcattattttcagaactccacagaaaacttcattcacagggagttttgaaaaataaatggtcaatactctacctcttgctgagcctcagtgaggacccacgcaggcagccaagcaaggtttctagctatgctacgttatttgctcaggccttaccaagagatgcccactcaaccccttactactatgccaggcctcagacccttcccctgagctaccaagatcggagtgcccagtcagcccagagctccggcagcgtgggcagcagtggcatcagcagcattggcctgtgtgccctcagtggccccgcgcctgcgccacaatctctcctcccaggacagtctaatcaagctccaggagtaggagattgccttcgacagcagttggggtcacgactcgcatggactttaactgcaaatcagccttcttcacaagccactacctcaaaaggtgtccccagtgctgtgtctcgcaacatgacaaggtccaggagagaaggggatacgggtggtactatggaaattacagaagcagctctggtaagggacattttgtacgtctttcagggcatagatggcaaaaacatcaaaatgaacaacactgaaaattgttacaaagtagaaggaaaggcaaatctaagtaggtctttgagagacacagcagtcaggctttctgagttgggatggttgcataataaaatcagaagatacacggaccagaggagcctggaccgctcattcggactcgtcgggcagagcttttgtgctgccttgcaccaggaactcagagaatactatcgattgctctctgttttacattctcagctacaactagaggatgaccagggtgtgaatttgggacttgagagtagtttaacacttcggcgcctcctggtttggacctatgatcccaaaatacgactgaagacccttgcggccctagtggaccactgccaaggaaggaaaggaggtgagctggcctcagctgtccacgcctacacaaaaacaggagacccgtacatgcggtctctggtgcagcacatcctcagcctcgtgtctcatcctgttttgagcttcctgtaccgctggatatatgatggggagcttgaggacacttaccacgaagtaaggatcggtgttcggttctgagacttggatttaaaaagcatgggcacg

SEQ ID NO: 442685 - DNA, 218 bp, Homo sapiens
gtatgatgatgctggtggggtggtgatgatggcaatggtgtgatgttgatgatgatgtgaggatggtgatactcatggtaacagtgatgttgatgacgtagtgattgtgatggtgtgatgatggggatgatggtgatgtgatgataatgatgttggggatgggtggtgatgatggcgatgatgaatgcgtggtggtggcagtgatggtggtgatgatg

SEQ ID NO: 442686 - DNA, 501 bp, Homo sapiens
ctggatattagccctttgtcagaagggtagattgtaaaaattttctcccattctgcaggttacctgttgactctgatggtagtttcttttgctgtgcagaagctctttagtttaattagatctacaggggatatcatcttaaaggatcattctctaaagtcactacacttcatgaaaactataccatatatattttttccattcctcttctgcaaagttcatgctttttgtactaaggaacaacacttttttcatattattaaaatatatattgtggtgattaagatgattagaagattattgacaaaacctgaatttaaatcttgtagcaccccacctgaactttatctaaacgcattatacctttccacttaaaatcagtcaatgtgtaatgagtgtgtcgtgctttaattatatttctcctccaaacagagcttttgtgctgccttgcaccaggaactcagagaatactatcgattgctctctgttttacattctcag

SEQ ID NO: 442687 - DNA, 2773 bp, Homo sapiens
agcggggcattgtgggaagcgcccgcgctttcggcgggttccgttaaaatggcgccctggtggccggcggcgcccgcgccttagcctgtcaggagcagggagcttgcggggcgcaggaagggcgcgggccgcggtccctgcgcgtgcggcggcagtggcggctctgcccggaccaccgtgcacggctccgggcgaggatggcgaccccggaccagaagtcgccgaacgttctgctgcagaacctgtgctgcaggatcctgggcaggagcgaagctgatgtagcccagcagttccagtatgctgtgcgggtgattggcagcaacttcgccccaactgttgaaagagatgaatttttagtagctgaaaaaatcaagaaagagcttattcgacaacgaagagaagcagatgctgcattattttcagaactccacagaaaacttcattcacagggagttttgaaaaataaatggtcaatactctacctcttgctgagcctcagtgaggacccacgcaggcagccaagcaaggtttctagctatgctacgttatttgctcaggccttaccaagagatgcccactcaaccccttactactatgccaggcctcagacccttcccctgagctaccaagatcggagtgcccagtcagcccagagctccggcagcgtgggcagcagtggcatcagcagcattggcctgtgtgccctcagtggccccgcgcctgcgccacaatctctcctcccaggacagtctaatcaagctccaggagtaggagattgccttcgacagcagttggggtcacgactcgcatggactttaactgcaaatcagccttcttcacaagccactacctcaaaaggtgtccccagtgctgtgtctcgcaacatgacaaggtccaggagagaaggggatacgggtggtactatggaaattacagaagcagctctggtaagggacattttgtacgtctttcagggcatagatggcaaaaacatcaaaatgaacaacactgaaaattgttacaaagtagaaggaaaggcaaatctaagtaggtctttgagagacacagcagtcaggctttctgagttgggatggttgcataataaaatcagaagatacacggaccagaggagcctggaccgctcattcggactcgtcgggcagagcttttgtgctgccttgcaccaggaactcagagaatactatcgattgctctctgttttacattctcagctacaactagaggatgaccagggtgtgaatttgggacttgagagtagtttaacacttcggcgcctcctggtttggacctatgatcccaaaatacgactgaagacccttgcggccctagtggaccactgccaaggaaggaaaggaggtgagctggcctcagctgtccacgcctacacaaaaacaggagacccgtacatgcggtctctggtgcagcacatcctcagcctcgtgtctcatcctgttttgagcttcctgtaccgctggatatatgatggggagcttgaggacacttaccacgaattttttgtagcatcagatccaacagttaaaacagatcgactgtggcacgacaagtatactttgaggaaatcgatgattccttcgtttatgacgatggatcagtctaggaaggtccttttgataggaaaatcaataaatttcttgcaccaagtttgtcatgatcagactcccactacaaagatgatagctgtgaccaagtctgcagagtcaccccaggacgctgcagacctattcacagacttggaaaatgcatttcaggggaagattgatgctgcttattttgagaccagcaaatacctgttggatgttctcaataaaaagtacagcttgctggaccacatgcaggcaatgaggcggtacctgcttcttggtcaaggagactttataaggcacttaatggacttgctaaaaccagaacttgtccgtccagctacgactttgtatcagcataacttgactggaattctagaaaccgctgtcagagccaccaacgcacagtttgacagtcctgagatcctgcgaaggctggacgtgcggctgctggaggtctctccaggtgacactggatgggatgtcttcagcctcgattatcatgttgacggaccaattgcaactgtgtttactcgagaatgtatgagccactacctaagagtatttaacttcctctggagggcgaagcggatggaatacatcctcactgacatacggaagggacacatgtgcaatgcaaagctcctgagaaacatgccagagttctccggggtgctgcaccagtgtcacattttggcctctgagatggtccatttcattcatcagatgcagtattacatcacatttgaggtgcttgaatgttcttgggatgagctttggaacaaagtccagcaggcccaggatttggatcacatcattgctgcacacgaggtgttcttagacaccatcatctcccgctgcctgctggacagtgactccagggcacttttaaatcaacttagagctgtgtttgatcaaattattgaacttcagaatgctcaagatgcaatatacagagctgctctggaagaattgcagagacgattacagtttgaagagaaaaagaaacagcgtgaaattgaggttgagatgtgcctatactgcgtttgaagtcccgagaaatcactgacagttgtaaagagggaggggccaccctcactggcatcatcatcctgtttcacaaaataaataaaaacagcagcattcatgag

SEQ ID NO: 442688 - DNA, 3926 bp, Homo sapiens
agcggggcattgtgggaagcgcccgcgctttcggcgggttccgttaaaatggcgccctggtggccggcggcgcccgcgccttagcctgtcaggagcagggagcttgcggggcgcaggaagggcgcgggccgcggtccctgcgcgtgcggcggcagtggcggctctgcccggaccaccgtgcacggctccgggcgaggatggcgaccccggaccagaagtcgccgaacgttctgctgcagaacctgtgctgcaggatcctgggcaggagcgaagctgatgtagcccagcagttccagtatgctgtgcgggtgattggcagcaacttcgccccaactgttgaaagagatgaatttttagtagctgaaaaaatcaagaaagagcttattcgacaacgaagagaagcagatgctgcattattttcagaactccacagaaaacttcattcacagggagttttgaaaaataaatggtcaatactctacctcttgctgagcctcagtgaggacccacgcaggcagccaagcaaggtttctagctatgctacgttatttgctcaggccttaccaagagatgcccactcaaccccttactactatgccaggcctcagacccttcccctgagctaccaagatcggagtgcccagtcagcccagagctccggcagcgtgggcagcagtggcatcagcagcattggcctgtgtgccctcagtggccccgcgcctgcgccacaatctctcctcccaggacagtctaatcaagctccaggagtaggagattgccttcgacagcagttggggtcacgactcgcatggactttaactgcaaatcagccttcttcacaagccactacctcaaaaggtgtccccagtgctgtgtctcgcaacatgacaaggtccaggagagaaggggatacgggtggtactatggaaattacagaagcagctctggtaagggacattttgtacgtctttcagggcatagatggcaaaaacatcaaaatgaacaacactgaaaattgttacaaagtagaaggaaaggcaaatctaagtaggtctttgagagacacagcagtcaggctttctgagttgggatggttgcataataaaatcagaagatacacggaccagaggagcctggaccgctcattcggactcgtcgggcagagcttttgtgctgccttgcaccaggaactcagagaatactatcgattgctctctgttttacattctcagctacaactagaggatgaccagggtgtgaatttgggacttgagagtagtttaacacttcggcgcctcctggtttggacctatgatcccaaaatacgactgaagacccttgcggccctagtggaccactgccaaggaaggaaaggaggtgagctggcctcagctgtccacgcctacacaaaaacaggagacccgtacatgcggtctctggtgcagcacatcctcagcctcgtgtctcatcctgttttgagcttcctgtaccgctggatatatgatggggagcttgaggacacttaccacgaattttttgtagcatcagatccaacagttaaaacagatcgactgtggcacgacaagtatactttgaggaaatcgatgattccttcgtttatgacgatggatcagtctaggaaggtccttttgataggaaaatcaataaatttcttgcaccaagtttgtcatgatcagactcccactacaaagatgatagctgtgaccaagtctgcagagtcaccccaggacgctgcagacctattcacagacttggaaaatgcatttcaggggaagattgatgctgcttattttgagaccagcaaatacctgttggatgttctcaataaaaagtacagcttgctggaccacatgcaggcaatgaggcggtacctgcttcttggtcaaggagactttataaggcacttaatggacttgctaaagtctctccaggtgacactggatgggatgtcttcagcctcgattatcatgttgacggaccaattgcaactgtgtttactcgagaatgtatgagccactacctaagagtatttaacttcctctggagggcgaagcggatggaatacatcctcactgacatacggaagggacacatgtgcaatgcaaagctcctgagaaacatgccagagttctccggggtgctgcaccagtgtcacattttggcctctgagatggtccatttcattcatcagatgcagtattacatcacatttgaggtgcttgaatgttcttgggatgagctttggaacaaagtccagcaggcccaggatttggatcacatcattgctgcacacgaggtgttcttagacaccatcatctcccgctgcctgctggacagtgactccagggcacttttaaatcaacttagagctgtgtttgatcaaattattgaacttcagaatgctcaagatgcaatatacagagctgctctggaagaattgcagagacgattacagtttgaagagaaaaagaaacagcgtgaaattgagggccagtggggagtgacggcagcagaggaagaggaggaaaataagaggattggagaatttaaagaatctataccaaaaatgtgctcacagttgcgaatattgacccatttctaccagggtatcgtgcagcagtttttggtgttactgacgaccagctctgacgagagtcttcggtttcttagcttcaggctggacttcaacgagcattacaaagccagggagcccaggctccgtgtgtctctgggtaccagggggcggcgcagctcccacacgtgaagctcgcggtcctcccagggagctgcgggtgatgttcgttgcactgctagacacgaaattcccattgacgtcctgcaggaactgcatgctgcaggtgtcctgcccttccgcccacgagtgcgccatgtttcagcggagcggcgtgtgggagaagccacgtcgtgtttcacatgtcggagtcgaatgcatttgtaaatccctaagtcaagtaggctggctgcactgttcacatttgtctctaaaagtcttcatcgctaaaagataccataatttgctgaggcttcttaagctttctatgttataatttatatttgtcactttaaaaaatccatttcttttagaaaaaattagggtgataggatattcattagttaagatggtaacgtcattgctatttttttaacatcctctttagaggtaatttttgttaacataaccaaaaattaaattgaaacaaaatgtcccaactaagaaaatatatagagcattttatttttttttagtgttgtaaaatattaacctctgtgagatcctttgtatcttaatgcattacctttacacatatttattcttattttctctcctttcagagtttacatttttatatttaatttactatttcagatttttaaaatagtatagaaaaaagtaggagtgatagagaacaaaaatactcttatacagtgcaacccaaataccgcgaatgcatcagctaaagcagcgtgtaaataggagtgatgagaaagttaatggagtattttattttcaaagttcctgataagcattggaaagaaatcgacatggataatgaagatttcctttttccttgcctattttttcattgtaaatatttatatactactgaccaagatgttggggtgggggggattgttttttgtaaaaatgtcattatcaggtcacataaatctgcctttatgttgcataagtgaaaatttagaaaattaaaagcaattatctttcaaaaaaaaaaacagggggggttaaaattccgaggggcaggtaggtaccagtttgtaaagggcctagggggttaagaagagggggggtaaagggggggaaggtgattggagacctctggggaatggaacacaaaaggagaatgtattgaaatcgtgatgta

SEQ ID NO: 442689 - DNA, 4032 bp, Homo sapiens
actgtaactgccgtgttttcctactgtttaaagggttgaaggttggatttgatataaaactattctgggaaagttcacatggcgaatattgttactaataagcaaaactaatcctatacgagcattgcttttcaactagagccatgcattggaatcgcctgtgatttcacaagaacctgataacgttgattgcctgtgggaaggggagctggtggccagtggttgagaacaggactttttatgctgatgtagcccagcagttccagtatgctgtgcgggtgattggcagcaacttcgccccaactgttgaaagagatgaatttttagtagctgaaaaaatcaagaaagagcttattcgacaacgaagagaagcagatgctgcattattttcagaactccacagaaaacttcattcacagggagttttgaaaaataaatggtcaatactctacctcttgctgagcctcagtgaggacccacgcaggcagccaagcaaggtttctagctatgctacgttatttgctcaggccttaccaagagatgcccactcaaccccttactactatgccaggcctcagacccttcccctgagctaccaagatcggagtgcccagtcagcccagagctccggcagcgtgggcagcagtggcatcagcagcattggcctgtgtgccctcagtggccccgcgcctgcgccacaatctctcctcccaggacagtctaatcaagctccaggagtaggagattgccttcgacagcagttggggtcacgactcgcatggactttaactgcaaatcagccttcttcacaagccactacctcaaaaggtgtccccagtgctgtgtctcgcaacatgacaaggtccaggagagaaggggatacgggtggtactatggaaattacagaagcagctctggtaagggacattttgtacgtctttcagggcatagatggcaaaaacatcaaaatgaacaacactgaaaattgttacaaagtagaaggaaaggcaaatctaagtaggtctttgagagacacagcagtcaggctttctgagttgggatggttgcataataaaatcagaagatacacggaccagaggagcctggaccgctcattcggactcgtcgggcagagcttttgtgctgccttgcaccaggaactcagagaatactatcgattgctctctgttttacattctcagctacaactagaggatgaccagggtgtgaatttgggacttgagagtagtttaacacttcggcgcctcctggtttggacctatgatcccaaaatacgactgaagacccttgcggccctagtggaccactgccaaggaaggaaaggaggtgagctggcctcagctgtccacgcctacacaaaaacaggagacccgtacatgcggtctctggtgcagcacatcctcagcctcgtgtctcatcctgttttgagcttcctgtaccgctggatatatgatggggagcttgaggacacttaccacgaattttttgtagcatcagatccaacagttaaaacagatcgactgtggcacgacaagtatactttgaggaaatcgatgattccttcgtttatgacgatggatcagtctaggaaggtccttttgataggaaaatcaataaatttcttgcaccaagtttgtcatgatcagactcccactacaaagatgatagctgtgaccaagtctgcagagtcaccccaggacgctgcagacctattcacagacttggaaaatgcatttcaggggaagattgatgctgcttattttgagaccagcaaatacctgttggatgttctcaataaaaagtacagcttgctggaccacatgcaggcaatgaggcggtacctgcttcttggtcaaggagactttataaggcacttaatggacttgctaaaaccagaacttgtccgtccagctacgactttgtatcagcataacttgactggaattctagaaaccgctgtcagagccaccaacgcacagtttgacagtcctgagatcctgcgaaggctggacgtgcggctgctggaggtctctccaggtgacactggatgggatgtcttcagcctcgattatcatgttgacggaccaattgcaactgtgtttactcgagaatgtatgagccactacctaagagtatttaacttcctctggagggcgaagcggatggaatacatcctcactgacatacggaagggacacatgtgcaatgcaaagctcctgagaaacatgccagagttctccggggtgctgcaccagtgtcacattttggcctctgagatggtccatttcattcatcagatgcagtattacatcacatttgaggtgcttgaatgttcttgggatgagctttggaacaaagtccagcaggcccaggatttggatcacatcattgctgcacacgaggtgttcttagacaccatcatctcccgctgcctgctggacagtgactccagggcacttttaaatcaacttagagctgtgtttgatcaaattattgaacttcagaatgctcaagatgcaatatacagagctgctctggaagaattgcagagacgattacagtttgaagagaaaaagaaacagcgtgaaattgagggccagtggggagtgacggcagcagaggaagaggaggaaaataagaggattggagaatttaaagaatctataccaaaaatgtgctcacagttgcgaatattgacccatttctaccagggtatcgtgcagcagtttttggtgttactgacgaccagctctgacgagagtcttcggtttcttagcttcaggctggacttcaacgagcattacaaagccagggagcccaggctccgtgtgtctctgggtaccagggggcggcgcagctcccacacgtgaagctcgcggtcctcccagggagctgcgggtgatgttcgttgcactgctagacacgaaattcccattgacgtcctgcaggaactgcatgctgcaggtgtcctgcccttccgcccacgagtgcgccatgtttcagcggagcggcgtgtgggagaagccacgtcgtgtttcacatgtcggagtcgaatgcatttgtaaatccctaagtcaagtaggctggctgcactgttcacatttgtctctaaaagtcttcatcgctaaaagataccataatttgctgaggcttcttaagctttctatgttataatttatatttgtcactttaaaaaatccatttcttttagaaaaaattagggtgataggatattcattagttaagatggtaacgtcattgctatttttttaacatcctctttagaggtaatttttgttaacataaccaaaaattaaattgaaacaaaatgtcccaactaagaaaatatatagagcattttatttttttttagtgttgtaaaatattaacctctgtgagatcctttgtatcttaatgcattacctttacacatatttattcttattttctctcctttcagagtttacatttttatatttaatttactatttcagatttttaaaatagtatagaaaaaagtaggagtgatagagaacaaaaatactcttatacagtgcaacccaaataccgcgaatgcatcagctaaagcagcgtgtaaataggagtgatgagaaagttaatggagtattttattttcaaagttcctgataagcattggaaagaaatcgacatggataatgaagatttcctttttccttgcctattttttcattgtaaatatttatatactactgaccaagatgttggggtgggggggattgttttttgtaaaaatgtcattatcaggtcacataaatctgcctttatgttgcataagtgaaaatttagaaaattaaaagcaattatctttcaaaaaaaaaaacagggggggttaaaattccgaggggcaggtaggtaccagtttgtaaagggcctagggggttaagaagagggggggtaaagggggggaaggtgattggagacctctggggaatggaacacaaaaggagaatgtattgaaatcgtgatgta

SEQ ID NO: 442690 - DNA, 2596 bp, Homo sapiens
ccgtatccccttctctccgggaccttgtcatgttgcgagacacagcttgaggacacttaccacgaattttttgtagcatcagatccaacagttaaaacagatcgactgtggcacgacaagtatactttgaggaaatcgatgattccttcgtttatgacgatggatcagtctaggaaggtccttttgataggaaaatcaataaatttcttgcaccaagtttgtcatgatcagactcccactacaaagatgatagctgtgaccaagtctgcagagtcaccccaggacgctgcagacctattcacagacttggaaaatgcatttcaggggaagattgatgctgcttattttgagaccagcaaatacctgttggatgttctcaataaaaagtacagcttgctggaccacatgcaggcaatgaggcggtacctgcttcttggtcaaggagactttataaggcacttaatggacttgctaaaaccagaacttgtccgtccagctacgactttgtatcagcataacttgactggaattctagaaaccgctgtcagagccaccaacgcacagtttgacagtcctgagatcctgcgaaggctggacgtgcggctgctggaggtctctccaggtgacactggatgggatgtcttcagcctcgattatcatgttgacggaccaattgcaactgtgtttactcgagaatgtatgagccactacctaagagtatttaacttcctctggagggcgaagcggatggaatacatcctcactgacatacggaagggacacatgtgcaatgcaaagctcctgagaaacatgccagagttctccggggtgctgcaccagtgtcacattttggcctctgagatggtccatttcattcatcagatgcagtattacatcacatttgaggtgcttgaatgttcttgggatgagctttggaacaaagtccagcaggcccaggatttggatcacatcattgctgcacacgaggtgttcttagacaccatcatctcccgctgcctgctggacagtgactccagggcacttttaaatcaacttagagctgtgtttgatcaaattattgaacttcagaatgctcaagatgcaatatacagagctgctctggaagaattgcagagacgattacagtttgaagagaaaaagaaacagcgtgaaattgagggccagtggggagtgacggcagcagaggaagaggaggaaaataagaggattggagaatttaaagaatctataccaaaaatgtgctcacagttgcgaatattgacccatttctaccagggtatcgtgcagcagtttttggtgttactgacgaccagctctgacgagagtcttcggtttcttagcttcaggctggacttcaacgagcattacaaagccagggagcccaggctccgtgtgtctctgggtaccagggggcggcgcagctcccacacgtgaagctcgcggtcctcccagggagctgcgggtgatgttcgttgcactgctagacacgaaattcccattgacgtcctgcaggaactgcatgctgcaggtgtcctgcccttccgcccacgagtgcgccatgtttcagcggagcggcgtgtgggagaagccacgtcgtgtttcacatgtcggagtcgaatgcatttgtaaatccctaagtcaagtaggctggctgcactgttcacatttgtctctaaaagtcttcatcgctaaaagataccataatttgctgaggcttcttaagctttctatgttataatttatatttgtcactttaaaaaatccatttcttttagaaaaaattagggtgataggatattcattagttaagatggtaacgtcattgctatttttttaacatcctctttagaggtaatttttgttaacataaccaaaaattaaattgaaacaaaatgtcccaactaagaaaatatatagagcattttatttttttttagtgttgtaaaatattaacctctgtgagatcctttgtatcttaatgcattacctttacacatatttattcttattttctctcctttcagagtttacatttttatatttaatttactatttcagatttttaaaatagtatagaaaaaagtaggagtgatagagaacaaaaatactcttatacagtgcaacccaaataccgcgaatgcatcagctaaagcagcgtgtaaataggagtgatgagaaagttaatggagtattttattttcaaagttcctgataagcattggaaagaaatcgacatggataatgaagatttcctttttccttgcctattttttcattgtaaatatttatatactactgaccaagatgttggggtgggggggattgttttttgtaaaaatgtcattatcaggtcacataaatctgcctttatgttgcataagtgaaaatttagaaaattaaaagcaattatctttcaaaaaaaaaaacagggggggttaaaattccgaggggcaggtaggtaccagtttgtaaagggcctagggggttaagaagagggggggtaaagggggggaaggtgattggagacctctggggaatggaacacaaaaggagaatgtattgaaatcgtgatgta

SEQ ID NO: 442691 - DNA, 2510 bp, Homo sapiens
agcggggcattgtgggaagcgcccgcgctttcggcgggttccgttaaaatggcgccctggtggccggcggcgcccgcgccttagcctgtcaggagcagggagcttgcggggcgcaggaagggcgcgggccgcggtccctgcgcgtgcggcggcagtggcggctctgcccggaccaccgtgcacggctccgggcgaggatggcgaccccggaccagaagtcgccgaacgttctgctgcagaacctgtgctgcaggatcctgggcaggagcgaagctgatgtagcccagcagttccagtatgctgtgcgggtgattggcagcaacttcgccccaactgttgaaagagatgaatttttagtagctgaaaaaatcaagaaagagcttattcgacaacgaagagaagcagatgctgcattattttcagaactccacagaaaacttcattcacagggagttttgaaaaataaatggtcaatactctacctcttgctgagcctcagtgaggacccacgcaggcagccaagcaaggtttctagctatgctacgttatttgctcaggccttaccaagagatgcccactcaaccccttactactatgccaggcctcagacccttcccctgagctaccaagatcggagtgcccagtcagcccagagctccggcagcgtgggcagcagtggcatcagcagcattggcctgtgtgccctcagtggccccgcgcctgcgccacaatctctcctcccaggacagtctaatcaagctccaggagtaggagattgccttcgacagcagttggggtcacgactcgcatggactttaactgcaaatcagccttcttcacaagccactacctcaaaaggtgtccccagtgctgtgtctcgcaacatgacaaggtccaggagagaaggggatacgggtggtactatggaaattacagaagcagctctggtaagggacattttgtacgtctttcagggcatagatggcaaaaacatcaaaatgaacaacactgaaaattgttacaaagtagaaggaaaggcaaatctaagtaggtctttgagagacacagcagtcaggctttctgagttgggatggttgcataataaaatcagaagatacacggaccagaggagcctggaccgctcattcggactcgtcgggcagagcttttgtgctgccttgcaccaggaactcagagaatactatcgattgctctctgttttacattctcagctacaactagaggatgaccagggtgtgaatttgggacttgagagtagtttaacacttcggcgcctcctggtttggacctatgatcccaaaatacgactgaagacccttgcggccctagtggaccactgccaaggtcccacgcgcgtctttcccacgcacgtctttcccacgcgcgactttcccacgcgcgactttcccacgcgcgactttcccatgcacgtctttcccacgcgcgtctttcccacgcgcgtctggcactcgctttgtttcagaactcgtttgtagggtgcgccatccaggcttgcttttgtgtcctgcccgtttttgtccttaatggccgtgttgattcgataggaatcgacagatgggagccaagaggggacgtaaccacttgccagtgtggcccagtatttatatggtagaagctcgggctggcattgagatggaggtgggaaagaggagggtgtctcgtgtttaaagatttctctcttgtgtggtccttggttatggctccccatggtgcttgctgctcccttggtcgcctttccttgcattttgctttttgcctttagtccttctgcagtcagggaccatgttggtgactctcggtcagatgttcccatatttgcatgtcttgctttggcctctctggctctaggttctgtattgctagttgctttctgacattttttctcattgtttgtgctaccttggccaagaacctctttgccttctccctcgtttgtaacattgagatcctagtagcagttacttcttagggttgttaggatgacatgagatgggcgagttggccatctgccacacaagagttcccttctcactgccatcctctgcccagggtgttccccagaatctgcagggccccattggtcatcttgctgtctgcacaccttcctctctcacctcttggcacttccctcaaaaaagagagaagtggagcacagtaaataaacgccagcgttttctccagttcccagcacctctccggaactggatcccccaaactcctctgtcactttctgtgtccagcgggcccctggggtccttcactgtcttcactctgctcagcctgtgcgcttggccttggtgctgtagggactgttataagagctgctgtccgatccccatattcaatctcacagccccactttgtgtacacacaccagagccatcttcttaaaatcagatcctgtcactcctctccctaaaatctaccagtggtctaataaaatcttgaatttttagcataaaaaaaaa

SEQ ID NO: 442692 - DNA, 1411 bp, Homo sapiens
cagggaaggtcgggtgtaaattcggacgaggagctggaccgctcttttcggactcgtcgggcagagcttttgtgctgccttgcaccaggaactcagagaatactatcgattgctctctgttttacattctcagctacaactagaggatgaccagggtgtgaatttgggacttgagagtagtttaacacttcggcgcctcctggtttggacctatgatcccaaaatacgactgaagacccttgcggccctagtggaccactgccaaggtcccacgcgcgtctttcccacgcacgtctttcccacgcgcgactttcccacgcgcgactttcccacgcgcgactttcccatgcacgtctttcccacgcgcgtctttcccacgcgcgtctggcactcgctttgtttcagaactcgtttgtagggtgcgccatccaggcttgcttttgtgtcctgcccgtttttgtccttaatggccgtgttgattcgataggaatcgacagatgggagccaagaggggacgtaaccacttgccagtgtggcccagtatttatatggtagaagctcgggctggcattgagatggaggtgggaaagaggagggtgtctcgtgtttaaagatttctctcttgtgtggtccttggttatggctccccatggtgcttgctgctcccttggtcgcctttccttgcattttgctttttgcctttagtccttctgcagtcagggaccatgttggtgactctcggtcagatgttcccatatttgcatgtcttgctttggcctctctggctctaggttctgtattgctagttgctttctgacattttttctcattgtttgtgctaccttggccaagaacctctttgccttctccctcgtttgtaacattgagatcctagtagcagttacttcttagggttgttaggatgacatgagatgggcgagttggccatctgccacacaagagttcccttctcactgccatcctctgcccagggtgttccccagaatctgcagggccccattggtcatcttgctgtctgcacaccttcctctctcacctcttggcacttccctcaaaaaagagagaagtggagcacagtaaataaacgccagcgttttctccagttcccagcacctctccggaactggatcccccaaactcctctgtcactttctgtgtccagcgggcccctggggtccttcactgtcttcactctgctcagcctgtgcgcttggccttggtgctgtagggactgttataagagctgctgtccgatccccatattcaatctcacagccccactttgtgtacacacaccagagccatcttcttaaaatcagatcctgtcactcctctccctaaaatctaccagtggtctaataaaatcttgaatttttagcataaaaaaaaa

SEQ ID NO: 442693 - DNA, 3857 bp, Homo sapiens
ccatgggcgcttccaggccgcactcacggtccttgcctgccccctggcgtccgtgtggaggaaggcagtgcccgtttcttcagccgtgggtgcccctggctctgcctccccggggatcccccaaaaccctcgggccctcctcttccgggaagtcctccgggccgacccacacagctgtcgctgccctgattccactccctcttccctgcttggcccttacccgagggcgggcctgcccatgaggccgctctcaggacgcctgcccacagcagctcctgacattgggccctgtgctcaggggtggagtctggggctgggtgagggcaccgacgggtggaggggaagctgccggaagcggggagagaggcggcccccacctgtgcccccgcagctctgagggttgggaaggcagcgcctgcagccctcaccttcctgccctcaggctgcgaggcttgttcccagagggccgttggcttccctgagtgcctgagtgtccataagttggacccccaagaagccccaaccgggaggtcctcctccccctctcctgcgctcaggccggccctggcggtgcttgcccagtgggttcccatagtgcgggcgctaagtgctcagatgggccccagtgggcctgaggacttgtggggccggctgggccctcaggaggagccggggtgctctggagcgcctgtgggtgctgggtgtggctgcttcccggcctgtcatgaggaagtgggacggcccgcctgccacgcccagctctgggtgctccagctgggccacagcctggtcctgccgctgcgcccgcccgccatggtgtcccgggaccaggctcacctgggccccaagtatgtgggcctctgggacttcaagtcccggacggacgaggagctgagcttccgcgcgggggacgtcttccacgtggccaggaaggaggagcagtggtggtgggccacgctgctggacgaggcgggtggggccgtggcccagggctatgtgccccacaactacctggccgagagggagacggtggagtcggaaccgtggttctttggctgcatctcccgctcggaagctgtgcgtcggctgcaggccgagggcaacgccacgggcgccttcctgatcagggtcagcgagaagccgagtgccgactacgtcctgtcggtgcgggacacgcaggctgtgcggcactacaagatctggcggcgtgccgggggccggctgcacctgaacgaggcggtgtccttcctcagcctgcccgagcttgtgaactaccacagggcccagagcctgtcccacggcctgcggctggccgcgccctgccggaagcacgagcctgagcccctgccccattgggatgactgggagaggccgagggaggagttcacgctctgcaggaagctggggtccggctactttggggaggtcttcgaggggctctggaaagaccgggtccaggtggccattaaggtgatttctcgagatgctgcagtcggagatccaggccatgaagaagctgcggcacaaacacatcctggcgctgtacgccgtggtgtccgtgggggaccccgtgtacatcatcacggagctcatggccaagggcagcctgctggagctgctccgcgactctgatgagaaagtcctgcccgtttcggagctgctggacatcgcctggcaggtggctgagggcatgtgttacctggagtcgcagaattacatccaccgggacctggccgccaggaacatcctcgtcggggaaaacaccctctgcaaagttggggacttcgggttagccaggcttatcaaggaggacgtctacctctcccatgaccacaatatcccctacaagtggacggcccctgaagcgctctcccgaggccattactccaccaaatccgacgtctggtcctttgggattctcctgcatgagatgttcagcaggggtcaggtgccctacccaggcatgtccaaccatgaggccttcctgagggtggacgccggctaccgcatgccctgccctctggagtgcccgcccagcgtgcacaagctgatgctgacatgctggtgcagggaccccgagcagagaccctgcttcaaggccctgcgggagaggctctccagcttcaccagctacgagaacccgacctgagctgctgtggagcgggcatggccgggccctgctgaggaggggcctgggcagagggcctggacctgggatcaaggcccacgcgcttccctggggtttactgaggtgatgggtgcaggaaaggttcacaaatgtggagtgtctgcgtccaatacacgcgtgtgctcctctccttactccatcgtgtgtgccttgggtctcagctgctgacacgcagcctgctctggagcctgcagatgagatccgggagactgacacgaagccagcagaggtcagaggggactctgaccacagcccgctctctggctgtctgtctgcagtgcccggctgagggtgggaggcaaacacgccttgttcctgctcttcccagttcagcttggtgggagaaagtcattcgcgtggctcgggacgctcatgtaaatttggttttggtgctcaagggttctttcctcccaggggcaggtgtttctttcctgtttgtcttgtgtcttgagagcttggccttatgaccagtgagaactctctccctggtctctgccagcccaagcatcactgcccgaggcgccagctcagtttcaccgtccacgtccacaaggggcttttcccaccttcacctttgtcgctgggtcagtgctggaaagcgcccctcactcctgcgctgacaagggcccttctctactgtctgtggggtggttccgggctgggggggctgcctcctttgcacctgattttgaaggtgtctctttcatccatggttaagtcataaaaagcttattggttttggttttgactcacctgaaagtttttttggtttaaaagaagaataggcggggcacggtggctcatgcctgtaatcccagcactttgggaggctgaggcaggtggatcacgaggtcaggagatcgacaccatcctggctaacacggtgaaaccccgtctctactaaaaaatacaaaaaattagctgggtgtggtggtgggggtgggcgcctgtggtcccagctacgtgggaggctgaggcagcagactggtgtgaacccgggaggtggagcttgcagtgagccgagatcgcgccactgcactccagcctgggcgacagagcgagactccatctcaaaaaaaaaaaaaaaaaaaagaaagaaagaaaaataattttgggagtttctggaaaggtactaggatttctcaaaaggatttgtcttctgccttgtgaaagacagatgtcagactaatcaggcttatccgatgtgctacatgagatggaaagcgtgtgaaatagtaagtcacactaagtcttctggaggttctatttacgggtttggttttgatatgaatgttgcagaaactctataaaattcctagaaatctgatacgttatcctatgatatgtatcctatctcacatgctattcctagaaatctggtacaatgttatcagtcataattttggttattacattaaaatgctgcatgccacagaaataaccaagtttccttgccaaccgtgtcacgaatataataaactctcatcagatcctgagccatggctatcttaagtcttcggtcattcacagttattatcttactttgattttttctgaaagctttgcaatcagctagtcccaaattgtttattcttcaaagagattcctgggaaggattctgacaggtgctctggagcacaggtttctggttcaggtcatagccttggat

SEQ ID NO: 442694 - DNA, 3678 bp, Homo sapiens
ccatgggcgcttccaggccgcactcacggtccttgcctgccccctggcgtccgtgtggaggaaggcagtgcccgtttcttcagccgtgggtgcccctggctctgcctccccggggatcccccaaaaccctcgggccctcctcttccgggaagtcctccgggccgacccacacagctgtcgctgccctgattccactccctcttccctgcttggcccttacccgagggcgggcctgcccatgaggccgctctcaggacgcctgcccacagcagctcctgacattgggccctgtgctcaggggtggagtctggggctgggtgagggcaccgacgggtggaggggaagctgccggaagcggggagagaggcggcccccacctgtgcccccgcagctctgagggttgggaaggcagcgcctgcagccctcaccttcctgccctcaggctgcgaggcttgttcccagagggccgttggcttccctgagtgcctgagtgtccataagttggacccccaagaagccccaaccgggaggtcctcctccccctctcctgcgctcaggccggccctggcggtgcttgcccagtgggttcccatagtgcgggcgctaagtgctcagatgggccccagtgggcctgaggacttgtggggccggctgggccctcaggaggagccggggtgctctggagcgcctgtgggtgctgggtgtggctgcttcccggcctgtcatgaggaagtgggacggcccgcctgccacgcccagctctgggtgctccagctgggccacagcctggtcctgccgctgcgcccgcccgccatggtgtcccgggaccaggctcacctgggccccaagtatgtgggcctctgggacttcaagtcccggacggacgaggagctgagcttccgcgcgggggacgtcttccacgtggccaggaaggaggagcagtggtggtgggccacgctgctggacgaggcgggtggggccgtggcccagggctatgtgccccacaactacctggccgagagggagacggtggagtcggaaccgtggttctttggctgcatctcccgctcggaagctgtgcgtcggctgcaggccgagggcaacgccacgggcgccttcctgatcaggtgcgggacacgcaggctgtgcggcactacaagatctggcggcgtgccgggggccggctgcacctgaacgaggcggtgtccttcctcagcctgcccgagcttgtgaactaccacagggcccagagcctgtcccacggcctgcggctggccgcgccctgccggaagcacgagcctgagcccctgccccattgggatgactgggagaggccgagggaggagttcacgctctgcaggaagctggggtccggctactttggggaggtcttcgaggggctctggaaagaccgggtccaggtggccattaaggtgatttctcgagactctgatgagaaagtcctgcccgtttcggagctgctggacatcgcctggcaggtggctgagggcatgtgttacctggagtcgcagaattacatccaccgggacctggccgccaggaacatcctcgtcggggaaaacaccctctgcaaagttggggacttcgggttagccaggcttatcaaggaggacgtctacctctcccatgaccacaatatcccctacaagtggacggcccctgaagcgctctcccgaggccattactccaccaaatccgacgtctggtcctttgggattctcctgcatgagatgttcagcaggggtcaggtgccctacccaggcatgtccaaccatgaggccttcctgagggtggacgccggctaccgcatgccctgccctctggagtgcccgcccagcgtgcacaagctgatgctgacatgctggtgcagggaccccgagcagagaccctgcttcaaggccctgcgggagaggctctccagcttcaccagctacgagaacccgacctgagctgctgtggagcgggcatggccgggccctgctgaggaggggcctgggcagagggcctggacctgggatcaaggcccacgcgcttccctggggtttactgaggtgatgggtgcaggaaaggttcacaaatgtggagtgtctgcgtccaatacacgcgtgtgctcctctccttactccatcgtgtgtgccttgggtctcagctgctgacacgcagcctgctctggagcctgcagatgagatccgggagactgacacgaagccagcagaggtcagaggggactctgaccacagcccgctctctggctgtctgtctgcagtgcccggctgagggtgggaggcaaacacgccttgttcctgctcttcccagttcagcttggtgggagaaagtcattcgcgtggctcgggacgctcatgtaaatttggttttggtgctcaagggttctttcctcccaggggcaggtgtttctttcctgtttgtcttgtgtcttgagagcttggccttatgaccagtgagaactctctccctggtctctgccagcccaagcatcactgcccgaggcgccagctcagtttcaccgtccacgtccacaaggggcttttcccaccttcacctttgtcgctgggtcagtgctggaaagcgcccctcactcctgcgctgacaagggcccttctctactgtctgtggggtggttccgggctgggggggctgcctcctttgcacctgattttgaaggtgtctctttcatccatggttaagtcataaaaagcttattggttttggttttgactcacctgaaagtttttttggtttaaaagaagaataggcggggcacggtggctcatgcctgtaatcccagcactttgggaggctgaggcaggtggatcacgaggtcaggagatcgacaccatcctggctaacacggtgaaaccccgtctctactaaaaaatacaaaaaattagctgggtgtggtggtgggggtgggcgcctgtggtcccagctacgtgggaggctgaggcagcagactggtgtgaacccgggaggtggagcttgcagtgagccgagatcgcgccactgcactccagcctgggcgacagagcgagactccatctcaaaaaaaaaaaaaaaaaaaagaaagaaagaaaaataattttgggagtttctggaaaggtactaggatttctcaaaaggatttgtcttctgccttgtgaaagacagatgtcagactaatcaggcttatccgatgtgctacatgagatggaaagcgtgtgaaatagtaagtcacactaagtcttctggaggttctatttacgggtttggttttgatatgaatgttgcagaaactctataaaattcctagaaatctgatacgttatcctatgatatgtatcctatctcacatgctattcctagaaatctggtacaatgttatcagtcataattttggttattacattaaaatgctgcatgccacagaaataaccaagtttccttgccaaccgtgtcacgaatataataaactctcatcagatcctgagccatggctatcttaagtcttcggtcattcacagttattatcttactttgattttttctgaaagctttgcaatcagctagtcccaaattgtttattcttcaaagagattcctgggaaggattctgacaggtgctctggagcacaggtttctggttcaggtcatagccttggat

SEQ ID NO: 442695 - DNA, 2574 bp, Homo sapiens
ccatgggcgcttccaggccgcactcacggtccttgcctgccccctggcgtccgtgtggaggaaggcagtgcccgtttcttcagccgtgggtgcccctggctctgcctccccggggatcccccaaaaccctcgggccctcctcttccgggaagtcctccgggccgacccacacagctgtcgctgccctgattccactccctcttccctgcttggcccttacccgagggcgggcctgcccatgaggccgctctcaggacgcctgcccacagcagctcctgacattgggccctgtgctcaggggtggagtctggggctgggtgagggcaccgacgggtggaggggaagctgccggaagcggggagagaggcggcccccacctgtgcccccgcagctctgagggttgggaaggcagcgcctgcagccctcaccttcctgccctcaggctgcgaggcttgttcccagagggccgttggcttccctgagtgcctgagtgtccataagttggacccccaagaagccccaaccgggaggtcctcctccccctctcctgcgctcaggccggccctggcggtgcttgcccagtgggttcccatagtgcgggcgctaagtgctcagatgggccccagtgggcctgaggacttgtggggccggctgggccctcaggaggagccggggtgctctggagcgcctgtgggtgctgggtgtggctgcttcccggcctgtcatgaggaagtgggacggcccgcctgccacgcccagctctgggtgctccagctgggccacagcctggtcctgccgctgcgcccgcccgccatggtgtcccgggaccaggctcacctgggccccaagtatgtgggcctctgggacttcaagtcccggacggacgaggagctgagcttccgcgcgggggacgtcttccacgtggccaggaaggaggagcagtggtggtgggccacgctgctggacgaggcgggtggggccgtggcccagggctatgtgccccacaactacctggccgagagggagacggtggagtcggaaccgtggttctttggctgcatctcccgctcggaagctgtgcgtcggctgcaggccgagggcaacgccacgggcgccttcctgatcagggtcagcgagaagccgagtgccgactacgtcctgtcggtgcgggacacgcaggctgtgcggcactacaagatctggcggcgtgccgggggccggctgcacctgaacgaggcggtgtccttcctcagcctgcccgagcttgtgaactaccacagggcccagagcctgtcccacggcctgcggctggccgcgccctgccggaagcacgagcctgagcccctgccccattgggatgactgggagaggccgagggaggagttcacgctctgcaggaagctggggtccggctactttggggaggtcttcgaggggctctggaaagaccgggtccaggtggccattaaggtgatttctcgagatgctgcagtcggagatccaggccatgaagaagctgcggcacaaacacatcctggcgctgtacgccgtggtgtccgtgggggaccccgtgtacatcatcacggagctcatggccaagggcagcctgctggagctgctccgcgactctgatgagaaagtcctgcccgtttcggagctgctggacatcgcctggcaggtggctgagggcatgtgttacctggagtcgcagaattacatccaccgggacctggccgccaggaacatcctcgtcggggaaaacaccctctgcaaagttggggacttcgggttagccaggcttatcaaggaggacgtctacctctcccatgaccacaatatcccctacaagtggacggcccctgaagcgctctcccgaggccattactccaccaaatccgacgtctggtcctttgggattctcctgcatgagatgttcagcaggggtcaggtgccctacccaggagattcagggtcttgctatgttgcccaggctggtctcgaactcctgggctctagcaatcctcctgcctcgggactacaggcctgagctgctgcgcccagcctgggcacgaaagccgtctgtacgagagttgctggggaaatttctctgaagtctgtatcaagtggggcagcttcagcttacagggctttgggaaaagagcagttttaattttcagtgactccatgaggaatggtggaagaaaaaattggaaagagtggtttggtgagctgtaggcaaatattggaggaaactgaagttcaggacccggtccggaccacaggtgggcgacaaaacctccagacagcaaaccgggctagagtctaatagtgggggcacgagttttattttgaaacataatttttctctctacagtcaacaaatttctttttctttttttttttttgagatagagtttcgctcttattgcacaggctggagtgcaatggcttgatctcggctcacggcaacctctgcctcccgggttcaagtgattctcctgcctcagcctcccgagtagctgggattacaggcatgcgccaccacgcccagctaatttttgtactttcagtaga

SEQ ID NO: 442696 - DNA, 3877 bp, Homo sapiens
ccatgggcgcttccaggccgcactcacggtccttgcctgccccctggcgtccgtgtggaggaaggcagtgcccgtttcttcagccgtgggtgcccctggctctgcctccccggggatcccccaaaaccctcgggccctcctcttccgggaagtcctccgggccgacccacacagctgtcgctgccctgattccactccctcttccctgcttggcccttacccgagggcgggcctgcccatgaggccgctctcaggacgcctgcccacagcagctcctgacattgggccctgtgctcaggggtggagtctggggctgggtgagggcaccgacgggtggaggggaagctgccggaagcggggagagaggcggcccccacctgtgcccccgcagctctgagggttgggaaggcagcgcctgcagccctcaccttcctgccctcaggctgcgaggcttgttcccagagggccgttggcttccctgagtgcctgagtgtccataagttggacccccaagaagccccaaccgggaggtcctcctccccctctcctgcgctcaggccggccctggcggtgcttgcccagtgggttcccatagtgcgggcgctaagtgctcagatgggccccagtgggcctgaggacttgtggggccggctgggccctcaggaggagccggggtgctctggagcgcctgtgggtgctgggtgtggctgcttcccggcctgtcatgaggaagtgggacggcccgcctgccacgcccagctctgggtgctccagctgggccacagcctggtcctgccgctgcgcccgcccgccatggtgtcccgggaccaggctcacctgggccccaagtatgtgggcctctgggacttcaagtcccggacggacgaggagctgagcttccgcgcgggggacgtcttccacgtggccaggaaggaggagcagtggtggtgggccacgctgctggacgaggcgggtggggccgtggcccagggctatgtgccccacaactacctggccgagagggagacggtggagtcggaaccgtggttctttggctgcatctcccgctcggaagctgtgcgtcggctgcaggccgagggcaacgccacgggcgccttcctgatcagggtcagcgagaagccgagtgccgactacgtcctgtcggtgcgggacacgcaggctgtgcggcactacaagatctggcggcgtgccgggggccggctgcacctgaacgaggcggtgtccttcctcagcctgcccgagcttgtgaactaccacagggcccagagcctgtcccacggcctgcggctggccgcgccctgccggaagcacgagcctgagcccctgccccattgggatgactgggagaggccgagggaggagttcacgctctgcaggaagctggggtccggctactttggggaggtcttcgaggggctctggaaagaccgggtccaggtggccattaaggtgatttctcgagacaacctcctgcaccagcagatgctgcagtcggagatccaggccatgaagaagctgcggcacaaacacatcctggcgctgtacgccgtggtgtccgtgggggaccccgtgtacatcatcacggagctcatggccaagggcagcctgctggagctgctccgcgactctgatgagaaagtcctgcccgtttcggagctgctggacatcgcctggcaggtggctgagggcatgtgttacctggagtcgcagaattacatccaccgggacctggccgccaggaacatcctcgtcggggaaaacaccctctgcaaagttggggacttcgggttagccaggcttatcaaggaggacgtctacctctcccatgaccacaatatcccctacaagtggacggcccctgaagcgctctcccgaggccattactccaccaaatccgacgtctggtcctttgggattctcctgcatgagatgttcagcaggggtcaggtgccctacccaggcatgtccaaccatgaggccttcctgagggtggacgccggctaccgcatgccctgccctctggagtgcccgcccagcgtgcacaagctgatgctgacatgctggtgcagggaccccgagcagagaccctgcttcaaggccctgcgggagaggctctccagcttcaccagctacgagaacccgacctgagctgctgtggagcgggcatggccgggccctgctgaggaggggcctgggcagagggcctggacctgggatcaaggcccacgcgcttccctggggtttactgaggtgatgggtgcaggaaaggttcacaaatgtggagtgtctgcgtccaatacacgcgtgtgctcctctccttactccatcgtgtgtgccttgggtctcagctgctgacacgcagcctgctctggagcctgcagatgagatccgggagactgacacgaagccagcagaggtcagaggggactctgaccacagcccgctctctggctgtctgtctgcagtgcccggctgagggtgggaggcaaacacgccttgttcctgctcttcccagttcagcttggtgggagaaagtcattcgcgtggctcgggacgctcatgtaaatttggttttggtgctcaagggttctttcctcccaggggcaggtgtttctttcctgtttgtcttgtgtcttgagagcttggccttatgaccagtgagaactctctccctggtctctgccagcccaagcatcactgcccgaggcgccagctcagtttcaccgtccacgtccacaaggggcttttcccaccttcacctttgtcgctgggtcagtgctggaaagcgcccctcactcctgcgctgacaagggcccttctctactgtctgtggggtggttccgggctgggggggctgcctcctttgcacctgattttgaaggtgtctctttcatccatggttaagtcataaaaagcttattggttttggttttgactcacctgaaagtttttttggtttaaaagaagaataggcggggcacggtggctcatgcctgtaatcccagcactttgggaggctgaggcaggtggatcacgaggtcaggagatcgacaccatcctggctaacacggtgaaaccccgtctctactaaaaaatacaaaaaattagctgggtgtggtggtgggggtgggcgcctgtggtcccagctacgtgggaggctgaggcagcagactggtgtgaacccgggaggtggagcttgcagtgagccgagatcgcgccactgcactccagcctgggcgacagagcgagactccatctcaaaaaaaaaaaaaaaaaaaagaaagaaagaaaaataattttgggagtttctggaaaggtactaggatttctcaaaaggatttgtcttctgccttgtgaaagacagatgtcagactaatcaggcttatccgatgtgctacatgagatggaaagcgtgtgaaatagtaagtcacactaagtcttctggaggttctatttacgggtttggttttgatatgaatgttgcagaaactctataaaattcctagaaatctgatacgttatcctatgatatgtatcctatctcacatgctattcctagaaatctggtacaatgttatcagtcataattttggttattacattaaaatgctgcatgccacagaaataaccaagtttccttgccaaccgtgtcacgaatataataaactctcatcagatcctgagccatggctatcttaagtcttcggtcattcacagttattatcttactttgattttttctgaaagctttgcaatcagctagtcccaaattgtttattcttcaaagagattcctgggaaggattctgacaggtgctctggagcacaggtttctggttcaggtcatagccttggat

SEQ ID NO: 442697 - DNA, 2834 bp, Homo sapiens
gagtcacaggctgtgtagggttagctcccgggggacccaagcaacaagcaggggaggctgtaaagaggccgtcgggcaggggcccatggtggagacccctctattacgtgcagacccacgacctcgttagcagggtcacgcgcagacccacgacctcgttagtgagcaggggtgcaggggtggggtctggccggaggctggtcagctcccaggtgcaaagaccctgagtcctgagaactcgcccaggtggttctttggctgcatctcccgctcggaagctgtgcgtcggctgcaggccgagggcaacgccacgggcgccttcctgatcaggtgcgggacacgcaggctgtgcggcactacaagatccggctactttggggaggtcttcgaggggctctggaaagaccgggtccaggtggccattaaggtgatttctcgagacaacctcctgcaccagcagatgctgcagtcggagatccaggccatgaagaagctgcggcacaaacacatcctggcgctgtacgccgtggtgtccgtgggggaccccgtgtacatcatcacggagctcatggccaagggcagcctgctggagctgctccgcgactctgatgagaaagtcctgcccgtttcggagctgctggacatcgcctggcaggtggctgagggcatgtgttacctggagtcgcagaattacatccaccgggacctggccgccaggaacatcctcgtcggggaaaacaccctctgcaaagttggggacttcgggttagccaggcttatcaaggaggacgtctacctctcccatgaccacaatatcccctacaagtggacggcccctgaagcgctctcccgaggccattactccaccaaatccgacgtctggtcctttgggattctcctgcatgagatgttcagcaggggtcaggtgccctacccaggcatgtccaaccatgaggccttcctgagggtggacgccggctaccgcatgccctgccctctggagtgcccgcccagcgtgcacaagctgatgctgacatgctggtgcagggaccccgagcagagaccctgcttcaaggccctgcgggagaggctctccagcttcaccagctacgagaacccgacctgagctgctgtggagcgggcatggccgggccctgctgaggaggggcctgggcagagggcctggacctgggatcaaggcccacgcgcttccctggggtttactgaggtgatgggtgcaggaaaggttcacaaatgtggagtgtctgcgtccaatacacgcgtgtgctcctctccttactccatcgtgtgtgccttgggtctcagctgctgacacgcagcctgctctggagcctgcagatgagatccgggagactgacacgaagccagcagaggtcagaggggactctgaccacagcccgctctctggctgtctgtctgcagtgcccggctgagggtgggaggcaaacacgccttgttcctgctcttcccagttcagcttggtgggagaaagtcattcgcgtggctcgggacgctcatgtaaatttggttttggtgctcaagggttctttcctcccaggggcaggtgtttctttcctgtttgtcttgtgtcttgagagcttggccttatgaccagtgagaactctctccctggtctctgccagcccaagcatcactgcccgaggcgccagctcagtttcaccgtccacgtccacaaggggcttttcccaccttcacctttgtcgctgggtcagtgctggaaagcgcccctcactcctgcgctgacaagggcccttctctactgtctgtggggtggttccgggctgggggggctgcctcctttgcacctgattttgaaggtgtctctttcatccatggttaagtcataaaaagcttattggttttggttttgactcacctgaaagtttttttggtttaaaagaagaataggcggggcacggtggctcatgcctgtaatcccagcactttgggaggctgaggcaggtggatcacgaggtcaggagatcgacaccatcctggctaacacggtgaaaccccgtctctactaaaaaatacaaaaaattagctgggtgtggtggtgggggtgggcgcctgtggtcccagctacgtgggaggctgaggcagcagactggtgtgaacccgggaggtggagcttgcagtgagccgagatcgcgccactgcactccagcctgggcgacagagcgagactccatctcaaaaaaaaaaaaaaaaaaaagaaagaaagaaaaataattttgggagtttctggaaaggtactaggatttctcaaaaggatttgtcttctgccttgtgaaagacagatgtcagactaatcaggcttatccgatgtgctacatgagatggaaagcgtgtgaaatagtaagtcacactaagtcttctggaggttctatttacgggtttggttttgatatgaatgttgcagaaactctataaaattcctagaaatctgatacgttatcctatgatatgtatcctatctcacatgctattcctagaaatctggtacaatgttatcagtcataattttggttattacattaaaatgctgcatgccacagaaataaccaagtttccttgccaaccgtgtcacgaatataataaactctcatcagatcctgagccatggctatcttaagtcttcggtcattcacagttattatcttactttgattttttctgaaagctttgcaatcagctagtcccaaattgtttattcttcaaagagattcctgggaaggattctgacaggtgctctggagcacaggtttctggttcaggtcatagccttggat

SEQ ID NO: 442698 - DNA, 1655 bp, Homo sapiens
ccatgggcgcttccaggccgcactcacggtccttgcctgccccctggcgtccgtgtggaggaaggcagtgcccgtttcttcagccgtgggtgcccctggctctgcctccccggggatcccccaaaaccctcgggccctcctcttccgggaagtcctccgggccgacccacacagctgtcgctgccctgattccactccctcttccctgcttggcccttacccgagggcgggcctgcccatgaggccgctctcaggacgcctgcccacagcagctcctgacattgggccctgtgctcaggggtggagtctggggctgggtgagggcaccgacgggtggaggggaagctgccggaagcggggagagaggcggcccccacctgtgcccccgcagctctgagggttgggaaggcagcgcctgcagccctcaccttcctgccctcaggctgcgaggcttgttcccagagggccgttggcttccctgagtgcctgagtgtccataagttggacccccaagaagccccaaccgggaggtcctcctccccctctcctgcgctcaggccggccctggcggtgcttgcccagtgggttcccatagtgcgggcgctaagtgctcagatgggccccagtgggcctgaggacttgtggggccggctgggccctcaggaggagccggggtgctctggagcgcctgtgggtgctgggtgtggctgcttcccggcctgtcatgaggaagtgggacggcccgcctgccacgcccagctctgggtgctccagctgggccacagcctggtcctgccgctgcgcccgcccgccatggtgtcccgggaccaggctcacctgggccccaagtatgtgggcctctgggacttcaagtcccggacggacgaggagctgagcttccgcgcgggggacgtcttccacgtggccaggaaggaggagcagtggtggtgggccacgctgctggacgaggcgggtggggccgtggcccagggctatgtgccccacaactacctggccgagagggagacggtggagtcggaaccgtggttctttggctgcatctcccgctcggaagctgtgcgtcggctgcaggccgagggcaacgccacgggcgccttcctgatcagggtcagcgagaagccgagtgccgactacgtcctgtcggtgcgggacacgcaggctgtgcggcactacaagatctggcggcgtgccgggggccggctgcacctgaacgaggcggtgtccttcctcagcctgcccgagcttgtgaactaccacagggcccagagcctgtcccacggcctgcggctggccgcgccctgccggaagcacgagcctgagcccctgccccattgggatgactgggagaggccgagggaggagttcacgctctgcaggaagctggggtccggctactttggggaggtcttcgaggggctctggaaagaccgggtccaggtggccattaaggtgatttctcgaggtgagtgggccccgatcagggctctgtgtggccccgtgcctgccctgggccaccctcccaccccgccaacagggacctctggcctcgagccccaagcagcacccacagcgtccatgcgagagtggttccctttcaattgcacctatgtttttacctaaatacatttattata

SEQ ID NO: 442699 - DNA, 5013 bp, Homo sapiens
aacaaaaccggtatgtcaactatagcaaaatgtgatggggaaagagatgatacaacacaaaacatcacggaggtggctgctgtgaaaagcatttcaccagaagtttctgcctctaggagaaaattagattttaattctccaggtggttcttcaccagtagaaaattctgattgttccacaaatagcagattatctttctctcctgaaaatatcctcatccaaaaccaagacattgtgagagaagctgcagtgcagggagatgggcagaagcaaaggcagcctcaggccacagatctggactccagtgggacacatggcagtgagatgcttccagccacagaagtgactgtgtcaggagggttttctgttgaagaaaccagctgtggagacacagggagatctggtggtgaggccctggctgttgcaaatgattctaccagcacaccacaaaatgctaatggactttggaaattgaaatctacaactcccggtggtgctttgcctgagtgttttggcaccacagacactactttttcttcagcattttgcagaaaacatggagagacacaggatacctcccaaagtagcctgcctggtaccttacattgttacacaggcattcgagaggggggagacgacactgaggtagagagtgaggcatttagctgcagtgaggggagcgaacagcaagatgctcctgatgactcacagaaaaatttaggagacacagatgctgctgtagccgaggtgagaccttccttagaggtaggttatttgacgtcagctctgcaagattttaacataagtactttttctgagctggatagactttccacatcagaggttgtgatgtttcttgagagctgtcagttaggggattatagttcaggggactctgtttctgaatgttctagtaaaggaaccctaagtaaagaaatgaacaaagaattaaaggcaagtgaaataggagaaaaatacagaaagcaaccctgtgaggaagaaacacttggaacctgtgaagagtggattgaatcagaggaagatgattattcgttaaaaaatacaagtcagctcactcagtgttctttggaaactctgtctgaggttctgaccaagattaggcaagaacttcaaacaaattctgaagattgcaatggtaaagatactggcagtttattgctcttaaatgtaaataacaacatgaccactgagaatttaaaagagaaaagtccatttcgggaaacgactggctcctcatcacatgcttcagaaccaaccccacaagcagctgccttggacactgagggcagctctcccatcagcggtatgcctcagaatgaaaaccctcagagcagaccagaggcccgttcagatgcaggcaggcaaaccgatggtggggaagaagacctgccagaacctgtggagccatcagccttgtgctctgactctgtgatggagccatccatagagcaaagttctaactgcgaggccgaaacaacatttcagtgtcagatagcaacagtgacctcagaagttataaacgtacttataaataaggatcagaatctagtcattgaaaagggggacaactggacaatcatcagtggtgtagctgtcttgccacatgtggaccaggtcacactgtgtgacattcctggagacatccctatttctcaggatcaaggagagctggaagctggttgcatcccagtgacttctgctgagaagtccccagaggccagtcacactggccctgcatttcaggaggctccatgtggcaataatctttcatgtccccaagaggatgtttcaagcagtggtcagagcaccaactttgataagagtcgtttgcgaaatagacccgttaagcctagtatatggattagttctcaaatctatgatcaaaacttcgagactcagattgttgcgtctgatcacacatattataactcaaaactagagccatctggcaaaaataagaatcgatcaaagatttcaaacaaagatcagtcaaacaaaccagtaaaaacttcagcgtcgagcagagttgaaactcatcagagtgaagttgctcagtcattttcaggggaaaaagctaatacaaaaactcaaagaagccaaactcagaccattttagcaaatgctgatacatccactcctacagattgttctcctgacacactgagtaaaatacggcaagaggtggggcctcctttgccgcctctgcttgctcctctgatagctacacctccaaggacttcacagccactgtctccactgatatcgagttctagtccttcctcaccagcctctcctgttggccaggtttctcccttccgtgaaaccccagtgcctcctgccatgtctccatggccagaggaccccagacgtgcctctcctccagatccttctccatctccatctgcagcttcagccagtgagagggtagtgccgtctcctctgcagttctgtgcggccacgccgaagcacgcacttcctgtgcctggccgactcccaccctgtgcatctggccacgctgctgtgggagggcctcaggagaattctgtgaaaatccttgacaccatgtatccagagttatctgccagggcccggaccctcaacatcctcaaagggaatattcaactcacacgaggtccgcctgctgactgtaagaatttaccgggacctgccagtgctatgataggattcaaaacgatcacttcagcagcaactgcttttgtcaaaactgggagcagctctggtggtgactgtaaccaagacaagtcaagagatttggggactcagcaggattcaagcgggaaaagaacactgtcaacgtctacactgagaagtgctaaaagactgcgcctggacactgggtccccagaaccagaaaccaggggagtcactgcagaaggaatccacaaaaacctcccagggaacctccctccagctgaagttgcaacaacaaatgaggaaagaagttgttctagtccagccgtcagtgcagtttcacagttgcctttaagcccaaaagaaactgtggagtcccatgataaagccatagctaatgccctgaagaaaattgcagagttttcttttgatctgttacctgtcattcgtagtcatgtgtatgtgggaaatatctccaaaaagcccgtaatgagagatcaagagaaggaagttgtttatgaatttagcacaacaaaaaagcatttagcagagtgcttgcttcactctattctctcagaactaaaaattcagaagatatctatggaccacaattacattcacgccctctgcagggtgtatgtgggtatttgtcggcaactcggagacttggaaagagctcgtttgttttgctacagcctacttaaagaagattttccggagtctgaaaaattaactttgtttattgcaaacatgtggcatgatatatttctctctcaatcggtgattaataaagcaatgcagttagttgccaggcaacgtgctaaaggagaggttctgaactgcttgagagcttttcttaattgggaaaagaatgccccggtagatgttggcttcatggtttctaagctgcttttgaccatacagttatgtccaaaaacagaatttcaacctagtgaaaaatttggtgaagacctaagtgataacacttgggaatacatatttgccattgatctgctctgctgccatcagaaatggatctggacgcatgataacatcataagtaaggagctgtggcctgtgatggataaatggataaaatacagaaaaggacatgcaaacattgcgtatactcctgatattattatagcctcaatactgaggctgattggtcgtttaggccaattgggtttgaaagaaggatttccatctgctgtgaaaaatattagttcggttattggtatgtttatacagcatgctcacgatgaagatataccatggggtatacagttagcagccgtgtatgctctttgtgacttgagtcccagcaatccagcagaaatttccaagatcctggaagcttggcggagagaggcctccaaaagcgttccgtctgcgattgtcagctgcctagaggaagtcagtgccctgagcacagaggagcttggctgacctgggatgccactgaggcttgagaagtgccttgacacattttgaacacaaatagtttgatcagctttcagaatacaaagggaggtttcaaaacaaaaagacataaaatagataaaacagaccagaggctctccttattgtttggcaaggagacaggagaaacaagcagtcgcatagtcgtttttccctaaatctaatacgtttcacttaaggctgttgtgatctgtgacatatgggttatattattgtgtctttgtcaaacaacaaaaacttgaacttagccctttttttgctgcagaaagtgtccttttagtggcttcttaaaattgagtggcattttataatgaacttaccaatataaaaacatgatttggttcctgagctgttgttgttggacttgtgttccaatgagtgactaggaaaaaataaattggcaaaaacctagagttttctgctatctttgctggaaatgagttgcaaaagtttttctcaagatgtagtgcgtaattgatcagagcaaaacatgcagagcccttagcagaaacccactttaatgcattttcttcatatccctaaagttccttaaaaatatgtgacaatgcatcaggaagaggagaactgaagagtagaagttcccttgcagatttttttatcagtgacatgtaatgagcaattcacagatgagcgcaggcagagctctgtgtgccgtgtacatatggaccgtgctatgatgtgtctcacattggatgatattccactttgggaattttagtatttgtatatagaaaatgggtttaataactcaccatggttttgatttgtcttatattcgttatttcttaaaactcttgtatgtgtttttataataaaaaataaaagtaagccatggat

SEQ ID NO: 442700 - DNA, 363 bp, Homo sapiens
ttctgtatttgaatagtattccagtaggttacatcactaaaattttgaataacagatattttcttgttttatgactgatctgaaatttcttttcagatataccatggggtatacagttagcagccgtgtatgctctttgtgacttgagtcccagcaatccagcagaaatttccaagatcctggaagcttggcggagagaggcctccaaaagcgttccgtctgcgattgtcagctgcctagaggaagtcagtgccctgagcacagaggagcttggctgacctgggatgccactgaggcttgagaagtgccttgacacattttgaacacaaatagtttgatcagctttcagaatacaaagggagg

SEQ ID NO: 442701 - DNA, 276 bp, Homo sapiens
agagtaggaagagggagggggacaggcatctaagatagactttctccatctgttgggagcctgggcaagtaggaaagaagcctttttcatacactttagttgtatggctgagctgcttggcagggcactggaaacggcgaacttgtgcagcctgcaaatgagaccactcttatttttcagttttgatttgattcactcacttgtagttaggtaaatacgggctctatgtggctcaaggaatgtcaggctggggtaggtggcaaaagatacagtgat

SEQ ID NO: 442702 - DNA, 7307 bp, Homo sapiens
ttaggggcagaaaaacatttgtaataattaatggctttgagagacacaaggctttgtttgccccagagtattagttaacccacctagtgctcctaatcatacaatattaaggattgggagggacattcattgcctcactctctatttgtttcaccttctgtaaaattggtagaataatagtacccacttcatagcattgtatgatgattaaattggttaatatttttaaaatgcttagaacacagattgggcacataacagcaagcaccacatgtgtttataagataaattcctttgtgttgccttccgttaaagtttaaataagtaaataaataaataaatacttgcatgacattttgaagtctctctataacatctgagtaagtggcggctgcgacaatgctactggagttccagaatcgtgttggtgacaagattgttcaccagcatatggtgtggtgaaaactcactaatttggaattagttcagattattaagcctgaataggtgaaaatcctgaaatcaaggatctttggaactatttgaaatcagtattttatattttcctgttgtattcattaaagtgttgcaagtgttctatttgatggattaagtatatttaggatatacatgttcaatttgtgattttgtatacttaattggaacaagaaagctaataaaggttttgatatggacatctattcttttaagtaaacttcaatgaaaatatatgagtagagcatatagagatgtaaataatttgtggacacaccacagactgaaatagcaaatttaaaagaaattgttggaagaatcaagtgtttgtggaatgagtcctcctagtaaagttcctgctcttgtgaataattaagcctcatgtataattactatagcaaaaggaagcctaagaagtattagactctacttgtatttaaattacattttacataatttatgtgtatgaaaaatgttttaaatgcttattttcgtaagccatgagatagctcctttatattttaagaatttctgaattaatttgcttggattttattagtgcaaatggcagagctagcaattcctttttctgtgttcccattccatcctattcatccctcttttaggaaactctgaactctggattgtccttgtttacatacctgcctcctgcattggactatgtgtctctgagtgtagtatgactaattcatttgtttgtcaaggactctcaatgcatttgttgaacagcctaattagtaatgtctgcaacaatgacattttactgtatttaataaagctctgggaaagtaggatacacataagacaggtctaggtctaaattctttacagaaacttggatttttagttcggtttgaaatttgaagatgtgagtatatttatctcagtttcccaaaggacaagctaattggaattatcatcctctttcacttgattggatccccagaatgccatttacgcatgcagcaggattttataacagttttaaattctgtatatttgatgaagaggttttatatttttggattcaagcctctttttaaacttctacaatatggtttacaataattccttatatcctgcttttgaaatacatattacaactttttaagtttggaaggctatatttcaaggactgaagttacagtatactcaagtgatacacaagcctagcaccccactttccacatagtgttcgataaagattgataaactcgaaatcacagaccttttaattcttaagacaaatagcagcagaaagaaacatctttggcttatttctggtaaggtttttatgctctgtaaaacaaagaattgtattcatccgcgcagcacagattctattaaaaataaatgtgagagtcgttaatgtagtactgctcatttaccatcaaaattcacttttcaggaataatcccatcagtttaaattggatattggaatgagcattgattacatttaacttggtagcccaaaatttcttcatggggttttgaactcggcgggatttcaaaggttttaaaaatgagtttttgattttttttaaaaccctcaaatttcattacctttaaactaggtcgaaacggggcgcaagagattggattaacaccatagtaatacttattttgttcttaaccatttcagggcttcttgaaatagaggctgtatggtgtaatggaaaaaacagccttggaatctgggagcctgattcctggattcagtcccagttttgcgtgaccttgggcaagttactttacttctctgaatttccgtttcctcctctgcaaaatgaggatcgcaatagccaccttgcaaccttgactggagcgagcctcgcacaccccgcgccggcctggaggaagagcagccatgattacgccgccttcgctccgctacccgcttgcggctggcgccctcctccagcaggtgtaggcgctgccgcgctgccccacgcctttccgccgctcgcgggcctgcgcctcggcgtccccgaggaggccgctgcgggctgaggtagcgcaccggcctctcggcgtcccagtccggtcccgggcggagggaaagcgggcgacccacctccgaggcagaagccgaggcccggccccgccgagtgcggaggagcgcaggcagcccccgcccctcggccctccccccggccctcccggccctccctccgccccctccgccctcgcgcgccgcccgcccgggtcgccgcggggccgtggtgtacgtgcagagcgcgcagagcgagtggcgcccgtatgccctgcgctcctccacagcctgggccgggccgcccgggacgctgaggcggcggcggcggccgagggggccggtcttgcgctccccaggcccgcgcgcctgagcccaggttgccattcgccgcacaggccctattctctcagccctcggcggcgatgaggcgctgaggcggctgccggcgctgcgccggagcttaggactcggaagcggccgggccgagggcgtggggtgccggcctccctgaggcgagggtagcgggtgcatggcgcagtaacggcccctatctctctccccgctccccagcctcgggcgaggccgtccggccgctacccctcctgctcggccgccgcagtcgccgtcgccgccgccgccgccgccatggccaatgacagcggcgggcccggcgggccgagcccgagcgagcgagaccggcagtactgcgagctgtgcgggaagatggagaacctgctgcgctgcagccgctgccgcagctccttctactgctgcaaggagcaccagcgtcaggactggaagaagcacaagctcgtgtgccagggcagcgagggcgccctcggccacggagtgggcccacaccagcattccggccccgcgccgccggctgcagtgccgccgcccagggccggggcccgggagcccaggaaggcagcggcgcgccgggacaacgcctccggggacgcggccaagggaaaagtaaaggccaagcccccggccgacccagcggcggccgcgtcgccgtgtcgtgcggccgccggcggccagggctcggcggtggctgccgaagccgagcccggcaaggaggagccgccggcccgctcatcgctgttccaggagaaggcgaacctgtaccccccaagcaacacgcccggggatgcgctgagccccggcggcggcctgcggcccaacgggcagacgaagcccctgccggcgctgaagctggcgctcgagtacatcgtgccgtgcatgaacaagcacggcatctgtgtggtggacgacttcctcggcaaggagaccggacagcagatcggcgacgaggtgcgcgccctgcacgacaccgggaagttcacggacgggcagctggtcagccagaagagtgactcgtccaaggacatccgaggcgataagatcacctggatcgagggcaaggagcccggctgcgaaaccattgggctgctcatgagcagcatggacgacctgatacgccactgtaacgggaagctgggcagctacaaaatcaatggccggacgaaagccatggttgcttgttatccgggcaatggaacgggttatgtacgtcatgttgataatccaaatggagatggaagatgtgtgacatgtatatattatcttaataaagactgggatgccaaggtaagtggaggtatacttcgaatttttccagaaggcaaagcccagtttgctgacattgaacccaaatttgatagactgctgtttttctggtctgaccgtcgcaaccctcatgaagtacaaccagcatatgctacaaggtacgcaataactgtttggtattttgatgcagatgagagagcacgagctaaagtaaaatatctaacaggtgaaaaaggtgtgagggttgaactcaataaaccttcagattcggtcggtaaagacgtcttctagagcctttgatccagcaataccccacttcacctacaatattgttaactatttgttaacttgtgaatacgaataaatgggataaagaaaaatagacaaccagttcgcattttaataaggaaacagaaacaactttttgtgttgcatcaaacagaagattttgactgctgtgactttgtactgcatgatcaacttcaaatctgtgattgcttacaggaggaagataagctactaattgaaaatggtttttacatctggatatgaaataagtgccctgtgtagaatttttttcattcttatattttgccagatctgttatctagctgagttcatttcatctctcccttttttatatcaagtttgaatttgggataatttttctatattaggtacaatttatctaaactgaattgagaaaaaattacagtattattcctcaaaataacatcaatctatttttgtaaacctgttcatactattaaattttgccctaaaagacctcttaataatgattgttgccagtgactgatgattaattttattttacttaaaataagaaaaggagcactttaattacaactgaaaaatcagattgttttgtagtccttccttacactaatttgaactgttaaagattgctgctttttttttgacattgtcaataacgaaacctaattgtaaaacagtcaccatttactaccaataacttttagttaatgttttacaaggaaaaagacacaagaagagtttaaatttttttgttttgttttgtttttttgagacagtcttgctctgttacccaggctggaggggagtggtgcattcttggctcactgcaacctccgcctcccaggttcaagcaatcctcccacctcagcctcccaactagctgggactgcaggcacacaccaccatgcctgactaatttttgtatgtttagtagagacggggttttgccatgttgcctaggctggggtttaagttaaattttttaaaaaactaaagtgactggcactaagtgaacttgagattatcctcagcttcaagttcctaagataagggctttcttaagctttcaggtgtatgtatcctctagatgtagacaataatgtcccatttctaagtcttttccttttgcttctccttaaattgattgtacttccaaatttgctgttatgtttttttcctaatactgtgatctatctgatctgcagacaagaaccttgtctctgttgaagagcatcaaggggagattatgtacacattgaaactgaagtgtggtgttactgacggaatgtgcagtaactcctcagatatctgttaaggcatttcccagatgtgatgccagccttcttacctgtactgaaagatgcttagcttagaaaaaaacaaaacagatgcaaaatcagataattttattttgtttcatgggttttcttatttactttttaaacaaggaaggaatattagaaaatcacacaaggcctcacatacatgttatttaaagaatgaattgggacggatgtcttagacttcactttcctaggctttttagcaaaacctaaagggtggtatccatattttgcgtgaattatgggtgtaagaccttgcccacttaggttttctatctctgtccttgatcttctttgccaaaatgtgagtatacagaaattttctgtatatttcaacttaagacatttttagcatctgtatagtttgtattcaatttgagaccttttctatgggaagctcagtaatttttattaaaagattgccattgctattcatgtaaaacatggaaaaaaaattgtgtagtgaagccaacagtggacttaggatgggattgaatgttcagtatagtgatctcacttaggagaatttgcaggagaaagtgatagtttattgttttttcctcgcccatattcagttttgttctacttcctccccttccttccagatgataacatcacatctctacagtaagtgcctctgccagcccaacccaggagcgcaagttgtctttgccatctggtctatagtacagtgcgcggcgttaggccacaactcaaaagcattatcttttttagggttagtagaaattgttttatgttgatgggaggtttgtttgattgtcaaaatgtacagccacagccttttaatttgggagcccctgttgtcattcaaatgtgtacctctacagttgtaaaaagtattagattctactatctgtgggttgtgcttgccagacaggtcttaaattgtatattttttggaaaagtttatatactctcttaggaatcattgtgaaaagatcaagaaatcaggatggccatttatttaatatccattcatttcatgttagtgggactattaacttgtcaccaagcaggactctatttcaaacaaaatttaaaactgtttgtggcctatatgtgtttaatcctggttaaagataaagcttcataatgctgtttttattcaacacattaaccagctgtaaaacacagacctttatcaagagtaggcaaagattttcaggattcatatacagatagactataaagtcatgtaatttgaaaagcagtgtttcattatgaaagagctctcaagttgcttgtaaagctaatctaattaaaaagatgtataaatgttgttgaaacattatggtggttatttccagctgtcttttttgtttttcaatcctttatcatacattggctttccgaatgatccctttcatcagataaagcttttctggcttagtctaggacatttgttataactttttgtaaatgataatgaaggaaagagaacagtaaacataggagttcaacaattttagaaacatccctggggtcattggactgtctgtg

SEQ ID NO: 442703 - DNA, 544 bp, Homo sapiens
ctcccagtaggttaatagtggggggtaaggcgaggttagcgaggcttgctagaagtcatcaaaaagctattagtgggagtagagtttgaagtccttgagagaggattatgatgcgactgtgagtgcgttcgtagtttgagtttgctacagccatttaggtatacctaaatggctgtaatggccggacgaaagccatggttgcttgttatccgggcaatggaacgggttatgtacgtcatgttgataatccaaatggagatggaagatgtgtgacatgtatatattatcttaataaagactgggatgccaaggtaagtggaggtatacttcgaatttttccagaaggcaaagcccagtttgctgacattgaacccaaatttgatagactgctgtttttctggtctgaccgtcgcaaccctcatgaagtacaaccagcatatgctacaaggtagtattccttttcagaaaaaattggtttagagtatggtaggacaggagggaatctgtagatacacgtgaggctttctaatgatattttcatcaa

SEQ ID NO: 442704 - DNA, 153 bp, Homo sapiens
gcggccgcctactactactactaccactgctcgaattcaagcttctaacgatgtacggggtcatgtaatttgaaaagcagtgtttcattatgaaagagctctcaagttgcttgtaaagctaatctaattaaaaagatgtataaatgttgttga

SEQ ID NO: 442705 - DNA, 7091 bp, Homo sapiens
ttaggggcagaaaaacatttgtaataattaatggctttgagagacacaaggctttgtttgccccagagtattagttaacccacctagtgctcctaatcatacaatattaaggattgggagggacattcattgcctcactctctatttgtttcaccttctgtaaaattggtagaataatagtacccacttcatagcattgtatgatgattaaattggttaatatttttaaaatgcttagaacacagattgggcacataacagcaagcaccacatgtgtttataagataaattcctttgtgttgccttccgttaaagtttaaataagtaaataaataaataaatacttgcatgacattttgaagtctctctataacatctgagtaagtggcggctgcgacaatgctactggagttccagaatcgtgttggtgacaagattgttcaccagcatatggtgtggtgaaaactcactaatttggaattagttcagattattaagcctgaataggtgaaaatcctgaaatcaaggatctttggaactatttgaaatcagtattttatattttcctgttgtattcattaaagtgttgcaagtgttctatttgatggattaagtatatttaggatatacatgttcaatttgtgattttgtatacttaattggaacaagaaagctaataaaggttttgatatggacatctattcttttaagtaaacttcaatgaaaatatatgagtagagcatatagagatgtaaataatttgtggacacaccacagactgaaatagcaaatttaaaagaaattgttggaagaatcaagtgtttgtggaatgagtcctcctagtaaagttcctgctcttgtgaataattaagcctcatgtataattactatagcaaaaggaagcctaagaagtattagactctacttgtatttaaattacattttacataatttatgtgtatgaaaaatgttttaaatgcttattttcgtaagccatgagatagctcctttatattttaagaatttctgaattaatttgcttggattttattagtgcaaatggcagagctagcaattcctttttctgtgttcccattccatcctattcatccctcttttaggaaactctgaactctggattgtccttgtttacatacctgcctcctgcattggactatgtgtctctgagtgtagtatgactaattcatttgtttgtcaaggactctcaatgcatttgttgaacagcctaattagtaatgtctgcaacaatgacattttactgtatttaataaagctctgggaaagtaggatacacataagacaggtctaggtctaaattctttacagaaacttggatttttagttcggtttgaaatttgaagatgtgagtatatttatctcagtttcccaaaggacaagctaattggaattatcatcctctttcacttgattggatccccagaatgccatttacgcatgcagcaggattttataacagttttaaattctgtatatttgatgaagaggttttatatttttggattcaagcctctttttaaacttctacaatatggtttacaataattccttatatcctgcttttgaaatacatattacaactttttaagtttggaaggctatatttcaaggactgaagttacagtatactcaagtgatacacaagcctagcaccccactttccacatagtgttcgataaagattgataaactcgaaatcacagaccttttaattcttaagacaaatagcagcagaaagaaacatctttggcttatttctggtaaggtttttatgctctgtaaaacaaagaattgtattcatccgcgcagcacagattctattaaaaataaatgtgagagtcgttaatgtagtactgctcatttaccatcaaaattcacttttcaggaataatcccatcagtttaaattggatattggaatgagcattgattacatttaacttggtagcccaaaatttcttcatggggttttgaactcggcgggatttcaaaggttttaaaaatgagtttttgattttttttaaaaccctcaaatttcattacctttaaactaggtcgaaacggggcgcaagagattggattaacaccatagtaatacttattttgttcttaaccatttcagggcttcttgaaatagaggctgtatggtgtaatggaaaaaacagccttggaatctgggagcctgattcctggattcagtcccagttttgcgtgaccttgggcaagttactttacttctctgaatttccgtttcctcctctgcaaaatgaggatcgcaatagccaccttgcaaccttgactggagcgagcctcgcacaccccgcgccggcctggaggaagagcagccatgattacgccgccttcgctccgctacccgcttgcggctggcgccctcctccagcaggtgtaggcgctgccgcgctgccccacgcctttccgccgctcgcgggcctgcgcctcggcgtccccgaggaggccgctgcgggctgaggtagcgcaccggcctctcggcgtcccagtccggtcccgggcggagggaaagcgggcgacccacctccgaggcagaagccgaggcccggccccgccgagtgcggaggagcgcaggcagcccccgcccctcggccctccccccggccctcccggccctccctccgccccctccgccctcgcgcgccgcccgcccgggtcgccgcggggccgtggtgtacgtgcagagcgcgcagagcgagtggcgcccgtatgccctgcgctcctccacagcctgggccgggccgcccgggacgctgaggcggcggcggcggccgagggggccggtcttgcgctccccaggcccgcgcgcctgagcccaggttgccattcgccgcacaggccctattctctcagccctcggcggcgatgaggcgctgaggcggctgccggcgctgcgccggagcttaggactcggaagcggccgggccgagggcgtggggtgccggcctccctgaggcgagggtagcgggtgcatggcgcagtaacggcccctatctctctccccgctccccagcctcgggcgaggccgtccggccgctacccctcctgctcggccgccgcagtcgccgtcgccgccgccgccgccgccatggccaatgacagcggcgggcccggcgggccgagcccgagcgagcgagaccggcagtactgcgagctgtgcgggaagatggagaacctgctgcgctgcagccgctgccgcagctccttctactgctgcaaggagcaccagcgtcaggactggaagaagcacaagctcgtgtgccagggcagcgagggcgccctcggccacggagtgggcccacaccagcattccggccccgcgccgccggctgcagtgccgccgcccagggccggggcccgggagcccaggaaggcagcggcgcgccgggacaacgcctccggggacgcggccaagggaaaagtaaaggccaagcccccggccgacccagcggcggccgcgtcgccgtgtcgtgcggccgccggcggccagggctcggcggtggctgccgaagccgagcccggcaaggaggagccgccggcccgctcatcgctgttccaggagaaggcgaacctgtaccccccaagcaacacgcccggggatgcgctgagccccggcggcggcctgcggcccaacgggcagacgaagcccctgccggcgctgaagctggcgctcgagtacatcgtgccgtgcatgaacaagcacggcatctgtgtggtggacgacttcctcggcaaggagaccggacagcagatcggcgacgaggtgcgcgccctgcacgacaccgggaagttcacggacgggcagctggtcagccagaagagtgactcgtccaaggacatccgaggcgataagatcacctggatcgagggcaaggagcccggctgcgaaaccattgggctgctcatgagcagcatggacgacctgatacgccactgtaacgggaagctgggcagctacaaaatcaatggccggacgaaagccatggttgcttgttatccgggcaatggaacgggttatgtacgtcatgttgataatccaaatggagatggaagatgtgtgacatgtatatattatcttaataaagactgggatgccaaggtaagtggaggtatacttcgaatttttccagaaggcaaagcccagtttgctgacattgaacccaaatttgatagactgctgtttttctggtctgaccgtcgcaaccctcatgaagtacaaccagcatatgctacaaggtacgcaataactgtttggtattttgatgcagatgagagagcacgagctaaagtaaaatatctaacaggtgaaaaaggtgtgagggttgaactcaataaaccttcagattcggtcggtaaagacgtcttctagagcctttgatccagcaataccccacttcacctacaatattgttaactatttgttaacttgtgaatacgaataaatgggataaagaaaaatagacaaccagttcgcattttaataaggaaacagaaacaactttttgtgttgcatcaaacagaagattttgactgctgtgactttgtactgcatgatcaacttcaaatctgtgattgcttacaggaggaagataagctactaattgaaaatggtttttacatctggatatgaaataagtgccctgtgtagaatttttttcattcttatattttgccagatctgttatctagctgagttcatttcatctctcccttttttatatcaagtttgaatttgggataatttttctatattaggtacaatttatctaaactgaattgagaaaaaattacagtattattcctcaaaataacatcaatctatttttgtaaacctgttcatactattaaattttgccctaaaagacctcttaataatgattgttgccagtgactgatgattaattttattttacttaaaataagaaaaggagcactttaattacaactgaaaaatcagattgttttgtagtccttccttacactaatttgaactgttaaagattgctgctttttttttgacattgtcaataacgaaacctaattgtaaaacagtcaccatttactaccaataacttttagttaatgttttacaaggaaaaagacacaagaagagtttaaatttttttgttttgttttgtttttttgagacagtcttgctctgttacccaggctggaggggagtggtgcattcttggctcactgcaacctccgcctcccaggttcaagcaatcctcccacctcagcctcccaactagctgggactgcaggcacacaccaccatgcctgactaatttttgtatgtttagtagagacggggttttgccatgttgcctaggctggggtttaagttaaattttttaaaaaactaaagtgactggcactaagtgaacttgagattatcctcagcttcaagttcctaagataagggctttcttaagctttcaggtgtatgtatcctctagatgtagacaataatgtcccatttctaagtcttttccttttgcttctccttaaattgattgtacttccaaatttgctgttatgtttttttcctaatactgtgatctatctgatctgcagacaagaaccttgtctctgttgaagagcatcaaggggagattatgtacacattgaaactgaagtgtggtgttactgacggaatgtgcagtaactcctcagatatctgttaaggcatttcccagatgtgatgccagccttcttacctgtactgaaagatgcttagcttagaaaaaaacaaaacagatgcaaaatcagataattttattttgtttcatgggttttcttatttactttttaaacaaggaaggaatattagaaaatcacacaaggcctcacatacatgttatttaaagaatgaattgggacggatgtcttagacttcactttcctaggctttttagcaaaacctaaagggtggtatccatattttgcgtgaattatgggtgtaagaccttgcccacttaggttttctatctctgtccttgatcttctttgccaaaatgtgagtatacagaaattttctgtatatttcaacttaagacatttttagcatctgtatagtttgtattcaatttgagaccttttctatgggaagctcagtaatttttattaaaagattgccattgctattcatgtaaaacatggaaaaaaaattgtgtagtgaagccaacagtggacttaggatgggattgaatgttcagtatagtgatctcacttaggagaatttgcaggagaaagtgatagtttattgttttttcctcgcccatattcagttttgttctacttcctccccttccttccagatgataacatcacatctctacagtaagtgcctctgccagcccaacccaggagcgcaagttgtctttgccatctggtctatagtacagtgcgcggcgttaggccacaactcaaaagcattatcttttttagggttagtagaaattgttttatgttgatgggaggtttgtttgattgtcaaaatgtacagccacagccttttaatttgggagcccctgttgtcattcaaatgtgtacctctacagttgtaaaaagtattagattctactatctgtgggttgtgcttgccagacaggtcttaaattgtatattttttggaaaagtttatatactctcttaggaatcattgtgaaaagatcaagaaatcaggatggccatttatttaatatccattcatttcatgttagtgggactattaacttgtcaccaagcaggactctatttcaaacaaaatttaaaactgtttgtggcctatatgtgtttaatcctggttaaagataaagcttcataatgctgtttttattcaacacattaaccagctgtaaaacacagacctttatcaagagtaggcaaagattttcaggattcatatacagatagactataaagtcatgtaatttgaaaagcagtgtttcattatgaaagagctctcaagttgcttgtaaagctaatctaattaaaaagatgtataaatgttgttga

SEQ ID NO: 442706 - DNA, 6540 bp, Homo sapiens
ttaggggcagaaaaacatttgtaataattaatggctttgagagacacaaggctttgtttgccccagagtattagttaacccacctagtgctcctaatcatacaatattaaggattgggagggacattcattgcctcactctctatttgtttcaccttctgtaaaattggtagaataatagtacccacttcatagcattgtatgatgattaaattggttaatatttttaaaatgcttagaacacagattgggcacataacagcaagcaccacatgtgtttataagataaattcctttgtgttgccttccgttaaagtttaaataagtaaataaataaataaatacttgcatgacattttgaagtctctctataacatctgagtaagtggcggctgcgacaatgctactggagttccagaatcgtgttggtgacaagattgttcaccagcatatggtgtggtgaaaactcactaatttggaattagttcagattattaagcctgaataggtgaaaatcctgaaatcaaggatctttggaactatttgaaatcagtattttatattttcctgttgtattcattaaagtgttgcaagtgttctatttgatggattaagtatatttaggatatacatgttcaatttgtgattttgtatacttaattggaacaagaaagctaataaaggttttgatatggacatctattcttttaagtaaacttcaatgaaaatatatgagtagagcatatagagatgtaaataatttgtggacacaccacagactgaaatagcaaatttaaaagaaattgttggaagaatcaagtgtttgtggaatgagtcctcctagtaaagttcctgctcttgtgaataattaagcctcatgtataattactatagcaaaaggaagcctaagaagtattagactctacttgtatttaaattacattttacataatttatgtgtatgaaaaatgttttaaatgcttattttcgtaagccatgagatagctcctttatattttaagaatttctgaattaatttgcttggattttattagtgcaaatggcagagctagcaattcctttttctgtgttcccattccatcctattcatccctcttttaggaaactctgaactctggattgtccttgtttacatacctgcctcctgcattggactatgtgtctctgagtgtagtatgactaattcatttgtttgtcaaggactctcaatgcatttgttgaacagcctaattagtaatgtctgcaacaatgacattttactgtatttaataaagctctgggaaagtaggatacacataagacaggtctaggtctaaattctttacagaaacttggatttttagttcggtttgaaatttgaagatgtgagtatatttatctcagtttcccaaaggacaagctaattggaattatcatcctctttcacttgattggatccccagaatgccatttacgcatgcagcaggattttataacagttttaaattctgtatatttgatgaagaggttttatatttttggattcaagcctctttttaaacttctacaatatggtttacaataattccttatatcctgcttttgaaatacatattacaactttttaagtttggaaggctatatttcaaggactgaagttacagtatactcaagtgatacacaagcctagcaccccactttccacatagtgttcgataaagattgataaactcgaaatcacagaccttttaattcttaagacaaatagcagcagaaagaaacatctttggcttatttctggtaaggtttttatgctctgtaaaacaaagaattgtattcatccgcgcagcacagattctattaaaaataaatgtgagagtcgttaatgtagtactgctcatttaccatcaaaattcacttttcaggaataatcccatcagtttaaattggatattggaatgagcattgattacatttaacttggtagcccaaaatttcttcatggggttttgaactcggcgggatttcaaaggttttaaaaatgagtttttgattttttttaaaaccctcaaatttcattacctttaaactaggtcgaaacggggcgcaagagattggattaacaccatagtaatacttattttgttcttaaccatttcagggcttcttgaaatagaggctgtatggtgtaatggaaaaaacagccttggaatctgggagcctgattcctggattcagtcccagttttgcgtgaccttgggcaagttactttacttctctgaatttccgtttcctcctctgcaaaatgaggatcgcaatagccaccttgcaaccttgactggagcgagcctcgcacaccccgcgccggcctggaggaagagcagccatgattacgccgccttcgctccgctacccgcttgcggctggcgccctcctccagcaggtgtaggcgctgccgcgctgccccacgcctttccgccgctcgcgggcctgcgcctcggcgtccccgaggaggccgctgcgggctgaggtagcgcaccggcctctcggcgtcccagtccggtcccgggcggagggaaagcgggcgacccacctccgaggcagaagccgaggcccggccccgccgagtgcggaggagcgcaggcagcccccgcccctcggccctccccccggccctcccggccctccctccgccccctccgccctcgcgcgccgcccgcccgggtcgccgcggggccgtggtgtacgtgcagagcgcgcagagcgagtggcgcccgtatgccctgcgctcctccacagcctgggccgggccgcccgggacgctgaggcggcggcggcggccgagggggccggtcttgcgctccccaggcccgcgcgcctgagcccaggttgccattcgccgcacaggccctattctctcagccctcggcggcgatgaggcgctgaggcggctgccggcgctgcgccggagcttaggactcggaagcggccgggccgagggcgtggggtgccggcctccctgaggcgagggtagcgggtgcatggcgcagtaacggcccctatctctctccccgctccccagcctcgggcgaggccgtccggccgctacccctcctgctcggccgccgcagtcgccgtcgccgccgccgccgccgccatggccaatgacagcggcgggcccggcgggccgagcccgagcgagcgagaccggcagtactgcgagctgtgcgggaagatggagaacctgctgcgctgcagccgctgccgcagctccttctactgctgcaaggagcaccagcgtcaggactggaagaagcacaagctcgtgtgccagggcagcgagggcgccctcggccacggagtgggcccacaccagcattccggccccgcgccgccggctgcagtgccgccgcccagggccggggcccgggagcccaggaaggcagcggcgcgccgggacaacgcctccggggacgcggccaagggaaaagtaaaggccaagcccccggccgacccagcggcggccgcgtcgccgtgtcgtgcggccgccggcggccagggctcggcggtggctgccgaagccgagcccggcaaggaggagccgccggcccgctcatcgctgttccaggagaaggcgaacctgtaccccccaagcaacacgcccggggatgcgctgagccccggcggcggcctgcggcccaacgggcagacgaagcccctgccggcgctgaagctggcgctcgagtacatcgtgccgtgcatgaacaagcacggcatctgtgtggtggacgacttcctcggcaaggagaccggacagcagatcggcgacgaggtgcgcgccctgcacgacaccgggaagttcacggacgggcagctggtcagccagaagagtgactcgtccaaggacatccgaggcgataagatcacctggatcgagggcaaggagcccggctgcgaaaccattgggctgctcatgagcagcatggacgacctgatacgccactgtaacgggaagctgggcagctacaaaatcaatggccggacgaaagccatggttgcttgttatccgggcaatggaacgggttatgtacgtcatgttgataatccaaatggagatggaagatgtgtgacatgtatatattatcttaataaagactgggatgccaaggtaagtggaggtatacttcgaatttttccagaaggcaaagcccagtttgctgacattgaacccaaatttgatagactgctgtttttctggtctgaccgtcgcaaccctcatgaagtacaaccagcatatgctacaaggtacgcaataactgtttggtattttgatgcagatgagagagcacgagctaaagtaaaatatctaacaggtgaaaaaggtgtgagggttgaactcaataaaccttcagattcggtcggtaaagacgtcttctagagcctttgatccagcaataccccacttcacctacaatattgttaactatttgttaacttgtgaatacgaataaatgggataaagaaaaatagacaaccagttcgcattttaataaggaaacagaaacaactttttgtgttgcatcaaacagaagattttgactgctgtgactttgtactgcatgatcaacttcaaatctgtgattgcttacaggaggaagataagctactaattgaaaatggtttttacatctggatatgaaataagtgccctgtgtagaatttttttcattcttatattttgccagatctgttatctagctgagttcatttcatctctcccttttttatatcaagtttgaatttgggataatttttctatattaggtacaatttatctaaactgaattgagaaaaaattacagtattattcctcaaaataacatcaatctatttttgtaaacctgttcatactattaaattttgccctaaaagacctcttaataatgattgttgccagtgactgatgattaattttattttacttaaaataagaaaaggagcactttaattacaactgaaaaatcagattgttttgtagtccttccttacactaatttgaactgttaaagattgctgctttttttttgacattgtcaataacgaaacctaattgtaaaacagtcaccatttactaccaataacttttagttaatgttttacaaggaaaaagacacaagaagagtttaaatttttttgttttgttttgtttttttgagacagtcttgctctgttacccaggctggaggggagtggtgcattcttggctcactgcaacctccgcctcccaggttcaagcaatcctcccacctcagcctcccaactagctgggactgcaggcacacaccaccatgcctgactaatttttgtatgtttagtagagacggggttttgccatgttgcctaggctggggtttaagttaaattttttaaaaaactaaagtgactggcactaagtgaacttgagattatcctcagcttcaagttcctaagataagggctttcttaagctttcaggtgtatgtatcctctagatgtagacaataatgtcccatttctaagtcttttccttttgcttctccttaaattgattgtacttccaaatttgctgttatgtttttttcctaatactgtgatctatctgatctgcagacaagaaccttgtctctgttgaagagcatcaaggggagattatgtacacattgaaactgaagtgtggtgttactgacggaatgtgcagtaactcctcagatatctgttaaggcatttcccagatgtgatgccagccttcttacctgtactgaaagatgcttagcttagaaaaaaacaaaacagatgcaaaatcagataattttattttgtttcatgggttttcttatttactttttaaacaaggaaggaatattagaaaatcacacaaggcctcacatacatgttatttaaagaatgaattgggacggatgtcttagacttcactttcctaggctttttagcaaaacctaaagggtggtatccatattttgcgtgaattatgggtgtaagaccttgcccacttaggttttctatctctgtccttgatcttctttgccaaaatgtgagtatacagaaattttctgtatatttcaacttaagacatttttagcatctgtatattttttggaaaagtttatatactctcttaggaatcattgtgaaaagatcaagaaatcaggatggccatttatttaatatccattcatttcatgttagtgggactattaacttgtcaccaagcaggactctatttcaaacaaaatttaaaactgtttgtggcctatatgtgtttaatcctggttaaagataaagcttcataatgctgtttttattcaacacattaaccagctgtaaaacacagacctttatcaagagtaggcaaagattttcaggattcatatacagatagactataaagtcatgtaatttgaaaagcagtgtttcattatgaaagagctctcaagttgcttgtaaagctaatctaattaaaaagatgtataaatgttgttga

SEQ ID NO: 442707 - DNA, 3563 bp, Homo sapiens
gcccgaagcgtttactttgaaaaaattaggtgttcggcggtggctgccgaagccgagcccggcaaggaggagccgccggcccgctcatcgctgttccaggagaaggcgaacctgtaccccccaagcaacacgcccggggatgcgctgagccccggcggcggcctgcggcccaacgggcagacgaagcccctgccggcgctgaagctggcgctcgagtacatcgtgccgtgcatgaacaagcacggcatctgtgtggtggacgacttcctcggcaaggagaccggacagcagatcggcgacgaggtgcgcgccctgcacgacaccgggaagttcacggacgggcagctggtcagccagaagagtgactcgtccaaggacatccgaggcgataagatcacctggatcgagggcaaggagcccggctgcgaaaccattgggctgctcatgagcagcatggacgacctgatacgccactgtaacgggaagctgggcagctacaaaatcaatggccggacgaaagccatggttgcttgttatccgggcaatggaacgggttatgtacgtcatgttgataatccaaatggagatggaagatgtgtgacatgtatatattatcttaataaagactgggatgccaaggtaagtggaggtatacttcgaatttttccagaaggcaaagcccagtttgctgacattgaacccaaatttgatagactgctgtttttctggtctgaccgtcgcaaccctcatgaagtacaaccagcatatgctacaaggtacgcaataactgtttggtattttgatgcagatgagagagcacgagctaaagtaaaatatctaacaggtgaaaaaggtgtgagggttgaactcaataaaccttcagattcggtcggtaaagacgtcttctagagcctttgatccagcaataccccacttcacctacaatattgttaactatttgttaacttgtgaatacgaataaatgggataaagaaaaatagacaaccagttcgcattttaataaggaaacagaaacaactttttgtgttgcatcaaacagaagattttgactgctgtgactttgtactgcatgatcaacttcaaatctgtgattgcttacaggaggaagataagctactaattgaaaatggtttttacatctggatatgaaataagtgccctgtgtagaatttttttcattcttatattttgccagatctgttatctagctgagttcatttcatctctcccttttttatatcaagtttgaatttgggataatttttctatattaggtacaatttatctaaactgaattgagaaaaaattacagtattattcctcaaaataacatcaatctatttttgtaaacctgttcatactattaaattttgccctaaaagacctcttaataatgattgttgccagtgactgatgattaattttattttacttaaaataagaaaaggagcactttaattacaactgaaaaatcagattgttttgtagtccttccttacactaatttgaactgttaaagattgctgctttttttttgacattgtcaataacgaaacctaattgtaaaacagtcaccatttactaccaataacttttagttaatgttttacaaggaaaaagacacaagaagagtttaaatttttttgttttgttttgtttttttgagacagtcttgctctgttacccaggctggaggggagtggtgcattcttggctcactgcaacctccgcctcccaggttcaagcaatcctcccacctcagcctcccaactagctgggactgcaggcacacaccaccatgcctgactaatttttgtatgtttagtagagacggggttttgccatgttgcctaggctggggtttaagttaaattttttaaaaaactaaagtgactggcactaagtgaacttgagattatcctcagcttcaagttcctaagataagggctttcttaagctttcaggtgtatgtatcctctagatgtagacaataatgtcccatttctaagtcttttccttttgcttctccttaaattgattgtacttccaaatttgctgttatgtttttttcctaatactgtgatctatctgatctgcagacaagaaccttgtctctgttgaagagcatcaaggggagattatgtacacattgaaactgaagtgtggtgttactgacggaatgtgcagtaactcctcagatatctgttaaggcatttcccagatgtgatgccagccttcttacctgtactgaaagatgcttagcttagaaaaaaacaaaacagatgcaaaatcagataattttattttgtttcatgggttttcttatttactttttaaacaaggaaggaatattagaaaatcacacaaggcctcacatacatgttatttaaagaatgaattgggacggatgtcttagacttcactttcctaggctttttagcaaaacctaaagggtggtatccatattttgcgtgaattatgggtgtaagaccttgcccacttaggttttctatctctgtccttgatcttctttgccaaaatgtgagtatacagaaattttctgtatatttcaacttaagacatttttagcatctgtatagtttgtattcaatttgagaccttttctatgggaagctcagtaatttttattaaaagattgccattgctattcatgtaaaacatggaaaaaaaattgtgtagtgaagccaacagtggacttaggatgggattgaatgttcagtatagtgatctcacttaggagaatttgcaggagaaagtgatagtttattgttttttcctcgcccatattcagttttgttctacttcctccccttccttccagatgataacatcacatctctacagtaagtgcctctgccagcccaacccaggagcgcaagttgtctttgccatctggtctatagtacagtgcgcggcgttaggccacaactcaaaagcattatcttttttagggttagtagaaattgttttatgttgatgggaggtttgtttgattgtcaaaatgtacagccacagccttttaatttgggagcccctgttgtcattcaaatgtgtacctctacagttgtaaaaagtattagattctactatctgtgggttgtgcttgccagacaggtcttaaattgtatattttttggaaaagtttatatactctcttaggaatcattgtgaaaagatcaagaaatcaggatggccatttatttaatatccattcatttcatgttagtgggactattaacttgtcaccaagcaggactctatttcaaacaaaatttaaaactgtttgtggcctatatgtgtttaatcctggttaaagataaagcttcataatgctgtttttattcaacacattaaccagctgtaaaacacagacctttatcaagagtaggcaaagattttcaggattcatatacagatagactataaagtcatgtaatttgaaaagcagtgtttcattatgaaagagctctcaagttgcttgtaaagctaatctaattaaaaagatgtataaatgttgttga

SEQ ID NO: 442708 - DNA, 1274 bp, Homo sapiens
ccgaggaagatatcgtggcttgattctcttcctcccctgggcaagacaccaagtgctgggcttggatcctggagacaaggcagaagtagaggttctgtgagcttctttctttgcagcttcttcatcgtcctcctcctccacgtcttagacttcactttcctaggctttttagcaaaacctaaagggtggtatccatattttgcgtgaattatgggtgtaagaccttgcccacttaggttttctatctctgtccttgatcttctttgccaaaatgtgagtatacagaaattttctgtatatttcaacttaagacatttttagcatctgtatagtttgtattcaatttgagaccttttctatgggaagctcagtaatttttattaaaagattgccattgctattcatgtaaaacatggaaaaaaaattgtgtagtgaagccaacagtggacttaggatgggattgaatgttcagtatagtgatctcacttaggagaatttgcaggagaaagtgatagtttattgttttttcctcgcccatattcagttttgttctacttcctccccttccttccagatgataacatcacatctctacagtaagtgcctctgccagcccaacccaggagcgcaagttgtctttgccatctggtctatagtacagtgcgcggcgttaggccacaactcaaaagcattatcttttttagggttagtagaaattgttttatgttgatgggaggtttgtttgattgtcaaaatgtacagccacagccttttaatttgggagcccctgttgtcattcaaatgtgtacctctacagttgtaaaaagtattagattctactatctgtgggttgtgcttgccagacaggtcttaaattgtatattttttggaaaagtttatatactctcttaggaatcattgtgaaaagatcaagaaatcaggatggccatttatttaatatccattcatttcatgttagtgggactattaacttgtcaccaagcaggactctatttcaaacaaaatttaaaactgtttgtggcctatatgtgtttaatcctggttaaagataaagcttcataatgctgtttttattcaacacattaaccagctgtaaaacacagacctttatcaagagtaggcaaagattttcaggattcatatacagatagactataaagtcatgtaatttgaaaagcagtgtttcattatgaaagagctctcaagttgcttgtaaagctaatctaattaaaaagatgtataaatgttgttga

SEQ ID NO: 442709 - DNA, 4460 bp, Homo sapiens
ttaggggcagaaaaacatttgtaataattaatggctttgagagacacaaggctttgtttgccccagagtattagttaacccacctagtgctcctaatcatacaatattaaggattgggagggacattcattgcctcactctctatttgtttcaccttctgtaaaattggtagaataatagtacccacttcatagcattgtatgatgattaaattggttaatatttttaaaatgcttagaacacagattgggcacataacagcaagcaccacatgtgtttataagataaattcctttgtgttgccttccgttaaagtttaaataagtaaataaataaataaatacttgcatgacattttgaagtctctctataacatctgagtaagtggcggctgcgacaatgctactggagttccagaatcgtgttggtgacaagattgttcaccagcatatggtgtggtgaaaactcactaatttggaattagttcagattattaagcctgaataggtgaaaatcctgaaatcaaggatctttggaactatttgaaatcagtattttatattttcctgttgtattcattaaagtgttgcaagtgttctatttgatggattaagtatatttaggatatacatgttcaatttgtgattttgtatacttaattggaacaagaaagctaataaaggttttgatatggacatctattcttttaagtaaacttcaatgaaaatatatgagtagagcatatagagatgtaaataatttgtggacacaccacagactgaaatagcaaatttaaaagaaattgttggaagaatcaagtgtttgtggaatgagtcctcctagtaaagttcctgctcttgtgaataattaagcctcatgtataattactatagcaaaaggaagcctaagaagtattagactctacttgtatttaaattacattttacataatttatgtgtatgaaaaatgttttaaatgcttattttcgtaagccatgagatagctcctttatattttaagaatttctgaattaatttgcttggattttattagtgcaaatggcagagctagcaattcctttttctgtgttcccattccatcctattcatccctcttttaggaaactctgaactctggattgtccttgtttacatacctgcctcctgcattggactatgtgtctctgagtgtagtatgactaattcatttgtttgtcaaggactctcaatgcatttgttgaacagcctaattagtaatgtctgcaacaatgacattttactgtatttaataaagctctgggaaagtaggatacacataagacaggtctaggtctaaattctttacagaaacttggatttttagttcggtttgaaatttgaagatgtgagtatatttatctcagtttcccaaaggacaagctaattggaattatcatcctctttcacttgattggatccccagaatgccatttacgcatgcagcaggattttataacagttttaaattctgtatatttgatgaagaggttttatatttttggattcaagcctctttttaaacttctacaatatggtttacaataattccttatatcctgcttttgaaatacatattacaactttttaagtttggaaggctatatttcaaggactgaagttacagtatactcaagtgatacacaagcctagcaccccactttccacatagtgttcgataaagattgataaactcgaaatcacagaccttttaattcttaagacaaatagcagcagaaagaaacatctttggcttatttctggtaaggtttttatgctctgtaaaacaaagaattgtattcatccgcgcagcacagattctattaaaaataaatgtgagagtcgttaatgtagtactgctcatttaccatcaaaattcacttttcaggaataatcccatcagtttaaattggatattggaatgagcattgattacatttaacttggtagcccaaaatttcttcatggggttttgaactcggcgggatttcaaaggttttaaaaatgagtttttgattttttttaaaaccctcaaatttcattacctttaaactaggtcgaaacggggcgcaagagattggattaacaccatagtaatacttattttgttcttaaccatttcagggcttcttgaaatagaggctgtatggtgtaatggaaaaaacagccttggaatctgggagcctgattcctggattcagtcccagttttgcgtgaccttgggcaagttactttacttctctgaatttccgtttcctcctctgcaaaatgaggatcgcaatagccaccttgcaaccttgactggagcgagcctcgcacaccccgcgccggcctggaggaagagcagccatgattacgccgccttcgctccgctacccgcttgcggctggcgccctcctccagcaggtgtaggcgctgccgcgctgccccacgcctttccgccgctcgcgggcctgcgcctcggcgtccccgaggaggccgctgcgggctgaggtagcgcaccggcctctcggcgtcccagtccggtcccgggcggagggaaagcgggcgacccacctccgaggcagaagccgaggcccggccccgccgagtgcggaggagcgcaggcagcccccgcccctcggccctccccccggccctcccggccctccctccgccccctccgccctcgcgcgccgcccgcccgggtcgccgcggggccgtggtgtacgtgcagagcgcgcagagcgagtggcgcccgtatgccctgcgctcctccacagcctgggccgggccgcccgggacgctgaggcggcggcggcggccgagggggccggtcttgcgctccccaggcccgcgcgcctgagcccaggttgccattcgccgcacaggccctattctctcagccctcggcggcgatgaggcgctgaggcggctgccggcgctgcgccggagcttaggactcggaagcggccgggccgagggcgtggggtgccggcctccctgaggcgagggtagcgggtgcatggcgcagtaacggcccctatctctctccccgctccccagcctcgggcgaggccgtccggccgctacccctcctgctcggccgccgcagtcgccgtcgccgccgccgccgccgccatggccaatgacagcggcgggcccggcgggccgagcccgagcgagcgagaccggcagtactgcgagctgtgcgggaagatggagaacctgctgcgctgcagccgctgccgcagctccttctactgctgcaaggagcaccagcgtcaggactggaagaagcacaagctcgtgtgccagggcagcgagggcgccctcggccacggagtgggcccacaccagcattccggccccgcgccgccggctgcagtgccgccgcccagggccggggcccgggagcccaggaaggcagcggcgcgccgggacaacgcctccggggacgcggccaagggaaaagtaaaggccaagcccccggccgacccagcggcggccgcgtcgccgtgtcgtgcggccgccggcggccagggctcggcggtggctgccgaagccgagcccggcaaggaggagccgccggcccgctcatcgctgttccaggagaaggcgaacctgtaccccccaagcaacacgcccggggatgcgctgagccccggcggcggcctgcggcccaacgggcagacgaagcccctgccggcgctgaagctggcgctcgagtacatcgtgccgtgcatgaacaagcacggcatctgtgtggtggacgacttcctcggcaaggagaccggacagcagatcggcgacgaggtgcgcgccctgcacgacaccgggaagttcacggacgggcagctggtcagccagaagagtgactcgtccaaggacatccgaggcgataagatcacctggatcgagggcaaggagcccggctgcgaaaccattgggctgctcatgagcagcatggacgacctgatacgccactgtaacgggaagctgggcagctacaaaatcaatggccggacgaaagccatggttgcttgttatccgggcaatggaacgggttatgtacgtcatgttgataatccaaatggagatggaagatgtgtgacatgtatatattatcttaataaagactgggatgccaagccaaatttgatagactgctgtttttctggtctgaccgtcgcaaccctcatgaagtacaaccagcatatgctacaaggtacgcaataactgtttggtattttgatgcagatgagagagcacgagctaaagtaaaatatctaacaggtgaaaaaggtgtgagggttgaactcaataaaccttcagattcggtcggtaaagacgtcttctagagcctttgatccagcaataccccacttcacctacaatattgttaactatttgttaacttgtgaatacgaataaatgggataaag

SEQ ID NO: 442710 - DNA, 4521 bp, Homo sapiens
ttaggggcagaaaaacatttgtaataattaatggctttgagagacacaaggctttgtttgccccagagtattagttaacccacctagtgctcctaatcatacaatattaaggattgggagggacattcattgcctcactctctatttgtttcaccttctgtaaaattggtagaataatagtacccacttcatagcattgtatgatgattaaattggttaatatttttaaaatgcttagaacacagattgggcacataacagcaagcaccacatgtgtttataagataaattcctttgtgttgccttccgttaaagtttaaataagtaaataaataaataaatacttgcatgacattttgaagtctctctataacatctgagtaagtggcggctgcgacaatgctactggagttccagaatcgtgttggtgacaagattgttcaccagcatatggtgtggtgaaaactcactaatttggaattagttcagattattaagcctgaataggtgaaaatcctgaaatcaaggatctttggaactatttgaaatcagtattttatattttcctgttgtattcattaaagtgttgcaagtgttctatttgatggattaagtatatttaggatatacatgttcaatttgtgattttgtatacttaattggaacaagaaagctaataaaggttttgatatggacatctattcttttaagtaaacttcaatgaaaatatatgagtagagcatatagagatgtaaataatttgtggacacaccacagactgaaatagcaaatttaaaagaaattgttggaagaatcaagtgtttgtggaatgagtcctcctagtaaagttcctgctcttgtgaataattaagcctcatgtataattactatagcaaaaggaagcctaagaagtattagactctacttgtatttaaattacattttacataatttatgtgtatgaaaaatgttttaaatgcttattttcgtaagccatgagatagctcctttatattttaagaatttctgaattaatttgcttggattttattagtgcaaatggcagagctagcaattcctttttctgtgttcccattccatcctattcatccctcttttaggaaactctgaactctggattgtccttgtttacatacctgcctcctgcattggactatgtgtctctgagtgtagtatgactaattcatttgtttgtcaaggactctcaatgcatttgttgaacagcctaattagtaatgtctgcaacaatgacattttactgtatttaataaagctctgggaaagtaggatacacataagacaggtctaggtctaaattctttacagaaacttggatttttagttcggtttgaaatttgaagatgtgagtatatttatctcagtttcccaaaggacaagctaattggaattatcatcctctttcacttgattggatccccagaatgccatttacgcatgcagcaggattttataacagttttaaattctgtatatttgatgaagaggttttatatttttggattcaagcctctttttaaacttctacaatatggtttacaataattccttatatcctgcttttgaaatacatattacaactttttaagtttggaaggctatatttcaaggactgaagttacagtatactcaagtgatacacaagcctagcaccccactttccacatagtgttcgataaagattgataaactcgaaatcacagaccttttaattcttaagacaaatagcagcagaaagaaacatctttggcttatttctggtaaggtttttatgctctgtaaaacaaagaattgtattcatccgcgcagcacagattctattaaaaataaatgtgagagtcgttaatgtagtactgctcatttaccatcaaaattcacttttcaggaataatcccatcagtttaaattggatattggaatgagcattgattacatttaacttggtagcccaaaatttcttcatggggttttgaactcggcgggatttcaaaggttttaaaaatgagtttttgattttttttaaaaccctcaaatttcattacctttaaactaggtcgaaacggggcgcaagagattggattaacaccatagtaatacttattttgttcttaaccatttcagggcttcttgaaatagaggctgtatggtgtaatggaaaaaacagccttggaatctgggagcctgattcctggattcagtcccagttttgcgtgaccttgggcaagttactttacttctctgaatttccgtttcctcctctgcaaaatgaggatcgcaatagccaccttgcaaccttgactggagcgagcctcgcacaccccgcgccggcctggaggaagagcagccatgattacgccgccttcgctccgctacccgcttgcggctggcgccctcctccagcaggtgtaggcgctgccgcgctgccccacgcctttccgccgctcgcgggcctgcgcctcggcgtccccgaggaggccgctgcgggctgaggtagcgcaccggcctctcggcgtcccagtccggtcccgggcggagggaaagcgggcgacccacctccgaggcagaagccgaggcccggccccgccgagtgcggaggagcgcaggcagcccccgcccctcggccctccccccggccctcccggccctccctccgccccctccgccctcgcgcgccgcccgcccgggtcgccgcggggccgtggtgtacgtgcagagcgcgcagagcgagtggcgcccgtatgccctgcgctcctccacagcctgggccgggccgcccgggacgctgaggcggcggcggcggccgagggggccggtcttgcgctccccaggcccgcgcgcctgagcccaggttgccattcgccgcacaggccctattctctcagccctcggcggcgatgaggcgctgaggcggctgccggcgctgcgccggagcttaggactcggaagcggccgggccgagggcgtggggtgccggcctccctgaggcgagggtagcgggtgcatggcgcagtaacggcccctatctctctccccgctccccagcctcgggcgaggccgtccggccgctacccctcctgctcggccgccgcagtcgccgtcgccgccgccgccgccgccatggccaatgacagcggcgggcccggcgggccgagcccgagcgagcgagaccggcagtactgcgagctgtgcgggaagatggagaacctgctgcgctgcagccgctgccgcagctccttctactgctgcaaggagcaccagcgtcaggactggaagaagcacaagctcgtgtgccagggcagcgagggcgccctcggccacggagtgggcccacaccagcattccggccccgcgccgccggctgcagtgccgccgcccagggccggggcccgggagcccaggaaggcagcggcgcgccgggacaacgcctccggggacgcggccaagggaaaagtaaaggccaagcccccggccgacccagcggcggccgcgtcgccgtgtcgtgcggccgccggcggccagggctcggcggtggctgccgaagccgagcccggcaaggaggagccgccggcccgctcatcgctgttccaggagaaggcgaacctgtaccccccaagcaacacgcccggggatgcgctgagccccggcggcggcctgcggcccaacgggcagacgaagcccctgccggcgctgaagctggcgctcgagtacatcgtgccgtgcatgaacaagcacggcatctgtgtggtggacgacttcctcggcaaggagaccggacagcagatcggcgacgaggtgcgcgccctgcacgacaccgggaagttcacggacgggcagctggtcagccagaagagtgactcgtccaaggacatccgaggcgataagatcacctggatcgagggcaaggagcccggctgcgaaaccattgggctgctcatgagcagcatggacgacctgatacgccactgtaacgggaagctgggcagctacaaaatcaatggccggacgaaagccatggttgcttgttatccgggcaatggaacgggttatgtacgtcatgttgataatccaaatggagatggaagatgtgtgacatgtatatattatcttaataaagactgggatgccaaggtaagtggaggtatacttcgaatttttccagaaggcaaagcccagtttgctgacattgaacccaaatttgatagactgctgtttttctggtctgaccgtcgcaaccctcatgaagtacaaccagcatatgctacaaggtacgcaataactgtttggtattttgatgcagatgagagagcacgagctaaagtaaaatatctaacaggtgaaaaaggtgtgagggttgaactcaataaaccttcagattcggtcggtaaagacgtcttctagagcctttgatccagcaataccccacttcacctacaatattgttaactatttgttaacttgtgaatacgaataaatgggataaag

SEQ ID NO: 442711 - DNA, 4356 bp, Homo sapiens
ttaggggcagaaaaacatttgtaataattaatggctttgagagacacaaggctttgtttgccccagagtattagttaacccacctagtgctcctaatcatacaatattaaggattgggagggacattcattgcctcactctctatttgtttcaccttctgtaaaattggtagaataatagtacccacttcatagcattgtatgatgattaaattggttaatatttttaaaatgcttagaacacagattgggcacataacagcaagcaccacatgtgtttataagataaattcctttgtgttgccttccgttaaagtttaaataagtaaataaataaataaatacttgcatgacattttgaagtctctctataacatctgagtaagtggcggctgcgacaatgctactggagttccagaatcgtgttggtgacaagattgttcaccagcatatggtgtggtgaaaactcactaatttggaattagttcagattattaagcctgaataggtgaaaatcctgaaatcaaggatctttggaactatttgaaatcagtattttatattttcctgttgtattcattaaagtgttgcaagtgttctatttgatggattaagtatatttaggatatacatgttcaatttgtgattttgtatacttaattggaacaagaaagctaataaaggttttgatatggacatctattcttttaagtaaacttcaatgaaaatatatgagtagagcatatagagatgtaaataatttgtggacacaccacagactgaaatagcaaatttaaaagaaattgttggaagaatcaagtgtttgtggaatgagtcctcctagtaaagttcctgctcttgtgaataattaagcctcatgtataattactatagcaaaaggaagcctaagaagtattagactctacttgtatttaaattacattttacataatttatgtgtatgaaaaatgttttaaatgcttattttcgtaagccatgagatagctcctttatattttaagaatttctgaattaatttgcttggattttattagtgcaaatggcagagctagcaattcctttttctgtgttcccattccatcctattcatccctcttttaggaaactctgaactctggattgtccttgtttacatacctgcctcctgcattggactatgtgtctctgagtgtagtatgactaattcatttgtttgtcaaggactctcaatgcatttgttgaacagcctaattagtaatgtctgcaacaatgacattttactgtatttaataaagctctgggaaagtaggatacacataagacaggtctaggtctaaattctttacagaaacttggatttttagttcggtttgaaatttgaagatgtgagtatatttatctcagtttcccaaaggacaagctaattggaattatcatcctctttcacttgattggatccccagaatgccatttacgcatgcagcaggattttataacagttttaaattctgtatatttgatgaagaggttttatatttttggattcaagcctctttttaaacttctacaatatggtttacaataattccttatatcctgcttttgaaatacatattacaactttttaagtttggaaggctatatttcaaggactgaagttacagtatactcaagtgatacacaagcctagcaccccactttccacatagtgttcgataaagattgataaactcgaaatcacagaccttttaattcttaagacaaatagcagcagaaagaaacatctttggcttatttctggtaaggtttttatgctctgtaaaacaaagaattgtattcatccgcgcagcacagattctattaaaaataaatgtgagagtcgttaatgtagtactgctcatttaccatcaaaattcacttttcaggaataatcccatcagtttaaattggatattggaatgagcattgattacatttaacttggtagcccaaaatttcttcatggggttttgaactcggcgggatttcaaaggttttaaaaatgagtttttgattttttttaaaaccctcaaatttcattacctttaaactaggtcgaaacggggcgcaagagattggattaacaccatagtaatacttattttgttcttaaccatttcagggcttcttgaaatagaggctgtatggtgtaatggaaaaaacagccttggaatctgggagcctgattcctggattcagtcccagttttgcgtgaccttgggcaagttactttacttctctgaatttccgtttcctcctctgcaaaatgaggatcgcaatagccaccttgcaaccttgactggagcgagcctcgcacaccccgcgccggcctggaggaagagcagccatgattacgccgccttcgctccgctacccgcttgcggctggcgccctcctccagcaggtgtaggcgctgccgcgctgccccacgcctttccgccgctcgcgggcctgcgcctcggcgtccccgaggaggccgctgcgggctgaggtagcgcaccggcctctcggcgtcccagtccggtcccgggcggagggaaagcgggcgacccacctccgaggcagaagccgaggcccggccccgccgagtgcggaggagcgcaggcagcccccgcccctcggccctccccccggccctcccggccctccctccgccccctccgccctcgcgcgccgcccgcccgggtcgccgcggggccgtggtgtacgtgcagagcgcgcagagcgagtggcgcccgtatgccctgcgctcctccacagcctgggccgggccgcccgggacgctgaggcggcggcggcggccgagggggccggtcttgcgctccccaggcccgcgcgcctgagcccaggttgccattcgccgcacaggccctattctctcagccctcggcggcgatgaggcgctgaggcggctgccggcgctgcgccggagcttaggactcggaagcggccgggccgagggcgtggggtgccggcctccctgaggcgagggtagcgggtgcatggcgcagtaacggcccctatctctctccccgctccccagcctcgggcgaggccgtccggccgctacccctcctgctcggccgccgcagtcgccgtcgccgccgccgccgccgccatggccaatgacagcggcgggcccggcgggccgagcccgagcgagcgagaccggcagtactgcgagctgtgcgggaagatggagaacctgctgcgctgcagccgctgccgcagctccttctactgctgcaaggagcaccagcgtcaggactggaagaagcacaagctcgtgtgccagggcagcgagggcgccctcggccacggagtgggcccacaccagcattccggccccgcgccgccggctgcagtgccgccgcccagggccggggcccgggagcccaggaaggcagcggcgcgccgggacaacgcctccggggacgcggccaagggaaaagtaaaggccaagcccccggccgacccagcggcggccgcgtcgccgtgtcgtgcggccgccggcggccagggctcggcggtggctgccgaagccgagcccggcaaggaggagccgccggcccgctcatcgctgttccaggagaaggcgaacctgtaccccccaagcaacacgcccggggatgcgctgagccccggcggcggcctgcggcccaacgggcagacgaagcccctgccggcgctgaagctggcgctcgagtacatcgtgccgtgcatgaacaagcacggcatctgtgtggtggacgacttcctcggcaaggagaccggacagcagatcggcgacgaggtgcgcgccctgcacgacaccgggaagttcacggacgggcagctggtcagccagaagagtgactcgtccaaggacatccgaggcgataagatcacctggatcgagggcaaggagcccggctgcgaaaccattgggctgctcatgagcagcatggacgacctgatacgccactgtaacgggaagctgggcagctacaaaatcaatggccggacgaaagccatggttgcttgttatccgggcaatggaacgggttatgtacgtcatgttgataatccaaatggagatggaagatgtgtgacatgtatatattatcttaataaagactgggatgccaaggtaagtggaggtatacttcgaatttttccagaaggcaaagcccagtttgctgacattgaacccaaatttgatagactgctgtttttctggtctgaccgtcgcaaccctcatgaagtacaaccagcatatgctacaagctacccagtaactcctttgtacttgtgatgtcgatatcccggattcgctgac

SEQ ID NO: 442712 - DNA, 422 bp, Homo sapiens
  misc_feature (57)..(57): n is a, c, g, or t
  misc_feature (67)..(67): n is a, c, g, or t
caactcctccccgtctaccgccccccacgtaacccaccacggaatagaccttcttgngtgaagacgnagtaagtggaggtatacttcgaatttttccagaaggcaaagcccagtttgctgacattgaacccaaatttgatagactgctgtttttctggtctgaccgtcgcaaccctcatgaagtacaaccagcatatgctacaaggtacgcaataactgtttggtattttgatgcagatgagagagcacgagctaaagtaaaatatctaacaggtgaaaaaggtgtgagggttgaactcaataaaccttcagattcggtcggtaaagacgtcttctagagcctttgatccagcaataccccacttcacctacaatattgttaactatttgttaacttgtgaatacgaataaatgggataaag

SEQ ID NO: 442713 - DNA, 7037 bp, Homo sapiens
ttaggggcagaaaaacatttgtaataattaatggctttgagagacacaaggctttgtttgccccagagtattagttaacccacctagtgctcctaatcatacaatattaaggattgggagggacattcattgcctcactctctatttgtttcaccttctgtaaaattggtagaataatagtacccacttcatagcattgtatgatgattaaattggttaatatttttaaaatgcttagaacacagattgggcacataacagcaagcaccacatgtgtttataagataaattcctttgtgttgccttccgttaaagtttaaataagtaaataaataaataaatacttgcatgacattttgaagtctctctataacatctgagtaagtggcggctgcgacaatgctactggagttccagaatcgtgttggtgacaagattgttcaccagcatatggtgtggtgaaaactcactaatttggaattagttcagattattaagcctgaataggtgaaaatcctgaaatcaaggatctttggaactatttgaaatcagtattttatattttcctgttgtattcattaaagtgttgcaagtgttctatttgatggattaagtatatttaggatatacatgttcaatttgtgattttgtatacttaattggaacaagaaagctaataaaggttttgatatggacatctattcttttaagtaaacttcaatgaaaatatatgagtagagcatatagagatgtaaataatttgtggacacaccacagactgaaatagcaaatttaaaagaaattgttggaagaatcaagtgtttgtggaatgagtcctcctagtaaagttcctgctcttgtgaataattaagcctcatgtataattactatagcaaaaggaagcctaagaagtattagactctacttgtatttaaattacattttacataatttatgtgtatgaaaaatgttttaaatgcttattttcgtaagccatgagatagctcctttatattttaagaatttctgaattaatttgcttggattttattagtgcaaatggcagagctagcaattcctttttctgtgttcccattccatcctattcatccctcttttaggaaactctgaactctggattgtccttgtttacatacctgcctcctgcattggactatgtgtctctgagtgtagtatgactaattcatttgtttgtcaaggactctcaatgcatttgttgaacagcctaattagtaatgtctgcaacaatgacattttactgtatttaataaagctctgggaaagtaggatacacataagacaggtctaggtctaaattctttacagaaacttggatttttagttcggtttgaaatttgaagatgtgagtatatttatctcagtttcccaaaggacaagctaattggaattatcatcctctttcacttgattggatccccagaatgccatttacgcatgcagcaggattttataacagttttaaattctgtatatttgatgaagaggttttatatttttggattcaagcctctttttaaacttctacaatatggtttacaataattccttatatcctgcttttgaaatacatattacaactttttaagtttggaaggctatatttcaaggactgaagttacagtatactcaagtgatacacaagcctagcaccccactttccacatagtgttcgataaagattgataaactcgaaatcacagaccttttaattcttaagacaaatagcagcagaaagaaacatctttggcttatttctggtaaggtttttatgctctgtaaaacaaagaattgtattcatccgcgcagcacagattctattaaaaataaatgtgagagtcgttaatgtagtactgctcatttaccatcaaaattcacttttcaggaataatcccatcagtttaaattggatattggaatgagcattgattacatttaacttggtagcccaaaatttcttcatggggttttgaactcggcgggatttcaaaggttttaaaaatgagtttttgattttttttaaaaccctcaaatttcattacctttaaactaggtcgaaacggggcgcaagagattggattaacaccatagtaatacttattttgttcttaaccatttcagggcttcttgaaatagaggctgtatggtgtaatggaaaaaacagccttggaatctgggagcctgattcctggattcagtcccagttttgcgtgaccttgggcaagttactttacttctctgaatttccgtttcctcctctgcaaaatgaggatcgcaatagccaccttgcaaccttgactggagcgagcctcgcacaccccgcgccggcctggaggaagagcagccatgattacgccgccttcgctccgctacccgcttgcggctggcgccctcctccagcaggtgtaggcgctgccgcgctgccccacgcctttccgccgctcgcgggcctgcgcctcggcgtccccgaggaggccgctgcgggctgaggtagcgcaccggcctctcggcgtcccagtccggtcccgggcggagggaaagcgggcgacccacctccgaggcagaagccgaggcccggccccgccgagtgcggaggagcgcaggcagcccccgcccctcggccctccccccggccctcccggccctccctccgccccctccgccctcgcgcgccgcccgcccgggtcgccgcggggccgtggtgtacgtgcagagcgcgcagagcgagtggcgcccgtatgccctgcgctcctccacagcctgggccgggccgcccgggacgctgaggcggcggcggcggccgagggggccggtcttgcgctccccaggcccgcgcgcctgagcccaggttgccattcgccgcacaggccctattctctcagccctcggcggcgatgaggcgctgaggcggctgccggcgctgcgccggagcttaggactcggaagcggccgggccgagggcgtggggtgccggcctccctgaggcgagggtagcgggtgcatggcgcagtaacggcccctatctctctccccgctccccagcctcgggcgaggccgtccggccgctacccctcctgctcggccgccgcagtcgccgtcgccgccgccgccgccgccatggccaatgacagcggcgggcccggcgggccgagcccgagcgagcgagaccggcagtactgcgagctgtgcgggaagatggagaacctgctgcgctgcagccgctgccgcagctccttctactgctgcaaggagcaccagcgtcaggactggaagaagcacaagctcgtgtgccagggcagcgagggcgccctcggccacggagtgggcccacaccagcattccggccccgcgccgccggctgcagtgccgccgcccagggccggggcccgggagcccaggaaggcagcggcgcgccgggacaacgcctccggggacgcggccaagggaaaagtaaaggccaagcccccggccgacccagcggcggccgcgtcgccgtgtcgtgcggccgccggcggccagggctcggcggtggctgccgaagccgagcccggcaaggaggagccgccggcccgctcatcgctgttccaggagaaggcgaacctgtaccccccaagcaacacgcccggggatgcgctgagccccggcggcggcctgcggcccaacgggcagacgaagcccctgccggcgctgaagctggcgctcgagtacatcgtgccgtgcatgaacaagcacggcatctgtgtggtggacgacttcctcggcaaggagaccggacagcagatcggcgacgaggtgcgcgccctgcacgacaccgggaagttcacggacgggcagctggtcagccagaagagtgactcgtccaaggacatccgaggcgataagatcacctggatcgagggcaaggagcccggctgcgaaaccattgggctgctcatgagcagcatggacgacctgatacgccactgtaacgggaagctgggcagctacaaaatcaatggccggacgaaagccatggttgcttgttatccgggcaatggaacgggttatgtacgtcatgttgataatccaaatggagatggaagatgtgtgacatgtatatattatcttaataaagactgggatgccaaggtaagtggaggtatacttcgaatttttccagaaggcaaagcccagtttgctgacattgaacccaaatttgatagactgctgtttttctggtctgaccgtcgcaaccctcatgaagtacaaccagcatatgctacaaggtacgcaataactgtttggtattttgatgcagatgagagagcacgagctaaagtaaaatatctaacaggtgaaaaaggtgtgagggttgaactcaataaaccttcagattcggtcggtaaagacgtcttctagagcctttgatccagcaataccccacttcacctacaatattgttaactatttgttaacttgtgaatacgaataaatgggataaagaaaaatagacaaccagttcgcattttaataaggaaacagaaacaactttttgtgttgcatcaaacagaagattttgactgctgtgactttgtactgcatgatcaacttcaaatctgtgattgcttacaggaggaagataagctactaattgaaaatggtttttacatctggatatgaaataagtgccctgtgtagaatttttttcattcttatattttgccagatctgttatctagctgagttcatttcatctctcccttttttatatcaagtttgaatttgggataatttttctatattaggtacaatttatctaaactgaattgagaaaaaattacagtattattcctcaaaataacatcaatctatttttgtaaacctgttcatactattaaattttgccctaaaagacctcttaataatgattgttgccagtgactgatgattaattttattttacttaaaataagaaaaggagcactttaattacaactgaaaaatcagattgttttgtagtccttccttacactaatttgaactgttaaagattgctgctttttttttgacattgtcaataacgaaacctaattgtaaaacagtcaccatttactaccaataacttttagttaatgttttacaaggaaaaagacacaagaagagtttaaatttttttgttttgttttgtttttttgagacagtcttgctctgttacccaggctggaggggagtggtgcattcttggctcactgcaacctccgcctcccaggttcaagcaatcctcccacctcagcctcccaactagctgggactgcaggcacacaccaccatgcctgactaatttttgtatgtttagtagagacggggttttgccatgttgcctaggctggggtttaagttaaattttttaacctaagataagggctttcttaagctttcaggtgtatgtatcctctagatgtagacaataatgtcccatttctaagtcttttccttttgcttctccttaaattgattgtacttccaaatttgctgttatgtttttttcctaatactgtgatctatctgatctgcagacaagaaccttgtctctgttgaagagcatcaaggggagattatgtacacattgaaactgaagtgtggtgttactgacggaatgtgcagtaactcctcagatatctgttaaggcatttcccagatgtgatgccagccttcttacctgtactgaaagatgcttagcttagaaaaaaacaaaacagatgcaaaatcagataattttattttgtttcatgggttttcttatttactttttaaacaaggaaggaatattagaaaatcacacaaggcctcacatacatgttatttaaagaatgaattgggacggatgtcttagacttcactttcctaggctttttagcaaaacctaaagggtggtatccatattttgcgtgaattatgggtgtaagaccttgcccacttaggttttctatctctgtccttgatcttctttgccaaaatgtgagtatacagaaattttctgtatatttcaacttaagacatttttagcatctgtatagtttgtattcaatttgagaccttttctatgggaagctcagtaatttttattaaaagattgccattgctattcatgtaaaacatggaaaaaaaattgtgtagtgaagccaacagtggacttaggatgggattgaatgttcagtatagtgatctcacttaggagaatttgcaggagaaagtgatagtttattgttttttcctcgcccatattcagttttgttctacttcctccccttccttccagatgataacatcacatctctacagtaagtgcctctgccagcccaacccaggagcgcaagttgtctttgccatctggtctatagtacagtgcgcggcgttaggccacaactcaaaagcattatcttttttagggttagtagaaattgttttatgttgatgggaggtttgtttgattgtcaaaatgtacagccacagccttttaatttgggagcccctgttgtcattcaaatgtgtacctctacagttgtaaaaagtattagattctactatctgtgggttgtgcttgccagacaggtcttaaattgtatattttttggaaaagtttatatactctcttaggaatcattgtgaaaagatcaagaaatcaggatggccatttatttaatatccattcatttcatgttagtgggactattaacttgtcaccaagcaggactctatttcaaacaaaatttaaaactgtttgtggcctatatgtgtttaatcctggttaaagataaagcttcataatgctgtttttattcaacacattaaccagctgtaaaacacagacctttatcaagagtaggcaaagattttcaggattcatatacagatagactataaagtcatgtaatttgaaaagcagtgtttcattatgaaagagctctcaagttgcttgtaaagctaatctaattaaaaagatgtataaatgttgttga

SEQ ID NO: 442714 - DNA, 3212 bp, Homo sapiens
aggcctctcagtgtaggtaggctacatttttagcaccagtttcctttatttgctttgttaatgtaatccttctgttgaaaactgttttgtaacttcctggaaaacaaaacaaaacaaaacaacaacacggaattggcgcaggagggctcgttttatcctcccaatttggccatggttgcttgttatccgggcaatggaacgggttatgtacgtcatgttgataatccaaatggagatggaagatgtgtgacatgtatatattatcttaataaagactgggatgccaaggtaagtggaggtatacttcgaatttttccagaaggcaaagcccagtttgctgacattgaacccaaatttgatagactgctgtttttctggtctgaccgtcgcaaccctcatgaagtacaaccagcatatgctacaaggtacgcaataactgtttggtattttgatgcagatgagagagcacgagctaaagtaaaatatctaacaggtgaaaaaggtgtgagggttgaactcaataaaccttcagattcggtcggtaaagacgtcttctagagcctttgatccagcaataccccacttcacctacaatattgttaactatttgttaacttgtgaatacgaataaatgggataaagaaaaatagacaaccagttcgcattttaataaggaaacagaaacaactttttgtgttgcatcaaacagaagattttgactgctgtgactttgtactgcatgatcaacttcaaatctgtgattgcttacaggaggaagataagctactaattgaaaatggtttttacatctggatatgaaataagtgccctgtgtagaatttttttcattcttatattttgccagatctgttatctagctgagttcatttcatctctcccttttttatatcaagtttgaatttgggataatttttctatattaggtacaatttatctaaactgaattgagaaaaaattacagtattattcctcaaaataacatcaatctatttttgtaaacctgttcatactattaaattttgccctaaaagacctcttaataatgattgttgccagtgactgatgattaattttattttacttaaaataagaaaaggagcactttaattacaactgaaaaatcagattgttttgtagtccttccttacactaatttgaactgttaaagattgctgctttttttttgacattgtcaataacgaaacctaattgtaaaacagtcaccatttactaccaataacttttagttaatgttttacaaggaaaaagacacaagaagagtttaaatttttttgttttgttttgtttttttgagacagtcttgctctgttacccaggctggaggggagtggtgcattcttggctcactgcaacctccgcctcccaggttcaagcaatcctcccacctcagcctcccaactagctgggactgcaggcacacaccaccatgcctgactaatttttgtatgtttagtagagacggggttttgccatgttgcctaggctggggtttaagttaaattttttaaaaaactaaagtgactggcactaagtgaacttgagattatcctcagcttcaagttcctaagataagggctttcttaagctttcaggtgtatgtatcctctagatgtagacaataatgtcccatttctaagtcttttccttttgcttctccttaaattgattgtacttccaaatttgctgttatgtttttttcctaatactgtgatctatctgatctgcagacaagaaccttgtctctgttgaagagcatcaaggggagattatgtacacattgaaactgaagtgtggtgttactgacggaatgtgcagtaactcctcagatatctgttaaggcatttcccagatgtgatgccagccttcttacctgtactgaaagatgcttagcttagaaaaaaacaaaacagatgcaaaatcagataattttattttgtttcatgggttttcttatttactttttaaacaaggaaggaatattagaaaatcacacaaggcctcacatacatgttatttaaagaatgaattgggacggatgtcttagacttcactttcctaggctttttagcaaaacctaaagggtggtatccatattttgcgtgaattatgggtgtaagaccttgcccacttaggttttctatctctgtccttgatcttctttgccaaaatgtgagtatacagaaattttctgtatatttcaacttaagacatttttagcatctgtatagtttgtattcaatttgagaccttttctatgggaagctcagtaatttttattaaaagattgccattgctattcatgtaaaacatggaaaaaaaattgtgtagtgaagccaacagtggacttaggatgggattgaatgttcagtatagtgatctcacttaggagaatttgcaggagaaagtgatagtttattgttttttcctcgcccatattcagttttgttctacttcctccccttccttccagatgataacatcacatctctacagtaagtgcctctgccagcccaacccaggagcgcaagttgtctttgccatctggtctatagtacagtgcgcggcgttaggccacaactcaaaagcattatcttttttagggttagtagaaattgttttatgttgatgggaggtttgtttgattgtcaaaatgtacagccacagccttttaatttgggagcccctgttgtcattcaaatgtgtacctctacagttgtaaaaagtattagattctactatctgtgggttgtgcttgccagacaggtcttaaattgtatattttttggaaaagtttatatactctcttaggaatcattgtgaaaagatcaagaaatcaggatggccatttatttaatatccattcatttcatgttagtgggactattaacttgtcaccaagcaggactctatttcaaacaaaatttaaaactgtttgtggcctatatgtgtttaatcctggttaaagataaagcttcataatgctgtttttattcaacacattaaccagctgtaaaacacagacctttatcaagagtaggcaaagattttcaggattcatatacagatagactataaagtcatgtaatttgaaaagcagtgtttcattatgaaagagctctcaagttgcttgtaaagctaatctaattaaaaagatgtataaatgttgttga

SEQ ID NO: 442715 - DNA, 2670 bp, Homo sapiens
tgggccgggagaggctggcgcgccgggcggctccgcgaatcctccggcatccgccccggcgggccgcccccgcccgcggcagccccccgagcagtggcccggcatcggcgccttcccggcgggcaagagtgagccatggagctacgtgtggggaacaagtaccgcctgggacggaagatcgggagcgggtccttcggagatatctacctgggtgccaacatcgcctctggtgaggaagtcgccatcaagctggagtgtgtgaagacaaagcacccccagctgcacatcgagagcaagttctacaagatgatgcagggtggcgtggggatcccgtccatcaagtggtgcggagctgagggcgactacaacgtgatggtcatggagctgctggggcctagcctcgaggacctgttcaacttctgttcccgcaaattcagcctcaagacggtgctgctcttggccgaccagatgatcagccgcatcgagtatatccactccaagaacttcatccaccgggacgtcaagcccgacaacttcctcatggggctggggaagaagggcaacctggtctacatcatcgacttcggcctggccaagaagtaccgggacgcccgcacccaccagcacattccctaccgggaaaacaagaacctgaccggcacggcccgctacgcttccatcaacacgcacctgggcattgagcaaagccgtcgagatgacctggagagcctgggctacgtgctcatgtacttcaacctgggctccctgccctggcaggggctcaaagcagccaccaagcgccagaagtatgaacggatcagcgagaagaagatgtcaacgcccatcgaggtcctctgcaaaggctatccctccgaattctcaacatacctcaacttctgccgctccctgcggtttgacgacaagcccgactactcttacctacgtcagctcttccgcaacctcttccaccggcagggcttctcctatgactacgtctttgactggaacatgctgaaattcggtgcagcccggaatcccgaggatgtggaccgggagcggcgagaacacgaacgcgaggagaggatggggcagctacgggggtccgcgacccgagccctgccccctggcccacccacgggggccactgccaaccggctccgcagtgccgccgagcccgtggcttccacgccagcctcccgcatccagccggctggcaatacttctcccagagcgatctcgcgggtcgaccgggagaggaaggtgagtatgaggctgcacaggggtgcgcccgccaacgtctcctcctcagacctcactgggcggcaagaggtctcccggatcccagcctcacagacaagtgtgccatttgaccatctcgggaagtgaggagagcccccattggaccagtgtttgcttagtgtcttcactgtattttctttaaaaaaaaaaaaaaaaaaaaggcaaaaataaaccactcaaaagaacaacaaaaaaacccagcacaaaaccgacgatggagtttgtttctttgatttctttgccaatggcaagaagatgagatgccctcagcactgaggattcttgcccccttgtggtgcccgctgcccccaaccttcaggctgccagatgctcccctgacaacaccaggctacaggagccagacgccagggcctgcccggcctcctgttcctgcccccacccaccacctgcctggagaggaacgggtcgggtccgtgtcggagaagtgacaggtcccagagccaaagccggccctcaagcatcatcagggagtggtgtagtcagttgaaggcagttcccaccgagttttccgagcctcagaatccaggagatacgcacagccccacccactctgagatgacagtggctgacttcccgtgctgggcttttccattgtccccctggcctccaggctcctcctctgcctctccatggagtgggtggggaggtggtgggggccggcgtcccctgcgtgtgtgtgtgtgtgtgtgtgtgtgtggatgtattgacctgtgtttcccaagacagcaggtgccacggcccgccccgcctgccagcccgaattcccgttctcctgtgtctactaacaaggacatgggggtgggcggtgacctccgcatccctcagagctcagagggtcctcgctgccaccggtccccccctagcccgtcatcagccggtggcagctccatcttccattcctggttttagggcagaatccatggagactgcttccagaaggcatctggctctgagttataaattacttccctggtcctgacagtcacctggggtcccccctctccctggttccacctttctgaggaggagcctggagtcagggctgggttttggattaacccatccttcctagttaacacctttttgtttttattttattttatttttgtttgttttctccgtgtgtgtgttttcctaatttatttacctctgtttcccctttttcctttttttttttaattaaagagcaaagctttttattactttgtaatttaaaaaactgaaaaaaaaaaaactgaagaactttggggggaattttgtacttttttcctgtgtaaatattggacttttttgagctttatcgtggttgttaatttgaagtaataaagtagaaaagataaagtgaaaaaa

SEQ ID NO: 442716 - DNA, 2646 bp, Homo sapiens
ggttgggatctgaggggtcctctctgtgcccatcacagtttgagcttcagggaaaagaagaagaggtctttgcccttcgtttttccacgggaggagaatcaagagtgagccatggagctacgtgtggggaacaagtaccgcctgggacggaagatcgggagcgggtccttcggagatatctacctgggtgccaacatcgcctctggtgaggaagtcgccatcaagctggagtgtgtgaagacaaagcacccccagctgcacatcgagagcaagttctacaagatgatgcagggtggcgtggggatcccgtccatcaagtggtgcggagctgagggcgactacaacgtgatggtcatggagctgctggggcctagcctcgaggacctgttcaacttctgttcccgcaaattcagcctcaagacggtgctgctcttggccgaccagatgatcagccgcatcgagtatatccactccaagaacttcatccaccgggacgtcaagcccgacaacttcctcatggggctggggaagaagggcaacctggtctacatcatcgacttcggcctggccaagaagtaccgggacgcccgcacccaccagcacattccctaccgggaaaacaagaacctgaccggcacggcccgctacgcttccatcaacacgcacctgggcattgagcaaagccgtcgagatgacctggagagcctgggctacgtgctcatgtacttcaacctgggctccctgccctggcaggggctcaaagcagccaccaagcgccagaagtatgaacggatcagcgagaagaagatgtcaacgcccatcgaggtcctctgcaaaggctatccctccgaattctcaacatacctcaacttctgccgctccctgcggtttgacgacaagcccgactactcttacctacgtcagctcttccgcaacctcttccaccggcagggcttctcctatgactacgtctttgactggaacatgctgaaattcggtgcagcccggaatcccgaggatgtggaccgggagcggcgagaacacgaacgcgaggagaggatggggcagctacgggggtccgcgacccgagccctgccccctggcccacccacgggggccactgccaaccggctccgcagtgccgccgagcccgtggcttccacgccagcctcccgcatccagccggctggcaatacttctcccagagcgatctcgcgggtcgaccgggagaggaaggtgagtatgaggctgcacaggggtgcgcccgccaacgtctcctcctcagacctcactgggcggcaagaggtctcccggatcccagcctcacagacaagtgtgccatttgaccatctcgggaagtgaggagagcccccattggaccagtgtttgcttagtgtcttcactgtattttctttaaaaaaaaaaaaaaaaaaaaggcaaaaataaaccactcaaaagaacaacaaaaaaacccagcacaaaaccgacgatggagtttgtttctttgatttctttgccaatggcaagaagatgagatgccctcagcactgaggattcttgcccccttgtggtgcccgctgcccccaaccttcaggctgccagatgctcccctgacaacaccaggctacaggagccagacgccagggcctgcccggcctcctgttcctgcccccacccaccacctgcctggagaggaacgggtcgggtccgtgtcggagaagtgacaggtcccagagccaaagccggccctcaagcatcatcagggagtggtgtagtcagttgaaggcagttcccaccgagttttccgagcctcagaatccaggagatacgcacagccccacccactctgagatgacagtggctgacttcccgtgctgggcttttccattgtccccctggcctccaggctcctcctctgcctctccatggagtgggtggggaggtggtgggggccggcgtcccctgcgtgtgtgtgtgtgtgtgtgtgtgtgtggatgtattgacctgtgtttcccaagacagcaggtgccacggcccgccccgcctgccagcccgaattcccgttctcctgtgtctactaacaaggacatgggggtgggcggtgacctccgcatccctcagagctcagagggtcctcgctgccaccggtccccccctagcccgtcatcagccggtggcagctccatcttccattcctggttttagggcagaatccatggagactgcttccagaaggcatctggctctgagttataaattacttccctggtcctgacagtcacctggggtcccccctctccctggttccacctttctgaggaggagcctggagtcagggctgggttttggattaacccatccttcctagttaacacctttttgtttttattttattttatttttgtttgttttctccgtgtgtgtgttttcctaatttatttacctctgtttcccctttttcctttttttttttaattaaagagcaaagctttttattactttgtaatttaaaaaactgaaaaaaaaaaaactgaagaactttggggggaattttgtacttttttcctgtgtaaatattggacttttttgagctttatcgtggttgttaatttgaagtaataaagtagaaaagataaagtgaaaaaa

SEQ ID NO: 442717 - DNA, 2856 bp, Homo sapiens
ggggacgaggaggagggggcctgttattttgcaggctcgcgggggaggccccccggccggcctgcctccgcttccccccgctgggccctccgaggccccggccggccaggcggccaccccggctgtgatttggggacgctgagggagggggcttggggtgctgggcgccggatactgttgattcgggcccgcgtagggtttcatcggacaatcaccggcgccccctgctctcccggccccggcgcccggacctgggggttcgcaaggctgcgcccgctcgttggatgacgggcgtttgggggtcctaagcaagagtgagccatggagctacgtgtggggaacaagtaccgcctgggacggaagatcgggagcgggtccttcggagatatctacctgggtgccaacatcgcctctggtgaggaagtcgccatcaagctggagtgtgtgaagacaaagcacccccagctgcacatcgagagcaagttctacaagatgatgcagggtggcgtggggatcccgtccatcaagtggtgcggagctgagggcgactacaacgtgatggtcatggagctgctggggcctagcctcgaggacctgttcaacttctgttcccgcaaattcagcctcaagacggtgctgctcttggccgaccagatgatcagccgcatcgagtatatccactccaagaacttcatccaccgggacgtcaagcccgacaacttcctcatggggctggggaagaagggcaacctggtctacatcatcgacttcggcctggccaagaagtaccgggacgcccgcacccaccagcacattccctaccgggaaaacaagaacctgaccggcacggcccgctacgcttccatcaacacgcacctgggcattgagcaaagccgtcgagatgacctggagagcctgggctacgtgctcatgtacttcaacctgggctccctgccctggcaggggctcaaagcagccaccaagcgccagaagtatgaacggatcagcgagaagaagatgtcaacgcccatcgaggtcctctgcaaaggctatccctccgaattctcaacatacctcaacttctgccgctccctgcggtttgacgacaagcccgactactcttacctacgtcagctcttccgcaacctcttccaccggcagggcttctcctatgactacgtctttgactggaacatgctgaaattcggtgcagcccggaatcccgaggatgtggaccgggagcggcgagaacacgaacgcgaggagaggatggggcagctacgggggtccgcgacccgagccctgccccctggcccacccacgggggccactgccaaccggctccgcagtgccgccgagcccgtggcttccacgccagcctcccgcatccagccggctggcaatacttctcccagagcgatctcgcgggtcgaccgggagaggaaggtgagtatgaggctgcacaggggtgcgcccgccaacgtctcctcctcagacctcactgggcggcaagaggtctcccggatcccagcctcacagacaagtgtgccatttgaccatctcgggaagtgaggagagcccccattggaccagtgtttgcttagtgtcttcactgtattttctttaaaaaaaaaaaaaaaaaaaaggcaaaaataaaccactcaaaagaacaacaaaaaaacccagcacaaaaccgacgatggagtttgtttctttgatttctttgccaatggcaagaagatgagatgccctcagcactgaggattcttgcccccttgtggtgcccgctgcccccaaccttcaggctgccagatgctcccctgacaacaccaggctacaggagccagacgccagggcctgcccggcctcctgttcctgcccccacccaccacctgcctggagaggaacgggtcgggtccgtgtcggagaagtgacaggtcccagagccaaagccggccctcaagcatcatcagggagtggtgtagtcagttgaaggcagttcccaccgagttttccgagcctcagaatccaggagatacgcacagccccacccactctgagatgacagtggctgacttcccgtgctgggcttttccattgtccccctggcctccaggctcctcctctgcctctccatggagtgggtggggaggtggtgggggccggcgtcccctgcgtgtgtgtgtgtgtgtgtgtgtgtgtggatgtattgacctgtgtttcccaagacagcaggtgccacggcccgccccgcctgccagcccgaattcccgttctcctgtgtctactaacaaggacatgggggtgggcggtgacctccgcatccctcagagctcagagggtcctcgctgccaccggtccccccctagcccgtcatcagccggtggcagctccatcttccattcctggttttagggcagaatccatggagactgcttccagaaggcatctggctctgagttataaattacttccctggtcctgacagtcacctggggtcccccctctccctggttccacctttctgaggaggagcctggagtcagggctgggttttggattaacccatccttcctagttaacacctttttgtttttattttattttatttttgtttgttttctccgtgtgtgtgttttcctaatttatttacctctgtttcccctttttcctttttttttttaattaaagagcaaagctttttattactttgtaatttaaaaaactgaaaaaaaaaaaactgaagaactttggggggaattttgtacttttttcctgtgtaaatattggacttttttgagctttatcgtggttgttaatttgaagtaataaagtagaaaagataaagtgaaaaaa

SEQ ID NO: 442718 - DNA, 3119 bp, Homo sapiens
  misc_feature (2683)..(2683): n is a, c, g, or t
  misc_feature (2710)..(2710): n is a, c, g, or t
  misc_feature (2714)..(2714): n is a, c, g, or t
tgggccgggagaggctggcgcgccgggcggctccgcgaatcctccggcatccgccccggcgggccgcccccgcccgcggcagccccccgagcagtggcccggcatcggcgccttcccggcgggcaagagtgagccatggagctacgtgtggggaacaagtaccgcctgggacggaagatcgggagcgggtccttcggagatatctacctgggtgccaacatcgcctctggtgaggaagtcgccatcaagctggagtgtgtgaagacaaagcacccccagctgcacatcgagagcaagttctacaagatgatgcagggtggcgtggggatcccgtccatcaagtggtgcggagctgagggcgactacaacgtgatggtcatggagctgctggggcctagcctcgaggacctgttcaacttctgttcccgcaaattcagcctcaagacggtgctgctcttggccgaccagatgatcagccgcatcgagtatatccactccaagaacttcatccaccgggacgtcaagcccgacaacttcctcatggggctggggaagaagggcaacctggtctacatcatcgacttcggcctggccaagaagtaccgggacgcccgcacccaccagcacattccctaccgggaaaacaagaacctgaccggcacggcccgctacgcttccatcaacacgcacctgggcattgagcaaagccgtcgagatgacctggagagcctgggctacgtgctcatgtacttcaacctgggctccctgccctggcaggggctcaaagcagccaccaagcgccagaagtatgaacggatcagcgagaagaagatgtcaacgcccatcgaggtcctctgcaaaggctatccctccgaattctcaacatacctcaacttctgccgctccctgcggtttgacgacaagcccgactactcttacctacgtcagctcttccgcaacctcttccaccggcagggcttctcctatgactacgtctttgactggaacatgctgaaattcggtgcagcccggaatcccgaggatgtggaccgggagcggcgagaacacgaacgcgaggagaggatggggcagctacgggggtccgcgacccgagccctgccccctggcccacccacgggggccactgccaaccggctccgcagtgccgccgagcccgtggcttccacgccagcctcccgcatccagccggctggcaatacttctcccagagcgatctcgcgggtcgaccgggagaggaaggtgagtatgaggctgcacaggggtgcgcccgccaacgtctcctcctcagacctcactgggcggcaagaggtctcccggatcccagcctcacagacaagtgtgccatttgaccatctcgggaagtgaggagagcccccattggaccagtgtttgcttagtgtcttcactgtattttctttaaaaaaaaaaaaaaaaaaaaggcaaaaataaaccactcaaaagaacaacaaaaaaacccagcacaaaaccgacgatggagtttgtttctttgatttctttgccaatggcaagaagatgagatgccctcagcactgaggattcttgcccccttgtggtgcccgctgcccccaaccttcaggctgccagatgctcccctgacaacaccaggctacaggagccagacgccagggcctgcccggcctcctgttcctgcccccacccaccacctgcctggagaggaacgggtcgggtccgtgtcggagaagtgacaggtcccagagccaaagccggccctcaagcatcatcagggagtggtgtagtcagttgaaggcagttcccaccgagttttccgagcctcagaatccaggagatacgcacagccccacccactctgagatgacagtggctgacttcccgtgctgggcttttccattgtccccctggcctccaggctcctcctctgcctctccatggagtgggtggggaggtggtgggggccggcgtcccctgcgtgtgtgtgtgtgtgtgtgtgtgtgtggatgtattgacctgtgtttcccaagacagcaggtgccacggcccgccccgcctgccagcccgaattcccgttctcctgtgtctactaacaaggacatgggggtgggcggtgacctccgcatccctcagagctcagagggtcctcgctgccaccggtccccccctagcccgtcatcagccggtggcagctccatcttccattcctggttttagggcagaatccatggagactgcttccagaaggcatctggctctgagttataaattacttccctggtcctgacagtcacctggggtcccccctctccctggttccacctttctgaggaggagcctggagtcagggctgggttttggattaacccatccttcctagttaacacctttttgtttttattttattttatttttgtttgttttctccgtgtgtgtgttttcctaatttatttacctctgtttcccctttttcctttttttttttaattaaagagcaaagctttttattactttgtaatttaaaaaactgaaaaaaaaaaaactgaagaactttggggggaattttgtacttttttcctgtgtaaatattggacttttttgagctttatcgtggttgttaatttgaagtaataaagtagaaaagataaagtgaaaaaaaaaaaaaaacaanaaaaaaaaaaaaaaaaaaaaaaaaaanaaanaaaacaaataaataataataaaacgatatatatgaaaaaccacaaaaaaatactaacatcatattataaactctatctttaaaatgtttaatattcaaaatgtttattgctccggtcttatttaactcacaggatcataattttccaatgtcgcggtctttttaaaataaatgtcgaccttctatttaaaaaccttgtgtgtgtaaaaacctcgtgggttctactaaaatagaagacttaaggtttataaacatactctctcaccttgtggctctcacatatctataatctctcccccatctctcgcttttctcaataggtgttactccatcattttaagtccctgtgtatatattcgctggaataatattttcagacttcgtagtatttgtcgaccttttattc

SEQ ID NO: 442719 - DNA, 2512 bp, Homo sapiens
tctaaaattgattgtggtaatggctgcgcaagcttgtgaatatactaaaaacggtgccaacatcgcctctggtgaggaagtcgccatcaagctggagtgtgtgaagacaaagcacccccagctgcacatcgagagcaagttctacaagatgatgcagggtggcgtggggatcccgtccatcaagtggtgcggagctgagggcgactacaacgtgatggtcatggagctgctggggcctagcctcgaggacctgttcaacttctgttcccgcaaattcagcctcaagacggtgctgctcttggccgaccagatgatcagccgcatcgagtatatccactccaagaacttcatccaccgggacgtcaagcccgacaacttcctcatggggctggggaagaagggcaacctggtctacatcatcgacttcggcctggccaagaagtaccgggacgcccgcacccaccagcacattccctaccgggaaaacaagaacctgaccggcacggcccgctacgcttccatcaacacgcacctgggcattgagcaaagccgtcgagatgacctggagagcctgggctacgtgctcatgtacttcaacctgggctccctgccctggcaggggctcaaagcagccaccaagcgccagaagtatgaacggatcagcgagaagaagatgtcaacgcccatcgaggtcctctgcaaaggctatccctccgaattctcaacatacctcaacttctgccgctccctgcggtttgacgacaagcccgactactcttacctacgtcagctcttccgcaacctcttccaccggcagggcttctcctatgactacgtctttgactggaacatgctgaaattcggtgcagcccggaatcccgaggatgtggaccgggagcggcgagaacacgaacgcgaggagaggatggggcagctacgggggtccgcgacccgagccctgccccctggcccacccacgggggccactgccaaccggctccgcagtgccgccgagcccgtggcttccacgccagcctcccgcatccagccggctggcaatacttctcccagagcgatctcgcgggtcgaccgggagaggaaggtgagtatgaggctgcacaggggtgcgcccgccaacgtctcctcctcagacctcactgggcggcaagaggtctcccggatcccagcctcacagacaagtgtgccatttgaccatctcgggaagtgaggagagcccccattggaccagtgtttgcttagtgtcttcactgtattttctttaaaaaaaaaaaaaaaaaaaaggcaaaaataaaccactcaaaagaacaacaaaaaaacccagcacaaaaccgacgatggagtttgtttctttgatttctttgccaatggcaagaagatgagatgccctcagcactgaggattcttgcccccttgtggtgcccgctgcccccaaccttcaggctgccagatgctcccctgacaacaccaggctacaggagccagacgccagggcctgcccggcctcctgttcctgcccccacccaccacctgcctggagaggaacgggtcgggtccgtgtcggagaagtgacaggtcccagagccaaagccggccctcaagcatcatcagggagtggtgtagtcagttgaaggcagttcccaccgagttttccgagcctcagaatccaggagatacgcacagccccacccactctgagatgacagtggctgacttcccgtgctgggcttttccattgtccccctggcctccaggctcctcctctgcctctccatggagtgggtggggaggtggtgggggccggcgtcccctgcgtgtgtgtgtgtgtgtgtgtgtgtgtggatgtattgacctgtgtttcccaagacagcaggtgccacggcccgccccgcctgccagcccgaattcccgttctcctgtgtctactaacaaggacatgggggtgggcggtgacctccgcatccctcagagctcagagggtcctcgctgccaccggtccccccctagcccgtcatcagccggtggcagctccatcttccattcctggttttagggcagaatccatggagactgcttccagaaggcatctggctctgagttataaattacttccctggtcctgacagtcacctggggtcccccctctccctggttccacctttctgaggaggagcctggagtcagggctgggttttggattaacccatccttcctagttaacacctttttgtttttattttattttatttttgtttgttttctccgtgtgtgtgttttcctaatttatttacctctgtttcccctttttcctttttttttttaattaaagagcaaagctttttattactttgtaatttaaaaaactgaaaaaaaaaaaactgaagaactttggggggaattttgtacttttttcctgtgtaaatattggacttttttgagctttatcgtggttgttaatttgaagtaataaagtagaaaagataaagtgaaaaaa

SEQ ID NO: 442720 - DNA, 2278 bp, Homo sapiens
tgggccgggagaggctggcgcgccgggcggctccgcgaatcctccggcatccgccccggcgggccgcccccgcccgcggcagccccccgagcagtggcccggcatcggcgccttcccggcgggcaagagtgagccatggagctacgtgtggggaacaagtaccgcctgggacggaagatcgggagcgggtccttcggagatatctacctgggtgccaacatcgcctctggtgaggaagtcgccatcaagctggagtgtgtgaagacaaagcacccccagctgcacatcgagagcaagttctacaagatgatgcagggtggcgtggggatcccgtccatcaagtggtgcggagctgagggcgactacaacgtgatggtcatggagctgctggggcctagcctcgaggacctgttcaacttctgttcccgcaaattcagcctcaagacggtgctgctcttggccgaccagatgatcagccgcatcgagtatatccactccaagaacttcatccaccgggacgtcaagcccgacaacttcctcatggggctggggaagaagggcaacctggtctacatcatcgacttcggcctggccaagaagtaccgggacgcccgcacccaccagcacattccctaccgggaaaacaagaacctgaccggcacggcccgctacgcttccatcaacacgcacctgggcattgagcaaagccgtcgagatgacctggagagcctgggctacgtgctcatgtacttcaacctgggctccctgccctggcaggggctcaaagcagccaccaagcgccagaagtatgaacggatcagcgagaagaagatgtcaacgcccatcgaggtcctctgcaaaggctatccctccgaattctcaacatacctcaacttctgccgctccctgcggtttgacgacaagcccgactactcttacctacgtcagctcttccgcaacctcttccaccggcagggcttctcctatgactacgtctttgactggaacatgctgaaattcggtgcagcccggaatcccgaggatgtggaccgggagcggcgagaacacgaacgcgaggagaggatggggcagctacgggggtccgcgacccgagccctgccccctggcccacccacgggggccactgccaaccggctccgcagtgccgccgagcccgtggcttccacgccagcctcccgcatccagccggctggcaatacttctcccagagcgatctcgcgggtcgaccgggagaggaaggtgagtatgaggctgcacaggggtgcgcccgccaacgtctcctcctcagacctcactgggcggcaagaggtctcccggatcccagcctcacagacaagtgtgccatttgaccatctcgggaagtgaggagagcccccattggaccagtgtttgcttagtgtcttcactgtattttctttaaaaaaaaaaaaaaaaaaaaggcaaaaataaaccactcaaaagaacaacaaaaaaacccagcacaaaaccgacgatggagtttgtttctttgatttctttgccaatggcaagaagatgagatgccctcagcactgaggattcttgcccccttgtggtgcccgctgcccccaaccttcaggctgccagatgctcccctgacaacaccaggctacaggagccagacgccagggcctgcccggcctcctgttcctgcccccacccaccacctgcctggagaggaacgggtcgggtccgtgtcggagaagtgacaggtcccagagccaaagccggccctcaagcatcatcagggagtggtgtagtcagttgaaggcactccatcttccattcctggttttagggcagaatccatggagactgcttccagaaggcatctggctctgagttataaattacttccctggtcctgacagtcacctggggtcccccctctccctggttccacctttctgaggaggagcctggagtcagggctgggttttggattaacccatccttcctagttaacacctttttgtttttattttattttatttttgtttgttttctccgtgtgtgtgttttcctaatttatttacctctgtttcccctttttcctttttttttttaattaaagagcaaagctttttattactttgtaatttaaaaaactgaaaaaaaaaaaactgaagaactttggggggaattttgtacttttttcctgtgtaaatattggacttttttgagctttatcgtggttgttaatttgaagtaataaagtagaaaagataaagtgaaaaaa

SEQ ID NO: 442721 - DNA, 2319 bp, Homo sapiens
tgggccgggagaggctggcgcgccgggcggctccgcgaatcctccggcatccgccccggcgggccgcccccgcccgcggcagccccccgagcagtggcccggcatcggcgccttcccggcgggcaagagtgagccatggagctacgtgtggggaacaagtaccgcctgggacggaagatcgggagcgggtccttcggagatatctacctgggtgccaacatcgcctctggtgaggaagtcgccatcaagctggagtgtgtgaagacaaagcacccccagctgcacatcgagagcaagttctacaagatgatgcagggtggcgtggggatcccgtccatcaagtggtgcggagctgagggcgactacaacgtgatggtcatggagctgctggggcctagcctcgaggacctgttcaacttctgttcccgcaaattcagcctcaagacggtgctgctcttggccgaccagatgatcagccgcatcgagtatatccactccaagaacttcatccaccgggacgtcaagcccgacaacttcctcatggggctggggaagaagggcaacctggtctacatcatcgacttcggcctggccaagaagtaccgggacgcccgcacccaccagcacattccctaccgggaaaacaagaacctgaccggcacggcccgctacgcttccatcaacacgcacctgggcattgagcaaagccgtcgagatgacctggagagcctgggctacgtgctcatgtacttcaacctgggctccctgccctggcaggggctcaaagcagccaccaagcgccagaagtatgaacggatcagcgagaagaagatgtcaacgcccatcgaggtcctctgcaaaggctatccctccgaattctcaacatacctcaacttctgccgctccctgcggtttgacgacaagcccgactactcttacctacgtcagctcttccgcaacctcttccaccggcagggcttctcctatgactacgtctttgactggaacatgctgaaattcggtgcagcccggaatcccgaggatgtggaccgggagcggcgagaacacgaacgcgaggagaggatggggcagctacgggggtccgcgacccgagccctgccccctggcccacccacgggggccactgccaaccggctccgcagtgccgccgagcccgtggcttccacgccagcctcccgcatccagccggctggcaatacttctcccagagcgatctcgcgggtcgaccgggagaggaaggtgagtatgaggctgcacaggggtgcgcccgccaacgtctcctcctcagacctcactgggcggcaagaggtctcccggatcccagcctcacagacaagtgtgccatttgaccatctcgggaagtgaggagagcccccattggaccagtgtttgcttagtgtcttcactgtattttctttaaaaaaaaaaaaaaaaaaaaggcaaaaataaaccactcaaaagaacaacaaaaaaacccagcacaaaaccgacgatggagtttgtttctttgatttctttgccaatggcaagaagatgagatgccctcagcactgaggattcttgcccccttgtggtgcccgctgcccccaaccttcaggctgccagatgctcccctgacaacaccaggctacaggagccagacgccagggcctgcccggcctcctgttcctgcccccacccaccacctgcctggagaggaacgggtcgggtccgtgtcggagaagtgacaggtcccagagccaaagccggccctcaagcatcatcagggagtggtgtagtcagttgaaggcagttcccaccgagttttccgagcctcagaatccaggagatacgcacagccccacccactctgagatgacagtggctgacttcccgtgctgggcttttccattgtccccggagcctggagtcagggctgggttttggattaacccatccttcctagttaacacctttttgtttttattttattttatttttgtttgttttctccgtgtgtgtgttttcctaatttatttacctctgtttcccctttttcctttttttttttaattaaagagcaaagctttttattactttgtaatttaaaaaactgaaaaaaaaaaaactgaagaactttggggggaattttgtacttttttcctgtgtaaatattggacttttttgagctttatcgtggttgttaatttgaagtaataaagtagaaaagataaagtgaaaaaagttgactattaaccgcgtctctgcgtttactatttccattaattggctgcgtttaacacgtttttggccttgttt

SEQ ID NO: 442722 - DNA, 2087 bp, Homo sapiens
  misc_feature (1910)..(1910): n is a, c, g, or t
tgggccgggagaggctggcgcgccgggcggctccgcgaatcctccggcatccgccccggcgggccgcccccgcccgcggcagccccccgagcagtggcccggcatcggcgccttcccggcgggcaagagtgagccatggagctacgtgtggggaacaagtaccgcctgggacggaagatcgggagcgggtccttcggagatatctacctgggtgccaacatcgcctctggtgaggaagtcgccatcaagctggagtgtgtgaagacaaagcacccccagctgcacatcgagagcaagttctacaagatgatgcagggtggcgtggggatcccgtccatcaagtggtgcggagctgagggcgactacaacgtgatggtcatggagctgctggggcctagcctcgaggacctgttcaacttctgttcccgcaaattcagcctcaagacggtgctgctcttggccgaccagatgatcagccgcatcgagtatatccactccaagaacttcatccaccgggacgtcaagcccgacaacttcctcatggggctggggaagaagggcaacctggtctacatcatcgacttcggcctggccaagaagtaccgggacgcccgcacccaccagcacattccctaccgggaaaacaagaacctgaccggcacggcccgctacgcttccatcaacacgcacctgggcattgagcaaagccgtcgagatgacctggagagcctgggctacgtgctcatgtacttcaacctgggctccctgccctggcaggggctcaaagcagccaccaagcgccagaagtatgaacggatcagcgagaagaagatgtcaacgcccatcgaggtcctctgcaaaggctatccctccgaattctcaacatacctcaacttctgccgctccctgcggtttgacgacaagcccgactactcttacctacgtcagctcttccgcaacctcttccaccggcagggcttctcctatgactacgtctttgactggaacatgctgaaattcggtgcagcccggaatcccgaggatgtggaccgggagcggcgagaacacgaacgcgaggagaggatggggcagctacgggggtccgcgacccgagccctgccccctggcccacccacgggggccactgccaaccggctccgcagtgccgccgagcccgtggcttccacgccagcctcccgcatccagccggctggcaatacttctcccagagcgatctcgcgggtcgaccgggagaggaaggtgagtatgaggctgcacaggggtgcgcccgccaacgtctcctcctcagacctcactgggcggcaagaggtctcccggatcccagcctcacagacaagtgtgccatttgaccatctcgggaagtgaggagagcccccattggaccagtgtttgcttagtgtcttcactgtattttctttaaaaaaaaaaaaaaaaaaaaggcaaaaataaaccactcaaaagaacaacaaaaaaacccagcacaaaaaaaaaaaaaggggggggggggtaaaaggatatccctgagggggggccaaaggttataccgggtacccaggttttttgtggtccaagggtgggcccatattaggggaggcgtgatattaaataaggcaagggcagttgggccgtcggttgtcacacggtcgggtgacgtgtggagaaactcggctaacgtggggactctgggggaggggaacccttcattttgggggggtggcattatgtgggacaattaccttacgggagatttaaaaggcccaggggtacactatacaacttttccacgggggttcacggggggttaaacccagcggggcatagtggctggggcgcggggagagattgggccaagggggtatgatttcggcacaactcttcttcccgacgcngtgcgacaaaaaaacgggagcaccaagacggagacaagaggcaaaaagcaaacggggcgaggagagggagagagagagacgaaagaggaagagggagaacacgagacaaagagaaaaggggagaggacgagagagcgacagaacgggaggcgagcgagacgcgatgcgagcgacaca

SEQ ID NO: 442723 - DNA, 3342 bp, Homo sapiens
  misc_feature (2025)..(2025): n is a, c, g, or t
tgggccgggagaggctggcgcgccgggcggctccgcgaatcctccggcatccgccccggcgggccgcccccgcccgcggcagccccccgagcagtggcccggcatcggcgccttcccggcgggcaagagtgagccatggagctacgtgtggggaacaagtaccgcctgggacggaagatcgggagcgggtccttcggagatatctacctgggtgccaacatcgcctctggtgaggaagtcgccatcaagctggagtgtgtgaagacaaagcacccccagctgcacatcgagagcaagttctacaagatgatgcagggtggcgtggggatcccgtccatcaagtggtgcggagctgagggcgactacaacgtgatggtcatggagctgctggggcctagcctcgaggacctgttcaacttctgttcccgcaaattcagcctcaagacggtgctgctcttggccgaccagatgatcagccgcatcgagtatatccactccaagaacttcatccaccgggacgtcaagcccgacaacttcctcatggggctggggaagaagggcaacctggtctacatcatcgacttcggcctggccaagaagtaccgggacgcccgcacccaccagcacattccctaccgggaaaacaagaacctgaccggcacggcccgctacgcttccatcaacacgcacctgggcattgagcaaagccgtcgagatgacctggagagcctgggctacgtgctcatgtacttcaacctgggctccctgccctggcaggggctcaaagcagccaccaagcgccagaagtatgaacggatcagcgagaagaagatgtcaacgcccatcgaggtcctctgcaaaggctatccctccgaattctcaacatacctcaacttctgccgctccctgcggtttgacgacaagcccgactactcttacctacgtcagctcttccgcaacctcttccaccggcagggcttctcctatgactacgtctttgactggaacatgctgaaattcggtgcagcccggaatcccgaggatgtggaccgggagcggcgagaacacgaacgcgaggagaggatggggcagctacgggggtccgcgacccgagccctgccccctggcccacccacgggggccactgccaaccggctccgcagtgccgccgagcccgtggcttccacgccagcctcccgcatccagccggctggcaatacttctcccagagcgatctcgcgggtcgaccgggagaggaaggtgagtatgaggctgcacaggggtgcgcccgccaacgtctcctcctcagacctcactgggcggcaagaggtctcccggatcccagcctcacagacaagtgtgccatttgaccatctcgggaagtgaggagagcccccattggaccagtgtttgcttaggcagtagtccgacacgtcgggggactcaactttacactgggacaatctgtgtgtggtctgttttgtagaaattcatccacacaagagagtggaggcatgaacagggctggccttcctcggatctcaggcccaggaaccaagctgtccatggcgggctgggcagatatttgggggtggggtggggagatgctcaccaggagggcagagaagggagagaatccgtttctgtcacatgaagatggatctcctagcgtgctgggccttgagccaggctctggggcccagagggagatagaccaagggacgagaagacaggagtttggggggccaagtgcagtggctcgcacctgtaatcccagcacttcgggaggcccagacaggtgggtcacttgaggtcaggagttcgagaccagcctggccaacatggtgaaaacccatctctactaaaaacacaaaaattagccgggtgtggtggcacacacctgtaatctcagctactcgggacactgagacaggagaattgcttgaatctgggaggtggaggttgcagtgagccgagatcgtgccactgcactccagcctgggggacagagcgagactccatctnaaaaaaaaaaaaagtagccagagacagctgtgtacctcacctgtcttttcccttctcccttctagtgtcttcactgtattttctttaaaaaaaaaaaaaaaaaaaaggcaaaaataaaccactcaaaagaacaacaaaaaaacccagcacaaaaccgacgatggagtttgtttctttgatttctttgccaatggcaagaagatgagatgccctcagcactgaggattcttgcccccttgtggtgcccgctgcccccaaccttcaggctgccagatgctcccctgacaacaccaggctacaggagccagacgccagggcctgcccggcctcctgttcctgcccccacccaccacctgcctggagaggaacgggtcgggtccgtgtcggagaagtgacaggtcccagagccaaagccggccctcaagcatcatcagggagtggtgtagtcagttgaaggcagttcccaccgagttttccgagcctcagaatccaggagatacgcacagccccacccactctgagatgacagtggctgacttcccgtgctgggcttttccattgtccccctggcctccaggctcctcctctgcctctccatggagtgggtggggaggtggtgggggccggcgtcccctgcgtgtgtgtgtgtgtgtgtgtgtgtgtggatgtattgacctgtgtttcccaagacagcaggtgccacggcccgccccgcctgccagcccgaattcccgttctcctgtgtctactaacaaggacatgggggtgggcggtgacctccgcatccctcagagctcagagggtcctcgctgccaccggtccccccctagcccgtcatcagccggtggcagctccatcttccattcctggttttagggcagaatccatggagactgcttccagaaggcatctggctctgagttataaattacttccctggtcctgacagtcacctggggtcccccctctccctggttccacctttctgaggaggagcctggagtcagggctgggttttggattaacccatccttcctagttaacacctttttgtttttattttattttatttttgtttgttttctccgtgtgtgtgttttcctaatttatttacctctgtttcccctttttcctttttttttttaattaaagagcaaagctttttattactttgtaatttaaaaaactgaaaaaaaaaaaactgaagaactttggggggaattttgtacttttttcctgtgtaaatattggacttttttgagctttatcgtggttgttaatttgaagtaataaagtagaaaagataaagtgaaaaaa

SEQ ID NO: 442724 - DNA, 2731 bp, Homo sapiens
tgggccgggagaggctggcgcgccgggcggctccgcgaatcctccggcatccgccccggcgggccgcccccgcccgcggcagccccccgagcagtggcccggcatcggcgccttcccggcgggcaagagtgagccatggagctacgtgtggggaacaagtaccgcctgggacggaagatcgggagcgggtccttcggagatatctacctgggtgccaacatcgcctctggtgaggaagtcgccatcaagctggagtgtgtgaagacaaagcacccccagctgcacatcgagagcaagttctacaagatgatgcagggtggcgtggggatcccgtccatcaagtggtgcggagctgagggcgactacaacgtgatggtcatggagctgctggggcctagcctcgaggacctgttcaacttctgttcccgcaaattcagcctcaagacggtgctgctcttggccgaccagatgatcagccgcatcgagtatatccactccaagaacttcatccaccgggacgtcaagcccgacaacttcctcatggggctggggaagaagggcaacctggtctacatcatcgacttcggcctggccaagaagtaccgggacgcccgcacccaccagcacattccctaccgggaaaacaagaacctgaccggcacggcccgctacgcttccatcaacacgcacctgggcattgagcaaagccgtcgagatgacctggagagcctgggctacgtgctcatgtacttcaacctgggctccctgccctggcaggggctcaaagcagccaccaagcgccagaagtatgaacggatcagcgagaagaagatgtcaacgcccatcgaggtcctctgcaaaggctatccctccgaattctcaacatacctcaacttctgccgctccctgcggtttgacgacaagcccgactactcttacctacgtcagctcttccgcaacctcttccaccggcagggcttctcctatgactacgtctttgactggaacatgctgaaattcatgcggcccccttcctgccagccccctgcccttccctgtggacggccccaggatgaactagggtgcagcccggaatcccgaggatgtggaccgggagcggcgagaacacgaacgcgaggagaggatggggcagctacgggggtccgcgacccgagccctgccccctggcccacccacgggggccactgccaaccggctccgcagtgccgccgagcccgtggcttccacgccagcctcccgcatccagccggctggcaatacttctcccagagcgatctcgcgggtcgaccgggagaggaaggtgagtatgaggctgcacaggggtgcgcccgccaacgtctcctcctcagacctcactgggcggcaagaggtctcccggatcccagcctcacagacaagtgtgccatttgaccatctcgggaagtgaggagagcccccattggaccagtgtttgcttagtgtcttcactgtattttctttaaaaaaaaaaaaaaaaaaaaggcaaaaataaaccactcaaaagaacaacaaaaaaacccagcacaaaaccgacgatggagtttgtttctttgatttctttgccaatggcaagaagatgagatgccctcagcactgaggattcttgcccccttgtggtgcccgctgcccccaaccttcaggctgccagatgctcccctgacaacaccaggctacaggagccagacgccagggcctgcccggcctcctgttcctgcccccacccaccacctgcctggagaggaacgggtcgggtccgtgtcggagaagtgacaggtcccagagccaaagccggccctcaagcatcatcagggagtggtgtagtcagttgaaggcagttcccaccgagttttccgagcctcagaatccaggagatacgcacagccccacccactctgagatgacagtggctgacttcccgtgctgggcttttccattgtccccctggcctccaggctcctcctctgcctctccatggagtgggtggggaggtggtgggggccggcgtcccctgcgtgtgtgtgtgtgtgtgtgtgtgtgtggatgtattgacctgtgtttcccaagacagcaggtgccacggcccgccccgcctgccagcccgaattcccgttctcctgtgtctactaacaaggacatgggggtgggcggtgacctccgcatccctcagagctcagagggtcctcgctgccaccggtccccccctagcccgtcatcagccggtggcagctccatcttccattcctggttttagggcagaatccatggagactgcttccagaaggcatctggctctgagttataaattacttccctggtcctgacagtcacctggggtcccccctctccctggttccacctttctgaggaggagcctggagtcagggctgggttttggattaacccatccttcctagttaacacctttttgtttttattttattttatttttgtttgttttctccgtgtgtgtgttttcctaatttatttacctctgtttcccctttttcctttttttttttaattaaagagcaaagctttttattactttgtaatttaaaaaactgaaaaaaaaaaaactgaagaactttggggggaattttgtacttttttcctgtgtaaatattggacttttttgagctttatcgtggttgttaatttgaagtaataaagtagaaaagataaagtgaaaaaa

SEQ ID NO: 442725 - DNA, 2470 bp, Homo sapiens
tgggccgggagaggctggcgcgccgggcggctccgcgaatcctccggcatccgccccggcgggccgcccccgcccgcggcagccccccgagcagtggcccggcatcggcgccttcccggcgggcaagagtgagccatggagctacgtgtggggaacaagtaccgcctgggacggaagatcgggagcgggtccttcggagatatctacctgggtgccaacatcgcctctggtgaggaagtcgccatcaagctggagtgtgtgaagacaaagcacccccagctgcacatcgagagcaagttctacaagatgatgcagggtggcgtggggatcccgtccatcaagtggtgcggagctgagggcgactacaacgtgatggtcatggagctgctggggcctagcctcgaggacctgttcaacttctgttcccgcaaattcagcctcaagacggtgctgctcttggccgaccagatgatcagccgcatcgagtatatccactccaagaacttcatccaccgggacgtcaagcccgacaacttcctcatggggctggggaagaagggcaacctggtctacatcatcgacttcggcctggccaagaagtaccgggacgcccgcacccaccagcacattccctaccgggaaaacaagaacctgaccggcacggcccgctacgcttccatcaacacgcacctgggcattgagcaaagccgtcgagatgacctggagagcctgggctacgtgctcatgtacttcaacctgggctccctgccctggcaggggctcaaagcagccaccaagcgccagaagtatgaacggatcagcgagaagaagatgtcaacgcccatcgaggtcctctgcaaaggctatccctccgaattctcaacatacctcaacttctgccgctccctgcggtttgacgacaagcccgactactcttacctacgtcagctcttccgcaacctcttccaccggcagggcttctcctatgactacgtctttgactggaacatgctgaaattcggtgcagcccggaatcccgaggatgtggaccgggagcggcgagaacacgaacgcgaggagaggatggggcagctacgggggtccgcgacccgagccctgccccctggcccacccacgggggccactgccaaccggctccgcagtgccgccgagcccgtggcttccacgccagcctcccgcatccagccggctggcaatacttctcccagagcgatctcgcgggtcgaccgggagaggaaggtgagtatgaggctgcacaggggtgcgcccgccaacgtctcctcctcagacctcactgggcggcaagaggtctcccggatcccagcctcacagacaagtgtgccatttgaccatctcgggaagtgaggagagcccccattggaccagtgtttgcttaggctgccagatgctcccctgacaacaccaggctacaggagccagacgccagggcctgcccggcctcctgttcctgcccccacccaccacctgcctggagaggaacgggtcgggtccgtgtcggagaagtgacaggtcccagagccaaagccggccctcaagcatcatcagggagtggtgtagtcagttgaaggcagttcccaccgagttttccgagcctcagaatccaggagatacgcacagccccacccactctgagatgacagtggctgacttcccgtgctgggcttttccattgtccccctggcctccaggctcctcctctgcctctccatggagtgggtggggaggtggtgggggccggcgtcccctgcgtgtgtgtgtgtgtgtgtgtgtgtgtggatgtattgacctgtgtttcccaagacagcaggtgccacggcccgccccgcctgccagcccgaattcccgttctcctgtgtctactaacaaggacatgggggtgggcggtgacctccgcatccctcagagctcagagggtcctcgctgccaccggtccccccctagcccgtcatcagccggtggcagctccatcttccattcctggttttagggcagaatccatggagactgcttccagaaggcatctggctctgagttataaattacttccctggtcctgacagtcacctggggtcccccctctccctggttccacctttctgaggaggagcctggagtcagggctgggttttggattaacccatccttcctagttaacacctttttgtttttattttattttatttttgtttgttttctccgtgtgtgtgttttcctaatttatttacctctgtttcccctttttcctttttttttttaattaaagagcaaagctttttattactttgtaatttaaaaaactgaaaaaaaaaaaactgaagaactttggggggaattttgtacttttttcctgtgtaaatattggacttttttgagctttatcgtggttgttaatttgaagtaataaagtagaaaagataaagtgaaaaaa

SEQ ID NO: 442726 - DNA, 3654 bp, Homo sapiens
  misc_feature (2337)..(2337): n is a, c, g, or t
tgggccgggagaggctggcgcgccgggcggctccgcgaatcctccggcatccgccccggcgggccgcccccgcccgcggcagccccccgagcagtggcccggcatcggcgccttcccggcgggcaagagtgagccatggagctacgtgtggggaacaagtaccgcctgggacggaagatcgggagcgggtccttcggagatatctacctgggtgccaacatcgcctctggtgaggaagtcgccatcaagctggagtgtgtgaagacaaagcacccccagctgcacatcgagagcaagttctacaagatgatgcagggtggcgtggggatcccgtccatcaagtggtgcggagctgagggcgactacaacgtgatggtcatggagctgctggggcctagcctcgaggacctgttcaacttctgttcccgcaaattcagcctcaagacggtgctgctcttggccgaccagatgatcagccgcatcgagtatatccactccaagaacttcatccaccgggacgtcaagcccgacaacttcctcatggggctggggaagaagggcaacctggtctacatcatcgacttcggcctggccaagaagtaccgggacgcccgcacccaccagcacattccctaccgggaaaacaagaacctgaccggcacggcccgctacgcttccatcaacacgcacctgggcattgagcaaagccgtcgagatgacctggagagcctgggctacgtgctcatgtacttcaacctgggctccctgccctggcaggggctcaaagcagccaccaagcgccagaagtatgaacggatcagcgagaagaagatgtcaacgcccatcgaggtcctctgcaaaggctatccctccgaattctcaacatacctcaacttctgccgctccctgcggtttgacgacaagcccgactactcttacctacgtcagctcttccgcaacctcttccaccggcagggcttctcctatgactacgtctttgactggaacatgctgaaattcggggcttcctcgagccaggctcagccccgtgacagccccatgacagcgaagggacctttctgtccccgcccctgtccctgtgctgggcccacgtactcacccacgtactggtgcccggctcccctgggcacccagagccccccagataggccggtggaggaggtggaggagctgtccccccaaaactactggcctgtggtctggactccagggccccatttctgatgtcgccaggtgtgcctgagcccatcggggccaggcctgaggaagtgtttcttgggaggatgggatgaccccctgttcccaagagatggcagcacagtggaggccatggtggaaaaggccctgccatggggtccttgagggccaggacagcctgagggagggatggtggccactgcccacaaggggcctggtgggaacgggtcccaggacagactcatagctagaccccgttggcggcctctgtgttgaaccagaactcattaaacacctcctcttgcttcatcctggtgtgcctctttcatggcagggccctcagccaccctgctagatggttaggaccaaggctctgttctcctggaagccaaggtcggcacattggtcttgggcttctcttctctctgggtttcttgttcactaaggagtaacacagaggtcaggcagagaatgggggtctcgcaggctagggacctcagggagaggcctctgttgcccttttcagcaaggctggaaatgggatatgggcaggggacgtcttctctgacttcaccctagaccttctggctccaaatggggcccatggccttgagcacctgggaccagctctttccaccacagggcattgggcactgggcactttcttatcgagatagtcactcccacgtctggttcgtgatgggcttggccctccagctcagcacaactgcaagaatggattttgtattctctagacggacactgtccaagatggtagccattggccacatgcgacacatttttaatgaattaaaattaatcaagactggaaatgtcggccaggcctggtggctcatgcctgtaatcccagcacttcgggaggcccagacaggtgggtcacttgaggtcaggagttcgagaccagcctggccaacatggtgaaaacccatctctactaaaaacacaaaaattagccgggtgtggtggcacacacctgtaatctcagctactcgggacactgagacaggagaattgcttgaatctgggaggtggaggttgcagtgagccgagatcgtgccactgcactccagcctgggggacagagcgagactccatctnaaaaaaaaaaaaagtagccagagacagctgtgtacctcacctgtcttttcccttctcccttctagtgtcttcactgtattttctttaaaaaaaaaaaaaaaaaaaaggcaaaaataaaccactcaaaagaacaacaaaaaaacccagcacaaaaccgacgatggagtttgtttctttgatttctttgccaatggcaagaagatgagatgccctcagcactgaggattcttgcccccttgtggtgcccgctgcccccaaccttcaggctgccagatgctcccctgacaacaccaggctacaggagccagacgccagggcctgcccggcctcctgttcctgcccccacccaccacctgcctggagaggaacgggtcgggtccgtgtcggagaagtgacaggtcccagagccaaagccggccctcaagcatcatcagggagtggtgtagtcagttgaaggcagttcccaccgagttttccgagcctcagaatccaggagatacgcacagccccacccactctgagatgacagtggctgacttcccgtgctgggcttttccattgtccccctggcctccaggctcctcctctgcctctccatggagtgggtggggaggtggtgggggccggcgtcccctgcgtgtgtgtgtgtgtgtgtgtgtgtgtggatgtattgacctgtgtttcccaagacagcaggtgccacggcccgccccgcctgccagcccgaattcccgttctcctgtgtctactaacaaggacatgggggtgggcggtgacctccgcatccctcagagctcagagggtcctcgctgccaccggtccccccctagcccgtcatcagccggtggcagctccatcttccattcctggttttagggcagaatccatggagactgcttccagaaggcatctggctctgagttataaattacttccctggtcctgacagtcacctggggtcccccctctccctggttccacctttctgaggaggagcctggagtcagggctgggttttggattaacccatccttcctagttaacacctttttgtttttattttattttatttttgtttgttttctccgtgtgtgtgttttcctaatttatttacctctgtttcccctttttcctttttttttttaattaaagagcaaagctttttattactttgtaatttaaaaaactgaaaaaaaaaaaactgaagaactttggggggaattttgtacttttttcctgtgtaaatattggacttttttgagctttatcgtggttgttaatttgaagtaataaagtagaaaagataaagtgaaaaaa

SEQ ID NO: 442727 - DNA, 2552 bp, Homo sapiens
tgggccgggagaggctggcgcgccgggcggctccgcgaatcctccggcatccgccccggcgggccgcccccgcccgcggcagccccccgagcagtggcccggcatcggcgccttcccggcgggcaagagtgagccatggagctacgtgtggggaacaagtaccgcctgggacggaagatcgggagcgggtccttcggagatatctacctgggtgccaacatcgcctctggtgaggaagtcgccatcaagctggagtgtgtgaagacaaagcacccccagctgcacatcgagagcaagttctacaagatgatgcagggtggcgtggggatcccgtccatcaagtggtgcggagctgagggcgactacaacgtgatggtcatggagctgctggggcctagcctcgaggacctgttcaacttctgttcccgcaaattcagcctcaagacggtgctgctcttggccgaccagatgatcagccgcatcgagtatatccactccaagaacttcatccaccgggacgtcaagcccgacaacttcctcatggggctggggaagaagggcaacctggtctacatcatcgacttcggcctggccaagaagtaccgggacgcccgcacccaccagcacattccctaccgggaaaacaagaacctgaccggcacggcccgctacgcttccatcaacacgcacctgggcattgagcaaagccgtcgagatgacctggagagcctgggctacgtgctcatgtacttcaacctgggctccctgccctggcaggggctcaaagcagccaccaagcgccagaagtatgaacggatcagcgagaagaagatgtcaacgcccatcgaggtcctctgcaaaggctatccctccgaattctcaacatacctcaacttctgccgctccctgcggtttgacgacaagcccgactactcttacctacgtcagctcttccgcaacctcttccaccggcagggcttctcctatgactacgtctttgactggaacatgctgaaattcatgcggcccccttcctgccagccccctgcccttccctgtggacggccccaggatgaactagggtgcagcccggaatcccgaggatgtggaccgggagcggcgagaacacgaacgcgaggaaggtgagtatgaggctgcacaggggtgcgcccgccaacgtctcctcctcagacctcactgggcggcaagaggtctcccggatcccagcctcacagacaagtgtgccatttgaccatctcgggaagtgaggagagcccccattggaccagtgtttgcttagtgtcttcactgtattttctttaaaaaaaaaaaaaaaaaaaaggcaaaaataaaccactcaaaagaacaacaaaaaaacccagcacaaaaccgacgatggagtttgtttctttgatttctttgccaatggcaagaagatgagatgccctcagcactgaggattcttgcccccttgtggtgcccgctgcccccaaccttcaggctgccagatgctcccctgacaacaccaggctacaggagccagacgccagggcctgcccggcctcctgttcctgcccccacccaccacctgcctggagaggaacgggtcgggtccgtgtcggagaagtgacaggtcccagagccaaagccggccctcaagcatcatcagggagtggtgtagtcagttgaaggcagttcccaccgagttttccgagcctcagaatccaggagatacgcacagccccacccactctgagatgacagtggctgacttcccgtgctgggcttttccattgtccccctggcctccaggctcctcctctgcctctccatggagtgggtggggaggtggtgggggccggcgtcccctgcgtgtgtgtgtgtgtgtgtgtgtgtgtggatgtattgacctgtgtttcccaagacagcaggtgccacggcccgccccgcctgccagcccgaattcccgttctcctgtgtctactaacaaggacatgggggtgggcggtgacctccgcatccctcagagctcagagggtcctcgctgccaccggtccccccctagcccgtcatcagccggtggcagctccatcttccattcctggttttagggcagaatccatggagactgcttccagaaggcatctggctctgagttataaattacttccctggtcctgacagtcacctggggtcccccctctccctggttccacctttctgaggaggagcctggagtcagggctgggttttggattaacccatccttcctagttaacacctttttgtttttattttattttatttttgtttgttttctccgtgtgtgtgttttcctaatttatttacctctgtttcccctttttcctttttttttttaattaaagagcaaagctttttattactttgtaatttaaaaaactgaaaaaaaaaaaactgaagaactttggggggaattttgtacttttttcctgtgtaaatattggacttttttgagctttatcgtggttgttaatttgaagtaataaagtagaaaagataaagtgaaaaaa

SEQ ID NO: 442728 - DNA, 3466 bp, Homo sapiens
  misc_feature (2149)..(2149): n is a, c, g, or t
ccttgcctccctgccccgggcaggtgccaacatcgcctctggtgaggaagtcgccatcaagctggagtgtgtgaagacaaagcacccccagctgcacatcgagagcaagttctacaagatgatgcagggtggcgtggggatcccgtccatcaagtggtgcggagctgagggcgactacaacgtgatggtcatggagctgctggggcctagcctcgaggacctgttcaacttctgttcccgcaaattcagcctcaagacggtgctgctcttggccgaccagatgatcagccgcatcgagtatatccactccaagaacttcatccaccgggacgtcaagcccgacaacttcctcatggggctggggaagaagggcaacctggtctacatcatcgacttcggcctggccaagaagtaccgggacgcccgcacccaccagcacattccctaccgggaaaacaagaacctgaccggcacggcccgctacgcttccatcaacacgcacctgggcattgagcaaagccgtcgagatgacctggagagcctgggctacgtgctcatgtacttcaacctgggctccctgccctggcaggggctcaaagcagccaccaagcgccagaagtatgaacggatcagcgagaagaagatgtcaacgcccatcgaggtcctctgcaaaggctatccctccgaattctcaacatacctcaacttctgccgctccctgcggtttgacgacaagcccgactactcttacctacgtcagctcttccgcaacctcttccaccggcagggcttctcctatgactacgtctttgactggaacatgctgaaattcggggcttcctcgagccaggctcagccccgtgacagccccatgacagcgaagggacctttctgtccccgcccctgtccctgtgctgggcccacgtactcacccacgtactggtgcccggctcccctgggcacccagagccccccagataggccggtggaggaggtggaggagctgtccccccaaaactactggcctgtggtctggactccagggccccatttctgatgtcgccaggtgtgcctgagcccatcggggccaggcctgaggaagtgtttcttgggaggatgggatgaccccctgttcccaagagatggcagcacagtggaggccatggtggaaaaggccctgccatggggtccttgagggccaggacagcctgagggagggatggtggccactgcccacaaggggcctggtgggaacgggtcccaggacagactcatagctagaccccgttggcggcctctgtgttgaaccagaactcattaaacacctcctcttgcttcatcctggtgtgcctctttcatggcagggccctcagccaccctgctagatggttaggaccaaggctctgttctcctggaagccaaggtcggcacattggtcttgggcttctcttctctctgggtttcttgttcactaaggagtaacacagaggtcaggcagagaatgggggtctcgcaggctagggacctcagggagaggcctctgttgcccttttcagcaaggctggaaatgggatatgggcaggggacgtcttctctgacttcaccctagaccttctggctccaaatggggcccatggccttgagcacctgggaccagctctttccaccacagggcattgggcactgggcactttcttatcgagatagtcactcccacgtctggttcgtgatgggcttggccctccagctcagcacaactgcaagaatggattttgtattctctagacggacactgtccaagatggtagccattggccacatgcgacacatttttaatgaattaaaattaatcaagactggaaatgtcggccaggcctggtggctcatgcctgtaatcccagcacttcgggaggcccagacaggtgggtcacttgaggtcaggagttcgagaccagcctggccaacatggtgaaaacccatctctactaaaaacacaaaaattagccgggtgtggtggcacacacctgtaatctcagctactcgggacactgagacaggagaattgcttgaatctgggaggtggaggttgcagtgagccgagatcgtgccactgcactccagcctgggggacagagcgagactccatctnaaaaaaaaaaaaagtagccagagacagctgtgtacctcacctgtcttttcccttctcccttctagtgtcttcactgtattttctttaaaaaaaaaaaaaaaaaaaaggcaaaaataaaccactcaaaagaacaacaaaaaaacccagcacaaaaccgacgatggagtttgtttctttgatttctttgccaatggcaagaagatgagatgccctcagcactgaggattcttgcccccttgtggtgcccgctgcccccaaccttcaggctgccagatgctcccctgacaacaccaggctacaggagccagacgccagggcctgcccggcctcctgttcctgcccccacccaccacctgcctggagaggaacgggtcgggtccgtgtcggagaagtgacaggtcccagagccaaagccggccctcaagcatcatcagggagtggtgtagtcagttgaaggcagttcccaccgagttttccgagcctcagaatccaggagatacgcacagccccacccactctgagatgacagtggctgacttcccgtgctgggcttttccattgtccccctggcctccaggctcctcctctgcctctccatggagtgggtggggaggtggtgggggccggcgtcccctgcgtgtgtgtgtgtgtgtgtgtgtgtgtggatgtattgacctgtgtttcccaagacagcaggtgccacggcccgccccgcctgccagcccgaattcccgttctcctgtgtctactaacaaggacatgggggtgggcggtgacctccgcatccctcagagctcagagggtcctcgctgccaccggtccccccctagcccgtcatcagccggtggcagctccatcttccattcctggttttagggcagaatccatggagactgcttccagaaggcatctggctctgagttataaattacttccctggtcctgacagtcacctggggtcccccctctccctggttccacctttctgaggaggagcctggagtcagggctgggttttggattaacccatccttcctagttaacacctttttgtttttattttattttatttttgtttgttttctccgtgtgtgtgttttcctaatttatttacctctgtttcccctttttcctttttttttttaattaaagagcaaagctttttattactttgtaatttaaaaaactgaaaaaaaaaaaactgaagaactttggggggaattttgtacttttttcctgtgtaaatattggacttttttgagctttatcgtggttgttaatttgaagtaataaagtagaaaagataaagtgaaaaaa

SEQ ID NO: 442729 - DNA, 1465 bp, Homo sapiens
tgggccgggagaggctggcgcgccgggcggctccgcgaatcctccggcatccgccccggcgggccgcccccgcccgcggcagccccccgagcagtggcccggcatcggcgccttcccggcgggcaagagtgagccatggagctacgtgtggggaacaagtaccgcctgggacggaagatcgggagcgggtccttcggagatatctacctgggtgccaacatcgcctctggtgaggaagtcgccatcaagctggagtgtgtgaagacaaagcacccccagctgcacatcgagagcaagttctacaagatgatgcagggtggcgtggggatcccgtccatcaagtggtgcggagctgagggcgactacaacgtgatggtcatggagctgctggggcctagcctcgaggacctgttcaacttctgttcccgcaaattcagcctcaagacggtgctgctcttggccgaccagatgatcagccgcatcgagtatatccactccaagaacttcatccaccgggacgtcaagcccgacaacttcctcatggggctggggaagaagggcaacctggtctacatcatcgacttcggcctggccaagaagtaccgggacgcccgcacccaccagcacattccctaccgggaaaacaagaacctgaccggcacggcccgctacgcttccatcaacacgcacctgggcattgagcaaagccgtcgagatgacctggagagcctgggctacgtgctcatgtacttcaacctgggctccctgccctggcaggggctcaaagcagccaccaagcgccagaagtatgaacggatcagcgagaagaagatgtcaacgcccatcgaggtcctctgcaaaggctatccctccgaattctcaacatacctcaacttctgccgctccctgcggtttgacgacaagcccgactactcttacctacgtcagctcttccgcaacctcttccaccggcagggcttctcctatgactacgtctttgactggaacatgctgaaattcggtgcagcccggaatcccgaggatgtggaccgggagcggcgagaacacgaacgcgaggagaggatggggcagctacgggggtccgcgacccgagccctgccccctggcccacccacgggggccactgccaaccggctccgcagtgccgccgagcccgtggcttccacgccagcctcccgcatccagccggctggcaatacttctcccagagcgatctcgcgggtcgaccgggagaggaaggtgagtatgaggctgcacaggggtgcgcccgccaacgtctcctcctcagacctcactgggcggcaagaggtctcccggatcccagcctcacaggtgagctgcccccctgccagtccctctgggcctcagaactgagttagagaccccccagtgggaggtcaggccgtggctctgttcttccctttccatcgacgctgcttgcctt

SEQ ID NO: 442730 - DNA, 2796 bp, Homo sapiens
  misc_feature (23)..(24): n is a, c, g, or t
  misc_feature (1479)..(1479): n is a, c, g, or t
caaactataggctagtagaggcnnggtgtgaaattgtatgtcttgtttcacatctcttctggaaaagggggcttcctcgagccaggctcagccccgtgacagccccatgacagcgaagggacctttctgtccccgcccctgtccctgtgctgggcccacgtactcacccacgtactggtaaggatcctctgaggtctggcttttccaaaatttgccacttgaccagtgagcgcaagaggctgagcctcagctgtgctttttgtccctttcaggtgcccggctcccctgggcacccagagccccccagataggccggtggaggaggtggaggagctgtccccccaaaactactggcctgtggtctggactccagggccccatttctgatgtcgccaggtgtgcctgagcccatcggggccaggcctgaggaagtgtttcttgggaggatgggatgaccccctgttcccaagagatggcagcacagtggaggccatggtggaaaaggccctgccatggggtccttgagggccaggacagcctgagggagggatggtggccactgcccacaaggggcctggtgggaacgggtcccaggacagactcatagctagaccccgttggcggcctctgtgttgaaccagaactcattaaacacctcctcttgcttcatcctggtgtgcctctttcatggcagggccctcagccaccctgctagatggttaggaccaaggctctgttctcctggaagccaaggtcggcacattggtcttgggcttctcttctctctgggtttcttgttcactaaggagtaacacagaggtcaggcagagaatgggggtctcgcaggctagggacctcagggagaggcctctgttgcccttttcagcaaggctggaaatgggatatgggcaggggacgtcttctctgacttcaccctagaccttctggctccaaatggggcccatggccttgagcacctgggaccagctctttccaccacagggcattgggcactgggcactttcttatcgagatagtcactcccacgtctggttcgtgatgggcttggccctccagctcagcacaactgcaagaatggattttgtattctctagacggacactgtccaagatggtagccattggccacatgcgacacatttttaatgaattaaaattaatcaagactggaaatgtcggccaggcctggtggctcatgcctgtaatcccagcacttcgggaggcccagacaggtgggtcacttgaggtcaggagttcgagaccagcctggccaacatggtgaaaacccatctctactaaaaacacaaaaattagccgggtgtggtggcacacacctgtaatctcagctactcgggacactgagacaggagaattgcttgaatctgggaggtggaggttgcagtgagccgagatcgtgccactgcactccagcctgggggacagagcgagactccatctnaaaaaaaaaaaaagtagccagagacagctgtgtacctcacctgtcttttcccttctcccttctagtgtcttcactgtattttctttaaaaaaaaaaaaaaaaaaaaggcaaaaataaaccactcaaaagaacaacaaaaaaacccagcacaaaaccgacgatggagtttgtttctttgatttctttgccaatggcaagaagatgagatgccctcagcactgaggattcttgcccccttgtggtgcccgctgcccccaaccttcaggctgccagatgctcccctgacaacaccaggctacaggagccagacgccagggcctgcccggcctcctgttcctgcccccacccaccacctgcctggagaggaacgggtcgggtccgtgtcggagaagtgacaggtcccagagccaaagccggccctcaagcatcatcagggagtggtgtagtcagttgaaggcagttcccaccgagttttccgagcctcagaatccaggagatacgcacagccccacccactctgagatgacagtggctgacttcccgtgctgggcttttccattgtccccctggcctccaggctcctcctctgcctctccatggagtgggtggggaggtggtgggggccggcgtcccctgcgtgtgtgtgtgtgtgtgtgtgtgtgtggatgtattgacctgtgtttcccaagacagcaggtgccacggcccgccccgcctgccagcccgaattcccgttctcctgtgtctactaacaaggacatgggggtgggcggtgacctccgcatccctcagagctcagagggtcctcgctgccaccggtccccccctagcccgtcatcagccggtggcagctccatcttccattcctggttttagggcagaatccatggagactgcttccagaaggcatctggctctgagttataaattacttccctggtcctgacagtcacctggggtcccccctctccctggttccacctttctgaggaggagcctggagtcagggctgggttttggattaacccatccttcctagttaacacctttttgtttttattttattttatttttgtttgttttctccgtgtgtgtgttttcctaatttatttacctctgtttcccctttttcctttttttttttaattaaagagcaaagctttttattactttgtaatttaaaaaactgaaaaaaaaaaaactgaagaactttggggggaattttgtacttttttcctgtgtaaatattggacttttttgagctttatcgtggttgttaatttgaagtaataaagtagaaaagataaagtgaaaaaa

SEQ ID NO: 442731 - DNA, 1671 bp, Homo sapiens
  misc_feature (1540)..(1540): n is a, c, g, or t
tgggccgggagaggctggcgcgccgggcggctccgcgaatcctccggcatccgccccggcgggccgcccccgcccgcggcagccccccgagcagtggcccggcatcggcgccttcccggcgggcaagagtgagccatggagctacgtgtggggaacaagtaccgcctgggacggaagatcgggagcgggtccttcggagatatctacctgggtgccaacatcgcctctggtgaggaagtcgccatcaagctggagtgtgtgaagacaaagcacccccagctgcacatcgagagcaagttctacaagatgatgcagggtggcgtggggatcccgtccatcaagtggtgcggagctgagggcgactacaacgtgatggtcatggagctgctggggcctagcctcgaggacctgttcaacttctgttcccgcaaattcagcctcaagacggtgctgctcttggccgaccagatgatcagccgcatcgagtatatccactccaagaacttcatccaccgggacgtcaagcccgacaacttcctcatggggctggggaagaagggcaacctggtctacatcatcgacttcggcctggccaagaagtaccgggacgcccgcacccaccagcacattccctaccgggaaaacaagaacctgaccggcacggcccgctacgcttccatcaacacgcacctgggcattgagcaaagccgtcgagatgacctggagagcctgggctacgtgctcatgtacttcaacctgggctccctgccctggcaggggctcaaagcagccaccaagcgccagaagtatgaacggatcagcgagaagaagatgtcaacgcccatcgaggtcctctgcaaaggctatccctccgaattctcaacatacctcaacttctgccgctccctgcggtttgacgacaagcccgactactcttacctacgtcagctcttccgcaacctcttccaccggcagggcttctcctatgactacgtctttgactggaacatgctgaaattcggggcttcctcgagccaggctcagccccgtgacagccccatgacagcgaagggacctttctgtccccgcccctgtccctgtgctgggcccacgtactcacccacgtactggtgcccggctcccctgggcacccagagccccccagataggccggtggaggaggtggaggagctgtccccccaaaactactggcctgtggtctggactccagggccccatttctgatgtcgccaggtgtgcctgagcccatcggggccaggcctgaggaagtgtttcttgggaggatgggatgaccccctgttcccaagagatggcagcacagtggaggccatggtggaaaaggccctgccatggggtccttgagggccaggacagcctgagggagggatggtggccactgcccacaaggggcctggtgggaacgggtcccaggacagactcatagctagaccccgttggcggcctctgtgttgaaccagaactcattaaacacctcctcttgcttcaaaaaaaaaacaanaaaaaaaaaaaagggggggcaaagatcccggggcactaccgacccttgtaaaggcccagggggtaaagagcggcgcgaacggaggagtctgctggaccctggggcggaccccagaccgaaggtgcacccga

SEQ ID NO: 442732 - DNA, 2203 bp, Homo sapiens
tgggccgggagaggctggcgcgccgggcggctccgcgaatcctccggcatccgccccggcgggccgcccccgcccgcggcagccccccgagcagtggcccggcatcggcgccttcccggcgggcaagagtgagccatggagctacgtgtggggaacaagtaccgcctgggacggaagatcgggagcgggtccttcggagatatctacctgggtgccaacatcgcctctggtgaggaagtcgccatcaagctggagtgtgtgaagacaaagcacccccagctgcacatcgagagcaagttctacaagatgatgcagggtggcgtggggatcccgtccatcaagtggtgcggagctgagggcgactacaacgtgatggtcatggagctgctggggcctagcctcgaggacctgttcaacttctgttcccgcaaattcagcctcaagacggtgctgctcttggccgaccagatgatcagccgcatcgagtatatccactccaagaacttcatccaccgggacgtcaagcccgacaacttcctcatggggctggggaagaagggcaacctggtctacatcatcgacttcggcctggccaagaagtaccgggacgcccgcacccaccagcacattccctaccgggaaaacaagaacctgaccggcacggcccgctacgcttccatcaacacgcacctgggcattgagcaaagccgtcgagatgacctggagagcctgggctacgtgctcatgtacttcaacctgggctccctgccctggcaggggctcaaagcagccaccaagcgccagaagtatgaacggatcagcgagaagaagatgtcaacgcccatcgaggtcctctgcaaaggctatccctccgaattctcaacatacctcaacttctgccgctccctgcggtttgacgacaagcccgactactcttacctacgtcagctcttccgcaacctcttccaccggcagggcttctcctatgactacgtctttgactggaacatgctgaaattcgtgagtcacctggaggccaaggcgggcttgggggactggatggggaaggccctgactcagagggccagagtgagctggtggcgggaggggctcccgacagacgggaggtacgagctggacagtgtggttgacctcactggggtcccagagccctccagcctcatccgtgctgacagcttgtgccaccatgggcagcagggccaggcagggcgctgtctcccgtcggaacaaggaggatctggcttcacctggggtccctcctgggtgcccgcagcagggcatgggtggtgctggcggcgccccctgctgccctgattgctgcctacaccgtcctgctgctcctgttctgcacatcccaggtggctacctgcaccatggcccctcgggccagcctggacccagtcatggtgcttgctttcttcttggtcatgggcccctgggtctggctaggcagttgttctgtttccctcttttaagagtcccaggggtggggttgggtggggagcagcattggccggccgtacccagagctctggaatctgtgaaattgtatgtcttgtttcacatctcttctggaaaagggggcttcctcgagccaggctcagccccgtgacagccccatgacagcgaagggacctttctgtccccgcccctgtccctgtgctgggcccacgtactcacccacgtactggtaaggatcctctgaggtctggcttttccaaaatttgccacttgaccagtgagcgcaagaggctgagcctcagctgtgctttttgtccctttcaggtgcccggctcccctgggcacccagagccccccagataggccggtggaggaggtggaggagctgtccccccaaaactactggcctgtggtctggactccagggccccatttctgatgtcgccaggtgtgcctgagcccatcggggccaggcctgaggaagtgtttcttgggaggatgggatgaccccctgttcccaagagatggcagcacagtggaggccatggtggaaaaggccctgccatggggtccttgagggccaggacagcctgagggagggatggtggccactgcccacaaggggcctggtgggaacgggtcccaggacagactcatagctagaccccgttggcggcctctgtgttgaaccagaactcattaaacacctcctcttgcttca

SEQ ID NO: 442733 - DNA, 2967 bp, Homo sapiens
  misc_feature (1650)..(1650): n is a, c, g, or t
tggcctggcagaggtgggtgggagccctgccctcgtcctcctgcctgtgggcgaggagggagtcctgcgagagaaccctcattggccatctacttaggtagcaggtttgcctccctgggcaacattcttagctacagacagggacatcttagagtcactggaatcacacaggccttccctcagcttgaggggctgcctggaggtgggggtgggggtacacctcctcagtggggagagacttgccaaatctctatcgccagcggctaagggacttgacttgaagcttgtacctccctctctctccctccccctctctccctccccaccctcaaaagacaagtgtgccatttgaccatctcgggaagtgaggagagcccccattggaccagtgtttgcttaggtgagtccatgactgctgcagatgcagccagcccagccgacctagaagctcccagggccccagaaagagaccaatgtgttgtggaggggtgggtggcagtggcagtggcagatggtaccaggcgccccagaactctaaggggcctcaagtagtttaaaacctcggaggctgcctgacttggggccaagggtttctatgctcaggcctgacccctcatggattagtttctgctggaaaaactttttctgccctcggccaggtctctatctccttctgccttaacatattttggaaggttggttcccagcagagacggggccatgggctcacactctgacctctcccacggcattagccctgtctcagcctctgggctgttacgcaagttaattcctgcacaagactcacaacagggctgtggaggaagcaaaggagccctttttatgcctctgtagtaggactgagagaggccctctggccagcgtgagcctgctggttcttcccggactgtaccaggccttgaggcggggtatggaaacgccccactctggggcctggcttggggaaggggaggcggcaggggttctttgggcttctcgagggtataatctgagctctctggggaacgtgtgtccatttgtaggcagtagtccgacacgtcgggggactcaactttacactgggacaatctgtgtgtggtctgttttgtagaaattcatccacacaagagagtggaggcatgaacagggctggccttcctcggatctcaggcccaggaaccaagctgtccatggcgggctgggcagatatttgggggtggggtggggagatgctcaccaggagggcagagaagggagagaatccgtttctgtcacatgaagatggatctcctagcgtgctgggccttgagccaggctctggggcccagagggagatagaccaagggacgagaagacaggagtttggggggccaagtgcagtggctcgcacctgtaatcccagcacttcgggaggcccagacaggtgggtcacttgaggtcaggagttcgagaccagcctggccaacatggtgaaaacccatctctactaaaaacacaaaaattagccgggtgtggtggcacacacctgtaatctcagctactcgggacactgagacaggagaattgcttgaatctgggaggtggaggttgcagtgagccgagatcgtgccactgcactccagcctgggggacagagcgagactccatctnaaaaaaaaaaaaagtagccagagacagctgtgtacctcacctgtcttttcccttctcccttctagtgtcttcactgtattttctttaaaaaaaaaaaaaaaaaaaaggcaaaaataaaccactcaaaagaacaacaaaaaaacccagcacaaaaccgacgatggagtttgtttctttgatttctttgccaatggcaagaagatgagatgccctcagcactgaggattcttgcccccttgtggtgcccgctgcccccaaccttcaggctgccagatgctcccctgacaacaccaggctacaggagccagacgccagggcctgcccggcctcctgttcctgcccccacccaccacctgcctggagaggaacgggtcgggtccgtgtcggagaagtgacaggtcccagagccaaagccggccctcaagcatcatcagggagtggtgtagtcagttgaaggcagttcccaccgagttttccgagcctcagaatccaggagatacgcacagccccacccactctgagatgacagtggctgacttcccgtgctgggcttttccattgtccccctggcctccaggctcctcctctgcctctccatggagtgggtggggaggtggtgggggccggcgtcccctgcgtgtgtgtgtgtgtgtgtgtgtgtgtggatgtattgacctgtgtttcccaagacagcaggtgccacggcccgccccgcctgccagcccgaattcccgttctcctgtgtctactaacaaggacatgggggtgggcggtgacctccgcatccctcagagctcagagggtcctcgctgccaccggtccccccctagcccgtcatcagccggtggcagctccatcttccattcctggttttagggcagaatccatggagactgcttccagaaggcatctggctctgagttataaattacttccctggtcctgacagtcacctggggtcccccctctccctggttccacctttctgaggaggagcctggagtcagggctgggttttggattaacccatccttcctagttaacacctttttgtttttattttattttatttttgtttgttttctccgtgtgtgtgttttcctaatttatttacctctgtttcccctttttcctttttttttttaattaaagagcaaagctttttattactttgtaatttaaaaaactgaaaaaaaaaaaactgaagaactttggggggaattttgtacttttttcctgtgtaaatattggacttttttgagctttatcgtggttgttaatttgaagtaataaagtagaaaagataaagtgaaaaaa

SEQ ID NO: 442734 - DNA, 1652 bp, Homo sapiens
tggcctggcagaggtgggtgggagccctgccctcgtcctcctgcctgtgggcgaggagggagtcctgcgagagaaccctcattggccatctacttaggtagcaggtttgcctccctgggcaacattcttagctacagacagggacatcttagagtcactggaatcacacaggccttccctcagcttgaggggctgcctggaggtgggggtgggggtacacctcctcagtggggagagacttgccaaatctctatcgccagcggctaagggacttgacttgaagcttgtacctccctctctctccctccccctctctccctccccaccctcaaaagacaagtgtgccatttgaccatctcgggaagtgaggagagcccccattggaccagtgtttgcttagtgtcttcactgtattttctttaaaaaaaaaaaaaaaaaaaaggcaaaaataaaccactcaaaagaacaacaaaaaaacccagcacaaaaccgacgatggagtttgtttctttgatttctttgccaatggcaagaagatgagatgccctcagcactgaggattcttgcccccttgtggtgcccgctgcccccaaccttcaggctgccagatgctcccctgacaacaccaggctacaggagccagacgccagggcctgcccggcctcctgttcctgcccccacccaccacctgcctggagaggaacgggtcgggtccgtgtcggagaagtgacaggtcccagagccaaagccggccctcaagcatcatcagggagtggtgtagtcagttgaaggcagttcccaccgagttttccgagcctcagaatccaggagatacgcacagccccacccactctgagatgacagtggctgacttcccgtgctgggcttttccattgtccccctggcctccaggctcctcctctgcctctccatggagtgggtggggaggtggtgggggccggcgtcccctgcgtgtgtgtgtgtgtgtgtgtgtgtgtggatgtattgacctgtgtttcccaagacagcaggtgccacggcccgccccgcctgccagcccgaattcccgttctcctgtgtctactaacaaggacatgggggtgggcggtgacctccgcatccctcagagctcagagggtcctcgctgccaccggtccccccctagcccgtcatcagccggtggcagctccatcttccattcctggttttagggcagaatccatggagactgcttccagaaggcatctggctctgagttataaattacttccctggtcctgacagtcacctggggtcccccctctccctggttccacctttctgaggaggagcctggagtcagggctgggttttggattaacccatccttcctagttaacacctttttgtttttattttattttatttttgtttgttttctccgtgtgtgtgttttcctaatttatttacctctgtttcccctttttcctttttttttttaattaaagagcaaagctttttattactttgtaatttaaaaaactgaaaaaaaaaaaactgaagaactttggggggaattttgtacttttttcctgtgtaaatattggacttttttgagctttatcgtggttgttaatttgaagtaataaagtagaaaagataaagtgaaaaaa

SEQ ID NO: 442735 - DNA, 356 bp, Homo sapiens
gactgcatcaacgccgctgactgcatcaacgccgctgactgcatcaacgccgctgactgcatccaacgccgatgcaatgggaaccttcaccctgaggccaggcccttcccatgctacccaacagtagacaggacaccctgtgttgttggctgcaccggggtgctgggatctgtggatccctggggcctggaagccactctcagcacatacagccactgtgttccgaggtccagtcagctggccgggaaggaattcaacacagccaaggacagaggtccatatgatgacgggtggatgctcgtgtgactttgctgaccttttatgttttctatgggcaataaaggccaagagagctc

SEQ ID NO: 442736 - DNA, 583 bp, Homo sapiens
tctaaaattgattgtggtaatggctgcgcaagcttgtgaatatactaaaaacggtgagtcgcacactttgagtgactcaattggagagttatctgaattacatctcaataaaggtgttgaaagaaattgcaacttataacacagtatccagtgaagcgtcccccaccccttcctccctgacccacttagccctgtacagtcatgtttctgttcagtgtttctttatgtagctagagccaaacacagatacttagttccccacctttttaaagaaaactgaaatgagagtgtggaatatacactgttctgtgctttgctttttcacttcctgtatcttggagatctttccacttgtgtgcagagagagcttcctggttctttttccattgtattctgttttatggatgggctattctttatttaatcagccccctcaggagggacatttgggttgtttccaagcttctgctgttccaaacagcctgcagccgacagccttgtccccgccttgttttgcaccgtgctaggatgtcaggtaaactcccagaagcggggttgctggtcagggctgagtagcgtcaaa

SEQ ID NO: 442737 - DNA, 374 bp, Homo sapiens
tgacctctccacggggtgggccaggcaagggggcagtaggtgccctctcatagtcattgaatgattaagtgcctgaactggaaaaactaggcccaaattaagttgagaaggccctgcctcaggcttcttctctgtaggaggaggataatagcagtgcctgtttaaaatgcgtgcagtgagcaacatccgacgtgggggcaggagggtcctggtgcattgtgaggagcatgacccagaggatgagttaggggcctgagtggacccctgtccctcacctagtctttgactctctgtgcagagcaaagccgtcgagatgacctggagagcctgggctacgtgctcatgtacttcaacctgggctccctgccctggca

SEQ ID NO: 442738 - DNA, 318 bp, Homo sapiens
ggttgggatctgaggggtcctctctgtgcccatcacagtttgagcttcagggaaaagaagaagaggtctttgcccttcgtttttccacgggaggagaatgtatgagcccaggctacctttctgggccttgtgtcgacatccctagctgtctcctcaaatctcttgccctgaatcaacctggcctgtgttctctgcggcactcggaacctggaggcggactgagcctccagcagtctaacatcttttgcagtgtcgtgaatagccgcctgttttcgcaggggcccagtgctctgcctggagaggagagagatcctggca

SEQ ID NO: 442739 - DNA, 3959 bp, Homo sapiens
  misc_feature (2685)..(2685): n is a, c, g, or t
  misc_feature (2689)..(2689): n is a, c, g, or t
tgggccgggagaggctggcgcgccgggcggctccgcgaatcctccggcatccgccccggcgggccgcccccgcccgcggcagccccccgagcagtggcccggcatcggcgccttcccggcgggcaagagtgagccatggagctacgtgtggggaacaagtaccgcctgggacggaagatcgggagcgggtccttcggagatatctacctgggtgccaacatcgcctctggtgaggaagtcgccatcaagctggagtgtgtgaagacaaagcacccccagctgcacatcgagagcaagttctacaagatgatgcagggtggcgtggggatcccgtccatcaagtggtgcggagctgagggcgactacaacgtgatggtcatggagctgctggggcctagcctcgaggacctgttcaacttctgttcccgcaaattcagcctcaagacggtgctgctcttggccgaccagatgatcagccgcatcgagtatatccactccaagaacttcatccaccgggacgtcaagcccgacaacttcctcatggggctggggaagaagggcaacctggtctacatcatcgacttcggcctggccaagaagtaccgggacgcccgcacccaccagcacattccctaccgggaaaacaagaacctgaccggcacggcccgctacgcttccatcaacacgcacctgggcattgagcaaagccgtcgagatgacctggagagcctgggctacgtgctcatgtacttcaacctgggctccctgccctggcaggggctcaaagcagccaccaagcgccagaagtatgaacggatcagcgagaagaagatgtcaacgcccatcgaggtcctctgcaaaggctatccctccgaattctcaacatacctcaacttctgccgctccctgcggtttgacgacaagcccgactactcttacctacgtcagctcttccgcaacctcttccaccggcagggcttctcctatgactacgtctttgactggaacatgctgaaattcggtgcagcccggaatcccgaggatgtggaccgggagcggcgagaacacgaacgcgaggagaggatggggcagctacgggggtccgcgacccgagccctgccccctggcccacccacgggggccactgccaaccggctccgcagtgccgccgagcccgtggcttccacgccagcctcccgcatccagccggctggcaatacttctcccagagcgatctcgcgggtcgaccgggagaggaaggtgagtatgaggctgcacaggggtgcgcccgccaacgtctcctcctcagacctcactgggcggcaagaggtctcccggatcccagcctcacagacaagtgtgccatttgaccatctcgggaagtgaggagagcccccattggaccagtgtttgcttagtgtcttcactgtattttctttaaaaaaaaaaaaaaaaaaaaggcaaaaataaaccactcaaaagaacaacaaaaaaacccagcacaaaaccgacgatggagtttgtttctttgatttctttgccaatggcaagaagatgagatgccctcagcactgaggattcttgcccccttgtggtgcccgctgcccccaaccttcaggctgccagatgctcccctgacaacaccaggctacaggagccagacgccagggcctgcccggcctcctgttcctgcccccacccaccacctgcctggagaggaacgggtcgggtccgtgtcggagaagtgacaggtcccagagccaaagccggccctcaagcatcatcagggagtggtgtagtcagttgaaggcagttcccaccgagttttccgagcctcagaatccaggagatacgcacagccccacccactctgagatgacagtggctgacttcccgtgctgggcttttccattgtccccctggcctccaggctcctcctctgcctctccatggagtgggtggggaggtggtgggggccggcgtcccctgcgtgtgtgtgtgtgtgtgtgtgtgtgtggatgtattgacctgtgtttcccaagacagcaggtgccacggcccgccccgcctgccagcccgaattcccgttctcctgtgtctactaacaaggacatgggggtgggcggtgacctccgcatccctcagagctcagagggtcctcgctgccaccggtccccccctagcccgtcatcagccggtggcagctccatcttccattcctggttttagggcagaatccatggagactgcttccagaaggcatctggctctgagttataaattacttccctggtcctgacagtcacctggggtcccccctctccctggttccacctttctgaggaggagcctggagtcagggctgggttttggattaacccatccttcctagttaacacctttttgtttttattttattttatttttgtttgttttctccgtgtgtgtgttttcctaatttatttacctctgtttcccctttttcctttttttttttaattaaagagcaaagctttttattactttgtaatttaaaaaactgaaaaaaaaaaaactgaagaactttggggggaattttgtacttttttcctgtgtaaatattggacttttttgagctttatcgtggttgttaatttgaagtaataaagtagaaaagataaagtgaaaaaaaaaaaaaaaaaaaanaaanaaaacaaacaacaaaaaacagggcgcggcgcgcgcgctctaaaaatttctccctctcggggggcgcccaaagttttacacgcggcttcccacgaggtttcttttgtcacaagggggcgccccctatatatggagcggagtccgctattatatatatacagccatgagcgcacgtgtggcccggcggtattaaacccaaccgtttgttgcacgtgtgggaacacacagtgtgataaaccgtggtgaaacaccctgtgtgtaaaaaggaaccgcctatatactttcgtggggcggggagcccaaatactttgggcacaacaaaatctccctccatcgaagagactattttaacaagcgctctctaagggaggagaaaattaataaccaatctttaaaaggggctgatatccacagtgcgtgtttaacacactacagacgtcggaaatatttcttgcgttgagacgccgtcttaagaaaacaattgttcggggtgatccaccggagggtatattcagacctctcgactagaacacatatctttttatctaccccgcgcgggggaaccctaccggttgggtatcacaaaacacactacccgggagtgctaacgatcggttccaagagacggaggaccgcagacagacgagagaacgacgcgaccaaactaacgtagacaggccaagatgcaagagctaacacacgaacaacgaccgagaatgatccatcaacgcacgtaaataacgaagacgcaacgcagtaaacaacaggttagcatccgcagacagcgaaagtgaacgcagcgacaacagcagtccgtacagaggcagcgacagcaggaaagaggagggagagaaggagacggaggaagaagagagagggctgatgtaggagagagagggaacagcgggagaatcgagcggcaagaggaaggaagagagggacgcggagtagtgagggacaggggtggcagggaccaggagagagaggaacaaatcagaccagaggagacgagtgagcgagagcaggaaagcggggagtcaagacagaacacgggacggaacagcagcagaagagagcgaaggcgggagagcggagggagagcggagcaggcgacggcgagagagagtggggagacggaggtggagacacgacgatgaagcaagcgggaggagagcgcaagggagggtcaggacgagcgaagaggggcgacagaaggagcgaggccatgtagtcgagagggataggataggaacggatgcaggtgccgaggg

SEQ ID NO: 442740 - DNA, 3927 bp, Homo sapiens
  misc_feature (2653)..(2653): n is a, c, g, or t
  misc_feature (2657)..(2657): n is a, c, g, or t
tgggccgggagaggctggcgcgccgggcggctccgcgaatcctccggcatccgccccggcgggccgcccccgcccgcggcagccccccgagcagtggcccggcatcggcgccttcccggcgggcaagagtgagccatggagctacgtgtggggaacaagtaccgcctgggacggaagatcgggagcgggtccttcggagatatctacctgggtgccaacatcgcctctggtgaggaagtcgccatcaagctggagtgtgtgaagacaaagcacccccagctgcacatcgagagcaagttctacaagatgatgcagggtggcgtggggatcccgtccatcaagtggtgcggagctgagggcgactacaacgtgatggtcatggagctgctggggcctagcctcgaggacctgttcaacttctgttcccgcaaattcagcctcaagacggtgctgctcttggccgaccagatgatcagccgcatcgagtatatccactccaagaacttcatccaccgggacgtcaagcccgacaacttcctcatggggctggggaagaagggcaacctggtctacatcatcgacttcggcctggccaagaagtaccgggacgcccgcacccaccagcacattccctaccgggaaaacaagaacctgaccggcacggcccgctacgcttccatcaacacgcacctgggcattgagcaaagccgtcgagatgacctggagagcctgggctacgtgctcatgtacttcaacctgggctccctgccctggcaggggctcaaagcagccaccaagcgccagaagtatgaacggatcagcgagaagaagatgtcaacgcccatcgaggtcctctgcaaaggctatccctccgaattctcaacatacctcaacttctgccgctccctgcggtttgacgacaagcccgactactcttacctacgtcagctcttccgcaacctcttccaccggcagggcttctcctatgactacgtctttgactggaacatgctgaaattcggtgcagcccggaatcccgaggatgtggaccgggagcggcgagaacacgaacgcgaggagaggatggggcagctacgggggtccgcgacccgagccctgccccctggcccacccacgggggccactgccaaccggctccgcagtgccgccgagcccgtggcttccacgccagcctcccgcatccagccggctggcaatacttctcccagagcgatctcgcgggtcgaccgggagaggaaggtgagtatgaggctgcacaggggtgcgcccgccaacgtctcctcctcagacctcactgggcggcaagaggtctcccggatcccagcctcacagacaagtgtgccatttgaccatctcgggaagtgaggagagcccccattggaccagtgtttgcttagtgtcttcactgtattttctttaaaaaaaaaaaaaaaaaaaaggcaaaaataaaccactcaaaagaacaacaaaaaaacccagcacaaaaccgacgatggagtttgtttctttgatttctttgccaatggcaagaagatgagatgccctcagcactgaggattcttgcccccttgtggtgcccgctgcccccaaccttcaggctgccagatgctcccctgacaacaccaggctacaggagccagacgccagggcctgcccggcctcctgttcctgcccccacccaccacctgcctggagaggaacgggtcgggtccgtgtcggagaagtgacaggtcccagagccaaagccggccctcaagcatcatcagggagtggtgtagtcagttgaaggcagttcccaccgagttttccgagcctcagaatccaggagatacgcacagccccacccactctgagatgacagtggctgacttcccgtgctgggcttttccattgtccccctggcctccaggctcctcctctgcctctccatggagtgggtggggaggtggtgggggccggcgtcccctgcgtgtgtgtgtgtgtgtgtgtgtgtgtggatgtattgacctgtgtttcccaagacagcaggtgccacggcccgccccgcctgccagcccgaattcccgttctcctgtgtctactaacaaggacatgggggtgggcggtgacctccgcatccctcagagctcagagggtcctcgctgccaccggtccccccctagcccgtcatcagccggtggcagctccatcttccattcctggttttagggcagaatccatggagactgcttccagaaggcatctggctctgagttataaattacttccctggtcctgacagtcacctggggtcccccctctccctggttccacctttctgaggactgcctttccatggagtgggtggggaggtggtgggggccggcgtcccctgcgtgtgtgtgtgtgtgtgtgtgttttcctaatttatttacctctgtttcccctttttcctttttttttttaattaaagagcaaagctttttattactttgtaatttaaaaaactgaaaaaaaaaaaactgaagaactttggggggaattttgtacttttttcctgtgtaaatattggacttttttgagctttatcgtggttgttaatttgaagtaataaagtagaaaagataaagtgaaaaaaaaaaaaaaaaaaaanaaanaaaacaaacaacaaaaaacagggcgcggcgcgcgcgctctaaaaatttctccctctcggggggcgcccaaagttttacacgcggcttcccacgaggtttcttttgtcacaagggggcgccccctatatatggagcggagtccgctattatatatatacagccatgagcgcacgtgtggcccggcggtattaaacccaaccgtttgttgcacgtgtgggaacacacagtgtgataaaccgtggtgaaacaccctgtgtgtaaaaaggaaccgcctatatactttcgtggggcggggagcccaaatactttgggcacaacaaaatctccctccatcgaagagactattttaacaagcgctctctaagggaggagaaaattaataaccaatctttaaaaggggctgatatccacagtgcgtgtttaacacactacagacgtcggaaatatttcttgcgttgagacgccgtcttaagaaaacaattgttcggggtgatccaccggagggtatattcagacctctcgactagaacacatatctttttatctaccccgcgcgggggaaccctaccggttgggtatcacaaaacacactacccgggagtgctaacgatcggttccaagagacggaggaccgcagacagacgagagaacgacgcgaccaaactaacgtagacaggccaagatgcaagagctaacacacgaacaacgaccgagaatgatccatcaacgcacgtaaataacgaagacgcaacgcagtaaacaacaggttagcatccgcagacagcgaaagtgaacgcagcgacaacagcagtccgtacagaggcagcgacagcaggaaagaggagggagagaaggagacggaggaagaagagagagggctgatgtaggagagagagggaacagcgggagaatcgagcggcaagaggaaggaagagagggacgcggagtagtgagggacaggggtggcagggaccaggagagagaggaacaaatcagaccagaggagacgagtgagcgagagcaggaaagcggggagtcaagacagaacacgggacggaacagcagcagaagagagcgaaggcgggagagcggagggagagcggagcaggcgacggcgagagagagtggggagacggaggtggagacacgacgatgaagcaagcgggaggagagcgcaagggagggtcaggacgagcgaagaggggcgacagaaggagcgaggccatgtagtcgagagggataggataggaacggatgcaggtgccgaggg

SEQ ID NO: 442741 - DNA, 2244 bp, Homo sapiens
tgggccgggagaggctggcgcgccgggcggctccgcgaatcctccggcatccgccccggcgggccgcccccgcccgcggcagccccccgagcagtggcccggcatcggcgccttcccggcgggcaagagtgagccatggagctacgtgtggggaacaagtaccgcctgggacggaagatcgggagcgggtccttcggagatatctacctgggtgccaacatcgcctctggtgaggaagtcgccatcaagctggagtgtgtgaagacaaagcacccccagctgcacatcgagagcaagttctacaagatgatgcagggtggcgtggggatcccgtccatcaagtggtgcggagctgagggcgactacaacgtgatggtcatggagctgctggggcctagcctcgaggacctgttcaacttctgttcccgcaaattcagcctcaagacggtgctgctcttggccgaccagatgatcagccgcatcgagtatatccactccaagaacttcatccaccgggacgtcaagcccgacaacttcctcatggggctggggaagaagggcaacctggtctacatcatcgacttcggcctggccaagaagtaccgggacgcccgcacccaccagcacattccctaccgggaaaacaagaacctgaccggcacggcccgctacgcttccatcaacacgcacctgggcattgagcaaagccgtcgagatgacctggagagcctgggctacgtgctcatgtacttcaacctgggctccctgccctggcaggggctcaaagcagccaccaagcgccagaagtatgaacggatcagcgagaagaagatgtcaacgcccatcgaggtcctctgcaaaggctatccctccgaattctcaacatacctcaacttctgccgctccctgcggtttgacgacaagcccgactactcttacctacgtcagctcttccgcaacctcttccaccggcagggcttctcctatgactacgtctttgactggaacatgctgaaattcggtgcagcccggaatcccgaggatgtggaccgggagcggcgagaacacgaacgcgaggagaggatggggcagctacgggggtccgcgacccgagccctgccccctggcccacccacgggggccactgccaaccggctccgcagtgccgccgagcccgtggcttccacgccagcctcccgcatccagccggctggcaatacttctcccagagcgatctcgcgggtcgaccgggagaggaaggtgagtatgaggctgcacaggggtgcgcccgccaacgtctcctcctcagacctcactgggcggcaagaggtctcccggatcccagcctcacagacaagtgtgccatttgaccatctcgggaagtgaggagagcccccattggaccagtgtttgcttagtgtcttcactgtattttctttaaaaaaaaaaaaaaaaaaaaggcaaaaataaaccactcaaaagaacaacaaaaaaacccagcacaaaaccgacgatggagtttgtttctttgatttctttgccaatggcaagaagatgagatgccctcagcactgaggattcttgcccccttgtggtgcccgctgcccccaaccttcaggctgccagatgctcccctgacaacaccaggctacaggagccagacgccagggcctgcccggcctcctgttcctgcccccacccaccacctgcctggagaggaacgggtcgggtccgtgtcggagaagtgacaggtcccagagccaaagccggccctcaagcatcatcagggagtggtgtagtcagttgaaggcagttcccaccgagttttccgagcctcagaatccaggagatacgcacagccccacccactctgagatgacagtggctgacttcccgtgctgggcttttccattgtccccggagcctggagtcagggctgggttttggattaacccatccttcctagttaacacctttttgtttttattttattttatttttgtttgttttctccgtgtgtgtgttttcctaatttatttacctctgtttcccctttttcctttttttttttaattaaagagcaaagctttttattactttgtaatttaaaaaactgaaaaaaaaaaaactgaagaactttggggggaattttgtacttttttcctgtgtaaatattggacttttttgagctttatcgtggttgttaatttgaagtaataaagtagaaaagataaagtgaaaaaa

SEQ ID NO: 442742 - DNA, 2159 bp, Homo sapiens
tgggccgggagaggctggcgcgccgggcggctccgcgaatcctccggcatccgccccggcgggccgcccccgcccgcggcagccccccgagcagtggcccggcatcggcgccttcccggcgggcaagagtgagccatggagctacgtgtggggaacaagtaccgcctgggacggaagatcgggagcgggtccttcggagatatctacctgggtgccaacatcgcctctggtgaggaagtcgccatcaagctggagtgtgtgaagacaaagcacccccagctgcacatcgagagcaagttctacaagatgatgcagggtggcgtggggatcccgtccatcaagtggtgcggagctgagggcgactacaacgtgatggtcatggagctgctggggcctagcctcgaggacctgttcaacttctgttcccgcaaattcagcctcaagacggtgctgctcttggccgaccagatgatcagccgcatcgagtatatccactccaagaacttcatccaccgggacgtcaagcccgacaacttcctcatggggctggggaagaagggcaacctggtctacatcatcgacttcggcctggccaagaagtaccgggacgcccgcacccaccagcacattccctaccgggaaaacaagaacctgaccggcacggcccgctacgcttccatcaacacgcacctgggcattgagcaaagccgtcgagatgacctggagagcctgggctacgtgctcatgtacttcaacctgggctccctgccctggcaggggctcaaagcagccaccaagcgccagaagtatgaacggatcagcgagaagaagatgtcaacgcccatcgaggtcctctgcaaaggctatccctccgaattctcaacatacctcaacttctgccgctccctgcggtttgacgacaagcccgactactcttacctacgtcagctcttccgcaacctcttccaccggcagggcttctcctatgactacgtctttgactggaacatgctgaaattcggtgcagcccggaatcccgaggatgtggaccgggagcggcgagaacacgaacgcgaggagaggatggggcagctacgggggtccgcgacccgagccctgccccctggcccacccacgggggccactgccaaccggctccgcagtgccgccgagcccgtggcttccacgccagcctcccgcatccagccggctggcaatacttctcccagagcgatctcgcgggtcgaccgggagaggaaggtgagtatgaggctgcacaggggtgcgcccgccaacgtctcctcctcagacctcactgggcggcaagaggtctcccggatcccagcctcacagacaagtgtgccatttgaccatctcgggaagtgaggagagcccccattggaccagtgtttgcttagtgtcttcactgtattttctttaaaaaaaaaaaaaaaaaaaaggcaaaaataaaccactcaaaagaacaacaaaaaaacccagcacaaaaccgacgatggagtttgtttctttgatttctttgccaatggcaagaagatgagatgccctcagcactgaggattcttgcccccttgtggtgcccgctgcccccaaccttcaggctgccagatgctcccctgacaacaccaggctacaggagccagacgccagggcctgcccggcctcctgttcctgcccccacccaccacctgcctggagaggaacgggtcgggtccgtgtcggagaagtgacaggtcccagagccaaagccggccctcaagcatcatcagggagtggtgtagtcagttgaaggcagttcccaccgagttttccgagcggagcctggagtcagggctgggttttggattaacccatccttcctagttaacacctttttgtttttattttattttatttttgtttgttttctccgtgtgtgtgttttcctaatttatttacctctgtttcccctttttcctttttttttttaattaaagagcaaagctttttattactttgtaatttaaaaaactgaaaaaaaaaaaactgaagaactttggggggaattttgtacttttttcctgtgtaaatattggacttttttgagctttatcgtggttgttaatttgaagtaataaagtagaaaagataaagtgaaaaaa

SEQ ID NO: 442743 - DNA, 3985 bp, Homo sapiens
  misc_feature (2668)..(2668): n is a, c, g, or t
tgggccgggagaggctggcgcgccgggcggctccgcgaatcctccggcatccgccccggcgggccgcccccgcccgcggcagccccccgagcagtggcccggcatcggcgccttcccggcgggcaagagtgagccatggagctacgtgtggggaacaagtaccgcctgggacggaagatcgggagcgggtccttcggagatatctacctgggtgccaacatcgcctctggtgaggaagtcgccatcaagctggagtgtgtgaagacaaagcacccccagctgcacatcgagagcaagttctacaagatgatgcagggtggcgtggggatcccgtccatcaagtggtgcggagctgagggcgactacaacgtgatggtcatggagctgctggggcctagcctcgaggacctgttcaacttctgttcccgcaaattcagcctcaagacggtgctgctcttggccgaccagatgatcagccgcatcgagtatatccactccaagaacttcatccaccgggacgtcaagcccgacaacttcctcatggggctggggaagaagggcaacctggtctacatcatcgacttcggcctggccaagaagtaccgggacgcccgcacccaccagcacattccctaccgggaaaacaagaacctgaccggcacggcccgctacgcttccatcaacacgcacctgggcattgagcaaagccgtcgagatgacctggagagcctgggctacgtgctcatgtacttcaacctgggctccctgccctggcaggggctcaaagcagccaccaagcgccagaagtatgaacggatcagcgagaagaagatgtcaacgcccatcgaggtcctctgcaaaggctatccctccgaattctcaacatacctcaacttctgccgctccctgcggtttgacgacaagcccgactactcttacctacgtcagctcttccgcaacctcttccaccggcagggcttctcctatgactacgtctttgactggaacatgctgaaattcggtgcagcccggaatcccgaggatgtggaccgggagcggcgagaacacgaacgcgaggagaggatggggcagctacgggggtccgcgacccgagccctgccccctggcccacccacgggggccactgccaaccggctccgcagtgccgccgagcccgtggcttccacgccagcctcccgcatccagccggctggcaatacttctcccagagcgatctcgcgggtcgaccgggagaggaaggtgagtatgaggctgcacaggggtgcgcccgccaacgtctcctcctcagacctcactgggcggcaagaggtctcccggatcccagcctcacagacaagtgtgccatttgaccatctcgggaagtgaggagagcccccattggaccagtgtttgcttaggtgagtccatgactgctgcagatgcagccagcccagccgacctagaagctcccagggccccagaaagagaccaatgtgttgtggaggggtgggtggcagtggcagtggcagatggtaccaggcgccccagaactctaaggggcctcaagtagtttaaaacctcggaggctgcctgacttggggccaagggtttctatgctcaggcctgacccctcatggattagtttctgctggaaaaactttttctgccctcggccaggtctctatctccttctgccttaacatattttggaaggttggttcccagcagagacggggccatgggctcacactctgacctctcccacggcattagccctgtctcagcctctgggctgttacgcaagttaattcctgcacaagactcacaacagggctgtggaggaagcaaaggagccctttttatgcctctgtagtaggactgagagaggccctctggccagcgtgagcctgctggttcttcccggactgtaccaggccttgaggcggggtatggaaacgccccactctggggcctggcttggggaaggggaggcggcaggggttctttgggcttctcgagggtataatctgagctctctggggaacgtgtgtccatttgtaggcagtagtccgacacgtcgggggactcaactttacactgggacaatctgtgtgtggtctgttttgtagaaattcatccacacaagagagtggaggcatgaacagggctggccttcctcggatctcaggcccaggaaccaagctgtccatggcgggctgggcagatatttgggggtggggtggggagatgctcaccaggagggcagagaagggagagaatccgtttctgtcacatgaagatggatctcctagcgtgctgggccttgagccaggctctggggcccagagggagatagaccaagggacgagaagacaggagtttggggggccaagtgcagtggctcgcacctgtaatcccagcacttcgggaggcccagacaggtgggtcacttgaggtcaggagttcgagaccagcctggccaacatggtgaaaacccatctctactaaaaacacaaaaattagccgggtgtggtggcacacacctgtaatctcagctactcgggacactgagacaggagaattgcttgaatctgggaggtggaggttgcagtgagccgagatcgtgccactgcactccagcctgggggacagagcgagactccatctnaaaaaaaaaaaaagtagccagagacagctgtgtacctcacctgtcttttcccttctcccttctagtgtcttcactgtattttctttaaaaaaaaaaaaaaaaaaaaggcaaaaataaaccactcaaaagaacaacaaaaaaacccagcacaaaaccgacgatggagtttgtttctttgatttctttgccaatggcaagaagatgagatgccctcagcactgaggattcttgcccccttgtggtgcccgctgcccccaaccttcaggctgccagatgctcccctgacaacaccaggctacaggagccagacgccagggcctgcccggcctcctgttcctgcccccacccaccacctgcctggagaggaacgggtcgggtccgtgtcggagaagtgacaggtcccagagccaaagccggccctcaagcatcatcagggagtggtgtagtcagttgaaggcagttcccaccgagttttccgagcctcagaatccaggagatacgcacagccccacccactctgagatgacagtggctgacttcccgtgctgggcttttccattgtccccctggcctccaggctcctcctctgcctctccatggagtgggtggggaggtggtgggggccggcgtcccctgcgtgtgtgtgtgtgtgtgtgtgtgtgtggatgtattgacctgtgtttcccaagacagcaggtgccacggcccgccccgcctgccagcccgaattcccgttctcctgtgtctactaacaaggacatgggggtgggcggtgacctccgcatccctcagagctcagagggtcctcgctgccaccggtccccccctagcccgtcatcagccggtggcagctccatcttccattcctggttttagggcagaatccatggagactgcttccagaaggcatctggctctgagttataaattacttccctggtcctgacagtcacctggggtcccccctctccctggttccacctttctgaggaggagcctggagtcagggctgggttttggattaacccatccttcctagttaacacctttttgtttttattttattttatttttgtttgttttctccgtgtgtgtgttttcctaatttatttacctctgtttcccctttttcctttttttttttaattaaagagcaaagctttttattactttgtaatttaaaaaactgaaaaaaaaaaaactgaagaactttggggggaattttgtacttttttcctgtgtaaatattggacttttttgagctttatcgtggttgttaatttgaagtaataaagtagaaaagataaagtgaaaaaa

SEQ ID NO: 442744 - DNA, 1645 bp, Homo sapiens
tgggccgggagaggctggcgcgccgggcggctccgcgaatcctccggcatccgccccggcgggccgcccccgcccgcggcagccccccgagcagtggcccggcatcggcgccttcccggcgggcaagagtgagccatggagctacgtgtggggaacaagtaccgcctgggacggaagatcgggagcgggtccttcggagatatctacctgggtgccaacatcgcctctggtgaggaagtcgccatcaagctggagtgtgtgaagacaaagcacccccagctgcacatcgagagcaagttctacaagatgatgcagggtggcgtggggatcccgtccatcaagtggtgcggagctgagggcgactacaacgtgatggtcatggagctgctggggcctagcctcgaggacctgttcaacttctgttcccgcaaattcagcctcaagacggtgctgctcttggccgaccagatgatcagccgcatcgagtatatccactccaagaacttcatccaccgggacgtcaagcccgacaacttcctcatggggctggggaagaagggcaacctggtctacatcatcgacttcggcctggccaagaagtaccgggacgcccgcacccaccagcacattccctaccgggaaaacaagaacctgaccggcacggcccgctacgcttccatcaacacgcacctgggcattgagcaaagccgtcgagatgacctggagagcctgggctacgtgctcatgtacttcaacctgggctccctgccctggcaggggctcaaagcagccaccaagcgccagaagtatgaacggatcagcgagaagaagatgtcaacgcccatcgaggtcctctgcaaaggctatccctccgaattctcaacatacctcaacttctgccgctccctgcggtttgacgacaagcccgactactcttacctacgtcagctcttccgcaacctcttccaccggcagggcttctcctatgactacgtctttgactggaacatgctgaaattcggtgcagcccggaatcccgaggatgtggaccgggagcggcgagaacacgaacgcgaggagaggatggggcagctacgggggtccgcgacccgagccctgccccctggcccacccacgggggccactgccaaccggctccgcagtgccgccgagcccgtggcttccacgccagcctcccgcatccagccggctggcaatacttctcccagagcgatctcgcgggtcgaccgggagaggaaggtgagtatgaggctgcacaggggtgcgcccgccaacgtctcctcctcagacctcactgggcggcaagaggtctcccggatcccagcctcacagacaagtgtgccatttgaccatctcgggaagtgaggagagcccccattggaccagtgtttgcttagtgtcttcactgtatttcttaacacaaaaaaaaccggaggcccatgcccgggcggaaagggtcaggaacggcccggccagccggcccggccagctcctgccaagggaactgcggcccaagggcgataacccagcagacgcacagaccgagacgccccacccaacggcaccaaacacaacacggcactacacacacacacacccacaacacaacaacgcacacccgaca

SEQ ID NO: 442745 - DNA, 4330 bp, Homo sapiens
  misc_feature (3013)..(3013): n is a, c, g, or t
tgggccgggagaggctggcgcgccgggcggctccgcgaatcctccggcatccgccccggcgggccgcccccgcccgcggcagccccccgagcagtggcccggcatcggcgccttcccggcgggcaagagtgagccatggagctacgtgtggggaacaagtaccgcctgggacggaagatcgggagcgggtccttcggagatatctacctgggtgccaacatcgcctctggtgaggaagtcgccatcaagctggagtgtgtgaagacaaagcacccccagctgcacatcgagagcaagttctacaagatgatgcagggtggcgtggggatcccgtccatcaagtggtgcggagctgagggcgactacaacgtgatggtcatggagctgctggggcctagcctcgaggacctgttcaacttctgttcccgcaaattcagcctcaagacggtgctgctcttggccgaccagatgatcagccgcatcgagtatatccactccaagaacttcatccaccgggacgtcaagcccgacaacttcctcatggggctggggaagaagggcaacctggtctacatcatcgacttcggcctggccaagaagtaccgggacgcccgcacccaccagcacattccctaccgggaaaacaagaacctgaccggcacggcccgctacgcttccatcaacacgcacctgggcattgagcaaagccgtcgagatgacctggagagcctgggctacgtgctcatgtacttcaacctgggctccctgccctggcaggggctcaaagcagccaccaagcgccagaagtatgaacggatcagcgagaagaagatgtcaacgcccatcgaggtcctctgcaaaggctatccctccgaattctcaacatacctcaacttctgccgctccctgcggtttgacgacaagcccgactactcttacctacgtcagctcttccgcaacctcttccaccggcagggcttctcctatgactacgtctttgactggaacatgctgaaattcgtgagtcacctggaggccaaggcgggcttgggggactggatggggaaggccctgactcagagggccagagtgagctggtggcgggaggggctcccgacagacgggaggtacgagctggacagtgtggttgacctcactggggtcccagagccctccagcctcatccgtgctgacagcttgtgccaccatgggcagcagggccaggcagggcgctgtctcccgtcggaacaaggaggatctggcttcacctggggtccctcctgggtgcccgcagcagggcatgggtggtgctggcggcgccccctgctgccctgattgctgcctacaccgtcctgctgctcctgttctgcacatcccaggtggctacctgcaccatggcccctcgggccagcctggacccagtcatggtgcttgctttcttcttggtcatgggcccctgggtctggctaggcagttgttctgtttccctcttttaagagtcccaggggtggggttgggtggggagcagcattggccggccgtacccagagctctggaatctgtgaaattgtatgtcttgtttcacatctcttctggaaaagggggcttcctcgagccaggctcagccccgtgacagccccatgacagcgaagggacctttctgtccccgcccctgtccctgtgctgggcccacgtactcacccacgtactggtaaggatcctctgaggtctggcttttccaaaatttgccacttgaccagtgagcgcaagaggctgagcctcagctgtgctttttgtccctttcaggtgcccggctcccctgggcacccagagccccccagataggccggtggaggaggtggaggagctgtccccccaaaactactggcctgtggtctggactccagggccccatttctgatgtcgccaggtgtgcctgagcccatcggggccaggcctgaggaagtgtttcttgggaggatgggatgaccccctgttcccaagagatggcagcacagtggaggccatggtggaaaaggccctgccatggggtccttgagggccaggacagcctgagggagggatggtggccactgcccacaaggggcctggtgggaacgggtcccaggacagactcatagctagaccccgttggcggcctctgtgttgaaccagaactcattaaacacctcctcttgcttcatcctggtgtgcctctttcatggcagggccctcagccaccctgctagatggttaggaccaaggctctgttctcctggaagccaaggtcggcacattggtcttgggcttctcttctctctgggtttcttgttcactaaggagtaacacagaggtcaggcagagaatgggggtctcgcaggctagggacctcagggagaggcctctgttgcccttttcagcaaggctggaaatgggatatgggcaggggacgtcttctctgacttcaccctagaccttctggctccaaatggggcccatggccttgagcacctgggaccagctctttccaccacagggcattgggcactgggcactttcttatcgagatagtcactcccacgtctggttcgtgatgggcttggccctccagctcagcacaactgcaagaatggattttgtattctctagacggacactgtccaagatggtagccattggccacatgcgacacatttttaatgaattaaaattaatcaagactggaaatgtcggccaggcctggtggctcatgcctgtaatcccagcacttcgggaggcccagacaggtgggtcacttgaggtcaggagttcgagaccagcctggccaacatggtgaaaacccatctctactaaaaacacaaaaattagccgggtgtggtggcacacacctgtaatctcagctactcgggacactgagacaggagaattgcttgaatctgggaggtggaggttgcagtgagccgagatcgtgccactgcactccagcctgggggacagagcgagactccatctnaaaaaaaaaaaaagtagccagagacagctgtgtacctcacctgtcttttcccttctcccttctagtgtcttcactgtattttctttaaaaaaaaaaaaaaaaaaaaggcaaaaataaaccactcaaaagaacaacaaaaaaacccagcacaaaaccgacgatggagtttgtttctttgatttctttgccaatggcaagaagatgagatgccctcagcactgaggattcttgcccccttgtggtgcccgctgcccccaaccttcaggctgccagatgctcccctgacaacaccaggctacaggagccagacgccagggcctgcccggcctcctgttcctgcccccacccaccacctgcctggagaggaacgggtcgggtccgtgtcggagaagtgacaggtcccagagccaaagccggccctcaagcatcatcagggagtggtgtagtcagttgaaggcagttcccaccgagttttccgagcctcagaatccaggagatacgcacagccccacccactctgagatgacagtggctgacttcccgtgctgggcttttccattgtccccctggcctccaggctcctcctctgcctctccatggagtgggtggggaggtggtgggggccggcgtcccctgcgtgtgtgtgtgtgtgtgtgtgtgtgtggatgtattgacctgtgtttcccaagacagcaggtgccacggcccgccccgcctgccagcccgaattcccgttctcctgtgtctactaacaaggacatgggggtgggcggtgacctccgcatccctcagagctcagagggtcctcgctgccaccggtccccccctagcccgtcatcagccggtggcagctccatcttccattcctggttttagggcagaatccatggagactgcttccagaaggcatctggctctgagttataaattacttccctggtcctgacagtcacctggggtcccccctctccctggttccacctttctgaggaggagcctggagtcagggctgggttttggattaacccatccttcctagttaacacctttttgtttttattttattttatttttgtttgttttctccgtgtgtgtgttttcctaatttatttacctctgtttcccctttttcctttttttttttaattaaagagcaaagctttttattactttgtaatttaaaaaactgaaaaaaaaaaaactgaagaactttggggggaattttgtacttttttcctgtgtaaatattggacttttttgagctttatcgtggttgttaatttgaagtaataaagtagaaaagataaagtgaaaaaa

SEQ ID NO: 442746 - DNA, 2069 bp, Homo sapiens
ggctcctggatccggctacctggcagaggctcctggccactgttcgcaggtcttcccttgctctgaaagcagcagaggctctgctcacgggcaggctaggctttcatcacggtaggatagggaaggccatggctctgttgcctccttttcttgcctctcacagattggaagtatctagggacagtgggtggctaggacagtgctggctgcagggggtctgggagcgtgggcctcacagtggccttctctatcctctgcaacaccctccagccgaattctcaacatacctcaacttctgccgctccctgcggtttgacgacaagcccgactactcttacctacgtcagctcttccgcaacctcttccaccggcagggcttctcctatgactacgtctttgactggaacatgctgaaattcggtgcagcccggaatcccgaggatgtggaccgggagcggcgagaacacgaacgcgaggagaggatggggcagctacgggggtccgcgacccgagccctgccccctggcccacccacgggggccactgccaaccggctccgcagtgccgccgagcccgtggcttccacgccagcctcccgcatccagccggctggcaatacttctcccagagcgatctcgcgggtcgaccgggagaggaaggtgagtatgaggctgcacaggggtgcgcccgccaacgtctcctcctcagacctcactgggcggcaagaggtctcccggatcccagcctcacagacaagtgtgccatttgaccatctcgggaagtgaggagagcccccattggaccagtgtttgcttagtgtcttcactgtattttctttaaaaaaaaaaaaaaaaaaaaggcaaaaataaaccactcaaaagaacaacaaaaaaacccagcacaaaaccgacgatggagtttgtttctttgatttctttgccaatggcaagaagatgagatgccctcagcactgaggattcttgcccccttgtggtgcccgctgcccccaaccttcaggctgccagatgctcccctgacaacaccaggctacaggagccagacgccagggcctgcccggcctcctgttcctgcccccacccaccacctgcctggagaggaacgggtcgggtccgtgtcggagaagtgacaggtcccagagccaaagccggccctcaagcatcatcagggagtggtgtagtcagttgaaggcagttcccaccgagttttccgagcctcagaatccaggagatacgcacagccccacccactctgagatgacagtggctgacttcccgtgctgggcttttccattgtccccctggcctccaggctcctcctctgcctctccatggagtgggtggggaggtggtgggggccggcgtcccctgcgtgtgtgtgtgtgtgtgtgtgtgtgtggatgtattgacctgtgtttcccaagacagcaggtgccacggcccgccccgcctgccagcccgaattcccgttctcctgtgtctactaacaaggacatgggggtgggcggtgacctccgcatccctcagagctcagagggtcctcgctgccaccggtccccccctagcccgtcatcagccggtggcagctccatcttccattcctggttttagggcagaatccatggagactgcttccagaaggcatctggctctgagttataaattacttccctggtcctgacagtcacctggggtcccccctctccctggttccacctttctgaggaggagcctggagtcagggctgggttttggattaacccatccttcctagttaacacctttttgtttttattttattttatttttgtttgttttctccgtgtgtgtgttttcctaatttatttacctctgtttcccctttttcctttttttttttaattaaagagcaaagctttttattactttgtaatttaaaaaactgaaaaaaaaaaaactgaagaactttggggggaattttgtacttttttcctgtgtaaatattggacttttttgagctttatcgtggttgttaatttgaagtaataaagtagaaaagataaagtgaaaaaa

SEQ ID NO: 442747 - DNA, 3599 bp, Homo sapiens
tgggccgggagaggctggcgcgccgggcggctccgcgaatcctccggcatccgccccggcgggccgcccccgcccgcggcagccccccgagcagtggcccggcatcggcgccttcccggcgggcaagagtgagccatggagctacgtgtggggaacaagtaccgcctgggacggaagatcgggagcgggtccttcggagatatctacctgggtgccaacatcgcctctggtgaggaagtcgccatcaagctggagtgtgtgaagacaaagcacccccagctgcacatcgagagcaagttctacaagatgatgcagggtggcgtggggatcccgtccatcaagtggtgcggagctgagggcgactacaacgtgatggtcatggagctgctggggcctagcctcgaggacctgttcaacttctgttcccgcaaattcagcctcaagacggtgctgctcttggccgaccagatgatcagccgcatcgagtatatccactccaagaacttcatccaccgggacgtcaagcccgacaacttcctcatggggctggggaagaagggcaacctggtctacatcatcgacttcggcctggccaagaagtaccgggacgcccgcacccaccagcacattccctaccgggaaaacaagaacctgaccggcacggcccgctacgcttccatcaacacgcacctgggcattgagcaaagccgtcgagatgacctggagagcctgggctacgtgctcatgtacttcaacctgggctccctgccctggcaggggctcaaagcagccaccaagcgccagaagtatgaacggatcagcgagaagaagatgtcaacgcccatcgaggtcctctgcaaaggctatccctccgaattctcaacatacctcaacttctgccgctccctgcggtttgacgacaagcccgactactcttacctacgtcagctcttccgcaacctcttccaccggcagggcttctcctatgactacgtctttgactggaacatgctgaaattcgtgagtcacctggaggccaaggcgggcttgggggactggatggggaaggccctgactcagagggccagagtgagctggtggcgggaggggctcccgacagacgggaggtacgagctggacagtgtggttgacctcactggggtcccagagccctccagcctcatccgtgctgacagcttgtgccaccatgggcagcagggccaggcagggcgctgtctcccgtcggaacaaggaggatctggcttcacctggggtccctcctgggtgcccgcagcagggcatgggtggtgctggcggcgccccctgctgccctgattgctgcctacaccgtcctgctgctcctgttctgcacatcccaggtggctacctgcaccatggcccctcgggccagcctggacccagtcatggtgcttgctttcttcttggtcatgggcccctgggtctggctaggcagttgttctgtttccctcttttaagagtcccaggggtggggttgggtggggagcagcattggccggccgtacccagagctctggaatctgtgaaattgtatgtcttgtttcacatctcttctggaaaagggggcttcctcgagccaggctcagccccgtgacagccccatgacagcgaagggacctttctgtccccgcccctgtccctgtgctgggcccacgtactcacccacgtactggtaaggatcctctgaggtctggcttttccaaaatttgccacttgaccagtgagcgcaagaggctgagcctcagctgtgctttttgtccctttcaggtgcccggctcccctgggcacccagagccccccagataggccggtggaggaggtggaggagctgtccccccaaaactactggcctgtggtctggactccagggccccatttctgatgtcgccaggtgtgcctgagcccatcggggccaggcctgaggaagtgtttcttgggaggatgggatgaccccctgttcccaagagatggcagcacagtggaggccatggtggaaaaggccctgccatggggtccttgagggccaggacagcctgagggagggatggtggccactgcccacaaggggcctggtgggaacgggtcccaggacagactcatagctagaccccgttggcggcctctgtgttgaaccagaactcattaaacacctcctcttgcttcatcctggtgtgcctctttcatggcagggccctcagccaccctgctagatggttaggaccaaggctctgttctcctggaagccaaggtcggcacattggtcttgggcttctcttctctctgggtttcttgttcactaaggagtaacacagaggtcaggcagagaatgggggtctcgcaggctagggacctcagggagaggcctctgttgcccttttcagcaaggctggaaatgggatatgggcaggggacgtcttctctgacttcaccctagaccttctggctccaaatggggcccatggccttgagcacctgggaccagctctttccaccacagggcattgggcactgggcactttcttatcgagatagtcactcccacgtctggttcgtgatgggcttggccctccagctcagcacaactgcaagaatggattttgtattctctagacggacactgtccaagatggtagccattggccacatgcgacacatttttaatgaattaaaattaatcaagactggaaatgtcggccaggcctggtggctcatgcctgtaatcccagcactttgggaggccatagagggcggatgacttgaggtcaggagtttaagaccagcctggccaacatggtgaaacccatttctactaaaaacacaaaaattagctgggcatggtggtgtgttcctgtaatcccagctgcttgggaggctgaggcaggagaatcgcttgaacccaggaggcagagattggagtgagctgagatcatgccactgccctccagtggccaccacatccggcaaggcagatgggaccatttccttcatccagaacgttctgtggacatcactgctctaggttcctcccttatggagtctcacaagactgtctagccagcaagatctcttttccaaccaggccaggagcacctctccacccactgctgctggtctgaccgccttcctggaagtccctcttgaggcaggccctggagttagaagctgggcagaggcacccacagccttatcctttgccaatctctgactcaatgccacggccactgtagtgagctgaaccacctccagcagtcccctggcagaagcacctggaaaacatgcaatgggaaccttcaccctgaggccaggcccttcccatgctacccaacagtagacaggacaccctgtgttgttggctgcaccggggtgctgggatctgtggatccctggggcctggaagccactctcagcacatacagccactgtgttccgaggtccagtcagctggccgggaaggaattcaacacagccaaggacagaggtccatatgatgacgggtggatgctcgtgtgactttgctgaccttttatgttttctatgggcaataaaggccaagagagctc

SEQ ID NO: 442748 - DNA, 1527 bp, Homo sapiens
tgggccgggagaggctggcgcgccgggcggctccgcgaatcctccggcatccgccccggcgggccgcccccgcccgcggcagccccccgagcagtggcccggcatcggcgccttcccggcgggcaagagtgagccatggagctacgtgtggggaacaagtaccgcctgggacggaagatcgggagcgggtccttcggagatatctacctgggtgccaacatcgcctctggtgaggaagtcgccatcaagctggagtgtgtgaagacaaagcacccccagctgcacatcgagagcaagttctacaagatgatgcagggtggcgtggggatcccgtccatcaagtggtgcggagctgagggcgactacaacgtgatggtcatggagctgctggggcctagcctcgaggacctgttcaacttctgttcccgcaaattcagcctcaagacggtgctgctcttggccgaccagatgatcagccgcatcgagtatatccactccaagaacttcatccaccgggacgtcaagcccgacaacttcctcatggggctggggaagaagggcaacctggtctacatcatcgacttcggcctggccaagaagtaccgggacgcccgcacccaccagcacattccctaccgggaaaacaagaacctgaccggcacggcccgctacgcttccatcaacacgcacctgggcattgagcaaagccgtcgagatgacctggagagcctgggctacgtgctcatgtacttcaacctgggctccctgccctggcaggggctcaaagcagccaccaagcgccagaagtatgaacggatcagcgagaagaagatgtcaacgcccatcgaggtcctctgcaaaggctatccctccgaattctcaacatacctcaacttctgccgctccctgcggtttgacgacaagcccgactactcttacctacgtcagctcttccgcaacctcttccaccggcagggcttctcctatgactacgtctttgactggaacatgctgaaattcggggcttcctcgagccaggctcagccccgtgacagccccatgacagcgaagggacctttctgtccccgcccctgtccctgtgctgggcccacgtactcacccacgtactggtgcccggctcccctgggcacccagagccccccagataggccggtggaggaggtggaggagctgtccccccaaaactactggcctgtggtctggactccagggccccatttctgatgtcgccaggtgtgcctgagcccatcggggccaggcctgaggaagtgtttcttgggaggatgggatgaccccctgttcccaagagatggcagcacagtggaggccatggtggaaaaggccctgccatggggtccttgagggccaggacagcctgagggagggatggtggccactgcccacaaggggcctggtgggaacgggtcccaggacagactcatagctagaccccgttggcggcctctgtgttgaaccagaactcattaaacacctcctcttgcttca

SEQ ID NO: 442749 - DNA, 1952 bp, Homo sapiens
tgggccgggagaggctggcgcgccgggcggctccgcgaatcctccggcatccgccccggcgggccgcccccgcccgcggcagccccccgagcagtggcccggcatcggcgccttcccggcgggcaagagtgagccatggagctacgtgtggggaacaagtaccgcctgggacggaagatcgggagcgggtccttcggagatatctacctgggtgccaacatcgcctctggtgaggaagtcgccatcaagctggagtgtgtgaagacaaagcacccccagctgcacatcgagagcaagttctacaagatgatgcagggtggcgtggggatcccgtccatcaagtggtgcggagctgagggcgactacaacgtgatggtcatggagctgctggggcctagcctcgaggacctgttcaacttctgttcccgcaaattcagcctcaagacggtgctgctcttggccgaccagatgatcagccgcatcgagtatatccactccaagaacttcatccaccgggacgtcaagcccgacaacttcctcatggggctggggaagaagggcaacctggtctacatcatcgacttcggcctggccaagaagtaccgggacgcccgcacccaccagcacattccctaccgggaaaacaagaacctgaccggcacggcccgctacgcttccatcaacacgcacctgggcattgagcaaagccgtcgagatgacctggagagcctgggctacgtgctcatgtacttcaacctgggctccctgccctggcaggggctcaaagcagccaccaagcgccagaagtatgaacggatcagcgagaagaagatgtcaacgcccatcgaggtcctctgcaaaggctatccctccgaattctcaacatacctcaacttctgccgctccctgcggtttgacgacaagcccgactactcttacctacgtcagctcttccgcaacctcttccaccggcagggcttctcctatgactacgtctttgactggaacatgctgaaattcgtgagtcacctggaggccaaggcgggcttgggggactggatggggaaggccctgactcagagggccagagtgagctggtggcgggaggggctcccgacagacgggaggtacgagctggacagtgtggttgacctcactggggtcccagagccctccagcctcatccgtgctgacagcttgtgccaccatgggcagcagggccaggcagggcgctgtctcccgtcggaacaaggaggatctggcttcacctggggtccctcctgggtgcccgcagcagggcatgggtggtgctggcggcgccccctgctgccctgattgctgcctacaccgtcctgctgctcctgttctgcacatcccaggtggctacctgcaccatggcccctcgggccagcctggacccagtcatggtgcttgctttcttcttggtcatgggcccctgggtctggctaggcagttgttctgtttccctcttttaagagtcccaggggtggggttgggtggggagcagcattggccggccgtacccagagctctggaatctgtgaaattgtatgtcttgtttcacatctcttctggaaaagggggcttcctcgagccaggctcagccccgtgacagccccatgacagcgaagggacctttctgtccccgcccctgtccctgtgctgggcccacgtactcacccacgtactggtaaggatcctctgaggtctggcttttccaaaatttgccacttgaccagtgagcgcaagaggccatggtggaaaaggccctgccatggggtccttgagggccaggacagcctgagggagggatggtggccactgcccacaaggggcctggtgggaacgggtcccaggacagactcatagctagaccccgttggcggcctctgtgttgaaccagaactcattaaacacctcctcttgcttca

SEQ ID NO: 442750 - DNA, 796 bp, Homo sapiens
  misc_feature (777)..(777): n is a, c, g, or t
ggggacgaggaggagggggcctgttattttgcaggctcgcgggggaggccccccggccggcctgcctccgcttccccccgctgggccctccgaggccccggccggccaggcggccaccccggctgtgatttggggacgctgagggagggggcttggggtgctgggcgccggatactgttgattcgggcccgcgtagggtttcatcggacaatcaccggcgccccctgctctcccggccccggcgcccggacctgggggttcgcaaggctgcgcccgctcgttggatgacgggcgtttgggggtcctaagcaagagtgagccatggagctacgtgtggggaacaagtaccgcctgggacggaagatcgggagcgggtccttcggagatatctacctgggtgccaacatcgcctctggtgaggaagtcgccatcaagctggagtgtgtgaagacaaagcacccccagctgcacatcgagagcaagttctacaagatgatgcagggtggcgtggggatcccgtccatcaagtggtgcggagctgagggcgactacaacgtgatggtcatggagctgctggggcctagcctcgaggacctgttcaacttctgttcccgcaaattcagcctcaagacggtgctgctcttggccgaccagatgatcagccgcatcgagtatatccaccccaagaacttcctgcagacggtgcggaagatcctgtcgcggctgttccgcgtgttcgtgcacgtctacatccaccactttgaccgcatcgcgcanatgggctccgaggcccacg

SEQ ID NO: 442751 - DNA, 308 bp, Homo sapiens
cttatctgtaacattttgttttattttattattttattttattttattttctcacaggatatcacattggagtcactgccaagtcatagccataaatgatgagtcggtcctctttccagtggatcataagacaatggaccctttttgttatgatggttttaaactttcaattgtcactttttatgctatttctgtatataaaggtgcacgaaggtaaaaagtattttttcaagttgtaaataatttatttaatatttaatggaagtgtatttattttacagctcattaaacttttttaaccaaacaga

SEQ ID NO: 442752 - DNA, 2199 bp, Homo sapiens
gttttgtaataattaaacttgtaattatttgacttgaaatatttaatcattttttgggaaagaatggatagattttgttaatgttagcactcttaaaattaagcagtggcttttttccccgtgtctcccatattctccttgtgtttgaaacataaaacaaacactaaacctaagcaaaagttgctgggtttgttttcataattgaggtgagtttttccctcaactattacaataaaagaaaactttttatgattttaatgataatgttttgtggtgggttaaagacctcctaacaacagggggtttttatacaacaacaagaagtttttaaataattgagtttttaaagtggaaagcagcagtaaattaaactagaaggatatattttatacctagaaataaataaagctcaacttgttttgtaagcctgttttaaaaatatttaatcatttaatttgtgcaagtatagagttctcctatggcaaaactataccatcatcttctccaattgtgcatggcagctgtactaagttctgcaaaaacaagacatatggatgtgtttcataccttctcagaattggtatatcaagacacatttaaatataagccctctggaaatggatttatatacagtcaacataaatacccccttagaaattggtaatattttatagccaggtttaggtttagtgtcaagtatagtgattgctggtctatcactactcatgaagtggaaccccctctactcataaaaaccccaatcaaacatatagatgaatagaaccttgataacattagaatgccttgttctctgaaggcttagaagacaatacgtcaggaaatatgaaggagaagctgaggaacgaaagaaacttcgacaagagaatggaaatgtacatgctatagcataactgaagataaaattacaggtttgagttttaaaatatatctttagatcatatcctataattttgaaaaatttaacactatataatctcaagaaaaatatggaatgtgttcttaattatatatacactatgaacaatggctatgttaaagtattattctttgagtataagatggaattcaatgttgagaatagactacgtgtttaataagtattattagggatataaatataagagacactggtccagttctcaaagaagttattgtttagtagataggaaaaaaaatgtaagaaaccagaatactagggatgtaaaataaatgtcatgagaaaggaaccaatggagtatgagaagtttccagtgaaaaacagaaagaatccagtagaatttatttagggaagaggaaaagatgtgttcggggtggccttggaagtgaacgttgaaggactagtgagattggttcaagaaactgtgaagggaaagaaagggttatactgagaaatggaagagataattttagaaacttgtgaaaaatggcttaatctaaatgagtgttaggggagatacagttgtgatgataggttgagctcacatggtggagagccacagttgcgggtgcttgcactgataatgtgagggcatggagacagacaataggttgaatgctctttttttacaaaaggaagtagaaagggagggggatgtaaatttgataaataggttggtgaaaacttatattttcttgtaaagagagagaactgagcatgttgtaggtataaggtaaaaaggcgtgaagaggaatatttcgttgataatgaaagtgagcagctagggaagaaaactcccagaggaagagggaggcaaggaaatcaagaacacacttaaagtttgtcagaagaaggaactttatttccttaaacattcaagaaagatgatgtcatttcagttattgattgtctaacttcagtaggtttaagagttacttgagggctgggcacagtggctcaggcctgtaatcccagcactttgggaggctgaggtgggcggatcacctgaggtcaggagtgcaagaccagcctggccaacatggtgaaaccttttctaaatatacaaaattttctaaaaatacaaaaaattagctgggtgtggtggtgaatgtctatagtcccagctacttgagaggctgaggcagtagaattgcttgaactgcaaggcagaggttgcagtaagccaagatcgcgccattgcactccaacctgggcaacaagagcgaaactccatcttaaaa

SEQ ID NO: 442753 - DNA, 1546 bp, Homo sapiens
  misc_feature (1)..(3): n is a, c, g, or t
  misc_feature (1363)..(1363): n is a, c, g, or t
nnngagacgttcgcacacctgggtgccagcgccccagaggtcccgggacagcccgaggcgccgcgcccgccgccccgagctccccaagccttcgagagcggcgcacactcccggtctccactcgctcttccaacacccgctcgttttggcggcagctcgtgtcccagagaccgagttgccccagagaccgagacgccgccgctgcgaaggaccaatgagagccccgctgctaccgccggcgccggtggtgctgtcgctcttgatactcggctcaggccattatgctgctggattggacctcaatgacacctactctgggaagcgtgaaccattttctggggaccacagtgctgatggatttgaggttacctcaagaagtgagatgtcttcagggagtgagatttcccctgtgagtgaaatgccttctagtagtgaaccgtcctcgggagccgactatgactactcagaagagtatgataacgaaccacaaatacctggctatattgtcgatgattcagtcagagttgaacaggtagttaagcccccccaaaacaagacggaaagtgaaaatacttcagataaacccaaaagaaagaaaaagggaggcaaaaatggaaaaaatagaagaaacagaaagaagaaaaatccatgtaatgcagaatttcaaaatttctgcattcacggagaatgcaaatatatagagcacctggaagcagtaacatgcaaatgtcagcaagaatatttcggtgaacggtgtggggaaaagtccatgaaaactcacagcatgattgacagtagtttatcaaaaattgcattagcagccatagctgcctttatgtctgctgtgatcctcacagctgttgctgttattacagtccagcttagaagacaatacgtcaggaaatatgaaggagaagctgaggaacgaaagaaacttcgacaagagaatggaaatgtacatgctatagcataactgaagataaaattacaggatatcacattggagtcactgccaagtcatagccataaatgatgagtcggtcctctttccagtggatcataagacaatggaccctttttgttatgatggttttaaactttcaattgtcactttttatgctatttctgtatataaaggtgcacgaaggtaaaaagtattttttcaagttgtaaataatttatttaatatttaatggaagtgtatttattttacagctcattaaacttttttaaccaaacagaaaaaattacaaaaacttaataatataaaattattgattatattcaattttatattgatatccctttatattttaccctatttcccttcaatctttttcccttacccttttttttaccaacnatcttatacttctaaacatctttacttacccttttctaatatctttttataatcattccactttttttcctcttttatcttatatttctattgcctctttcttattttattttccttacaacttcctcacttttaaaatataatagtctcttcttttcgtctttttttccttttcccctactt

SEQ ID NO: 442754 - DNA, 1071 bp, Homo sapiens
gaaaatgagctccatggaaattatcaatttgattataatctgttgtaatctgggtgttggagcattgtaacatagagtaactctaatttataattctcagttttttccacctgcaagtagtactcactaattcccaactataatcatgagtggacactactttcaggtagaaaaaactgaaaattataaattagggttatgcagtcctctctaacttttatattgtgttaggtaatgaggcacgcatggctgttacccctgtgagcgctcactgctatgacatctttctctcatgtctctaaaattatattcaagtttgagagactcttgtcaataaatcttttcttttttagttgaacaggtagttaagcccccccaaaacaagacggaaagtgaaaatacttcagataaacccaaaagaaagaaaaagggaggcaaaaatggaaaaaatagaagaaacagaaagaagaaaaatccatgtaatgcagaatttcaaaatttctgcattcacggagaatgcaaatatatagagcacctggaagcagtaacatgcaaatgtcagcaagaatatttcggtgaacggtgtggggaaaagtccatgaaaactcacagcatgattgacagtagtttatcaaaaattgcattagcagccatagctgcctttatgtctgctgtgatcctcacagctgttgctgttattacagtccagcttagaagacaatacgtcaggaaatatgaaggagaagctgaggaacgaaagaaacttcgacaagagaatggaaatgtacatgctatagcataactgaagataaaattacaggatatcacattggagtcactgccaagtcatagccataaatgatgagtcggtcctctttccagtggatcataagacaatggaccctttttgttatgatggttttaaactttcaattgtcactttttatgctatttctgtatataaaggtgcacgaaggtaaaaagtattttttcaagttgtaaataatttatttaatatttaatggaagtgtatttattttacagctcattaaacttttttaaccaaacaga

SEQ ID NO: 442755 - DNA, 722 bp, Homo sapiens
tgccatctgggactatggctaggctggctggaactagttgaagatttgaggtaagaacaattaaccaaaagaaagaaaaagggaggcaaaaatggaaaaaatagaagaaacagaaagaagaaaaatccatgtaatgcagaatttcaaaatttctgcattcacggagaatgcaaatatatagagcacctggaagcagtaacatgcaaatgtcagcaagaatatttcggtgaacggtgtggggaaaagtccatgaaaactcacagcatgattgacagtagtttatcaaaaattgcattagcagccatagctgcctttatgtctgctgtgatcctcacagctgttgctgttattacagtccagcttagaagacaatacgtcaggaaatatgaaggagaagctgaggaacgaaagaaacttcgacaagagaatggaaatgtacatgctatagcataactgaagataaaattacaggatatcacattggagtcactgccaagtcatagccataaatgatgagtcggtcctctttccagtggatcataagacaatggaccctttttgttatgatggttttaaactttcaattgtcactttttatgctatttctgtatataaaggtgcacgaaggtaaaaagtattttttcaagttgtaaataatttatttaatatttaatggaagtgtatttattttacagctcattaaacttttttaaccaaacaga

SEQ ID NO: 442756 - DNA, 2147 bp, Homo sapiens
gttttgtaataattaaacttgtaattatttgacttgaaatatttaatcattttttgggaaagaatggatagattttgttaatgttagcactcttaaaattaagcagtggcttttttccccgtgtctcccatattctccttgtgtttgaaacataaaacaaacactaaacctaagcaaaagttgctgggtttgttttcataattgaggtgagtttttccctcaactattacaataaaagaaaactttttatgattttaatgataatgttttgtggtgggttaaagacctcctaacaacagggggtttttatacaacaacaagaagtttttaaataattgagtttttaaagtggaaagcagcagtaaattaaactagaaggatatattttatacctagaaataaataaagctcaacttgttttgtaagcctgttttaaaaatatttaatcatttaatttgtgcaagtatagagttctcctatggcaaaaaaacaagacatatggatgtgtttcataccttctcagaattggtatatcaagacacatttaaatataagccctctggaaatggatttatatacagtcaacataaatacccccttagaaattggtaatattttatagccaggtttaggtttagtgtcaagtatagtgattgctggtctatcactactcatgaagtggaaccccctctactcataaaaaccccaatcaaacatatagatgaatagaaccttgataacattagaatgccttgttctctgaaggcttagaagacaatacgtcaggaaatatgaaggagaagctgaggaacgaaagaaacttcgacaagagaatggaaatgtacatgctatagcataactgaagataaaattacaggtttgagttttaaaatatatctttagatcatatcctataattttgaaaaatttaacactatataatctcaagaaaaatatggaatgtgttcttaattatatatacactatgaacaatggctatgttaaagtattattctttgagtataagatggaattcaatgttgagaatagactacgtgtttaataagtattattagggatataaatataagagacactggtccagttctcaaagaagttattgtttagtagataggaaaaaaaatgtaagaaaccagaatactagggatgtaaaataaatgtcatgagaaaggaaccaatggagtatgagaagtttccagtgaaaaacagaaagaatccagtagaatttatttagggaagaggaaaagatgtgttcggggtggccttggaagtgaacgttgaaggactagtgagattggttcaagaaactgtgaagggaaagaaagggttatactgagaaatggaagagataattttagaaacttgtgaaaaatggcttaatctaaatgagtgttaggggagatacagttgtgatgataggttgagctcacatggtggagagccacagttgcgggtgcttgcactgataatgtgagggcatggagacagacaataggttgaatgctctttttttacaaaaggaagtagaaagggagggggatgtaaatttgataaataggttggtgaaaacttatattttcttgtaaagagagagaactgagcatgttgtaggtataaggtaaaaaggcgtgaagaggaatatttcgttgataatgaaagtgagcagctagggaagaaaactcccagaggaagagggaggcaaggaaatcaagaacacacttaaagtttgtcagaagaaggaactttatttccttaaacattcaagaaagatgatgtcatttcagttattgattgtctaacttcagtaggtttaagagttacttgagggctgggcacagtggctcaggcctgtaatcccagcactttgggaggctgaggtgggcggatcacctgaggtcaggagtgcaagaccagcctggccaacatggtgaaaccttttctaaatatacaaaattttctaaaaatacaaaaaattagctgggtgtggtggtgaatgtctatagtcccagctacttgagaggctgaggcagtagaattgcttgaactgcaaggcagaggttgcagtaagccaagatcgcgccattgcactccaacctgggcaacaagagcgaaactccatcttaaaa

SEQ ID NO: 442757 - DNA, 2146 bp, Homo sapiens
gttttgtaataattaaacttgtaattatttgacttgaaatatttaatcattttttgggaaagaatggatagattttgttaatgttagcactcttaaaattaagcagtggcttttttccccgtgtctcccatattctccttgtgtttgaaacataaaacaaacactaaacctaagcaaaagttgctgggtttgttttcataattgaggtgagtttttccctcaactattacaataaaagaaaactttttatgattttaatgataatgttttgtggtgggttaaagacctcctaacaacagggggtttttatacaacaacaagaagtttttaaataattgagtttttaaagtggaaagcagcagtaaattaaactagaaggatatattttatacctagaaataaataaagctcaacttgttttgtaagcctgttttaaaaatatttaatcatttaatttgtgcaagtatagagttctcctatggcaaaactataccatcatcttctccaattgtgcatggcagctgtactaagttctgcaaacatttaaatataagccctctggaaatggatttatatacagtcaacataaatacccccttagaaattggtaatattttatagccaggtttaggtttagtgtcaagtatagtgattgctggtctatcactactcatgaagtggaaccccctctactcataaaaaccccaatcaaacatatagatgaatagaaccttgataacattagaatgccttgttctctgaaggcttagaagacaatacgtcaggaaatatgaaggagaagctgaggaacgaaagaaacttcgacaagagaatggaaatgtacatgctatagcataactgaagataaaattacaggtttgagttttaaaatatatctttagatcatatcctataattttgaaaaatttaacactatataatctcaagaaaaatatggaatgtgttcttaattatatatacactatgaacaatggctatgttaaagtattattctttgagtataagatggaattcaatgttgagaatagactacgtgtttaataagtattattagggatataaatataagagacactggtccagttctcaaagaagttattgtttagtagataggaaaaaaaatgtaagaaaccagaatactagggatgtaaaataaatgtcatgagaaaggaaccaatggagtatgagaagtttccagtgaaaaacagaaagaatccagtagaatttatttagggaagaggaaaagatgtgttcggggtggccttggaagtgaacgttgaaggactagtgagattggttcaagaaactgtgaagggaaagaaagggttatactgagaaatggaagagataattttagaaacttgtgaaaaatggcttaatctaaatgagtgttaggggagatacagttgtgatgataggttgagctcacatggtggagagccacagttgcgggtgcttgcactgataatgtgagggcatggagacagacaataggttgaatgctctttttttacaaaaggaagtagaaagggagggggatgtaaatttgataaataggttggtgaaaacttatattttcttgtaaagagagagaactgagcatgttgtaggtataaggtaaaaaggcgtgaagaggaatatttcgttgataatgaaagtgagcagctagggaagaaaactcccagaggaagagggaggcaaggaaatcaagaacacacttaaagtttgtcagaagaaggaactttatttccttaaacattcaagaaagatgatgtcatttcagttattgattgtctaacttcagtaggtttaagagttacttgagggctgggcacagtggctcaggcctgtaatcccagcactttgggaggctgaggtgggcggatcacctgaggtcaggagtgcaagaccagcctggccaacatggtgaaaccttttctaaatatacaaaattttctaaaaatacaaaaaattagctgggtgtggtggtgaatgtctatagtcccagctacttgagaggctgaggcagtagaattgcttgaactgcaaggcagaggttgcagtaagccaagatcgcgccattgcactccaacctgggcaacaagagcgaaactccatcttaaaa

SEQ ID NO: 442758 - DNA, 2144 bp, Homo sapiens
gttttgtaataattaaacttgtaattatttgacttgaaatatttaatcattttttgggaaagaatggatagattttgttaatgttagcactcttaaaattaagcagtggcttttttccccgtgtctcccatattctccttgtgtttgaaacataaaacaaacactaaacctaagcaaaagttgctgggtttgttttcataattgaggtgagtttttccctcaactattacaataaaagaaaaagggggtttttatacaacaacaagaagtttttaaataattgagtttttaaagtggaaagcagcagtaaattaaactagaaggatatattttatacctagaaataaataaagctcaacttgttttgtaagcctgttttaaaaatatttaatcatttaatttgtgcaagtatagagttctcctatggcaaaactataccatcatcttctccaattgtgcatggcagctgtactaagttctgcaaaaacaagacatatggatgtgtttcataccttctcagaattggtatatcaagacacatttaaatataagccctctggaaatggatttatatacagtcaacataaatacccccttagaaattggtaatattttatagccaggtttaggtttagtgtcaagtatagtgattgctggtctatcactactcatgaagtggaaccccctctactcataaaaaccccaatcaaacatatagatgaatagaaccttgataacattagaatgccttgttctctgaaggcttagaagacaatacgtcaggaaatatgaaggagaagctgaggaacgaaagaaacttcgacaagagaatggaaatgtacatgctatagcataactgaagataaaattacaggtttgagttttaaaatatatctttagatcatatcctataattttgaaaaatttaacactatataatctcaagaaaaatatggaatgtgttcttaattatatatacactatgaacaatggctatgttaaagtattattctttgagtataagatggaattcaatgttgagaatagactacgtgtttaataagtattattagggatataaatataagagacactggtccagttctcaaagaagttattgtttagtagataggaaaaaaaatgtaagaaaccagaatactagggatgtaaaataaatgtcatgagaaaggaaccaatggagtatgagaagtttccagtgaaaaacagaaagaatccagtagaatttatttagggaagaggaaaagatgtgttcggggtggccttggaagtgaacgttgaaggactagtgagattggttcaagaaactgtgaagggaaagaaagggttatactgagaaatggaagagataattttagaaacttgtgaaaaatggcttaatctaaatgagtgttaggggagatacagttgtgatgataggttgagctcacatggtggagagccacagttgcgggtgcttgcactgataatgtgagggcatggagacagacaataggttgaatgctctttttttacaaaaggaagtagaaagggagggggatgtaaatttgataaataggttggtgaaaacttatattttcttgtaaagagagagaactgagcatgttgtaggtataaggtaaaaaggcgtgaagaggaatatttcgttgataatgaaagtgagcagctagggaagaaaactcccagaggaagagggaggcaaggaaatcaagaacacacttaaagtttgtcagaagaaggaactttatttccttaaacattcaagaaagatgatgtcatttcagttattgattgtctaacttcagtaggtttaagagttacttgagggctgggcacagtggctcaggcctgtaatcccagcactttgggaggctgaggtgggcggatcacctgaggtcaggagtgcaagaccagcctggccaacatggtgaaaccttttctaaatatacaaaattttctaaaaatacaaaaaattagctgggtgtggtggtgaatgtctatagtcccagctacttgagaggctgaggcagtagaattgcttgaactgcaaggcagaggttgcagtaagccaagatcgcgccattgcactccaacctgggcaacaagagcgaaactccatcttaaaa

SEQ ID NO: 442759 - DNA, 1242 bp, Homo sapiens
  misc_feature (1)..(3): n is a, c, g, or t
nnngagacgttcgcacacctgggtgccagcgccccagaggtcccgggacagcccgaggcgccgcgcccgccgccccgagctccccaagccttcgagagcggcgcacactcccggtctccactcgctcttccaacacccgctcgttttggcggcagctcgtgtcccagagaccgagttgccccagagaccgagacgccgccgctgcgaaggaccaatgagagccccgctgctaccgccggcgccggtggtgctgtcgctcttgatactcggctcaggccattatgctgctggattggacctcaatgacacctactctgggaagcgtgaaccattttctggggaccacagtgctgatggatttgaggttacctcaagaagtgagatgtcttcagggagtgagatttcccctgtgagtgaaatgccttctagtagtgaaccgtcctcgggagccgactatgactactcagaagagtatgataacgaaccacaaatacctggctatattgtcgatgattcagtcagagttgaacaggtagttaagcccccccaaaacaagacggaaagtgaaaatacttcagataaacccaaaagaaagaaaaagggaggcaaaaatggaaaaaatagaagaaacagaaagaagaaaaatccatgtaatgcagaatttcaaaatttctgcattcacggagaatgcaaatatatagagcacctggaagcagtaacatgcaaatgtcagcaagaatatttcggtgaacggtgtggggaaaagtccatgaaaactcacagcatgattgacagtagtttatcaaaaattgcattagcagccatagctgcctttatgtctgctgtgatcctcacagctgttgctgttattacagtccagcttagaagacaatacgtcaggaaatatgaaggagaagctgaggaacgaaagaaacttcgacaagagaatggaaatgtacatgctatagcataactgaagataaaattacaggatatcacattggagtcactgccaagtcatagccataaatgatgagtcggtcctctttccagtggatcataagacaatggaccctttttgttatgatggttttaaactttcaattgtcactttttatgctatttctgtatataaaggtgcacgaaggtaaaaagtattttttcaagttgtaaataatttatttaatatttaatggaagtgtatttattttacagctcattaaacttttttaaccaaacaga

SEQ ID NO: 442760 - DNA, 786 bp, Homo sapiens
  misc_feature (1)..(3): n is a, c, g, or t
nnngagacgttcgcacacctgggtgccagcgccccagaggtcccgggacagcccgaggcgccgcgcccgccgccccgagctccccaagccttcgagagcggcgcacactcccggtctccactcgctcttccaacacccgctcgttttggcggcagctcgtgtcccagagaccgagttgccccagagaccgagacgccgccgctgcgaaggaccaatgagagccccgctgctaccgccggcgccggtggtgctgtcgctcttgatactcggctcaggccattatgctgctggattggacctcaatgacacctactctgggaagcgtgaaccattttctggggaccacagtgctgatggatttgaggttacctcaagaagtgagatgtcttcagggagtgagatttcccctgtgagtgaaatgccttctagtagtgaaccgtcctcgggagccgactatgactactcagaagagtatgataacgaaccacaaatacctggctatattgtcgatgattcagtcagagttgaacaggtagttaagcccccccaaaacaagacggaaagtgaaaatacttcagataaacccaaaagaaagaaaaagggaggcaaaaatggaaaaaatagaagaaacagaaagaagaaaaatccatgtaatgcagaatttcaaaatttctgcattcacggagaatgcaaatatatagagcacctggaagcagtaacatgcaaatgtcagcagaatatttcgtgacggtgttgggatacatcgggatcctctagatcacctcc

SEQ ID NO: 442761 - DNA, 686 bp, Homo sapiens
tgcgcgagcttggagccgggtagagggcgggccttccgggacgagggcgcgtgggtgaggaaggtcaggtctaggaactctaactccttgccactcaagaaatgtcctccctttcagaatatgccttccgcatgtctcgtctcagtgcccggctatttggtgaagtcaccaggcctactaattccaagtctatgaaagtggtgaaactgtttagtgaactgcccttggccaagaagaaggagacttatgattggtatccaaatcaccacacttacgctgaactcatgcagacgctccgatttcttggactctacagagatgagcatcaggattttatggatgagcaaaaacgactaaagaagcttcgtggaaaggagaaaccaaagaaaggagaagggaaaagagcagcaaaaaggaaatagtgttggtccctcaagagggagactttcttcctcagtggcggagagaagaaagtgcatttattgtctttccacatattggaggaatgtcatcttcctaaatgaagtttatttggaggaacacagtcatctccttggtgaaatctaatccggttacattgtggctggtttcttgaacacattctaactgtgcaaaattatcttggccttggccgtgtaatgtgaggtttacctgattctctaatgaaataaatacctaagttattg

SEQ ID NO: 442762 - DNA, 643 bp, Homo sapiens
tgcgcgagcttggagccgggtagagggcgggccttccgggacgagggcgcgtgggtgaggaaggtcaggtctagaatatgccttccgcatgtctcgtctcagtgcccggctatttggtgaagtcaccaggcctactaattccaagtctatgaaagtggtgaaactgtttagtgaactgcccttggccaagaagaaggagacttatgattggtatccaaatcaccacacttacgctgaactcatgcagacgctccgatttcttggactctacagagatgagcatcaggattttatggatgagcaaaaacgactaaagaagcttcgtggaaaggagaaaccaaagaaaggagaagggaaaagagcagcaaaaaggaaatagtgttggtccctcaagagggagactttcttcctcagtggcggagagaagaaagtgcatttattgtctttccacatattggaggaatgtcatcttcctaaatgaagtttatttggaggaacacagtcatctccttggtgaaatctaatccggttacattgtggctggtttcttgaacacattctaactgtgcaaaattatcttggccttggccgtgtaatgtgaggtttacctgattctctaatgaaataaatacctaagttattg

SEQ ID NO: 442763 - DNA, 830 bp, Homo sapiens
  misc_feature (724)..(724): n is a, c, g, or t
  misc_feature (738)..(738): n is a, c, g, or t
tgcgcgagcttggagccgggtagagggcgggccttccgggacgagggcgcgtgggtgaggaaggtcaggtctaggaactctaactccttgccactcaagaaatgtcctccctttcagaatatgccttccgcatgtctcgtctcagtgcccggctatttggtgaagtcaccaggcctactaattccaagtctatgaaagtggtgaaactgtttagtgaactgcccttggccaagaagaaggagacttatgattggtatccaaatcaccacacttacgctgaactcatgcagacgctccgatttcttggactctacagagatgagcatcaggattttatggatgagcaaaaacgactaaagaagcttcgtggaaaggagaaaccaaagaaaggagaagggaaaagagcagcaaaaaggaaatagtgttggtccctcaagagggagactttcttcctcagtggcggagagaagaaagtgcatttattgtctttccacatattggaggaatgtcatcttcctaaatgaagtttatttggaggaacacagtcatctccttggtgaaatctaatccggttacattgtggctggtttcttgaacacattctaactgtgcaaaattatcttggccttggccgtgtaatgtgaggtttacctgattctctaatgaaataaatacctaagttattgaaaaaaaaaaaaaaaaaaaaaaatgtggggggggggcntgaaagtttaaacntggtggggggggcaggatggaagggaagggtcaggaaccggcgaaaggggtttccaaaaaggggcggcgttggcacccagggtggtcggtag

SEQ ID NO: 442764 - DNA, 976 bp, Homo sapiens
aattactctcttccatattggttaacagtagaaggctcagtttctctgctcatcacacggccttcggcactgtagctttgggtggtgggctgcagattaattttgtaaccaccttaagaaaaatacggaactctaactccttgccactcaagaaatgtcctccctttcagaatatgccttccgcatgtctcgtctcagtgcccggctatttggtgaagtcaccaggcctactaattccaagtctatgaaagtggtgaaactgtttagtgaactgcccttggccaagaagaaggagacttatgattggtatccaaatcaccacacttacgctgaactcatgcagacgctccgatttcttggactctacaggtgatgacaaacacaaagagggacctatgagagactttttttcagtagatcagaaaaggaaaaaaattagcctttctatccttgtagttttgttcttataatagagcccaggtagttcaaaaggtacagttggcaggagaaagtcttctttcaaaatacccataatggagagaccaaaaaaaaaaaggaaattcatgcttgttggaagatatattttaattatgtctacaacatgactaatgttgaatagatactgagctgtagagaggtgtttaatcatttgttaatctaagagcactctaaaaaggatgccaagaggccaggcgcagtggctcacgcttgtaatcccagcactttgggaggccgaggcaggcagatcacgaggtcaagaaatcaagaccatcctggccaacttggtgaaactctgtctctactaaaaatacaaaaattagctgggcatggtggtgcacgcctgtagtcccagctactcgggaggctaaggcaggagaattgcttgaatctgggaggcggaggttgcagtgagccgagatcgcgccactgcactccagcctggcaacagagtgagactccatctcgagaaaaaaaa

SEQ ID NO: 442765 - DNA, 739 bp, Homo sapiens
aattactctcttccatattggttaacagtagaaggctcagtttctctgctcatcacacggccttcggcactgtagctttgggtggtgggctgcagattaattttgtaaccaccttaagaaaaatacggaactctaactccttgccactcaagaaatgtcctccctttcagaatatgccttccgcatgtctcgtctcagtgcccggctatttggtgaagtcaccaggcctactaattccaagtctatgaaagtggtgaaactgtttagtgaactgcccttggccaagaagaaggagacttatgattggtatccaaatcaccacacttacgctgaactcatgcagacgctccgatttcttggactctacagagatgagcatcaggattttatggatgagcaaaaacgactaaagaagcttcgtggaaaggagaaaccaaagaaaggagaagggaaaagagcagcaaaaaggaaatagtgttggtccctcaagagggagactttcttcctcagtggcggagagaagaaagtgcatttattgtctttccacatattggaggaatgtcatcttcctaaatgaagtttatttggaggaacacagtcatctccttggtgaaatctaatccggttacattgtggctggtttcttgaacacattctaactgtgcaaaattatcttggccttggccgtgtaatgtgaggtttacctgattctctaatgaaataaatacctaagttattg

SEQ ID NO: 442766 - DNA, 883 bp, Homo sapiens
  misc_feature (777)..(777): n is a, c, g, or t
  misc_feature (791)..(791): n is a, c, g, or t
aattactctcttccatattggttaacagtagaaggctcagtttctctgctcatcacacggccttcggcactgtagctttgggtggtgggctgcagattaattttgtaaccaccttaagaaaaatacggaactctaactccttgccactcaagaaatgtcctccctttcagaatatgccttccgcatgtctcgtctcagtgcccggctatttggtgaagtcaccaggcctactaattccaagtctatgaaagtggtgaaactgtttagtgaactgcccttggccaagaagaaggagacttatgattggtatccaaatcaccacacttacgctgaactcatgcagacgctccgatttcttggactctacagagatgagcatcaggattttatggatgagcaaaaacgactaaagaagcttcgtggaaaggagaaaccaaagaaaggagaagggaaaagagcagcaaaaaggaaatagtgttggtccctcaagagggagactttcttcctcagtggcggagagaagaaagtgcatttattgtctttccacatattggaggaatgtcatcttcctaaatgaagtttatttggaggaacacagtcatctccttggtgaaatctaatccggttacattgtggctggtttcttgaacacattctaactgtgcaaaattatcttggccttggccgtgtaatgtgaggtttacctgattctctaatgaaataaatacctaagttattgaaaaaaaaaaaaaaaaaaaaaaatgtggggggggggcntgaaagtttaaacntggtggggggggcaggatggaagggaagggtcaggaaccggcgaaaggggtttccaaaaaggggcggcgttggcacccagggtggtcggtag

SEQ ID NO: 442767 - DNA, 2016 bp, Homo sapiens
cggggagacggttgtcgggctggttcctgtgctggatcctgggcggcctgaggggtacggagactctgggggagggagacggcagcggcatggcggccgggtgtaagacgcccgaccctcctcttccctgtcttcgccgccgccgctgctggagtcactgggaccctctagtctgcgtgtgttagttgtaatcccgccgccctcctgtcagccctccgctccgccggccctccttccttccgccgccgcagccagcccgagggtcggccggctgtgtaacactctcccaccccacccaccagcccgcgggccagcaccatggaggacgtgaagctggagttcccttcccttccacagtgcaaggaagacgccgaggagtggacctaccctatgagacgagagatgcaggaaattttacctggattgttcttaggcccatattcatctgctatgaaaagcaagctacctgtactacagaaacatggaataacccatataatatgcatacgacaaaatattgaagcaaactttattaaaccaaactttcagcagttatttagatatttagtcctggatattgcagataatccagttgaaaatataatacgttttttccctatgactaaggaatttattgatgggagcttacaaaatgggaggaaaagttcttgtgcatggaaatgcagggatctccagaagtgcagcctttgttattgcatacattatggaaacatttggaatgaagtacagagatgcttttgcttatgttcaagaaagaagattttgtattaatcctaatgctggatttgtccatcaacttcaggaatatgaagccatctacctagcaaaattaacaatacagatgatgtcaccactccagatagaaaggtcattatctgttcattctggtaccacaggcagtttgaagagaacacatgaagaagaggatgattttggaaccatgcaagtggcgactgcacagaatggctgacttgaagagcaacatcatagagtgtgaatttctatttgggaaggagaaaatacaagagaaaattataatgtaaaatggtaaaaacataagtagtttttttttcaattacatgttgcttccagacatacttctctgcaacttgttgagcaacattttaagatgttggacttctgcaatagatgacactgatggttttactcctttttttaaaaacacatgcgcgcgcacacacacatgctttacaagttttattataaaccaagaattttggacttgcaaagaggtattattgcaataatgcacttttcatacttgaaatttatttgtatgatataaagttattactttaaacaaaatgcaagtatggggggattgtttataaagtttgggtaatttataacaaaatttgctaaggtttgctaaaaattcatttttctgttctatatattacatttttaacataattttacagttcaattttatgatggagcctcttacagaaacattaacaaaatgcaggaatctgccacatttcttttttagtataacttaatagcttaattaccattttattttttatacttcttccattattaatctttaaatcatgatcctaattagctgtccttactttaacttgatctaattattgcttcctttcttattactttcctaatttttctatattttaaaaactacagtttccatgataaaaggaaaacgttttgatttatagtaccaagtgcttaaacacaaggatagtgttagattttcgagtgactttcctttttgcattttttggcagtaaaagccaaacgttgtatttgttcttttcagagttgtccagcccttttttcctttgtccaaaatgattctaaatagaatctaataaaccaatgtagcattatttttttctaaatgaagccccaaaaaagaaaagtgccttgcatcatttaaaaaaaataattaaatcctcatggcctctaaattagtatgtagaacactgaaaagttcttaacattttt

SEQ ID NO: 442768 - DNA, 2086 bp, Homo sapiens
cggggagacggttgtcgggctggttcctgtgctggatcctgggcggcctgaggggtacggagactctgggggagggagacggcagcggcatggcggccgggtgtaagacgcccgaccctcctcttccctgtcttcgccgccgccgctgctggagtcactgggaccctctagtctgcgtgtgttagttgtaatcccgccgccctcctgtcagccctccgctccgccggccctccttccttccgccgccgcagccagcccgagggtcggccggctgtgtaacactctcccaccccacccaccagcccgcgggccagcaccatggaggacgtgaagctggagttcccttcccttccacagtgcaaggaagacgccgaggagtggacctaccctatgagacgagagatgcaggaaattttacctggattgttcttaggcccatattcatctgctatgaaaagcaagctacctgtactacagaaacatggaataacccatataatatgcatacgacaaaatattgaagcaaactttattaaaccaaactttcagcagttatttagatatttagtcctggatattgcagataatccagttgaaaatataatacgttttttccctatgactaaggaatttattgatgggagcttacaaaatgggaggttcccttcccttccacagtgcaaggaagacgccgaggagtggacctaccctatgagacgagagatgcaggaaattttacctggattgttcttaggcccatattcatctgctatgaaaagcaagctacctgtactacagaaacatttggaatgaagtacagagatgcttttgcttatgttcaagaaagaagattttgtattaatcctaatgctggatttgtccatcaacttcaggaatatgaagccatctacctagcaaaattaacaatacagatgatgtcaccactccagatagaaaggtcattatctgttcattctggtaccacaggcagtttgaagagaacacatgaagaagaggatgattttggaaccatgcaagtggcgactgcacagaatggctgacttgaagagcaacatcatagagtgtgaatttctatttgggaaggagaaaatacaagagaaaattataatgtaaaatggtaaaaacataagtagtttttttttcaattacatgttgcttccagacatacttctctgcaacttgttgagcaacattttaagatgttggacttctgcaatagatgacactgatggttttactcctttttttaaaaacacatgcgcgcgcacacacacatgctttacaagttttattataaaccaagaattttggacttgcaaagaggtattattgcaataatgcacttttcatacttgaaatttatttgtatgatataaagttattactttaaacaaaatgcaagtatggggggattgtttataaagtttgggtaatttataacaaaatttgctaaggtttgctaaaaattcatttttctgttctatatattacatttttaacataattttacagttcaattttatgatggagcctcttacagaaacattaacaaaatgcaggaatctgccacatttcttttttagtataacttaatagcttaattaccattttattttttatacttcttccattattaatctttaaatcatgatcctaattagctgtccttactttaacttgatctaattattgcttcctttcttattactttcctaatttttctatattttaaaaactacagtttccatgataaaaggaaaacgttttgatttatagtaccaagtgcttaaacacaaggatagtgttagattttcgagtgactttcctttttgcattttttggcagtaaaagccaaacgttgtatttgttcttttcagagttgtccagcccttttttcctttgtccaaaatgattctaaatagaatctaataaaccaatgtagcattatttttttctaaatgaagccccaaaaaagaaaagtgccttgcatcatttaaaaaaaataattaaatcctcatggcctctaaattagtatgtagaacactgaaaagttcttaacattttt

SEQ ID NO: 442769 - DNA, 1266 bp, Homo sapiens
cggggagacggttgtcgggctggttcctgtgctggatcctgggcggcctgaggggtacggagactctgggggagggagacggcagcggcatggcggccgggtgtaagacgcccgaccctcctcttccctgtcttcgccgccgccgctgctggagtcactgggaccctctagtctgcgtgtgttagttgtaatcccgccgccctcctgtcagccctccgctccgccggccctccttccttccgccgccgcagccagcccgagggtcggccggctgtgtaacactctcccaccccacccaccagcccgcgggccagcaccatggaggacgtgaagctggagttcccttcccttccacagtgcaaggaagacgccgaggagtggacctaccctatgagacgagagatgcaggaaattttacctggattgttcttaggcccatattcatctgctatgaaaagcaagctacctgtactacagaaacatggaataacccatataatatgcatacgacaaaatattgaagcaaactttattaaaccaaactttcagcagttatttagctacttgggaggctgaggcaggagaattgcttgaactcgggaggcggaggttgcagtgagctattactccagcctgggcaacaagagcgaaactctgtctcaaaaaaaaaaagggggggggggacattaagagagtggtgatgacccaaatgttgaaccaatttatgtttagggtgggtgggtgttcttagctgttgaatcctgaatgggtttatcaaacgtgaactagctggcttaatgcagccagcgttctggggcagcagaacattttcattcttactggtaaattctattggctggcttccaaaggtgatgattttcaagcagacatgttctatatgggtctggggtttaaggatctgggtgcccagcctctatcagagcttgcctaccgggcaaagctgcctacccttcaagtggggaaaatttaatccactggtttaacaagggctcaccctctccaccctgtcctaacgacctttggtggaatgtgctgggatatttgctggctcaatagcaagggggtagctctgcttacattttaagaaagtggaggctgagggcatggtatcaatactggtgtgcaactccaagaagttttcctggttaaaatttaaaggaaagatctgtggtatggattaaccattttcttatgcctgggtatggacattttcagtggtctttctacgtctaggggtgaaatgtg

SEQ ID NO: 442770 - DNA, 1259 bp, Homo sapiens
  misc_feature (1230)..(1230): n is a, c, g, or t
cggggagacggttgtcgggctggttcctgtgctggatcctgggcggcctgaggggtacggagactctgggggagggagacggcagcggcatggcggccgggtgtaagacgcccgaccctcctcttccctgtcttcgccgccgccgctgctggagtcactgggaccctctagtctgcgtgtgttagttgtaatcccgccgccctcctgtcagccctccgctccgccggccctccttccttccgccgccgcagccagcccgagggtcggccggctgtgtaacactctcccaccccacccaccagcccgcgggccagcaccatggaggacgtgaagctggagttcccttcccttccacagtgcaaggaagacgccgaggagtggacctaccctatgagacgagagatgcaggaaattttacctggattgttcttaggcccatattcatctgctatgaaaagcaagctacctgtactacagaaacatggaataacccatataatatgcatacgacaaaatattgaagcaaactttattaaaccaaactttcagcagttatttagatatttagtcctggatattgcagataatccagttgaaaatataatacgttttttccctatgactaaggaatttattgatgggagcttacaaaatgggaggaaaagttcttgtgcatggaaatgcagggatctccagaagtgcagcctttgttattgcatacattatggaaacatttggaatgaagtacagagatgcttttgcttatgttcaagaaagaagattttgtattaatcctaatgctggatttgtccatcaacttcaggaatatgaagccatctacctagcaaaattaacaatacagatgatgtcaccactccagatagaaaggtcattatctgttcattctggtaccacaggcagtttgaagagaacacatgaagaagaggatgattttggaaccatgcaagtggcgactgcacagaatggctgacttgaagagcaacatcatagagtgtgaatttctatttgggaaggagaaaatacaagagaaaattataatgtaaaatggtaaaaacataagtagtttttttttcaattacatgttgcttccagacatacttctctgcaacttgttgagcaacattttaagatgttggacttctgcaatagatgacactgatggttttactcctttttttaaaaaacaccgatgcggccactctctttttntcttacatccggatgaaaacgatcataga

SEQ ID NO: 442771 - DNA, 3457 bp, Homo sapiens
agggacaaggaggctgtgatcagatctcgcgaggttcaggaaagcgccccgggaactgggccgctgggccagcccctgcgtcggggggcaagatggcagcccaggctttggcgctgctgagagaggtagcgaggctggaagcgccgctggaggagctacgcgcgcttcactccgtgctgcaggcagtgccgctcaacgagcttcgccagcaagcggcggagctgcgcctcggcccgctcttctccctgcttaacgagaaccatagggaaaagactactttgtgtgtatccattctggagagattgctccaagctatggaaccggttcacgtggcccggaacctcagggttgacctgcagaggggactaattcaccctgatgattctgtaaaaatcctcactctttcccagattggaagaattgttgaaaattctgatgctgttactgagattctaaataatgctgaattactaaaacaaattgtttattgcattggtggagagaatctatctgtagcaaaagcggctatcaaatccctgtcaagaatatcactaacccaagctggactggaggctttatttgaaagcaatctgctggatgatttgaaaagtgtaatgaaaacaaatgacattgttcgatacagggtgtatgagctaattatagagatttcttccgtgtcaccagaatctttaaactactgtaccacaagtggattggtaacccagctcctgagagagctgactggtgaggatgtgttggtcagagccacctgtatagaaatggtgacatcactggcatatactcatcatgggcgacaatatcttgctcaagaaggagtaattgaccaaatttctaatataattgttggggcagattcagaccctttctctagcttctatctgccaggattcgtgaagttttttggaaacctggctgtcatggatagtcctcaacagatctgtgagcgttatcctatctttgtggaaaaagtctttgaaatgatagaaagtcaggaccccactatgattggtgtagctgtagacacagttggaatcttgggatccaatgttgaaggaaaacaggttttacagaaaacaggaactcgctttgaacgcttgcttatgagaataggacatcaatcaaagaatgccccagtggagctaaaaattagatgtttggatgcaatttcatctcttctgtacttaccacctgagcagcagactgatgaccttctgaggatgacagaatcctggttttcttctttatctcgggatccactggagctcttccgtggcattagtagtcagcccttccctgaactacactgtgctgccttaaaagtgtttacggccattgcaaaccaaccctgggctcagaaacttatgtttaacagtccaggttttgtagaatatgtggtggaccggtctgtggagcatgacaaagcttcaaaggatgccaaatatgaactagtgaaagcacttgccaattccaagacaattgcagaaatctttgggaacccaaattatttgaggctcagaacttacctgagtgaagggccatactatgtgaaacctgtttccacgacagcagtagaaggagccgaatgatttcttctagagctcatgtagaggaccacgttttgaccaaaacttctcctaaggcatttgactccatctatatttcacaaaagagacttcctttccccaagaattatcatggaatgtcagatgttactttgttaccaacactgttatatttctacattgaaatgcaaagtggaactaggagtttggaatgcattaagagcagacaagcttggtcataatagatccagtgtttttcagattcctttcactgccttaatctttgcaacagggtggaagtttttttcttccctcaaaattttcatggacatgcaatcttatctaaaagcctgcttcagggctgggcgcggtggctaacacctataattcccagcactttgggaggccaagatgggcaaatcacttgagtctaggagttcaagaccagcctggccaatatggcaaaaccctgtctctactaaaaatataaaatcagccaggcatggtggcgcacacctataatctcagctactcaggaggctgaggcacgagaatcgcttgagcctgggaggcagaggttgcagtgagctgagatcttgccactgcacaccagcctgggcaacacagcaagactctgtctcaaaaataaatgaataaaataaaaacctgccaccaaattatttctggattctcttcactatctttttttttctttttggtcctttttccatttctgattccactttcaaagtcttggatatattctttgaaaaatgagtagtatggaatattaagattatgttccttatactcagaatactttttatgagctctcttgtttttttgttactattattcctttgaaaaaaagacaaaatatctaaaaaatgtttatagtgttcatgtaattttttttgctgtttaccaatgaactttgccctgttgtggttttgggggatcagaaggattcctaaactgtcatttcatttattggtaggtcatgattgctgagggttttgctttggatttttcatacctataaagtcaatcttgagttgatcagagaaagggaaacttactcctaataaacagactcagaacagaagggacatatgcataaatcaggataccatctcattaatttacaaaggataatctttcttttcattgacaacacctacacccacctgttttccagtgttcttctctctaaacagcaaagccaaagcactctgcacaccaaatcacctgttcagaggtttatgcatgagcatatttcttttaggccgtggtgaagttgataaaccacccctgctttgtaacaaaattattttaaagtgactggaattatctagtccccagattgatcatctcccctggcaacgtgactctgttttttgtgtgtgtttccatgctgactagtcccctactgttaatatcactactaattaggctataaccaggtctttcctggcctgagaaatattctcttaaaatgacctttgttttaatctcattcatgatgttgattttttttcaatgtggtgcaatatatacaataaaatttgtcataactattttaagtgtacagttcagtatattacatatgttcataagttgtacaaccatcaccaccatccatcttcagaattattttcatcttatacaattgaaactgtattcattaaacaataactgtctattccctcttttccccagcctctggcaaccaccattctgcttcatgacattgattttattcacttaacatcagattttggggggatgccctctctcctatgtatggtctacacattctgattttttttttagattgaataaaatttgtaaatcattattttcatttcataagt

SEQ ID NO: 442772 - DNA, 2378 bp, Homo sapiens
aaaaactgatgaaggaaattgaagaagacacaaataaatggaaaggtatcctatgttcatggattggaaggattaatattattaaaatgttcatgctgcccaaagcactatatagattcagtgcattccctccaaaatttttaaatttaatgacatttttcacgaaagcagaaaaaataatttttaaatatacatatttcagaatacattgttcacaataaagatatatgattttttgtcagttaaaagttaatttttttaaaaagatacctatagcctcttattgaggtggaatctgttgctcttggagctacgtactgttgactttggttttctggaaacatcagtgctatttagaacattaggatatttttctttttgaatatcaacaaaaacataaataaaaatactagtaatgacatttacagtatgtttcacagattaatcacatctctgagtgggagtctttatctgttgtaggatctactcttgccattctattctgggttttggttgattagtctttcttgaacacttccagaaattggagatgtatgcctgccttaggtagcctagcttattttattaatgaacatatccatttaaaaatttcttcctggtaatgagtctaaacttgccttcctgtaatttgtatccactggtcctttttctttgttctccctcttgcatatgccagtacttcaatagctggtcccagctccattgacgccctctctcaggatcacacatcacaggtccttcagaatctcctaatggtctctctgatctccaggcaacacactactctaacctttctatgcttttctggcctgcagttcatttctgttcctgtgaagtcatagagcccgcaattcatgctgtcttgttcccctattaaaatatatttttgtaaatctctttaggattcgtgaagttttttggaaacctggctgtcatggatagtcctcaacagatctgtgagcgttatcctatctttgtggaaaaagtctttgaaatgatagaaagtcaggaccccactatgattggtgtagctgtagacacagttggaatcttgggatccaatgttgaaggaaaacaggttttacagaaaacaggttggtatgacttggccctgttcagggatatcttaatctttgacaggggttcaatatgtaagttcatttgctggtgggttaactacattgtagaaactattttatgggtggcagtcttgttaaccatgaccttgtactcatgtctgaaaatctaataattattacggaaaacctttttttttttttttttgacttttcactggtttaggttttcattggtttaggtttctaccaatcgatttcaaccaaacattgtttcctgtttcccctctatgatgtcttctttgactagatttcatggtacaaagaccacgggctagagtcagaaaggtctggattcatgtccttgggttttctattctttttttttttttttttttttttaagagattgagagtgtctctctgttacccaggctggccccgaactcccgggctcaagcaatcctcctgcctcatcctcttgattggctgggtctacaggtccacaccattgtatccagccctgactttgctttttgaacttcatttactcacttcacttttctaggcctcattttcttcatttataaaaatggcataacaactgcttctcagggttgttgtgaatatttatgaaatttagagaaaggaaaataaaagtttgttataagatttcatgttaagagatacttttggcatgttaagagatacaatggttcatgcctgtaatccagcactttgggaggctaaggtgggtgggttgcctgagctcaggagttcaagaccaggctgggcaacatggcaaaatcctatctctactcaagaatacaaaaattaaccaggcatggtactgcacaactgtagtcccagctacttgagaagctgaggaaggagaatctcttgaacctggcaggtggaggttgcagtgagctgagatcatgccactacactccagcctgggtgacagagtgaaattctatctcaaaaaaaaaaaaaaaaaagaggccaggtatggtggctcatgcctgtaatcccagcattttgggaggccaaagcaggtggatcacttgaggtcaggagctcgagaccagcctggccaacatggtgaaaccctgtctctactaaaagtacaaaaatcagccaagcgtggtggtgcatgcctgcagtcccagctactcgggaggctgaggcaggagaatggcatgaacacaggaggtaaaggttgcagtgagccgagatcacaccactgcactccagcctgggcgacagtgcgagactctgt

SEQ ID NO: 442773 - DNA, 686 bp, Homo sapiens
agggacaaggaggctgtgatcagatctcgcgaggttcaggaaagcgccccgggaactgggccgctgggccagcccctgcgtcggggggcaagatggcagcccaggctttggcgctgctgagagaggtagcgaggctggaagcgccgctggaggagctacgcgcgcttcactccgtgctgcaggcagtgccgctcaacgagcttcgccagcaagcggcggagctgcgcctcggcccgctcttctccctgcttaacgagaaccatagggaaaagactactttgtgtgtatccattctggagagattgctccaagctatggaaccggttcacgtggcccggaacctcagggttgacctgcagaggggactaattcaccctgatgattctgtaaaaatcctcactctttcccagattggaagaattgttgaaaattctgatgctgttactgagattctaaataatgctgaattactaaaacaaattgtttattgcattggtggagagaatctatctgtagcaaaagcggtgagtctactagaatcattgacttaaatgtgcagagacatcggtgtcccaaaagataaagaaaggccttctgaattgagaggtgaaggtttagaatggatgatttgcgtaatggaatttacaacttcatatggattgtgtaaaataaatggttgtcaagta

SEQ ID NO: 442774 - DNA, 3536 bp, Homo sapiens
agggacaaggaggctgtgatcagatctcgcgaggttcaggaaagcgccccgggaactgggccgctgggccagcccctgcgtcggggggcaagatggcagcccaggctttggcgctgctgagagaggtagcgaggctggaagcgccgctggaggagctacgcgcgcttcactccgtgctgcaggcagtgccgctcaacgagcttcgccagcaagcggcggagctgcgcctcggcccgctcttctccctgcttaacgagaaccatagggaaaagactactttgtgtgtatccattctggagagattgctccaagctatggaaccggttcacgtggcccggaacctcagggttgacctgcagaggggactaattcaccctgatgattctgtaaaaatcctcactctttcccagattggaagaattgttgaaaattctgatgctgttactgagattctaaataatgctgaattactaaaacaaattgtttattgcattggtggagagaatctatctgtagcaaaagcggctatcaaatccctgtcaagaatatcactaacccaagctggactggaggctttatttgaaagcaatctgctggatgatttgaaaagtgtaatgaaaacaaatgacattgttcgatacagggtgtatgagctaattatagagatttcttccgtgtcaccagaatctttaaactactgtaccacaagtggattggtaacccagctcctgagagagctgactggtgaggatgtgttggtcagagccacctgtatagaaatggtgacatcactggcatatactcatcatgggcgacaatatcttgctcaagaaggagtaattgaccaaatttctaatataattgttggggcagattcagaccctttctctagcttctatctgccaggattcgtgaagttttttggaaacctggctgtcatggatagtcctcaacagatctgtgagcgttatcctatctttgtggaaaaagtctttgaaatgatagaaagtcaggaccccactatgattggtgtagctgtagacacagttggaatcttgggatccaatgttgaaggaaaacaggttttacagaaaacaggaactcgctttgaacgcttgcttatgagaataggacatcaatcaaagaatgccccagtggagctaaaaattagatgtttggatgcaatttcatctcttctgtacttaccacctgagcagcagactgatgaccttctgaggatgacagaatcctggttttcttctttatctcgggatccactggagctcttccgtggcattagtagtcagcccttccctgaactacactgtgctgccttaaaagtgtttacggccattgcaaaccaaccctgggctcagaaacttatgtttaacagtccaggttttgtagaatatgtggtggaccggtctgtggagcatgacaaagcttcaaaggatgccaaatatgaactagtgaaagcacttgccaattccaagacaattgcagaaatctttgggaacccaaattatttgaggctcagaacttacctgagtgaagggccatactatgtgaaacctgtttccacgacagcagtagaaggagccgaatgatttcttctagagctcatgtagaggaccacgttttgaccaaaacttctcctaaggcatttgactccatctatatttcacaaaagagacttcctttccccaagaattatcatggaatgtcagatgttactttgttaccaacactgttatatttctacattgaaatgcaaagtggaactaggagtttggaatgcattaagagcagacaagcttggtcataatagatccagtgtttttcagattcctttcactgccttaatctttgcaacagggtggaagtttttttcttccctcaaaattttcatggacatgcaatcttatctaaaagcctgcttcagggctgggcgcggtggctaacacctataattcccagcactttgggaggccaagatgggcaaatcacttgagtctaggagttcaagaccagcctggccaatatggcaaaaccctgtctctactaaaaatataaaatcagccaggcatggtggcgcacacctataatctcagctactcaggaggctgaggcacgagaatcgcttgagcctgggaggcagaggttgcagtgagctgagatcttgccactgcacaccagcctgggcaacacagcaagactctgtctcaaaaataaatgaataaaataaaaacctgccaccaaattatttctggattctcttcactatctttttttttctttttggtcctttttccatttctgattccactttcaaagtcttggatatattctttgaaaaatgagtagtatggaatattaagattatgttccttatactcagaatactttttatgagctctcttgtttttttgttactattattcctttgaaaaaaagacaaaatatctaaaaaatgtttatagtgttcatgtaattttttttgctgtttaccaatgaactttgccctgttgtggttttgggggatcagaaggattcctaaactgtcatttcatttattggtaggtcatgattgctgagggttttgctttggatttttcatacctataaagtcaatcttgagttgatcagagaaagggaaacttactcctaataaacagactcagaacagaagggacatatgcataaatcaggataccatctcattaatttacaaaggataatctttcttttcattgacaacacctacacccacctgttttccagtgttcttctctctaaacagcaaagccaaagcactctgcacaccaaatcacctgttcagaggtttatgcatgagcatatttcttttaggccgtggtgaagttgataaaccacccctgctttgtaacaaaattattttaaagtgactggaattatctagtccccagattgatcatctcccctggcaacgtgactctgttttttgtgtgtgtttccatgctgactagtcccctactgttaatatcactactaattaggctataaccaggtctttcctggcctgagaaatattctcttaaaatgacctttgttttaatctcattcatgatgttgattttttttcaatgtggtgcaatatatacaataaaatttgtcataactattttaagtgtacagttcagtatattacatatgttcataagttgtacaaccatcaccaccatccatcttcagaattattttcatcttatacaattgaaactgtattcattaaacaataactgtctattccctcttttccccagcctctggcaaccaccattctgcttcatgacattgattttattcacttaacatcagattttggggggatgccctctctcctatgtatggtctacacattctgattttttttttagattgaataaaatttgtaaatcattattttcatttcataagtaaacacctgttgactgcctattatgttcttgggattggggaaggtgctagacattggcctaagtgccaagtgcatctca

SEQ ID NO: 442775 - DNA, 3312 bp, Homo sapiens
agggacaaggaggctgtgatcagatctcgcgaggttcaggaaagcgccccgggaactgggccgctgggccagcccctgcgtcggggggcaagatggcagcccaggctttggcgctgctgagagaggtagcgaggctggaagcgccgctggaggagctacgcgcgcttcactccgtgctgcaggcagtgccgctcaacgagcttcgccagcaagcggcggagctgcgcctcggcccgctcttctccctgcttaacgagaaccatagattggaagaattgttgaaaattctgatgctgttactgagattctaaataatgctgaattactaaaacaaattgtttattgcattggtggagagaatctatctgtagcaaaagcggctatcaaatccctgtcaagaatatcactaacccaagctggactggaggctttatttgaaagcaatctgctggatgatttgaaaagtgtaatgaaaacaaatgacattgttcgatacagggtgtatgagctaattatagagatttcttccgtgtcaccagaatctttaaactactgtaccacaagtggattggtaacccagctcctgagagagctgactggtgaggatgtgttggtcagagccacctgtatagaaatggtgacatcactggcatatactcatcatgggcgacaatatcttgctcaagaaggagtaattgaccaaatttctaatataattgttggggcagattcagaccctttctctagcttctatctgccaggattcgtgaagttttttggaaacctggctgtcatggatagtcctcaacagatctgtgagcgttatcctatctttgtggaaaaagtctttgaaatgatagaaagtcaggaccccactatgattggtgtagctgtagacacagttggaatcttgggatccaatgttgaaggaaaacaggttttacagaaaacaggaactcgctttgaacgcttgcttatgagaataggacatcaatcaaagaatgccccagtggagctaaaaattagatgtttggatgcaatttcatctcttctgtacttaccacctgagcagcagactgatgaccttctgaggatgacagaatcctggttttcttctttatctcgggatccactggagctcttccgtggcattagtagtcagcccttccctgaactacactgtgctgccttaaaagtgtttacggccattgcaaaccaaccctgggctcagaaacttatgtttaacagtccaggttttgtagaatatgtggtggaccggtctgtggagcatgacaaagcttcaaaggatgccaaatatgaactagtgaaagcacttgccaattccaagacaattgcagaaatctttgggaacccaaattatttgaggctcagaacttacctgagtgaagggccatactatgtgaaacctgtttccacgacagcagtagaaggagccgaatgatttcttctagagctcatgtagaggaccacgttttgaccaaaacttctcctaaggcatttgactccatctatatttcacaaaagagacttcctttccccaagaattatcatggaatgtcagatgttactttgttaccaacactgttatatttctacattgaaatgcaaagtggaactaggagtttggaatgcattaagagcagacaagcttggtcataatagatccagtgtttttcagattcctttcactgccttaatctttgcaacagggtggaagtttttttcttccctcaaaattttcatggacatgcaatcttatctaaaagcctgcttcagggctgggcgcggtggctaacacctataattcccagcactttgggaggccaagatgggcaaatcacttgagtctaggagttcaagaccagcctggccaatatggcaaaaccctgtctctactaaaaatataaaatcagccaggcatggtggcgcacacctataatctcagctactcaggaggctgaggcacgagaatcgcttgagcctgggaggcagaggttgcagtgagctgagatcttgccactgcacaccagcctgggcaacacagcaagactctgtctcaaaaataaatgaataaaataaaaacctgccaccaaattatttctggattctcttcactatctttttttttctttttggtcctttttccatttctgattccactttcaaagtcttggatatattctttgaaaaatgagtagtatggaatattaagattatgttccttatactcagaatactttttatgagctctcttgtttttttgttactattattcctttgaaaaaaagacaaaatatctaaaaaatgtttatagtgttcatgtaattttttttgctgtttaccaatgaactttgccctgttgtggttttgggggatcagaaggattcctaaactgtcatttcatttattggtaggtcatgattgctgagggttttgctttggatttttcatacctataaagtcaatcttgagttgatcagagaaagggaaacttactcctaataaacagactcagaacagaagggacatatgcataaatcaggataccatctcattaatttacaaaggataatctttcttttcattgacaacacctacacccacctgttttccagtgttcttctctctaaacagcaaagccaaagcactctgcacaccaaatcacctgttcagaggtttatgcatgagcatatttcttttaggccgtggtgaagttgataaaccacccctgctttgtaacaaaattattttaaagtgactggaattatctagtccccagattgatcatctcccctggcaacgtgactctgttttttgtgtgtgtttccatgctgactagtcccctactgttaatatcactactaattaggctataaccaggtctttcctggcctgagaaatattctcttaaaatgacctttgttttaatctcattcatgatgttgattttttttcaatgtggtgcaatatatacaataaaatttgtcataactattttaagtgtacagttcagtatattacatatgttcataagttgtacaaccatcaccaccatccatcttcagaattattttcatcttatacaattgaaactgtattcattaaacaataactgtctattccctcttttccccagcctctggcaaccaccattctgcttcatgacattgattttattcacttaacatcagattttggggggatgccctctctcctatgtatggtctacacattctgattttttttttagattgaataaaatttgtaaatcattattttcatttcataagt

SEQ ID NO: 442776 - DNA, 3474 bp, Homo sapiens
aaaaactgatgaaggaaattgaagaagacacaaataaatggaaaggtatcctatgttcatggattggaaggattaatattattaaaatgttcatgctgcccaaagcactatatagattcagtgcattccctccaaaatttttaaatttaatgacatttttcacgaaagcagaaaaaataatttttaaatatacatatttcagaatacattgttcacaataaagatatatgattttttgtcagttaaaagttaatttttttaaaaagatacctatagcctcttattgaggtggaatctgttgctcttggagctacgtactgttgactttggttttctggaaacatcagtgctatttagaacattaggatatttttctttttgaatatcaacaaaaacataaataaaaatactagtaatgacatttacagtatgtttcacagattaatcacatctctgagtgggagtctttatctgttgtaggatctactcttgccattctattctgggttttggttgattagtctttcttgaacacttccagaaattggagatgtatgcctgccttaggtagcctagcttattttattaatgaacatatccatttaaaaatttcttcctggtaatgagtctaaacttgccttcctgtaatttgtatccactggtcctttttctttgttctccctcttgcatatgccagtacttcaatagctggtcccagctccattgacgccctctctcaggatcacacatcacaggtccttcagaatctcctaatggtctctctgatctccaggcaacacactactctaacctttctatgcttttctggcctgcagttcatttctgttcctgtgaagtcatagagcccgcaattcatgctgtcttgttcccctattaaaatatatttttgtaaatctctttaggattcgtgaagttttttggaaacctggctgtcatggatagtcctcaacagatctgtgagcgttatcctatctttgtggaaaaagtctttgaaatgatagaaagtcaggaccccactatgattggtgtagctgtagacacagttggaatcttgggatccaatgttgaaggaaaacaggttttacagaaaacaggaactcgctttgaacgcttgcttatgagaataggacatcaatcaaagaatgccccagtggagctaaaaattagatgtttggatgcaatttcatctcttctgtacttaccacctgagcagcagactgatgaccttctgaggatgacagaatcctggttttcttctttatctcgggatccactggagctcttccgtggcattagtagtcagcccttccctgaactacactgtgctgccttaaaagtgtttacggccattgcaaaccaaccctgggctcagaaacttatgtttaacagtccaggttttgtagaatatgtggtggaccggtctgtggagcatgacaaagcttcaaaggatgccaaatatgaactagtgaaagcacttgccaattccaagacaattgcagaaatctttgggaacccaaattatttgaggctcagaacttacctgagtgaagggccatactatgtgaaacctgtttccacgacagcagtagaaggagccgaatgatttcttctagagctcatgtagaggaccacgttttgaccaaaacttctcctaaggcatttgactccatctatatttcacaaaagagacttcctttccccaagaattatcatggaatgtcagatgttactttgttaccaacactgttatatttctacattgaaatgcaaagtggaactaggagtttggaatgcattaagagcagacaagcttggtcataatagatccagtgtttttcagattcctttcactgccttaatctttgcaacagggtggaagtttttttcttccctcaaaattttcatggacatgcaatcttatctaaaagcctgcttcagggctgggcgcggtggctaacacctataattcccagcactttgggaggccaagatgggcaaatcacttgagtctaggagttcaagaccagcctggccaatatggcaaaaccctgtctctactaaaaatataaaatcagccaggcatggtggcgcacacctataatctcagctactcaggaggctgaggcacgagaatcgcttgagcctgggaggcagaggttgcagtgagctgagatcttgccactgcacaccagcctgggcaacacagcaagactctgtctcaaaaataaatgaataaaataaaaacctgccaccaaattatttctggattctcttcactatctttttttttctttttggtcctttttccatttctgattccactttcaaagtcttggatatattctttgaaaaatgagtagtatggaatattaagattatgttccttatactcagaatactttttatgagctctcttgtttttttgttactattattcctttgaaaaaaagacaaaatatctaaaaaatgtttatagtgttcatgtaattttttttgctgtttaccaatgaactttgccctgttgtggttttgggggatcagaaggattcctaaactgtcatttcatttattggtaggtcatgattgctgagggttttgctttggatttttcatacctataaagtcaatcttgagttgatcagagaaagggaaacttactcctaataaacagactcagaacagaagggacatatgcataaatcaggataccatctcattaatttacaaaggataatctttcttttcattgacaacacctacacccacctgttttccagtgttcttctctctaaacagcaaagccaaagcactctgcacaccaaatcacctgttcagaggtttatgcatgagcatatttcttttaggccgtggtgaagttgataaaccacccctgctttgtaacaaaattattttaaagtgactggaattatctagtccccagattgatcatctcccctggcaacgtgactctgttttttgtgtgtgtttccatgctgactagtcccctactgttaatatcactactaattaggctataaccaggtctttcctggcctgagaaatattctcttaaaatgacctttgttttaatctcattcatgatgttgattttttttcaatgtggtgcaatatatacaataaaatttgtcataactattttaagtgtacagttcagtatattacatatgttcataagttgtacaaccatcaccaccatccatcttcagaattattttcatcttatacaattgaaactgtattcattaaacaataactgtctattccctcttttccccagcctctggcaaccaccattctgcttcatgacattgattttattcacttaacatcagattttggggggatgccctctctcctatgtatggtctacacattctgattttttttttagattgaataaaatttgtaaatcattattttcatttcataagt

SEQ ID NO: 442777 - DNA, 1633 bp, Homo sapiens
cccctgtcttataatacaatctatacactaaggataagaaatctgtgtctgtgatataagttaccaataattttcctcagatgtcatcttttgcttgtttttcataagaacttattcttagccaggcatggtggctcacgcctgtaatcccagcactttgggaggccaaggcaggtggatcacctgaggtcaggagttcgagaccagcctggccaaaatggtgaaaccccatctctactaaaaatacaaaaattagctgggcgtggtggcaggcacctgtaatcccagctatcaggaggctgaggcacgagaatcgcttgagcctgggaggcagaggttgcagtgagctgagatcttgccactgcacaccagcctgggcaacacagcaagactctgtctcaaaaataaatgaataaaataaaaacctgccaccaaattatttctggattctcttcactatctttttttttctttttggtcctttttccatttctgattccactttcaaagtcttggatatattctttgaaaaatgagtagtatggaatattaagattatgttccttatactcagaatactttttatgagctctcttgtttttttgttactattattcctttgaaaaaaagacaaaatatctaaaaaatgtttatagtgttcatgtaattttttttgctgtttaccaatgaactttgccctgttgtggttttgggggatcagaaggattcctaaactgtcatttcatttattggtaggtcatgattgctgagggttttgctttggatttttcatacctataaagtcaatcttgagttgatcagagaaagggaaacttactcctaataaacagactcagaacagaagggacatatgcataaatcaggataccatctcattaatttacaaaggataatctttcttttcattgacaacacctacacccacctgttttccagtgttcttctctctaaacagcaaagccaaagcactctgcacaccaaatcacctgttcagaggtttatgcatgagcatatttcttttaggccgtggtgaagttgataaaccacccctgctttgtaacaaaattattttaaagtgactggaattatctagtccccagattgatcatctcccctggcaacgtgactctgttttttgtgtgtgtttccatgctgactagtcccctactgttaatatcactactaattaggctataaccaggtctttcctggcctgagaaatattctcttaaaatgacctttgttttaatctcattcatgatgttgattttttttcaatgtggtgcaatatatacaataaaatttgtcataactattttaagtgtacagttcagtatattacatatgttcataagttgtacaaccatcaccaccatccatcttcagaattattttcatcttatacaattgaaactgtattcattaaacaataactgtctattccctcttttccccagcctctggcaaccaccattctgcttcatgacattgattttattcacttaacatcagattttggggggatgccctctctcctatgtatggtctacacattctgattttttttttagattgaataaaatttgtaaatcattattttcatttcataagt

SEQ ID NO: 442778 - DNA, 1160 bp, Homo sapiens
aactagttccatacctactcagtttttcaaagaatatatccaagactttgaaagtggaatcagaaatggaaaaaggaccaaaaagaaaaaaaagatagtgaagagaatccagaaataatttggtggcaggtttttatattattcctttgaaaaaaagacaaaatatctaaaaaatgtttatagtgttcatgtaattttttttgctgtttaccaatgaactttgccctgttgtggttttgggggatcagaaggattcctaaactgtcatttcatttattggtaggtcatgattgctgagggttttgctttggatttttcatacctataaagtcaatcttgagttgatcagagaaagggaaacttactcctaataaacagactcagaacagaagggacatatgcataaatcaggataccatctcattaatttacaaaggataatctttcttttcattgacaacacctacacccacctgttttccagtgttcttctctctaaacagcaaagccaaagcactctgcacaccaaatcacctgttcagaggtttatgcatgagcatatttcttttaggccgtggtgaagttgataaaccacccctgctttgtaacaaaattattttaaagtgactggaattatctagtccccagattgatcatctcccctggcaacgtgactctgttttttgtgtgtgtttccatgctgactagtcccctactgttaatatcactactaattaggctataaccaggtctttcctggcctgagaaatattctcttaaaatgacctttgttttaatctcattcatgatgttgattttttttcaatgtggtgcaatatatacaataaaatttgtcataactattttaagtgtacagttcagtatattacatatgttcataagttgtacaaccatcaccaccatccatcttcagaattattttcatcttatacaattgaaactgtattcattaaacaataactgtctattccctcttttccccagcctctggcaaccaccattctgcttcatgacattgattttattcacttaacatcagattttggggggatgccctctctcctatgtatggtctacacattctgattttttttttagattgaataaaatttgtaaatcattattttcatttcataagt

SEQ ID NO: 442779 - DNA, 1759 bp, Homo sapiens
agggacaaggaggctgtgatcagatctcgcgaggttcaggaaagcgccccgggaactgggccgctgggccagcccctgcgtcggggggcaagatggcagcccaggctttggcgctgctgagagaggtagcgaggctggaagcgccgctggaggagctacgcgcgcttcactccgtgctgcaggcagtgccgctcaacgagcttcgccagcaagcggcggagctgcgcctcggcccgctcttctccctgcttaacgagaaccatagggaaaagactactttgtgtgtatccattctggagagattgctccaagctatggaaccggttcacgtggcccggaacctcagggttgacctgcagaggggactaattcaccctgatgattctgtaaaaatcctcactctttcccagattggaagaattgttgaaaattctgatgctgttactgagattctaaataatgctgaattactaaaacaaattgtttattgcattggtggagagaatctatctgtagcaaaagcggctatcaaatccctgtcaagaatatcactaacccaagctggactggaggctttatttgaaagcaatctgctggatgatttgaaaagtgtaatgaaaacaaatgacattgttcgatacagggtgtatgagctaattatagagatttcttccgtgtcaccagaatctttaaactactgtaccacaagtggattggtaacccagctcctgagagagctgactggtgaggatgtgttggtcagagccacctgtatagaaatggtgacatcactggcatatactcatcatgggcgacaatatcttgctcaagaaggagtaattgaccaaatttctaatataattgttggggcagattcagaccctttctctagcttctatctgccaggattcgtgaagttttttggaaacctggctgtcatggatagtcctcaacagatctgtgagcgttatcctatctttgtggaaaaagtctttgaaatgatagaaagtcaggaccccactatgattggtgtagctgtagacacagttggaatcttgggatccaatgttgaaggaaaacaggttttacagaaaacaggttggtatgacttggccctgttcagggatatcttaatctttgacaggggttcaatatgtaagttcatttgctggtgggttaactacattgtagaaactattttatgggtggcagtcttgttaaccatgaccttgtactcatgtctgaaaatctaataattattacggaaaacctttttttttttttttttgacttttcactggtttaggttttcattggtttaggtttctaccaatcgatttcaaccaaacattgtttcctgtttcccctctatgatgtcttctttgactagatttcatggtacaaagaccacgggctagagtcagaaaggtctggattcatgtccttgggttttctattctttttttttttttttttttttttaagagattgagagtgtctctctgttacccaggctggccccgaactcccgggctcaagcaatcctcctgcctcatcctcttgattggctgggtctacaggtccacaccattgtatccagccctgactttgctttttgaacttcatttactcacttcacttttctaggcctcattttcttcatttataaaaatggcataacaactgcttctcagggttgttgtgaatatttatgaaatttagagaaaggaactgaggatcctgtagagtcacctcagca

SEQ ID NO: 442780 - DNA, 966 bp, Homo sapiens
agggacaaggaggctgtgatcagatctcgcgaggttcaggaaagcgccccgggaactgggccgctgggccagcccctgcgtcggggggcaagatggcagcccaggctttggcgctgctgagagaggtagcgaggctggaagcgccgctggaggagctacgcgcgcttcactccgtgctgcaggcagtgccgctcaacgagcttcgccagcaagcggcggagctgcgcctcggcccgctcttctccctgcttaacgagaaccatagggaaaagactactttgtgtgtatccattctggagagattgctccaagctatggaaccggttcacgtggcccggaacctcagggttgacctgcagaggggactaattcaccctgatgattctgtaaaaatcctcactctttcccagattggaagaattgttgaaaattctgatgctgttactgagattctaaataatgctgaattactaaaacaaattgtttattgcattggtggagagaatctatctgtagcaaaagcggctatcaaatccctgtcaagaatatcactaacccaagctggactggaggctttatttgaaagcaatctgctggatgatttgaaaagtgtaatgaaaacaaatgacattgttcgatacagggtgtatgagagccacctgtatagaaatggtgacatcactggcatatactcatcatgggcgacaatatcttgctcaagaaggagtaattgaccaaatttctaatataattgttggggcagattcagaccctttctctagcttctatctgccaggtaaggaacactgatgcctatggaaatgatggtgcgtgttttatttctgagttatctctgacatcagggggttggggtagggagtggacagggattgttttcctttagagctgatttccttaatgagctgatttcgtttagaagatatctagagcaaccaagttcaaatt

SEQ ID NO: 442781 - DNA, 364 bp, Homo sapiens
gagtgaaagctgctgtttcaaaaagaagtctgtgtggaggagacgctgacgcaagcttcagctattattaggttgttacttcctacctgggcaggatatgaactaataagatttatgatgtctccttcagggaaaagactactttgtgtgtatccattctggagagattgctccaagctatggaaccggttcacgtggcccggaacctcagggttgacctgcagaggggactaattcaccctgatgattctgtaaaaatcctcactctttcccaggtatgaaattctactaggaaccgacattgaccacctgctctgggccaggttctgcactgggacagaaagatgaagaaagcacagtattt

SEQ ID NO: 442782 - DNA, 336 bp, Homo sapiens
ggaattattgtttgatggatacagagtttcagtttgggttgatgaaaaagttctagagatggatggttatgatggttgcccaacagtgtgaatgtacttaatagcactgaactatacactaaaaatggttaaaatggtaaattttatgttgtgtatattttaccataataaagaagaatctcactgttatccttcaaaggaactcgctttgaacgcttgcttatgagaataggacatcaatcaaagaatgccccagtggagctaaaaattagatgtttggatgcaatttcatctcttctgtacttaccagtaagtaggtagggaaataatgaagga

SEQ ID NO: 442783 - DNA, 1194 bp, Homo sapiens
  misc_feature (974)..(974): n is a, c, g, or t
  misc_feature (1084)..(1084): n is a, c, g, or t
  misc_feature (1090)..(1090): n is a, c, g, or t
agggacaaggaggctgtgatcagatctcgcgaggttcaggaaagcgccccgggaactgggccgctgggccagcccctgcgtcggggggcaagatggcagcccaggctttggcgctgctgagagaggtagcgaggctggaagcgccgctggaggagctacgcgcgcttcactccgtgctgcaggcagtgccgctcaacgagcttcgccagcaagcggcggagctgcgcctcggcccgctcttctccctgcttaacgagaaccatagggaaaagactactttgtgtgtatccattctggagagattgctccaagctatggaaccggttcacgtggcccggaacctcagggttgacctgcagaggggactaattcaccctgatgattctgtaaaaatcctcactctttcccagattggaagaattgttgaaaattctgatgctgttactgagattctaaataatgctgaattactaaaacaaattgtttattgcattggtggagagaatctatctgtagcaaaagcggctatcaaatccctgtcaagaatatcactaacccaagctggactggaggctttatttgaaagcaatctgctggatgatttgaaaagtgtaatgaaaacaaatgacattgttcgatacagggtgtatgagctaattatagagatttcttccgtgtcaccagaatctttaaactactgtaccacaagtggattggtaacccagctcctgagagagctgactggtgaggatgtgttggtcagagccacctgtatagaaatggtgacatcactggcatatactcatcatgggcgacaatatcttgctcaagaaggagtaattgaccaaatttctaatataattgttggggcagattcagaccctttctctagcttctatctgccagaatcgtgaagttttttgaaccttgctgcattgtaagtcttacagatctggagcgtaatctatctttgnggaaaagtcttggaatgattgaagtatgacccactttattgtgtgacttagaccaactgggatcttgaatccatgttacggaaccggttttcacgaaacaggactactcnaaactntcgtttagaattggacttaattaagaatgcccacggggctaacttttgagagaacaaactcgcttttcttatattggaccatgagctctccggcatatagtact

SEQ ID NO: 442784 - DNA, 3404 bp, Homo sapiens
agggacaaggaggctgtgatcagatctcgcgaggttcaggaaagcgccccgggaactgggccgctgggccagcccctgcgtcggggggcaagatggcagcccaggctttggcgctgctgagagaggtagcgaggctggaagcgccgctggaggagctacgcgcgcttcactccgtgctgcaggcagtgccgctcaacgagcttcgccagcaagcggcggagctgcgcctcggcccgctcttctccctgcttaacgagaaccatagggaaaagactactttgtgtgtatccattctggagagattgctccaagctatggaaccggttcacgtggcccggaacctcagggttgacctgcagaggggactaattcaccctgatgattctgtaaaaatcctcactctttcccagattggaagaattgttgaaaattctgatgctgttactgagattctaaataatgctgaattactaaaacaaattgtttattgcattggtggagagaatctatctgtagcaaaagcggctatcaaatccctgtcaagaatatcactaacccaagctggactggaggctttatttgaaagcaatctgctggatgatttgaaaagtgtaatgaaaacaaatgacattgttcgatacagggtgtatgagctaattatagagatttcttccgtgtcaccagaatctttaaactactgtaccacaagtggattggtaacccagctcctgagagagctgactggtgaggatgtgttggtcagagccacctgtatagaaatggtgacatcactggcatatactcatcatgggcgacaatatcttgctcaagaaggagtaattgaccaaatttctaatataattgttggggcagattcagaccctttctctagcttctatctgccaggattcgtgaagttttttggaaacctggctgtcatggatagtcctcaacagatctgtgagcgttatcctatctttgtggaaaaagtctttgaaatgatagaaagtcaggaccccactatgattggtgtagctgtagacacagttggaatcttgggatccaatgttgaaggaaaacaggttttacagaaaacaggaactcgctttgaacgcttgcttatgagaataggacatcaatcaaagaatgccccagtggagctaaaaattagatgtttggatgcaatttcatctcttctgtacttaccacctgagcagcagactgatgaccttctgaggatgacagaatcctggttttcttctttatctcgggatccactggagctcttccgtggcattagtagtcagcccttccctgaactacactgtgctgccttaaaagtgtttacggccattgcaaaccaaccctgggctcagaaacttatgtttaacagtccaggttttgtagaatatgtggtggaccggtctgtggagcatgacaaagcttcaaaggatgccaaatatgaactagtgaaagcacttgccaattccaagacaattgcagaaatctttgggaacccaaattatttgaggctcagaacttacctgagtgaagggccatactatgtgaaacctgtttccacgacagcagtagaaggagccgaatgatttcttctagagctcatgtagaggaccacgttttgaccaaaacttctcctaaggcatttgactccatctatatttcacaaaagagacttcctttccccaagaattatcatggaatgtcagatgttactttgttaccaacactgttatatttctacattgaaatgcaaagtggaactaggagtttggaatgcattaagagcagacaagcttggtcataatagatccagtgtttttcagattcctttcactgccttaatctttgcaacagggtggaagtttttttcttccctcaaaattttcatggacatgcaatcttatctaaaagcctgcttcagggctgggcgcggtggctaacacctataattcccagcactttgggaggccaagatgggcaaatcacttgagtctaggagttcaagaccagcctggccaatatggcaaaaccctgtctctactaaaaatataaaatcagccaggcatggtggcgcacacctataatctcagctactcaggaggctgaggcacgagaatcgcttgagcctgggaggcagaggttgcagtgagctgagatcttgccactgcacaccagcctgggcaacacagcaagactctgtctcaaaaataaatgaataaaataaaaacctgccaccaaattatttctggattctcttcactatctttttttttctttttggtcctttttccatttctgattccactttcaaagtcttggatatattctttgaaaaatgagtagtatggaatattaagattatgttccttatactcagaatactttttatgagctctcttgtttttttgttactattattcctttgaaaaaaagacaaaatatctaaacctgttgtggttttgggggatcagaaggattcctaaactgtcatttcatttattggtaggtcatgattgctgagggttttgctttggatttttcatacctataaagtcaatcttgagttgatcagagaaagggaaacttactcctaataaacagactcagaacagaagggacatatgcataaatcaggataccatctcattaatttacaaaggataatctttcttttcattgacaacacctacacccacctgttttccagtgttcttctctctaaacagcaaagccaaagcactctgcacaccaaatcacctgttcagaggtttatgcatgagcatatttcttttaggccgtggtgaagttgataaaccacccctgctttgtaacaaaattattttaaagtgactggaattatctagtccccagattgatcatctcccctggcaacgtgactctgttttttgtgtgtgtttccatgctgactagtcccctactgttaatatcactactaattaggctataaccaggtctttcctggcctgagaaatattctcttaaaatgacctttgttttaatctcattcatgatgttgattttttttcaatgtggtgcaatatatacaataaaatttgtcataactattttaagtgtacagttcagtatattacatatgttcataagttgtacaaccatcaccaccatccatcttcagaattattttcatcttatacaattgaaactgtattcattaaacaataactgtctattccctcttttccccagcctctggcaaccaccattctgcttcatgacattgattttattcacttaacatcagattttggggggatgccctctctcctatgtatggtctacacattctgattttttttttagattgaataaaatttgtaaatcattattttcatttcataagt

SEQ ID NO: 442785 - DNA, 3451 bp, Homo sapiens
agggacaaggaggctgtgatcagatctcgcgaggttcaggaaagcgccccgggaactgggccgctgggccagcccctgcgtcggggggcaagatggcagcccaggctttggcgctgctgagagaggtagcgaggctggaagcgccgctggaggagctacgcgcgcttcactccgtgctgcaggcagtgccgctcaacgagcttcgccagcaagcggcggagctgcgcctcggcccgctcttctccctgcttaacgagaaccatagggaaaagactactttgtgtgtatccattctggagagattgctccaagctatggaaccggttcacgtggcccggaacctcagggttgacctgcagaggggactaattcaccctgatgattctgtaaaaatcctcactctttcccagattggaagaattgttgaaaattctgatgctgttactgagattctaaataatgctgaattactaaaacaaattgtttattgcattggtggagagaatctatctgtagcaaaagcggctatcaaatccctgtcaagaatatcactaacccaagctggactggaggctttatttgaaagcaatctgctggatgatttgaaaagtgtaatgaaaacaaatgacattgttcgatacagggtgtatgagctaattatagagatttcttccgtgtcaccagaatctttaaactactgtaccacaagtggattggtaacccagctcctgagagagctgactggtgaggatgtgttggtcagagccacctgtatagaaatggtgacatcactggcatatactcatcatgggcgacaatatcttgctcaagaaggagtaattgaccaaatttctaatataattgttggggcagattcagaccctttctctagcttctatctgccaggattcgtgaagttttttggaaacctggctgtcatggatagtcctcaacagatctgtgagcgttatcctatctttgtggaaaaagtctttgaaatgatagaaagtcaggaccccactatgattggtgtagctgtagacacagttggaatcttgggatccaatgttgaaggaaaacaggttttacagaaaacaggaactcgctttgaacgcttgcttatgagaataggacatcaatcaaagaatgccccagtggagctaaaaattagatgtttggatgcaatttcatctcttctgtacttaccacctgagcagcagactgatgaccttctgaggatgacagaatcctggttttcttctttatctcgggatccactggagctcttccgtggcattagtagtcagcccttccctgaactacactgtgctgccttaaaagtgtttacggccattgcaaaccaaccctgggctcagaaacttatgtttaacagtccaggttttgtagaatatgtggtggaccggtctgtggagcatgacaaagcttcaaaggatgccaaatatgaactagtgaaagcacttgccaattccaagacaattgcagaaatctttgggaacccaaattatttgaggctcagaacttacctgagtgaagggccatactatgtgaaacctgtttccacgacagcagtagaaggagccgaatgatttcttctagagctcatgtagaggaccacgttttgaccaaaacttctcctaaggcatttgactccatctatatttcacaaaagagacttcctttccccaagaattatcatggaatgtcagatgttactttgttaccaacactgttatatttctacattgaaatgcaaagtggaactaggagtttggaatgcattaagagcagacaagcttggtcataatagatccagtgtttttcagattcctttcactgccttaatctttgcaacagggtggaagtttttttcttccctcaaaattttcatggacatgcaatcttatctaaaagcctgcttcagggctgggcgcggtggctaacacctataattcccagcactttgggaggccaagatgggcaaatcacttgagtctaggagttcaagaccagcctggccaatatggcaaaaccctgtctctactaaaaatataaaatcagccaggcatggtggcgcacacctataatctcagctactcaggaggctgaggcacgagaatcgcttgagcctgggaggcagaggttgcagtgagctgagatcttgccactgcacaccagcctgggcaacacagcaagactctgtctcaaaaataaatgaataaaataaaaacctgccaccaaattatttctggattctcttcactatctttttttttctttttggtcctttttccatttctgattccactttcaaagtcttggatatattctttgaaaaatgagtagtatggaatattaagattatgttccttatactcagaatactttttatgagctctcttgtttttttgttactattattcctttgaaaaaaagacaaaatatctaaaaaatgtttatagtgttcatgtaattttttttgctgtttaccaatgaactttgccctgttgtggttttgggggatcagaaggattcctaaactgtcatttcatttattggtaggtcatgattgctgagggttttgctttggatttttcatacctataaagtcaatcttgagttgatcagagaaagggaaacttactcctaataaacagactcagaacagaagggacatatgcataaatcaggataccatctcattaatttacaaaggataatctttcttttcattgacaacacctacacccacctgttttccagtgttcttctctctaaacagcaaagccaaagcactctgcacaccaaatcacctgttcagaggtttatgcatgagcatatttcttttaggccgtggtgaagttgataaaccacccctgctttgtaacaaaattattttaaagtgactggaattatctagtccccagattgatcatctcccctggcaacgtgactctgttttttgtgtgtgtttccatgctgactagtcccctactgttaatatcactactaattaggctataaccaggtctttcctggcctgagaaatattctcttaaaatgacctttgttttaatctcattcatgatgttgattttttttcaatgtggtgcaatatatacaataaaatttgtcatactgaaaaaaaaaaaaaagaaaaaatggtgcggcgcccgagcctcagaaaaatgtcttttagacatcgtttgggcgcgggcccatgagtaatgtacattggccaacgctgtccaaggagccctggctgcatggggggtcccccataaaacgcgggggcaccgggtctgacatccagggtcggggctccgcgctcaccgggcacgcgaccccccccgccctgatgagaaaaagacgaagaagaaaaaaagcaggagaaaagagaggcacaaaaaaaacataaaacacacaaaaagag

SEQ ID NO: 442786 - DNA, 1642 bp, Homo sapiens
agggacaaggaggctgtgatcagatctcgcgaggttcaggaaagcgccccgggaactgggccgctgggccagcccctgcgtcggggggcaagatggcagcccaggctttggcgctgctgagagaggtagcgaggctggaagcgccgctggaggagctacgcgcgcttcactccgtgctgcaggcagtgccgctcaacgagcttcgccagcaagcggcggagctgcgcctcggcccgctcttctccctgcttaacgagaaccatagggaaaagactactttgtgtgtatccattctggagagattgctccaagctatggaaccggttcacgtggcccggaacctcagggttgacctgcagaggggactaattcaccctgatgattctgtaaaaatcctcactctttcccagattggaagaattgttgaaaattctgatgctgttactgagattctaaataatgctgaattactaaaacaaattgtttattgcattggtggagagaatctatctgtagcaaaagcggctatcaaatccctgtcaagaatatcactaacccaagctggactggaggctttatttgaaagcaatctgctggatgatttgaaaagtgtaatgaaaacaaatgacattgttcgatacagggtgtatgagctaattatagagatttcttccgtgtcaccagaatctttaaactactgtaccacaagtggattggtaacccagctcctgagagagctgactggtgaggatgtgttggtcagagccacctgtatagaaatggtgacatcactggcatatactcatcatgggcgacaatatcttgctcaagaaggagtaattgaccaaatttctaatataattgttggggcagattcagaccctttctctagcttctatctgccaggattcgtgaagttttttggaaacctggctgtcatggatagtcctcaacagatctgtgagcgttatcctatctttgtggaaaaagtctttgaaatgatagaaagtcaggaccccactatgattggtgtagctgtagacacagttggaatcttgggatccaatgttgaaggaaaacaggttttacagaaaacaggaactcgctttgaacgcttgcttatgagaataggacatcaatcaaagaatgccccagtggagctaaaaattagatgtttggatgcaatttcatctcttctgtacttaccacctgagcagcagactgatgaccttctgaggatgacagaatcctggttttcttctttatctcgggatccactggagctcttccgtggcattagtagtcagcccttccctgaactacactgtgctgccttaaaagtgtttacgggaaggaaacacctgcatcttgaagaactagtaggaggcaatcaagtgaagaatacagtggagtagcaaagcaagacagcaggtacacatgaaaacaagagaacatgtttgagaaactacaagtaattcaatatgaccaacgcctaggatttaaagggaaatttttgcaaaattctttatcattattactaataatagctaccatttcttagcattgattttatgttaggcacttggcatgcatttcttactttatcatcataatagccataaaagttacgtatcatttcaca

SEQ ID NO: 442787 - DNA, 251 bp, Homo sapiens
atgatattattactcaacgactatcgcttttaatatagttgttggggccttaatgatgacgagcatgagtggatcacccgtacctgtcgaaagggctaggatgagatcgtgggtcacaggcccgagccgtgaactctgtggctgcctccaccagaggtttccatctgccctactagcattggctgccctgggggacgggctgtagttctagaacctgattttaactcaggaataaagactttctgcggtca

SEQ ID NO: 442788 - DNA, 528 bp, Homo sapiens
gccatggagtacacagggagcaaatatatcggggaatatgtagatgggaggatggagggcaaagcaagtacatcctccctaccgaaacaatatatgttggggaaatgaaggatggcatgtttcacggcgagggaaccctgtacttccccagcggaagccaatacgacgccatttgggaaaacggattggccataaaggtatggctcaactcaccaatatggacccacctagaaaaatccccaagggctattacgattgtggagacggcttctataacccagtcacgagggtagtcaaggactataggaaccgctttctaagaaacgcagatgatgacgagcatgagtggatcacccgtacctgtcgaaagggctaggatgagatcgtgggtcacaggcccgagccgtgaactctgtggctgcctccaccagaggtttccatctgccctactagcattggctgccctgggggacgggctgtagttctagaacctgattttaactcaggaataaagactttctgcggtca

SEQ ID NO: 442789 - DNA, 624 bp, Homo sapiens
tgtgagaggtctgaacagtgatgtccagttcaaggatggagggcaaagcaagtacatcctccctaccgaaacaatatatgttggggaaatgaaggatggcatgtttcacggcgagggaaccctgtacttccccagcggaagccaatacgacgccatttgggaaaacggattggccataaagggcacatatacgttctcagatgggctgcactatgatgagaaaaactggcattactgcgacggctatgatcggaggttttacacagagatcctcaatggcttgaagcctgcaggtatggctcaactcaccaatatggacccacctagaaaaatccccaagggctattacgattgtggagacggcttctataacccagtcacgagggtagtcaaggactataggaaccgctttctaagaaacgcagatgatgacgagcatgagtggatcacccgtacctgtcgaaagggctaggatgagatcgtgggtcacaggcccgagccgtgaactctgtggctgcctccaccagaggtttccatctgccctactagcattggctgccctgggggacgggctgtagttctagaacctgattttaactcaggaataaagactttctgcggtca

SEQ ID NO: 442790 - DNA, 640 bp, Homo sapiens
gccatggagtacacagggagcaaatatatcggggaatatgtagatgggaggatggagggcaaagcaagtacatcctccctaccgaaacaatatatgttggggaaatgaaggatggcatgtttcacggcgagggaaccctgtacttccccagcggaagccaatacgacgccatttgggaaaacggattggccataaagggcacatatacgttctcagatgggctgcactatgatgagaaaaactggcattactgcgacggctatgatcggaggttttacacagagatcctcaatggcttgaagcctgcaggtatggctcaactcaccaatatggacccacctagaaaaatccccaagggctattacgattgtggagacggcttctataacccagtcacgagggtagtcaaggactataggaaccgctttctaagaaacgcagatgatgacgagcatgagtggatcacccgtacctgtcgaaagggctaggatgagatcgtgggtcacaggcccgagccgtgaactctgtggctgcctccaccagaggtttccatctgccctactagcattggctgccctgggggacgggctgtagttctagaacctgattttaactcaggaataaagactttctgcggtca

SEQ ID NO: 442791 - DNA, 556 bp, Homo sapiens
tgtgagaggtctgaacagtgatgtccagttcaaggatggagggcaaagcaagtacatcctccctaccgaaacaatatatgttggggaaatgaaggatggcatgtttcacggcgagggaaccctgtacttccccagcggaagccaatacgacgccatttgggaaaacggattggccataaagggcacatatacgttctcagatgggctgcactatgatgagaaaaactggcattactgcgacggctatgatcggaggttttacacagagatcctcaatggcttgaagcctgcaggtatggctcaactcaccaatatggacccacctagaaaaatccccaagggctattacgattgtggagacggcttctataacccagtcacgagggtagtcaaggactataggaaccgctttctaagaaacgcaggtaggtttcttccgacactgcagcacgttttctcttcacccacatatgagtatgtgcatctgtatgtacaaatgtatgcacacacttgatgagaaagaagcttttgctgatagaagatgaaagttgattac

SEQ ID NO: 442792 - DNA, 807 bp, Homo sapiens
attagattcactttggtctgcagtcctgcgtctcctggttagccttgtcgagtattgtgtggtagaatattatgcatatgtttaaagaatcatattttctaagattatttggaagcatgtttggtaatgtcaagtggagtaccccagatacattttagacatttatcgtcatcatctgctctgagtggaaggccgttcagagaggctagaggttcttattctggctataaattatgtgagtaaaattgtgctaaccagttaaaagtactgtacacccatgctcaatatatagtcctggaaatagcaattgaaacatgtcttctcacaagagaaaatgacagttttaatgatgtatttgatgaatttaaactttaagtcaggtgctgcaaattggaaagaagacttgtggtgttttaagttgctgtggacacttttaagaaacttagaacccatggaacccttgtttatcgccatgcaaattacaatcttgaatgagtgttttttaaaaataaagtattagaaaaatgtgtagtaaagatgtaaaattaaaaaatggaattctccattaactgtggattttactaaatagaattactggtgaagcagatttatccatcgagactatctggtatgcgttatgtatgtagtctgttgctgctgaaagatgtctgtgtgcctgtatcaacatgtgacttcatgtaaagtttctttgtgttcacagttcttagcaaatgcagttacaatccatagatagccagcagtggatgttactccaggaaaatgcaggattaaaattgtccttgtgta

SEQ ID NO: 442793 - DNA, 2786 bp, Homo sapiens
attgtctcgcgggagcgctgctggcggtcgggcgctcgggcggccctggccggggagacgagttgcatgtgttggttcagctggcgatagcggcgggagcggagccggcggggcctgtgcgaccgcctgggtttgtgaaatggctgctgacatttctgaatccagcggggctgactgcaaaggagacccaaggaacagtgccaagttagatgccgattacccacttcgagtcctttattgtggagtctgttcattaccaacagagtactgtgaatatatgcctgatgttgctaaatgtagacaatggttagagaagaattttccaaatgaatttgcaaaacttactgtagaaaattcacccaaacaagaagctggaattagtgagggtcaaggaacagcaggggaagaagaggagaagaaaaaacagaagagaggtggaaggggtcaaataaaacaaaaaaagaagaccgtaccacaaaaggttactatagccaaaattcccagagcaaagaagaaatatgtgacaagagtatgtggccttgcaacttttgaaattgatcttaaagaagcacaaagattttttgctcaaaaattctcctgtggtgcctcagtaacaggggaggatgaaattatcattcagggagattttacagatgacataattgatgtcattcaggaaaaatggccagaggtagatgatgacagcatcgaagatcttggagaagtaaagaagtgaatttgaaaatttgtctgtatttaatggcctgaactgagagttgatatggccaaagggagagaggccttttaaaatatatatatatatacacatatatatgtatatatacacatatatgtatgtatacacatatacacatgtatatatacatgtgtgtatgtatacatgtatatacatatatacatacacatatatgtatacatatatacacatatatgtatacatatatacacatatatgtatatatatgtatacatatatacacatatatgtatacatatatacacatatatgtatacatatatacacacatatatatatattctacagtaaaactgtagactgtcctcgtccttggcattttcactgttctgtacaaggctgcttgtttttttattgccaaagtcaaataaacgggagactgtcatgctcatgcatgaatagaatttagtcaaataaaaaattttggtcatttggtactgactttctctctctctctctctctcttttttttttttgacagagtctcgcactgttgcctgggctggaatgcagtggtgcgatctcggctcactgcaacctccgcctcccgggttcaagtgattctcctgcctcagcctcccaagtaggtgggattacaggcgcccgcaccacgcccagctaatttttgtatttttagtagagatggggtttcactatgttggccaggctggtctcgaactcctgacctcgtgattggcccacctcagcctcccaaagtgctggtattacagatgtgagccaccgcacccagcctgagtttctctttctctctttttaactttattttttgaaaaacccggtagactttgtggggagcatttttgttgataattttactgatctaaagctgagtgattttttaaaagaatttgaatttggcttcctcaccagtaatatgtctccttgcttctttgatgtgatagttttgagatgggtgagaatctaatagatctgtggttgaatttgctgtgttgttatgaagtccaccctgtgggcacaataacataactgttggtaggagttgtttgagctattctggagattatttggtaaagtatactaaaagccttaaaaccatgtatgtgcgctgtttgaaccagtaagccacttctttgacattagaagacattagaagaaataatcagccttgcataaaacttatggatgaaagtattcatcacaatattatttataataaaaaattgcaaatgttataaatgaacaattgggaaatggttaaagaagtgatggtgcattgtgtggtagaatattatgcatatgtttaaagaatcatattttctaagattatttggaagcatgtttggtaatgtcaagtggagtaccccagatacattttagacatttatcgtcatcatctgctctgagtggaaggccgttcagagaggctagaggttcttattctggctataaattatgtgagtaaaattgtgctaaccagttaaaagtactgtacacccatgctcaatatatagtcctggaaatagcaattgaaacatgtcttctcacaagagaaaatgacagttttaatgatgtatttgatgaatttaaactttaagtcaggtgctgcaaattggaaagaagacttgtggtgttttaagttgctgtggacacttttaagaaacttagaacccatggaacccttgtttatcgccatgcaaattacaatcttgaatgagtgttttttaaaaataaagtattagaaaaatgtgtagtaaagatgtaaaattaaaaaatggaattctccattaactgtggattttactaaatagaattactggtgaagcagatttatccatcgagactatctggtatgcgttatgtatgtagtctgttgctgctgaaagatgtctgtgtgcctgtatcaacatgtgacttcatgtaaagtttctttgtgttcacagttcttagcaaatgcagttacaatccatagatagccagcagtggatgttactccaggaaaatgcaggattaaaattgtccttgtgta

SEQ ID NO: 442794 - DNA, 664 bp, Homo sapiens
attgtctcgcgggagcgctgctggcggtcgggcgctcgggcggccctggccggggagacgagttgcatgtgttggttcagctggcgatagcggcgggagcggagccggcggggcctgtgcgaccgcctgggtttgtgaaatggctgctgacatttctgaatccagcggggctgactgcaaaggagacccaaggaacagtgccaagttagatgccgattacccacttcgagtcctttattgtggagttctttttttttctcctagtactgtgaatatatgcctgatgttgctaaatgtagacaatggttagagaagaattttccaaatgaatttgcaaaacttactgtaggtatgaacattttttttcttgcattaaacttctgtacctgagacaaatgcatgtatggcattattctaaagataggaaagtcctcctttagtaggatattacagaattaacatttatctgttagctgtttaagttctctctgagataggataggtctgaatatcaactttcttacataaaaaagtaaatgggccgggcgcagtggctcacacctataatcctagcagtttgggaggctgaggcaggcggatcacaaggtcaggagatcaagatcatcttggctaacacagtgaaaccccatctctactaaaaatg

SEQ ID NO: 442795 - DNA, 2720 bp, Homo sapiens
attgtctcgcgggagcgctgctggcggtcgggcgctcgggcggccctggccggggagacgagttgcatgtgttggttcagctggcgatagcggcgggagcggagccggcggggcctgtgcgaccgcctgggtttgtgaaatggctgctgacatttctgaatccagcggggctgactgcaaaggagacccaaggaacagtgccaagttagatgccgattacccacttcgagtcctttattgtggagtctgttcattaccaacagagtactgtgaatatatgcctgatgttgctaaatgtagacaatggttagagaagaattttccaaatgaatttgcaaaacttactgtagaaaattcacccaaacaagaagctggaattagtgagggtcaaggaacagcaggggaagaagaggagaagaaaaaacagaagagaggtggaaggggtcaaataaaacaaaaaaagaagaccgtaccacaaaaggttactatagccaaaattcccagagcaaagaagaaatatgtgacaagagtatgtggccttgcaacttttgaaattgatcttaaagaagcacaaagattttttgctcaaaaattctcctgtggtgcctcagtaacaggggaggatgaaattatcattcagggagattttacagatgacataattgatgtcattcaggaaaaatggccagaggtagatgatgacagcatcgaagatcttggagaagtaaagaagtgaatttgaaaatttgtctgtatttaatggcctgaactgagagttgatatggccaaagggagagaggccttttaaaatatatatatatatacacatatatatgtatatatacacatatatgtatgtatacacatatacacatgtatatatacatgtgtgtatgtatacatgtatatacatatatacatacacatatatgtatacatatatacacatatatgtatacatatatacacatatatgtatacatatatatatattctacagtaaaactgtagactgtcctcgtccttggcattttcactgttctgtacaaggctgcttgtttttttattgccaaagtcaaataaacgggagactgtcatgctcatgcatgaatagaatttagtcaaataaaaaattttggtcatttggtactgactttctctctctctctctctctcttttttttttttgacagagtctcgcactgttgcctgggctggaatgcagtggtgcgatctcggctcactgcaacctccgcctcccgggttcaagtgattctcctgcctcagcctcccaagtaggtgggattacaggcgcccgcaccacgcccagctaatttttgtatttttagtagagatggggtttcactatgttggccaggctggtctcgaactcctgacctcgtgattggcccacctcagcctcccaaagtgctggtattacagatgtgagccaccgcacccagcctgagtttctctttctctctttttaactttattttttgaaaaacccggtagactttgtggggagcatttttgttgataattttactgatctaaagctgagtgattttttaaaagaatttgaatttggcttcctcaccagtaatatgtctccttgcttctttgatgtgatagttttgagatgggtgagaatctaatagatctgtggttgaatttgctgtgttgttatgaagtccaccctgtgggcacaataacataactgttggtaggagttgtttgagctattctggagattatttggtaaagtatactaaaagccttaaaaccatgtatgtgcgctgtttgaaccagtaagccacttctttgacattagaagacattagaagaaataatcagccttgcataaaacttatggatgaaagtattcatcacaatattatttataataaaaaattgcaaatgttataaatgaacaattgggaaatggttaaagaagtgatggtgcattgtgtggtagaatattatgcatatgtttaaagaatcatattttctaagattatttggaagcatgtttggtaatgtcaagtggagtaccccagatacattttagacatttatcgtcatcatctgctctgagtggaaggccgttcagagaggctagaggttcttattctggctataaattatgtgagtaaaattgtgctaaccagttaaaagtactgtacacccatgctcaatatatagtcctggaaatagcaattgaaacatgtcttctcacaagagaaaatgacagttttaatgatgtatttgatgaatttaaactttaagtcaggtgctgcaaattggaaagaagacttgtggtgttttaagttgctgtggacacttttaagaaacttagaacccatggaacccttgtttatcgccatgcaaattacaatcttgaatgagtgttttttaaaaataaagtattagaaaaatgtgtagtaaagatgtaaaattaaaaaatggaattctccattaactgtggattttactaaatagaattactggtgaagcagatttatccatcgagactatctggtatgcgttatgtatgtagtctgttgctgctgaaagatgtctgtgtgcctgtatcaacatgtgacttcatgtaaagtttctttgtgttcacagttcttagcaaatgcagttacaatccatagatagccagcagtggatgttactccaggaaaatgcaggattaaaattgtccttgtgta

SEQ ID NO: 442796 - DNA, 2600 bp, Homo sapiens
attgtctcgcgggagcgctgctggcggtcgggcgctcgggcggccctggccggggagacgagttgcatgtgttggttcagctggcgatagcggcgggagcggagccggcggggcctgtgcgaccgcctgggtttgtgaaatggctgctgacatttctgaatccagcggggctgactgcaaaggagacccaaggaacagtgccaagttagatgccgattacccacttcgagtcctttattgtggagtctgttcattaccaacagagtactgtgaatatatgcctgatgttgctaaatgtagacaatggttagagaagaattttccaaatgaatttgcaaaacttactgtagaaaattcacccaaacaagaagctggaattagtgagggtcaaggaacagcaggggaagaagaggagaagaaaaaacagaagagaggtggaaggggtcaaataaaacaaaaaaagaagaccgtaccacaaaaggttactatagccaaaattcccagagcaaagaagaaatatgtgacaagagtatgtggccttgcaacttttgaaattgatcttaaagaagcacaaagattttttgctcaaaaattctcctgtggtgcctcagtaacaggggaggatgaaattatcattcagggagattttacagatgacataattgatgtcattcaggaaaaatggccagaggtagatgatgacagcatcgaagatcttggagaagtaaagaagtgaatttgaaaatttgtctgtatttaatggcctgaactgagagttgatatggccaaagggagagaggccttttaaaatatatatatatatacacatatatgtatacatatatacacatatatgtatacatatatatatattctacagtaaaactgtagactgtcctcgtccttggcattttcactgttctgtacaaggctgcttgtttttttattgccaaagtcaaataaacgggagactgtcatgctcatgcatgaatagaatttagtcaaataaaaaattttggtcatttggtactgactttctctctctctctctctctcttttttttttttgacagagtctcgcactgttgcctgggctggaatgcagtggtgcgatctcggctcactgcaacctccgcctcccgggttcaagtgattctcctgcctcagcctcccaagtaggtgggattacaggcgcccgcaccacgcccagctaatttttgtatttttagtagagatggggtttcactatgttggccaggctggtctcgaactcctgacctcgtgattggcccacctcagcctcccaaagtgctggtattacagatgtgagccaccgcacccagcctgagtttctctttctctctttttaactttattttttgaaaaacccggtagactttgtggggagcatttttgttgataattttactgatctaaagctgagtgattttttaaaagaatttgaatttggcttcctcaccagtaatatgtctccttgcttctttgatgtgatagttttgagatgggtgagaatctaatagatctgtggttgaatttgctgtgttgttatgaagtccaccctgtgggcacaataacataactgttggtaggagttgtttgagctattctggagattatttggtaaagtatactaaaagccttaaaaccatgtatgtgcgctgtttgaaccagtaagccacttctttgacattagaagacattagaagaaataatcagccttgcataaaacttatggatgaaagtattcatcacaatattatttataataaaaaattgcaaatgttataaatgaacaattgggaaatggttaaagaagtgatggtgcattgtgtggtagaatattatgcatatgtttaaagaatcatattttctaagattatttggaagcatgtttggtaatgtcaagtggagtaccccagatacattttagacatttatcgtcatcatctgctctgagtggaaggccgttcagagaggctagaggttcttattctggctataaattatgtgagtaaaattgtgctaaccagttaaaagtactgtacacccatgctcaatatatagtcctggaaatagcaattgaaacatgtcttctcacaagagaaaatgacagttttaatgatgtatttgatgaatttaaactttaagtcaggtgctgcaaattggaaagaagacttgtggtgttttaagttgctgtggacacttttaagaaacttagaacccatggaacccttgtttatcgccatgcaaattacaatcttgaatgagtgttttttaaaaataaagtattagaaaaatgtgtagtaaagatgtaaaattaaaaaatggaattctccattaactgtggattttactaaatagaattactggtgaagcagatttatccatcgagactatctggtatgcgttatgtatgtagtctgttgctgctgaaagatgtctgtgtgcctgtatcaacatgtgacttcatgtaaagtttctttgtgttcacagttcttagcaaatgcagttacaatccatagatagccagcagtggatgttactccaggaaaatgcaggattaaaattgtccttgtgta

SEQ ID NO: 442797 - DNA, 2376 bp, Homo sapiens
atcaatatcctgtataccggagatgttgaaagtaaggtgagggtcaaggaacagcaggggaagaagaggagaagaaaaaacagaagagaggtggaaggggtcaaataaaacaaaaaaagaagaccgtaccacaaaaggttactatagccaaaattcccagagcaaagaagaaatatgtgacaagagtatgtggccttgcaacttttgaaattgatcttaaagaagcacaaagattttttgctcaaaaattctcctgtggtgcctcagtaacaggggaggatgaaattatcattcagggagattttacagatgacataattgatgtcattcaggaaaaatggccagaggtagatgatgacagcatcgaagatcttggagaagtaaagaagtgaatttgaaaatttgtctgtatttaatggcctgaactgagagttgatatggccaaagggagagaggccttttaaaatatatatatatatacacatatatatgtatatatacacatatatgtatgtatacacatatacacatgtatatatacatgtgtgtatgtatacatgtatatacatatatacatacacatatatgtatacatatatacacatatatgtatacatatatacacatatatgtatacatatatatatattctacagtaaaactgtagactgtcctcgtccttggcattttcactgttctgtacaaggctgcttgtttttttattgccaaagtcaaataaacgggagactgtcatgctcatgcatgaatagaatttagtcaaataaaaaattttggtcatttggtactgactttctctctctctctctctctcttttttttttttgacagagtctcgcactgttgcctgggctggaatgcagtggtgcgatctcggctcactgcaacctccgcctcccgggttcaagtgattctcctgcctcagcctcccaagtaggtgggattacaggcgcccgcaccacgcccagctaatttttgtatttttagtagagatggggtttcactatgttggccaggctggtctcgaactcctgacctcgtgattggcccacctcagcctcccaaagtgctggtattacagatgtgagccaccgcacccagcctgagtttctctttctctctttttaactttattttttgaaaaacccggtagactttgtggggagcatttttgttgataattttactgatctaaagctgagtgattttttaaaagaatttgaatttggcttcctcaccagtaatatgtctccttgcttctttgatgtgatagttttgagatgggtgagaatctaatagatctgtggttgaatttgctgtgttgttatgaagtccaccctgtgggcacaataacataactgttggtaggagttgtttgagctattctggagattatttggtaaagtatactaaaagccttaaaaccatgtatgtgcgctgtttgaaccagtaagccacttctttgacattagaagacattagaagaaataatcagccttgcataaaacttatggatgaaagtattcatcacaatattatttataataaaaaattgcaaatgttataaatgaacaattgggaaatggttaaagaagtgatggtgcattgtgtggtagaatattatgcatatgtttaaagaatcatattttctaagattatttggaagcatgtttggtaatgtcaagtggagtaccccagatacattttagacatttatcgtcatcatctgctctgagtggaaggccgttcagagaggctagaggttcttattctggctataaattatgtgagtaaaattgtgctaaccagttaaaagtactgtacacccatgctcaatatatagtcctggaaatagcaattgaaacatgtcttctcacaagagaaaatgacagttttaatgatgtatttgatgaatttaaactttaagtcaggtgctgcaaattggaaagaagacttgtggtgttttaagttgctgtggacacttttaagaaacttagaacccatggaacccttgtttatcgccatgcaaattacaatcttgaatgagtgttttttaaaaataaagtattagaaaaatgtgtagtaaagatgtaaaattaaaaaatggaattctccattaactgtggattttactaaatagaattactggtgaagcagatttatccatcgagactatctggtatgcgttatgtatgtagtctgttgctgctgaaagatgtctgtgtgcctgtatcaacatgtgacttcatgtaaagtttctttgtgttcacagttcttagcaaatgcagttacaatccatagatagccagcagtggatgttactccaggaaaatgcaggattaaaattgtccttgtgta

SEQ ID NO: 442798 - DNA, 2580 bp, Homo sapiens
attgtctcgcgggagcgctgctggcggtcgggcgctcgggcggccctggccggggagacgagttgcatgtgttggttcagctggcgatagcggcgggagcggagccggcggggcctgtgcgaccgcctgggtttgtgaaatggctgctgacatttctgaatccagcggggctgactgcaaaggagacccaaggaacagtgccaagttagatgccgattacccacttcgagtcctttattgtggagtctgttcattaccaacagagtactgtgaatatatgcctgatgttgctaaatgtagacaatggttagagaagaattttccaaatgaatttgcaaaacttactgtagaaaattcacccaaacaagaagctggaattagtgagggtcaaggaacagcaggggaagaagaggagaagaaaaaacagaagagaggtggaaggggtcaaataaaacaaaaaaagaagaccgtaccacaaaaggttactatagccaaaattcccagagcaaagaagaaatatgtgacaagagtatgtggccttgcaacttttggtagatgatgacagcatcgaagatcttggagaagtaaagaagtgaatttgaaaatttgtctgtatttaatggcctgaactgagagttgatatggccaaagggagagaggccttttaaaatatatatatatatacacatatatatgtatatatacacatatatgtatgtatacacatatacacatgtatatatacatgtgtgtatgtatacatgtatatacatatatacatacacatatatgtatacatatatacacatatatgtatacatatatacacatatatgtatacatatatatatattctacagtaaaactgtagactgtcctcgtccttggcattttcactgttctgtacaaggctgcttgtttttttattgccaaagtcaaataaacgggagactgtcatgctcatgcatgaatagaatttagtcaaataaaaaattttggtcatttggtactgactttctctctctctctctctctcttttttttttttgacagagtctcgcactgttgcctgggctggaatgcagtggtgcgatctcggctcactgcaacctccgcctcccgggttcaagtgattctcctgcctcagcctcccaagtaggtgggattacaggcgcccgcaccacgcccagctaatttttgtatttttagtagagatggggtttcactatgttggccaggctggtctcgaactcctgacctcgtgattggcccacctcagcctcccaaagtgctggtattacagatgtgagccaccgcacccagcctgagtttctctttctctctttttaactttattttttgaaaaacccggtagactttgtggggagcatttttgttgataattttactgatctaaagctgagtgattttttaaaagaatttgaatttggcttcctcaccagtaatatgtctccttgcttctttgatgtgatagttttgagatgggtgagaatctaatagatctgtggttgaatttgctgtgttgttatgaagtccaccctgtgggcacaataacataactgttggtaggagttgtttgagctattctggagattatttggtaaagtatactaaaagccttaaaaccatgtatgtgcgctgtttgaaccagtaagccacttctttgacattagaagacattagaagaaataatcagccttgcataaaacttatggatgaaagtattcatcacaatattatttataataaaaaattgcaaatgttataaatgaacaattgggaaatggttaaagaagtgatggtgcattgtgtggtagaatattatgcatatgtttaaagaatcatattttctaagattatttggaagcatgtttggtaatgtcaagtggagtaccccagatacattttagacatttatcgtcatcatctgctctgagtggaaggccgttcagagaggctagaggttcttattctggctataaattatgtgagtaaaattgtgctaaccagttaaaagtactgtacacccatgctcaatatatagtcctggaaatagcaattgaaacatgtcttctcacaagagaaaatgacagttttaatgatgtatttgatgaatttaaactttaagtcaggtgctgcaaattggaaagaagacttgtggtgttttaagttgctgtggacacttttaagaaacttagaacccatggaacccttgtttatcgccatgcaaattacaatcttgaatgagtgttttttaaaaataaagtattagaaaaatgtgtagtaaagatgtaaaattaaaaaatggaattctccattaactgtggattttactaaatagaattactggtgaagcagatttatccatcgagactatctggtatgcgttatgtatgtagtctgttgctgctgaaagatgtctgtgtgcctgtatcaacatgtgacttcatgtaaagtttctttgtgttcacagttcttagcaaatgcagttacaatccatagatagccagcagtggatgttactccaggaaaatgcaggattaaaattgtccttgtgta

SEQ ID NO: 442799 - DNA, 1595 bp, Homo sapiens
tctagagatcacgtgtttcctttgtctgcttattactgtctactactatgtcttgcttatttaatctagtcttcctttctagaatgtaattaaccacaagagtacgacatcttttattgtcttatcctcagcaatctgcaacagtgtgtagcatatagtacacttccaataaaaatcaatatttatttgcccctaaatcatttactttatttaattttgtttttttgagatggggtttcactatgttggccaggctggtctcgaactcctgacctcgtgattggcccacctcagcctcccaaagtgctggtattacagatgtgagccaccgcacccagcctgagtttctctttctctctttttaactttattttttgaaaaacccggtagactttgtggggagcatttttgttgataattttactgatctaaagctgagtgattttttaaaagaatttgaatttggcttcctcaccagtaatatgtctccttgcttctttgatgtgatagttttgagatgggtgagaatctaatagatctgtggttgaatttgctgtgttgttatgaagtccaccctgtgggcacaataacataactgttggtaggagttgtttgagctattctggagattatttggtaaagtatactaaaagccttaaaaccatgtatgtgcgctgtttgaaccagtaagccacttctttgacattagaagacattagaagaaataatcagccttgcataaaacttatggatgaaagtattcatcacaatattatttataataaaaaattgcaaatgttataaatgaacaattgggaaatggttaaagaagtgatggtgcattgtgtggtagaatattatgcatatgtttaaagaatcatattttctaagattatttggaagcatgtttggtaatgtcaagtggagtaccccagatacattttagacatttatcgtcatcatctgctctgagtggaaggccgttcagagaggctagaggttcttattctggctataaattatgtgagtaaaattgtgctaaccagttaaaagtactgtacacccatgctcaatatatagtcctggaaatagcaattgaaacatgtcttctcacaagagaaaatgacagttttaatgatgtatttgatgaatttaaactttaagtcaggtgctgcaaattggaaagaagacttgtggtgttttaagttgctgtggacacttttaagaaacttagaacccatggaacccttgtttatcgccatgcaaattacaatcttgaatgagtgttttttaaaaataaagtattagaaaaatgtgtagtaaagatgtaaaattaaaaaatggaattctccattaactgtggattttactaaatagaattactggtgaagcagatttatccatcgagactatctggtatgcgttatgtatgtagtctgttgctgctgaaagatgtctgtgtgcctgtatcaacatgtgacttcatgtaaagtttctttgtgttcacagttcttagcaaatgcagttacaatccatagatagccagcagtggatgttactccaggaaaatgcaggattaaaattgtccttgtgta

SEQ ID NO: 442800 - DNA, 1152 bp, Homo sapiens
attgtctcgcgggagcgctgctggcggtcgggcgctcgggcggccctggccggggagacgagttgcatgtgttggttcagctggcgatagcggcgggagcggagccggcggggcctgtgcgaccgcctgggtttgtgaaatggctgctgacatttctgaatccagcggggctgactgcaaaggagacccaaggaacagtgccaagttagatgccgattacccacttcgagtcctttattgtggagtctgttcattaccaacagagtactgtgaatatatgcctgatgttgctaaatgtagacaatggttagagaagaattttccaaatgaatttgcaaaacttactgtagaaaattcacccaaacaagaagctggaattagtgagggtcaaggaacagcaggggaagaagaggagaagaaaaaacagaagagaggtggaaggggtcaaataaaacaaaaaaagaagaccgtaccacaaaaggttactatagccaaaattcccagagcaaagaagaaatatgtgacaagagtatgtggccttgcaacttttgaaattgatcttaaagaagcacaaagattttttgctcaaaaattctcctgtggtgcctcagtaacaggggaggatgaaattatcattcagggagattttacagatgacataattgatgtcattcaggaaaaatggccagaggtagatgatgacagcatcgaagatcttggagaagtaaagaagtgaatttgaaaatttgtctgtatttaatggcctgaactgagagttgatatggccaaagggagagaggccttttaaaatatatatatatatacacatatatatgtatatatacacatatatgtatgtatacacatatacacatgtatatatacatgtgtgtatgtatacatgtatatacatatatacatacacatatatgtatacatatatacacatatatgtatacatatatacacatatatgtatacatatatatatattctacagtaaaactgtagactgtcctcgtccttggcattttcactgttctgtacaaggctgcttgtttttttattgccaaagtcaaataaacgggagactgtcatgctcatgcatgaatagaatttagtcaaataaaaaattttggtcatttggtactg

SEQ ID NO: 442801 - DNA, 2766 bp, Homo sapiens
attgtctcgcgggagcgctgctggcggtcgggcgctcgggcggccctggccggggagacgagttgcatgtgttggttcagctggcgatagcggcgggagcggagccggcggggcctgtgcgaccgcctgggtttgtgaaatggctgctgacatttctgaatccagcggggctgactgcaaaggagacccaaggaacagtgccaagttagatgccgattacccacttcgagtcctttattgtggagtctgttcattaccaacagagtactgtgaatatatgcctgatgttgctaaatgtagacaatggttagagaagaattttccaaatgaatttgcaaaacttactgtagaaaattcacccaaacaagaagctggaattagtgagggtcaaggaacagcaggggaagaagaggagaagaaaaaacagaagagaggtggaaggggtcaaataaaacaaaaaaagaagaccgtaccacaaaaggttactatagccaaaattcccagagcaaagaagaaatatgtgacaagagtatgtggccttgcaacttttgaaattgatcttaaagaagcacaaagattttttgctcaaaaattctcctgtggtgcctcagtaacaggggaggatgaaattatcattcagggagattttacagatgacataattgatgtcattcaggaaaaatggccagaggtagatgatgacagcatcgaagatcttggagaagtaaagaagtgaatttgaaaatttgtctgtatttaatggcctgaactgagagttgatatggccaaagggagagaggccttttaaaatatatatatatatacacatatatatgtatatatacacatatatgtatgtatacacatatacacatgtatatatacatgtgtgtatgtatacatgtatatacatatatacatacacatatatgtatacatatatacacatatatgtatacatatatacacatatatgtatatatatgtatacatatatacacatatatgtatacatatatacacatacatatatatatattctacagtaaaactgtagactgtcctcgtccttggcattttcactgttctgtacaaggctgcttgtttttttattgccaaagtcaaataaacgggagactgtcatgctcatgcatgaatagaatttagtcaaataaaaaattttggtcatttggtactgactttctctctctctctctctctcttttttttttttgacagagtctcgcactgttgcctgggctggaatgcagtggtgcgatctcggctcactgcaacctccgcctcccgggttcaagtgattctcctgcctcagcctcccaagtaggtgggattacaggcgcccgcaccacgcccagctaatttttgtatttttagtagagatggggtttcactatgttggccaggctggtctcgaactcctgacctcgtgattggcccacctcagcctcccaaagtgctggtattacagatgtgagccaccgcacccagcctgagtttctctttctctctttttaactttattttttgaaaaacccggtagactttgtggggagcatttttgttgataattttactgatctaaagctgagtgattttttaaaagaatttgaatttggcttcctcaccagtaatatgtctccttgcttctttgatgtgatagttttgagatgggtgagaatctaatagatctgtggttgaatttgctgtgttgttatgaagtccaccctgtgggcacaataacataactgttggtaggagttgtttgagctattctggagattatttggtaaagtatactaaaagccttaaaaccatgtatgtgcgctgtttgaaccagtaagccacttctttgacattagaagacattagaagaaataatcagccttgcataaaacttatggatgaaagtattcatcacaatattatttataataaaaaattgcaaatgttataaatgaacaattgggaaatggttaaagaagtgatggtgcattgtgtggtagaatattatgcatatgtttaaagaatcatattttctaagattatttggaagcatgtttggtaatgtcaagtggagtaccccagatacattttagacatttatcgtcatcatctgctctgagtggaaggccgttcagagaggctagaggttcttattctggctataaattatgtgagtaaaattgtgctaaccagttaaaagtactgtacacccatgctcaatatatagtcctggaaatagcaattgaaacatgtcttctcacaagagaaaatgacagttttaatgatgtatttgatgaatttaaactttaagtcaggtgctgcaaattggaaagaagacttgtggtgttttaagttgctgtggacacttttaagaaacttagaacccatggaacccttgtttatcgccatgcaaattacaatcttgaatgagtgttttttaaaaataaagtattagaaaaatgtgtagtaaagatgtaaaattaaaaaatggaattctccattaactgtggattttactaaatagaattactggtgaagcagatttatccatcgagactatctggtatgcgttatgtatgtagtctgttgctgctgaaagatgtctgtgtgcctgtatcaacatgtgacttcatgtaaagtttctttgtgttcacagttcttagcaaatgcagttacaatccatagatagccagcagtggatgttactccaggaaaatgcaggattaaaattgtccttgtgta

SEQ ID NO: 442802 - DNA, 2801 bp, Homo sapiens
attgtctcgcgggagcgctgctggcggtcgggcgctcgggcggccctggccggggagacgagttgcatgtgttggttcagctggcgatagcggcgggagcggagccggcggggcctgtgcgaccgcctgggtttgtgaaatggctgctgacatttctgaatccagcggggctgactgcaaaggagacccaaggaacagtgccaagttagatgccgattacccacttcgagtcctttattgtggagtctgttcattaccaacagagtactgtgaatatatgcctgatgttgctaaatgtagacaatggttagagaagaattttccaaatgaatttgcaaaacttactgtagaaaattcacccaaacaagaagctggaattagtgagggtcaaggaacagcaggggaagaagaggagaagaaaaaacagaagagaggtggaaggggtcaaataaaacaaaaaaagaagaccgtaccacaaaaggttactatagccaaaattcccagagcaaagaagaaatatgtgacaagagtatgtggccttgcaacttttgaaattgatcttaaagaagcacaaagattttttgctcaaaaattctcctgtggtgcctcagtaacaggggaggatgaaattatcattcagggagattttacagatgacataattgatgtcattcaggaaaaatggccagaggtagatgatgacagcatcgaagatcttggagaagtaaagaagtgaatttgaaaatttgtctgtatttaatggcctgaactgagagttgatatggccaaagggagagaggccttttaaaatatatatatatatacacatatatatgtatatatacacatatatgtatgtatacacatatacacatgtatatatacatgtgtgtatgtatacatgtatatacatatatacatacacatatatgtatacatatatacacatatatgtatacatatatacacatatatgtatatatatgtatacatatatacacatatatgtatacatatatacacatacatatatatatattctacagtaaaactgtagactgtcctcgtccttggcattttcactgttctgtacaaggctgcttgtttttttattgccaaagtcaaataaacgggagactgtcatgctcatgcatgaatagaatttagtcaaataaaaaattttggtcatttggtactgactttctctctctctctctctctcttttttttttttgacagagtctcgcactgttgcctgggctggaatgcagtggtgcgatctcggctcactgcaacctccgcctcccgggttcaagtgattctcctgcctcagcctcccaagtaggtgggattacaggcgcccgcaccacgcccagctaatttttgtatttttagtagagatggggtttcactatgttggccaggctggtctcgaactcctgacctcgtgattggcccacctcagcctcccaaagtgctggtattacagatgtgagccaccgcacccagcctgagtttctctttctctctttttaactttattttttgaaaaacccggtagactttgtggggagcatttttgttgataattttactgatctaaagctgagtgattttttaaaagaatttgaatttggcttcctcaccagtaatatgtctccttgcttctttgatgtgatagttttgagatgggtgagaatctaatagatctgtggttgaatttgctgtgttgttatgaagtccaccctgtgggcacaataacataactgttggtaggagttgtttgagctattctggagattatttggtaaagtatactaaaagccttaaaaccatgtatgtgcgctgtttgaaccagtaagccacttctttgacattagaagacattagaagaaataatcagccttgcataaaacttatggatgaaagtattcatcacaatattatttataataaaaaattgcaaatgttataaatgaacaattgggaaatggttaaagaagtgatggtgcattgtgtggtagaatattatgcatatgtttaaagaatcatattttctaagattatttggaagcatgtttggtaatgtcaagtggagtaccccagatacattttagacatttatcgtcatcatctgctctgagtggaaggccgttcagagaggctagaggttcttattctggctataaattatgtgagtaaaattgtgctaaccagttaaaagtactgtacacccatgctcaatatatagtcctggaaatagcaattgaaacatgtcttctcacaagagaaaatgacagttttaatgatgtatttgatgaatttaaactttaagtcaggtgctgcaaattggaaagaagacttgtggtgttttaagttgctgtggacacttttaagaaacttagaacccatggaacccttgtttatcgccatgcaaattacaatcttgaatgagtgttttttaaaaataaagtattagaaaaatgtgtagtaaagatgtaaaattaaaaaatggaattctccattaactgtggattttactaaatagaattactggtgaagcagatttatccatcgagactatctggtatgcgttatgtatgtagtctgttgctgctgaaagatgtctgtgtgcctgtatcaacatgtgacttcatgtaaagtttctttgtgttcacagttcttagcaaatgcagttacaatccatagatagccagcagtggatgttactccaggaaaatgcaggattaaaattgtccttgtgtaaaaaaaaaaaacgacgagagaacaagacaaagcac

SEQ ID NO: 442803 - DNA, 5679 bp, Homo sapiens
  misc_feature (36)..(36): n is a, c, g, or t
  misc_feature (180)..(180): n is a, c, g, or t
  misc_feature (501)..(501): n is a, c, g, or t
  misc_feature (5381)..(5381): n is a, c, g, or t
atttgattccattctgacactgtctatctggatatngggtcagctcccataggctgagggctcaatcccacaacagcgcacacacattaatgccagtcacaaacacaagttgtggcctgtgcttctcaatgaccagctgtgaattgtgaattctgatgaccccctccttgaaattgattngtttgcttgagtggctcacataacacagggaaacacttatatttacccatttattatagaagatgctacaaagcacacagatgaacatctagatggaagtgatctattagttgagatatgggaaaggagtgaggagctgggatgtattctctcatgtattctgtcttttttgagttttcatggaggccccattatggaggccttgcttccattattggcattggtgatcaactgaactttcattccctctgtcctcccgagaggacagaggcttagtctaaccgagcctcagcctttccagtgaccacccaccgagccttngttccggtgaccgccctccatcctgaagctacctaggtgctccagacaccaattatcccattaatgtacaaaaagatacttatcactccactgatttcaagtgagctcttatgtcaggagagggggatgaagaccaaatctgtatgtcacattgtcacaatctggatctgtcagctcacccacttcaatttaacctattctcacatttttctcctcttctccttttatgtgaaattttgaactctccccttagccacttggtgaaatgtgtttttcattttaggtacggttgacatttagggatgtggccatagaattctctcaggaggagtggaaatgcctggaccctgctcagaggatcttatacagggacgtgatgttggagaactactggaaccttgtttctctgggactgtgtcattttgatatgaatattatctccatgttggaggaagggaaagagccctggactgtgaagagctgtgtgaaaatagcaagaaaaccaagaacgcgggaatgtgtcaaaggcgtggtcacagatatccctcctaaatgtacaatcaaggatttgctaccaaaagagaagagcagtacagaagcagtattccacacagtggtgttggaaagacacgaaagccctgacattgaagacttttccttcaaggaaccccagaaaaatgtgcatgattttgagtgtcaatggagagatgacacaggaaattacaagggagtgcttatggcccagaaagaaggtaaaagagatcaacgcgacagaagagacatagaaaacaagcttatgaacaatcagcttggagtaagctttcattctcatctgcctgaactgcagctatttcaaggtgaggggaaaatgtatgaatgtaatcaagttgagaagtctaccaacaatggttcctcagtgtcaccacttcaacaaattccttctagtgtccaaacccacaggtctaaaaaatatcatgaacttaaccatttttcattactcacacaaagacgaaaagcaaacagttgtggaaaaccttataaatgtaatgaatgtggcaaggcgttcactcagaattcgaaccttacaagtcataggagaattcatagtggagagaagccttacaaatgcagtgagtgcggcaaaacctttactgttcgttcaaatctaactattcatcaggtcatccatactggagaaaaaccttacaaatgtcatgagtgtggcaaggtcttcaggcacaattcataccttgcaactcatcggcgaattcatactggagagaaaccttacaagtgtaatgagtgtggaaaagcctttagaggacattcaaacctaactacccatcagttaattcatactggagaaaaaccgttcaaatgtaatgaatgtggcaagctcttcactcaaaattcacaccttataagtcattggagaattcacactggagagaaaccttacaagtgcaatgagtgcggcaaagcctttagtgttcgttcaagcctagcaatccatcagacaatccacactggagaaaaaccttacaaatgtaatgaatgtggcaaagtctttaggtacaattcatacctcggaaggcatcggagagttcatactggtgagaaaccttacaagtgtaatgaatgtggcaaagccttcagtatgcattcaaacctagctacccatcaggtcatccatactggaacaaaacctttcaaatgcaatgaatgcagcaaggttttcactcaaaattcacaacttgcaaatcatcgaagaattcatactggagagaaaccttacaagtgtaatgagtgtgggaaagccttcagtgttcgttcaagtctgactacccatcaggcaatccattctggagagaaaccttacaaatgtattgaatgtggcaagagcttcactcaaaaatcacaccttagaagtcatcggggaattcattctggagagaaaccttacaagtgtaatgaatgtggtaaagtcttcgctcaaacatcacaacttgcaaggcattggagagttcatactggagaaaaaccttacaagtgtaatgactgtggcagagcctttagtgatcgttcaagcctaacttttcatcaggcaatacatactggagagaaaccttacaaatgtcatgaatgcggcaaggtttttaggcacaattcataccttgcaactcatcggcgaattcatactggagagaaaccttacaagtgtaatgagtgtgggaaagcctttagtatgcattcaaacctaactacccataaggtcatccatactggagagaagccttacaaatgtaatcaatgtggcaaggtcttcactcagaactcacaccttgcaaatcatcaaaggactcacaccggagagaaaccttaccgatgcaatgagtgtgggaaagccttcagtgttcgttcaagcctaaccacccatcaggcaatccatactgggaaaaaaccttacaaatgtaatgaatgtggcaaggtctttactcaaaatgctcacctggcaaatcaccgaagaattcatactggggagaaaccttacaggtgtacagagtgtgggaaagcctttagggtaagatcaagtctaactacccatatggcaatccacactggagaaaagcgttacaaatgtaatgagtgtggcaaggtcttcaggcagagttcaaatcttgcaagtcatcacagaatgcataccggagagaaaccttacaaatgagtgtggtgaggtcattaggtacaattcactcctttcacatcagttaatttcattcttgacagaatccttacaaatgtagtgacagtggccaatccctcatgagttgaagcattaatagatatgagaggccataagcaagagacatcatgtaaacatatgtggcagagggtctatccaggcctcgcaggttactaggcatcaagatttatatctttgatgaaacgaaacaaatgtaatatgcatcctgaggccattacccagtgaccgatggtaagtgaggattcctaggaggaataacagtctctggtttccctgtttgcctttgatattatacactgtagaatactcacaagtccaaatatgctaaaaattatatatttttaactcacatacgaaaaggttgcaggatatttgtaggcagtcagttaccttcaccttatgaaatgtttcactgagttatttgaggttttttggaaagcctactattgcgtttcaatgtgaactttgaaatcttattgtgcatccttacacaccttccatggtgctttcttggaaagatcattgggatggaaggatcattgattgggtgaagatcattgattaggtgaaggattatttctatccaatttgtgaagaaggaggactttgcttttaaaattaagtatcatctgaattagcatttgggagtggcgaaaaacaatgtaaaactatgatgtcactcaccattctgataatgttcagggtgcctttctcctaccaggagagtactgtggcttagaggaaagaaatggtctatcaactgaacatgaaatggagcaggccaagaccttaggacattgggatttttgtgggaggagagtaataggtaattagacactgattgtgtggtagaaatactgcaggggaaaaggtcgccctcttatgcatcaaagagcaatacctgttgtttagcaaagagtgatgaaaaattgatcttgttttgaaattgaagagagaggccaggcgcggtggctcacacctgtaatcccagcactttgggaggctgaggcaggtggatcacctgaggtcgggagttcgagaccagcctgaccaacatggagaaaccccaattgtactaaaaatacaaaattagccgggcgtggtggcaggtgcctgtaatcccagctacttgggaggctgaggcaggagagtgcttgaacccaggaggcggaggttgtggtgagccaagatcatgccactgcactccagcctgggcaacaagaacaaaactccatctaaagaagaaaaagaaaaactgaagagagagtagttgtcagagtgaagagtttaatcaacagaagtagagtaacatattctttagtagaactcacattatctgcttgaagcacattttgctaatgttttattcagaatgtatcatagatataatgttttaactaataaaatagaatggtttttctctatgaatgaatcacattctttctgccaacatagttttatcctgtctcagtaggatactccataacacaatagcagtacaccactaggctcttaaacgatcaagaacaatttttttcatggtgaaatcaaataacgcagttttggaaacctataaccgcattttgtgcttgaattacgtgccccacactgtggcttaggatacttattggggtataatgaaaatcttactgaaagttaatttcacattcttacaccccaaaatctgcattgccattgatgcatatgcaccacattattatatttccacatcagtttcttgtgtgccaaataagacccatgctatgcatcttggtttccatgaagtgaaaatacatagtaagaatgcgagaaatataaatcaggccaggcacggtggctcacacctgtaatcccagtactttgggaggccaaggcaagcagatcacctgaagtcaggagagaccagcctggccagcatagtgaaaccccatctctactaaaaatacaaacttagctgggcttagtggtgcatgcctgtagtctcagctacttgggaggctgaggcaggagaattgcttgaatccaagaggcagaggttctattaatggagatcattccattacactccagcctgggcaccaggaacgaaactcgttctcaaaaaacaaaacaaaanaaaaaaaacgttggctgggcatggtggctcacgcctgtaatcccaacaatttgggaggctgaggcaggtggattacttaaggtcaggagttcaagaccagactggccaacatggtgaaaccctgtctctactaaaaatgcaaaaacattagctgggtgtggtggtgcatgcctgtaaatcccagctacttgggaggctgaggcaggagaatggcttgaacccaggtggtggaggctgcagtgagctgagatcacgccatcgcactccagcctgggcaacaagagcaaaactccatctc

SEQ ID NO: 442804 - DNA, 1720 bp, Homo sapiens
  misc_feature (2)..(2): n is a, c, g, or t
  misc_feature (4)..(4): n is a, c, g, or t
  misc_feature (893)..(893): n is a, c, g, or t
tngnccacagacccggaagtggatcgtgcggagcaagcatcacaccatggcgtatgagtgttcctctgtgtagactcaacctgcgcctcgccgtcccccattcgcacacccgatgcccgggggtcgctacggacttaaaatctccgcaccgcaccctccacctcagaaacgttcctggatccgaacactgccccctgacgacctagagagatcccggctcccagcccactgagtggcttcagcctcgctggcacctcccaactcctggcctctctgcacgaggcgcctgccccgggccccgcctacaggggacccagctcttcttgcagccactggaagctgatcacctggagtgaagacctcacacgaagaagtctggaagaagaggaagaggaaagaaaaggagtcagggatggcccttactcaggtaaagtgatactcctggtggattgttcttttatttcttcctgaaatgcctggcattggcattgcgaatcttctctgagtctgaagcgtcctgcctgacatgtttgctagcactcacccgcgccttccctcagtccctctcatctcgtttagattccatctcccgtgatccagtgacatgaacttgggaagaggctgcactgggcatggtcctgggaagggctcacacccagacatggatggagacggggtgagggtcctgtggtgtcagtgctgttgggcagcagggattgctcaggggccgcatctggatgcactgtcagcgctgtgtaaaccatgataacagaagctgcccatgaagtcaggtgcacacgtacctgctcactggcatagaaaagaacactaaggggaaagctttcctgcctcattggtaactgcatttgaagccgaacaagtgagtcattggntttccgactccaaactcgtaaagactgggaacagaatggaaagtttagacactgacattggagatagatgattctttcattccatcatccattttaatgtatgacgtcaacataaatgtgtaacaagattcattaaactagtctcagaagctctatcccatggagactgtgatgttcttacaagaacctttgtccgtcgggtattgtaggtgagaatggcatataagcagaacaaccttgccattagagagaatggaactgtatttttgttttaccagttatgagtcaacattttgtttcttttattttgaacatggcatcatgtatatatttcttttatagtgaaatgatacatttatgtgccaagaggtaaagcatcccttttcctgtccagccttccacccttcctcacatcttagtggggagccactgttctcaattctgtgggaagggtcagtgcaagtcctgtagaaatgtattttgacatcattatgagatttaaacaaattcctcagtgaatgtttggttgtgatatgttaacctgcaagttttgaacattgacatgttttcgtgttaggaaacaggagctcacttttctacatccttgttggagcatgctgggaatgaagacaggtggatcttttaactttctcacttctataaagaatgccacacagggtgctgcatggtggctcacacctgtaatcccagcacttgtggaagccaaggtgggaggatcatttgagccccagagattgaggctgcagtgagccatgatagtgccactgcacttcagcctgagtgatagaacaagaccttgtctcaaa

SEQ ID NO: 442805 - DNA, 853 bp, Homo sapiens
  misc_feature (2)..(2): n is a, c, g, or t
  misc_feature (4)..(4): n is a, c, g, or t
tngnccacagacccggaagtggatcgtgcggagcaagcatcacaccatggcgtatgagtgttcctctgtgtagactcaacctgcgcctcgccgtcccccattcgcacacccgatgcccgggggtcgctacggacttaaaatctccgcaccgcaccctccacctcagaaacgttcctggatccgaacactgccccctgacgacctagagagatcccggctcccagcccactgagtggcttcagcctcgctggtaggtctctcctccaaagctctggaaacagactcctgggagtgagagggaggggagcgcaggcaccgccccctttccccaagtcccccgcccacttcatccctcaggcacctcccaactcctggcctctctgcacgaggcgcctgccccgggccccgcctacaggggacccagctcttcttgcagccactggaagctgatcacctggagtgaagacctcacacgtgagtttccctctgtttaggttaaacttgggcttcccaggctcctgcacatccagactcgatttgcaggagtcctcagagacatatgtgtatatatgagtgattgtagttcactgcagcctggacctcctgggctcaagcgatcctcccacctcagcctcctgagtagctgggaccaccggtgtgtaccaccaccacgtttaaataattttttttatatatatttagtagagaggaagtctcactgtgttgcctgagctggtctcgaatttgtgggctcaagtgatcctcccgcttcggctgggattacagcccacgaagtgctgggattacaggcatgagccgtcactccggaccctatagaccttagtatcccctc

SEQ ID NO: 442806 - DNA, 5205 bp, Homo sapiens
  misc_feature (2)..(2): n is a, c, g, or t
  misc_feature (4)..(4): n is a, c, g, or t
  misc_feature (4907)..(4907): n is a, c, g, or t
tngnccacagacccggaagtggatcgtgcggagcaagcatcacaccatggcgtatgagtgttcctctgtgtagactcaacctgcgcctcgccgtcccccattcgcacacccgatgcccgggggtcgctacggacttaaaatctccgcaccgcaccctccacctcagaaacgttcctggatccgaacactgccccctgacgacctagagagatcccggctcccagcccactgagtggcttcagcctcgctggaagaagtctggaagaagaggaagaggaaagaaaaggagtcagggatggcccttactcaggtacggttgacatttagggatgtggccatagaattctctcaggaggagtggaaatgcctggaccctgctcagaggatcttatacagggacgtgatgttggagaactactggaaccttgtttctctgggactgtgtcattttgatatgaatattatctccatgttggaggaagggaaagagccctggactgtgaagagctgtgtgaaaatagcaagaaaaccaagaacgcgggaatgtgtcaaaggcgtggtcacagatatccctcctaaatgtacaatcaaggatttgctaccaaaagagaagagcagtacagaagcagtattccacacagtggtgttggaaagacacgaaagccctgacattgaagacttttccttcaaggaaccccagaaaaatgtgcatgattttgagtgtcaatggagagatgacacaggaaattacaagggagtgcttatggcccagaaagaaggtaaaagagatcaacgcgacagaagagacatagaaaacaagcttatgaacaatcagcttggagtaagctttcattctcatctgcctgaactgcagctatttcaaggtgaggggaaaatgtatgaatgtaatcaagttgagaagtctaccaacaatggttcctcagtgtcaccacttcaacaaattccttctagtgtccaaacccacaggtctaaaaaatatcatgaacttaaccatttttcattactcacacaaagacgaaaagcaaacagttgtggaaaaccttataaatgtaatgaatgtggcaaggcgttcactcagaattcgaaccttacaagtcataggagaattcatagtggagagaagccttacaaatgcagtgagtgcggcaaaacctttactgttcgttcaaatctaactattcatcaggtcatccatactggagaaaaaccttacaaatgtcatgagtgtggcaaggtcttcaggcacaattcataccttgcaactcatcggcgaattcatactggagagaaaccttacaagtgtaatgagtgtggaaaagcctttagaggacattcaaacctaactacccatcagttaattcatactggagaaaaaccgttcaaatgtaatgaatgtggcaagctcttcactcaaaattcacaccttataagtcattggagaattcacactggagagaaaccttacaagtgcaatgagtgcggcaaagcctttagtgttcgttcaagcctagcaatccatcagacaatccacactggagaaaaaccttacaaatgtaatgaatgtggcaaagtctttaggtacaattcatacctcggaaggcatcggagagttcatactggtgagaaaccttacaagtgtaatgaatgtggcaaagccttcagtatgcattcaaacctagctacccatcaggtcatccatactggaacaaaacctttcaaatgcaatgaatgcagcaaggttttcactcaaaattcacaacttgcaaatcatcgaagaattcatactggagagaaaccttacaagtgtaatgagtgtgggaaagccttcagtgttcgttcaagtctgactacccatcaggcaatccattctggagagaaaccttacaaatgtattgaatgtggcaagagcttcactcaaaaatcacaccttagaagtcatcggggaattcattctggagagaaaccttacaagtgtaatgaatgtggtaaagtcttcgctcaaacatcacaacttgcaaggcattggagagttcatactggagaaaaaccttacaagtgtaatgactgtggcagagcctttagtgatcgttcaagcctaacttttcatcaggcaatacatactggagagaaaccttacaaatgtcatgaatgcggcaaggtttttaggcacaattcataccttgcaactcatcggcgaattcatactggagagaaaccttacaagtgtaatgagtgtgggaaagcctttagtatgcattcaaacctaactacccataaggtcatccatactggagagaagccttacaaatgtaatcaatgtggcaaggtcttcactcagaactcacaccttgcaaatcatcaaaggactcacaccggagagaaaccttaccgatgcaatgagtgtgggaaagccttcagtgttcgttcaagcctaaccacccatcaggcaatccatactgggaaaaaaccttacaaatgtaatgaatgtggcaaggtctttactcaaaatgctcacctggcaaatcaccgaagaattcatactggggagaaaccttacaggtgtacagagtgtgggaaagcctttagggtaagatcaagtctaactacccatatggcaatccacactggagaaaagcgttacaaatgtaatgagtgtggcaaggtcttcaggcagagttcaaatcttgcaagtcatcacagaatgcataccggagagaaaccttacaaatgagtgtggtgaggtcattaggtacaattcactcctttcacatcagttaatttcattcttgacagaatccttacaaatgtagtgacagtggccaatccctcatgagttgaagcattaatagatatgagaggccataagcaagagacatcatgtaaacatatgtggcagagggtctatccaggcctcgcaggttactaggcatcaagatttatatctttgatgaaacgaaacaaatgtaatatgcatcctgaggccattacccagtgaccgatggtaagtgaggattcctaggaggaataacagtctctggtttccctgtttgcctttgatattatacactgtagaatactcacaagtccaaatatgctaaaaattatatatttttaactcacatacgaaaaggttgcaggatatttgtaggcagtcagttaccttcaccttatgaaatgtttcactgagttatttgaggttttttggaaagcctactattgcgtttcaatgtgaactttgaaatcttattgtgcatccttacacaccttccatggtgctttcttggaaagatcattgggatggaaggatcattgattgggtgaagatcattgattaggtgaaggattatttctatccaatttgtgaagaaggaggactttgcttttaaaattaagtatcatctgaattagcatttgggagtggcgaaaaacaatgtaaaactatgatgtcactcaccattctgataatgttcagggtgcctttctcctaccaggagagtactgtggcttagaggaaagaaatggtctatcaactgaacatgaaatggagcaggccaagaccttaggacattgggatttttgtgggaggagagtaataggtaattagacactgattgtgtggtagaaatactgcaggggaaaaggtcgccctcttatgcatcaaagagcaatacctgttgtttagcaaagagtgatgaaaaattgatcttgttttgaaattgaagagagaggccaggcgcggtggctcacacctgtaatcccagcactttgggaggctgaggcaggtggatcacctgaggtcgggagttcgagaccagcctgaccaacatggagaaaccccaattgtactaaaaatacaaaattagccgggcgtggtggcaggtgcctgtaatcccagctacttgggaggctgaggcaggagagtgcttgaacccaggaggcggaggttgtggtgagccaagatcatgccactgcactccagcctgggcaacaagaacaaaactccatctaaagaagaaaaagaaaaactgaagagagagtagttgtcagagtgaagagtttaatcaacagaagtagagtaacatattctttagtagaactcacattatctgcttgaagcacattttgctaatgttttattcagaatgtatcatagatataatgttttaactaataaaatagaatggtttttctctatgaatgaatcacattctttctgccaacatagttttatcctgtctcagtaggatactccataacacaatagcagtacaccactaggctcttaaacgatcaagaacaatttttttcatggtgaaatcaaataacgcagttttggaaacctataaccgcattttgtgcttgaattacgtgccccacactgtggcttaggatacttattggggtataatgaaaatcttactgaaagttaatttcacattcttacaccccaaaatctgcattgccattgatgcatatgcaccacattattatatttccacatcagtttcttgtgtgccaaataagacccatgctatgcatcttggtttccatgaagtgaaaatacatagtaagaatgcgagaaatataaatcaggccaggcacggtggctcacacctgtaatcccagtactttgggaggccaaggcaagcagatcacctgaagtcaggagagaccagcctggccagcatagtgaaaccccatctctactaaaaatacaaacttagctgggcttagtggtgcatgcctgtagtctcagctacttgggaggctgaggcaggagaattgcttgaatccaagaggcagaggttctattaatggagatcattccattacactccagcctgggcaccaggaacgaaactcgttctcaaaaaacaaaacaaaanaaaaaaaacgttggctgggcatggtggctcacgcctgtaatcccaacaatttgggaggctgaggcaggtggattacttaaggtcaggagttcaagaccagactggccaacatggtgaaaccctgtctctactaaaaatgcaaaaacattagctgggtgtggtggtgcatgcctgtaaatcccagctacttgggaggctgaggcaggagaatggcttgaacccaggtggtggaggctgcagtgagctgagatcacgccatcgcactccagcctgggcaacaagagcaaaactccatctc

SEQ ID NO: 442807 - DNA, 3997 bp, Homo sapiens
  misc_feature (2)..(2): n is a, c, g, or t
  misc_feature (4)..(4): n is a, c, g, or t
tngnccacagacccggaagtggatcgtgcggagcaagcatcacaccatggcgtatgagtgttcctctgtgtagactcaacctgcgcctcgccgtcccccattcgcacacccgatgcccgggggtcgctacggacttaaaatctccgcaccgcaccctccacctcagaaacgttcctggatccgaacactgccccctgacgacctagagagatcccggctcccagcccactgagtggcttcagcctcgctggaagaagtctggaagaagaggaagaggaaagaaaaggagtcagggatggcccttactcaggtacggttgacatttagggatgtggccatagaattctctcaggaggagtggaaatgcctggaccctgctcagaggatcttatacagggacgtgatgttggagaactactggaaccttgtttctctgggactgtgtcattttgatatgaatattatctccatgttggaggaagggaaagagccctggactgtgaagagctgtgtgaaaatagcaagaaaaccaagaacgcgggaatgtgtcaaaggcgtggtcacagatatccctcctaaatgtacaatcaaggatttgctaccaaaagagaagagcagtacagaagcagtattccacacagtggtgttggaaagacacgaaagccctgacattgaagacttttccttcaaggaaccccagaaaaatgtgcatgattttgagtgtcaatggagagatgacacaggaaattacaagggagtgcttatggcccagaaagaaggtaaaagagatcaacgcgacagaagagacatagaaaacaagcttatgaacaatcagcttggagtaagctttcattctcatctgcctgaactgcagctatttcaaggtgaggggaaaatgtatgaatgtaatcaagttgagaagtctaccaacaatggttcctcagtgtcaccacttcaacaaattccttctagtgtccaaacccacaggtctaaaaaatatcatgaacttaaccatttttcattactcacacaaagacgaaaagcaaacagttgtggaaaaccttataaatgtaatgaatgtggcaaggcgttcactcagaattcgaaccttacaagtcataggagaattcatagtggagagaagccttacaaatgcagtgagtgcggcaaaacctttactgttcgttcaaatctaactattcatcaggtcatccatactggagaaaaaccttacaaatgtcatgagtgtggcaaggtcttcaggcacaattcataccttgcaactcatcggcgaattcatactggagagaaaccttacaagtgtaatgagtgtggaaaagcctttagaggacattcaaacctaactacccatcagttaattcatactggagaaaaaccgttcaaatgtaatgaatgtggcaagctcttcactcaaaattcacaccttataagtcattggagaattcacactggagagaaaccttacaagtgcaatgagtgcggcaaagcctttagtgttcgttcaagcctagcaatccatcagacaatccacactggagaaaaaccttacaaatgtaatgaatgtggcaaagtctttaggtacaattcatacctcggaaggcatcggagagttcatactggtgagaaaccttacaagtgtaatgaatgtggcaaagccttcagtatgcattcaaacctagctacccatcaggtcatccatactggaacaaaacctttcaaatgcaatgaatgcagcaaggttttcactcaaaattcacaacttgcaaatcatcgaagaattcatactggagagaaaccttacaagtgtaatgagtgtgggaaagccttcagtgttcgttcaagtctgactacccatcaggcaatccattctggagagaaaccttacaaatgtattgaatgtggcaagagcttcactcaaaaatcacaccttagaagtcatcggggaattcattctggagagaaaccttacaagtgtaatgaatgtggtaaagtcttcgctcaaacatcacaacttgcaaggcattggagagttcatactggagaaaaaccttacaagtgtaatgactgtggcagagcctttagtgatcgttcaagcctaacttttcatcaggcaatacatactggagagaaaccttacaaatgtcatgaatgcggcaaggtttttaggcacaattcataccttgcaactcatcggcgaattcatactggagagaaaccttacaagtgtaatgagtgtgggaaagcctttagtatgcattcaaacctaactacccataaggtcatccatactggagagaagccttacaaatgtaatcaatgtggcaaggtcttcactcagaactcacaccttgcaaatcatcaaaggactcacaccggagagaaaccttaccgatgcaatgagtgtgggaaagccttcagtgttcgttcaagcctaaccacccatcaggcaatccatactgggaaaaaaccttacaaatgtaatgaatgtggcaaggtctttactcaaaatgctcacctggcaaatcaccgaagaattcatactggggagaaaccttacaggtgtacagagtgtgggaaagcctttagggtaagatcaagtctaactacccatatggcaatccacactggagaaaagcgttacaaatgtaatgagtgtggcaaggtcttcaggcagagttcaaatcttgcaagtcatcacagaatgcataccggagagaaaccttacaaatgagtgtggtgaggtcattaggtacaattcactcctttcacatcagttaatttcattcttgacagaatccttacaaatgtagtgacagtggccaatccctcatgagttgaagcattaatagatatgagaggccataagcaagagacatcatgtaaacatatgtggcagagggtctatccaggcctcgcaggttactaggcatcaagatttatatctttgatgaaacgaaacaaatgtaatatgcatcctgaggccattacccagtgaccgatggtaagtgaggattcctaggaggaataacagtctctggtttccctgtttgcctttgatattatacactgtagaatactcacaagtccaaatatgctaaaaattatatatttttaactcacatacgaaaaggttgcaggatatttgtaggcagtcagttaccttcaccttatgaaatgtttcactgagttatttgaggttttttggaaagcctactattgcgtttcaatgtgaactttgaaatcttattgtgcatccttacacaccttccatggtgctttcttggaaagatcattgggatggaaggatcattgattgggtgaagatcattgattaggtgaaggattatttctatccaatttgtgaagaaggaggactttgcttttaaaattaagtatcatctgaattagcatttgggagtggcgaaaaacaatgtaaaactatgatgtcactcaccattctgataatgttcagggtgcctttctcctaccaggagagtactgtggcttagaggaaagaaatggtctatcaactgaacatgaaatggagcaggccaagaccttaggacattgggatttttgtgggaggagagtaataggtaattagacactgattgtgtggtagaaatactgcaggggaaaaggtcgccctcttatgcatcaaagagcaatacctgttgtttagcaaagagtgatgaaaaattgatcttgttttgaactcctgacctcaagtaatccacccgcctcggcctttcaaagtgctggattacaggcgtgagccgccacgcctggccgcattatcatttcttaagataccagttgtgcttatttagttcatgtagttattgaatatcactcagtatgtcaaacataatgtctaacacttccatagagataaccttgttttctgttttttatttgtatacttattgtacataaaagtgagaatcgacactgatagaaagcgaggccgagctcc

SEQ ID NO: 442808 - DNA, 2747 bp, Homo sapiens
  misc_feature (2)..(2): n is a, c, g, or t
  misc_feature (4)..(4): n is a, c, g, or t
tngnccacagacccggaagtggatcgtgcggagcaagcatcacaccatggcgtatgagtgttcctctgtgtagactcaacctgcgcctcgccgtcccccattcgcacacccgatgcccgggggtcgctacggacttaaaatctccgcaccgcaccctccacctcagaaacgttcctggatccgaacactgccccctgacgacctagagagatcccggctcccagcccactgagtggcttcagcctcgctggaagaagtctggaagaagaggaagaggaaagaaaaggagtcagggatggcccttactcaggtacggttgacatttagggatgtggccatagaattctctcaggaggagtggaaatgcctggaccctgctcagaggatcttatacagggacgtgatgttggagaactactggaaccttgtttctctgggactgtgtcattttgatatgaatattatctccatgttggaggaagggaaagagccctggactgtgaagagctgtgtgaaaatagcaagaaaaccaagaacgcgggaatgtgtcaaaggcgtggtcacagatatccctcctaaatgtacaatcaaggatttgctaccaaaagagaagagcagtacagaagcagtattccacacagtggtgttggaaagacacgaaagccctgacattgaagacttttccttcaaggaaccccagaaaaatgtgcatgattttgagtgtcaatggagagatgacacaggaaattacaagggagtgcttatggcccagaaagaaggtaaaagagatcaacgcgacagaagagacatagaaaacaagcttatgaacaatcagcttggagtaagctttcattctcatctgcctgaactgcagctatttcaaggtgaggggaaaatgtatgaatgtaatcaagttgagaagtctaccaacaatggttcctcagtgtcaccacttcaacaaattccttctagtgtccaaacccacaggtctaaaaaatatcatgaacttaaccatttttcattactcacacaaagacgaaaagcaaacagttgtggaaaaccttataaatgtaatgaatgtggcaaggcgttcactcagaattcgaaccttacaagtcataggagaattcatagtggagagaagccttacaaatgcagtgagtgcggcaaaacctttactgttcgttcaaatctaactattcatcaggtcatccatactggagaaaaaccttacaaatgtcatgagtgtggcaaggtcttcaggcacaattcataccttgcaactcatcggcgaattcatactggagagaaaccttacaagtgtaatgagtgtggaaaagcctttagaggacattcaaacctaactacccatcagttaattcatactggagaaaaaccgttcaaatgtaatgaatgtggcaagctcttcactcaaaattcacaccttataagtcattggagaattcacactggagagaaaccttacaagtgcaatgagtgcggcaaagcctttagtgttcgttcaagcctagcaatccatcagacaatccacactggagaaaaaccttacaaatgtaatgaatgtggcaaagtctttaggtacaattcatacctcggaaggcatcggagagttcatactggtgagaaaccttacaagtgtaatgaatgtggcaaagccttcagtatgcattcaaacctagctacccatcaggtcatccatactggaacaaaacctttcaaatgcaatgaatgcagcaaggttttcactcaaaattcacaacttgcaaatcatcgaagaattcatactggagagaaaccttacaagtgtaatgagtgtgggaaagccttcagtgttcgttcaagtctgactacccatcaggcaatccattctggagagaaaccttacaaatgtattgaatgtggcaagagcttcactcaaaaatcacaccttagaagtcatcggggaattcattctggagagaaaccttacaagtgtaatgaatgtggtaaagtcttcgctcaaacatcacaacttgcaaggcattggagagttcatactggagaaaaaccttacaagtgtaatgactgtggcagagcctttagtgatcgttcaagcctaacttttcatcaggcaatacatactggagagaaaccttacaaatgtcatgaatgcggcaaggtttttaggcacaattcataccttgcaactcatcggcgaattcatactggagagaaaccttacaagtgtaatgagtgtgggaaagcctttagtatgcattcaaacctaactacccataaggtcatccatactggagagaagccttacaaatgtaatcaatgtggcaaggtcttcactcagaactcacaccttgcaaatcatcaaaggactcacaccggagagaaaccttaccgatgcaatgagtgtgggaaagccttcagtgttcgttcaagcctaaccacccatcaggcaatccatactgggaaaaaaccttacaaatgtaatgaatgtggcaaggtctttactcaaaatgctcacctggcaaatcaccgaagaattcatactggggagaaaccttacaggtgtacagagtgtgggaaagcctttagggtaagatcaagtctaactacccatatggcaatccacactggagaaaagcgttacaaatgtaatgagtgtggcaaggtcttcaggcagactgcatgcagttcatcaatttggctgcttttccatagctgctatgaaaatt

SEQ ID NO: 442809 - DNA, 1325 bp, Homo sapiens
  misc_feature (2)..(2): n is a, c, g, or t
  misc_feature (4)..(4): n is a, c, g, or t
tngnccacagacccggaagtggatcgtgcggagcaagcatcacaccatggcgtatgagtgttcctctgtgtagactcaacctgcgcctcgccgtcccccattcgcacacccgatgcccgggggtcgctacggacttaaaatctccgcaccgcaccctccacctcagaaacgttcctggatccgaacactgccccctgacgacctagagagatcccggctcccagcccactgagtggcttcagcctcgctgtcccccgcccacttcatccctcaggcacctcccaactcctggcctctctgcacgaggcgcctgccccgggccccgcctacaggggacccagctcttcttgcagccactggaagctgatcacctggagtgaagacctcacacgaagaagtctggaagaagaggaagaggaaagaaaaggagtcagggatggcccttactcaggtacggttgacatttagggatgtggccatagaattctctcaggaggagtggaaatgcctggaccctgctcagaggatcttatacagggacgtgatgttggagaactactggaaccttgtttctctgggactgtgtcattttgatatgaatattatctccatgttggaggaagggaaagagccctggactgtgaagagctgtgtgaaaatagcaagaaaaccaagaacgcgggaatgtgtcaaaggcgtggtcacagacctgctcaggagatggaaacattggctgctgctccttggcatctgctgccccaaacctcatggaagagtctccagccgtctccgcctgtcgaggtccctcggccatttcttccattctgcttttgccactttcatgggggtgtgtgataagcgagtgggttctatcttctaagattgttctcagcataaccgtaaagacacctaacaaaatccttctgtcattgatcctcagtcttacatggggtgcgtattctgtttttccaggcttcagcacagaaatacaagtactgcatgttgtcacttacatttggaatctaaaccaataaaactaatagcagcaaagagtagaatgtgggttaccacaggttggggactggagggaatagggagatgttggtcactgggtgaaaacattaggagtaaatgataggtttttgagatgacttatatggtaataggcttgtttccatcagtccatattgtatacctataacagaatatcagtttgtttcctgtaaatatatataactataatttgtcaatatagaatttttttaaaaatcatattccagttcttattgtgttggttctaaataaaaatgcttctttctcttaag

SEQ ID NO: 442810 - DNA, 861 bp, Homo sapiens
  misc_feature (2)..(2): n is a, c, g, or t
  misc_feature (4)..(4): n is a, c, g, or t
tngnccacagacccggaagtggatcgtgcggagcaagcatcacaccatggcgtatgagtgttcctctgtgtagactcaacctgcgcctcgccgtcccccattcgcacacccgatgcccgggggtcgctacggacttaaaatctccgcaccgcaccctccacctcagaaacgttcctggatccgaacactgccccctgacgacctagagagatcccggctcccagcccactgagtggcttcagcctcgctggaagaagtctggaagaagaggaagaggaaagaaaaggagtcagggatggcccttactcagattccatctcccgtgatccagtgacatgaacttgggaagaggctgcactgggcatggtcctgggaagggctcacacccagacatggatggagacggggtgagggtcctgtggtgtcagtgctgttgggcagcagggattgctcaggggccgcatctggatgcactgtcagcgctgtgtaaaccatgataacagaagctgcccatgaagtcaggtgcacacgtacctgctcactggcatagaaaagaacactaaggggaaagctttcctgcctcattggtaactgcatttgaagccgaacaagaaacaggagctcacttttctacatccttgttggagcatgctgggaatgaagacaggtggatcttttaactttctcacttctataaagaatgccacacagggtgctgcatggtggctcacacctgtaatcccagcacttgtggaagccaaggtgggaggatcatttgagccccagagattgaggctgcagtgagccatgatagtgccactgcacttcagcctgagtgatagaacaagaccttgtctcaaa

SEQ ID NO: 442811 - DNA, 5322 bp, Homo sapiens
  misc_feature (2)..(2): n is a, c, g, or t
  misc_feature (4)..(4): n is a, c, g, or t
  misc_feature (5024)..(5024): n is a, c, g, or t
tngnccacagacccggaagtggatcgtgcggagcaagcatcacaccatggcgtatgagtgttcctctgtgtagactcaacctgcgcctcgccgtcccccattcgcacacccgatgcccgggggtcgctacggacttaaaatctccgcaccgcaccctccacctcagaaacgttcctggatccgaacactgccccctgacgacctagagagatcccggctcccagcccactgagtggcttcagcctcgctggcacctcccaactcctggcctctctgcacgaggcgcctgccccgggccccgcctacaggggacccagctcttcttgcagccactggaagctgatcacctggagtgaagacctcacacgaagaagtctggaagaagaggaagaggaaagaaaaggagtcagggatggcccttactcaggtacggttgacatttagggatgtggccatagaattctctcaggaggagtggaaatgcctggaccctgctcagaggatcttatacagggacgtgatgttggagaactactggaaccttgtttctctgggactgtgtcattttgatatgaatattatctccatgttggaggaagggaaagagccctggactgtgaagagctgtgtgaaaatagcaagaaaaccaagaacgcgggaatgtgtcaaaggcgtggtcacagatatccctcctaaatgtacaatcaaggatttgctaccaaaagagaagagcagtacagaagcagtattccacacagtggtgttggaaagacacgaaagccctgacattgaagacttttccttcaaggaaccccagaaaaatgtgcatgattttgagtgtcaatggagagatgacacaggaaattacaagggagtgcttatggcccagaaagaaggtaaaagagatcaacgcgacagaagagacatagaaaacaagcttatgaacaatcagcttggagtaagctttcattctcatctgcctgaactgcagctatttcaaggtgaggggaaaatgtatgaatgtaatcaagttgagaagtctaccaacaatggttcctcagtgtcaccacttcaacaaattccttctagtgtccaaacccacaggtctaaaaaatatcatgaacttaaccatttttcattactcacacaaagacgaaaagcaaacagttgtggaaaaccttataaatgtaatgaatgtggcaaggcgttcactcagaattcgaaccttacaagtcataggagaattcatagtggagagaagccttacaaatgcagtgagtgcggcaaaacctttactgttcgttcaaatctaactattcatcaggtcatccatactggagaaaaaccttacaaatgtcatgagtgtggcaaggtcttcaggcacaattcataccttgcaactcatcggcgaattcatactggagagaaaccttacaagtgtaatgagtgtggaaaagcctttagaggacattcaaacctaactacccatcagttaattcatactggagaaaaaccgttcaaatgtaatgaatgtggcaagctcttcactcaaaattcacaccttataagtcattggagaattcacactggagagaaaccttacaagtgcaatgagtgcggcaaagcctttagtgttcgttcaagcctagcaatccatcagacaatccacactggagaaaaaccttacaaatgtaatgaatgtggcaaagtctttaggtacaattcatacctcggaaggcatcggagagttcatactggtgagaaaccttacaagtgtaatgaatgtggcaaagccttcagtatgcattcaaacctagctacccatcaggtcatccatactggaacaaaacctttcaaatgcaatgaatgcagcaaggttttcactcaaaattcacaacttgcaaatcatcgaagaattcatactggagagaaaccttacaagtgtaatgagtgtgggaaagccttcagtgttcgttcaagtctgactacccatcaggcaatccattctggagagaaaccttacaaatgtattgaatgtggcaagagcttcactcaaaaatcacaccttagaagtcatcggggaattcattctggagagaaaccttacaagtgtaatgaatgtggtaaagtcttcgctcaaacatcacaacttgcaaggcattggagagttcatactggagaaaaaccttacaagtgtaatgactgtggcagagcctttagtgatcgttcaagcctaacttttcatcaggcaatacatactggagagaaaccttacaaatgtcatgaatgcggcaaggtttttaggcacaattcataccttgcaactcatcggcgaattcatactggagagaaaccttacaagtgtaatgagtgtgggaaagcctttagtatgcattcaaacctaactacccataaggtcatccatactggagagaagccttacaaatgtaatcaatgtggcaaggtcttcactcagaactcacaccttgcaaatcatcaaaggactcacaccggagagaaaccttaccgatgcaatgagtgtgggaaagccttcagtgttcgttcaagcctaaccacccatcaggcaatccatactgggaaaaaaccttacaaatgtaatgaatgtggcaaggtctttactcaaaatgctcacctggcaaatcaccgaagaattcatactggggagaaaccttacaggtgtacagagtgtgggaaagcctttagggtaagatcaagtctaactacccatatggcaatccacactggagaaaagcgttacaaatgtaatgagtgtggcaaggtcttcaggcagagttcaaatcttgcaagtcatcacagaatgcataccggagagaaaccttacaaatgagtgtggtgaggtcattaggtacaattcactcctttcacatcagttaatttcattcttgacagaatccttacaaatgtagtgacagtggccaatccctcatgagttgaagcattaatagatatgagaggccataagcaagagacatcatgtaaacatatgtggcagagggtctatccaggcctcgcaggttactaggcatcaagatttatatctttgatgaaacgaaacaaatgtaatatgcatcctgaggccattacccagtgaccgatggtaagtgaggattcctaggaggaataacagtctctggtttccctgtttgcctttgatattatacactgtagaatactcacaagtccaaatatgctaaaaattatatatttttaactcacatacgaaaaggttgcaggatatttgtaggcagtcagttaccttcaccttatgaaatgtttcactgagttatttgaggttttttggaaagcctactattgcgtttcaatgtgaactttgaaatcttattgtgcatccttacacaccttccatggtgctttcttggaaagatcattgggatggaaggatcattgattgggtgaagatcattgattaggtgaaggattatttctatccaatttgtgaagaaggaggactttgcttttaaaattaagtatcatctgaattagcatttgggagtggcgaaaaacaatgtaaaactatgatgtcactcaccattctgataatgttcagggtgcctttctcctaccaggagagtactgtggcttagaggaaagaaatggtctatcaactgaacatgaaatggagcaggccaagaccttaggacattgggatttttgtgggaggagagtaataggtaattagacactgattgtgtggtagaaatactgcaggggaaaaggtcgccctcttatgcatcaaagagcaatacctgttgtttagcaaagagtgatgaaaaattgatcttgttttgaaattgaagagagaggccaggcgcggtggctcacacctgtaatcccagcactttgggaggctgaggcaggtggatcacctgaggtcgggagttcgagaccagcctgaccaacatggagaaaccccaattgtactaaaaatacaaaattagccgggcgtggtggcaggtgcctgtaatcccagctacttgggaggctgaggcaggagagtgcttgaacccaggaggcggaggttgtggtgagccaagatcatgccactgcactccagcctgggcaacaagaacaaaactccatctaaagaagaaaaagaaaaactgaagagagagtagttgtcagagtgaagagtttaatcaacagaagtagagtaacatattctttagtagaactcacattatctgcttgaagcacattttgctaatgttttattcagaatgtatcatagatataatgttttaactaataaaatagaatggtttttctctatgaatgaatcacattctttctgccaacatagttttatcctgtctcagtaggatactccataacacaatagcagtacaccactaggctcttaaacgatcaagaacaatttttttcatggtgaaatcaaataacgcagttttggaaacctataaccgcattttgtgcttgaattacgtgccccacactgtggcttaggatacttattggggtataatgaaaatcttactgaaagttaatttcacattcttacaccccaaaatctgcattgccattgatgcatatgcaccacattattatatttccacatcagtttcttgtgtgccaaataagacccatgctatgcatcttggtttccatgaagtgaaaatacatagtaagaatgcgagaaatataaatcaggccaggcacggtggctcacacctgtaatcccagtactttgggaggccaaggcaagcagatcacctgaagtcaggagagaccagcctggccagcatagtgaaaccccatctctactaaaaatacaaacttagctgggcttagtggtgcatgcctgtagtctcagctacttgggaggctgaggcaggagaattgcttgaatccaagaggcagaggttctattaatggagatcattccattacactccagcctgggcaccaggaacgaaactcgttctcaaaaaacaaaacaaaanaaaaaaaacgttggctgggcatggtggctcacgcctgtaatcccaacaatttgggaggctgaggcaggtggattacttaaggtcaggagttcaagaccagactggccaacatggtgaaaccctgtctctactaaaaatgcaaaaacattagctgggtgtggtggtgcatgcctgtaaatcccagctacttgggaggctgaggcaggagaatggcttgaacccaggtggtggaggctgcagtgagctgagatcacgccatcgcactccagcctgggcaacaagagcaaaactccatctc

SEQ ID NO: 442812 - DNA, 1206 bp, Homo sapiens
  misc_feature (2)..(2): n is a, c, g, or t
  misc_feature (4)..(4): n is a, c, g, or t
tngnccacagacccggaagtggatcgtgcggagcaagcatcacaccatggcgtatgagtgttcctctgtgtagactcaacctgcgcctcgccgtcccccattcgcacacccgatgcccgggggtcgctacggacttaaaatctccgcaccgcaccctccacctcagaaacgttcctggatccgaacactgccccctgacgacctagagagatcccggctcccagcccactgagtggcttcagcctcgctggcacctcccaactcctggcctctctgcacgaggcgcctgccccgggccccgcctacaggggacccagctcttcttgcagccactggaagctgatcacctggagtgaagacctcacacgaagaagtctggaagaagaggaagaggaaagaaaaggagtcagggatggcccttactcaggtacggttgacatttagggatgtggccatagaattctctcaggaggagtggaaatgcctggaccctgctcagaggatcttatacagggacgtgatgttggagaactactggaaccttgtttctctgggactgtgtcattttgatatgaatattatctccatgttggaggaagggaaagagccctggactgtgaagagctgtgtgaaaatagcaagaaaaccaagaacgcgggaatgtgtcaaaggcgtggtcacagatatccctcctaaatgtacaatcaaggatttgctaccaaaagagaagagcagtacagaagcagtattccacacagtggtgttggaaagacacgaaagccctgacattgaagacttttccttcaaggaaccccagaaaaatgtgcatgattttgagtgtcaatggagagatgacacaggaaattacaagggagtgcttatggcccagaaagaaggtaaaagagatcaacgcgacagaagagacatagaacctaccaagattaaacagtaaagaaatccaaaacctaaacagaccaataacaattaatgagattgaagctttaataaaaaaactcttccaggaaagaacagcccaggacctgatggcttcattactgtattttaccaaacatttcaagaagtaataccaattcctattcaaactattctgaaaaataaggaggagggaatactttcaaactcattctatgaggccagttttaccctgatatcaagaccagaccaagatacatcaaaaaaaggaaa

SEQ ID NO: 442813 - DNA, 291 bp, Homo sapiens
ttgttccctttcttctttcagctttgcttcagtgccaacctatcagaaaagccttccctgcttattccgtataaatatttccactcttttctctttttccactctacgtaataacatcttttaatttttttttgagactgtctctgaaaaaaaaataataagatcataggccagtctcagtggctcgcacctgttaattccaacactttgggaggctgaggtgggaggatcactggagcccaggagttgtagacccatctgggcaacatagcgagattctgtctctatttt

SEQ ID NO: 442814 - DNA, 4120 bp, Homo sapiens
gctcttctcgcctcatctcacataagggaaaactcaggctccaaaagcaaagtgattccaccaagatgacaatggaatcgggacctggtgtccaagcctggtcctcgcacgaggtagatactccctgagatgctggggaagagccatggtagggccactcatggccctcttcctttggcggaccttggaatccaccttccctgcgttaaagtgctccaccaggtgacgccggaagagaagccagcaggcggcggcggcgtcagcatcagcggcctcctgcccgtatctatcgtggcggcgacgggacccgcctccctgggcgccggagtcatgtgacccacacaatggctgagtggctactctcggcttcctggcaacgccgagcgaaagctatgactgcggccgcgggttcggcgggccgcgccgcggtgcccttgctgctgtgtgcgctgctggcgcccggcggcgcgtacgtgctcgacgactccgacgggctgggccgggagttcgacggcatcggcgcggtcagcggcggcggggcaacctcccgacttctagtaaattacccagagccctatcgttctcagatattggattatctctttaagccgaattttggtgcctctttgcatattttaaaagtggaaataggtggtgatgggcagacaacagacggcactgagccctcccacatgcattatgcactagatgagaattatttccgaggatacgagtggtggttgatgaaagaagctaagaagaggaatcccaatattacactcattgggttgccatggtcattccctggatggctgggaaaaggtttcgactggccttatgtcaatcttcagctgactgcctattatgtcgtgacctggattgtgggcgccaagcgttaccatgatttggacattgattatattggaatttggaatgagaggtcatataatgccaattatattaagatattaagaaaaatgctgaattatcaaggtctccagcgagtgaaaatcatagcaagtgataatctctgggagtccatctctgcatccatgctccttgatgccgaactcttcaaggtggttgatgttataggggctcattatcctggaacccattcagcaaaagatgcaaagttgactgggaagaagctttggtcttctgaagactttagcactttaaatagtgacatgggtgcaggctgctggggtcgcattttaaatcagaattatatcaatggctatatgacttccacaatcgcatggaatttagtggctagttactatgaacagttgccttatgggagatgcgggttgatgacggcccaagagccatggagtgggcactacgtggtagaatctcctgtctgggtatcagctcataccactcagtttactcaacctggctggtattacctgaagacagttggccatttagagaaaggaggaagctacgtagctctgactgatggcttagggaacctcaccatcatcattgaaaccatgagtcataaacattctaagtgcatacggccatttcttccttatttcaatgtgtcacaacaatttgccacctttgttcttaagggatcttttagtgaaataccagagctacaggtatggtataccaaacttggaaaaacatccgaaagatttctttttaagcagctggattctctatggctccttgacagcgatggcagtttcacactgagcctgcatgaagatgagctgttcacactcaccactctcaccactggtcgcaaaggcagctacccgcttcctccaaaatcccagcccttcccaagtacctataaggatgatttcaatgttgattacccattttttagtgaagctccaaactttgctgatcaaactggtgtatttgaatattttacaaatattgaagaccctggcgagcatcacttcacgctacgccaagttctcaaccagagacccattacgtgggctgccgatgcatccaacacaatcagtattataggagactacaactggaccaatctgactataaagtgtgatgtttacatagagacccctgacacaggaggtgtgttcattgcaggaagagtaaataaaggtggtattttgattagaagtgccagaggaattttcttctggatttttgcaaatggatcttacagggttacaggtgatttagctggatggattatatatgctttaggacgtgttgaagttacagcaaaaaaatggtatacactcacgttaactattaagggtcatttcgcctctggcatgctgaatgacaagtctctgtggacagacatccctgtgaattttccaaagaatggctgggctgcaattggaactcactcctttgaatttgcacagtttgacaactttcttgtggaagccacacgctaatacttaacagggcatcatagaatactctggattttcttcccttctttttggttttggttcagagccaattcttgtttcattggaacagtatatgaggcttttgagactaaaaataatgaagagtaaaaggggagagaaatttatttttaatttaccctgtggaagattttattagaattaattccaaggggaaaactggtgaatctttaacattacctggtgtgttccctaacattcaaactgtgcattggccatacccttaggagtggtttgagtagtacagacctcgaagccttgctgctaacactgaggtagctctcttcatcttatttgcaagcggtcctgtagatggcagtaacttgatcatcactgagatgtatttatgcatgctgaccgtgtgtccaagtgagccagtgtcttcatcacaagatgatgctgccataatagaaagctgaagaacactagaagtagctttttgaaaaccacttcaacctgttatgctttatgctctaaaaagtatttttttattttcctttttaagatgatacttttgaaatgcaggatatgatgagtgggatgattttaaaaacgcctctttaataaactacctctaacactatttctgcggtaatagatattagcagattaattgggttatttgcattatttaatttttttgattccaagttttggtcttgtaaccactataactctctgtgaacgtttttccaggtggctggaagaaggaagaaaacctgatatagccaatgctgttgtagtcgtttcctcagcctcatctcactgtgctgtggtctgtcctcacatgtgcactggtaacagactcacacagctgatgaatgcttttctctccttatgtgtggaaggaggggagcacttagacatttgctaactcccagaattggatcatctcctaagatgtacttactttttaaagtccaaatatgtttatatttaaatatacgtgagcatgttcatcatgttgtatgatttatactaagcattaatgtggctctatgtagcaaatcagttattcatgtaggtaaagtaaatctagaattatttataagaattactcattgaactaattctactatttaggaatttgtaagagtctaacataggcttagctacagtgaagttttgcattgcttttgaagacaagaagataagtgctagaataaataagattacagagaaaattttttgttaaaaccaagtgatttccagctgatgtatctaatattttttaaaacgaacattatagaggtgtaatttatttacaataaaatgttcctactttaaatatacaattcagtgagttttgataaattgatatacccatgtaaccaacactccagtcaagcttcagaatatttccatcaccccagaaggttctcttgtatacctgctcagtcagttcctttcactcccaattgttggcagccattgataggaattctatcactataggttagttttctttgttccagaacatcatgaaagcggcgtcatgtactgtgtattcttatgaatggtttctttccatcagcataatgatttgagatttgtccatgttgtgtgattcagtggtttgttccttcttatttctgaagagttttccattgtatgaatataccacaatttgtttcctccccaccagtttctgatactacaattaaaactgtctacatttacaa

SEQ ID NO: 442815 - DNA, 491 bp, Homo sapiens
  misc_feature (52)..(52): n is a, c, g, or t
  misc_feature (113)..(113): n is a, c, g, or t
  misc_feature (116)..(118): n is a, c, g, or t
gtggaatgatgacagtatagggggaaggggagctggagaaaggttggttagngggtacaaacatacagttagatggaaggaagaagctcaaatgttggatagcagagttaggnggnnngggtagaagacctaccatgtaaccaacactccagtcaagcttcagaatatttccatcaccccagaaggttctcttgtatacctgctcagtcagttcctttcactcccaattgttggcagccattgataggaattctatcactataggttagttttctttgttccagaacatcatgaaagcggcgtcatgtactgtgtattcttatgaatggtttctttccatcagcataatgatttgagatttgtccatgttgtgtgattcagtggtttgttccttcttatttctgaagagttttccattgtatgaatataccacaatttgtttcctccccaccagtttctgatactacaattaaaactgtctacatttacaa

SEQ ID NO: 442816 - DNA, 376 bp, Homo sapiens
atctagattaattatttaaaaatttaaacatgaggttgacggatatattcctccaaaatagaaaatagcttgtttggatgaatcagactcaaattgatatacagctttttttttttcccaaaagaaatactattattaccatttttgtcttatttggaactttctgtttttctatagctcataccactcagtttactcaacctggctggtattacctgaagacagttggccatttagagaaaggaggaagctacgtagctctgactgatggcttagggaacctcaccatcatcattgaaaccatggtaaacttttgttgttgctattggattaactcacttctttactattggaaaaataaaatataaaactgaaa

SEQ ID NO: 442817 - DNA, 4186 bp, Homo sapiens
gctcttctcgcctcatctcacataagggaaaactcaggctccaaaagcaaagtgattccaccaagatgacaatggaatcgggacctggtgtccaagcctggtcctcgcacgaggtagatactccctgagatgctggggaagagccatggtagggccactcatggccctcttcctttggcggaccttggaatccaccttccctgcgttaaagtgctccaccaggtgacgccggaagagaagccagcagtaagtacatgtgaaatccagtagctgaccacagacacgcgagcgataagaaaaagctcgctgcttcttttctcaacactccgccagctgcgtcagaggcccttgacccgcactcaaaatggcggcggcggcgtcagcatcagcggcctcctgcccgtatctatcgtggcggcgacgggacccgcctccctgggcgccggagtcatgtgacccacacaatggctgagtggctactctcggcttcctggcaacgccgagcgaaagctatgactgcggccgcgggttcggcgggccgcgccgcggtgcccttgctgctgtgtgcgctgctggcgcccggcggcgcgtacgtgctcgacgactccgacgggctgggccgggagttcgacggcatcggcgcggtcagcggcggcggggcaacctcccgacttctagtaaattacccagagccctatcgttctcagatattggattatctctttaagccgaattttggtgcctctttgcatattttaaaagtggaaataggtggtgatgggcagacaacagacggcactgagccctcccacatgcattatgcactagatgagaattatttccgaggatacgagtggtggttgatgaaagaagctaagaagaggaatcccaatattacactcattgggttgccatggtcattccctggatggctgggaaaaggtttcgactggccttatgtcaatcttcagctgactgcctattatgtcgtgacctggattgtgggcgccaagcgttaccatgatttggacattgattatattggaatttggaatgagaggtcatataatgccaattatattaagatattaagaaaaatgctgaattatcaaggtctccagcgagtgaaaatcatagcaagtgataatctctgggagtccatctctgcatccatgctccttgatgccgaactcttcaaggtggttgatgttataggggctcattatcctggaacccattcagctttaaatagtgacatgggtgcaggctgctggggtcgcattttaaatcagaattatatcaatggctatatgacttccacaatcgcatggaatttagtggctagttactatgaacagttgccttatgggagatgcgggttgatgacggcccaagagccatggagtgggcactacgtggtagaatctcctgtctgggtatcagctcataccactcagtttactcaacctggctggtattacctgaagacagttggccatttagagaaaggaggaagctacgtagctctgactgatggcttagggaacctcaccatcatcattgaaaccatgagtcataaacattctaagtgcatacggccatttcttccttatttcaatgtgtcacaacaatttgccacctttgttcttaagggatcttttagtgaaataccagagctacaggtatggtataccaaacttggaaaaacatccgaaagatttctttttaagcagctggattctctatggctccttgacagcgatggcagtttcacactgagcctgcatgaagatgagctgttcacactcaccactctcaccactggtcgcaaaggcagctacccgcttcctccaaaatcccagcccttcccaagtacctataaggatgatttcaatgttgattacccattttttagtgaagctccaaactttgctgatcaaactggtgtatttgaatattttacaaatattgaagaccctggcgagcatcacttcacgctacgccaagttctcaaccagagacccattacgtgggctgccgatgcatccaacacaatcagtattataggagactacaactggaccaatctgactataaagtgtgatgtttacatagagacccctgacacaggaggtgtgttcattgcaggaagagtaaataaaggtggtattttgattagaagtgccagaggaattttcttctggatttttgcaaatggatcttacagggttacaggtgatttagctggatggattatatatgctttaggacgtgttgaagttacagcaaaaaaatggtatacactcacgttaactattaagggtcatttcgcctctggcatgctgaatgacaagtctctgtggacagacatccctgtgaattttccaaagaatggctgggctgcaattggaactcactcctttgaatttgcacagtttgacaactttcttgtggaagccacacgctaatacttaacagggcatcatagaatactctggattttcttcccttctttttggttttggttcagagccaattcttgtttcattggaacagtatatgaggcttttgagactaaaaataatgaagagtaaaaggggagagaaatttatttttaatttaccctgtggaagattttattagaattaattccaaggggaaaactggtgaatctttaacattacctggtgtgttccctaacattcaaactgtgcattggccatacccttaggagtggtttgagtagtacagacctcgaagccttgctgctaacactgaggtagctctcttcatcttatttgcaagcggtcctgtagatggcagtaacttgatcatcactgagatgtatttatgcatgctgaccgtgtgtccaagtgagccagtgtcttcatcacaagatgatgctgccataatagaaagctgaagaacactagaagtagctttttgaaaaccacttcaacctgttatgctttatgctctaaaaagtatttttttattttcctttttaagatgatacttttgaaatgcaggatatgatgagtgggatgattttaaaaacgcctctttaataaactacctctaacactatttctgcggtaatagatattagcagattaattgggttatttgcattatttaatttttttgattccaagttttggtcttgtaaccactataactctctgtgaacgtttttccaggtggctggaagaaggaagaaaacctgatatagccaatgctgttgtagtcgtttcctcagcctcatctcactgtgctgtggtctgtcctcacatgtgcactggtaacagactcacacagctgatgaatgcttttctctccttatgtgtggaaggaggggagcacttagacatttgctaactcccagaattggatcatctcctaagatgtacttactttttaaagtccaaatatgtttatatttaaatatacgtgagcatgttcatcatgttgtatgatttatactaagcattaatgtggctctatgtagcaaatcagttattcatgtaggtaaagtaaatctagaattatttataagaattactcattgaactaattctactatttaggaatttgtaagagtctaacataggcttagctacagtgaagttttgcattgcttttgaagacaagaagataagtgctagaataaataagattacagagaaaattttttgttaaaaccaagtgatttccagctgatgtatctaatattttttaaaacgaacattatagaggtgtaatttatttacaataaaatgttcctactttaaatatacaattcagtgagttttgataaattgatatacccatgtaaccaacactccagtcaagcttcagaatatttccatcaccccagaaggttctcttgtatacctgctcagtcagttcctttcactcccaattgttggcagccattgataggaattctatcactataggttagttttctttgttccagaacatcatgaaagcggcgtcatgtactgtgtattcttatgaatggtttctttccatcagcataatgatttgagatttgtccatgttgtgtgattcagtggtttgttccttcttatttctgaagagttttccattgtatgaatataccacaatttgtttcctccccaccagtttctgatactacaattaaaactgtctacatttacaa

SEQ ID NO: 442818 - DNA, 4066 bp, Homo sapiens
tgccagtcagcaggcggttggggcgggcccgctgcggggctggggcgggtgctttctcgtttaacacgaaccagacaggcagttaggtttgaacaaatgaggatccggaggtccagagagtataggtgcagagagtaaagtgacaggtctaagtagtgaagtagccggggctggaaccctcgtcccaggcagtggggcacaggctgtcttcatcgcggagatggcagtcggggagcgtcgctccagaaagggccagggagtgcgggagcgtccgtgtgcgaaagagaacgccccagtgggatgctttggctgtgtctctcccttttggaggagttggtgggtggtggagtcgttaagtcccgtgcagttgttagtgcagggtaagaatgggctcctccagagagggtagcgccgaataggatttcgtttggaggcaggactggtgcctcaaggtctctttaaaaggaagataagcgagcggcctgaaactaccgggtactccctctgggcccatgggcttcatggtggccgacctttgggcaacctcccgacttctagtaaattacccagagccctatcgttctcagatattggattatctctttaagccgaattttggtgcctctttgcatattttaaaagtggaaataggtggtgatgggcagacaacagacggcactgagccctcccacatgcattatgcactagatgagaattatttccgaggatacgagtggtggttgatgaaagaagctaagaagaggaatcccaatattacactcattgggttgccatggtcattccctggatggctgggaaaaggtttcgactggccttatgtcaatcttcagctgactgcctattatgtcgtgacctggattgtgggcgccaagcgttaccatgatttggacattgattatattggaatttggaatgagaggtcatataatgccaattatattaagatattaagaaaaatgctgaattatcaaggtctccagcgagtgaaaatcatagcaagtgataatctctgggagtccatctctgcatccatgctccttgatgccgaactcttcaaggtggttgatgttataggggctcattatcctggaacccattcagctttaaatagtgacatgggtgcaggctgctggggtcgcattttaaatcagaattatatcaatggctatatgacttccacaatcgcatggaatttagtggctagttactatgaacagttgccttatgggagatgcgggttgatgacggcccaagagccatggagtgggcactacgtggtagaatctcctgtctgggtatcagctcataccactcagtttactcaacctggctggtattacctgaagacagttggccatttagagaaaggaggaagctacgtagctctgactgatggcttagggaacctcaccatcatcattgaaaccatgagtcataaacattctaagtgcatacggccatttcttccttatttcaatgtgtcacaacaatttgccacctttgttcttaagggatcttttagtgaaataccagagctacaggtatggtataccaaacttggaaaaacatccgaaagatttctttttaagcagctggattctctatggctccttgacagcgatggcagtttcacactgagcctgcatgaagatgagctgttcacactcaccactctcaccactggtcgcaaaggcagctacccgcttcctccaaaatcccagcccttcccaagtacctataaggatgatttcaatgttgattacccattttttagtgaagctccaaactttgctgatcaaactggtgtatttgaatattttacaaatattgaagaccctggcgagcatcacttcacgctacgccaagttctcaaccagagacccattacgtgggctgccgatgcatccaacacaatcagtattataggagactacaactggaccaatctgactataaagtgtgatgtttacatagagacccctgacacaggaggtgtgttcattgcaggaagagtaaataaaggtggtattttgattagaagtgccagaggaattttcttctggatttttgcaaatggatcttacagggttacaggtgatttagctggatggattatatatgctttaggacgtgttgaagttacagcaaaaaaatggtatacactcacgttaactattaagggtcatttcgcctctggcatgctgaatgacaagtctctgtggacagacatccctgtgaattttccaaagaatggctgggctgcaattggaactcactcctttgaatttgcacagtttgacaactttcttgtggaagccacacgctaatacttaacagggcatcatagaatactctggattttcttcccttctttttggttttggttcagagccaattcttgtttcattggaacagtatatgaggcttttgagactaaaaataatgaagagtaaaaggggagagaaatttatttttaatttaccctgtggaagattttattagaattaattccaaggggaaaactggtgaatctttaacattacctggtgtgttccctaacattcaaactgtgcattggccatacccttaggagtggtttgagtagtacagacctcgaagccttgctgctaacactgaggtagctctcttcatcttatttgcaagcggtcctgtagatggcagtaacttgatcatcactgagatgtatttatgcatgctgaccgtgtgtccaagtgagccagtgtcttcatcacaagatgatgctgccataatagaaagctgaagaacactagaagtagctttttgaaaaccacttcaacctgttatgctttatgctctaaaaagtatttttttattttcctttttaagatgatacttttgaaatgcaggatatgatgagtgggatgattttaaaaacgcctctttaataaactacctctaacactatttctgcggtaatagatattagcagattaattgggttatttgcattatttaatttttttgattccaagttttggtcttgtaaccactataactctctgtgaacgtttttccaggtggctggaagaaggaagaaaacctgatatagccaatgctgttgtagtcgtttcctcagcctcatctcactgtgctgtggtctgtcctcacatgtgcactggtaacagactcacacagctgatgaatgcttttctctccttatgtgtggaaggaggggagcacttagacatttgctaactcccagaattggatcatctcctaagatgtacttactttttaaagtccaaatatgtttatatttaaatatacgtgagcatgttcatcatgttgtatgatttatactaagcattaatgtggctctatgtagcaaatcagttattcatgtaggtaaagtaaatctagaattatttataagaattactcattgaactaattctactatttaggaatttgtaagagtctaacataggcttagctacagtgaagttttgcattgcttttgaagacaagaagataagtgctagaataaataagattacagagaaaattttttgttaaaaccaagtgatttccagctgatgtatctaatattttttaaaacgaacattatagaggtgtaatttatttacaataaaatgttcctactttaaatatacaattcagtgagttttgataaattgatatacccatgtaaccaacactccagtcaagcttcagaatatttccatcaccccagaaggttctcttgtatacctgctcagtcagttcctttcactcccaattgttggcagccattgataggaattctatcactataggttagttttctttgttccagaacatcatgaaagcggcgtcatgtactgtgtattcttatgaatggtttctttccatcagcataatgatttgagatttgtccatgttgtgtgattcagtggtttgttccttcttatttctgaagagttttccattgtatgaatataccacaatttgtttcctccccaccagtttctgatactacaattaaaactgtctacatttacaa

SEQ ID NO: 442819 - DNA, 4185 bp, Homo sapiens
gctcttctcgcctcatctcacataagggaaaactcaggctccaaaagcaaagtgattccaccaagatgacaatggaatcgggacctggtgtccaagcctggtcctcgcacgaggtagatactccctgagatgctggggaagagccatggtagggccactcatggccctcttcctttggcggaccttggaatccaccttccctgcgttaaagtgctccaccaggtgacgccggaagagaagccagcagtaagtacatgtgaaatccagtagctgaccacagacacgcgagcgataagaaaaagctcgctgcttcttttctcaacactccgccagctgcgtcagaggcccttgacccgcactcaaaatggcggcggcggcgtcagcatcagcggcctcctgcccgtatctatcgtggcggcgacgggacccgcctccctgggcgccggagtcatgtgacccacacaatggctgagtggctactctcggcttcctggcaacgccgagcgaaagctatgactgcggccgcgggttcggcgggccgcgccgcggtgcccttgctgctgtgtgcgctgctggcgcccggcggcgcgtacgtgctcgacgactccgacgggctgggccgggagttcgacggcatcggcgcggtcagcggcggcggggcaacctcccgacttctagtaaattacccagagccctatcgttctcagatattggattatctctttaagccgaattttggtgcctctttgcatattttaaaagtggaaataggtggtgatgggcagacaacagacggcactgagccctcccacatgcattatgcactagatgagaattatttccgaggatacgagtggtggttgatgaaagaagctaagaagaggaatcccaatattacactcattgggttgccatggtcattccctggatggctgggaaaaggtttcgactggccttatgtcaatcttcagctgactgcctattatgtcgtgacctggattgtgggcgccaagcgttaccatgatttggacattgattatattggaatttggaatgagaggtcatataatgccaattatattaagatattaagaaaaatgctgaattatcaaggtctccagcgagtgaaaatcatagcaagtgataatctctgggagtccatctctgcatccatgctccttgatgccgaactcttcaaggtggttgatgttataggggctcattatcctggaacccattcagcaaaagatgcaaagttgactgggaagaagctttggtcttctgaagactttagcactttaaatagtgacatgggtgcaggctgctggggtcgcattttaaatcagaattatatcaatggctatatgacttccacaatcgcatggaatttagtggctagttactatgaacagttgccttatgggagatgcgggttgatgacggcccaagagccatggagtgggcactacgtggtagaatctcctgtctgggtatcagctcataccactcagtttactcaacctggctggtattacctgaagacagttggccatttagagaaaggaggaagctacgtagctctgactgatggcttagggaacctcaccatcatcattgaaaccatgagtcataaacattctaagtgcatacggccatttcttccttatttcaatgtgtcacaacaatttgccacctttgttcttaagggatcttttagtgaaataccagagctacaggtatggtataccaaacttggaaaaacatccgaaagatttctttttaagcagctggattctctatggctccttgacagcgatggcagtttcacactgagcctgcatgaagatgagctgttcacactcaccactctcaccactggtcgcaaaggcagctacccgcttcctccaaaatcccagcccttcccaagtacctataaggatgatttcaatgttgattacccattttttagtgaagctccaaactttgctgatcaaactggtgtatttgaatattttacaaatattgaagaccctggcgagcatcacttcacgctacgccaagttctcaaccagagacccattacgtgggctgccgatgcatccaacacaatcagtattataggagactacaactggaccaatctgactataaagtgtgatgtttacatagagacccctgacacaggaggtgtgttcattgcaggaagagtaaataaaggtggtattttgattagaagtgccagaggaattttcttctggatttttgcaaatggatcttacagggttacaggtgatttagctggatggattatatatgctttaggacgtgttgaagttacagcaaaaaaatggtatacactcacgttaactattaagggtcatttcgcctctggcatgctgaatgacaagtctctgtggacagacatccctgtgaattttccaaagaatggctgggctgcaattggaactcactcctttgaatttgcacagtttgacaactttcttgtggaagccacacgctaatacttaacagggcatcatagaatactctggattttcttcccttctttttggttttggttcagagccaattcttgtttcattggaacagtatatgaggcttttgagactaaaaataatgaagagtaaaaggggagagaaatttatttttaatttaccctgtggaagattttattagaattaattccaaggggattggccatacccttaggagtggtttgagtagtacagacctcgaagccttgctgctaacactgaggtagctctcttcatcttatttgcaagcggtcctgtagatggcagtaacttgatcatcactgagatgtatttatgcatgctgaccgtgtgtccaagtgagccagtgtcttcatcacaagatgatgctgccataatagaaagctgaagaacactagaagtagctttttgaaaaccacttcaacctgttatgctttatgctctaaaaagtatttttttattttcctttttaagatgatacttttgaaatgcaggatatgatgagtgggatgattttaaaaacgcctctttaataaactacctctaacactatttctgcggtaatagatattagcagattaattgggttatttgcattatttaatttttttgattccaagttttggtcttgtaaccactataactctctgtgaacgtttttccaggtggctggaagaaggaagaaaacctgatatagccaatgctgttgtagtcgtttcctcagcctcatctcactgtgctgtggtctgtcctcacatgtgcactggtaacagactcacacagctgatgaatgcttttctctccttatgtgtggaaggaggggagcacttagacatttgctaactcccagaattggatcatctcctaagatgtacttactttttaaagtccaaatatgtttatatttaaatatacgtgagcatgttcatcatgttgtatgatttatactaagcattaatgtggctctatgtagcaaatcagttattcatgtaggtaaagtaaatctagaattatttataagaattactcattgaactaattctactatttaggaatttgtaagagtctaacataggcttagctacagtgaagttttgcattgcttttgaagacaagaagataagtgctagaataaataagattacagagaaaattttttgttaaaaccaagtgatttccagctgatgtatctaatattttttaaaacgaacattatagaggtgtaatttatttacaataaaatgttcctactttaaatatacaattcagtgagttttgataaattgatatacccatgtaaccaacactccagtcaagcttcagaatatttccatcaccccagaaggttctcttgtatacctgctcagtcagttcctttcactcccaattgttggcagccattgataggaattctatcactataggttagttttctttgttccagaacatcatgaaagcggcgtcatgtactgtgtattcttatgaatggtttctttccatcagcataatgatttgagatttgtccatgttgtgtgattcagtggtttgttccttcttatttctgaagagttttccattgtatgaatataccacaatttgtttcctccccaccagtttctgatactacaattaaaactgtctacatttacaa

SEQ ID NO: 442820 - DNA, 4328 bp, Homo sapiens
gctcttctcgcctcatctcacataagggaaaactcaggctccaaaagcaaagtgattccaccaagatgacaatggaatcgggacctggtgtccaagcctggtcctcgcacgaggtagatactccctgagatgctggggaagagccatggtagggccactcatggccctcttcctttggcggaccttggaatccaccttccctgcgttaaagtgctccaccaggtgacgccggaagagaagccagcagtaagtacatgtgaaatccagtagctgaccacagacacgcgagcgataagaaaaagctcgctgcttcttttctcaacactccgccagctgcgtcagaggcccttgacccgcactcaaaatggcggcggcggcgtcagcatcagcggcctcctgcccgtatctatcgtggcggcgacgggacccgcctccctgggcgccggagtcatgtgacccacacaatggctgagtggctactctcggcttcctggcaacgccgagcgaaagctatgactgcggccgcgggttcggcgggccgcgccgcggtgcccttgctgctgtgtgcgctgctggcgcccggcggcgcgtacgtgctcgacgactccgacgggctgggccgggagttcgacggcatcggcgcggtcagcggcggcggggcaacctcccgacttctagtaaattacccagagccctatcgttctcagatattggattatctctttaagccgaattttggtgcctctttgcatattttaaaagtggaaataggtggtgatgggcagacaacagacatattataggctaaaggtgtgggttctgagaacagggctcacgagtccagggattcatatccagcgttgaaaagctgaaagttgagacggcactgagccctcccacatgcattatgcactagatgagaattatttccgaggatacgagtggtggttgatgaaagaagctaagaagaggaatcccaatattacactcattgggttgccatggtcattccctggatggctgggaaaaggtttcgactggccttatgtcaatcttcagctgactgcctattatgtcgtgacctggattgtgggcgccaagcgttaccatgatttggacattgattatattggaatttggaatgagaggtcatataatgccaattatattaagatattaagaaaaatgctgaattatcaaggtctccagcgagtgaaaatcatagcaagtgataatctctgggagtccatctctgcatccatgctccttgatgccgaactcttcaaggtggttgatgttataggggctcattatcctggaacccattcagcaaaagatgcaaagttgactgggaagaagctttggtcttctgaagactttagcactttaaatagtgacatgggtgcaggctgctggggtcgcattttaaatcagaattatatcaatggctatatgacttccacaatcgcatggaatttagtggctagttactatgaacagttgccttatgggagatgcgggttgatgacggcccaagagccatggagtgggcactacgtggtagaatctcctgtctgggtatcagctcataccactcagtttactcaacctggctggtattacctgaagacagttggccatttagagaaaggaggaagctacgtagctctgactgatggcttagggaacctcaccatcatcattgaaaccatgagtcataaacattctaagtgcatacggccatttcttccttatttcaatgtgtcacaacaatttgccacctttgttcttaagggatcttttagtgaaataccagagctacaggtatggtataccaaacttggaaaaacatccgaaagatttctttttaagcagctggattctctatggctccttgacagcgatggcagtttcacactgagcctgcatgaagatgagctgttcacactcaccactctcaccactggtcgcaaaggcagctacccgcttcctccaaaatcccagcccttcccaagtacctataaggatgatttcaatgttgattacccattttttagtgaagctccaaactttgctgatcaaactggtgtatttgaatattttacaaatattgaagaccctggcgagcatcacttcacgctacgccaagttctcaaccagagacccattacgtgggctgccgatgcatccaacacaatcagtattataggagactacaactggaccaatctgactataaagtgtgatgtttacatagagacccctgacacaggaggtgtgttcattgcaggaagagtaaataaaggtggtattttgattagaagtgccagaggaattttcttctggatttttgcaaatggatcttacagggttacaggtgatttagctggatggattatatatgctttaggacgtgttgaagttacagcaaaaaaatggtatacactcacgttaactattaagggtcatttcgcctctggcatgctgaatgacaagtctctgtggacagacatccctgtgaattttccaaagaatggctgggctgcaattggaactcactcctttgaatttgcacagtttgacaactttcttgtggaagccacacgctaatacttaacagggcatcatagaatactctggattttcttcccttctttttggttttggttcagagccaattcttgtttcattggaacagtatatgaggcttttgagactaaaaataatgaagagtaaaaggggagagaaatttatttttaatttaccctgtggaagattttattagaattaattccaaggggaaaactggtgaatctttaacattacctggtgtgttccctaacattcaaactgtgcattggccatacccttaggagtggtttgagtagtacagacctcgaagccttgctgctaacactgaggtagctctcttcatcttatttgcaagcggtcctgtagatggcagtaacttgatcatcactgagatgtatttatgcatgctgaccgtgtgtccaagtgagccagtgtcttcatcacaagatgatgctgccataatagaaagctgaagaacactagaagtagctttttgaaaaccacttcaacctgttatgctttatgctctaaaaagtatttttttattttcctttttaagatgatacttttgaaatgcaggatatgatgagtgggatgattttaaaaacgcctctttaataaactacctctaacactatttctgcggtaatagatattagcagattaattgggttatttgcattatttaatttttttgattccaagttttggtcttgtaaccactataactctctgtgaacgtttttccaggtggctggaagaaggaagaaaacctgatatagccaatgctgttgtagtcgtttcctcagcctcatctcactgtgctgtggtctgtcctcacatgtgcactggtaacagactcacacagctgatgaatgcttttctctccttatgtgtggaaggaggggagcacttagacatttgctaactcccagaattggatcatctcctaagatgtacttactttttaaagtccaaatatgtttatatttaaatatacgtgagcatgttcatcatgttgtatgatttatactaagcattaatgtggctctatgtagcaaatcagttattcatgtaggtaaagtaaatctagaattatttataagaattactcattgaactaattctactatttaggaatttgtaagagtctaacataggcttagctacagtgaagttttgcattgcttttgaagacaagaagataagtgctagaataaataagattacagagaaaattttttgttaaaaccaagtgatttccagctgatgtatctaatattttttaaaacgaacattatagaggtgtaatttatttacaataaaatgttcctactttaaatatacaattcagtgagttttgataaattgatatacccatgtaaccaacactccagtcaagcttcagaatatttccatcaccccagaaggttctcttgtatacctgctcagtcagttcctttcactcccaattgttggcagccattgataggaattctatcactataggttagttttctttgttccagaacatcatgaaagcggcgtcatgtactgtgtattcttatgaatggtttctttccatcagcataatgatttgagatttgtccatgttgtgtgattcagtggtttgttccttcttatttctgaagagttttccattgtatgaatataccacaatttgtttcctccccaccagtttctgatactacaattaaaactgtctacatttacaa

SEQ ID NO: 442821 - DNA, 4186 bp, Homo sapiens
gctcttctcgcctcatctcacataagggaaaactcaggctccaaaagcaaagtgattccaccaagatgacaatggaatcgggacctggtgtccaagcctggtcctcgcacgaggtagatactccctgagatgctggggaagagccatggtagggccactcatggccctcttcctttggcggaccttggaatccaccttccctgcgttaaagtgctccaccaggtgacgccggaagagaagccagcagtaagtacatgtgaaatccagtagctgaccacagacacgcgagcgataagaaaaagctcgctgcttcttttctcaacactccgccagctgcgtcagaggcccttgacccgcactcaaaatggcggcggcggcgtcagcatcagcggcctcctgcccgtatctatcgtggcggcgacgggacccgcctccctgggcgccggagtcatgtgacccacacaatggctgagtggctactctcggcttcctggcaacgccgagcgaaagctatgactgcggccgcgggttcggcgggccgcgccgcggtgcccttgctgctgtgtgcgctgctggcgcccggcggcgcgtacgtgctcgacgactccgacgggctgggccgggagttcgacggcatcggcgcggtcagcggcggcggggcaacctcccgacttctagtaaattacccagagccctatcgttctcagatattggattatctctttaagccgaattttggtgcctctttgcatattttaaaagtggaaataggtggtgatgggcagacaacagacggcactgagccctcccacatgcattatgcactagatgagaattatttccgaggatacgagtggtggttgatgaaagaagctaagaagaggaatcccaatattacactcattgggttgccatggtcattccctggatggctggggacctggattgtgggcgccaagcgttaccatgatttggacattgattatattggaatttggaatgagaggtcatataatgccaattatattaagatattaagaaaaatgctgaattatcaaggtctccagcgagtgaaaatcatagcaagtgataatctctgggagtccatctctgcatccatgctccttgatgccgaactcttcaaggtggttgatgttataggggctcattatcctggaacccattcagcaaaagatgcaaagttgactgggaagaagctttggtcttctgaagactttagcactttaaatagtgacatgggtgcaggctgctggggtcgcattttaaatcagaattatatcaatggctatatgacttccacaatcgcatggaatttagtggctagttactatgaacagttgccttatgggagatgcgggttgatgacggcccaagagccatggagtgggcactacgtggtagaatctcctgtctgggtatcagctcataccactcagtttactcaacctggctggtattacctgaagacagttggccatttagagaaaggaggaagctacgtagctctgactgatggcttagggaacctcaccatcatcattgaaaccatgagtcataaacattctaagtgcatacggccatttcttccttatttcaatgtgtcacaacaatttgccacctttgttcttaagggatcttttagtgaaataccagagctacaggtatggtataccaaacttggaaaaacatccgaaagatttctttttaagcagctggattctctatggctccttgacagcgatggcagtttcacactgagcctgcatgaagatgagctgttcacactcaccactctcaccactggtcgcaaaggcagctacccgcttcctccaaaatcccagcccttcccaagtacctataaggatgatttcaatgttgattacccattttttagtgaagctccaaactttgctgatcaaactggtgtatttgaatattttacaaatattgaagaccctggcgagcatcacttcacgctacgccaagttctcaaccagagacccattacgtgggctgccgatgcatccaacacaatcagtattataggagactacaactggaccaatctgactataaagtgtgatgtttacatagagacccctgacacaggaggtgtgttcattgcaggaagagtaaataaaggtggtattttgattagaagtgccagaggaattttcttctggatttttgcaaatggatcttacagggttacaggtgatttagctggatggattatatatgctttaggacgtgttgaagttacagcaaaaaaatggtatacactcacgttaactattaagggtcatttcgcctctggcatgctgaatgacaagtctctgtggacagacatccctgtgaattttccaaagaatggctgggctgcaattggaactcactcctttgaatttgcacagtttgacaactttcttgtggaagccacacgctaatacttaacagggcatcatagaatactctggattttcttcccttctttttggttttggttcagagccaattcttgtttcattggaacagtatatgaggcttttgagactaaaaataatgaagagtaaaaggggagagaaatttatttttaatttaccctgtggaagattttattagaattaattccaaggggaaaactggtgaatctttaacattacctggtgtgttccctaacattcaaactgtgcattggccatacccttaggagtggtttgagtagtacagacctcgaagccttgctgctaacactgaggtagctctcttcatcttatttgcaagcggtcctgtagatggcagtaacttgatcatcactgagatgtatttatgcatgctgaccgtgtgtccaagtgagccagtgtcttcatcacaagatgatgctgccataatagaaagctgaagaacactagaagtagctttttgaaaaccacttcaacctgttatgctttatgctctaaaaagtatttttttattttcctttttaagatgatacttttgaaatgcaggatatgatgagtgggatgattttaaaaacgcctctttaataaactacctctaacactatttctgcggtaatagatattagcagattaattgggttatttgcattatttaatttttttgattccaagttttggtcttgtaaccactataactctctgtgaacgtttttccaggtggctggaagaaggaagaaaacctgatatagccaatgctgttgtagtcgtttcctcagcctcatctcactgtgctgtggtctgtcctcacatgtgcactggtaacagactcacacagctgatgaatgcttttctctccttatgtgtggaaggaggggagcacttagacatttgctaactcccagaattggatcatctcctaagatgtacttactttttaaagtccaaatatgtttatatttaaatatacgtgagcatgttcatcatgttgtatgatttatactaagcattaatgtggctctatgtagcaaatcagttattcatgtaggtaaagtaaatctagaattatttataagaattactcattgaactaattctactatttaggaatttgtaagagtctaacataggcttagctacagtgaagttttgcattgcttttgaagacaagaagataagtgctagaataaataagattacagagaaaattttttgttaaaaccaagtgatttccagctgatgtatctaatattttttaaaacgaacattatagaggtgtaatttatttacaataaaatgttcctactttaaatatacaattcagtgagttttgataaattgatatacccatgtaaccaacactccagtcaagcttcagaatatttccatcaccccagaaggttctcttgtatacctgctcagtcagttcctttcactcccaattgttggcagccattgataggaattctatcactataggttagttttctttgttccagaacatcatgaaagcggcgtcatgtactgtgtattcttatgaatggtttctttccatcagcataatgatttgagatttgtccatgttgtgtgattcagtggtttgttccttcttatttctgaagagttttccattgtatgaatataccacaatttgtttcctccccaccagtttctgatactacaattaaaactgtctacatttacaa

SEQ ID NO: 442822 - DNA, 4186 bp, Homo sapiens
gctcttctcgcctcatctcacataagggaaaactcaggctccaaaagcaaagtgattccaccaagatgacaatggaatcgggacctggtgtccaagcctggtcctcgcacgaggtagatactccctgagatgctggggaagagccatggtagggccactcatggccctcttcctttggcggaccttggaatccaccttccctgcgttaaagtgctccaccaggtgacgccggaagagaagccagcagtaagtacatgtgaaatccagtagctgaccacagacacgcgagcgataagaaaaagctcgctgcttcttttctcaacactccgccagctgcgtcagaggcccttgacccgcactcaaaatggcggcggcggcgtcagcatcagcggcctcctgcccgtatctatcgtggcggcgacgggacccgcctccctgggcgccggagtcatgtgacccacacaatggctgagtggctactctcggcttcctggcaacgccgagcgaaagctatgactgcggccgcgggttcggcgggccgcgccgcggtgcccttgctgctgtgtgcgctgctggcgcccggcggcgcgtacgtgctcgacgactccgacgggctgggccgggagttcgacggcatcggcgcggtcagcggcggcggggcaacctcccgacttctagtaaattacccagagccctatcgttctcagatattggattatctctttaagccgaattttggtgcctctttgcatattttaaaagtggaaataggtggtgatgggcagacaacagacggcactgagccctcccacatgcattatgcactagatgagaattatttccgaggatacgagtggtggttgatgaaagaagctaagaagaggaatcccaatattacactcattgggttgccatggtcattccctggatggctgggaaaaggtttcgactggccttatgtcaatcttcagctgactgcctattatgtcgtgacctggattgtgggcgccaagcgttaccatgatttggacattgattatattggaatttggaatgagaggtcatataatgccaattatattaagatattaagaaaaatgctgaattatcaaggtctccagcgagtgaaaatcatagcaagtgataatctctgggagtccatctctgcatccatgctccttgatgccgaactcttcaaggtggttgatgttataggggctcattatcctggaacccattcagcaaaagatgcaaagttgactgggaagaagctttggtcttctgaagactttagcactttaaatagtgacatgggtgcaggctgctggggtcgcattttaaatcagaattatatcaatggctatatgacttccacaatcgcatggaatttagtggctagttactatgaacagttgccttatgggagatgcgggttgatgacggcccaagagccatggagtgggcactacgtggtagaatctcctgtctgggtatcagctcataccactcagtttactcaacctggctggtattacctgaagacagttggccatttagagaaaggaggaagctacgtagctctgactgatggcttagggaacctcaccatcatcattgaaaccatgagtcataaacattctaagtgcatacggccatttcttccttatttcaatgtgtcacaacaatttgccacctttgttcttaagggatcttttagtgaaataccagagctacaggtatggtataccaaacttggaaaaacatccgaaagatttctttttaagcagctggattctctatggctccttgacagcgatggcagtttcacactgagcctgcatgaagatgagctgttcacactcaccactctcaccactggtcgcaaaggcagctacccgcttcctccaaaatcccagcccttcccaagtacctataaggatgatttcaatgttgattacccattttttagtgaagctccaaactttgctgatcaaactggtgtatttgaatattttacaaatattgaagaccctggcgagcatcacttcacgctacgccaagttctcaaccagagacccattacgtgggctgccgatgcatccaacacaatcagtattataggagactacaactggaccaatctgactataaagtgtgatgtttacatagagacccctgacacaggaggtgtgttcattgcaggaagagtaaataaaggtggtattttgattagaagtgccagaggaattttcttctggatttttgcaaatggatcttacagggttacaggtgatttagctggatggattatatatgctttaggacgtgttgaagttacagcaaaaaaatggtatacactcacgttaactattaagggtcatttcgcctctggcatgctgaatgacaagtctctgtggacagacatccctgtgaattttccaaagaatggctgggctgcaattggaactcactcctttgaatttgcacagtttgacaactttcttgtggaagccacacgctaatacttaacagggcatcatagaatactctggattttcttcccttctttttggttttggttcagagccaattcttgtttcattggaacagtatatgaggcttttgagactaaaaataatgaagagtaaaaggggagagaaatttatttttaatttaccctgtggaagattttattagaattaattccaaggggaaaactggtgaatctttaacattacctggtgtgttccctaacattcaaactgtgcattggccatacccttaggagtggtttgagtagtacagacctcgaagccttgctgctaacactgaggtagctctcttcatcttatttgcaagcggtcctgtagatggcagtaacttgatcatcactgagatgtatttatgcatgctgaccgtgtgtccaagtgagccagtgtcttcatcacaagatgatgctgccataatagaaagctgaagaacactagaagtagctttttgaaaaccacttcaacctgttatgctttatgctctaaaaagtatttttttattttcctttttaagatgatacttttgaaatgcaggatatgatgagtgggatgattttaaaaacgcctctttaataaactacctctaacactatttctgcggtaatagatattagcagattaattgggttatttgcattatttaatttttttgattccaagttttggtcttgtaaccactataactctctgtgaacgtttttccaggtggctggaagaaggaagaaaacctgatatagccaatgctgttgtagtcgtttcctcagcctcatctcactgtgctgtggtctgtcctcacatgtgcactggtaacagactcacacagctgatgaatgcttttctctccttatgtgtggaaggaggggagcacttagacatttgctaactcccagaattggatcatctcctaagatgtacttactttttaaagtccaaatatgtttatatttaaatatacgtgagcatgttcatcatgttgtatgatttatactaagcattaatgtggctctatgtagcaaatcagttattcatgtaggtaaagtaaatctagaattatttataagaattactcattgaactaattctactatttaggaatttgtaagagtctaacataggcttagctacagtgaagttttgcattgcttttgaagacaagaagataagtgctagaataaataagattacagagaaaattttttgttaaaaccaagtgatttccagctgatgtatctaatattttttaaaacgaacattatagaggtgtaatttatttacaatccatgtaaccaacactccagtcaagcttcagaatatttccatcaccccagaaggttctcttgtatacctgctcagtcagttcctttcactcccaattgttggcagccattgataggaattctatcactataggttagttttctttgttccagaacatcatgaaagcggcgtcatgtactgtgtattcttatgaatggtttctttccatcagcataatgatttgagatttgtccatgttgtgtgattcagtggtttgttccttcttatttctgaagagttttccattgtatgaatataccacaatttgtttcctccccaccagtttctgatactacaattaaaactgtctacatttacaa

SEQ ID NO: 442823 - DNA, 3596 bp, Homo sapiens
gctcttctcgcctcatctcacataagggaaaactcaggctccaaaagcaaagtgattccaccaagatgacaatggaatcgggacctggtgtccaagcctggtcctcgcacgaggtagatactccctgagatgctggggaagagccatggtagggccactcatggccctcttcctttggcggaccttggaatccaccttccctgcgttaaagtgctccaccaggtgacgccggaagagaagccagcagtaagtacatgtgaaatccagtagctgaccacagacacgcgagcgataagaaaaagctcgctgcttcttttctcaacactccgccagctgcgtcagaggcccttgacccgcactcaaaatggcggcggcggcgtcagcatcagcggcctcctgcccgtatctatcgtggcggcgacgggacccgcctccctgggcgccggagtcatgtgacccacacaatggctgagtggctactctcggcttcctggcaacgccgagcgaaagctatgactgcggccgcgggttcggcgggccgcgccgcggtgcccttgctgctgtgtgcgctgctggcgcccggcggcgcgtacgtgctcgacgactccgacgggctgggccgggagttcgacggcatcggcgcggtcagcggcggcggggcaacctcccgacttctagtaaattacccagagccctatcgttctcagatattggattatctctttaagccgaattttggtgcctctttgcatattttaaaagtggaaataggtggtgatgggcagacaacagacggcactgagccctcccacatgcattatgcactagatgagaattatttccgaggatacgagtggtggttgatgaaagaagctaagaagaggaatcccaatattacactcattgggttgccatggtcattccctggatggctgggaaaaggtttcgactggccttatgtcaatcttcagctgactgcctattatgtcgtgacctggattgtgggcgccaagcgttaccatgatttggacattgattatattggaatttggaatgagaggtcatataatgccaattatattaagatattaagaaaaatgctgaattatcaaggtctccagcgagtgaaaatcatagcaagtgataatctctgggagtccatctctgcatccatgctccttgatgccgaactcttcaaggtggttgatgttataggggctcattatcctggaacccattcagcaaaagatgcaaagttgactgggaagaagctttggtcttctgaagactttagcactttaaatagtgacatgggtgcaggctgctggggtcgcattttaaatcagaattatatcaatggctatatgacttccacaatcgcatggaatttagtggctagttactatgaacagttgccttatgggagatgcgggttgatgacggcccaagagccatggagtgggcactacgtggtagaatctcctgtctgggtatcagctcataccactcagtttactcaacctggctggtattacctgaagacagttggccatttagagaaaggaggaagctacgtagctctgactgatggcttagggaacctcaccatcatcattgaaaccatgagtcataaacattctaagtgcatacggccatttcttccttatttcaatgtgtcacaacaatttgccacctttgttcttaagggatcttttagtgaaataccagagctacaggtatggtataccaaacttggaaaaacatccgaaagatttctttttaagcagctggattctctatggctccttgacagcgatggcagtttcacactgagcctgcatgaagatgagctgttcacactcaccactctcaccactggtcgcaaaggcagctacccgcttcctccaaaatcccagcccttcccaagtacctataaggatgatttcaatgttgattacccattttttagtgaagctccaaactttgctgatcaaactggtgtatttgaatattttacaaatattgaagaccctggcgagcatcacttcacgctacgccaagttctcaaccagagacccattacgtgggctgccgatgcatccaacacaatcagtattataggagactacaactggaccaatctgactataaagtgtgatgtttacatagagacccctgacacaggaggtgtgttcattgcaggaagagtaaataaaggtggtattttgattagaagtgccagaggaattttcttctggatttttgcaaatggatcttacagggttacaggtgatttagctggatggattatatatgctttaggacgtgttgaagttacagcaaaaaaatggtatacactcacgttaactattaagggtcatttcgcctctggcatgctgaatgacaagtctctgtggacagacatccctgtgaattttccaaagaatggctgggctgcaattggaactcactcctttgaatttgcacagtttgacaactttcttgtggaagccacacgctaatacttaacagggcatcatagaatactctggattttcttcccttctttttggttttggttcagagccaattcttgtttcattggaacagtatatgaggcttttgagactaaaaataatgaagagtaaaaggggagagaaatttatttttaatttaccctgtggaagattttattagaattaattccaaggggaaaactggtgaatctttaacattacctggtgtgttccctaacattcaaactgtgcattggccatacccttaggagtggtttgagtagtacagacctcgaagccttgctgctaacactgaggtagctctcttcatcttatttgcaagcggtcctgtagatggcagtaacttgatcatcactgagatgtatttatgcatgctgaccgtgtgtccaagtgagccagtgtcttcatcacaagatgatgctgccataatagaaagctgaagaacactagaagtagctttttgaaaaccacttcaacctgttatgctttatgctctaaaaagtatttttttattttcctttttaagatgatacttttgaaatgcaggatatgatgagtgggatgattttaaaaacgcctctttaataaactacctctaacactatttctgcggtaatagatattagcagattaattgggttatttgcattatttaatttttttgattccaagttttggtcttgtaaccactataactctctgtgaacgtttttccaggtggctggaagaaggaagaaaacctgatatagccaatgctgttgtagtcgtttcctcagcctcatctcactgtgctgtggtctgtcctcacatgtgcactggtaacagactcacacagctgatgaatgcttttctctccttatgtgtggaaggaggggagcacttagacatttgctaactcccagaattggatcatctcctaagatgtacttactttttaaagtccaaatatgtttatattcaattactgagctgtctcctgtgttgattatctagcttatggggcttgttcaaccgtttcgtgggggggacccaatttttgccggaccctgggaggggggc

SEQ ID NO: 442824 - DNA, 4240 bp, Homo sapiens
gctcttctcgcctcatctcacataagggaaaactcaggctccaaaagcaaagtgattccaccaagatgacaatggaatcgggacctggtgtccaagcctggtcctcgcacgaggtagatactccctgagatgctggggaagagccatggtagggccactcatggccctcttcctttggcggaccttggaatccaccttccctgcgttaaagtgctccaccaggtgacgccggaagagaagccagcagtaagtacatgtgaaatccagtagctgaccacagacacgcgagcgataagaaaaagctcgctgcttcttttctcaacactccgccagctgcgtcagaggcccttgacccgcactcaaaatggcggcggcggcgtcagcatcagcggcctcctgcccgtatctatcgtggcggcgacgggacccgcctccctgggcgccggagtcatgtgacccacacaatggctgagtggctactctcggcttcctggcaacgccgagcgaaagctatgactgcggccgcgggttcggcgggccgcgccgcggtgcccttgctgctgtgtgcgctgctggcgcccggcggcgcgtacgtgctcgacgactccgacgggctgggccgggagttcgacggcatcggcgcggtcagcggcggcggggcaacctcccgacttctagtaaattacccagagccctatcgttctcagatattggattatctctttaagccgaattttggtgcctctttgcatattttaaaagtggaaataggtggtgatgggcagacaacagacggcactgagccctcccacatgcattatgcactagatgagaattatttccgaggatacgagtggtggttgatgaaagaagctaagaagaggaatcccaatattacactcattgggttgccatggtcattccctggatggctgggaaaaggtttcgactggccttatgtcaatcttcagctgactgcctattatgtcgtgacctggattgtgggcgccaagcgttaccatgatttggacattgattatattggaatttggaatgagaggtcatataatgccaattatattaagatattaagaaaaatgctgaattatcaaggtctccagcgagtgaaaatcatagcaagtgataatctctgggagtccatctctgcatccatgctccttgatgccgaactcttcaaggtggttgatgttataggggctcattatcctggaacccattcagcaaaagatgcaaagttgactgggaagaagctttggtcttctgaagactttagcactttaaatagtgacatgggtgcaggctgctggggtcgcattttaaatcagaattatatcaatggctatatgacttccacaatcgcatggaatttagtggctagttactatgaacagttgccttatgggagatgcgggttgatgacggcccaagagccatggagtgggcactacgtggtagaatctcctgtctgggtatcagctcataccactcagtttactcaacctggctggtattacctgaagacagttggccatttagagaaaggaggaagctacgtagctctgactgatggcttagggaacctcaccatcatcattgaaaccatgagtcataaacattctaagtgcatacggccatttcttccttatttcaatgtgtcacaacaatttgccacctttgttcttaagggatcttttagtgaaataccagagctacaggtatggtataccaaacttggaaaaacatccgaaagatttctttttaagcagctggattctctatggctccttgacagcgatggcagtttcacactgagcctgcatgaagatgagctgttcacactcaccactctcaccactggtcgcaaaggcagctacccgcttcctccaaaatcccagcccttcccaagtacctataaggatgatttcaatgttgattacccattttttagtgaagctccaaactttgctgatcaaactggtgtatttgaatattttacaaatattgaagaccctggcgagcatcacttcacgctacgccaagttctcaaccagagacccattacgtgggctgccgatgcatccaacacaatcagtattataggagactacaactggaccaatctgactataaagtgtgatgtttacatagagacccctgacacaggaggtgtgttcattgcaggaagagtaaataaaggtggtattttgattagaagtgccagaggaattttcttctggatttttgcaaatggatcttacagggttacaggtgatttagctggatggattatatatgctttaggacgtgttgaagttacagcaaaaaaatggtatacactcacgttaactattaagggtcatttcgcctctggcatgctgaatgacaagtctctgtggacagacatccctgtgaattttccaaagaatggctgggctgcaattggaactcactcctttgaatttgcacagtttgacaactttcttgtggaagccacacgctaatacttaacagggcatcatagaatactctggattttcttcccttctttttggttttggttcagagccaattcttgtttcattggaacagtatatgaggcttttgagactaaaaataatgaagagtaaaaggggagagaaatttatttttaatttaccctgtggaagattttattagaattaattccaaggggaaaactggtgaatctttaacattacctggtgtgttccctaacattcaaactgtgcattggccatacccttaggagtggtttgagtagtacagacctcgaagccttgctgctaacactgaggtagctctcttcatcttatttgcaagcggtcctgtagatggcagtaacttgatcatcactgagatgtatttatgcatgctgaccgtgtgtccaagtgagccagtgtcttcatcacaagatgatgctgccataatagaaagctgaagaacactagaagtagctttttgaaaaccacttcaacctgttatgctttatgctctaaaaagtatttttttattttcctttttaagatgatacttttgaaatgcaggatatgatgagtgggatgattttaaaaacgcctctttaataaactacctctaacactatttctgcggtaatagatattagcagattaattgggttatttgcattatttaatttttttgattccaagttttggtcttgtaaccactataactctctgtgaacgtttttccaggtggctggaagaaggaagaaaacctgatatagccaatgctgttgtagtcgtttcctcagcctcatctcactgtgctgtggtctgtcctcacatgtgcactggtaacagactcacacagctgatgaatgcttttctctccttatgtgtggaaggaggggagcacttagacatttgctaactcccagaattggatcatctcctaagatgtacttactttttaaagtccaaatatgtttatatttaaatatacgtgagcatgttcatcatgttgtatgatttatactaagcattaatgtggctctatgtagcaaatcagttattcatgtaggtaaagtaaatctagaattatttataagaattactcattgaactaattctactatttaggaatttgtaagagtctaacataggcttagctacagtgaagttttgcattgcttttgaagacaagaagataagtgctagaataaataagattacagagaaaattttttgttaaaaccaagtgatttccagctgatgtatctaatattttttaaaacgaacattatagaggtgtaatttatttacaataaaatgttcctactttaaatatacaattcagtgagttttgataaattgatatacccatgtaaccaacactccagtcaagcttcagaatatttccatcaccccagaaggttctcttgtatacctgctcagtcagttcctttcactcccaattgttggcagccattgataggaattctatcactataggttagttttctttgttccagaacatcatgaaagcggcgtcatgtactgtgtattcttatgaatggtttctttccatcagcataatgatttgagatttgtccatgttgtgtgattcagtggtttgttccttcttatttctgaagagttttccattgtatgaatataccacaatttgtttcctccccaccagtttctgatactacaattaaaactgtctacatttacaa

SEQ ID NO: 442825 - DNA, 4059 bp, Homo sapiens
gctcttctcgcctcatctcacataagggaaaactcaggctccaaaagcaaagtgattccaccaagatgacaatggaatcgggacctggtgtccaagcctggtcctcgcacgaggtagatactccctgagatgctggggaagagccatggtagggccactcatggccctcttcctttggcggaccttggaatccaccttccctgcgttaaagtgctccaccaggtgacgccggaagagaagccagcagtaagtacatgtgaaatccagtagctgaccacagacacgcgagcgataagaaaaagctcgctgcttcttttctcaacactccgccagctgcgtcagaggcccttgacccgcactcaaaatggcggcggcggcgtcagcatcagcggcctcctgcccgtatctatcgtggcggcgacgggacccgcctccctgggcgccggagtcatgtgacccacacaatggctgagtggctactctcggcttcctggcaacgccgagcgaaagctatgactgcggccgcgggttcggcgggccgcgccgcggtgcccttgctgctgtgtgcgctgctggcgcccggcggcgcgtacgtgctcgacgactccgacgggctgggccgggagttcgacggcatcggcgcggtcagcggcggcggggcaacctcccgacttctagtaaattacccagagccctatcgttctcagatattggattatctctttaagccgaattttggtgcctctttgcatattttaaaagtggaaataggtggtgatgggcagacaacagacggcactgagccctcccacatgcattatgcactagatgagaattatttccgaggatacgagtggtggttgatgaaagaagctaagaagaggaatcccaatattacactcattgggttgccatggtcattccctggatggctgggaaaaggtttcgactggccttatgtcaatcttcagctgactgcctattatgtcgtgacctggattgtgggcgccaagcgttaccatgatttggacattgattatattggaatttggaatgagaggtcatataatgccaattatattaagatattaagaaaaatgctgaattatcaaggtctccagcgagtgaaaatcatagcaagtgataatctctgggagtccatctctgcatccatgctccttgatgccgaactcttcaaggtggttgatgttataggggctcattatcctggaacccattcagcaaaagatgcaaagttgactgggaagaagctttggtcttctgaagactttagcactttaaatagtgacatgggtgcaggctgctggggtcgcattttaaatcagaattatatcaatggctatatgacttccacaatcgcatggaatttagtggctagttactatgaacagttgccttatgggagatgcgggttgatgacggcccaagagccatggagtgggcactacgtggtagaatctcctgtctgggtatcagctcataccactcagtttactcaacctggctggtattacctgaagacagttggccatttagagaaaggaggaagctacgtagctctgactgatggcttagggaacctcaccatcatcattgaaaccatgagtcataaacattctaagtgcatacggccatttcttccttatttcaatgtgtcacaacaatttgccacctttgttcttaagggatcttttagtgaaataccagagctacaggtatggtataccaaacttggaaaaacatccgaaagatttctttttaagcagctggattctctatggctccttgacagcgatggcagtttcacactgagcctgcatgaagatgagctgttcacactcaccactctcaccactggtcgcaaaggcagctacccgcttcctccaaaatcccagcccttcccaagtacctataaggatgatttcaatgttggaccaatctgactataaagtgtgatgtttacatagagacccctgacacaggaggtgtgttcattgcaggaagagtaaataaaggtggtattttgattagaagtgccagaggaattttcttctggatttttgcaaatggatcttacagggttacaggtgatttagctggatggattatatatgctttaggacgtgttgaagttacagcaaaaaaatggtatacactcacgttaactattaagggtcatttcgcctctggcatgctgaatgacaagtctctgtggacagacatccctgtgaattttccaaagaatggctgggctgcaattggaactcactcctttgaatttgcacagtttgacaactttcttgtggaagccacacgctaatacttaacagggcatcatagaatactctggattttcttcccttctttttggttttggttcagagccaattcttgtttcattggaacagtatatgaggcttttgagactaaaaataatgaagagtaaaaggggagagaaatttatttttaatttaccctgtggaagattttattagaattaattccaaggggaaaactggtgaatctttaacattacctggtgtgttccctaacattcaaactgtgcattggccatacccttaggagtggtttgagtagtacagacctcgaagccttgctgctaacactgaggtagctctcttcatcttatttgcaagcggtcctgtagatggcagtaacttgatcatcactgagatgtatttatgcatgctgaccgtgtgtccaagtgagccagtgtcttcatcacaagatgatgctgccataatagaaagctgaagaacactagaagtagctttttgaaaaccacttcaacctgttatgctttatgctctaaaaagtatttttttattttcctttttaagatgatacttttgaaatgcaggatatgatgagtgggatgattttaaaaacgcctctttaataaactacctctaacactatttctgcggtaatagatattagcagattaattgggttatttgcattatttaatttttttgattccaagttttggtcttgtaaccactataactctctgtgaacgtttttccaggtggctggaagaaggaagaaaacctgatatagccaatgctgttgtagtcgtttcctcagcctcatctcactgtgctgtggtctgtcctcacatgtgcactggtaacagactcacacagctgatgaatgcttttctctccttatgtgtggaaggaggggagcacttagacatttgctaactcccagaattggatcatctcctaagatgtacttactttttaaagtccaaatatgtttatatttaaatatacgtgagcatgttcatcatgttgtatgatttatactaagcattaatgtggctctatgtagcaaatcagttattcatgtaggtaaagtaaatctagaattatttataagaattactcattgaactaattctactatttaggaatttgtaagagtctaacataggcttagctacagtgaagttttgcattgcttttgaagacaagaagataagtgctagaataaataagattacagagaaaattttttgttaaaaccaagtgatttccagctgatgtatctaatattttttaaaacgaacattatagaggtgtaatttatttacaataaaatgttcctactttaaatatacaattcagtgagttttgataaattgatatacccatgtaaccaacactccagtcaagcttcagaatatttccatcaccccagaaggttctcttgtatacctgctcagtcagttcctttcactcccaattgttggcagccattgataggaattctatcactataggttagttttctttgttccagaacatcatgaaagcggcgtcatgtactgtgtattcttatgaatggtttctttccatcagcataatgatttgagatttgtccatgttgtgtgattcagtggtttgttccttcttatttctgaagagttttccattgtatgaatataccacaatttgtttcctccccaccagtttctgatactacaattaaaactgtctacatttacaa

SEQ ID NO: 442826 - DNA, 4187 bp, Homo sapiens
gctcttctcgcctcatctcacataagggaaaactcaggctccaaaagcaaagtgattccaccaagatgacaatggaatcgggacctggtgtccaagcctggtcctcgcacgaggtagatactccctgagatgctggggaagagccatggtagggccactcatggccctcttcctttggcggaccttggaatccaccttccctgcgttaaagtgctccaccaggtgacgccggaagagaagccagcagtaagtacatgtgaaatccagtagctgaccacagacacgcgagcgataagaaaaagctcgctgcttcttttctcaacactccgccagctgcgtcagaggcccttgacccgcactcaaaatggcggcggcggcgtcagcatcagcggcctcctgcccgtatctatcgtggcggcgacgggacccgcctccctgggcgccggagtcatgtgacccacacaatggctgagtggctactctcggcttcctggcaacgccgagcgaaagctatgactgcggccgcgggttcggcgggccgcgccgcggtgcccttgctgctgtgtgcgctgctggcgcccggcggcgcgtacgtgctcgacgactccgacgggctgggccgggagttcgacggcatcggcgcggtcagcggcggcggggcaacctcccgacttctagtaaattacccagagccctatcgttctcagatattggattatctctttaagccgaattttggtgcctctttgcatattttaaaagtggaaataggtggtgatgggcagacaacagacggcactgagccctcccacatgcattatgcactagatgagaattatttccgaggatacgagtggtggttgatgaaagaagctaagaagaggaatcccaatattacactcattgggttgccatggtcattccctggatggctgggaaaaggtttcgactggccttatgtcaatcttcagctgactgcctattatgtcgtgacctggattgtgggcgccaagcgttaccatgatttggacattgattatattggaatttggaatgagaggtcatataatgccaattatattaagatattaagaaaaatgctgaattatcaaggtctccagcgagtgaaaatcatagcaagtgataatctctgggagtccatctctgcatccatgctccttgatgccgaactcttcaaggtggttgatgttataggggctcattatcctggaacccattcagcaaaagatgcaaagttgactgggaagaagctttggtcttctgaagactttagcactttaaatagtgacatgggtgcaggctgctggggtcgcattttaaatcagaattatatcaatggctatatgacttccacaatcgcatggaatttagtggctagttactatgaacagttgccttatgggagatgcgggttgatgacggcccaagagccatggagtgggcactacgtggtagaatctcctgtctgggtatcagctcataccactcagtttactcaacctggctggtattacctgaagacagttggccatttagagaaaggaggaagctacgtagctctgactgatggcttagggaacctcaccatcatcattgaaaccatgagtcataaacattctaagtgcatacggccatttcttccttatttcaatgtgtcacaacaatttgccacctttgttcttaagggatcttttagtgaaataccagagctacaggtatggtataccaaacttggaaaaacatccgaaagatttctttttaagcagctggattctctatggctccttgacagcgatggcagtttcacactgagcctgcatgaagatgagctgttcacactcaccactctcaccactggtcgcaaaggcagctacccgcttcctccaaaatcccagcccttcccaagtacctataaggatgatttcaatgttgattacccattttttagtgaagctccaaactttgctgatcaaactggtgtatttgaatattttacaaatattgaagaccctggcgagcatcacttcacgctacgccaagttctcaaccagagacccattacgtgggctgccgatgcatccaacacaatcagtattataggagactacaactggaccaatctgactataaagtgtgatgtttacatagagacccctgacacaggaggtgtgttcattgcaggaagagtaaataaaggtggtattttgattagaagtgccagaggaattttcttctggatttttgcaaatggatcttacagggttacaggtgatttagctggatggattatatatgctttaggacgtgttgaagttacagcaaaaaaatggtatacactcacgttaactattaagggtcatttcgcctctggcatgctgaatgacaagtctctgtggacagacatccctgtgaattttccaaagaatggctgggctgcaattggaactcactcctttgaatttgcacagtttgacaactttcttgtggaagccacacgctaatacttaacagggcatcatagaatactctggattttcttcccttctttttggttttggttcagagccaattcttgtttcattggaacagtatatgaggcttttgagactaaaaataatgaagagtaaaaggggagagaaatttatttttaatttaccctgtggaagattttattagaattaattccaaggggaaaactggtgaatctttaacattacctggtgtgttccctaacattcaaactgtgcattggccatacccttaggagtggtttgagtagtacagacctcgaagccttgctgctaacactgaggtagctctcttcatcttatttgcaagcggtcctgtagatggcagtaacttgatcatcactgagatgtatttatgcatgctgaccgtgtgtccaagtgagccagtgtcttcatcacaagatgatgctgccataatagaaagctgaagaacactagaagtagctttttgaaaaccacttcaacctgttatgctttatgctctaaaaagtatttttttattttcctttttaagatgatacttttgaaatgcaggatatgatgagtgggatgattttaaaaacgcctctttaataaactacctctaacactatttctgcggtaatagatattagcagattaattgggttatttgcattatttaatttttttgattccaagttttggtcttgtaaccactataactctctgtgaacgtttttccaggtggctggaagaaggaatgtgctgtggtctgtcctcacatgtgcactggtaacagactcacacagctgatgaatgcttttctctccttatgtgtggaaggaggggagcacttagacatttgctaactcccagaattggatcatctcctaagatgtacttactttttaaagtccaaatatgtttatatttaaatatacgtgagcatgttcatcatgttgtatgatttatactaagcattaatgtggctctatgtagcaaatcagttattcatgtaggtaaagtaaatctagaattatttataagaattactcattgaactaattctactatttaggaatttgtaagagtctaacataggcttagctacagtgaagttttgcattgcttttgaagacaagaagataagtgctagaataaataagattacagagaaaattttttgttaaaaccaagtgatttccagctgatgtatctaatattttttaaaacgaacattatagaggtgtaatttatttacaataaaatgttcctactttaaatatacaattcagtgagttttgataaattgatatacccatgtaaccaacactccagtcaagcttcagaatatttccatcaccccagaaggttctcttgtatacctgctcagtcagttcctttcactcccaattgttggcagccattgataggaattctatcactataggttagttttctttgttccagaacatcatgaaagcggcgtcatgtactgtgtattcttatgaatggtttctttccatcagcataatgatttgagatttgtccatgttgtgtgattcagtggtttgttccttcttatttctgaagagttttccattgtatgaatataccacaatttgtttcctccccaccagtttctgatactacaattaaaactgtctacatttacaa

SEQ ID NO: 442827 - DNA, 3655 bp, Homo sapiens
agagtagaggagggatttgagagctattgaggatatcttggtgactgagggtacatgggaagtttggacaaaaggcaacctcccgacttctagtaaattacccagagccctatcgttctcagatattggattatctctttaagccgaattttggtgcctctttgcatattttaaaagtggaaataggtggtgatgggcagacaacagacggcactgagccctcccacatgcattatgcactagatgagaattatttccgaggatacgagtggtggttgatgaaagaagctaagaagaggaatcccaatattacactcattgggttgccatggtcattccctggatggctgggaaaaggtttcgactggccttatgtcaatcttcagctgactgcctattatgtcgtgacctggattgtgggcgccaagcgttaccatgatttggacattgattatattggaatttggaatgagaggtcatataatgccaattatattaagatattaagaaaaatgctgaattatcaaggtctccagcgagtgaaaatcatagcaagtgataatctctgggagtccatctctgcatccatgctccttgatgccgaactcttcaaggtggttgatgttataggggctcattatcctggaacccattcagcaaaagatgcaaagttgactgggaagaagctttggtcttctgaagactttagcactttaaatagtgacatgggtgcaggctgctggggtcgcattttaaatcagaattatatcaatggctatatgacttccacaatcgcatggaatttagtggctagttactatgaacagttgccttatgggagatgcgggttgatgacggcccaagagccatggagtgggcactacgtggtagaatctcctgtctgggtatcagctcataccactcagtttactcaacctggctggtattacctgaagacagttggccatttagagaaaggaggaagctacgtagctctgactgatggcttagggaacctcaccatcatcattgaaaccatgagtcataaacattctaagtgcatacggccatttcttccttatttcaatgtgtcacaacaatttgccacctttgttcttaagggatcttttagtgaaataccagagctacaggtatggtataccaaacttggaaaaacatccgaaagatttctttttaagcagctggattctctatggctccttgacagcgatggcagtttcacactgagcctgcatgaagatgagctgttcacactcaccactctcaccactggtcgcaaaggcagctacccgcttcctccaaaatcccagcccttcccaagtacctataaggatgatttcaatgttgattacccattttttagtgaagctccaaactttgctgatcaaactggtgtatttgaatattttacaaatattgaagaccctggcgagcatcacttcacgctacgccaagttctcaaccagagacccattacgtgggctgccgatgcatccaacacaatcagtattataggagactacaactggaccaatctgactataaagtgtgatgtttacatagagacccctgacacaggaggtgtgttcattgcaggaagagtaaataaaggtggtattttgattagaagtgccagaggaattttcttctggatttttgcaaatggatcttacagggttacaggtgatttagctggatggattatatatgctttaggacgtgttgaagttacagcaaaaaaatggtatacactcacgttaactattaagggtcatttcgcctctggcatgctgaatgacaagtctctgtggacagacatccctgtgaattttccaaagaatggctgggctgcaattggaactcactcctttgaatttgcacagtttgacaactttcttgtggaagccacacgctaatacttaacagggcatcatagaatactctggattttcttcccttctttttggttttggttcagagccaattcttgtttcattggaacagtatatgaggcttttgagactaaaaataatgaagagtaaaaggggagagaaatttatttttaatttaccctgtggaagattttattagaattaattccaaggggaaaactggtgaatctttaacattacctggtgtgttccctaacattcaaactgtgcattggccatacccttaggagtggtttgagtagtacagacctcgaagccttgctgctaacactgaggtagctctcttcatcttatttgcaagcggtcctgtagatggcagtaacttgatcatcactgagatgtatttatgcatgctgaccgtgtgtccaagtgagccagtgtcttcatcacaagatgatgctgccataatagaaagctgaagaacactagaagtagctttttgaaaaccacttcaacctgttatgctttatgctctaaaaagtatttttttattttcctttttaagatgatacttttgaaatgcaggatatgatgagtgggatgattttaaaaacgcctctttaataaactacctctaacactatttctgcggtaatagatattagcagattaattgggttatttgcattatttaatttttttgattccaagttttggtcttgtaaccactataactctctgtgaacgtttttccaggtggctggaagaaggaagaaaacctgatatagccaatgctgttgtagtcgtttcctcagcctcatctcactgtgctgtggtctgtcctcacatgtgcactggtaacagactcacacagctgatgaatgcttttctctccttatgtgtggaaggaggggagcacttagacatttgctaactcccagaattggatcatctcctaagatgtacttactttttaaagtccaaatatgtttatatttaaatatacgtgagcatgttcatcatgttgtatgatttatactaagcattaatgtggctctatgtagcaaatcagttattcatgtaggtaaagtaaatctagaattatttataagaattactcattgaactaattctactatttaggaatttgtaagagtctaacataggcttagctacagtgaagttttgcattgcttttgaagacaagaagataagtgctagaataaataagattacagagaaaattttttgttaaaaccaagtgatttccagctgatgtatctaatattttttaaaacgaacattatagaggtgtaatttatttacaataaaatgttcctactttaaatatacaattcagtgagttttgataaattgatatacccatgtaaccaacactccagtcaagcttcagaatatttccatcaccccagaaggttctcttgtatacctgctcagtcagttcctttcactcccaattgttggcagccattgataggaattctatcactataggttagttttctttgttccagaacatcatgaaagcggcgtcatgtactgtgtattcttatgaatggtttctttccatcagcataatgatttgagatttgtccatgttgtgtgattcagtggtttgttccttcttatttctgaagagttttccattgtatgaatataccacaatttgtttcctccccaccagtttctgatactacaattaaaactgtctacatttacaa

SEQ ID NO: 442828 - DNA, 2161 bp, Homo sapiens
cccggaattgccagttccaaaagcaaccaatcagtattataggagactacaactggaccaatctgactataaagtgtgatgtttacatagagacccctgacacaggaggtgtgttcattgcaggaagagtaaataaaggtggtattttgattagaagtgccagaggaattttcttctggatttttgcaaatggatcttacagggttacaggtgatttagctggatggattatatatgctttaggacgtgttgaagttacagcaaaaaaatggtatacactcacgttaactattaagggtcatttcgcctctggcatgctgaatgacaagtctctgtggacagacatccctgtgaattttccaaagaatggctgggctgcaattggaactcactcctttgaatttgcacagtttgacaactttcttgtggaagccacacgctaatacttaacagggcatcatagaatactctggattttcttcccttctttttggttttggttcagagccaattcttgtttcattggaacagtatatgaggcttttgagactaaaaataatgaagagtaaaaggggagagaaatttatttttaatttaccctgtggaagattttattagaattaattccaaggggaaaactggtgaatctttaacattacctggtgtgttccctaacattcaaactgtgcattggccatacccttaggagtggtttgagtagtacagacctcgaagccttgctgctaacactgaggtagctctcttcatcttatttgcaagcggtcctgtagatggcagtaacttgatcatcactgagatgtatttatgcatgctgaccgtgtgtccaagtgagccagtgtcttcatcacaagatgatgctgccataatagaaagctgaagaacactagaagtagctttttgaaaaccacttcaacctgttatgctttatgctctaaaaagtatttttttattttcctttttaagatgatacttttgaaatgcaggatatgatgagtgggatgattttaaaaacgcctctttaataaactacctctaacactatttctgcggtaatagatattagcagattaattgggttatttgcattatttaatttttttgattccaagttttggtcttgtaaccactataactctctgtgaacgtttttccaggtggctggaagaaggaagaaaacctgatatagccaatgctgttgtagtcgtttcctcagcctcatctcactgtgctgtggtctgtcctcacatgtgcactggtaacagactcacacagctgatgaatgcttttctctccttatgtgtggaaggaggggagcacttagacatttgctaactcccagaattggatcatctcctaagatgtacttactttttaaagtccaaatatgtttatatttaaatatacgtgagcatgttcatcatgttgtatgatttatactaagcattaatgtggctctatgtagcaaatcagttattcatgtaggtaaagtaaatctagaattatttataagaattactcattgaactaattctactatttaggaatttgtaagagtctaacataggcttagctacagtgaagttttgcattgcttttgaagacaagaagataagtgctagaataaataagattacagagaaaattttttgttaaaaccaagtgatttccagctgatgtatctaatattttttaaaacgaacattatagaggtgtaatttatttacaataaaatgttcctactttaaatatacaattcagtgagttttgataaattgatatacccatgtaaccaacactccagtcaagcttcagaatatttccatcaccccagaaggttctcttgtatacctgctcagtcagttcctttcactcccaattgttggcagccattgataggaattctatcactataggttagttttctttgttccagaacatcatgaaagcggcgtcatgtactgtgtattcttatgaatggtttctttccatcagcataatgatttgagatttgtccatgttgtgtgattcagtggtttgttccttcttatttctgaagagttttccattgtatgaatataccacaatttgtttcctccccaccagtttctgatactacaattaaaactgtctacatttacaa

SEQ ID NO: 442829 - DNA, 1696 bp, Homo sapiens
gctcttctcgcctcatctcacataagggaaaactcaggctccaaaagcaaagtgattccaccaagatgacaatggaatcgggacctggtgtccaagcctggtcctcgcacgaggtagatactccctgagatgctggggaagagccatggtagggccactcatggccctcttcctttggcggaccttggaatccaccttccctgcgttaaagtgctccaccaggtgacgccggaagagaagccagcagtaagtacatgtgaaatccagtagctgaccacagacacgcgagcgataagaaaaagctcgctgcttcttttctcaacactccgccagctgcgtcagaggcccttgacccgcactcaaaatggcggcggcggcgtcagcatcagcggcctcctgcccgtatctatcgtggcggcgacgggacccgcctccctgggcgccggagtcatgtgacccacacaatggctgagtggctactctcggcttcctggcaacgccgagcgaaagctatgactgcggccgcgggttcggcgggccgcgccgcggtgcccttgctgctgtgtgcgctgctggcgcccggcggcgcgtacgtgctcgacgactccgacgggctgggccgggagttcgacggcatcggcgcggtcagcggcggcggggcaacctcccgacttctagtaaattacccagagccctatcgttctcagatattggattatctctttaagccgaattttggtgcctctttgcatattttaaaagtggaaataggtggtgatgggcagacaacagacggcactgagccctcccacatgcattatgcactagatgagaattatttccgaggatacgagtggtggttgatgaaagaagctaagaagaggaatcccaatattacactcattgggttgccatggtcattccctggatggctgggaaaaggtttcgactggccttatgtcaatcttcagctgactgcctattatgtcgtgacctggattgtgggcgccaagcgttaccatgatttggacattgattatattggaatttggaatgagaggtcatataatgccaattatattaagatattaagaaaaatgctgaattatcaaggtctccagcgagtgaaaatcatagcaagtgataatctctgggagtccatctctgcatccatgctccttgatgccgaactcttcaaggtggttgatgttataggggctcattatcctggaacccattcagcaaaagatgcaaagttgactgggaagaagctttggtcttctgaagactttagcactttaaatagtgacatgggtgcaggctgctggggtcgcattttaaatcagaattatatcaatggctatatgacttccacaatcgcatggaatttagtggctagttactatgaacagttgccttatgggagatgcgggttgatgacggcccaagagccatggagtgggcactacgtggtagaatctcctgtctgggtatcagctcataccactcagtttactcaacctggctggtattacctgaagacagttggccatttagagaaaggaggaagctacgtagctctgactgatggcttagggaacctcaccatcatcattgaaaccatggtaaacttttgttgttgctattggattaactcacttctttactattggaaaaataaaatataaaactgaaa

SEQ ID NO: 442830 - DNA, 2029 bp, Homo sapiens
aagaacgctggaggttgattggcggtcttgccggccagtgaagccagggcatgggcggggcgcggctcggagcgcgaaacatggcggggcaggacgctggctgcggccgtggcggcgacgactactcagaggacgagggcgacagcagcgtgtccagggcggctgtggaggtgttcgggaagctgaaggacctaaactgccccttcctcgagggtctgtatatcacagagccaaagacaattcaggaactgctgtgcagcccctcagagtaccgcttggagatcctagagtggatgtgtacccgggtctggccctcactgcaggacaggttcagctcactgaaaggggtcccaacagaggtgaagatccaagaaatgacgaagctgggccacgagctgatgctgtgtgcgccagatgaccaggagctcctcaagggctgtgcctgcgcccagaagcagctacacttcatggaccagttgctcgataccatccggagcctgaccattgggtgctccagttgctcgagcctgatggagcacttcgaggacaccagggagaagaacgaggccttgctgggggagctcttctctagcccccacctgcagatgctcctgaatccagagtgcgacccgtggcccctggacatgcagcccctcctcaacaagcagagtgatgactggcagtgggccagtgcctctgccaagtccgaggaggaggagaagctggcggagcttgccaggcagctgcaggagagtgctgccaagttgcacgcgcttagaacggagtactttgcacagcatgagcaaggggctgctgcgggcgcagccgacatcagcaccctagaccagaagctgcgtctggtcacttccgacttccaccagctaatcttggcttttctccaagtctacgacgacgagctgggcgagtgctgccagcgcccaggccctgacctccacccgtgcggccccatcatccaggccacgcaccagaatctgacttcctacagccaactgctgcaagtggtcatggcagttgctgacacctctgcgaaggccgtggagaccgtgaagaagcagcaaggcgagcagatctgctggggtggcagcagctccgtcatgagtctagctaccaagatgaatgaactaatggagaaatagaaagtcttcagtgatggcctacgccaaagcacaggatggggcgggcaggaagccctctcccaagatcgagttggccgaggatggatgattgtggcagcagaagccgttgcagccccacgttgtgctctttgaggacttgctatccccgtgggaacatcaccatgtccgaggcaccccgggccgagacctttgtcttcctggacctggaagccactgggctccccagtgtggagcccgagattgccgagctgtccctctttgctgtccaccgctcctccctggagaacccggagcacgacgagtctggtgccctagtattgccccgggtcctggacaagctcacgctgtgcatgtgcccggagcgccccttcactgccaaggccagcgagatcaccggcctgagcagtgagggcctggcgcgatgccggaaggctggctttgatggcgccgtggtgcggacgctgcaggccttcctgagccgccaggcagggcccatctgccttgtggcccacaatggctttgattatgatttccccctgctgtgtgccgagctgcggcgcctgggtgcccgcctgccccgggacactgtctgcctggacacgctgccggccctgcggggcctggaccgcgcccacagccacggcacccgggcccggggccgccagggttacagcctcggcagcctcttccaccgctacttccgggcagagccaagcgcagcccactcagccgagggcgacgtgcacaccctgctcctgatcttcctgcaccgcgccgcagagctgctcgcctgggccgatgagcaggcccgtgggtgggcccacatcgagcccatgtacttgccgcctgatgaccccagcctggaggcctga

SEQ ID NO: 442831 - DNA, 1534 bp, Homo sapiens
aagaacgctggaggttgattggcggtcttgccggccagtgaagccagggcatgggcggggcgcggctcggagcgcgaaacatggcggggcaggacgctggctgcggccgtggcggcgacgactactcagaggacgagggcgacagcagcgtgtccagggcggctgtggaggtgttcgggaagctgaaggacctaaactgccccttcctcgagggtctgtatatcacagagccaaagacaattcaggaactgctgtgcagcccctcagagtaccgcttggagatcctagagtggatgtgtacccgggtctggccctcactgcaggacaggttcagctcactgaaaggggtcccaacagaggtgaagatccaagaaatgacgaagctgggccacgagctgatgctgtgtgcgccagatgaccaggagctcctcaagggctgtgcctgcgcccagaagcagctacacttcatggaccagttgctcgataccatccggagcctgaccattgggtgctccagttgctcgagcctgatggagcacttcgaggacaccagggagaagaacgaggccttgctgggggagctcttctctagcccccacctgcagatgctcctgaatccagagtgcgacccgtggcccctggacatgcagcccctcctcaacaagcagagtgatgactggcagtgggccagtgcctctgccaagtccgaggaggaggagaagctggcggagcttgccaggcagctgcaggagagtgctgccaagttgcacgcgcttagaacggagtactttgcacagcatgagcaaggggctgctgcgggcgcagccgacatcagcaccctagaccagaagctgcgtctggtcacttccgacttccaccagctaatcttggcttttctccaagtctacgacgacgagctgggcgagtgctgccagcgcccaggccctgacctccacccgtgcggccccatcatccaggccacgcaccagaatctgacttcctacagccaactgctgcaagtggtcatggcagttgctgacacctctgcgaaggccgtggagaccgtgaagaagcagcaaggcgagcagatctgctggggtggcagcagctccgtcatgagtctagctaccaagatgaatgaactaatggagaaatagaaagtcttcagtgatggcctacgccaaagcacaggatggggcgggcaggaagccctctcccaagatcgagttggccgaggatggatgattgtggcagcagaagccgttgcagccccacgttgtgctctaggcagggacctttggcccctttggggagggagagacagacgggcggtttgacttggacacaaagaaagccttggtttctaaaacaaaaaaaacaacaagaaagaagcaaggagcaaacagagcacgaaaacaaacgaaaaaaagcacagggggggccacaaaaaagagaccggcgagaggccaccggacacaacacacacacaaaggagtacagcaaaggggacgcccaacagggcaacagacaacac

SEQ ID NO: 442832 - DNA, 2567 bp, Homo sapiens
aagaacgctggaggttgattggcggtcttgccggccagtgaagccagggcatgggcggggcgcggctcggagcgcgaaacatggcggggcaggacgctggctgcggccgtggcggcgacgactactcagaggacgagggcgacagcagcgtgtccagggcggctgtggaggtgttcgggaagctgaaggacctaaactgccccttcctcgagggtctgtatatcacagagccaaagacaattcaggaactgctgtgcagcccctcagagtaccgcttggagatcctagagtggatgtgtacccgggtctggccctcactgcaggacaggttcagctcactgaaaggggtcccaacagaggtgaagatccaagaaatgacgaagctgggccacgagctgatgctgtgtgcgccagatgaccaggagctcctcaagggctgtgcctgcgcccagaagcagctacacttcatggaccagttgctcgataccatccggagcctgaccattgggtgctccagttgctcgagcctgatggagcacttcgaggacaccagggagaagaacgaggccttgctgggggagctcttctctagcccccacctgcagatgctcctgaatccagagtgcgacccgtggcccctggacatgcagcccctcctcaacaagcagagtgatgactggcagtgggccagtgcctctgccaagtccgaggaggaggagaagctggcggagcttgccaggcagctgcaggagagtgctgccaagttgcacgcgcttagaacggagtactttgcacagcatgagcaaggggctgctgcgggcgcagccgacatcagcaccctagaccagaagctgcgtctggtcacttccgacttccaccagctaatcttggcttttctccaagtctacgacgacgagctgggcgagtgctgccagcgcccaggccctgacctccacccgtgcggccccatcatccaggccacgcaccagaatctgacttcctacagccaagtaagggtgcccttcccctcccctctaaccgccccctcccctgttcactcagactgagagcttatatcctgcttgggctcaggggcctcagcagcccctgacaagggaccacagggcaggaccaggggctgggaggggctgggctgggctccctgctggccagtggcgtggcagggctctgggcccctcagtgggctggggaggtgctgcttctggtccttggacctgcccaccttagcaggcactagctaggcccagatccggtgtggggtcctgcgtgtcccagcctccaggtgctgttcctgtgttggccgcactgttgtcacgttacgctccaaaatagcaaggtccattcattcttgtggatgaccaagaactgtgccagacaggcagacaaatgcctgcctgtctgcccatgagcctgctcagacaggatgagaggaagtgggctcgtcaatgtttgcttgtttcgttgttccacatgtgagatccccagaggccaacctaaaaagccggctttagttacgatgactacagttcccacgtgcgcaactctgcccttggctcaaggattccgtgatgttcattttggttttctaagcgagaggctccgagccttccaacctctgactggctggtcctgtgagacccctcgatcagggatggtgaggccacagccctctcctgtccatttttcttgggacatttattttccccccttgccaattgctggggctgggaggacacgcagtgctggctggcatgtccctaggcatcgagggttgccagagcgacatgagagtgtggcatccccactgggccaggaagaggggacttaggtccgagaactctgattggtgacttccccgctgggagttctgtccctcacccttggctgtctttcaggtgaatgccacctgatcagtgtgagtgggggtgggaagcaggagatgccgtcgctacgtgagaccagcggcatttagtgcctgctcgctccctccctccctccctccctccctccctccctccccagctgctgcaagtggtcatggcagttgctgacacctctgcgaaggccgtggagaccgtgaagaagcagcaaggcgagcagatctgctggggtggcagcagctccgtcatgagtctagctaccaagatgaatgaactaatggagaaatagaaagtcttcagtgatggcctacgccaaagcacaggatggggcgggcaggaagccctctcccaagatcgagttggccgaggatggatgattgtggcagcagaagccgttgcagccccacgttgtgctctaggcagggacctttggcccctttggggagggagagacagacgggcggtttgacttggacacaaagaaagccttggtttctaaaacaaaaaaaacaacaagaaagaagcaaggagcaaacagagcacgaaaacaaacgaaaaaaagcacagggggggccacaaaaaagagaccggcgagaggccaccggacacaacacacacacaaaggagtacagcaaaggggacgcccaacagggcaacagacaacac

SEQ ID NO: 442833 - DNA, 2199 bp, Homo sapiens
aagaacgctggaggttgattggcggtcttgccggccagtgaagccagggcatgggcggggcgcggctcggagcgcgaaacatggcggggcaggacgctggctgcggccgtggcggcgacgactactcagaggacgagggcgacagcagcgtgtccagggcggctgtggaggtgttcgggaagctgaaggacctaaactgccccttcctcgagggtctgtatatcacagagccaaagacaattcaggaactgctgtgcagcccctcagagtaccgcttggagatcctagagtggatgtgtacccgggtctggccctcactgcaggacaggttcagctcactgaaaggggtcccaacagaggtgaagatccaagaaatgacgaagctgggccacgagctgatgctgtgtgcgccagatgaccaggagctcctcaagggctgtgcctgcgcccagaagcagctacacttcatggaccagttgctcgataccatccggagcctgaccattgggtgctccagttgctcgagcctgatggagcacttcgaggacaccagggagaagaacgaggccttgctgggggagctcttctctagcccccacctgcagatgctcctgaatccagagtgcgacccgtggcccctggacatgcagcccctcctcaacaagcagagtgatgactggcagtgggccagtgcctctgccaagtccgaggaggaggagaagctggcggagcttgccaggcagctgcaggagagtgctgccaagttgcacgcgcttagaacggagtactttgcacagcatgagcaaggggctgctgcgggcgcagccgacatcagcaccctagaccagaagctgcgtctggtcacttccgacttccaccagctaatcttggcttttctccaagtctacgacgacgagctgggcgagtgctgccagcgcccaggccctgacctccacccgtgcggccccatcatccaggccacgcaccagaatctgacttcctacagccaagtaagggtgcccttcccctcccctctaaccgccccctcccctgttcactcagactgagagcttatatcctgcttgggctcaggggcctcagcagcccctgacaagggaccacagggcaggaccaggggctgggaggggctgggctgggctccctgctggccagtggcgtggcagggctctgggcccctcagtgggctggggaggtgctgcttctggtccttggacctgcccaccttagcaggcactagctaggcccagatccggtgtggggtcctgcgtgtcccagcctccaggtgctgttcctgtgttggccgcactgttgtcacgttacgctccaaaatagcaaggtccattcattcttgtggatgaccaagaactgtgccagacaggcagacaaatgcctgcctgtctgcccatgagcctgctcagacaggatgagaggaagtgggctcgtcaatgtttgcttgtttcgttgttccacatgtgagatccccagaggccaacctaaaaagccggctttagttacgatgactacagttcccacgtgcgcaactctgcccttggctcaaggattccgtgatgttcattttggttttctaagcgagaggctccgagccttccaacctctgactggctggtcctgtgagacccctcgatcagggatgctgctgcaagtggtcatggcagttgctgacacctctgcgaaggccgtggagaccgtgaagaagcagcaaggcgagcagatctgctggggtggcagcagctccgtcatgagtctagctaccaagatgaatgaactaatggagaaatagaaagtcttcagtgatggcctacgccaaagcacaggatggggcgggcaggaagccctctcccaagatcgagttggccgaggatggatgattgtggcagcagaagccgttgcagccccacgttgtgctctaggcagggacctttggcccctttggggagggagagacagacgggcggtttgacttggacacaaagaaagccttggtttctaaaacaaaaaaaacaacaagaaagaagcaaggagcaaacagagcacgaaaacaaacgaaaaaaagcacagggggggccacaaaaaagagaccggcgagaggccaccggacacaacacacacacaaaggagtacagcaaaggggacgcccaacagggcaacagacaacac

SEQ ID NO: 442834 - DNA, 2124 bp, Homo sapiens
cggttttttgctagttcacagaaagaccatttttaatatgaaaagagaaaaacaatttgaaggccccacaatttgttgtgtaacaacataatttcaagtaaagtgaatgtgattaaaacatcttgatttcacaaagccattcagaggaggcttcgacaaacgcaaagcgacccaaaccctggagggtcacatcccggctgctacaaacctcggcggggcggccccgctcttgcggccgggacagcgcagcggcagcaggggccgcaggggacccgcagattggcacgccgctccccatccccgcagcgcgtctgcaccggagactctgcggggattgtagccggagggcgggccgggctccgaggcgctgctcaggcattggggtttgtcctcatgagctccacgtcggcgtgcaccatctccctcaccagctcatcgaaagcgacccggggcttccagttcagcttctgtttcgctttggtgcagtcgccctgcagaaagtcctcggcggcagcgtgcgaccctctttctaacgcggccgtggatgtttcttcccgggccgcagccaagcgcggttcttcctgggcggtggctttgggcttttcgtacccacagtcaagtcagttcacgtcgcctcccgcacacacgcgttcataaaacgaaactggagtttcacgaagcaattcttaggcttagcgtccaggaacgctgtagacggtctattctattctacccctattctactcggttcgattctgttcctaagaaaatgccgatctcgacccacttgtacttccacgagcggagctgcagccagcagctctgcaggaccccgcactgcccgccaccgtcccctctggcagtgccttcctcctcccgctttccccaactgctccactcgaggaaaccggaggacaggttcagctcactgaaaggggtcccaacagaggtgaagatccaagaaatgacgaagctgggccacgagctgatgctgtgtgcgccagatgaccaggagctcctcaagggctgtgcctgcgcccagaagcagctacacttcatggaccagttgctcgataccatccggagcctgaccattgggtgctccagttgctcgagcctgatggagcacttcgaggacaccagggagaagaacgaggccttgctgggggagctcttctctagcccccacctgcagatgctcctgaatccagagtgcgacccgtggcccctggacatgcagcccctcctcaacaagcagagtgatgactggcagtgggccagtgcctctgccaagtccgaggaggaggagaagctggcggagcttgccaggcagctgcaggagagtgctgccaagttgcacgcgcttagaacggagtactttgcacagcatgagcaaggggctgctgcgggcgcagccgacatcagcaccctagaccagaagctgcgtctggtcacttccgacttccaccagctaatcttggcttttctccaagtctacgacgacgagctgggcgagtgctgccagcgcccaggccctgacctccacccgtgcggccccatcatccaggccacgcaccagaatctgacttcctacagccaactgctgcaagtggtcatggcagttgctgacacctctgcgaaggccgtggagaccgtgaagaagcagcaaggcgagcagatctgctggggtggcagcagctccgtcatgagtctagctaccaagatgaatgaactaatggagaaatagaaagtcttcagtgatggcctacgccaaagcacaggatggggcgggcaggaagccctctcccaagatcgagttggccgaggatggatgattgtggcagcagaagccgttgcagccccacgttgtgctctaggcagggacctttggcccctttggggagggagagacagacgggcggtttgacttggacacaaagaaagccttggtttctaaaacaaaaaaaacaacaagaaagaagcaaggagcaaacagagcacgaaaacaaacgaaaaaaagcacagggggggccacaaaaaagagaccggcgagaggccaccggacacaacacacacacaaaggagtacagcaaaggggacgcccaacagggcaacagacaacac

SEQ ID NO: 442835 - DNA, 1416 bp, Homo sapiens
aagaacgctggaggttgattggcggtcttgccggccagtgaagccagggcatgggcggggcgcggctcggagcgcgaaacatggcggggcaggacgctggctgcggccgtggcggcgacgactactcagaggacgagggcgacagcagcgtgtccagggcggctgtggaggtgttcgggaagctgaaggacctaaactgccccttcctcgagggtctgtatatcacagagccaaagacaattcaggaactgctgtgcagcccctcagagtaccgcttggagatcctagagtggatgtgtacccgggtctggccctcactgcaggacaggttcagctcactgaaaggggtcccaacagaggtgaagatccaagaaatgacgaagctgggccacgagctgatgctgtgtgcgccagatgaccaggagctcctcaagggctgtgcctgcgcccagaagcagctacacttcatggaccagttgctcgataccatccggagcctgaccattgggtgctccagttgctcgagcctgatggagcacttcgaggacaccagggagaagaacgaggccttgctgggggagctcttctctagcccccacctgcagatgctcctgaatccagagtgcgacccgtggcccctggacatgcagcccctcctcaacaagcagagtgatgactggcagtgggccagtgcctctgccaagtccgaggaggaggagaagctggcggagcttgccaggcagctgcaggagagtgctgccaagttgcacgcgcttagaacggagtctacgacgacgagctgggcgagtgctgccagcgcccaggccctgacctccacccgtgcggccccatcatccaggccacgcaccagaatctgacttcctacagccaactgctgcaagtggtcatggcagttgctgacacctctgcgaaggccgtggagaccgtgaagaagcagcaaggcgagcagatctgctggggtggcagcagctccgtcatgagtctagctaccaagatgaatgaactaatggagaaatagaaagtcttcagtgatggcctacgccaaagcacaggatggggcgggcaggaagccctctcccaagatcgagttggccgaggatggatgattgtggcagcagaagccgttgcagccccacgttgtgctctaggcagggacctttggcccctttggggagggagagacagacgggcggtttgacttggacacaaagaaagccttggtttctaaaacaaaaaaaacaacaagaaagaagcaaggagcaaacagagcacgaaaacaaacgaaaaaaagcacagggggggccacaaaaaagagaccggcgagaggccaccggacacaacacacacacaaaggagtacagcaaaggggacgcccaacagggcaacagacaacac

SEQ ID NO: 442836 - DNA, 2499 bp, Homo sapiens
aagaacgctggaggttgattggcggtcttgccggccagtgaagccagggcatgggcggggcgcggctcggagcgcgaaacatggcggggcaggacgctggctgcggccgtggcggcgacgactactcagaggacgagggcgacagcagcgtgtccagggcggctgtggaggtgttcgggaagctgaaggacctaaactgccccttcctcgagggtctgtatatcacagagccaaagacaattcaggaactgctgtgcagcccctcagagtaccgcttggagatcctagagtggatgtgtacccgaaatgacgaagctgggccacgagctgatgctgtgtgcgccagatgaccaggagctcctcaagggctgtgcctgcgcccagaagcagctacacttcatggaccagttgctcgataccatccggagcctgaccattgggtgctccagttgctcgagcctgatggagcacttcgaggacaccagggagaagaacgaggccttgctgggggagctcttctctagcccccacctgcagatgctcctgaatccagagtgcgacccgtggcccctggacatgcagcccctcctcaacaagcagagtgatgactggcagtgggccagtgcctctgccaagtccgaggaggaggagaagctggcggagcttgccaggcagctgcaggagagtgctgccaagttgcacgcgcttagaacggagtactttgcacagcatgagcaaggggctgctgcgggcgcagccgacatcagcaccctagaccagaagctgcgtctggtcacttccgacttccaccagctaatcttggcttttctccaagtctacgacgacgagctgggcgagtgctgccagcgcccaggccctgacctccacccgtgcggccccatcatccaggccacgcaccagaatctgacttcctacagccaagtaagggtgcccttcccctcccctctaaccgccccctcccctgttcactcagactgagagcttatatcctgcttgggctcaggggcctcagcagcccctgacaagggaccacagggcaggaccaggggctgggaggggctgggctgggctccctgctggccagtggcgtggcagggctctgggcccctcagtgggctggggaggtgctgcttctggtccttggacctgcccaccttagcaggcactagctaggcccagatccggtgtggggtcctgcgtgtcccagcctccaggtgctgttcctgtgttggccgcactgttgtcacgttacgctccaaaatagcaaggtccattcattcttgtggatgaccaagaactgtgccagacaggcagacaaatgcctgcctgtctgcccatgagcctgctcagacaggatgagaggaagtgggctcgtcaatgtttgcttgtttcgttgttccacatgtgagatccccagaggccaacctaaaaagccggctttagttacgatgactacagttcccacgtgcgcaactctgcccttggctcaaggattccgtgatgttcattttggttttctaagcgagaggctccgagccttccaacctctgactggctggtcctgtgagacccctcgatcagggatggtgaggccacagccctctcctgtccatttttcttgggacatttattttccccccttgccaattgctggggctgggaggacacgcagtgctggctggcatgtccctaggcatcgagggttgccagagcgacatgagagtgtggcatccccactgggccaggaagaggggacttaggtccgagaactctgattggtgacttccccgctgggagttctgtccctcacccttggctgtctttcaggtgaatgccacctgatcagtgtgagtgggggtgggaagcaggagatgccgtcgctacgtgagaccagcggcatttagtgcctgctcgctccctccctccctccctccctccctccctccctccccagctgctgcaagtggtcatggcagttgctgacacctctgcgaaggccgtggagaccgtgaagaagcagcaaggcgagcagatctgctggggtggcagcagctccgtcatgagtctagctaccaagatgaatgaactaatggagaaatagaaagtcttcagtgatggcctacgccaaagcacaggatggggcgggcaggaagccctctcccaagatcgagttggccgaggatggatgattgtggcagcagaagccgttgcagccccacgttgtgctctaggcagggacctttggcccctttggggagggagagacagacgggcggtttgacttggacacaaagaaagccttggtttctaaaacaaaaaaaacaacaagaaagaagcaaggagcaaacagagcacgaaaacaaacgaaaaaaagcacagggggggccacaaaaaagagaccggcgagaggccaccggacacaacacacacacaaaggagtacagcaaaggggacgcccaacagggcaacagacaacac

SEQ ID NO: 442837 - DNA, 908 bp, Homo sapiens
gtcttgctctggcctgagtcgctcggtacagctcccctgtgtccctgtttctgaaagctttcttcctcgccctgggtgtgcagtgtctgaggtgagggccggtggcagcctggctggtgggcagggcagcctcaagggactctgcctctggctttgcagtactttgcacagcatgagcaaggggctgctgcgggcgcagccgacatcagcaccctagaccagaagctgcgtctggtcacttccgacttccaccagctaatcttggcttttctccaagtctacgacgacgagctgggcgagtgctgccagcgcccaggccctgacctccacccgtgcggccccatcatccaggccacgcaccagaatctgacttcctacagccaactgctgcaagtggtcatggcagttgctgacacctctgcgaaggccgtggagaccgtgaagaagcagcaaggcgagcagatctgctggggtggcagcagctccgtcatgagtctagctaccaagatgaatgaactaatggagaaatagaaagtcttcagtgatggcctacgccaaagcacaggatggggcgggcaggaagccctctcccaagatcgagttggccgaggatggatgattgtggcagcagaagccgttgcagccccacgttgtgctctaggcagggacctttggcccctttggggagggagagacagacgggcggtttgacttggacacaaagaaagccttggtttctaaaacaaaaaaaacaacaagaaagaagcaaggagcaaacagagcacgaaaacaaacgaaaaaaagcacagggggggccacaaaaaagagaccggcgagaggccaccggacacaacacacacacaaaggagtacagcaaaggggacgcccaacagggcaacagacaacac

SEQ ID NO: 442838 - DNA, 1310 bp, Homo sapiens
taggttttgggggagcaccccttcccctttggaggctgagcacggcatgtgtgggcaccttggtcacactccagagctcgcttcatccccacgagcggcacctgatctccagtgacggggagactgaggcctggcaaagaggacctgttgcctttgtgtaactggccccagcatgggggaggcattggccccagcatgggggaggcattgaccccaggcctgccaggcctggcagccacagcctggctaggtggaggttactgccttccgcaccactctggcttcctccccgtgcctgtgaagagctcggggcctgcttcctaatttgtaaacacggggcgtgtgtctcagtggctgtgagctagcgagggggtggcgagcgagccggctgcgcaggtcctgaggccccaggcctcattgttggccaacaggcagctgggggcgggctgcggccgctgattaaaggccgcctagagcagcctgtgtggcgacaggtgcccagaagcccaggaagccggtcagtgcccgccccagtcctcagggtttgtgcctctcgctcggacagtttgaggacttgctatccccgtgggaacatcaccatgtccgaggcaccccgggccgagacctttgtcttcctggacctggaagccactgggctccccagtgtggagcccgagattgccgagctgtccctctttgctgtccaccgctcctccctggagaacccggagcacgacgagtctggtgccctagtattgccccgggtcctggacaagctcacgctgtgcatgtgcccggagcgccccttcactgccaaggccagcgagatcaccggcctgagcagtgagggcctggcgcgatgccggaaggctggctttgatggcgccgtggtgcggacgctgcaggccttcctgagccgccaggcagggcccatctgccttgtggcccacaatggctttgattatgatttccccctgctgtgtgccgagctgcggcgcctgggtgcccgcctgccccgggacactgtctgcctggacacgctgccggccctgcggggcctggaccgcgcccacagccacggcacccgggcccggggccgccagggttacagcctcggcagcctcttccaccgctacttccgggcagagccaagcgcagcccactcagccgagggcgacgtgcacaccctgctcctgatcttcctgcaccgcgccgcagagctgctcgcctgggccgatgagcaggcccgtgggtgggcccacatcgagcccatgtacttgccgcctgatgaccccagcctggaggcctga

SEQ ID NO: 442839 - DNA, 615 bp, Homo sapiens
aagaacgctggaggttgattggcggtcttgccggccagtgaagccagggcatgggcggggcgcggctcggagcgcgaaacatggcggggcaggacgctggctgcggccgtggcggcgacgactactcagaggacgagggcgacagcagcgtgtccagggcggctgtggaggtgttcgggaagctgaaggacctaaactgccccttcctcgagggtctgtatatcacagagccaaagacaattcaggaactgctgtgcagcccctcagagtaccgcttggagatcctagagtggatgtgtacccgggtctggccctcactgcaggacaggttcagctcactgaaaggggtcccaacagaggtgaagatccaagaaatgacgaagctgggccacgagctgatgctgtgtgcgccagatgaccaggagctcctcaagggctgtgcctgcgcccagaagcagctacacttcatggaccagttgctcgataccatccggagcctgaccattgggtgctccagttgctcgagcctgatggagcacttcgaggacaccaaggagagtgctgccaagtgcacgcgcttagaacggagtacttgcacagcatgacgcaaggggc

SEQ ID NO: 442840 - DNA, 405 bp, Homo sapiens
gctgggggaagggatcagcctcaggtattgggtggtgcccacgcctgagcacattgccatgtgccttgccgcacgtggtcctcctggcagcccttggcctggcctctgtttgattgcggaggagaccggggcccacaggagagtgagtgagggggctgaggctgggagccagaaggtcttgctctggcctgagtcgctcggtacagctcccctgtgtccctgtttctgaaagctttcttcctcgccctgggtgtgcagtgtctgaggtgagggccggtggcagcctggctggtgggcagggcagcctcaagggactctgcctctggctttgcagtactttgcacagcatgagcaaggggctgctgcgggcgcagccgacatcagcaccctagaccagaagctgcg

SEQ ID NO: 442841 - DNA, 769 bp, Homo sapiens
gctggctgcggccgtggcggcgacgactactcagaggacgagggcgacagcagcgtgtccagggcggctgtggaggtgttcgggaagctgaaggtgctgttggcccagaaagccactccagggcgggggaccggggagggccccgcccgaggcccgggagggcttgctgcggaagtccgcggcgccacgcggccaccgtcgccggttccggctgcgccctgttcccttgcagcagggggtgcttgtggatcattcatctttgccctttggtgtgccccaggccttcgttcttgctgtctccacggcccgtgcctggtagttggggccagcaccgcctgtggaactgcagtacccgcgctgggcgctcggagcaagtgcagacacagaggacccaggcctggccttagggatcttgcggggtctggggggacagatgggcagagcctcgtgccactctgtcaagtcagcgagactagggcttggtgtcagttggtgtcagatgccaggggtgatagcctccagaagccctctacagccccacaggacagagccctcactgcagcagtgaggaaagctggcccacgaggttagggagctgtcccaggtcccctcggcccgctcgctcctccccccagacactcccccatcctgtccgcgactggctcagtggtccctctccctttccctctcccctttccctcagtcccgaaacctaggactctctcttaagtcttagtctcaggcgttgctcctaggtcctgctgccaca

SEQ ID NO: 442842 - DNA, 2309 bp, Homo sapiens
aagaacgctggaggttgattggcggtcttgccggccagtgaagccagggcatgggcggggcgcggctcggagcgcgaaacatggcggggcaggacgctggctgcggccgtggcggcgacgactactcagaggacgagggcgacagcagcgtgtccagggcggctgtggaggtgttcgggaagctgaaggacctaaactgccccttcctcgagggtctgtatatcacagagccaaagacaattcaggaactgctgtgcagcccctcagagtaccgcttggagatcctagagtggatgtgtacccgggtctggccctcactgcaggacaggttcagctcactgaaaggggtcccaacagaggtgaagatccaagaaatgacgaagctgggccacgagctgatgctgtgtgcgccagatgaccaggagctcctcaagggctgtgcctgcgcccagaagcagctacacttcatggaccagttgctcgataccatccggagcctgaccattgggtgctccagttgctcgagcctgatggagcacttcgaggacaccagggagaagaacgaggccttgctgggggagctcttctctagcccccacctgcagatgctcctgaatccagagtgcgacccgtggcccctggacatgcagcccctcctcaacaagcagagtgatgactggcagtgggccagtgcctctgccaagtccgaggaggaggagaagctggcggagcttgccaggcagctgcaggagagtgctgccaagttgcacgcgcttagaacggagtactttgcacagcatgagcaaggggctgctgcgggcgcagccgacatcagcaccctagaccagaagctgcgtctggtcacttccgacttccaccagctaatcttggcttttctccaagtctacgacgacgagctgggcgagtgctgccagcgcccaggccctgacctccacccgtgcggccccatcatccaggccacgcaccagaatctgacttcctacagccaaatccccagaggccaacctaaaaagccggctttagttacgatgactacagttcccacgtgcgcaactctgcccttggctcaaggattccgtgatgttcattttggttttctaagcgagaggctccgagccttccaacctctgactggctggtcctgtgagacccctcgatcagggatgctgctgcaagtggtcatggcagttgctgacacctctgcgaaggccgtggagaccgtgaagaagcagcaaggcgagcagatctgctggggtggcagcagctccgtcatgagtctagctaccaagatgaatgaactaatggagaaatagaaagtcttcagtgatggcctacgccaaagcacaggatggggcgggcaggaagccctctcccaagatcgagttggccgaggatggatgattgtggcagcagaagccgttgcagccccacgttgtgctcgcagctgggggcgggctgcggccgctgattaaaggccgcctagagcagcctgtgtggcgacaggtgcccagaagcccaggaagccggtcagtgcccgccccagtttgaggacttgctatccccgtgggaacatcaccatgtccgaggcaccccgggccgagacctttgtcttcctggacctggaagccactgggctccccagtgtggagcccgagattgccgagctgtccctctttgctgtccaccgctcctccctggagaacccggagcacgacgagtctggtgccctagtattgccccgggtcctggacaagctcacgctgtgcatgtgcccggagcgccccttcactgccaaggccagcgagatcaccggcctgagcagtgagggcctggcgcgatgccggaaggctggctttgatggcgccgtggtgcggacgctgcaggccttcctgagccgccaggcagggcccatctgccttgtggcccacaatggctttgattatgatttccccctgctgtgtgccgagctgcggcgcctgggtgcccgcctgccccgggacactgtctgcctggacacgctgccggccctgcggggcctggaccgcgcccacagccacggcacccgggcccggggccgccagggttacagcctcggcagcctcttccaccgctacttccgggcagagccaagcgcagcccactcagccgagggcgacgtgcacaccctgctcctgatcttcctgcaccgcgccgcagagctgctcgcctgggccgatgagcaggcccgtgggtgggcccacatcgagcccatgtacttgccgcctgatgaccccagcctggaggcctga

SEQ ID NO: 442843 - DNA, 2163 bp, Homo sapiens
aagaacgctggaggttgattggcggtcttgccggccagtgaagccagggcatgggcggggcgcggctcggagcgcgaaacatggcggggcaggacgctggctgcggccgtggcggcgacgactactcagaggacgagggcgacagcagcgtgtccagggcggctgtggaggtgttcgggaagctgaaggacctaaactgccccttcctcgagggtctgtatatcacagagccaaagacaattcaggaactgctgtgcagcccctcagagtaccgcttggagatcctagagtggatgtgtacccgggtctggccctcactgcaggacaggttcagctcactgaaaggggtcccaacagaggtgaagatccaagaaatgacgaagctgggccacgagctgatgctgtgtgcgccagatgaccaggagctcctcaagggctgtgcctgcgcccagaagcagctacacttcatggaccagttgctcgataccatccggagcctgaccattgggtgctccagttgctcgagcctgatggagcacttcgaggacaccagggagaagaacgaggccttgctgggggagctcttctctagcccccacctgcagatgctcctgaatccagagtgcgacccgtggcccctggacatgcagcccctcctcaacaagcagagtgatgactggcagtgggccagtgcctctgccaagtccgaggaggaggagaagctggcggagcttgccaggcagctgcaggagagtgctgccaagttgcacgcgcttagaacggagtactttgcacagcatgagcaaggggctgctgcgggcgcagccgacatcagcaccctagaccagaagctgcgtctggtcacttccgacttccaccagctaatcttggcttttctccaagtctacgacgacgagctgggcgagtgctgccagcgcccaggccctgacctccacccgtgcggccccatcatccaggccacgcaccagaatctgacttcctacagccaactgctgcaagtggtcatggcagttgctgacacctctgcgaaggccgtggagaccgtgaagaagcagcaaggcgagcagatctgctggggtggcagcagctccgtcatgagtctagctaccaagatgaatgaactaatggagaaatagaaagtcttcagtgatggcctacgccaaagcacaggatggggcgggcaggaagccctctcccaagatcgagttggccgaggatggatgattgtggcagcagaagccgttgcagccccacgttgtgctcgcagctgggggcgggctgcggccgctgattaaaggccgcctagagcagcctgtgtggcgacaggtgcccagaagcccaggaagccggtcagtgcccgccccagtcctcagggtttgtgcctctcgctcggacagtttgaggacttgctatccccgtgggaacatcaccatgtccgaggcaccccgggccgagacctttgtcttcctggacctggaagccactgggctccccagtgtggagcccgagattgccgagctgtccctctttgctgtccaccgctcctccctggagaacccggagcacgacgagtctggtgccctagtattgccccgggtcctggacaagctcacgctgtgcatgtgcccggagcgccccttcactgccaaggccagcgagatcaccggcctgagcagtgagggcctggcgcgatgccggaaggctggctttgatggcgccgtggtgcggacgctgcaggccttcctgagccgccaggcagggcccatctgccttgtggcccacaatggctttgattatgatttccccctgctgtgtgccgagctgcggcgcctgggtgcccgcctgccccgggacactgtctgcctggacacgctgccggccctgcggggcctggaccgcgcccacagccacggcacccgggcccggggccgccagggttacagcctcggcagcctcttccaccgctacttccgggcagagccaagcgcagcccactcagccgagggcgacgtgcacaccctgctcctgatcttcctgcaccgcgccgcagagctgctcgcctgggccgatgagcaggcccgtgggtgggcccacatcgagcccatgtacttgccgcctgatgaccccagcctggaggcctga

SEQ ID NO: 442844 - DNA, 1911 bp, Homo sapiens
aagaacgctggaggttgattggcggtcttgccggccagtgaagccagggcatgggcggggcgcggctcggagcgcgaaacatggcggggcaggacgctggctgcggccgtggcggcgacgactactcagaggacgagggcgacagcagcgtgtccagggcggctgtggaggtgttcgggaagctgaaggacctaaactgccccttcctcgagggtctgtatatcacagagccaaagacaattcaggaactgctgtgcagcccctcagagtaccgcttggagatcctagagtggatgtgtacccgggtctggccctcactgcaggacaggttcagctcactgaaaggggtcccaacagaggtgaagatccaagaaatgacgaagctgggccacgagctgatgctgtgtgcgccagatgaccaggagctcctcaagggctgtgcctgcgcccagaagcagctacacttcatggaccagttgctcgataccatccggagcctgaccattgggtgctccagttgctcgagcctgatggagcacttcgaggacaccagggagaagaacgaggccttgctgggggagctcttctctagcccccacctgcagatgctcctgaatccagagtgcgacccgtggcccctggacatgcagcccctcctcaacaagcagagtgatgactggcagtgggccagtgcctctgccaagtccgaggaggaggagaagctggcggagcttgccaggcagctgcaggagagtgctgccaagttgcacgcgcttagaacggagtctacgacgacgagctgggcgagtgctgccagcgcccaggccctgacctccacccgtgcggccccatcatccaggccacgcaccagaatctgacttcctacagccaactgctgcaagtggtcatggcagttgctgacacctctgcgaaggccgtggagaccgtgaagaagcagcaaggcgagcagatctgctggggtggcagcagctccgtcatgagtctagctaccaagatgaatgaactaatggagaaatagaaagtcttcagtgatggcctacgccaaagcacaggatggggcgggcaggaagccctctcccaagatcgagttggccgaggatggatgattgtggcagcagaagccgttgcagccccacgttgtgctctttgaggacttgctatccccgtgggaacatcaccatgtccgaggcaccccgggccgagacctttgtcttcctggacctggaagccactgggctccccagtgtggagcccgagattgccgagctgtccctctttgctgtccaccgctcctccctggagaacccggagcacgacgagtctggtgccctagtattgccccgggtcctggacaagctcacgctgtgcatgtgcccggagcgccccttcactgccaaggccagcgagatcaccggcctgagcagtgagggcctggcgcgatgccggaaggctggctttgatggcgccgtggtgcggacgctgcaggccttcctgagccgccaggcagggcccatctgccttgtggcccacaatggctttgattatgatttccccctgctgtgtgccgagctgcggcgcctgggtgcccgcctgccccgggacactgtctgcctggacacgctgccggccctgcggggcctggaccgcgcccacagccacggcacccgggcccggggccgccagggttacagcctcggcagcctcttccaccgctacttccgggcagagccaagcgcagcccactcagccgagggcgacgtgcacaccctgctcctgatcttcctgcaccgcgccgcagagctgctcgcctgggccgatgagcaggcccgtgggtgggcccacatcgagcccatgtacttgccgcctgatgaccccagcctggaggcctga

SEQ ID NO: 442845 - DNA, 1711 bp, Homo sapiens
aagaacgctggaggttgattggcggtcttgccggccagtgaagccagggcatgggcggggcgcggctcggagcgcgaaacatggcggggcaggacgctggctgcggccgtggcggcgacgactactcagaggacgagggcgacagcagcgtgtccagggcggctgtggaggtgttcgggaagctgaaggacctaaactgccccttcctcgagggtctgtatatcacagagccaaagacaattcaggaactgctgtgcagcccctcagagtaccgcttggagatcctagagtggatgtgtacccgggtctggccctcactgcaggacaggttcagctcactgaaaggggtcccaacagaggtgaagatccaagaaatgacgaagctgggccacgagctgatgctgtgtgcgccagatgaccaggagctcctcaagggctgtgcctgcgcccagaagcagctacacttcatggaccagttgctcgataccatccggagcctgaccattgggtgctccagttgctcgagcctgatggagcacttcgaggacaccagggagaagaacgaggccttgctgggggagctcttctctagcccccacctgcagatgctcctgaatccagagtgcgacccgtggcccctggacatgcagcccctcctcaacaagcagagtgatgactggcagtgggccagtgcctctgccaagtccgaggaggaggagaagctggcggagcttgccaggcagctgcaggagagtgctgccaagttgcacgcgcttagaacggagtactttgcacagcatgagcaaggggctgctgcgggcgcagccgacatcagcaccctagaccagaagctgcgtctggtcacttccgacttccaccagctaatcttggcttttctccaagtctacgacgacgagctgggcgagtgctgccagcgcccaggccctgacctccacccgtgcggccccatcatccaggccacgcaccagaatctgacttcctacagccaaatccccagaggccaacctaaaaagccggctttagttacgatgactacagttcccacgtgcgcaactctgcccttggctcaaggattccgtgatgttcattttggttttctaagcgagaggctccgagccttccaacctctgactggctggtcctgtgagacccctcgatcagggatgctgctgcaagtggtcatggcagttgctgacacctctgcgaaggccgtggagaccgtgaagaagcagcaaggcgagcagatctgctggggtggcagcagctccgtcatgagtctagctaccaagatgaatgaactaatggagaaatagaaagtcttcagtgatggcctacgccaaagcacaggatggggcgggcaggaagccctctcccaagatcgagttggccgaggatggatgattgtggcagcagaagccgttgcagccccacgttgtgctctaggcagggacctttggcccctttggggagggagagacagacgggcggtttgacttggacacaaagaaagccttggtttctaaaacaaaaaaaacaacaagaaagaagcaaggagcaaacagagcacgaaaacaaacgaaaaaaagcacagggggggccacaaaaaagagaccggcgagaggccaccggacacaacacacacacaaaggagtacagcaaaggggacgcccaacagggcaacagacaacac

SEQ ID NO: 442846 - DNA, 1634 bp, Homo sapiens
aagaacgctggaggttgattggcggtcttgccggccagtgaagccagggcatgggcggggcgcggctcggagcgcgaaacatggcggggcaggacgctggctgcggccgtggcggcgacgactactcagaggacgagggcgacagcagcgtgtccagggcggctgtggaggtgttcgggaagctgaaggacctaaactgccccttcctcgagggtctgtatatcacagagccaaagacaattcaggaactgctgtgcagcccctcagagtaccgcttggagatcctagagtggatgtgtacccgggtctggccctcactgcaggacaggttcagctcactgaaaggggtcccaacagaggtgaagatccaagaaatgacgaagctgggccacgagctgatgctgtgtgcgccagatgaccaggagctcctcaagggctgtgcctgcgcccagaagcagctacacttcatggaccagttgctcgataccatccggagcctgaccattgggtgctccagttgctcgagcctgatggagcacttcgaggacaccagggagaagaacgaggccttgctgggggagctcttctctagcccccacctgcagatgctcctgaatccagagtgcgacccgtggcccctggacatgcagcccctcctcaacaagcagagtgatgactggcagtgggccagtgcctctgccaagtccgaggaggaggagaagctggcggagcttgccaggcagctgcaggagagtgctgccaagttgcacgcgcttagaacggagtactttgcacagcatgagcaaggggctgctgcgggcgcagccgacatcagcaccctagaccagaagctgcgtctggtcacttccgacttccaccagctaatcttggcttttctccaagtctacgacgacgagctgggcgagtgctgccagcgcccaggccctgacctccacccgtgcggccccatcatccaggccacgcaccagaatctgacttcctacagccaaatccccagaggccaacctaaaaagccggctttagttacgatgactacagttcccacgtgcgcaactctgcccttggctcaaggattccgtgatgttcattttggttttctaagcgagaggctccgagccttccaacctctgactggctggtcctgtgagacccctcgatcagggatgctgctgcaagtggtcatggcagttgctgacacctctgcgaaggccgtggagaccgtgaagaagcagcaaggcgagcagatctgctggggtggcagcagctccgtcatgagtctagctaccaagatgaatgaactaatggagaaatagaaagtcttcagtgatggcagcagaagccgttgcagccccacgttgtgctctaggcagggacctttggcccctttggggagggagagacagacgggcggtttgacttggacacaaagaaagccttggtttctaaaacaaaaaaaacaacaagaaagaagcaaggagcaaacagagcacgaaaacaaacgaaaaaaagcacagggggggccacaaaaaagagaccggcgagaggccaccggacacaacacacacacaaaggagtacagcaaaggggacgcccaacagggcaacagacaacac

SEQ ID NO: 442847 - DNA, 1316 bp, Homo sapiens
aagaacgctggaggttgattggcggtcttgccggccagtgaagccagggcatgggcggggcgcggctcggagcgcgaaacatggcggggcaggacgctggctgcggccgtggcggcgacgactactcagaggacgagggcgacagcagcgtgtccagggcggctgtggaggtgttcgggaagctgaaggacctaaactgccccttcctcgagggtctgtatatcacagagccaaagacaattcaggaactgctgtgcagcccctcagagtaccgcttggagatcctagagtggatgtgtacccgggtctggccctcactgcaggacaggttcagctcactgaaaggggtcccaacagaggtgaagatccaagaaatgacgaagctgggccacgagctgatgctgtgtgcgccagatgaccaggagctcctcaagggctgtgcctgcgcccagaagcagctacacttcatggaccagttgctcgataccatccggagcctgaccattgggtgctccagttgctcgagcctgatggagcacttcgaggacaccagggagaagaacgaggccttgctgggggagctcttctctagcccccacctgcagatgctcctgaatccagagtgcgacccgtggcccctggacatgcagcccctcctcaacaagcagagtgatgactggcagtgggccagtgcctctgccaagtccgaggaggaggagaagctggcggagcttgccaggcagctgcaggagagtgctgccaagttgcacgcgcttagaacggagtactttgcacagcatgagcaaggggctgctgcgggcgcagccgacatcagcaccctagaccagaagctgcgtctggtcacttccgacttccaccagctaatcttggcttttctccaagtctacgacgacgagctgggcgagtgctgccagcgcccaggccctgacctccacccgtgcggccccatcatccaggccacgcaccagaatctgacttcctacagccaaatccccagaggccaacctaaaaagccggctttagttacgatgactacagttcccactaggcagggacctttggcccctttggggagggagagacagacgggcggtttgacttggacacaaagaaagccttggtttctaaaacaaaaaaaacaacaagaaagaagcaaggagcaaacagagcacgaaaacaaacgaaaaaaagcacagggggggccacaaaaaagagaccggcgagaggccaccggacacaacacacacacaaaggagtacagcaaaggggacgcccaacagggcaacagacaacac

SEQ ID NO: 442848 - DNA, 971 bp, Homo sapiens
aagaacgctggaggttgattggcggtcttgccggccagtgaagccagggcatgggcggggcgcggctcggagcgcgaaacatggcggggcaggacgctggctgcggccgtggcggcgacgactactcagaggacgagggcgacagcagcgtgtccagggcggctgtggaggtgttcgggaagctgaaggacctaaactgccccttcctcgagggtctgtatatcacagagccaaagacaattcaggaatgctgcgggcgcagccgacatcagcaccctagaccagaagctgcgtctggtcacttccgacttccaccagctaatcttggcttttctccaagtctacgacgacgagctgggcgagtgctgccagcgcccaggccctgacctccacccgtgcggccccatcatccaggccacgcaccagaatctgacttcctacagccaactgctgcaagtggtcatggcagttgctgacacctctgcgaaggccgtggagaccgtgaagaagcagcaaggcgagcagatctgctggggtggcagcagctccgtcatgagtctagctaccaagatgaatgaactaatggagaaatagaaagtcttcagtgatggcctacgccaaagcacaggatggggcgggcaggaagccctctcccaagatcgagttggccgaggatggatgattgtggcagcagaagccgttgcagccccacgttgtgctctaggcagggacctttggcccctttggggagggagagacagacgggcggtttgacttggacacaaagaaagccttggtttctaaaacaaaaaaaacaacaagaaagaagcaaggagcaaacagagcacgaaaacaaacgaaaaaaagcacagggggggccacaaaaaagagaccggcgagaggccaccggacacaacacacacacaaaggagtacagcaaaggggacgcccaacagggcaacagacaacac

SEQ ID NO: 442849 - DNA, 887 bp, Homo sapiens
aagaacgctggaggttgattggcggtcttgccggccagtgaagccagggcatgggcggggcgcggctcggagcgcgaaacatggcggggcaggacgctggctgcggccgtggcggcgacgactactcagaggacgagggcgacagcagcgtgtccagggcggctgtggaggtgttcgggaagctgaaggacctaaactgccccttcctcgagggtctgtatatcacagagccaaagacaattcaggaactgctgtgcagcccctcagagtaccgcttggagatcctagagtggatgtgtacccgggtctggccctcactgcaggacaggttcagctcactgaaaggggtcccaacagaggtgaagatccaagaaatgacgaagctgggccacgagctgatgctgtgtgcgccagatgaccaggagctcctcaagggctgtgcctgcgcccagaagcagctacacttcatggaccagttgctcgataccatccggagcctgaccattgggtgctccagttgctcgagcctgatggagcacttcgaggacaccagggagaagaacgaggccttgctgggggagctcttctctagcccccacctgcagatgctcctgaatccagagtgcgacccgtggcccctggacatgcagcccctcctcaacaagcagagtgatgactggcagtgggccagtgcctctgccaagtccgaggaggaggagaagctggcggagcttgccaggcagctgcaggagagtgctgccaagttgcacgcgcttagaacggagtacttttgccagcatgggccaggggcttgtgcgggcgcaccccacttaagcaccagctaattttgggtttttttccagtcttccaaccaccaaccttgtgcg

SEQ ID NO: 442850 - DNA, 933 bp, Homo sapiens
aagaacgctggaggttgattggcggtcttgccggccagtgaagccagggcatgggcggggcgcggctcggagcgcgaaacatggcggggcaggacgctggctgcggccgtggcggcgacgactactcagaggacgagggcgacagcagcgtgtccagggcggctgtggaggtgttcgggaagctgaaggacctaaactgccccttcctcgagggtctgtatatcacagagccaaagacaattcaggaactgctgtgcagcccctcagagtaccgcttggagatcctagagtggatgtgtacccgggtctggccctcactgcaggacaggttcagctcactgaaaggggtcccaacagaggtgaagatccaagaaatgacgaagctgggccacgagctgatgctgtgtgcgccagatgaccaggagctcctcaagggctgtgcctgcgcccagaagcagctacacttcatggaccagttgctcgataccatccggagcctgaccattgggtgctccagttgctcgaggtaaaggtgtggatggcccaggtgggcagtattgacgggcttctcttggtcctagttctggagctggtaggggctggggtgtcactccccctctgatgctggctggggtgtgacaccccacttggggatctggctggccaatcaggggccgggcagcatacgggcaaggggcagctgtgtcccaagggtgctggctgttgcccaaggccccgggggtgagtatgaaggtgggatgtgggcctcagagcagacgggccaggcacagaggagggtgagcacctagggtgctccatgggtgggtaggtaggcgggcaaaaatggaggagccagggcagacaggtggggcaggattctgcgcggtggggcttgtcctggcctctgtgcctggccccgatgtgcttctgggg

SEQ ID NO: 442851 - DNA, 2692 bp, Homo sapiens
aactagcccagccgcgcggagcgcctgggagaggagaaggagccgacctgccgagatggaggcgaccggcacctgggcgctgctgctggcgctggcgctgctcctgctgctgacgctggcgctgtccgggaccagggcccgaggccacctgccccccgggcccacgccgctaccactgctgggaaacctcctgcagctacggcccggggcgctgtattcagggctcatgcggctgagtaagaagtacggaccggtgttcaccatctacctgggaccctggcggcctgtggtggtcctggttgggcaggaggctgtgcgggaggccctgggaggtcaggctgaggagttcagcggccggggaaccgtagcgatgctggaagggacttttgatggccatggggttttcttctccaacggggagcggtggaggcagctgaggaagtttaccatgcttgctctgcgggacctgggcatggggaagcgagaaggcgaggagctgatccaggcggaggcccggtgtctggtggagacattccaggggacagaaggacgcccattcgatccctccctgctgctggcccaggccacctccaacgtagtctgctccctcctctttggcctccgcttctcctatgaggataaggagttccaggccgtggtccgggcagctggtggtaccctgctgggagtcagctcccaggggggtcagacctacgagatgttctcctggttcctgcggcccctgccaggcccccacaagcagctcctccaccacgtcagcaccttggctgccttcacagtccggcaggtgcagcagcaccaggggaacctggatgcttcgggccccgcacgtgaccttgtcgatgccttcctgctgaagatggcacaggaggaacaaaacccaggcacagaattcaccaacaagaacatgctgatgacagtcatttatttgctgtttgctgggacgatgacggtcagcaccacggtcggctataccctcctgctcctgatgaaataccctcatgtccaaaagtgggtacgtgaggagctgaatcgggagctgggggctggccaggcaccaagcctaggggaccgtacccgcctcccttacaccgacgcggttctgcatgaggcgcagcggctgctggcgctggtgcccatgggaataccccgcaccctcatgcggaccacccgcttccgagggtacaccctgccccagggcacggaggtcttccccctccttggctccatcctgcatgaccccaacatcttcaagcacccagaagagttcaacccagaccgtttcctggatgcagatggacggttcaggaagcatgaggcgttcctgcccttctccttagggaagcgtgtctgccttggagagggcctggcaaaagcggagctcttcctcttcttcaccaccatcctacaagccttctccctggagagcccgtgcccgccggacaccctgagcctcaagcccaccgtcagtggccttttcaacattcccccagcctcaacagtgggcatggacagggttaatgtctccagagtgtacactgcaggcagccacatttacacgcctgcagttgttttccggagtctgtcccacggcccacacgctcacttgactcatgctgctaagatgcacaaccgcacacccatacacaactacaagggccacaaagcaactgctgggttagctttccacagacataaatatagtccatctgcaatcacaagcacatagccaggtaacccaccaactcccctggatctgcagcccacacgtgggagtctggctgtcaccttcacaagccacagaaacggccacacatgttcacagctcacacgccctctccattcatcgaacttctcagtgtccctgtccctggtgcctggcacagggaacagcatgccccctccggggtcatgccacccagagactgtcgctgtctatggccccaactcatgctccctctcttggctacaccactctcccagcctgtgaccaccgatgtccacacacccccaaccacttgtccacacagctacccacgtacgacatcgtcctggctccccagagtatcttcccactgagacacgccgcccccacagaggcacagtccccagccacctctgcaactgcagccctcagtcacccctttttaagcaccctgattctaccaaatgcaaacacatctgggtctgcgattatgcacagagactttggacatacgaggaccctcagaccggaggaacacctgcccaaccccaacacgtgcttatgtaaccacgtggaaagcggcccctgctgcccctccacacacacatacacactcactgatctacagcccctgttcggcgtcagagtccccactagacccagtggaaggggttagagaccaagtaggggccagtttccaattcaccctgtcagggagtgagccggatctgacgttccttgtgacttaagggtccggcttgggaattaaagtttgtttctggcctttagcctaaaaaaaaaaactcaacaattcaacaaccacaaaatctatatccacctacaatcctacttaaatcatcccacttccactcctccattttcatctctctccaacccaccctccaataaccccgcggggggcccacttccccactccctcctacagcccctataccacctactccc

SEQ ID NO: 442852 - DNA, 2453 bp, Homo sapiens
aactagcccagccgcgcggagcgcctgggagaggagaaggagccgacctgccgagatggaggcgaccggcacctgggcgctgctgctggcgctggcgctgctcctgctgctgacgctggcgctgtccgggaccagggcccgaggccacctgccccccgggcccacgccgctaccactgctgggaaacctcctgcagctacggcccggggcgctgtattcagggctcatgcggctgagtaagaagtacggaccggtgttcaccatctacctgggaccctggcggcctgtggtggtcctggttgggcaggaggctgtgcgggaggccctgggaggtcaggctgaggagttcagcggccggggaaccgtagcgatgctggaagggacttttgatggccatggggttttcttctccaacggggagcggtggaggcagctgaggaagtttaccatgcttgctctgcgggacctgggcatggggaagcgagaaggcgaggagctgatccaggcggaggcccggtgtctggtggagacattccaggggacagaaggaggaacaaaacccaggcacagaattcaccaacaagaacatgctgatgacagtcatttatttgctgtttgctgggacgatgacggtcagcaccacggtcggctataccctcctgctcctgatgaaataccctcatgtccaaaagtgggtacgtgaggagctgaatcgggagctgggggctggccaggcaccaagcctaggggaccgtacccgcctcccttacaccgacgcggttctgcatgaggcgcagcggctgctggcgctggtgcccatgggaataccccgcaccctcatgcggaccacccgcttccgagggtacaccctgccccagggcacggaggtcttccccctccttggctccatcctgcatgaccccaacatcttcaagcacccagaagagttcaacccagaccgtttcctggatgcagatggacggttcaggaagcatgaggcgttcctgcccttctccttagggaagcgtgtctgccttggagagggcctggcaaaagcggagctcttcctcttcttcaccaccatcctacaagccttctccctggagagcccgtgcccgccggacaccctgagcctcaagcccaccgtcagtggccttttcaacattcccccagccttccagctgcaagtccgtcccactgaccttcactccaccacgcagaccagatgaaggaaggcaacttggaagtggtgggtgcccaggacggtgcctccagcctcaacagtgggcatggacagggttaatgtctccagagtgtacactgcaggcagccacatttacacgcctgcagttgttttccggagtctgtcccacggcccacacgctcacttgactcatgctgctaagatgcacaaccgcacacccatacacaactacaagggccacaaagcaactgctgggttagctttccacagacataaatatagtccatctgcaatcacaagcacatagccaggtaacccaccaactcccctggatctgcagcccacacgtgggagtctggctgtcaccttcacaagccacagaaacggccacacatgttcacagctcacacgccctctccattcatcgaacttctcagtgtccctgtccctggtgcctggcacagggaacagcatgccccctccggggtcatgccacccagagactgtcgctgtctatggccccaactcatgctccctctcttggctacaccactctcccagcctgtgaccaccgatgtccacacacccccaaccacttgtccacacagctacccacgtacgacatcgtcctggctccccagagtatcttcccactgagacacgccgcccccacagaggcacagtccccagccacctctgcaactgcagccctcagtcacccctttttaagcaccctgattctaccaaatgcaaacacatctgggtctgcgattatgcacagagactttggacatacgaggaccctcagaccggaggaacacctgcccaaccccaacacgtgcttatgtaaccacgtggaaagcggcccctgctgcccctccacacacacatacacactcactgatctacagcccctgttcggcgtcagagtccccactagacccagtggaaggggttagagaccaagtaggggccagtttccaattcaccctgtcagggagtgagccggatctgacgttccttgtgacttaagggtccggcttgggaattaaagtttgtttctggcctttagcctaaaaaaaaaaactcaacaattcaacaaccacaaaatctatatccacctacaatcctacttaaatcatcccacttccactcctccattttcatctctctccaacccaccctccaataaccccgcggggggcccacttccccactccctcctacagcccctataccacctactccc

SEQ ID NO: 442853 - DNA, 1933 bp, Homo sapiens
aactagcccagccgcgcggagcgcctgggagaggagaaggagccgacctgccgagatggaggcgaccggcacctgggcgctgctgctggcgctggcgctgctcctgctgctgacgctggcgctgtccgggaccagggcccgaggccacctgccccccgggcccacgccgctaccactgctgggaaacctcctgcagctacggcccggggcgctgtattcagggctcatgcggctgagtaagaagtacggaccggtgttcaccatctacctgggaccctggcggcctgtggtggtcctggttgggcaggaggctgtgcgggaggccctgggaggtcaggctgaggagttcagcggccggggaaccgtagcgatgctggaagggacttttgatggccatggggttttcttctccaacggggagcggtggaggcagctgaggaagtttaccatgcttgctctgcgggacctgggcatggggaagcgagaaggcgaggagctgatccaggcggaggcccggtgtctggtggagacattccaggggacagaaggacgcccattcgatccctccctgctgctggcccaggccacctccaacgtagtctgctccctcctctttggcctccgcttctcctatgaggataaggagttccaggccgtggtccgggcagctggtggtaccctgctgggagtcagctcccaggggggtcagacctacgagatgttctcctggttcctgcggcccctgccaggcccccacaagcagctcctccaccacgtcagcaccttggctgccttcacagtccggcaggtgcagcagcaccaggggaacctggatgcttcgggccccgcacgtgaccttgtcgatgccttcctgctgaagatggcacaggaggaacaaaacccaggcacagaattcaccaacaagaacatgctgatgacagtcatttatttgctgtttgctgggacgatgacggtcagcaccacggtcggctataccctcctgctcctgatgaaataccctcatgtccaaaagtgggtacgtgaggagctgaatcgggagctgggggctggccaggcaccaagcctaggggaccgtacccgcctcccttacaccgacgcggttctgcatgaggcgcagcggctgctggcgctggtgcccatgggaataccccgcaccctcatgcggaccacccgcttccgagggtacaccctgccccagggcacggaggtcttccccctccttggctccatcctgcatgaccccaacatcttcaagcacccagaagagttcaacccagaccgtttcctggatgcagatggacggttcaggaagcatgaggcgttcctgcccttctccttagggaagcgtgtctgccttggagagggcctggcaaaagcggagctcttcctcttcttcaccaccatcctacaagccttctccctggagagcccgtgcccgccggacaccctgagcctcaagcccaccgtcagtggccttttcaacattcccccagccttccagctgcaagtccgtcccactgaccttcactccaccacgcagaccagatgaaggaaggcaacttggaagtggtgggtgcccaggacggtgcctccagcctcaacagtgggcatggacagggttaatgtctccagagtgtacactgcaggcagccacatttacacgcctgcagttgttttccggagtctgtcccacggcccacacgctcacttgactcatgctgctaagatgcacaaccgcacacccatacacaactacaagggccacaaagcaactgctgggttagctttccacagacataaatatagtccatctgcaatcacaagcacatagccaggtaacccaccaactcccctggatctgcagcccacacgtgggagtctggctgtctgaggtcctctaggtcgctccagc

SEQ ID NO: 442854 - DNA, 1769 bp, Homo sapiens
aactagcccagccgcgcggagcgcctgggagaggagaaggagccgacctgccgagatggaggcgaccggcacctgggcgctgctgctggcgctggcgctgctcctgctgctgacgctggcgctgtccgggaccagggcccgaggccacctgccccccgggcccacgccgctaccactgctgggaaacctcctgcagctacggcccggggcgctgtattcagggctcatgcggctgagtaagaagtacggaccggtgttcaccatctacctgggaccctggcggcctgtggtggtcctggttgggcaggaggctgtgcgggaggccctgggaggtcaggctgaggagttcagcggccggggaaccgtagcgatgctggaagggacttttgatggccatggggttttcttctccaacggggagcggtggaggcagctgaggaagtttaccatgcttgctctgcgggacctgggcatggggaagcgagaaggcgaggagctgatccaggcggaggcccggtgtctggtggagacattccaggggacagaaggacgcccattcgatccctccctgctgctggcccaggccacctccaacgtagtctgctccctcctctttggcctccgcttctcctatgaggataaggagttccaggccgtggtccgggcagctggtggtaccctgctgggagtcagctcccaggggggtcagacctacgagatgttctcctggttcctgcggcccctgccaggcccccacaagcagctcctccaccacgtcagcaccttggctgccttcacagtccggcaggtgcagcagcaccaggggaacctggatgcttcgggccccgcacgtgaccttgtcgatgccttcctgctgaagatggcacaggaggaacaaaacccaggcacagaattcaccaacaagaacatgctgatgacagtcatttatttgctgtttgctgggacgatgacggtcagcaccacggtcggctataccctcctgctcctgatgaaataccctcatgtccaaaagtgggtacgtgaggagctgaatcgggagctgggggctggccaggcaccaagcctaggggaccgtacccgcctcccttacaccgacgcggttctgcatgaggcgcagcggctgctggcgctggtgcccatgggaataccccgcaccctcatgcggaccacccgcttccgagggtacaccctgccccagggcacggaggtcttccccctccttggctccatcctgcatgaccccaacatcttcaagcacccagaagagttcaacccagaccgtttcctggatgcagatggacggttcaggaagcatgaggcgttcctgcccttctccttagggaagcgtgtctgccttggagagggcctggcaaaagcggagctcttcctcttcttcaccaccatctgcatgtccccactgggcctgagtctagcctgggagccaggatactggggtccttttcccactcttccactgacttgctgtgtgaccttaggaagtctctgcccctctctcagcctcagtgtcccgagggccccgaagcattccattctcgtggaggagtttcctggctgagatttcaaatagtcctccccacctcaactgtcaccaactgactaagggactctatcacattgagcacattttcctaaggccctgctgtctgccgaggagcgccaagaagatgtacttgttacacacgaactgccaatccccagctccgttctgcccctcgtgtcagtcacca

SEQ ID NO: 442855 - DNA, 2794 bp, Homo sapiens
aactagcccagccgcgcggagcgcctgggagaggagaaggagccgacctgccgagatggaggcgaccggcacctgggcgctgctgctggcgctggcgctgctcctgctgctgacgctggcgctgtccgggaccagggcccgaggccacctgccccccgggcccacgccgctaccactgctgggaaacctcctgcagctacggcccggggcgctgtattcagggctcatgcggctgagtaagaagtacggaccggtgttcaccatctacctgggaccctggcggcctgtggtggtcctggttgggcaggaggctgtgcgggaggccctgggaggtcaggctgaggagttcagcggccggggaaccgtagcgatgctggaagggacttttgatggccatggggttttcttctccaacggggagcggtggaggcagctgaggaagtttaccatgcttgctctgcgggacctgggcatggggaagcgagaaggcgaggagctgatccaggcggaggcccggtgtctggtggagacattccaggggacagaaggacgcccattcgatccctccctgctgctggcccaggccacctccaacgtagtctgctccctcctctttggcctccgcttctcctatgaggataaggagttccaggccgtggtccgggcagctggtggtaccctgctgggagtcagctcccaggggggtcagacctacgagatgttctcctggttcctgcggcccctgccaggcccccacaagcagctcctccaccacgtcagcaccttggctgccttcacagtccggcaggtgcagcagcaccaggggaacctggatgcttcgggccccgcacgtgaccttgtcgatgccttcctgctgaagatggcacaggaggaacaaaacccaggcacagaattcaccaacaagaacatgctgatgacagtcatttatttgctgtttgctgggacgatgacggtcagcaccacggtcggctataccctcctgctcctgatgaaataccctcatgtccaaaagtgggtacgtgaggagctgaatcgggagctgggggctggccaggcaccaagcctaggggaccgtacccgcctcccttacaccgacgcggttctgcatgaggcgcagcggctgctggcgctggtgcccatgggaataccccgcaccctcatgcggaccacccgcttccgagggtacaccctgccccagggcacggaggtcttccccctccttggctccatcctgcatgaccccaacatcttcaagcacccagaagagttcaacccagaccgtttcctggatgcagatggacggttcaggaagcatgaggcgttcctgcccttctccttagggaagcgtgtctgccttggagagggcctggcaaaagcggagctcttcctcttcttcaccaccatcctacaagccttctccctggagagcccgtgcccgccggacaccctgagcctcaagcccaccgtcagtggccttttcaacattcccccagccttccagctgcaagtccgtcccactgaccttcactccaccacgcagaccagatgaaggaaggcaacttggaagtggtgggtgcccaggacggtgcctccagcctcaacagtgggcatggacagggttaatgtctccagagtgtacactgcaggcagccacatttacacgcctgcagttgttttccggagtctgtcccacggcccacacgctcacttgactcatgctgctaagatgcacaaccgcacacccatacacaactacaagggccacaaagcaactgctgggttagctttccacagacataaatatagtccatctgcaatcacaagcacatagccaggtaacccaccaactcccctggatctgcagcccacacgtgggagtctggctgtcaccttcacaagccacagaaacggccacacatgttcacagctcacacgccctctccattcatcgaacttctcagtgtccctgtccctggtgcctggcacagggaacagcatgccccctccggggtcatgccacccagagactgtcgctgtctatggccccaactcatgctccctctcttggctacaccactctcccagcctgtgaccaccgatgtccacacacccccaaccacttgtccacacagctacccacgtacgacatcgtcctggctccccagagtatcttcccactgagacacgccgcccccacagaggcacagtccccagccacctctgcaactgcagccctcagtcacccctttttaagcaccctgattctaccaaatgcaaacacatctgggtctgcgattatgcacagagactttggacatacgaggaccctcagaccggaggaacacctgcccaaccccaacacgtgcttatgtaaccacgtggaaagcggcccctgctgcccctccacacacacatacacactcactgatctacagcccctgttcggcgtcagagtccccactagacccagtggaaggggttagagaccaagtaggggccagtttccaattcaccctgtcagggagtgagccggatctgacgttccttgtgacttaagggtccggcttgggaattaaagtttgtttctggcctttagcctaaaaaaaaaaactcaacaattcaacaaccacaaaatctatatccacctacaatcctacttaaatcatcccacttccactcctccattttcatctctctccaacccaccctccaataaccccgcggggggcccacttccccactccctcctacagcccctataccacctactccc

SEQ ID NO: 442856 - DNA, 1493 bp, Homo sapiens
ggtaccaagatgggtagatggagcggttcacgaagcagtgaggcgtcgccttctccttagggaagcgtgtctgccttggagagggcctggcaaaagcggagctcttcctcttcttcaccaccatcctacaagccttctccctggagagcccgtgcccgccggacaccctgagcctcaagcccaccgtcagtggccttttcaacattcccccagccttccagctgcaagtccgtcccactgaccttcactccaccacgcagaccagatgaaggaaggcaacttggaagtggtgggtgcccaggacggtgcctccagcctcaacagtgggcatggacagggttaatgtctccagagtgtacactgcaggcagccacatttacacgcctgcagttgttttccggagtctgtcccacggcccacacgctcacttgactcatgctgctaagatgcacaaccgcacacccatacacaactacaagggccacaaagcaactgctgggttagctttccacagacataaatatagtccatctgcaatcacaagcacatagccaggtaacccaccaactcccctggatctgcagcccacacgtgggagtctggctgtcaccttcacaagccacagaaacggccacacatgttcacagctcacacgccctctccattcatcgaacttctcagtgtccctgtccctggtgcctggcacagggaacagcatgccccctccggggtcatgccacccagagactgtcgctgtctatggccccaactcatgctccctctcttggctacaccactctcccagcctgtgaccaccgatgtccacacacccccaaccacttgtccacacagctacccacgtacgacatcgtcctggctccccagagtatcttcccactgagacacgccgcccccacagaggcacagtccccagccacctctgcaactgcagccctcagtcacccctttttaagcaccctgattctaccaaatgcaaacacatctgggtctgcgattatgcacagagactttggacatacgaggaccctcagaccggaggaacacctgcccaaccccaacacgtgcttatgtaaccacgtggaaagcggcccctgctgcccctccacacacacatacacactcactgatctacagcccctgttcggcgtcagagtccccactagacccagtggaaggggttagagaccaagtaggggccagtttccaattcaccctgtcagggagtgagccggatctgacgttccttgtgacttaagggtccggcttgggaattaaagtttgtttctggcctttagcctaaaaaaaaaaactcaacaattcaacaaccacaaaatctatatccacctacaatcctacttaaatcatcccacttccactcctccattttcatctctctccaacccaccctccaataaccccgcggggggcccacttccccactccctcctacagcccctataccacctactccc

SEQ ID NO: 442857 - DNA, 990 bp, Homo sapiens
ctgcccacgaagtggctgccccaagtggaagtgggaagattgcttgagctcaggagtttgagcacttcgtgggcagcgctgcccacacgtgggagtctggctgtcaccttcacaagccacagaaacggccacacatgttcacagctcacacgccctctccattcatcgaacttctcagtgtccctgtccctggtgcctggcacagggaacagcatgccccctccggggtcatgccacccagagactgtcgctgtctatggccccaactcatgctccctctcttggctacaccactctcccagcctgtgaccaccgatgtccacacacccccaaccacttgtccacacagctacccacgtacgacatcgtcctggctccccagagtatcttcccactgagacacgccgcccccacagaggcacagtccccagccacctctgcaactgcagccctcagtcacccctttttaagcaccctgattctaccaaatgcaaacacatctgggtctgcgattatgcacagagactttggacatacgaggaccctcagaccggaggaacacctgcccaaccccaacacgtgcttatgtaaccacgtggaaagcggcccctgctgcccctccacacacacatacacactcactgatctacagcccctgttcggcgtcagagtccccactagacccagtggaaggggttagagaccaagtaggggccagtttccaattcaccctgtcagggagtgagccggatctgacgttccttgtgacttaagggtccggcttgggaattaaagtttgtttctggcctttagcctaaaaaaaaaaactcaacaattcaacaaccacaaaatctatatccacctacaatcctacttaaatcatcccacttccactcctccattttcatctctctccaacccaccctccaataaccccgcggggggcccacttccccactccctcctacagcccctataccacctactccc

SEQ ID NO: 442858 - DNA, 277 bp, Homo sapiens
agttgtaatgaggaataaatgagtgaatactatgtgaactgcttgcagtgttggctggcacataaagaagtgctcagtaaatgttagctatagttgtagttgttactactactaccactattcctactcctatgacttctttctcctcctcctcctttacctctttctcttattcactttttgccctcctatatgaagtagatactaagttctactgattctgtaacctacatattgcttttgtttttgagacagagtctcgcgctgtctcccaggc

SEQ ID NO: 442859 - DNA, 929 bp, Homo sapiens
  misc_feature (929)..(929): n is a, c, g, or t
atggggctagagagctatttccacaccagaccacagatactcacgttccagtcaggtttgcctgagtaggtctataagccttcctcatcaaaactgcaagtaatatgaaaaccaatccctaaagtatgctaaataatatacccatgcctgccatagaggtaacaatatttgacagcaatcaacaggaatataaagttctttgtgacacggtacctcttaataatacatactggtcacaaatacactgtagctagtatcatttgttttcagggagaaacctctgtttactatgagttttctttggaatctctgtacagaaaatactaatgaaatggactactcccacatctaaacgtcccaccaacagtttatctgaccaggagacaaatcaaacaaattaaggggagaaaagagatgtaacggcaaagtttctctactccagactagttgtttttttttttctccaaaatgctaatggcagaacttctgctactctgtactgtaccgcacctctgggtacatccagctgtgaccacaccacaactgtatcgcatccagcaacctaaagtactcttgtggttgctcatgtaaatacttggaaaatatctgcctcttccggactctccccttcacattatagaaatgctcaagtctcaaaaacaaaacaagaaacttccagagaacctattcacttcaaattacggagatcccctctctccttgatccacaataaacttctggaaaaggtcgcctacaggccttaaagaatcaccacgattttcctcccctatacaagcaaagcttttcagacaaaaatcttaacagtagaaatgtacccacataaacaagctggccctcaggcaaacattactactattcacacaaacatggggcccttgtcgacgcggccgcgaatttagtagtagtan

SEQ ID NO: 442860 - DNA, 849 bp, Homo sapiens
  misc_feature (849)..(849): n is a, c, g, or t
atggggctagagagctatttccacaccagaccacagatactcacgttccagtcaggtttgcctgagtaggtctataagccttcctcatcaaaactgcaagtaatatgaaaaccaatccctaaagtatgctaaataatatacccatgcctgccatagaggtaacaatatttgacagcaatcaacaggaatataaagttctttgtgacacggtacctcttaataatacatactggtcacaaatacactgtagctagtatcatttgttttcagggagaaacctctgtttactatgagttttctttggaatctctgtacagaaaatactaatgaaatggactactcccacatctaaacgtcccaccaacagtttatctgaccaggagacaaatcaaacaaattaaggggagaaaagagatgtaacggcaaagtttctctactccagactagttgtttttttttttctccaaaatgctaatggcagaacttctgctactctgtactgtaccgcacctctgggtacatccagctgtgaccacaccacaactgtatcgcatccagcaacctaaagtactcttgtggttgctcatgtaaatacttggaaaatatctgcctcttccggactctccccttcacattatagaaatgctcaagtctcaaaaacaaaacaagaaacttccagagaacctattcacttcaaattacggagatcccctctctccttgatccacaataaacttctggaaaaggtcgcctacaggccttaaagaatcaccacgattttcctcccctatacaagcaaagcttttcagacaaaaatcgtcgacgcggccgcgaatttagtagtagtan

SEQ ID NO: 442861 - DNA, 222 bp, Homo sapiens
catttcctgaaggaggtatccaagaagcagaagagcaaactaagcaaagccatgcgcaggaatcccaagtggtttggcaatgctggtgaaaaatgtgtttcgtggtaaggaggatgggggtggacaatgggaggagggagatggggctagagagctatttccacaccagaccacagatactcacgttccagtcaggtttgcctgagtaggtctataagcctt

SEQ ID NO: 442862 - DNA, 553 bp, Homo sapiens
tacctcattcataaagatgaaaaaccagccagcattgactgagcacttagaagacctcacaccaggatctctgtgaataagatctcatttcaccttcgctacaatgctgggagatgggaattacaccattcgcacatcaggaaacaggggctgtggattcttgggtaacttgcccatgctcagaaactgatgcagctgaggccagaagccaggtttgaatcattcataagctgagtgttttcactgagaagtgaaagatcaagcacaaccagcagagaaggccggagagaagctgctcgaggagatgaggaacctgcggggcaaagcactcaacacatacctgattctagaatgaaagtcaccagtaggtcagtcccttccatttgctttctgtgggccactgtggccccttgcgtccatttacatgccagccatctctgcaattaaagtttctggataaaaaaatgaaatgtagaggatgtatatatcttttaagtgataattataaatcttatatttaaaaataaaatggagttaggatgatgacagcgtt

SEQ ID NO: 442863 - DNA, 1595 bp, Homo sapiens
tccccaggcaggtgcaccttggtaaagatcctatgtcttttaaacttaaaaaagagcttactgaagagtggcaaaaagcatgtgccaaatataagctagacagaggagatcctattttggatgaggaatttcagcgacttaaaacagaagttagccataaacgggttgttcgcaatcaagaagagaaaatcaaggaatttcatcctacttttgatccactcattaataacacttggctcagcaggtccagggcacaaaaacggtttcaacaagtagcacgcaaggtcatgattcagggacgattattcaatatgctgagtgctgttcgtgaaatggacaaagagagtatactgagaaagattggccaagcaaaacaatcgatagcacaagaggcgaatttcttcaaattcttcctgaggcggatcagtcaggatgattataccagccggttctctgtgtcgcccaaggaggtgctgcccttcgctttcccagactgcagcccaccccaggactccaacgagttggctcctgatggccttggactggtcccaattaagtcttcagaagttcaaatcaagcagagttattccttcttcaatctgcaggttcctcaactgtacaaaattaagagatatcagccattctctgtccacaagtcttcaacaagttacagacctcaaaagcttgcccgagccctaaagcaaggagctgaggatgaagtcaccaccatcacagcccttccgaaacaggactccacaactcagctctctggcaaaacatcaatcttgagcatgaaaccacctgaggccttagccatgtctctagattatgatcctctgtatgtttttaatcccaacccaggattatttgctgtaatgcatcctctgacctatgcagaaacgttgatagattaccatctatgctctcaccccaagtacaaattcaccaaagagtcccgccacgggtccagcattcctgtcacccaaaagcagtttctccatcacacggacattattcccggaataatgcactggaaaagcttccagtccctggttctctcctccctgccggacccctccaagatggagaccacaaagagctgcgattccttcaattcatttatgcttccgatagacgtccctgccatccttgatgccttaccagaagaggacagactagaaacagtagaacgtgagctctgtgagcagaatgtagaagttatgttgactccagaaatgatcaaagtggaattccctatgttgaactacaaggacatcaggaaggagaaagaagtgaaagatcaagcacaaccagcagagaaggccggagagaagctgctcgaggagatgaggaacctgcggggcaaagcactcaacacatacctgattctagaatgaaagtcaccagtaggtcagtcccttccatttgctttctgtgggccactgtggccccttgcgtccatttacatgccagccatctctgcaattaaagtttctggataaaaaaatgaaatgtagaggatgtatatatcttttaagtgataattataaatcttatatttaaaaataaaatggagttaggatgatgacagcgtt

SEQ ID NO: 442864 - DNA, 1407 bp, Homo sapiens
tccccaggcaggtgcaccttggtaaagatcctatgtcttttaaacttaaaaaagagcttactgaagagtggcaaaaagcatgtgccaaatataagctagacagaggagatcctattttggatgaggaatttcagcgacttaaaacagaagttagccataaacgggttgttcgcaatcaagaagagaaaatcaaggaatttcatcctacttttgatccactcattaataacacttggctcagcaggtccagggcacaaaaacggtttcaacaagtagcacgcaaggtcatgattcagggacgattattcaatatgctgagtgctgttcgtgaaatggacaaagagagtatactgagaaagattggccaagcaaaacaatcgatagcacaagaggcgaatttcttcaaattcttcctgaggcggatcagtcaggatgattataccagccggttctctgtgtcgcccaaggaggtgctgcccttcgctttcccagactgcagcccaccccaggactccaacgagttggctcctgatggccttggactggtcccaattaagtcttcagaagttcaaatcaagcagagttattccttcttcaatctgcaggttcctcaactgtacaaaattaagagatatcagccattctctgtccacaagtcttcaacaagttacagacctcaaaagcttgcccgagccctaaagcaaggagctgaggatgaagtcaccaccatcacagcccttccgaaacaggactccacaactcagctctctggcaaaacatcaatcttgagcatgaaaccacctgaggccttagccatgtctctagattatgatcctctgtatgtttttaatcccaacccaggattatttgctgtaatgcatcctctgacctatgcagaaacgttgatagattaccatctatgctctcaccccaagtacaaattcaccaaagagtcccgccacgggtccagcattcctgtcacccaaaagcagtttctccatcacacggacattattcccggaataatgcactggaaaagcttccagtccctggttctctcctccctgccggacccctccaagatggagaccacaaagagctgcgattccttcaattcatttatgcttccgatagacgtccctgccatccttgatgccttaccagaagaggacagactagaaacagtagaacggagcacctggatctgctgctgtatctgtgacgacagagtcggggtatagcacaaagaaggccaccagccctgcatgacaagagctccggcacattaggaagactcttggtcccagagttcctccctacccgctatttcctgaactcctgttactgaagacccattcctttagctttgcgctttgtttctattaaactacctctggggagggaaca

SEQ ID NO: 442865 - DNA, 1252 bp, Homo sapiens
tccccaggcaggtgcaccttggtaaagatcctatgtcttttaaacttaaaaaagagcttactgaagagtggcaaaaagcatgtgccaaatataagctagacagaggagatcctattttggatgaggaatttcagcgacttaaaacagaagttagccataaacgggttgttcgcaatcaagaagagaaaatcaaggaatttcatcctacttttgatccactcattaataacacttggctcagcaggtccagggcacaaaaacggtttcaacaagtagcacgcaaggtcatgattcagggacgattattcaatatgctgagtgctgttcgtgaaatggacaaagagagtatactgagaaagattggccaagcaaaacaatcgatagcacaagaggcgaatttcttcaaattcttcctgaggcggatcagtcaggatgattataccagccggttctctgtgtcgcccaaggaggtgctgcccttcgctttcccagactgcagcccaccccaggactccaacgagttggctcctgatggccttggactggtcccaattaagtcttcagaagttcaaatcaagcagagttattccttcttcaatctgcaggttcctcaactgtacaaaattaagagatatcagccattctctgtccacaagtcttcaacaagttacagacctcaaaagcttgcccgagccctaaagcaaggagctgaggatgaagtcaccaccatcacagcccttccgaaacaggactccacaactcagctctctggcaaaacatcaatcttgagcatgaaaccacctgaggccttagccatgtctctagattatgatcctctgtatgtttttgtaagtgacaactggcagaagccttgttttctgtgttcctttatttcagcaattactctataggaaacagagcactcattgggaatattttttctctttggaatttcaagtgttaaacaatatctgacctttaatattgtttgccaacctttattttttggagaatatcagtgattccgtcttttagcaattcctgcatttttaatgaaaataattttatgatcttttctaaatatctataatatgtacatataggccaaagaagaaattgaaaaagaaattagcaagtatttttaagtgaatgaaaatgaaaacaaacaaaaaatctgtgggaaattaacagcactacacacctacattggaaaagaagaaaagtttcaagttaatgtcctaagctacccctt

SEQ ID NO: 442866 - DNA, 1502 bp, Homo sapiens
tccccaggcaggtgcaccttggtaaagatcctatgtcttttaaacttaaaaaagagcttactgaagagtggcaaaaagcatgtgccaaatataagctagacagaggagatcctattttggatgaggaatttcagcgacttaaaacagaagttagccataaacgggttgttcgcaatcaagaagagaaaatcaaggaatttcatcctacttttgatccactcattaataacacttggctcagcaggtccagggcacaaaaacggtttcaacaagtagcacgcaaggtcatgattcagggacgattattcaatatgctgagtgctgttcgtgaaatggacaaagagagtatactgagaaagattggccaagcaaaacaatcgatagcacaagaggcgaatttcttcaaattcttcctgaggcggatcagtcaggatgattataccagccggttctctgtgtcgcccaaggaggtgctgcccttcgctttcccagactgcagcccaccccaggactccaacgagttggctcctgatggccttggactggtcccaattaagtcttcagaagttcaaatcaagcagagttattccttcttcaatctgcaggttcctcaactgtacaaaattaagagatatcagccattctctgtccacaagtcttcaacaagttacagacctcaaaagcttgcccgagccctaaagcaaggagctgaggatgaagtcaccaccatcacagcccttccgaaacaggactccacaactcagctctctggcaaaacatcaatcttgagcatgaaaccacctgaggccttagccatgtctctagattatgatcctctgtatgtttttaatcccaacccaggattatttgctgtaatgcatcctctgacctatgcagaaacgttgatagattaccatctatgctctcaccccaagtacaaattcaccaaagagtcccgccacgggtccagcattcctgtcacccaaaagcagtttctccatcacacggacattattcccggaataatgcactggaaaagcttccagtccctggttctctcctccctgccggacccctccaagatggagaccacaaagagtgagctctgtgagcagaatgtagaagttatgttgactccagaaatgatcaaagtggaattccctatgttgaactacaaggacatcaggaaggagaaagaagtgaaagatcaagcacaaccagcagagaaggccggagagaagctgctcgaggagatgaggaacctgcggggcaaagcactcaacacatacctgattctagaatgaaagtcaccagtaggtcagtcccttccatttgctttctgtgggccactgtggccccttgcgtccatttacatgccagccatctctgcaattaaagtttctggataaaaaaatgaaatgtagaggatgtatatatcttttaagtgataattataaatcttatatttaaaaataaaatggagttaggatgatgacagcgtt

SEQ ID NO: 442867 - DNA, 2755 bp, Homo sapiens
  misc_feature (12)..(12): n is a, c, g, or t
tctcagacggcngaggtcactgcatcccggcgcggcccgcagaagacgagcgccgctgccgcctcctcctcccgggctcccgggctctcggggtccggggcctttgcacctgtcttttccagctgggcacaaagccttttgctgtcgccgtggcgactggaggccttcacttttaatccccctcattttccagttcattctctgcttattttctggtcagtccgtgaccctgtaggcggcctctgaccggcgatcgatttgccgccctcagggcgctgggcggccggctgcctccgaagctggggcggcctccgcggtctccatggtaacggcctctccggcgtctccgcctggaggggaagatgcggcctgcctggcccgccgcctcgcccccggcctcacggtgggaccccgggcactgaggacggaggtcccgggcgccggcccgcggggcaacgggcactagctggagaaagagcagctcatggagaggctgagagaagcggttttcgcgtcctacccaaactgggagagtaaccttcagcagctggactcaccgattggttttccttcattttcagtgaaatcccattctctggctggagacacagatggcctcaaatgagagagatgctatatcgtggtaccaaaagaagattggagcctacgatcagcagatatgggaaaagtcaatcgaacagactcagattaagggtttgaaaaacaaaccgaaaaagatgggccacataaagccagacttgattgacgttgacttaatcagagggtcaacatttgccaaagcaaaacctgaaattccatggacatctctgactcggaaggggcttgttcgagttgtattttttccattgttcagcaattggtggattcaggttacctctttaagaatctttgtttggctgttactactttatttcatgcaagttatagcaattgtcttatatttgatgatgcctattgtgaacataagtgaagtacttggacccttgtgccttatgctactcatgggaactgtccactgtcaaattgtgtctactcagataacaagaccatcaggaaacaatggaaatcgaagaagaagaaaattacgaaaaactgtaaatggtgatgggagccgagaaaatggaaataactcctctgataaagtcagaggaatagaaactttggaatctgtacccattattggtggtttttgggagactatctttggcaacaggattaaaagagtaaaattaatatctaacaaagggactgaaactgacaatgacccaagttgtgtccatcctatcattaagaggagacaatgtcgaccagagattagaatgtggcaaacaagagagaaagcaaaattttcagatggagaaaagtgccgtagggaggcttttaggcgtttgggtaatggggtgtctgatgacctgtcaagtgaagaagatggtgaagcacggacacagatgatattattgcgtaggagtgtggaaggggcctcaagtgacaatggttgtgaagttaagaatagaaaatcaatactttcaaggcacctaaactctcaggtaaagaaaaccactacaaggtggtgtcatattgtgcgggattcagatagtctggctgaatcagaatttgaatcagcagccttcagccagggctctagatcgggtgtgagtggtggctctcgaagcctcaacatgtcaagaagagactcagaaagcacccgccatgactcggagactgaggacatgttatgggacgacctgctacatggcccagagtgccggtcatctgtcaccagtgacagtgagggggcccatgtgaatacccttcactcagggaccaaacgtgaccccaaagaggatgtttttcagcagaatcatttattctggcttcagaattcaagtccttcctctgatcgagttagtgcaataatctgggaggggaatgagtgcaaaaagatggatatgtctgtgttggaaataagtggcatcatcatgagcagggtcaatgcctatcagcaaggagtaggttatcagatgctgggaaatgttgtcactattggattagcattttttccattcttacatcgacttttccgtgagaagagccttgaccaactaaagtccatttcagctgaggagatcttgactctcttttgtggggcaccacctgttacacctattattgttttgtcgataattaatttttttgaaagattgtgtcttacttggatgttttttttcatgatgtgtgtggcagagagaacatataaacagagatttttatttgcaaaactcttcagccatattacttctgccaggaaagctaggaaatatgaaatacctcatttcagacttaagaaggtggagaatattaaaatatggttatcactgcgttcctatctaaagagacgggggccacagcgttcagttgatgtggttgtatcctcggttttcctactgacactttcgattgctttcatttgttgtgctcaggtaaaagtttcacatctgctttaaggaaaaatgaaaattctattatagagttcactttctgttttagacttaggtcactgtccttaagtatgtatttttaatgcatctacattttttactattttggatgtttggtaatttttctaacttttcaaaatgggaatacaagtaattctgaagtcctttcaaactgtaagatcgctctaattttagttggtaattattaattgataataaaactatcatatgattgc

SEQ ID NO: 442868 - DNA, 3582 bp, Homo sapiens
  misc_feature (12)..(12): n is a, c, g, or t
tctcagacggcngaggtcactgcatcccggcgcggcccgcagaagacgagcgccgctgccgcctcctcctcccgggctcccgggctctcggggtccggggcctttgcacctgtcttttccagctgggcacaaagccttttgctgtcgccgtggcgactggaggccttcacttttaatccccctcattttccagttcattctctgcttattttctggtcagtccgtgaccctgtaggcggcctctgaccggcgatcgatttgccgccctcagggcgctgggcggccggctgcctccgaagctggggcggcctccgcggtctccatggtaacggcctctccggcgtctccgcctggaggggaagatgcggcctgcctggcccgccgcctcgcccccggcctcacggtgggaccccgggcactgaggacggaggtcccgggcgccggcccgcggggcaacgggcactaggtgagagccggacgcgggcgagcgaaggaggcgggtgccgggcgactccagcggcggcccctgcccctcccccgcacccacgaacacgctcgcccgatatattgcagaggcttctccggtcgccgctgcgccagtttttttttgtttgtttgttgtgttttccctggcaaacagctggagaaagagcagctcatggagaggctgagagaagcggttttcgcgtcctacccaaactgggagagtaaccttcagcagctggactcaccgattggttttccttcattttcagtgaaatcccattctctggctggagacacagatggcctcaaatgagagagatgctatatcgtggtaccaaaagaagattggagcctacgatcagcagatatgggaaaagtcaatcgaacagactcagattaagggtttgaaaaacaaaccgaaaaagatgggccacataaagccagacttgattgacgttgacttaatcagagggtcaacatttgccaaagcaaaacctgaaattccatggacatctctgactcggaaggggcttgttcgagttgtattttttccattgttcagcaattggtggattcaggttacctctttaagaatctttgtttggctgttactactttatttcatgcaagttatagcaattgtcttatatttgatgatgcctattgtgaacataagtgaagtacttggacccttgtgccttatgctactcatgggaactgtccactgtcaaattgtgtctactcagataacaagaccatcaggaaacaatggaaatcgaagaagaagaaaattacgaaaaactgtaaatggtgatgggagccgagaaaatggaaataactcctctgataaagtcagaggaatagaaactttggaatctgtacccattattggtggtttttgggagactatctttggcaacaggattaaaagagtaaaattaatatctaacaaagggactgaaactgacaatgacccaagttgtgtccatcctatcattaagaggagacaatgtcgaccagagattagaatgtggcaaacaagagagaaagcaaaattttcagatggagaaaagtgccgtagggaggcttttaggcgtttgggtaatggggtgtctgatgacctgtcaagtgaagaagatggtgaagcacggacacagatgatattattgcgtaggagtgtggaaggggcctcaagtgacaatggttgtgaagttaagaatagaaaatcaatactttcaaggcacctaaactctcaggtaaagaaaaccactacaaggtggtgtcatattgtgcgggattcagatagtctggctgaatcagaatttgaatcagcagccttcagccagggctctagatcgggtgtgagtggtggctctcgaagcctcaacatgtcaagaagagactcagaaagcacccgccatgactcggagactgaggacatgttatgggacgacctgctacatggcccagagtgccggtcatctgtcaccagtgacagtgagggggcccatgtgaatacccttcactcagggaccaaacgtgaccccaaagaggatgtttttcagcagaatcatttattctggcttcagaattcaagtccttcctctgatcgagttagtgcaataatctgggaggggaatgagtgcaaaaagatggatatgtctgtgttggaaataagtggcatcatcatgagcagggtcaatgcctatcagcaaggagtaggttatcagatgctgggaaatgttgtcactattggattagcattttttccattcttacatcgacttttccgtgagaagagccttgaccaactaaagtccatttcagctgaggagatcttgactctcttttgtggggcaccacctgttacacctattattgttttgtcgataattaatttttttgaaagattgtgtcttacttggatgttttttttcatgatgtgtgtggcagagagaacatataaacagagatttttatttgcaaaactcttcagccatattacttctgccaggaaagctaggaaatatgaaatacctcatttcagacttaagaaggtggagaatattaaaatatggttatcactgcgttcctatctaaagagacgggggccacagcgttcagttgatgtggttgtatcctcggttttcctactgacactttcgattgctttcatttgttgtgctcaggttctccaaggacataaaactttcctgaatgatgcttataactgggagtttttgatctgggaaacagctttactactttttttattgcgtctggcctcactggggtctgaaaccaataagaaatacagcaatgtttcaatattacttacagaacagattaatttatatcttaagatggaaaaaaagccaaataagaaagaacagcttactctagtaaacaatgtattaaagctgtccaccaagttgttgaaagagctggacacaccatttagactctatggactgacaatgaatcccttaatctacaatatcacaagagtagttatcctttctgctgtctcaggtgttataagtgatcttctaggatttaatataagactgtggaaaattaaatcataagctgagttaaatgcctggactctcccctggctggtatcaaaacttacctatcaaggaaagtgatgactgcagaaaccagtgagatacccacctgcttgttcacatgcacaggtgctctcagctctgccaaagcgaatgaatggtgtttccggaggagcaagtccttttccaactgggtgtgcatgctaaaaacctgtattttcatgcttttcaaacaacatgaatagtcagctgactaaagactgtgtgtgttgtggtaacacaaagacaattttgtaagtttgcgcttcagtactgtgacagttatgtttactggacatagtcttttgggcaactatgatagatgcccaaagcatgaagcaaatatcttttattggaaatatgcaaattcaatacttttccattatagtctatagaactggagatttcatttctctatcaaagagagatcaagcgaactattttaggttaaatccgaataaaagaactttactggagaaaaaaagtt

SEQ ID NO: 442869 - DNA, 2470 bp, Homo sapiens
atatgtataggtcgatactgggtttatttcgtcacgatgggtggcagtagtaatgtacttggacccttgtgccttatgctactcatgggaactgtccactgtcaaattgtgtctactcagataacaagaccatcaggaaacaatggaaatcgaagaagaagaaaattacgaaaaactgtaaatggtgatgggagccgagaaaatggaaataactcctctgataaagtcagaggaatagaaactttggaatctgtacccattattggtggtttttgggagactatctttggcaacaggattaaaagagtaaaattaatatctaacaaagggactgaaactgacaatgacccaagttgtgtccatcctatcattaagaggagacaatgtcgaccagagattagaatgtggcaaacaagagagaaagcaaaattttcagatggagaaaagtgccgtagggaggcttttaggcgtttgggtaatggggtgtctgatgacctgtcaagtgaagaagatggtgaagcacggacacagatgatattattgcgtaggagtgtggaaggggcctcaagtgacaatggttgtgaagttaagaatagaaaatcaatactttcaaggcacctaaactctcaggtaaagaaaaccactacaaggtggtgtcatattgtgcgggattcagatagtctggctgaatcagaatttgaatcagcagccttcagccagggctctagatcgggtgtgagtggtggctctcgaagcctcaacatgtcaagaagagactcagaaagcacccgccatgactcggagactgaggacatgttatgggacgacctgctacatggcccagagtgccggtcatctgtcaccagtgacagtgagggggcccatgtgaatacccttcactcagggaccaaacgtgaccccaaagaggatgtttttcagcagaatcatttattctggcttcagaattcaagtccttcctctgatcgagttagtgcaataatctgggaggggaatgagtgcaaaaagatggatatgtctgtgttggaaataagtggcatcatcatgagcagggtcaatgcctatcagcaaggagtaggttatcagatgctgggaaatgttgtcactattggattagcattttttccattcttacatcgacttttccgtgagaagagccttgaccaactaaagtccatttcagctgaggagatcttgactctcttttgtggggcaccacctgttacacctattattgttttgtcgataattaatttttttgaaagattgtgtcttacttggatgttttttttcatgatgtgtgtggcagagagaacatataaacagagatttttatttgcaaaactcttcagccatattacttctgccaggaaagctaggaaatatgaaatacctcatttcagacttaagaaggtggagaatattaaaatatggttatcactgcgttcctatctaaagagacgggggccacagcgttcagttgatgtggttgtatcctcggttttcctactgacactttcgattgctttcatttgttgtgctcaggttctccaaggacataaaactttcctgaatgatgcttataactgggagtttttgatctgggaaacagctttactactttttttattgcgtctggcctcactggggtctgaaaccaataagaaatacagcaatgtttcaatattacttacagaacagattaatttatatcttaagatggaaaaaaagccaaataagaaagaacagcttactctagtaaacaatgtattaaagctgtccaccaagttgttgaaagagctggacacaccatttagactctatggactgacaatgaatcccttaatctacaatatcacaagagtagttatcctttctgctgtctcaggtgttataagtgatcttctaggatttaatataagactgtggaaaattaaatcataagctgagttaaatgcctggactctcccctggctggtatcaaaacttacctatcaaggaaagtgatgactgcagaaaccagtgagatacccacctgcttgttcacatgcacaggtgctctcagctctgccaaagcgaatgaatggtgtttccggaggagcaagtccttttccaactgggtgtgcatgctaaaaacctgtattttcatgcttttcaaacaacatgaatagtcagctgactaaagactgtgtgtgttgtggtaacacaaagacaattttgtaagtttgcgcttcagtactgtgacagttatgtttactggacatagtcttttgggcaactatgatagatgcccaaagcatgaagcaaatatcttttattggaaatatgcaaattcaatacttttccattatagtctatagaactggagatttcatttctctatcaaagagagatcaagcgaactattttaggttaaatccgaataaaagaactttactggagaaaaaaagtt

SEQ ID NO: 442870 - DNA, 3044 bp, Homo sapiens
  misc_feature (12)..(12): n is a, c, g, or t
tctcagacggcngaggtcactgcatcccggcgcggcccgcagaagacgagcgccgctgccgcctcctcctcccgggctcccgggctctcggggtccggggcctttgcacctgtcttttccagctgggcacaaagccttttgctgtcgccgtggcgactggaggccttcacttttaatccccctcattttccagttcattctctgcttattttctggtcagtccgtgaccctgtaggcggcctctgaccggcgatcgatttgccgccctcagggcgctgggcggccggctgcctccgaagctggggcggcctccgcggtctccatggtaacggcctctccggcgtctccgcctggaggggaagatgcggcctgcctggcccgccgcctcgcccccggcctcacggtgggaccccgggcactgaggacggaggtcccgggcgccggcccgcggggcaacgggcactagtgaaatcccattctctggctggagacacagatggcctcaaatgagagagatgctatatcgtggtaccaaaagaagattggagcctacgatcagcagatatgggaaaagtcaatcgaacagactcagattaagggtttgaaaaacaaaccgaaaaagatgggccacataaagccagacttgattgacgttgacttaatcagagggtcaacatttgccaaagcaaaacctgaaattccatggacatctctgactcggaaggggcttgttcgagttgtattttttccattgttcagcaattggtggattcaggttacctctttaagaatctttgtttggctgttactactttatttcatgcaagttatagcaattgtcttatatttgatgatgcctattgtgaacataagtgaagtacttggacccttgtgccttatgctactcatgggaactgtccactgtcaaattgtgtctactcagataacaagaccatcaggaaacaatggaaatcgaagaagaagaaaattacgaaaaactgtaaatggtgatgggagccgagaaaatggaaataactcctctgataaagtcagaggaatagaaactttggaatctgtacccattattggtggtttttgggagactatctttggcaacaggattaaaagagtaaaattaatatctaacaaagggactgaaactgacaatgacccaagttgtgtccatcctatcattaagaggagacaatgtcgaccagagattagaatgtggcaaacaagagagaaagcaaaattttcagatggagaaaagtgccgtagggaggcttttaggcgtttgggtaatggggtgtctgatgacctgtcaagtgaagaagatggtgaagcacggacacagatgatattattgcgtaggagtgtggaaggggcctcaagtgacaatggttgtgaagttaagaatagaaaatcaatactttcaaggcacctaaactctcaggtaaagaaaaccactacaaggtggtgtcatattgtgcgggattcagatagtctggctgaatcagaatttgaatcagcagccttcagccagggctctagatcgggtgtgagtggtggctctcgaagcctcaacatgtcaagaagagactcagaaagcacccgccatgactcggagactgaggacatgttatgggacgacctgctacatggcccagagtgccggtcatctgtcaccagtgacagtgagggggcccatgtgaatacccttcactcagggaccaaacgtgaccccaaagaggatgtttttcagcagaatcatttattctggcttcagaattcaagtccttcctctgatcgagttagtgcaataatctgggaggggaatgagtgcaaaaagatggatatgtctgtgttggaaataagtggcatcatcatgagcagggtcaatgcctatcagcaaggagtaggttatcagatgctgggaaatgttgtcactattggattagcattttttccattcttacatcgacttttccgtgagaagagccttgaccaactaaagtccatttcagctgaggagatcttgactctcttttgtggggcaccacctgttacacctattattgttttgtcgataattaatttttttgaaagattgtgtcttacttggatgttttttttcatgatgtgtgtggcagagagaacatataaacagagatttttatttgcaaaactcttcagccatattacttctgccaggaaagctaggaaatatgaaatacctcatttcagacttaagaaggtggagaatattaaaatatggttatcactgcgttcctatctaaagagacgggggccacagcgttcagttgatgtggttgtatcctcggttttcctactgacactttcgattgctttcatttgttgtgctcaggttctccaaggacataaaactttcctgaatgatgcttataactgggagtttttgatctgggaaacagctttactactttttttattgcgtctggcctcactggggtctgaaaccaataagaaatacagcaatgtttcaatattacttacagaacagattaatttatatcttaagatggaaaaaaagccaaataagaaagaacagcttactctagtaaacaatgtattaaagctgtccaccaagttgttgaaagagctggacacaccatttagactctatggactgacaatgaatcccttaatctacaatatcacaagagtagttatcctttctgctgtctcaggtgttataagtgatcttctaggatttaatataagagtaagtatcaccaccactctgtagcatcctagtcttaaaaattactatgtacagaaatctgtgttcttcacacgtgtgtgtgtgtgtgtgtgtgtgtgtgtgtgtgtgtttctagcatgcaaataactcttgaggtaaagaaataggcattttgattggtggtccacaggtctccactcatctgccgttttctcacgacagcccagatatcaaccgaccagtgcttctcaggatcggaatcctaagaggatccaccattggaatcttccatatcagtcgt

SEQ ID NO: 442871 - DNA, 2666 bp, Homo sapiens
  misc_feature (12)..(12): n is a, c, g, or t
tctcagacggcngaggtcactgcatcccggcgcggcccgcagaagacgagcgccgctgccgcctcctcctcccgggctcccgggctctcggggtccggggcctttgcacctgtcttttccagctgggcacaaagccttttgctgtcgccgtggcgactggaggccttcacttttaatccccctcattttccagttcattctctgcttattttctggtcagtccgtgaccctgtaggcggcctctgaccggcgatcgatttgccgccctcagggcgctgggcggccggctgcctccgaagctggggcggcctccgcggtctccatggtaacggcctctccggcgtctccgcctggaggggaagatgcggcctgcctggcccgccgcctcgcccccggcctcacggtgggaccccgggcactgaggacggaggtcccgggcgccggcccgcggggcaacgggcactagtgaaatcccattctctggctggagacacagatggcctcaaatgagagagatgctatatcgtggtaccaaaagaagattggagcctacgatcagcagatatgggaaaagtcaatcgaacagactcagattaagggtttgaaaaacaaaccgaaaaagatgggccacataaagccagacttgattgacgttgacttaatcagagggtcaacatttgccaaagcaaaacctgaaattccatggacatctctgactcggaaggggcttgttcgagttgtattttttccattgttcagcaattggtggattcaggttacctctttaagaatctttgtttggctgttactactttatttcatgcaagttatagcaattgtcttatatttgatgatgcctattgtgaacataagtgaagtacttggacccttgtgccttatgctactcatgggaactgtccactgtcaaattgtgtctactcagataacaagaccatcaggaaacaatggaaatcgaagaagaagaaaattacgaaaaactgtaaatggtgatgggagccgagaaaatggaaataactcctctgataaagtcagaggaatagaaactttggaatctgtacccattattggtggtttttgggagactatctttggcaacaggattaaaagagtaaaattaatatctaacaaagggactgaaactgacaatgacccaagttgtgtccatcctatcattaagaggagacaatgtcgaccagagattagaatgtggcaaacaagagagaaagcaaaattttcagatggagaaaagtgccgtagggaggcttttaggcgtttgggtaatggggtgtctgatgacctgtcaagtgaagaagatggtgaagcacggacacagatgatattattgcgtaggagtgtggaaggggcctcaagtgacaatggttgtgaagttaagaatagaaaatcaatactttcaaggcacctaaactctcaggtaaagaaaaccactacaaggtggtgtcatattgtgcgggattcagatagtctggctgaatcagaatttgaatcagcagccttcagccagggctctagatcgggtgtgagtggtggctctcgaagcctcaacatgtcaagaagagactcagaaagcacccgccatgactcggagactgaggacatgttatgggacgacctgctacatggcccagagtgccggtcatctgtcaccagtgacagtgagggggcccatgtgaatacccttcactcagggaccaaacgtgaccccaaagaggatgtttttcagcagaatcatttattctggcttcagaattcaagtccttcctctgatcgagttagtgcaataatctgggaggggaatgagtgcaaaaagatggatatgtctgtgttggaaataagtggcatcatcatgagcagggtcaatgcctatcagcaaggagtaggttatcagatgctgggaaatgttgtcactattggattagcattttttccattcttacatcgacttttccgtgagaagagccttgaccaactaaagtccatttcagctgaggagatcttgactctcttttgtggggcaccacctgttacacctattattgttttgtcgataattaatttttttgaaagattgtgtcttacttggatgttttttttcatgatgtgtgtggcagagagaacatataaacaggtcagtggagaaataaggaaaattttttacctgtttttgtatatgatattccattgagttgcttttgttctcttgatttggtctctcttcaagttgatgtgggcaataaaggattgataagtggaaaaaaagaaagagaaagagaaacatcgaacacaagggggggcgccagcaaagagtatgccccagggggggccaaagaatccgggtaacccaggtttcatgcggacaaaggggggcccaaagtggggagccgacctataaggatgacggcctgggcgacggtgtataaaacagcgcgagggggacacatgggtcaacgccgtgggaactcccgcagaaagggaccccctatacacggcgggggcgcaccaaactggggcacaacgccacccagcagagatcaaacgccccagggcaaaacacacgacttcacaagcgcaaacgagggaagaatacgggctatcagccgagccaaagacgagccaaacgagacaga

SEQ ID NO: 442872 - DNA, 1571 bp, Homo sapiens
  misc_feature (12)..(12): n is a, c, g, or t
tctcagacggcngaggtcactgcatcccggcgcggcccgcagaagacgagcgccgctgccgcctcctcctcccgggctcccgggctctcggggtccggggcctttgcacctgtcttttccagctgggcacaaagccttttgctgtcgccgtggcgactggaggccttcacttttaatccccctcattttccagttcattctctgcttattttctggtcagtccgtgaccctgtaggcggcctctgaccggcgatcgatttgccgccctcagggcgctgggcggccggctgcctccgaagctggggcggcctccgcggtctccatggtaacggcctctccggcgtctccgcctggaggggaagatgcggcctgcctggcccgccgcctcgcccccggcctcacggtgggaccccgggcactgaggacggaggtcccgggcgccggcccgcggggcaacgggcactaggtgagagccggacgcgggcgagcgaaggaggcgggtgccgggcgactccagcggcggcccctgcccctcccccgcacccacgaacacgctcgcccgatatattgcagaggcttctccggtcgccgctgcgccagtttttttttgtttgtttgttgtgttttccctggcaaacagctggagaaagagcagctcatggagaggctgagagaagcggttttcgcgtcctacccaaactgggagagtaaccttcagcagctggactcaccgattggttttccttcattttcagtgaaatcccattctctggctggagacacagatggcctcaaatgagagagatgctatatcgtggtaccaaaagaagattggagcctacgatcagcagatatgggaaaagtcaatcgaacagactcagattaagggtttgaaaaacaaaccgaaaaagatgggccacataaagccagacttgattgacgttgacttaatcagagggtcaacatttgccaaagcaaaacctgaaattccatggacatctctgactcggaaggggcttgttcgagttgtattttttccattgttcagcaattggtggattcaggttacctctttaagaatctttgtttggctgttactactttatttcatgcaagttatagcaattgtcttatatttgatgatgcctattgtgaacataagtgaagtacttggacccttgtgccttatgctactcatgggaactgtccactgtcaaattgtgtctactcagataacaagaccatcaggaaacaatggaaatcgaagaagaagagtttcgctcttgttgcccaggctggagtgcaatggcgcaatctcggctcactgcaaccgatacctcctgagttcaagcgattctcctgcctcagcctctcaagtagctgggattacctgcgtatgccaccacacccagctaattttttttttggaatttagtagagatgggatttcaccatgttaatcaggctgatctagaactcctgacctcaggtgatccacccgctcggtctcccaaaggactgggattacaggcgtgagccattgcacccagcgtctaaacttttaataagga

SEQ ID NO: 442873 - DNA, 567 bp, Homo sapiens
cttttcagcttcagttttctcattttacacaaatataacagacagtgctcttgaatggaacaaaaaaaatcaagtttgaatttcatatcagtttaatagcctgagctgggtaatggtcttactctgatcctggggaatgtacagatgtagaatgaatgaaaaccagtacatgaactgcattgtattatttttgatcctggaagttttaaatgttttttctctatgatgttctatggttgctattgccagacttgatacattttcttcttttataaaggattcttagtttatagtcatgtaagtgtacctataaatcccacctggttttcctagaactaacttattttggtgattttgttctcttagctgtggaaaattaaatcataagctgagttaaatgcctggactctcccctggctggtatcaaaacttacctatcaaggaaagtgatgactgcagaaaccagtgagatacccacctgcttgttcacatgcacaggtgctctcagctctgccaaagcgaatgaatggtgtttccggaggagcaagtccttttccaactgggtgt

SEQ ID NO: 442874 - DNA, 319 bp, Homo sapiens
gtctgtgcagacatgataagaatagctagtatttattgtgttcttactgtgtgtcaggcactctgtcatctcatttaactttacaatcatcctgtagggtagatactattattatccccagtttagaggtgaggaaactgagcatagtctataagtgaagatgttgggattagaactcagggagaagtaatctagagttgccctaacctaaatttttctgtatattactttttcttattattttccttagaatggtcctttatgtgtattttatattttatatgagtagagtttgcatatagagaatataccttatatt

SEQ ID NO: 442875 - DNA, 669 bp, Homo sapiens
gtctcttcctgggctgtgaacaacactgcctggctttgcagtaagggtggcaaaaatgcactccctggccacccagctggtgtctcaataggtcatgtgcacctaagtctactgggctagtggagtggcaataacagacgatataaggtaggagttgcattgtgtctgagaagatgtggagaggactgtgaacctacttttgtgcaacactgaaaagtatatgcttcctttcagttaattgacatgagtctttgaagaatagactcacattctgagtctgtgagtgagtattttgtcattctacacccttacttagcaagctaaagtcctgaaaaatatgattcctgcattttcttgatttccagaataatatagcgtattccttaaaagaaagtggtttcatgaaaggtgttactttcaaaaaattaatcttcttttccttttttaaaaaataggattaaaagagtaaaattaatatctaacaaagggactgaaactgacaatgacccaagttgtgtccatcctatcattaagaggagacaatgtcgaccagagattagaatgtggcaaacaagagagaaagcaaaattttcagatggagaaaagtgccgtagggtaagatttagatggatttaacaaggggtttttttccccatgtaacattttcct

SEQ ID NO: 442876 - DNA, 411 bp, Homo sapiens
cagatcttccttattccatgtagccacatagttacccttatcttcctctgacagaagaccgggttgaagcttgctctctggagaggctgagccagagaagttctggattctggaagaccagaaacaaatcagagtctggtgagatgctgcactaataatggggattaagtgaaagtctggtcgtcagatttataatctgcaaacagaagactggaatttcttttcgtcaaaactgagtaaccaaagagaacctaaggatactgaaaagtgaaatgactggccacgcctctatagtgaggtccactattcaaaatgcttcacgcattgcacactgagcttgcattcagtgtgttagtgactgttaattataaatggataattaaagatcatcaaatatttaagacctaaaga

SEQ ID NO: 442877 - DNA, 3293 bp, Homo sapiens
  misc_feature (12)..(12): n is a, c, g, or t
tctcagacggcngaggtcactgcatcccggcgcggcccgcagaagacgagcgccgctgccgcctcctcctcccgggctcccgggctctcggggtccggggcctttgcacctgtcttttccagctgggcacaaagccttttgctgtcgccgtggcgactggaggccttcacttttaatccccctcattttccagttcattctctgcttattttctggtcagtccgtgaccctgtaggcggcctctgaccggcgatcgatttgccgccctcagggcgctgggcggccggctgcctccgaagctggggcggcctccgcggtctccatggtaacggcctctccggcgtctccgcctggaggggaagatgcggcctgcctggcccgccgcctcgcccccggcctcacggtgggaccccgggcactgaggacggaggtcccgggcgccggcccgcggggcaacgggcactagtgaaatcccattctctggctggagacacagatggcctcaaatgagagagatgctatatcgtggtaccaaaagaagattggagcctacgatcagcagatatgggaaaagtcaatcgaacagactcagattaagggtttgaaaaacaaaccgaaaaagatgggccacataaagccagacttgattgacgttgacttaatcagagggtcaacatttgccaaagcaaaacctgaaattccatggacatctctgactcggaaggggcttgttcgagttgtattttttccattgttcagcaattggtggattcaggttacctctttaagaatctttgtttggctgttactactttatttcatgcaagttatagcaattgtcttatatttgatgatgcctattgtgaacataagtgaagtacttggacccttgtgccttatgctactcatgggaactgtccactgtcaaattgtgtctactcagataacaagaccatcaggaaacaatggaaatcgaagaagaagaaaattacgaaaaactgtaaatggtgatgggagccgagaaaatggaaataactcctctgataaagtcagaggaatagaaactttggaatctgtacccattattggtggtttttgggagactatctttggcaacaggattaaaagagtaaaattaatatctaacaaagggactgaaactgacaatgacccaagttgtgtccatcctatcattaagaggagacaatgtcgaccagagattagaatgtggcaaacaagagagaaagcaaaattttcagatggagaaaagtgccgtagggaggcttttaggcgtttgggtaatggggtgtctgatgacctgtcaagtgaagaagatggtgaagcacggacacagatgatattattgcgtaggagtgtggaaggggcctcaagtgacaatggttgtgaagttaagaatagaaaatcaatactttcaaggcacctaaactctcaggtaaagaaaaccactacaaggtggtgtcatattgtgcgggattcagatagtctggctgaatcagaatttgaatcagcagccttcagccagggctctagatcgggtgtgagtggtggctctcgaagcctcaacatgtcaagaagagactcagaaagcacccgccatgactcggagactgaggacatgttatgggacgacctgctacatggcccagagtgccggtcatctgtcaccagtgacagtgagggggcccatgtgaatacccttcactcagggaccaaacgtgaccccaaagaggatgtttttcagcagaatcatttattctggcttcagaattcaagtccttcctctgatcgagttagtgcaataatctgggaggggaatgagtgcaaaaagatggatatgtctgtgttggaaataagtggcatcatcatgagcagggtcaatgcctatcagcaaggagtaggttatcagatgctgggaaatgttgtcactattggattagcattttttccattcttacatcgacttttccgtgagaagagccttgaccaactaaagtccatttcagctgaggagatcttgactctcttttgtggggcaccacctgttacacctattattgttttgtcgataattaatttttttgaaagattgtgtcttacttggatgttttttttcatgatgtgtgtggcagagagaacatataaacagagatttttatttgcaaaactcttcagccatattacttctgccaggaaagctaggaaatatgaaatacctcatttcagacttaagaaggtggagaatattaaaatatggttatcactgcgttcctatctaaagagacgggggccacagcgttcagttgatgtggttgtatcctcggttttcctactgacactttcgattgctttcatttgttgtgctcaggttctccaaggacataaaactttcctgaatgatgcttataactgggagtttttgatctgggaaacagctttactactttttttattgcgtctggcctcactggggtctgaaaccaataagaaatacagcaatgtttcaatattacttacagaacagattaatttatatcttaagatggaaaaaaagccaaataagaaagaacagcttactctagtaaacaatgtattaaagctgtccaccaagttgttgaaagagctggacacaccatttagactctatggactgacaatgaatcccttaatctacaatatcacaagagtagttatcctttctgctgtctcaggtgttataagtgatcttctaggatttaatataagactgtggaaaattaaatcataagctgagttaaatgcctggactctcccctggctggtatcaaaacttacctatcaaggaaagtgatgactgcagaaaccagtgagatacccacctgcttgttcacatgcacaggtgctctcagctctgccaaagcgaatgaatggtgtttccggaggagcaagtccttttccaactgggtgtgcatgctaaaaacctgtattttcatgcttttcaaacaacatgaatagtcagctgactaaagactgtgtgtgttgtggtaacacaaagacaattttgtaagtttgcgcttcagtactgtgacagttatgtttactggacatagtcttttgggcaactatgatagatgcccaaagcatgaagcaaatatcttttattggaaatatgcaaattcaatacttttccattatagtctatagaactggagatttcatttctctatcaaagagagatcaagcgaactattttaggttaaatccgaataaaagaactttactggagaaaaaaagtt

SEQ ID NO: 442878 - DNA, 2292 bp, Homo sapiens
  misc_feature (12)..(12): n is a, c, g, or t
tctcagacggcngaggtcactgcatcccggcgcggcccgcagaagacgagcgccgctgccgcctcctcctcccgggctcccgggctctcggggtccggggcctttgcacctgtcttttccagctgggcacaaagccttttgctgtcgccgtggcgactggaggccttcacttttaatccccctcattttccagttcattctctgcttattttctggtcagtccgtgaccctgtaggcggcctctgaccggcgatcgatttgccgccctcagggcgctgggcggccggctgcctccgaagctggggcggcctccgcggtctccatggtaacggcctctccggcgtctccgcctggaggggaagatgcggcctgcctggcccgccgcctcgcccccggcctcacggtgggaccccgggcactgaggacggaggtcccgggcgccggcccgcggggcaacgggcactagtgaaatcccattctctggctggagacacagatggcctcaaatgagagagatgctatatcgtggtaccaaaagaagattggagcctacgatcagcagatatgggaaaagtcaatcgaacagactcagattaagggtttgaaaaacaaaccgaaaaagatgggccacataaagccagacttgattgacgttgacttaatcagagggtcaacatttgccaaagcaaaacctgaaattccatggacatctctgactcggaaggggcttgttcgagttgtattttttccattgttcagcaattggtggattcaggttacctctttaagaatctttgtttggctgttactactttatttcatgcaagttatagcaattgtcttatatttgatgatgcctattgtgaacataagtgaagtacttggacccttgtgccttatgctactcatgggaactgtccactgtcaaattgtgtctactcagataacaagaccatcaggaaacaatggaaatcgaagaagaagaaaattacgaaaaactgtaaatggtgatgggagccgagaaaatggaaataactcctctgataaagtcagaggaatagaaactttggaatctgtacccattattggtggtttttgggagactatctttggcaacaggattaaaagagtaaaattaatatctaacaaagggactgaaactgacaatgacccaagttgtgtccatcctatcattaagaggagacaatgtcgaccagagattagaatgtggcaaacaagagagaaagcaaaattttcagatggagaaaagtgccgtagggaggcttttaggcgtttgggtaatggggtgtctgatgacctgtcaagtgaagaagatggtgaagcacggacacagatgatattattgcgtaggagtgtggaaggggcctcaagtgacaatggttgtgaagttaagaatagaaaatcaatactttcaaggcacctaaactctcaggtaaagaaaaccactacaaggtggtgtcatattgtgcgggattcagatagtctggctgaatcagaatttgaatcagcagccttcagccagggctctagatcgggtgtgagtggtggctctcgaagcctcaacatgtcaagaagagactcagaaagcacccgccatgactcggagactgaggacatgttatgggacgacctgctacatggcccagagtgccggtcatctgtcaccagtgacagtgagggggcccatgtgaatacccttcactcagggaccaaacgtgaccccaaagaggatgtttttcagcagaatcatttattctggcttcagaattcaagtccttcctctgatcgagttagtgcaataatctgggaggggaatgagtgcaaaaagatggatatgtctgtgttggaaataagtggcatcatcatgagcagggtcaatgcctatcagcaaggagtaggttatcagatgctgggaaatgttgtcactattggattagcattttttccattcttacatcgacttttccgtgagaagagccttgaccaactaaagtccatttcagctgaggagatcttgactctcttttgtggggcaccacctgttacacctattattgttttgtcgataattaatttttttgaaagattgtgtcttacttggatgttttttttcatgatgtgtgtggcagagagaacatataaacaggtcagtggagaaataaggaaaattttttacctgtttttgtatatgatattccattgagttgcttttgttctcttgatttggtctctcttcaagttgatgtgggcaataaaggattgataagtgga

SEQ ID NO: 442879 - DNA, 3077 bp, Homo sapiens
  misc_feature (12)..(12): n is a, c, g, or t
tctcagacggcngaggtcactgcatcccggcgcggcccgcagaagacgagcgccgctgccgcctcctcctcccgggctcccgggctctcggggtccggggcctttgcacctgtcttttccagctgggcacaaagccttttgctgtcgccgtggcgactggaggccttcacttttaatccccctcattttccagttcattctctgcttattttctggtcagtccgtgaccctgtaggcggcctctgaccggcgatcgatttgccgccctcagggcgctgggcggccggctgcctccgaagctggggcggcctccgcggtctccatggtaacggcctctccggcgtctccgcctggaggggaagatgcggcctgcctggcccgccgcctcgcccccggcctcacggtgggaccccgggcactgaggacggaggtcccgggcgccggcccgcggggcaacgggcactagtgaaatcccattctctggctggagacacagatggcctcaaatgagagagatgctatatcgtggtaccaaaagaagattggagcctacgatcagcagatatgggaaaagtcaatcgaacagactcagattaagggtttgaaaaacaaaccgaaaaagatgggccacataaagccagacttgattgacgttgacttaatcagagggtcaacatttgccaaagcaaaacctgaaattccatggacatctctgactcggaaggggcttgttcgagttgtattttttccattgttcagcaattggtggattcaggttacctctttaagaatctttgtttggctgttactactttatttcatgcaagttatagcaattgtcttatatttgatgatgcctattgtgaacataagtgaagtacttggacccttgtgccttatgctactcatgggaactgtccactgtcaaattgtgtctactcagataacaagaccatcaggaaacaatggaaatcgaagaagaagaaaattacgaaaaactgtaaatggtgatgggagccgagaaaatggaaataactcctctgataaagtcagaggaatagaaactttggaatctgtacccattattggtggtttttgggagactatctttggcaacaggattaaaagagtaaaattaatatctaacaaagggactgaaactgacaatgacccaagttgtgtccatcctatcattaagaggagacaatgtcgaccagagattagaatgtggcaaacaagagagaaagcaaaattttcagatggagaaaagtgccgtagggaggcttttaggcgtttgggtaatggggtgtctgatgacctgtcaagtgaagaagatggtgaagcacggacacagatgatattattgcgtaggagtgtggaaggggcctcaagtgacaatggttgtgaagttaagaatagaaaatcaatactttcaaggcacctaaactctcaggtaaagaaaaccactacaaggtggtgtcatattgtgcgggattcagatagtctggctgaatcagaatttgaatcagcagccttcagccagggctctagatcgggtgtgagtggtggctctcgaagcctcaacatgtcaagaagagactcagaaagcacccgccatgactcggagactgaggacatgttatgggacgacctgctacatggcccagagtgccggtcatctgtcaccagtgacagtgagggggcccatgtgaatacccttcactcagggaccaaacgtgaccccaaagaggatgtttttcagcagaatcatttattctggcttcagaattcaagtccttcctctgatcgagttagtgcaataatctgggaggggaatgagtgcaaaaagatggatatgtctgtgttggaaataagtggcatcatcatgagcagggtcaatgcctatcagcaaggagtaggttatcagatgctgggaaatgttgtcactattggattagcattttttccattcttacatcgacttttccgtgagaagagccttgaccaactaaagtccatttcagctgaggagatcttgactctcttttgtggggcaccacctgttacacctattattgttttgtcgataattaatttttttgaaagattgtgtcttacttggatgttttttttcatgatgtgtgtggcagagagaacatataaacagagatttttatttgcaaaactcttcagccatattacttctgccaggaaagctaggaaatatgaaatacctcatttcagacttaagaaggtggagaatattaaaatatggttatcactgcgttcctatctaaagagacgggggccacagcgttcagttgatgtggttgtatcctcggttttcctactgacactttcgattgctttcatttgttgtgctcaggttctccaaggacataaaactttcctgaatgatgcttataactgggagtttttgatctgggaaacagctttactactttttttattgcgtctggcctcactggggtctgaaaccaataagaaatacagcaatgtttcaatattacttacagaacaggtattgatcagtcctgtcaattgggtttagtggttaggggtagcgtaatacgctgtaaggttcctgcagaggattcagggtttaatcactgtctagctgtcactttctagctacaggacctcacaagtcagtttgctgctctgtagttgcttatccctaataaaatggatgtaatatctcctcctgctctgtgagaattaagatctaatggattgaaaagactttgtatactatggagagatttttattggtggtaatggagcatgcttttaatctcatattctatgtcaagtattagatctttagagtacttgtcatttagcatgtataataagcttcttgaattcttctgtattagacatagaatacattattcagtgtttggaagatacttggttttcagtatgtgaatagacactaagattgagaaatatctcttgtaaatacagagtagtataaagtttttttaattttgtttttaatttcaagtttttccataaactttgaataaaaacatttatcattcaaaactgtt

SEQ ID NO: 442880 - DNA, 2826 bp, Homo sapiens
  misc_feature (12)..(12): n is a, c, g, or t
tctcagacggcngaggtcactgcatcccggcgcggcccgcagaagacgagcgccgctgccgcctcctcctcccgggctcccgggctctcggggtccggggcctttgcacctgtcttttccagctgggcacaaagccttttgctgtcgccgtggcgactggaggccttcacttttaatccccctcattttccagttcattctctgcttattttctggtcagtccgtgaccctgtaggcggcctctgaccggcgatcgatttgccgccctcagggcgctgggcggccggctgcctccgaagctggggcggcctccgcggtctccatggtaacggcctctccggcgtctccgcctggaggggaagatgcggcctgcctggcccgccgcctcgcccccggcctcacggtgggaccccgggcactgaggacggaggtcccgggcgccggcccgcggggcaacgggcactagtgaaatcccattctctggctggagacacagatggcctcaaatgagagagatgctatatcgtggtaccaaaagaagattggagcctacgatcagcagatatgggaaaagtcaatcgaacagactcagattaagggtttgaaaaacaaaccgaaaaagatgggccacataaagccagacttgattgacgttgacttaatcagagggtcaacatttgccaaagcaaaacctgaaattccatggacatctctgactcggaaggggcttgttcgagttgtattttttccattgttcagcaattggtggattcaggttacctctttaagaatctttgtttggctgttactactttatttcatgcaagttatagcaattgtcttatatttgatgatgcctattgtgaacataagtgaagtacttggacccttgtgccttatgctactcatgggaactgtccactgtcaaattgtgtctactcagataacaagaccatcaggaaacaatggaaatcgaagaagaagaaaattacgaaaaactgtaaatggtgatgggagccgagaaaatggaaataactcctctgataaagtcagaggaatagaaactttggaatctgtacccattattggtggtttttgggagactatctttggcaacaggattaaaagagtaaaattaatatctaacaaagggactgaaactgacaatgacccaagttgtgtccatcctatcattaagaggagacaatgtcgaccagagattagaatgtggcaaacaagagagaaagcaaaattttcagatggagaaaagtgccgtagggaggcttttaggcgtttgggtaatggggtgtctgatgacctgtcaagtgaagaagatggtgaagcacggacacagatgatattattgcgtaggagtgtggaaggggcctcaagtgacaatggttgtgaagttaagaatagaaaatcaatactttcaaggcacctaaactctcaggtaaagaaaaccactacaaggtggtgtcatattgtgcgggattcagatagtctggctgaatcagaatttgaatcagcagccttcagccagggctctagatcgggtgtgagtggtggctctcgaagcctcaacatgtcaagaagagactcagaaagcacccgccatgactcggagactgaggacatgttatgggacgacctgctacatggcccagagtgccggtcatctgtcaccagtgacagtgagggggcccatgtgaatacccttcactcagggaccaaacgtgaccccaaagaggatgtttttcagcagaatcatttattctggcttcagaattcaagtccttcctctgatcgagttagtgcaataatctgggaggggaatgagtgcaaaaagatggatatgtctgtgttggaaataagtggcatcatcatgagcagggtcaatgcctatcagcaaggagtaggttatcagatgctgggaaatgttgtcactattggattagcattttttccattcttacatcgacttttccgtgagaagagccttgaccaactaaagtccatttcagctgaggagatcttgactctcttttgtggggcaccacctgttacacctattattgttttgtcgataattaatttttttgaaagattgtgtcttacttggatgttttttttcatgatgtgtgtggcagagagaacatataaacagagatttttatttgcaaaactcttcagccatattacttctgccaggaaagctaggaaatatgaaatacctcatttcagacttaagaaggtggagaatattaaaatatggttatcactgcgttcctatctaaagagacgggggccacagcgttcagttgatgtggttgtatcctcggttttcctactgacactttcgattgctttcatttgttgtgctcaggtaaaagtttcacatctgctttaaggaaaaatgaaaattctattatagagttcactttctgttttagacttaggtcactgtccttaagtatgtatttttaatgcatctacattttttactattttggatgtttggtaatttttctaacttttcaaaatgggaatacaagtaattctgaagtcctttcaaactgtaagatcgctctaattttagttggtaattattaattgataataaaactatcatatgattgcaaaataactgattttctgactacattattccttctgtatttattagttatcactccaaggtagatctttcatttctttccctcttatttattcattcatttatttattatactgtggaatcatgtattctcatttttatacagtgggttaaaatctgttactataggctgggcatagcagcttaac

SEQ ID NO: 442881 - DNA, 1455 bp, Homo sapiens
  misc_feature (12)..(12): n is a, c, g, or t
tctcagacggcngaggtcactgcatcccggcgcggcccgcagaagacgagcgccgctgccgcctcctcctcccgggctcccgggctctcggggtccggggcctttgcacctgtcttttccagctgggcacaaagccttttgctgtcgccgtggcgactggaggccttcacttttaatccccctcattttccagttcattctctgcttattttctggtcagtccgtgaccctgtaggcggcctctgaccggcgatcgatttgccgccctcagggcgctgggcggccggctgcctccgaagctggggcggcctccgcggtctccatggtaacggcctctccggcgtctccgcctggaggggaagatgcggcctgcctggcccgccgcctcgcccccggcctcacggtgggaccccgggcactgaggacggaggtcccgggcgccggcccgcggggcaacgggcactaggtgagagccggacgcgggcgagcgaaggaggcgggtgccgggcgactccagcggcggcccctgcccctcccccgcacccacgaacacgctcgcccgatatattgcagaggcttctccggtcgccgctgcgccagtttttttttgtttgtttgttgtgttttccctggcaaacagctggagaaagagcagctcatggagaggctgagagaagcggttttcgcgtcctacccaaactgggagagtaaccttcagcagctggactcaccgattggttttccttcattttcagtgaaatcccattctctggctggagacacagatggcctcaaatgagagagatgctatatcgtggtaccaaaagaagattggagcctacgatcagcagatatgggaaaagtcaatcgaacagactcagattaagggtttgaaaaacaaaccgaaaaagatgggccacataaagccagacttgattgacgttgacttaatcagagggtcaacatttgccaaagcaaaacctgaaattccatggacatctctgactcggaaggggcttgttcgagttgtattttttccattgttcagcaattggtggattcaggttacctctttaagaatctttgtttggctgttactactttatttcatgcaagataacaagaccatcaggaaacaatggaaatcgaagaagaagagtttcgctcttgttgcccaggctggagtgcaatggcgcaatctcggctcactgcaaccgatacctcctgagttcaagcgattctcctgcctcagcctctcaagtagctgggattacctgcgtatgccaccacacccagctaattttttttttggaatttagtagagatgggatttcaccatgttaatcaggctgatctagaactcctgacctcaggtgatccacccgctcggtctcccaaaggactgggattacaggcgtgagccattgcacccagcgtctaaacttttaataagga

SEQ ID NO: 442882 - DNA, 2648 bp, Homo sapiens
ggtgctgagcccctgcgcggtttctggtgcgtagagactgtaaatcgctgcgcttctcagtcatcatcatcccagcttttcccggctcgaattcagcctccaactcaagctcgcgggaaagactacctgagaggagaaaagcttctgtccctggaccttcttctgagggtggagtcggaggctccctgctttccagccgcccagtgacccaagcttaatcttcagcaccacttggggcgaccttttcggtgcaaacctacgattctgtttctcaggattcctccccatcccgcttcgccccggaaaagctgacaagaacttcaggtgtaagccctgagtagtgaggatctgcggtctccgtggagagctgtgcttggaagagaaggacgctggtgggggctgagatcagagctgtcttctggcccagttgcccccatgctgctgtcatggctaacagttctaggggctggaatggtcgtcctgcacttcttgcagaaactcctgttcccttacttttgggatgacttctggttcgtgttgaaggtggtgctcattataattcggctgaagaagtatgaaaagagaggggagctggtgactgtgctggataaattcttgagtcatgccaaaagacaacctcggaaacctttcatcatctatgagggagacatctacacctatcaggatgtagacaaaaggagcagcagagtggcccatgtcttcctgaaccattcctctctgaaaaagggggacacggtggctctgctgatgagcaatgagccggacttcgttcacgtgtggttcggcctcgccaagctgggctgcgtggtggcctttctcaacaccaacattcgctccaactccctcctgaattgcatccgcgcctgtgggcccagagccctagtggtgggcgcagatttgcttggaacggtagaagaaatccttccaagcctctcagaaaatatcagtgtttgggggatgaaagattctgttccacaaggtgtaatttcactcaaagaaaaactgagcacctcacctgatgagcccgtgccacgcagccaccatgttgtctcactcctcaagtctacttgtctttacatttttacctctggaacaacaggtctaccaaaagcagctgtgattagtcagctgcaggttttaaggggttctgctgtcctgtgggcttttggttgtactgctcatgacattgtttatataacccttcctctgtatcatagttcagcagctatcctgggaatttctggatgtgttgagttgggtgccacttgtgtgttaaagaagaaattttcagcaagccagttttggagtgactgcaagaagtatgatgtgactgtgtttcagtatattggagaactttgtcgctacctttgcaaacaatctaagagagaaggagaaaaggatcataaggtgcgtttggcaattggaaatggcatacggagtgatgtatggagagaatttttagacagatttggaaatataaaggtgtgtgaactttatgcagctaccgaatcaagcatatctttcatgaactacactgggagaattggagcaattgggagaacaaatttgttttacaaacttctttccacttttgacttaataaagtatgactttcagaaagatgaacccatgagaaatgagcagggttggtgtattcatgtgaaaaaaggagaacctggacttctcatttctcgagtgaatgcaaaaaatcccttctttggctatgctgggccttataagcacacaaaagacaaattgctttgtgatgtttttaagaagggagatgtttaccttaatactggagacttaatagtccaggatcaggacaatttcctttatttttgggaccgtactggagacactttcagatggaaaggagaaaatgtcgcaaccactgaggttgctgatgttattggaatgttggatttcatacaggaagcaaacgtctatggtgtggctatatcaggttatgaaggaagagcaggaatggcttctattattttaaaaccaaatacatctttagatttggaaaaagtttatgaacaagttgtaacatttctaccagcttatgcttgtccacgatttttaagaattcaggaaaaaatggaagcaacaggaacattcaaactattgaagcatcagttggtggaagatggatttaatccactgaaaatttctgaaccactttacttcatggataacttgaaaaagtcttatgttctactgaccagggaactttatgatcaaataatgttaggggaaataaaactttaagatttttatatctagaactttcatatgctttcttaggaagagtgagaggggggtatatgattctttatgaaatggggaaagggagctaacattaattatgcatgtactatatttccttaatatgagagataattttttaattgcataagaattttaatttcttttaattgatataaacagtagttgattattctttttatctatttggagattcagtgcataactaagtattttccttaatactaaagattttaaataataaatagtggctagcggtttggacaatcactaaaaatgtactttctaataagtaaaatttctaattttgaataaaagattaaattttactgaaa

SEQ ID NO: 442883 - DNA, 379 bp, Homo sapiens
gaaggaaagaatgcaacatttcttttgctttggatcacatctacctctttgttcaggatgtatactttgacttgaaccattcattatgtatttttgttcccgaccttgattatacacttcagatgtgaaattgttcacagatggctcagtgatggtcttttgttacttatctagggaaaaatattttgcatctttgcatgaatatctaataagaaaagaaattatctgtacactaggaaagattaatggatcggggcaatgtaaatctactgaggatattctgatagtgagcctggtccaaaatatttgatcagtgaaaccataatatttcgatttctttgcagcctgttttgtgcaacttccaagtcaagattatgaa

SEQ ID NO: 442884 - DNA, 427 bp, Homo sapiens
gtttcaatacacaaaagcaactccaaagtgaattgtttgagatttaaggtttgcttaactcttcccaaccctttggcttttagatttgcttggaacggtagaagaaatccttccaagcctctcagaaaatatcagtgtttgggggatgaaagattctgttccacaaggtgtaatttcactcaaagaaaaactgagcacctcacctgatgagcccgtgccacgcagccaccatgttgtctcactcctcaagtctacttgtctttacatttttacctctggaacaacaggtatgatccaattcttttgaaggctaaaatgaatgcgagaaatttgcaaagcaacagtgttgggcaaatttctaccatgtgtagtgaccaaccatctgagaatgcatgcttgcaagaagatgtaaggatctcagaggcta

SEQ ID NO: 442885 - DNA, 1995 bp, Homo sapiens
  misc_feature (23)..(23): n is a, c, g, or t
ccgtgcgctccgaagacggatantggaaagctgcaaaagtcaccagaaagaaacagggctgccttagtaaagtacagaggtgaagtggagcaagatggcagaatagcaagctcctttgatggccatccgcacaaatgtctacacagaaaaagcaccttcacaagaaccaaaaatcagcctgttttgtgcaacttccaagtcaagattatgaacattttcagactttttgcaagacagaattcaatggattaacaatcagccttatttgcttggaacggtagaagaaatccttccaagcctctcagaaaatatcagtgtttgggggatgaaagattctgttccacaaggtgtaatttcactcaaagaaaaactgagcacctcacctgatgagcccgtgccacgcagccaccatgttgtctcactcctcaagtctacttgtctttacatttttacctctggaacaacaggtctaccaaaagcagctgtgattagtcagctgcaggttttaaggggttctgctgtcctgtgggcttttggttgtactgctcatgacattgtttatataacccttcctctgtatcatagttcagcagctatcctgggaatttctggatgtgttgagttgggtgccacttgtgtgttaaagaagaaattttcagcaagccagttttggagtgactgcaagaagtatgatgtgactgtgtttcagtatattggagaactttgtcgctacctttgcaaacaatctaagagagaaggagaaaaggatcataaggtgcgtttggcaattggaaatggcatacggagtgatgtatggagagaatttttagacagatttggaaatataaaggtgtgtgaactttatgcagctaccgaatcaagcatatctttcatgaactacactgggagaattggagcaattgggagaacaaatttgttttacaaacttctttccacttttgacttaataaagtatgactttcagaaagatgaacccatgagaaatgagcagggttggtgtattcatgtgaaaaaaggagaacctggacttctcatttctcgagtgaatgcaaaaaatcccttctttggctatgctgggccttataagcacacaaaagacaaattgctttgtgatgtttttaagaagggagatgtttaccttaatactggagacttaatagtccaggatcaggacaatttcctttatttttgggaccgtactggagacactttcagatggaaaggagaaaatgtcgcaaccactgaggttgctgatgttattggaatgttggatttcatacaggaagcaaacgtctatggtgtggctatatcaggttatgaaggaagagcaggaatggcttctattattttaaaaccaaatacatctttagatttggaaaaagtttatgaacaagttgtaacatttctaccagcttatgcttgtccacgatttttaagaattcaggaaaaaatggaagcaacaggaacattcaaactattgaagcatcagttggtggaagatggatttaatccactgaaaatttctgaaccactttacttcatggataacttgaaaaagtcttatgttctactgaccagggaactttatgatcaaataatgttaggggaaataaaactttaagatttttatatctagaactttcatatgctttcttaggaagagtgagaggggggtatatgattctttatgaaatggggaaagggagctaacattaattatgcatgtactatatttccttaatatgagagataattttttaattgcataagaattttaatttcttttaattgatataaacagtagttgattattctttttatctatttggagattcagtgcataactaagtattttccttaatactaaagattttaaataataaatagtggctagcggtttggacaatcactaaaaatgtactttctaataagtaaaatttctaattttgaataaaagattaaattttactgaaa

SEQ ID NO: 442886 - DNA, 384 bp, Homo sapiens
tattttttgtagagatggggtctcaccatattgtccaggctggtctcaaaccctggccacaaccaacctttctgccttggcctcccagagtgctgggattacaggcatgggccaccacacccagcccctgaagctatcttttaaaaaaatttttactagcacttaggtgatttctgctttgacctaattggtactctccttgcaaaatttgccagtgaaaaaaacttactaatgtctgattttccatgagatgttctccatatagttacatatcatatgtaattactacattcaatattattgacataacaagggtatggtgccgtcttgtttggggagtttgacattgagcgaagatgcttcctggatgggtgcggtggctca

SEQ ID NO: 442887 - DNA, 626 bp, Homo sapiens
agaaagccattttcagttcgagcgccaagatcgtgaagcccaatggcgagaagccgacgagttcgagtccggcatctcccaggctcttctggagctggagatgaactcggacctcaaggctcagctcagggagctgaatattacggcagctaaggaaattgaagttggtggtggtcggaaagctatcataatctttgttcccgttcctcaactgaaatctttccagaaaatccaagtccggctagtacgcgaattggagaaaaagttcagtgggaagcatgtcgtctttatcgctcagaggagaattctgcctaagccaactcgaaaaagccgtacaaaaaataagcaaaagcgtcccaggagccgtactctgacagctgtgcacgatgccatccttgaggacttggtcttcccaagcgaaattgtgggcaagagaatccgcgtcaaactagatggcagccggctcataaaggttcatttggacaaagcacagcagaacaatgtggaacacaaggttgaaactttttctggtgtctataagaagctcacgggcaaggatgttaattttgaattcccagagtttcaattgtaaacaaaaatgactaaataaaaagtatatattcaca

SEQ ID NO: 442888 - DNA, 1089 bp, Homo sapiens
  misc_feature (630)..(630): n is a, c, g, or t
agaaagccattttcagttcgagcgccaagatcgtgaagcccaatggcgagaagccgacgagttcgagtccggcatctcccaggctcttctggagctggagatgaactcggacctcaaggctcagctcagggagctgaatattacggcagctaaggaaattgaagttggtggtggtcggaaagctatcataatctttgttcccgttcctcaactgaaatctttccagaaaatccaagtccggctagtacgcgaattggagaaaaagttcagtgggaagcatgtcgtctttatcgctcagaggagaattctgcctaagccaactcgaaaaagccgtacaaaaaataagcaaaagcgtcccaggagccgtactctgacagctgtgcacgatgccatccttgaggacttggtcttcccaagcgaaattgtgggcaagagaatccgcgtcaaactagatggcagccggctcataaaggttcatttggacaaagcacagcagaacaatgtggaacacaaggttgaaactttttctggtgtctataagaagctcacgggcaaggatgttaattttgaattcccagagtttcaattgtaaacaaaaatgactaaataaaaagtatatattcacaagcnaaacaaacagaaaacaacaaaacaacaacaacacacacacttgtggcgggcgcgcgctctctggcgccctccggagagaaagactttctctataaaacaccaattcgcggtgggggggcgcgcgggggcgccccaaggaggcgactcaagtgtgaaacaagtggtgcgccaatatagcgtgtgtccccaaggagagaaaacccggggaccccacgaacaccaagggcgccgcggaagaactctcacccaaaattaaaaaccgcgccgggggggcgaaaaccagagagaagcacgttcttcacgagaaacaaaaatctcccgaagagcggcagcataagagaagaagaccgcaaaaaacagaggggggaaaaccacacatcacaaaaggaggaaggcccacaagagaggaacgcgcggaaaactcccagatatgagagcccgcgcgtcccacgggtggac

SEQ ID NO: 442889 - DNA, 426 bp, Homo sapiens
  misc_feature (90)..(90): n is a, c, g, or t
  misc_feature (140)..(140): n is a, c, g, or t
tactgtgaatatatactttttatttagtcatttttgtttacaattgaaactctgggaattcaaaattaacatcctttttcgttttcttcntatagacaccagaaaatttttcaaccttttttaccacattgtcctgctgngctttgtccaaacgaaccatgataagtactctgacagctgtgcacgatgccatccttgaggacttggtcttcccaagcgaaattgtgggcaagagaatccgcgtcaaactagatggcagccggctcataaaggttcatttggacaaagcacagcagaacaatgtggaacacaaggttgaaactttttctggtgtctataagaagctcacgggcaaggatgttaattttgaattcccagagtttcaattgtaaacaaaaatgactaaataaaaagtatatattcaca

SEQ ID NO: 442890 - DNA, 572 bp, Homo sapiens
agaaagccattttcagttcgagcgccaagatcgtgaagcccaatggcgagaagccgacgagttcgagtccggcatctcccaggctcttctggagctggagatgaactcggacctcaaggctcagctcagggagctgaatattacggcagctaaggaaattgaagttggtggtggtcggaaagctatcataatctttgttcccgttcctcaactgaaatctttccagaaaatccaagtccggctagtacgcgaattggagaaaaagttcagtgggaagcatgtcgtctttatcgctcagaggagaattctgcctaagccaactcgaaaaagccgtacaaaaaataagcaaaagcgtcccaggagccgtactctgacagctgtgcacgatgccatccttgaggacttggtcttcccaagcgaaattgtgggcaagagaatccgcgtcaaactagatggcagccggctcataaaggttcatttggacaaagcacagcagaacaatgtggaacacaaggaattcccagagtttcaattgtaaacaaaaatgactaaataaaaagtatatattcaca

SEQ ID NO: 442891 - DNA, 2301 bp, Homo sapiens
  misc_feature (507)..(507): n is a, c, g, or t
  misc_feature (580)..(580): n is a, c, g, or t
  misc_feature (596)..(596): n is a, c, g, or t
  misc_feature (602)..(602): n is a, c, g, or t
  misc_feature (1020)..(1020): n is a, c, g, or t
gtccagagcgcggcgtaggtgtggagaaaacattacgtcgacggggagttcgcctccagtagcgtttctactggtgccaccccgcctccgacccgccctgcggccctcccttttcttttctgccgggtaatggctgcttccaagacccagggggctgtcgcccgaatgcaggaagaccgtgatgggagctgcagcacagtcgggggtgtaggttatggggacagtaaggattgtatcctggagccgctttccctgccagaaagtccaggtggcaccaccactttagaaggttctccatctgtgccttgtattttctgtgaagaacattttcctgtggctgaacaagacaaacttctgaagcacatgattattgagcataagattgtcatagctgatgtcaagttggttgctgatttccaaaggtaagttctgtttttgtccttaaaagaattaaatttgaccatgtgtggtggctcatgtctgtaatcctagtactttgggaggccnaagtgggaggatcacccgaggccagtagtagttcaagatgccagctctaaaaacaaaatttaaaaattatctnggatcaatggcatgcncctgtngttccagctacttgggaggttgaggcaggagggctgcttgcacccatgagttcgaggctgcagtgagttatggttataccattgcactccagcctgggtgacagaatgagaccctgtctcttaagaaagagaattaaatgtattgtttgttaaaggagtgacataatctatatataaaataattcccatacaaatatgaaaattcatattcattttcaggtttctccttagacttaaaaaaaaaaactttacaactcttttgtacttctgagactttttttttttttttgagatggagttttgctattgtcacccaggctggagtgcagtggcacgatctcagcttgttgcaacttctgcctcccatgttcaagcgattctcctgcctcagcctcctgagtagctgggattacaggcncctgccaccacgcccagctaatttttgtattcttagtagagatggggtttcaccatgttggccaggcctgtctcgaactcctgagctcaggtgatctgcccacctcagcctcccacagtgctgggattacaggcatgagccactgcacccagccaacttctcagactttaaaaaaatctttacattatttttcttgagtctgtaagtttgagaatgtcacatactaatttattttctataagttctctaaagagatgaactttccaaagagtagataatactcactttgcagcattccatgacattgtagatcttattgatgtctcccagattatgtctcatgttttaggccatagacattctctgagtgggtccttccagtaattccagaatagacttggcaacaggacactcaaaaggcagtgtttgggaatgggatccttggagactttcaagccaaaaggatattgcccaaacaaatctcagtttaaatgttgtgatgaggttgattccttttttcccaatttataatttctggaagtagttgtccaagagaaataccttccctgtatagttactgaaagcataaaatttggtgtatctggtaaggtcccattttgaggtattctgtcctgatttccccataaaacattgtagtagcccagacattgaatacccctgcatctaaactctgtttctcccaggccatataaaacattcctagcaaacagcttctttcttatgataggtcttgcaaaagagcaagctgtattattaagagctgactatgaaagtaggaaagcctggggttgagtgcaggctttcacacttcctaatcttgtgatttcctgccaagctacctaactactctaagcattgattttctcatctataaaatgggggtaacaccagccctcatggttattgaatattacataaaacaaagtatggaatgtgagggcgatctggctgtgacatctgtcaccccattaatcgccagggttgattcggctgatctggctggctaagtggctgtccccttcctccctcaccactccatgttcatgcctcccaaagctgtgttctcagtcaaagaggacaaccatctccactagaagaggaccagtctttggtcaagggtatacgagtagctgcgcttccctgctggaacctccagacaagctctcaagtccatttgtaggagaacatagggtagtcaagcttccaagattccagacacatccaaatgaagtgctgcatgtggcagtctgcctttcttaa

SEQ ID NO: 442892 - DNA, 2687 bp, Homo sapiens
gtccagagcgcggcgtaggtgtggagaaaacattacgtcgacggggagttcgcctccagtagcgtttctactggtgccaccccgcctccgacccgccctgcggccctcccttttcttttctgccgggtaatggctgcttccaagacccagggggctgtcgcccgaatgcaggaagaccgtgatgggagctgcagcacagtcgggggtgtaggttatggggacagtaaggattgtatcctggagccgctttccctgccagaaagtccaggtggcaccaccactttagaaggttctccatctgtgccttgtattttctgtgaagaacattttcctgtggctgaacaagacaaacttctgaagcacatgattattgagcataagattgtcatagctgatgtcaagttggttgctgatttccaaaggtacattttatattggaggaaaaggttcactgaacagcccatcacagatttttgtagtgtaataagaattaattccactgctccatttgaagaacaagagaattattttttgttatgtgacgttttaccagaagatagaattcttagagaagagcttcagaaacagagactgagagaaattctggaacaacagcagcaagaacgaaatgataccaattttcatggcgtttgtatgttttgcaatgaagaattccttggaaacagatctgttattttgaaccacatggccagagaacatgctttcaacattggattgccagacaacattgtaaactgcaatgaatttttgtgtacattacagaaaaagcttgacaatttgcagtgcttgtactgtgagaagaccttcagggacaaaaatacacttaaagatcacatgaggaaaaaacagcatcgtaagattaatcctaagaacagagaatatgacagattttatgtcatcaattatttggaacttggaaaatcgtgggaagaagttcagttggaagatgatcgggagttgctggaccatcaggaagatgactggtctgattgggaagaacaccctgcctctgcagtctgcttattttgtgaaaagcaagcagaaacaattgagaagttgtatgtccacatggaggatgcacacgaatttgatcttctcaaaataaagtcagaacttggattaaatttctatcagcaagtgaaactggtcaattttattcggaggcaagttcaccaatgcagatgttatggctgccatgtgaagttcaaatccaaagcagacttaagaactcacatggaagaaactaaacacacttcgctgctccccgatagaaagacgtgggatcaactggagtattattttccaacctatgaaaatgacactctcctgtgtacactatctgacagtgaaagtgacctgacagctcaggaacaaaatgaaaatgttcccatcatcagtgaagatacatctaaactgtatgctttgaaacaaagcagtattttgaaccagttgctactataagagtacttgaaaacctagaagaaactaccacagaagcaatttttcatgtttttctcctatgagacagatatgaaagaacaatttaaatttgaacatcaacaaaagattggtccttggtgaaataaacttttcaaaaatgaatgttcttttcaaaaaataaagtagaaaaatgcacttactaagaacatgaaaaaaaatgaagtaggaaaataagatgaagactttgtattttggctgtaaagttttattgtgtgatcatcttaaattatctcacttcattaaactcataattatatatagaagtatatgtcaattacaaagaaatgaaatgttcaaattatttataaacctgatttttcaatcagtagtttcagtctcctccccaaggaccttcttcatccaacaagttgcaaaatttgaatatcccttctgtactatattgggtgagctgtaaatgtaatgactaaaagaaaagccacagaagaaagaagaaatggtcaaagacgtggataatatgcaaattggccattatattagaacaatcaagagctgactgtgttattaccactttctgcctagggtggccaaattccctagaaatagacatcaagccagttaacttcacttttccctgcaatttgtatgtcactaacatttaaatgccattttttaaaaacataaccacaataccattatgacacctaaaaaacattaacattaacttaatatcatctgttttcagtttttcccacttgtctcaaaatgtatgtttacaatattatcagtttcattactgatgaatattatatgcctcctgataagatgtactgaggaggacagaatatcacttttgtagatttataccaaaaatgcataatttggatataatgaagaaacagtcaaatccaagtttgaggctgggcacagtagctcatatctgtaatcccagcactttgggaggccaaggcagaggatcacatgaggtcaggagttcaagatcagcctggccaacgtggcaaaaccccatctctacgaaaaatacacagattagccaggcatggtggaatgcacctatagtcccagctacttgggaggctgaagcacaagaatcgcttgaatccaggaggcaaaagttgcagtgagccgagatcacaccactgcagttcagcctgggcaacagaccaagactctgtctcaaaaaaagg

SEQ ID NO: 442893 - DNA, 1667 bp, Homo sapiens
gtccagagcgcggcgtaggtgtggagaaaacattacgtcgacggggagttcgcctccagtagcgtttctactggtgccaccccgcctccgacccgccctgcggccctcccttttcttttctgccgggtaatggctgcttccaagacccagggggctgtcgcccgaatgcaggaagaccgtgatgggagctgcagcacagtcgggggtgtaggttatggggacagtaaggattgtatcctggagccgctttccctgccagaaagtccaggtggcaccaccactttagaaggttctccatctgtgccttgtattttctgtgaagaacattttcctgtggctgaacaagacaaacttctgaagcacatgattattgagcataagattgtcatagctgatgtcaagttggttgctgatttccaaaggtacattttatattggaggaaaaggttcactgaacagcccatcacagatttttgtagtgtaataagaattaattccactgctccatttgaagaacaagagaattattttttgttatgtgacgttttaccagaagatagaattcttagagaagagcttcagaaacagagactgagagaaattctggaacaacagcagcaagaacgaaatgataccaattttcatggcgtttgtatgttttgcaatgaagaattccttggaaacagatctgttattttgaaccacatggccagagaacatgctttcaacattggattgccagacaacattgtaaactgcaatgaatttttgtgtacattacagaaaaagcttgacaatttgcagtgcttgtactgtgagaagaccttcagggacaaaaatacacttaaagatcacatgaggaaaaaacagcatcgtaagattaatcctaagaacagagaatatgacagattttatgtcatcaattatttggaacttggaaaatcgtgggaagaagttcagttggaagatgatcgggagttgctggaccatcaggaagatgactggtctgattgggaagaacaccctgcctctgcagtctgcttattttgtgaaaagcaagcagaaacaattgagaagttgtatgtccacatggaggatgcacacgaatttgatcttctcaaaataaagtcagaacttggattaaatttctatcagcaagtgaaactggtcaattttattcggaggcaagttcaccaatgcagatgttatggctgccatgtgaagttcaaatccaaagcagacttaagaactcacatggaagaaactaaacacacttcgctgctccccgatagaaagacgtgggatcaactggagtattattttccaacctatgaaaatgacactctcctgtgtacactatctgacagtgaaagtgacctgacagctcaggaacaaaatgaaaatgttcccatcatcagtgaagatacatctaaactgtatgctttgaaacaaagcagtattttgaaccagttgctactataagagtacttgaaaacctagaagaaactaccacagaagcaatttttcatgtttttctcctatgagacagatatgaaagaacaatttaaatttgaacatcaacaaaagattggtccttggtgaaataaacttttcaaaaatgaatgttcttttcaaaaaataaagtagaaaaatgcacttactaagaa

SEQ ID NO: 442894 - DNA, 1677 bp, Homo sapiens
gtccagagcgcggcgtaggtgtggagaaaacattacgtcgacggggagttcgcctccagtagcgtttctactggtgccaccccgcctccgacccgccctgcggccctcccttttcttttctgccgggtaatggctgcttccaagacccagggggctgtcgcccgaatgcaggaagaccgtgatgggagctgcagcacagtcgggggtgtaggttatggggacagtaaggattgtatcctggagccgctttccctgccagaaagtccaggtggcaccaccactttagaaggttctccatctgtgccttgtattttctgtgaagaacattttcctgtggctgaacaagacaaacttctgaagcacatgattattgagcataagattgtcatagctgatgtcaagttggttgctgatttccaaaggtacattttatattggaggaaaaggttcactgaacagcccatcacagatttttgtagtgtaataagaattaattccactgctccatttgaagaacaagagaattattttttgttatgtgacgttttaccagaagatagaattcttagagaagagcttcagaaacagagactgagagaaattctggaacaacagcagcaagaacgaaatgataccaattttcatggcgtttgtatgttttgcaatgaagaattccttggaaacagatctgttattttgaaccacatggccagagaacatgctttcaacattggattgccagacaacattgtaaactgcaatgaatttttgtgtacattacagaaaaagcttgacaatttgcagtgcttgtactgtgagaagaccttcagggacaaaaatacacttaaagatcacatgaggaaaaaacagcatcgtaagattaatcctaagaacagagaatatgacagattttatgtcatcaattatttggaacttggaaaatcgtgggaagaagttcagttggaagatgatcgggagttgctggaccatcaggaagatgactggtctgattgggaagaacaccctgcctctgcagtctgcttattttgtgaaaagcaagcagaaacaattgagaagttgtatgtccacatggaggatgcacacgaatttgatcttctcaaaataaagtcagaacttggattaaatttctatcagcaagtgaaactggtcaattttattcggaggtattattttccaacctatgaaaatgacactctcctgtgtacactatctgacagtgaaagtgacctgacagctcaggaacaaaatgaaaatgttcccatcatcagtgaagatacatctaaactgtatgctttgaaacaaagcagtattttgaaccagttgctactataagagtacttgaaaacctagaagaaactaccacagaagcaatttttcatgtttttctcctatgagacagatatgaaagaacaatttaaatttgaacatcaacaaaagattggtccttggtgaaataaacttttcaaaaatgaatgttcttttcaaaaaataaagtagaaaaatgcacttactaagaacatgaaaaaaaatgaagtaggaaaataagatgaagactttgtattttggctgtaaagttttattgtgtgatcatcttaaattatctcacttcattaaactcataattatatatagaagtatatgtcaattacaaagaaa

SEQ ID NO: 442895 - DNA, 1806 bp, Homo sapiens
gtccagagcgcggcgtaggtgtggagaaaacattacgtcgacggggagttcgcctccagtagcgtttctactggtgccaccccgcctccgacccgccctgcggccctcccttttcttttctgccgggtaatggctgcttccaagacccagggggctgtcgcccgaatgcaggaagaccgtgatgggagctgcagcacagtcgggggtgtaggttatggggacagtaaggattgtatcctggagccgctttccctgccagaaagtccaggtggcaccaccactttagaaggttctccatctgtgccttgtattttctgtgaagaacattttcctgtggctgaacaagacaaacttctgaagcacatgattattgagcataagattgtcatagctgatgtcaagttggttgctgatttccaaaggtacattttatattggaggaaaaggttcactgaacagcccatcacagatttttgtagtgtaataagaattaattccactgctccatttgaagaacaagagaattattttttgttatgtgacgttttaccagaagatagaattcttagagaagagcttcagaaacagagactgagagaaattctggaacaacagcagcaagaacgaaatgataccaattttcatggcgtttgtatgttttgcaatgaagaattccttggaaacagatctgttattttgaaccacatggccagagaacatgctttcaacattggattgccagacaacattgtaaactgcaatgaatttttgtgtacattacagaaaaagcttgacaatttgcagtgcttgtactgtgagaagaccttcagggacaaaaatacacttaaagatcacatgaggaaaaaacagcatcgtaagattaatcctaagaacagagaatatgacagattttatgtcatcaattatttggaacttggaaaatcgtgggaagaagttcagttggaagatgatcgggagttgctggaccatcaggaagatgactggtctgattgggaagaacaccctgcctctgcagtctgcttattttgtgaaaagcaagcagaaacaattgagaagttgtatgtccacatggaggatgcacacgaatttgatcttctcaaaataaagtcagaacttggattaaatttctatcagcaagtgaaactggtcaattttattcggaggcaagttcaccaatgcagatgttatggctgccatgtgaagttcaaatccaaagcagacttaagaactcacatggaagaaactaaacacacttcgctgctccccgatagaaagacgtgggatcaactggagtattattttccaacctatgaaaatgacactctcctgtgtacactatctgacagtgaaagtgacctgacagctcaggaacaaaatgaaaatgttcccatcatcagtgaagatacatctaaactgtatgctttgaaacaaagcagtattttgaaccagttgctactataagagtacttgaaaacctagaagaaactaccacagaagcaatttttcatgtttttctcctatgagacagatatgaaagaacaatttaaatttgaacatcaacaaaagattggtccttggtgaaataaacttttcaaaaatgaatgttcttttcaaaaaataaagtagaaaaatgcacttactaagaacatgaaaaaaaatgaagtaggaaaataagatgaagactttgtattttggctgtaaagttttattgtgtgatcatcttaaattatctcacttcattaaactcataattatatatagaagtatatgtcaattacaaagaaa

SEQ ID NO: 442896 - DNA, 2262 bp, Homo sapiens
gtccagagcgcggcgtaggtgtggagaaaacattacgtcgacggggagttcgcctccagtagcgtttctactggtgccaccccgcctccgacccgccctgcggccctcccttttcttttctgccgggtaatggctgcttccaagacccagggggctgtcgcccgaatgcaggaagaccgtgatgggagctgcagcacagtcgggggtgtaggttatggggacagtaaggattgtatcctggagccgctttccctgccagaaagtccaggtggcaccaccactttagaaggttctccatctgtgccttgtattttctgtgaagaacattttcctgtggctgaacaagacaaacttctgaagcacatgattattgagcataagattgtcatagctgatgtcaagttggttgctgatttccaaaggtacattttatattggaggaaaaggttcactgaacagcccatcacagatttttgtagtgtaataagaattaattccactgctccatttgaagaacaagagaattattttttgttatgtgacgttttaccagaagatagaattcttagagaagagcttcagaaacagagactgagagaaattctggaacaacagcagcaagaacgaaatgataccaattttcatggcgtttgtatgttttgcaatgaagaattccttggaaacagatctgttattttgaaccacatggccagagaacatgctttcaacattggattgccagacaacattgtaaactgcaatgaatttttgtgtacattacagaaaaagcttgacaatttgcagtgcttgtactgtgagaagaccttcagggacaaaaatacacttaaagatcacatgaggaaaaaacagcatcgtaagattaatcctaagaacagagaatatgacagattttatgtcatcaattatttggaacttggaaaatcgtgggaagaagttcagttggaagatgatcgggagttgctggaccatcaggaagatgactggtctgattgggaagaacaccctgcctctgcagtctgcttattttgtgaaaagcaagcagaaacaattgagaagttgtatgtccacatggaggatgcacacgaatttgatcttctcaaaataaagtcagaacttggattaaatttctatcagcaagtgaaactggtcaattttattcggaggcaagttcaccaatgcagatgttatggctgccatgtgaagttcaaatccaaagcagacttaagaactcacatggaagaaactaaacacacttcgctgctccccgatagaaagacgtgggatcaactggagtattattttccaacctatgaaaatgacactctcctgtgtacactatctgacagtgaaagtgacctgacagctcaggaacaaaatgaaaatgttcccatcatcagtgaagatacatctaaactgtatgctttgaaacaaagcagtattttgaaccagttgctactataagagtacttgaaaacctagaagaaactaccacagaagcaatttttcatgtttttctcctatgagacagatatgaaagaacaatttaaatttgaacatcaacaaaagattggtccttggtgaaataaacttttcaaaaatgaatgttcttttcaaaaaataaagtagaaaaatgcacttactaagaacatgaaaaaaaatgaagtaggaaaataagatgaagactttgtattttggctgtaaagttttattgtgtgatcatcttaaattatctcacttcattaaactcataattatatatagaagtatatgtcaattacaaagaaaaaagaagagaaaaagaaaaagaaaaaaagaaaaagaagaaaaagaaagagagaaaaagagaaagaagaaagaggaggaagaagagaagaggagagaggaagaggagaagaaaagagagagagagggaagaggaggtgacactaaagacaaaagaagcaaagacagcacatgcagagcagggcagacgcagataaatagattacgtaacataaaggagatgcgcgacacgcacaagaacggaagagaactgactgcagcctctcgcggaggatgacagcgaacgcacgcaaaaaggaagacaagcgagaagggcaagagaaagaggagggcggcgggcaagcggccagccacacaaggcggaggggaaggacagaagagtcgaggtgcagagcagagtgctgcaaggaggcaccaaaaacaggagagggggaagcgacagagcgagaggcagagcag

SEQ ID NO: 442897 - DNA, 1174 bp, Homo sapiens
gtccagagcgcggcgtaggtgtggagaaaacattacgtcgacggggagttcgcctccagtagcgtttctactggtgccaccccgcctccgacccgccctgcggccctcccttttcttttctgccgggtaatggctgcttccaagacccagggggctgtcgcccgaatgcaggaagaccgtgatgggagctgcagcacagtcgggggtgtaggttatggggacagtaaggattgtatcctggagccgctttccctgccagaaagtccaggtggcaccaccactttagaaggttctccatctgtgccttgtattttctgtgaagaacattttcctgtggctgaacaagacaaacttctgaagcacatgattattgagcataagattgtcatagctgatgtcaagttggttgctgatttccaaaggtacattttatattggaggaaaaggttcactgaacagcccatcacagatttttgtagtgtaataagaattaattccactgctccatttgaagaacaagagaattattttttgttatgtgacgttttaccagaagatagaattcttagagaagagcttcagaaacagagactgagagaaattctggaacaacagcagcaagaacgaaatgataccaattttcatggcgtttgtatgttttgcaatgaagaattccttggaaacagatctgttattttgaaccacatggccagagaacatgctttcaacattggattgccagacaacattgtaaactgcaatgaatttttgtgtacattacagaaaaagcttgacaatttgcagtgcttgtactgtgagaagaccttcagggacaaaaatacacttaaagatcacatgaggaaaaaacagcatcgtaagattaatcctaagaacagagaatatgacagattttatgtcatcaattatttggtaaggctttcttttcataacttaaaatttgattgcagtactgcaaacaaaatctttctgaggaccaactaatatttgaataagcaattattgcaaaagtcaaaatgtaattgaggggcacattcaagtagtgattagctttgaaatggttagagtacaagacatttgatttgacttgtcttttatttgacagtgtttatgtagtaaaaatgtcatgtctctagaactcacagtcatcttgacc

SEQ ID NO: 442898 - DNA, 1586 bp, Homo sapiens
ctggtggcatagggcagacacgcctgcagacattctctgggaaagggcagcagcagccaggtgtggcagtgacagggaggtgtgaatgaggcaggatgaactggacaggtttgtacaccttgctcagtggcgtgaaccggcattctactgccattggccgagtatggctctcggtcatcttcatcttcagaatcatggtgctggtggtggctgcagagagtgtgtggggtgatgagaaatcttccttcatctgcaacacactccagcctggctgcaacagcgtttgctatgaccaattcttccccatctcccatgtgcggctgtggtccctgcagctcatcctagtttccaccccagctctcctcgtggccatgcacgtggctcaccagcaacacatagagaagaaaatgctacggcttgagggccatggggaccccctacacctggaggaggtgaagaggcacaaggtccacatctcagggacactgtggtggacctatgtcatcagcgtggtgttccggctgttgtttgaggccgtcttcatgtatgtcttttatctgctctaccctggctatgccatggtgcggctggtcaagtgcgacgtctacccctgccccaacacagtggactgcttcgtgtcccgccccaccgagaaaaccgtcttcaccgtcttcatgctagctgcctctggcatctgcatcatcctcaatgtggccgaggtggtgtacctcatcatccgggcctgtgcccgccgagcccagcgccgctccaatccaccttcccgcaagggctcgggcttcggccaccgcctctcacctgaatacaagcagaatgagatcaacaagctgctgagtgagcaggatggctccctgaaagacatactgcgccgcagccctggcaccggggctgggctggctgaaaagagcgaccgctgctcggcctgctgatgccacataccaggcaacctcccatcccacccccgaccctgccctgggcgagcccctccttctcccctgccggtgcacaggcctctgcctgctggggattactcgatcaaaaccttccttccctggctacttcccttcctcccggggccttccttttgaggagctggaggggtggggagctagaggccacctatgccagtgctcaaggttactgggagtgtgggctgcccttgttgcctgcacccttccctcttccctctccctctctctgggaccactgggtacaagagatgggatgctccgacagcgtctccaattatgaaactaatcttaaccctgtgctgtcagataccctgtttctggagtcacatcagtgaggagggatgtgggtaagaggagcagagggcaggggtgctgtggacatgtgggtggagaagggagggtggccagcactagtaaaggaggaatagtgcttgctggccacaaggaaaaggaggaggtgtctggggtgagggagttagggagagagaagcaggcagataagttggagcaggggttggtcaaggccacctctgcctctagtccccaaggcctctctctgcctgaaatgttacacattaaacaggattttacagtaaa

SEQ ID NO: 442899 - DNA, 1639 bp, Homo sapiens
agcatatgactccccagcgggggcggtgatgaattgggacgcaggcgcggagcccagggaccactccccctgcacagacatgagaccataggggacctgtctgggtggcctcagggataggcgctccccaaggtgtgaatgaggcaggatgaactggacaggtttgtacaccttgctcagtggcgtgaaccggcattctactgccattggccgagtatggctctcggtcatcttcatcttcagaatcatggtgctggtggtggctgcagagagtgtgtggggtgatgagaaatcttccttcatctgcaacacactccagcctggctgcaacagcgtttgctatgaccaattcttccccatctcccatgtgcggctgtggtccctgcagctcatcctagtttccaccccagctctcctcgtggccatgcacgtggctcaccagcaacacatagagaagaaaatgctacggcttgagggccatggggaccccctacacctggaggaggtgaagaggcacaaggtccacatctcagggacactgtggtggacctatgtcatcagcgtggtgttccggctgttgtttgaggccgtcttcatgtatgtcttttatctgctctaccctggctatgccatggtgcggctggtcaagtgcgacgtctacccctgccccaacacagtggactgcttcgtgtcccgccccaccgagaaaaccgtcttcaccgtcttcatgctagctgcctctggcatctgcatcatcctcaatgtggccgaggtggtgtacctcatcatccgggcctgtgcccgccgagcccagcgccgctccaatccaccttcccgcaagggctcgggcttcggccaccgcctctcacctgaatacaagcagaatgagatcaacaagctgctgagtgagcaggatggctccctgaaagacatactgcgccgcagccctggcaccggggctgggctggctgaaaagagcgaccgctgctcggcctgctgatgccacataccaggcaacctcccatcccacccccgaccctgccctgggcgagcccctccttctcccctgccggtgcacaggcctctgcctgctggggattactcgatcaaaaccttccttccctggctacttcccttcctcccggggccttccttttgaggagctggaggggtggggagctagaggccacctatgccagtgctcaaggttactgggagtgtgggctgcccttgttgcctgcacccttccctcttccctctccctctctctgggaccactgggtacaagagatgggatgctccgacagcgtctccaattatgaaactaatcttaaccctgtgctgtcagataccctgtttctggagtcacatcagtgaggagggatgtgggtaagaggagcagagggcaggggtgctgtggacatgtgggtggagaagggagggtggccagcactagtaaaggaggaatagtgcttgctggccacaaggaaaaggaggaggtgtctggggtgagggagttagggagagagaagcaggcagataagttggagcaggggttggtcaaggccacctctgcctctagtccccaaggcctctctctgcctgaaatgttacacattaaacaggattttacagtaaa

SEQ ID NO: 442900 - DNA, 1793 bp, Homo sapiens
agcatatgactccccagcgggggcggtgatgaattgggacgcaggcgcggagcccagggaccactccccctgcacagacatgagaccataggggacctgtctgggtggcctcagggataggcgctccccaaggtgtgaatgaggcaggatgaactggacaggtttgtacaccttgctcagtggcgtgaaccggcattctactgccattggccgagtatggctctcggtcatcttcatcttcagaatcatggtgctggtggtggctgcagagagtgtgtggggtgatgagaaatcttccttcatctgcaacacactccagcctggctgcaacagcgtttgctatgaccaattcttccccatctcccatgtgcggctgtggtccctgcagctcatcctagtttccaccccagctctcctcgtggccatgcacgtggctcaccagcaacacatagagaagaaaatgctacggcttgagggccatggggaccccctacacctggaggaggtgaagaggcacaaggtccacatctcagggacactgtggtggacctatgtcatcagcgtggtgttccggctgttgtttgaggccgtcttcatgtatgtcttttatctgctctaccctggctatgccatggtgcggctggtcaagtgcgacgtctacccctgccccaacacagtggactgcttcgtgtcccgccccaccgagaaaaccgtcttcaccgtcttcatgctagctgcctctggcatctgcatcatcctcaatgtggccgaggtggtgtacctcatcatccgggcctgtgcccgccgagcccagcgccgctccaatccaccttcccgcaagggctcgggcttcggccaccgcctctcacctgaatacaagcagaatgagatcaacaagctgctgagtgagcaggatggctccctgaaagacatactgcgccgcagccctggcaccggggctgggctggctgaaaagagcgaccgctgctcggcctgctgatgccacataccaggcaacctcccatcccacccccgaccctgccctgggcgagcccctccttctcccctgccggtgcacaggcctctgcctgctggggattactcgatcaaaaccttccttccctggctacttcccttcctcccggggccttccttttgaggagctggaggggtggggagctagaggccacctatgccagtgctcaaggttactgggagtgtgggctgcccttgttgcctgcacccttccctcttccctctccctctctctgggaccactgggtacaagagatgggatgctccgacagcgtctccaattatgaaactaatcttaaccctgtgctgtcagataccctgtttctggagtcacatcagtgaggagggatgtgggtaagaggagcagagggcaggggtgctgtggacatgtgggtggagaagggagggtggccagcactagtaaaggaggaatagtgcttgctggccacaaggaaaaggaggaggtgtctggggtgagggagttagggagagagaagcaggcagataagttggagcaggggttggtcaaggccacctctgcctctagtccccaaggcctctctctgcctgaaatgttacacattaaacaggattttacagtaaacacccctgccctctgctcctcttacccacatccctcctcactgatgtgactccagaaacagggtatctgacagcacagggttaagattagtttcataattggagacgctgtcggagcatcccatctcttgtacccagtggtcccagagtcgacg

SEQ ID NO: 442901 - DNA, 1997 bp, Homo sapiens
  misc_feature (1471)..(1471): n is a, c, g, or t
agcatatgactccccagcgggggcggtgatgaattgggacgcaggcgcggagcccagggaccactccccctgcacagacatgagaccataggggacctgtctgggtggcctcagggataggcgctccccaaggtgtgaatgaggcaggatgaactggacaggtttgtacaccttgctcagtggcgtgaaccggcattctactgccattggccgagtatggctctcggtcatcttcatcttcagaatcatggtgctggtggtggctgcagagagtgtgtggggtgatgagaaatcttccttcatctgcaacacactccagcctggctgcaacagcgtttgctatgaccaattcttccccatctcccatgtgcggctgtggtccctgcagctcatcctagtttccaccccagctctcctcgtggccatgcacgtggctcaccagcaacacatagagaagaaaatgctacggcttgagggccatggggaccccctacacctggaggaggtgaagaggcacaaggtccacatctcagggacactgtggtggacctatgtcatcagcgtggtgttccggctgttgtttgaggccgtcttcatgtatgtcttttatctgctctaccctggctatgccatggtgcggctggtcaagtgcgacgtctacccctgccccaacacagtggactgcttcgtgtcccgccccaccgagaaaaccgtcttcaccgtcttcatgctagctgcctctggcatctgcatcatcctcaatgtggccgaggtggtgtacctcatcatccgggcctgtgcccgccgagcccagcgccgctccaatccaccttcccgcaagggctcgggcttcggccaccgcctctcacctgaatacaagcagaatgagatcaacaagctgctgagtgagcaggatggctccctgaaagacatactgcgccgcagccctggcaccggggctgggctggctgaaaagagcgaccgctgctcggcctgctgatgccacataccaggcaacctcccatcccacccccgaccctgccctgggcgagcccctccttctcccctgccggtgcacaggcctctgcctgctggggattactcgatcaaaaccttccttccctggctacttcccttcctcccggggccttccttttgaggagctggaggggtggggagctagaggccacctatgccagtgctcaaggttactgggagtgtgggctgcccttgttgcctgcacccttccctcttccctctccctctctctgggaccactgggtacaagagatgggatgctccgacagcgtctccaattatgaaactaatcttaaccctgtgctgtcagataccctgtttctggagtcacatcagtgaggagggatgtgggtaagaggagcagagggtcacgggggtcacttgctagggaccaattgtctagtggtgttgaggaacgtaaaaggcggaaagnggttggccctacgacactagtaaaggaggaatagtgcttgctggccacaaggaaaaggaggaggtgtctggggtgagggagttagggagagagaagcaggcagataagttggagcaggggttggtcaaggccacctctgcctctagtccccaaggcctctctctgcctgaaatgttacacattaaacaggattttacagtaaacagtaaatgaagaggtggcttgtgtgtttgtcaagttctttctcctgcaacctctgacctcccccaggatgagctggccttggttttttactgattaagaaaggaacagggcaaaagaagtagttacttgagtagctgaagctgcaaatgaggaaatcactgtacttctgggccgcagagccagccccggagccattcctccctgttgcttttgttgttgtggttcttgtctttttcattgtctaataacagctttattgggatttagtttacatacctccttcctctgattttgaaaagattaaaaatgacaactccctctg

SEQ ID NO: 442902 - DNA, 1573 bp, Homo sapiens
cttatgcatagtacgaggccgggtgttagactgtctgggtggcctcagggataggcgctccccaaggtgtgaatgaggcaggatgaactggacaggtttgtacaccttgctcagtggcgtgaaccggcattctactgccattggccgagtatggctctcggtcatcttcatcttcagaatcatggtgctggtggtggctgcagagagtgtgtggggtgatgagaaatcttccttcatctgcaacacactccagcctggctgcaacagcgtttgctatgaccaattcttccccatctcccatgtgcggctgtggtccctgcagctcatcctagtttccaccccagctctcctcgtggccatgcacgtggctcaccagcaacacatagagaagaaaatgctacggcttgagggccatggggaccccctacacctggaggaggtgaagaggcacaaggtccacatctcagggacactgtggtggacctatgtcatcagcgtggtgttccggctgttgtttgaggccgtcttcatgtatgtcttttatctgctctaccctggctatgccatggtgcggctggtcaagtgcgacgtctacccctgccccaacacagtggactgcttcgtgtcccgccccaccgagaaaaccgtcttcaccgtcttcatgctagctgcctctggcatctgcatcatcctcaatgtggccgaggtggtgtacctcatcatccgggcctgtgcccgccgagcccagcgccgctccaatccaccttcccgcaagggctcgggcttcggccaccgcctctcacctgaatacaagcagaatgagatcaacaagctgctgagtgagcaggatggctccctgaaagacatactgcgccgcagccctggcaccggggctgggctggctgaaaagagcgaccgctgctcggcctgctgatgccacataccaggcaacctcccatcccacccccgaccctgccctgggcgagcccctccttctcccctgccggtgcacaggcctctgcctgctggggattactcgatcaaaaccttccttccctggctacttcccttcctcccggggccttccttttgaggagctggaggggtggggagctagaggccacctatgccagtgctcaaggttactgggagtgtgggctgcccttgttgcctgcacccttccctcttccctctccctctctctgggaccactgggtacaagagatgggatgctccgacagcgtctccaattatgaaactaatcttaaccctgtgctgtcagataccctgtttctggagtcacatcagtgaggagggatgtgggtaagaggagcagagggcaggggtgctgtggacatgtgggtggagaagggagggtggccagcactagtaaaggaggaatagtgcttgctggccacaaggaaaaggaggaggtgtctggggtgagggagttagggagagagaagcaggcagataagttggagcaggggttggtcaaggccacctctgcctctagtccccaaggcctctctctgcctgaaatgttacacattaaacaggattttacagtaaa

SEQ ID NO: 442903 - DNA, 1117 bp, Homo sapiens
agcatatgactccccagcgggggcggtgatgaattgggacgcaggcgcggagcccagggaccactccccctgcacagacatgagaccataggggacctgtctgggtggcctcagggataggcgctccccaaggtgtgaatgaggcaggatgaactggacaggtttgtacaccttgctcagtggcgtgaaccggcattctactgccattggccgagtatggctctcggtcatcttcatcttcagaatcatggtgctggtggtggctgcagagagtgtgtggggtgatgagaaatcttccttcatctgcaacacactccagcctggctgcaacagcgtttgctatgaccaattcttccccatctcccatgtgcggctgtggtccctgcagctcatcctagtttccaccccagctctcctcgtggccatgcacgtggctcaccagcaacacatagagaagaaaatgctacggcttgagggccatggggaccccctacacctggaggaggtgaagaggcacaaggtccacatctcagggacactgtggtggacctatgtcatcagcgtggtgttccggctgttgtttgaggccgtcttcatgtatgtcttttatctgctctaccctggctatgccatggtgcggctggtcaagtgcgacgtctacccctgccccaacacagtggactgcttcgtgtcccgccccaccgagaaaaccgtcttcaccgtcttcatgctagctgcctctggcatctgcatcatcctcaatgtggccgaggtggtgtacctcatcatccgggcctgtgcccgccgagcccagcgccgctccaatccaccttcccgcaagggctcgggcttcggccaccgcctctcacctgaatacaagcagaatgagatcaacaagctgctgagtgagcaggatggctccctgaaagacatactgcgccgcagccctggcaccggggctgggctggctgaaaagagcgaccgctgctcggcctgctgatgccacataccaggcagataagttggagcaggggttggtcaaggccacctctgcctctagtccccaaggcctctctctgcctgaaatgttacacattaaacaggattttacagtaaa

SEQ ID NO: 442904 - DNA, 1032 bp, Homo sapiens
agcatatgactccccagcgggggcggtgatgaattgggacgcaggcgcggagcccagggaccactccccctgcacagacatgagaccataggggacctgtctgggtggcctcagggataggcgctccccaaggtgtgaatgaggcaggatgaactggacaggtttgtacaccttgctcagtggcgtgaaccggcattctactgccattggccgagtatggctctcggtcatcttcatcttcagaatcatggtgctggtggtggctgcagagagtgtgtggggtgatgagaaatcttccttcatctgcaacacactccagcctggctgcaacagcgtttgctatgaccaattcttccccatctcccatgtgcggctgtggtccctgcagctcatcctagtttccaccccagctctcctcgtggccatgcacgtggctcaccagcaacacatagagaagaaaatgctacggcttgagggccatggggaccccctacacctggaggaggtgaagaggcacaaggtccacatctcagggacactgtggtggacctatgtcatcagcgtggtgttccggctgttgtttgaggccgtcttcatgtatgtcttttatctgctctaccctggctatgccatggtgcggctctgcctctagtccccaaggcctctctctgcctgaaatgttacacattaaacaggattttacagtaaacagtaaatgaagaggtggcttgtgtgtttgtcaagttctttctcctgcaacctctgacctcccccaggatgagctggccttggttttttactgattaagaaaggaacagggcaaaagaagtagttacttgagtagctgaagctgcaaatgaggaaatcactgtacttctgggccgcagagccagccccggagccattcctccctgttgcttttgttgttgtggttcttgtctttttcattgtctaataacagctttattgggatttagtttacatacctccttcctctgattttgaaaagattaaaaatgacaactccctctg

SEQ ID NO: 442905 - DNA, 509 bp, Homo sapiens
agcatatgactccccagcgggggcggtgatgaattgggacgcaggcgcggagcccagggaccactccccctgcacagacatgagaccataggggacctgtctgggtggcctcagggataggcgctccccaaggtgtgaatgaggcaggatgaactggacaggtttgtacaccttgctcagtggcgtgaaccggcattctactgccattggccgagtatggctctcggtcatcttcatcttcagaatcatggtgctggtggtggctgcagagagtgtgtggggtgatgagaaatcttccttcatctgcaacacactccagcctggctgcaacagcgtttgctatgaccaattcttccccatctcccatgtgcggctgtggtccctgcactctcctcgtggccatgcacgtggctcaccagcaacacatagagaagaaaatgctctgcctctagtccccaaggcctctctctgcctgaaatgttacacattaaacaggattttacagtaaa

SEQ ID NO: 442906 - DNA, 868 bp, Homo sapiens
agcatatgactccccagcgggggcggtgatgaattgggacgcaggcgcggagcccagggaccactccccctgcacagacatgagaccataggggacctgtctgggtggcctcagggataggcgctccccaaggtgtgaatgaggcaggatgaactggacaggtttgtacaccttgctcagtggcgtgaaccggcattctactgccattggccgagtatggctctcggtcatcttcatcttcagaatcatggtgctggtggtggctgcagagagtgtgtggggtgatgagaaatcttccttcatctgcaacacactccagcctggctgcaacagcgtttgctatgaccaattcttccccatctcccatgtgcggctgtggtccctgcagctcatcctagtttccaccccagctctcctcgtggccatgcacgtggctcaccagcaacacatagagaagaaaatgctacggcttgagggccatggggaccccctacacctggaggaggtgaagaggcacaaggtccacatctcagggacactgtggtggacctatgtcatcagcgtggtgttccggctgttgtttgaggccgtcttcatgtatgtcttttatctgctctaccctggctatgccatggtgcggctggtcaagtgcgacgtctacccctgccccaacacagtggactgcttcgtgtcccgccccaccgagaaaaccgtcttcaccgtcttcatgctagctgcctctggcatctgcatcatcctcaatgtggccgaggtggtgtacctcatcatccgggcctgtgcccgccgagcccagggcgtcaatcacacttccgagggcggttggcccgccttccttggtcagggggtc

SEQ ID NO: 442907 - DNA, 1889 bp, Homo sapiens
agcatatgactccccagcgggggcggtgatgaattgggacgcaggcgcggagcccagggaccactccccctgcacagacatgagaccataggggacctgtctgggtggcctcagggataggcgctccccaaggtgtgaatgaggcaggatgaactggacaggtttgtacaccttgctcagtggcgtgaaccggcattctactgccattggccgagtatggctctcggtcatcttcatcttcagaatcatggtgctggtggtggctgcagagagtgtgtggggtgatgagaaatcttccttcatctgcaacacactccagcctggctgcaacagcgtttgctatgaccaattcttccccatctcccatgtgcggctgtggtccctgcagctcatcctagtttccaccccagctctcctcgtggccatgcacgtggctcaccagcaacacatagagaagaaaatgctacggcttgagggccatggggaccccctacacctggaggaggtgaagaggcacaaggtccacatctcagggacactgtggtggacctatgtcatcagcgtggtgttccggctgttgtttgaggccgtcttcatgtatgtcttttatctgctctaccctggctatgccatggtgcggctggtcaagtgcgacgtctacccctgccccaacacagtggactgcttcgtgtcccgccccaccgagaaaaccgtcttcaccgtcttcatgctagctgcctctggcatctgcatcatcctcaatgtggccgaggtggtgtacctcatcatccgggcctgtgcccgccgagcccagcgccgctccaatccaccttcccgcaagggctcgggcttcggccaccgcctctcacctgaatacaagcagaatgagatcaacaagctgctgagtgagcaggatggctccctgaaagacatactgcgccgcagccctggcaccggggctgggctggctgaaaagagcgaccgctgctcggcctgctgatgccacataccaggcaacctcccatcccacccccgaccctgccctgggcgagcccctccttctcccctgccggtgcacaggcctctgcctgctggggattactcgatcaaaaccttccttccctggctacttcccttcctcccggggccttccttttgaggagctggaggggtggggagctagaggccacctatgccagtgctcaaggttactgggagtgtgggctgcccttgttgcctgcacccttccctcttccctctccctctctctgggaccactgggtacaagagatgggatgctccgacagcgtctccaattatgaaactaatcttaaccctgtgctgtcagataccctgtttctggagtcacatcagtgaggagggatgtgggtaagaggagcagagggcaggggtgctgtggacatgtgggtggagaagggagggtggccagcactagtaaaggaggaatagtgcttgctggccacaaggaaaaggaggaggtgtctggggtgagggagttagggagagagaagcaggcagataagttggagcaggggttggtcaaggccacctctgcctctagtccccaaggcctctctctgcctgaaatgttacacattaaacaggattttacagtaaaaaaaaacaaaacaaaaaaaaaaaaaacaacaccaacaacaaccaccaaaaagaccagagaaagaaaaagaacagagacacagagaaaaaaaaaggacaagaaagcacaaagaagaaacacaacaagaaagagcacgagaaaacacaccacaaacaaacccacaggaaaaccgaagaaagaacaacacaaaggaagagaagagaaagagaacaaaacagaaaccagagaaaaaaaaatacaacgaacacgt

SEQ ID NO: 442908 - DNA, 1962 bp, Homo sapiens
agcatatgactccccagcgggggcggtgatgaattgggacgcaggcgcggagcccagggaccactccccctgcacagacatgagaccataggggacctgtctgggtggcctcagggataggcgctccccaaggtgtgaatgaggcaggatgaactggacaggtttgtacaccttgctcagtggcgtgaaccggcattctactgccattggccgagtatggctctcggtcatcttcatcttcagaatcatggtgctggtggtggctgcagagagtgtgtggggtgatgagaaatcttccttcatctgcaacacactccagcctggctgcaacagcgtttgctatgaccaattcttccccatctcccatgtgcggctgtggtccctgcagctcatcctagtttccaccccagctctcctcgtggccatgcacgtggctcaccagcaacacatagagaagaaaatgctacggcttgagggccatggggaccccctacacctggaggaggtgaagaggcacaaggtccacatctcagggacactgtggtggacctatgtcatcagcgtggtgttccggctgttgtttgaggccgtcttcatgtatgtcttttatctgctctaccctggctatgccatggtgcggctggtcaagtgcgacgtctacccctgccccaacacagtggactgcttcgtgtcccgccccaccgagaaaaccgtcttcaccgtcttcatgctagctgcctctggcatctgcatcatcctcaatgtggccgaggtggtgtacctcatcatccgggcctgtgcccgccgagcccagcgccgctccaatccaccttcccgcaagggctcgggcttcggccaccgcctctcacctgaatacaagcagaatgagatcaacaagctgctgagtgagcaggatggctccctgaaagacatactgcgccgcagccctggcaccggggctgggctggctgaaaagagcgaccgctgctcggcctgctgatgccacataccaggcaacctcccatcccacccccgaccctgccctgggcgagcccctccttctcccctgccggtgcacaggcctctgcctgctggggattactcgatcaaaaccttccttccctggctacttcccttcctcccggggccttccttttgaggagctggaggggtggggagctagaggccacctatgccagtgctcaaggttactgggagtgtgggctgcccttgttgcctgcacccttccctcttccctctccctctctctgggaccactgggtacaagagatgggatgctccgacagcgtctccaattatgaaactaatcttaaccctgtgctgtcagataccctgtttctggagtcacatcagtgaggagggatgtgggtaagaggagcagagggcaggggtgctgtggacatgtgggtggagaagggagggtggccagcactagtaaaggaggaatagtgcttgctggccacaaggaaaaggaggaggtgtctggggtgagggagttagggagagagaagcaggcagataagttggagcaggggttggtcaaggccacctctgcctctagtccccaaggcctctctctgcctgaaatgttacacattaaacaggattttacagtaaacagtaaatgaagaggtggcttgtgtgtttgtcaagttctttctcctgcaacctctgacctcccccaggatgagctggccttggttttttactgattaagaaaggaacagggcaaaagaagtagttacttgagtagctgaagctgcaaatgaggaaatcactgtacttctgggccgcagagccagccccggagccattcctccctgttgcttttgttgttgtggttcttgtctttttcattgtctaataacagctttattgggatttagtttacatacctccttcctctgattttgaaaagattaaaaatgacaactccctctg

SEQ ID NO: 442909 - DNA, 1259 bp, Homo sapiens
agcatatgactccccagcgggggcggtgatgaattgggacgcaggcgcggagcccagggaccactccccctgcacagacatgagaccataggggacctgtctgggtggcctcagggataggcgctccccaaggtgtgaatgaggcaggatgaactggacaggtttgtacaccttgctcagtggcgtgaaccggcattctactgccattggccgagtatggctctcggtcatcttcatcttcagaatcatggtgctggtggtggctgcagagagtgtgtggggtgatgagaaatcttccttcatctgcaacacactccagcctggctgcaacagcgtttgctatgaccaattcttccccatctcccatgtgcggctgtggtccctgcagctcatcctagtttccaccccagctctcctcgtggccatgcacgtggctcaccagcaacacatagagaagaaaatgctacggcttgagggccatggggaccccctacacctggaggaggtgaagaggcacaaggtccacatctcagggacactgtggtggacctatgtcatcagcgtggtgttccggctgttgtttgaggccgtcttcatgtatgtcttttatctgctctaccctggctatgccatggtgcggctggtcaagtgcgacgtctacccctgccccaacacagtggactgcttcgtgtcccgccccaccgagaaaaccgtcttcaccgtcttcatgctagctgcctctggcatctgcatcatcctcaatgtggccgaggtggtgtacctcatcatccgggcctgtgcccgccgagcccagcgccgctccaatccaccttcccgcaagggctcgggcttcggccaccgcctctcacctgaatacaagcagaatgagatcaacaagctgctgagtgagcaggatggctccctgaaagacatactgcgccgcagccctggcaccggggctgggctggctgaaaagagcgaccgctgctcggcctgctgatgccacataccaggcaacctcccatcccacccccgaccctgccctgggcgagcccctccttctcccctgccggtgcacaggcctctgcctgctggggattactcgatcaaaaccttccttccctggctacttcccttcctcccggggccttccttttgaggagctggaggggtggggagctagaggccacctctgcctctagtccccaaggcctctctctgcctgaaatgttacacattaaacaggattttacagtaaa

SEQ ID NO: 442910 - DNA, 1569 bp, Homo sapiens
ggctgtacgctccggatttaatgggattgcagcagcagccaggtgtggcagtgacaggcaaggtgtgaatgaggcaggatgaactggacaggtttgtacaccttgctcagtggcgtgaaccggcattctactgccattggccgagtatggctctcggtcatcttcatcttcagaatcatggtgctggtggtggctgcagagagtgtgtggggtgatgagaaatcttccttcatctgcaacacactccagcctggctgcaacagcgtttgctatgaccaattcttccccatctcccatgtgcggctgtggtccctgcagctcatcctagtttccaccccagctctcctcgtggccatgcacgtggctcaccagcaacacatagagaagaaaatgctacggcttgagggccatggggaccccctacacctggaggaggtgaagaggcacaaggtccacatctcagggacactgtggtggacctatgtcatcagcgtggtgttccggctgttgtttgaggccgtcttcatgtatgtcttttatctgctctaccctggctatgccatggtgcggctggtcaagtgcgacgtctacccctgccccaacacagtggactgcttcgtgtcccgccccaccgagaaaaccgtcttcaccgtcttcatgctagctgcctctggcatctgcatcatcctcaatgtggccgaggtggtgtacctcatcatccgggcctgtgcccgccgagcccagcgccgctccaatccaccttcccgcaagggctcgggcttcggccaccgcctctcacctgaatacaagcagaatgagatcaacaagctgctgagtgagcaggatggctccctgaaagacatactgcgccgcagccctggcaccggggctgggctggctgaaaagagcgaccgctgctcggcctgctgatgccacataccaggcaacctcccatcccacccccgaccctgccctgggcgagcccctccttctcccctgccggtgcacaggcctctgcctgctggggattactcgatcaaaaccttccttccctggctacttcccttcctcccggggccttccttttgaggagctggaggggtggggagctagaggccacctatgccagtgctcaaggttactgggagtgtgggctgcccttgttgcctgcacccttccctcttccctctccctctctctgggaccactgggtacaagagatgggatgctccgacagcgtctccaattatgaaactaatcttaaccctgtgctgtcagataccctgtttctggagtcacatcagtgaggagggatgtgggtaagaggagcagagggcaggggtgctgtggacatgtgggtggagaagggagggtggccagcactagtaaaggaggaatagtgcttgctggccacaaggaaaaggaggaggtgtctggggtgagggagttagggagagagaagcaggcagataagttggagcaggggttggtcaaggccacctctgcctctagtccccaaggcctctctctgcctgaaatgttacacattaaacaggattttacagtaaa

SEQ ID NO: 442911 - DNA, 539 bp, Homo sapiens
ccaccacacctgacctcgtaaaattcttaaacgatctatactcagttgtcttacagttgcctagattcttgttccatttaaagaaactgaaatttgaaatcacaaatgtggattatggatatgatgggttatggatatgatatatttgtaatgaatatgcaagagagaacatttgaaacattaattagtagaaatgtacttaaagaagaggccttggttttttaccgtaatattggcaggtgacatgtatttgttttgagtaaaaatcaaatatttcagttacatttttaaaattacctgatatactgtactttttcatgtaaccagtcagccctgagtcctatttgtgttagataagtttttaccaatcccagaaggagatagaggacaagcttttatatgcttcggctgaagaaaacctttctccaaagaagtaattatctgatcctcctataaagggccagatagtaaatattttagattttgcaggctgaagtagaatcaagggtaatacgtacgttctgatataacaagagaga

SEQ ID NO: 442912 - DNA, 307 bp, Homo sapiens
tcttggcctctaaggactccacagactgttagacatgtgtgtcctctggacggtagctccccagggacaaaagaattgttgacttcctgtcctgcactctaggatttccttctgggacagttcttctaaatcagacctgtatccctcttgctgcaccctatgagcacggtgctctaagatcgcacatccctgccttgcttcccctgggtctgagggagtctaggggcttgggattaggagcaggagtgtttccctggccctcccccatggtctgtgtgttgtcccccccccaccccccacccccacc

SEQ ID NO: 442913 - DNA, 677 bp, Homo sapiens
agaggcgctcctcacttaccaggcggggcggccgggcagaggcactcctcacctcccagacggggcggccgggcagagacgcccctcacctcccagaaggggcggccgggcagaggcacccacttcccagacagggcggccgggcagaggcgctcctcacttcccaggcggggcggccaaaattttatccttttaaaattaatttttctaccacatgattgaattttttatttgaaactccagtgaattttgtactgttacaaagacatgaaaatctttgataatggtcttaattaaataggaagatctattaatgttctaacatgttttgtttgaaattaaaataaatacagctggtataatcactgttctgccttccacacactggaaataggcatagatttagaaagcagtgcagtagcaaatgaggtctaatatgatttctaatgaatttggatagtagatctggatcttagaactctctattttgctgtcactgagtccagctatgcttatcctatgtggtttgttctatgatcaattgacatttcttcttaggtttgaaataattataaggaaagtaatttcaatagctcaattatggtcattaagaagaaagcatcttagaccagcgctttatcagtacatcatatttagacgtacagaatttctatgtg

SEQ ID NO: 442914 - DNA, 2607 bp, Homo sapiens
gactgcggtgagggggcgagccgtgaagatggcggcagtggtggaggtggaggttggaggtggtgctgctggggaacgggagctggatgagggtcgagcacgcacgcatgcatgccaagcaccgtggccatgaagctatgcatgctgaaatggtcctcatcctcatcgcaaccttggtggtggcccagctgctcctggtgcagtggaagcagaggcacccacgctcctacaatatggtgaccctctttcagatgtgggttgttcccctctatttcacagtgaagctgcactggtggaggttcctagtgatctggatcttgttctctgctgtcacagcctttgttaccttccgagccacccgaaaacctctagtacagacaaccccaaggttggtttataagtggttcctgctaatctataaaatcagctatgccactggcattgttggctacatggctgtcatgtttaccctctttggtcttaacttattattcaagatcaaaccagaagatgccatggactttggcatctcccttctcttctatggcctctactatggagttctggaacgggactttgcagaaatgtgtgcagactacatggcatctaccatagggttctacagcgagtcgggcatgcctaccaaacatctttcagacagtgtgtgtgctgtgtgtgggcagcagatctttgtggacgtcagtgaagaggggatcattgagaacacgtataggctgtcctgcaatcatgtcttccacgagttctgcatccgtggctggtgcatcgtgggaaagaagcaaacgtgtccctactgcaaagagaaggtagacctcaagaggatgttcagcaatccctgggagaggcctcacgtcatgtatgggcaactgctggactggcttcgatacttggtagcctggcagcctgtcatcattggtgtagtccaaggcatcaactacatcctgggcctggaatagtgatgaagagcatcagtggaaaacccaccccacacgccatggacctcagggcactctcctccctgcccacaaagacctcctgggtgggaaagactcaaaggggcgcttgggccactcaggacccctccggctgtgtcggactggggagggatatgatggagagccagccagtggggctgtcagcagtggggggctttttaaaagaaaactattttgatgaatatatttaaaaaacctttttttattgtggagcataggaattgcccccctccaggcttcaccctccctgcctaagcagggtgggggcagagccatgacatttttggtttaaaggagccttctcatctctggccgagaacactgctgggctcccaggtagctgaaggcctcagcccacccactcccttcttccctgtgtggggctcaagcctggtgcacttagtatagaagagctaacgtactcaggcttgtgccacgggtgagcactgaggccccaggtgtcctccctcccccactgtctgggacacaggacaggtgttgcgtctgactctgtctccccctgtccaagagctataggctggttgaggcaagtggaaccttatcagtgacttggccaacaagggaagccttggggcctcagaattcattgaaaatttgttttgggacaactggaagaatcagcaccatggatactcgcccgtgggcagggctgtggtcagccaagaatagaggtcatatagttgggccatggggcaattgttggcagccatgactgacggccccttgtgcaagctcattcttcagtggatccttcagtggagtggtgacacgtgccagcggtcactctgccacatcacttccttcttgaaagcctaagagtgcgtatgcgtgtgtgtgtgtgtgtgtgtgtacgtgaggcagaagaatatgacagatgtcagcttctccctgtgtcagatgatatgtccttgaagctggcaggggattcccagtccagggaatatccctacatgatttttgtcattcatgggtcctccctgggcctgacaacgggagtggtgggtgggtgagaacaggttctgagagggggcttctaggaaggccccagccctagtcctaggcgacttgaataaagtgggaggtcaaacatgggccttcggcattgggtttctagggaatatggctcagtagggcctgccccttcaagggcagcaagaacgaagcaggatgttgtcactcccgtctgaataaagctccatgagctgggttggaaagctgaacatttatcttgctttcttcttcccacctctttccctggggtccccaggggtgtcttgcctttgttaacccccatcggagacctgagggtctgggggtggttgggcctgcctttctgctgttcccagctgttcccctgctgacatccctaggagtggtggaatgccaggctcctgtcctgtggcctgggggcctggggcatcattgggcctgccttcagactgaggttgctctatgttctcactgcctgaggacagtgtcccgccaccacctgccttcctgaggaccacactcaggctcggcttctcttccccagctgtggcttcccatggtaccctgctgcttatgccacctg

SEQ ID NO: 442915 - DNA, 2783 bp, Homo sapiens
gactgcggtgagggggcgagccgtgaagatggcggcagtggtggaggtggaggttggaggtggtgctgctggggaacgggagctggatgaggttgatatgtcagatctctctccagaagagcaatggagggtcgagcacgcacgcatgcatgccaagcaccgtggccatgaagctatgcatgctgaaatggtcctcatcctcatcgcaaccttggtggtggcccagctgctcctggtgcagtggaagcagaggcacccacgctcctacaattagagacggggtttcactgtgttagccaggatggtctcgatctcctgaccttgtgatccgcctcggcctcccaaagtgctgggattacaggcgtgagccaccgcgcccggcagatttttacaacctattctgaagaaaatggtgaccctctttcagatgtgggttgttcccctctatttcacagtgaagctgcactggtggaggttcctagtgatctggatcttgttctctgctgtcacagcctttgttaccttccgagccacccgaaaacctctagtacagacaaccccaaggttggtttataagtggttcctgctaatctataaaatcagctatgccactggcattgttggctacatggctgtcatgtttaccctctttggtcttaacttattattcaagatcaaaccagaagatgccatggactttggcatctcccttctcttctatggcctctactatggagttctggaacgggactttgcagaaatgtgtgcagactacatggcatctaccatagggttctacagcgagtcgggcatgcctaccaaacatctttcagacagtgtgtgtgctgtgtgtgggcagcagatctttgtggacgtcagtgaagaggggatcattgagaacacgtataggctgtcctgcaatcatgtcttccacgagttctgcatccgtggctggtgcatcgtgggaaagaagcaaacgtgtccctactgcaaagagaaggtagacctcaagaggatgttcagcaatccctgggagaggcctcacgtcatgtatgggcaactgctggactggcttcgatacttggtagcctggcagcctgtcatcattggtgtagtccaaggcatcaactacatcctgggcctggaatagtgatgaagagcatcagtggaaaacccaccccacacgccatggacctcagggcactctcctccctgcccacaaagacctcctgggtgggaaagactcaaaggggcgcttgggccactcaggacccctccggctgtgtcggactggggagggatatgatggagagccagccagtggggctgtcagcagtggggggctttttaaaagaaaactattttgatgaatatatttaaaaaacctttttttattgtggagcataggaattgcccccctccaggcttcaccctccctgcctaagcagggtgggggcagagccatgacatttttggtttaaaggagccttctcatctctggccgagaacactgctgggctcccaggtagctgaaggcctcagcccacccactcccttcttccctgtgtggggctcaagcctggtgcacttagtatagaagagctaacgtactcaggcttgtgccacgggtgagcactgaggccccaggtgtcctccctcccccactgtctgggacacaggacaggtgttgcgtctgactctgtctccccctgtccaagagctataggctggttgaggcaagtggaaccttatcagtgacttggccaacaagggaagccttggggcctcagaattcattgaaaatttgttttgggacaactggaagaatcagcaccatggatactcgcccgtgggcagggctgtggtcagccaagaatagaggtcatatagttgggccatggggcaattgttggcagccatgactgacggccccttgtgcaagctcattcttcagtggatccttcagtggagtggtgacacgtgccagcggtcactctgccacatcacttccttcttgaaagcctaagagtgcgtatgcgtgtgtgtgtgtgtgtgtgtgtacgtgaggcagaagaatatgacagatgtcagcttctccctgtgtcagatgatatgtccttgaagctggcaggggattcccagtccagggaatatccctacatgatttttgtcattcatgggtcctccctgggcctgacaacgggagtggtgggtgggtgagaacaggttctgagagggggcttctaggaaggccccagccctagtcctaggcgacttgaataaagtgggaggtcaaacatgggccttcggcattgggtttctagggaatatggctcagtagggcctgccccttcaagggcagcaagaacgaagcaggatgttgtcactcccgtctgaataaagctccatgagctgggttggaaagctgaacatttatcttgctttcttcttcccacctctttccctggggtccccaggggtgtcttgcctttgttaacccccatcggagacctgagggtctgggggtggttgggcctgcctttctgctgttcccagctgttcccctgctgacatccctaggagtggtggaatgccaggctcctgtcctgtggcctgggggcctggggcatcattgggcctgccttcagactgaggttgctctatgttctcactgcctgaggacagtgtcccgccaccacctgccttcctgaggaccacactcaggctcggcttctcttccccagctgtggcttcccatggtaccctgctgcttatgccacctg

SEQ ID NO: 442916 - DNA, 2333 bp, Homo sapiens
gccctgtgctgagtgctggggatacagagctggataagacatggtccctgccctcaaggagtactctgtttaatggaggagatggacaagaaagctcctgttgcagtgcagttggttggtttataagtggttcctgctaatctataaaatcagctatgccactggcattgttggctacatggctgtcatgtttaccctctttggtcttaacttattattcaagatcaaaccagaagatgccatggactttggcatctcccttctcttctatggcctctactatggagttctggaacgggactttgcagaaatgtgtgcagactacatggcatctaccatagggttctacagcgagtcgggcatgcctaccaaacatctttcagacagtgtgtgtgctgtgtgtgggcagcagatctttgtggacgtcagtgaagaggggatcattgagaacacgtataggctgtcctgcaatcatgtcttccacgagttctgcatccgtggctggtgcatcgtgggaaagaagcaaacgtgtccctactgcaaagagaaggtagacctcaagaggatgttcagcaatccctgggagaggcctcacgtcatgtatgggcaactgctggactggcttcgatacttggtagcctggcagcctgtcatcattggtgtagtccaaggcatcaactacatcctgggcctggaatagtgatgaagagcatcagtggaaaacccaccccacacgccatggacctcagggcactctcctccctgcccacaaagacctcctgggtgggaaagactcaaaggggcgcttgggccactcaggacccctccggctgtgtcggactggggagggatatgatggagagccagccagtggggctgtcagcagtggggggctttttaaaagaaaactattttgatgaatatatttaaaaaacctttttttattgtggagcataggaattgcccccctccaggcttcaccctccctgcctaagcagggtgggggcagagccatgacatttttggtttaaaggagccttctcatctctggccgagaacactgctgggctcccaggtagctgaaggcctcagcccacccactcccttcttccctgtgtggggctcaagcctggtgcacttagtatagaagagctaacgtactcaggcttgtgccacgggtgagcactgaggccccaggtgtcctccctcccccactgtctgggacacaggacaggtgttgcgtctgactctgtctccccctgtccaagagctataggctggttgaggcaagtggaaccttatcagtgacttggccaacaagggaagccttggggcctcagaattcattgaaaatttgttttgggacaactggaagaatcagcaccatggatactcgcccgtgggcagggctgtggtcagccaagaatagaggtcatatagttgggccatggggcaattgttggcagccatgactgacggccccttgtgcaagctcattcttcagtggatccttcagtggagtggtgacacgtgccagcggtcactctgccacatcacttccttcttgaaagcctaagagtgcgtatgcgtgtgtgtgtgtgtgtgtgtgtacgtgaggcagaagaatatgacagatgtcagcttctccctgtgtcagatgatatgtccttgaagctggcaggggattcccagtccagggaatatccctacatgatttttgtcattcatgggtcctccctgggcctgacaacgggagtggtgggtgggtgagaacaggttctgagagggggcttctaggaaggccccagccctagtcctaggcgacttgaataaagtgggaggtcaaacatgggccttcggcattgggtttctagggaatatggctcagtagggcctgccccttcaagggcagcaagaacgaagcaggatgttgtcactcccgtctgaataaagctccatgagctgggttggaaagctgaacatttatcttgctttcttcttcccacctctttccctggggtccccaggggtgtcttgcctttgttaacccccatcggagacctgagggtctgggggtggttgggcctgcctttctgctgttcccagctgttcccctgctgacatccctaggagtggtggaatgccaggctcctgtcctgtggcctgggggcctggggcatcattgggcctgccttcagactgaggttgctctatgttctcactgcctgaggacagtgtcccgccaccacctgccttcctgaggaccacactcaggctcggcttctcttccccagctgtggcttcccatggtaccctgctgcttatgccacctg

SEQ ID NO: 442917 - DNA, 1251 bp, Homo sapiens
gactgcggtgagggggcgagccgtgaagatggcggcagtggtggaggtggaggttggaggtggtgctgctggggaacgggagctggatgaggttgatatgtcagatctctctccagaagagcaatggagggtcgagcacgcacgcatgcatgccaagcaccgtggccatgaagctatgcatgctgaaatggtcctcatcctcatcgcaaccttggtggtggcccagctgctcctggtgcagtggaagcagaggcacccacgctcctacaatatggtgaccctctttcagatgtgggttgttcccctctatttcacagtgaagctgcactggtggaggttcctagtgatctggatcttgttctctgctgtcacagcctttgttaccttccgagccacccgaaaacctctagtacagacaaccccaaggttggtttataagtggttcctgctaatctataaaatcagctatgccactggcattgttggctacatggctgtcatgtttaccctctttggtcttaacttattattcaagatcaaaccagaagatgccatggactttggcatctcccttctcttctatggcctctactatggagttctggaacgggactttgcagaaatgtgtgcagactacatggcatctaccatagggttctacagcgagtcgggcatgcctaccaaacatctttcagacagtgtgtgtgctgtgtgtgggcagcagatctttgtggacgtcagtgaagaggggatcattgagaacacgtataggctgtcctgcaatcatgtcttccacgagttctgcatccgtggctggtgcatcgtgggaaagaagcaaacgtgtccctactgcaaagagaaggtagacctcaagaggatgttcagcaatccctgggagaggcctcacgtcatgtatgggcaactgctggactggcttcgatacttggtagcctggcagcctgtcatcattggtgtagtccaaggcatcaactacatcctgggcctggaatagtgatgaagagcatcagtggaaaacccaccccacacgccatggacctcagggcactctcctccctgcccacaaagacctcctgggtgggaaagactcaaaggggcgcttgggccactcaggacccctccggctgtgtcggactggggagggatatgatggagagccagccagtggggctgtcagcagtggggggctttttaaaagaaaactattttgatgaatatatttaaaaaaccttt

SEQ ID NO: 442918 - DNA, 2061 bp, Homo sapiens
tgtctccattttgccccataacagtcttgtgagatagggatcattatccttacttcacatgtgaggaaacaggttcagacacagggacttgcccaacattacagagctgataaagagcgaaggcaggatttgaacctttcaaagactgtctggggctggagtgccgccctggctctcaccatttcccttgaccagcggtgctcagcttccacgagttctgcatccgtggctggtgcatcgtgggaaagaagcaaacgtgtccctactgcaaagagaaggtagacctcaagaggatgttcagcaatccctgggagaggcctcacgtcatgtatgggcaactgctggactggcttcgatacttggtagcctggcagcctgtcatcattggtgtagtccaaggcatcaactacatcctgggcctggaatagtgatgaagagcatcagtggaaaacccaccccacacgccatggacctcagggcactctcctccctgcccacaaagacctcctgggtgggaaagactcaaaggggcgcttgggccactcaggacccctccggctgtgtcggactggggagggatatgatggagagccagccagtggggctgtcagcagtggggggctttttaaaagaaaactattttgatgaatatatttaaaaaacctttttttattgtggagcataggaattgcccccctccaggcttcaccctccctgcctaagcagggtgggggcagagccatgacatttttggtttaaaggagccttctcatctctggccgagaacactgctgggctcccaggtagctgaaggcctcagcccacccactcccttcttccctgtgtggggctcaagcctggtgcacttagtatagaagagctaacgtactcaggcttgtgccacgggtgagcactgaggccccaggtgtcctccctcccccactgtctgggacacaggacaggtgttgcgtctgactctgtctccccctgtccaagagctataggctggttgaggcaagtggaaccttatcagtgacttggccaacaagggaagccttggggcctcagaattcattgaaaatttgttttgggacaactggaagaatcagcaccatggatactcgcccgtgggcagggctgtggtcagccaagaatagaggtcatatagttgggccatggggcaattgttggcagccatgactgacggccccttgtgcaagctcattcttcagtggatccttcagtggagtggtgacacgtgccagcggtcactctgccacatcacttccttcttgaaagcctaagagtgcgtatgcgtgtgtgtgtgtgtgtgtgtgtacgtgaggcagaagaatatgacagatgtcagcttctccctgtgtcagatgatatgtccttgaagctggcaggggattcccagtccagggaatatccctacatgatttttgtcattcatgggtcctccctgggcctgacaacgggagtggtgggtgggtgagaacaggttctgagagggggcttctaggaaggccccagccctagtcctaggcgacttgaataaagtgggaggtcaaacatgggccttcggcattgggtttctagggaatatggctcagtagggcctgccccttcaagggcagcaagaacgaagcaggatgttgtcactcccgtctgaataaagctccatgagctgggttggaaagctgaacatttatcttgctttcttcttcccacctctttccctggggtccccaggggtgtcttgcctttgttaacccccatcggagacctgagggtctgggggtggttgggcctgcctttctgctgttcccagctgttcccctgctgacatccctaggagtggtggaatgccaggctcctgtcctgtggcctgggggcctggggcatcattgggcctgccttcagactgaggttgctctatgttctcactgcctgaggacagtgtcccgccaccacctgccttcctgaggaccacactcaggctcggcttctcttccccagctgtggcttcccatggtaccctgctgcttatgccacctg

SEQ ID NO: 442919 - DNA, 1937 bp, Homo sapiens
gactgcggtgagggggcgagccgtgaagatggcggcagtggtggaggtggaggttggaggtggtgctgctggggaacgggagctggatgaggttgatatgtcagatctctctccagaagagcaatggagggtcgagcacgcacgcatgcatgccaagcaccgtggccatgaagctatgcatgctgaaatggtcctcatcctcatcgcaaccttggtggtggcccagctgctcctggtgcagtggaagcagaggcacccacgctcctacaatatggtgaccctctttcagatgtgggttgttcccctctatttcacagtgaagctgcactggtggaggttcctagtgatctggatcttgttctctgctgtcacagcctttgttaccttccgagccacccgaaaacctctagtacagacaaccccaagccctccggctgtgtcggactggggagggatatgatggagagccagccagtggggctgtcagcagtggggggctttttaaaagaaaactattttgatgaatatatttaaaaaacctttttttattgtggagcataggaattgcccccctccaggcttcaccctccctgcctaagcagggtgggggcagagccatgacatttttggtttaaaggagccttctcatctctggccgagaacactgctgggctcccaggtagctgaaggcctcagcccacccactcccttcttccctgtgtggggctcaagcctggtgcacttagtatagaagagctaacgtactcaggcttgtgccacgggtgagcactgaggccccaggtgtcctccctcccccactgtctgggacacaggacaggtgttgcgtctgactctgtctccccctgtccaagagctataggctggttgaggcaagtggaaccttatcagtgacttggccaacaagggaagccttggggcctcagaattcattgaaaatttgttttgggacaactggaagaatcagcaccatggatactcgcccgtgggcagggctgtggtcagccaagaatagaggtcatatagttgggccatggggcaattgttggcagccatgactgacggccccttgtgcaagctcattcttcagtggatccttcagtggagtggtgacacgtgccagcggtcactctgccacatcacttccttcttgaaagcctaagagtgcgtatgcgtgtgtgtgtgtgtgtgtgtgtacgtgaggcagaagaatatgacagatgtcagcttctccctgtgtcagatgatatgtccttgaagctggcaggggattcccagtccagggaatatccctacatgatttttgtcattcatgggtcctccctgggcctgacaacgggagtggtgggtgggtgagaacaggttctgagagggggcttctaggaaggccccagccctagtcctaggcgacttgaataaagtgggaggtcaaacatgggccttcggcattgggtttctagggaatatggctcagtagggcctgccccttcaagggcagcaagaacgaagcaggatgttgtcactcccgtctgaataaagctccatgagctgggttggaaagctgaacatttatcttgctttcttcttcccacctctttccctggggtccccaggggtgtcttgcctttgttaacccccatcggagacctgagggtctgggggtggttgggcctgcctttctgctgttcccagctgttcccctgctgacatccctaggagtggtggaatgccaggctcctgtcctgtggcctgggggcctggggcatcattgggcctgccttcagactgaggttgctctatgttctcactgcctgaggacagtgtcccgccaccacctgccttcctgaggaccacactcaggctcggcttctcttccccagctgtggcttcccatggtaccctgctgcttatgccacctg

SEQ ID NO: 442920 - DNA, 1124 bp, Homo sapiens
gactgcggtgagggggcgagccgtgaagatggcggcagtggtggaggtggaggttggaggtggtgctgctggggaacgggagctggatgaggttgatatgtcagatctctctccagaagagcaatggagggtcgagcacgcacgcatgcatgccaagcaccgtggccatgaagctatgcatgctgaaatggtcctcatcctcatcgcaaccttggtggtggcccagctgctcctggtgcagtggaagcagaggcacccacgctcctacaatatggtgaccctctttcagatgtgggttgttcccctctatttcacagtgaagctgcactggtggaggttcctagtgatctggatcttgttctctgctgtcacagcctttgttaccttccgagccacccgaaaacctctagtacagacaaccccaaggttggtttataagtggttcctgctaatctataaaatcagctatgccactggcattgttggctacatggctgtcatgtttaccctctttggtcttaacttattattcaagatcaaaccagaagatgccatggactttggcatctcccttctcttctatggcctctactatggagttctggaacgggactttgcagaaatgtgtgcagactacatggcatctaccatagggttctacagcgagtcgggcatgcctaccaaacatctttcagacagtgtgtgtgctgtgtgtgggcagcagatctttgtggacgtcagtgaagaggggatcattgagaacacgtataggctgtcctgcaatcatgtgtatcctgcctcgagctcctgggccacatctctcctgcaatctgcacactgtagtgagagagagaaagagggtggtcatgaccctaggcatgctgtccagacccttgagtgtaggagagccacaagagggccaccttccctaccctttcccacagatcagagccactcttaggtaaacagtggttacaacctggctgggtctgagaggaacctgaggctgcagctagtgaggctgtgctagcagacctgagatctgaccagtcacaggggaagaggaccctctaatgggatccctcagtttagcatcatcctctgttctgaataacacttgtaat

SEQ ID NO: 442921 - DNA, 2645 bp, Homo sapiens
gactgcggtgagggggcgagccgtgaagatggcggcagtggtggaggtggaggttggaggtggtgctgctggggaacgggagctggatgaggttgatatgtcagatctctctccagaagagcaatggagggtcgagcacgcacgcatgcatgccaagcaccgtggccatgaagctatgcatgctgaaatggtcctcatcctcatcgcaaccttggtggtggcccagctgctcctggtgcagtggaagcagaggcacccacgctcctacaatatggtgaccctctttcagatgtgggttgttcccctctatttcacagtgaagctgcactggtggaggttcctagtgatctggatcttgttctctgctgtcacagcctttgttaccttccgagccacccgaaaacctctagtacagacaaccccaaggttggtttataagtggttcctgctaatctataaaatcagctatgccactggcattgttggctacatggctgtcatgtttaccctctttggtcttaacttattattcaagatcaaaccagaagatgccatggactttggcatctcccttctcttctatggcctctactatggagttctggaacgggactttgcagaaatgtgtgcagactacatggcatctaccatagggttctacagcgagtcgggcatgcctaccaaacatctttcagacagtgtgtgtgctgtgtgtgggcagcagatctttgtggacgtcagtgaagaggggatcattgagaacacgtataggctgtcctgcaatcatgtcttccacgagttctgcatccgtggctggtgcatcgtgggaaagaagcaaacgtgtccctactgcaaagagaaggtagacctcaagaggatgttcagcaatccctgggagaggcctcacgtcatgtatgggcaactgctggactggcttcgatacttggtagcctggcagcctgtcatcattggtgtagtccaaggcatcaactacatcctgggcctggaatagtgatgaagagcatcagtggaaaacccaccccacacgccatggacctcagggcactctcctccctgcccacaaagacctcctgggtgggaaagactcaaaggggcgcttgggccactcaggacccctccggctgtgtcggactggggagggatatgatggagagccagccagtggggctgtcagcagtggggggctttttaaaagaaaactattttgatgaatatatttaaaaaacctttttttattgtggagcataggaattgcccccctccaggcttcaccctccctgcctaagcagggtgggggcagagccatgacatttttggtttaaaggagccttctcatctctggccgagaacactgctgggctcccaggtagctgaaggcctcagcccacccactcccttcttccctgtgtggggctcaagcctggtgcacttagtatagaagagctaacgtactcaggcttgtgccacgggtgagcactgaggccccaggtgtcctccctcccccactgtctgggacacaggacaggtgttgcgtctgactctgtctccccctgtccaagagctataggctggttgaggcaagtggaaccttatcagtgacttggccaacaagggaagccttggggcctcagaattcattgaaaatttgttttgggacaactggaagaatcagcaccatggatactcgcccgtgggcagggctgtggtcagccaagaatagaggtcatatagttgggccatggggcaattgttggcagccatgactgacggccccttgtgcaagctcattcttcagtggatccttcagtggagtggtgacacgtgccagcggtcactctgccacatcacttccttcttgaaagcctaagagtgcgtatgcgtgtgtgtgtgtgtgtgtgtgtacgtgaggcagaagaatatgacagatgtcagcttctccctgtgtcagatgatatgtccttgaagctggcaggggattcccagtccagggaatatccctacatgatttttgtcattcatgggtcctccctgggcctgacaacgggagtggtgggtgggtgagaacaggttctgagagggggcttctaggaaggccccagccctagtcctaggcgacttgaataaagtgggaggtcaaacatgggccttcggcattgggtttctagggaatatggctcagtagggcctgccccttcaagggcagcaagaacgaagcaggatgttgtcactcccgtctgaataaagctccatgagctgggttggaaagctgaacatttatcttgctttcttcttcccacctctttccctggggtccccaggggtgtcttgcctttgttaacccccatcggagacctgagggtctgggggtggttgggcctgcctttctgctgttcccagctgttcccctgctgacatccctaggagtggtggaatgccaggctcctgtcctgtggcctgggggcctggggcatcattgggcctgccttcagactgaggttgctctatgttctcactgcctgaggacagtgtcccgccaccacctgccttcctgaggaccacactcaggctcggcttctcttccccagctgtggcttcccatggtaccctgctgcttatgccacctg

SEQ ID NO: 442922 - DNA, 2452 bp, Homo sapiens
gactgcggtgagggggcgagccgtgaagatggcggcagtggtggaggtggaggttggaggtggtgctgctggggaacgggagctggatgagggtcgagcacgcacgcatgcatgccaagcaccgtggccatgaagctatgcatgctgaaatggtcctcatcctcatcgcaaccttggtggtggcccagctgctcctggtgcagtggaagcagaggcacccacgctcctacaatgttggtttataagtggttcctgctaatctataaaatcagctatgccactggcattgttggctacatggctgtcatgtttaccctctttggtcttaacttattattcaagatcaaaccagaagatgccatggactttggcatctcccttctcttctatggcctctactatggagttctggaacgggactttgcagaaatgtgtgcagactacatggcatctaccatagggttctacagcgagtcgggcatgcctaccaaacatctttcagacagtgtgtgtgctgtgtgtgggcagcagatctttgtggacgtcagtgaagaggggatcattgagaacacgtataggctgtcctgcaatcatgtcttccacgagttctgcatccgtggctggtgcatcgtgggaaagaagcaaacgtgtccctactgcaaagagaaggtagacctcaagaggatgttcagcaatccctgggagaggcctcacgtcatgtatgggcaactgctggactggcttcgatacttggtagcctggcagcctgtcatcattggtgtagtccaaggcatcaactacatcctgggcctggaatagtgatgaagagcatcagtggaaaacccaccccacacgccatggacctcagggcactctcctccctgcccacaaagacctcctgggtgggaaagactcaaaggggcgcttgggccactcaggacccctccggctgtgtcggactggggagggatatgatggagagccagccagtggggctgtcagcagtggggggctttttaaaagaaaactattttgatgaatatatttaaaaaacctttttttattgtggagcataggaattgcccccctccaggcttcaccctccctgcctaagcagggtgggggcagagccatgacatttttggtttaaaggagccttctcatctctggccgagaacactgctgggctcccaggtagctgaaggcctcagcccacccactcccttcttccctgtgtggggctcaagcctggtgcacttagtatagaagagctaacgtactcaggcttgtgccacgggtgagcactgaggccccaggtgtcctccctcccccactgtctgggacacaggacaggtgttgcgtctgactctgtctccccctgtccaagagctataggctggttgaggcaagtggaaccttatcagtgacttggccaacaagggaagccttggggcctcagaattcattgaaaatttgttttgggacaactggaagaatcagcaccatggatactcgcccgtgggcagggctgtggtcagccaagaatagaggtcatatagttgggccatggggcaattgttggcagccatgactgacggccccttgtgcaagctcattcttcagtggatccttcagtggagtggtgacacgtgccagcggtcactctgccacatcacttccttcttgaaagcctaagagtgcgtatgcgtgtgtgtgtgtgtgtgtgtgtacgtgaggcagaagaatatgacagatgtcagcttctccctgtgtcagatgatatgtccttgaagctggcaggggattcccagtccagggaatatccctacatgatttttgtcattcatgggtcctccctgggcctgacaacgggagtggtgggtgggtgagaacaggttctgagagggggcttctaggaaggccccagccctagtcctaggcgacttgaataaagtgggaggtcaaacatgggccttcggcattgggtttctagggaatatggctcagtagggcctgccccttcaagggcagcaagaacgaagcaggatgttgtcactcccgtctgaataaagctccatgagctgggttggaaagctgaacatttatcttgctttcttcttcccacctctttccctggggtccccaggggtgtcttgcctttgttaacccccatcggagacctgagggtctgggggtggttgggcctgcctttctgctgttcccagctgttcccctgctgacatccctaggagtggtggaatgccaggctcctgtcctgtggcctgggggcctggggcatcattgggcctgccttcagactgaggttgctctatgttctcactgcctgaggacagtgtcccgccaccacctgccttcctgaggaccacactcaggctcggcttctcttccccagctgtggcttcccatggtaccctgctgcttatgccacctg

SEQ ID NO: 442923 - DNA, 2237 bp, Homo sapiens
gactgcggtgagggggcgagccgtgaagatggcggcagtggtggaggtggaggttggaggtggtgctgctggggaacgggagctggatgaggttgatatgtcagatctctctccagaagagcaatggagggtcgagcacgcacgcatgcatgccaagcaccgtggccatgaagctatgcatgctgaaatggtcctcatcctcatcgcaaccttggtggtggcccagctgctcctggtgcagtggaagcagaggcacccacgctcctacaatatggtgaccctctttcagatgtgggttgttcccctctatttcacagtgaagctgcactggtggaggttcctagtgatctggatcttgttctctgctgtcacagcctttgttaccttccgagccacccgaaaacctctagtacagacaaccccaaggttggtttataagtggttcctgctaatctataaaatcagctatgccactggcattgttggctacatggctgtcatgtttaccctctttggtcttaacttattattcaagatcaaaccagaagatgccatggactttggcatctcccttctcttctatggcctctactatggagttctggaacgggactttgcagaaatgtgtgcagactacatggcatctaccatagggttctacagcgagtcgggcatgcctaccaaacatctttcagacagtgtgtgtgctgtgtgtgggcagcagatctttgtggacgtcagtgaagaggggatcattgagaacacgtataggctgtcctgcaatcatgtcttccacgagttctgcatccgtggctggtgcatcgtgggaaagaagcaaacgtgtccctactgcaaagagaaggtagacctcaagaggatgttcagcaatccctgggagaggcctcacgtcatgtatgggcaactgctggactggcttcgatacttggtagcctggcagcctgtcatcattggtgtagtccaaggcatcaactacatcctgggcctggaatagtgatgaagagcatcagtggaaaacccaccccacacgccatggacctcagggcactctcctccctgcccacaaagacctcctgggtgggaaagactcaaaggggcgcttgggccactcaggacccctccggctgtgtcggactggggagggatatgatggagagccagccagtggggctgtcagcagtggggggctttttaaaagaaaactattttgatgaatatatttaaaaaacctttttttattgtggagcataggaattgcccccctccaggcttcaccctccctgcctaagcagggtgggggcagagccatgacatttttggtttaaaggagccttctcatctctggccgagaacactgctgggctcccaggtagctgaaggcctcagcccacccactcccttcttccctgtgtggggctcaagcctggtgcacttagtatagaagagctaacgtactcaggcttgtgccacgggtgagcactgaggccccaggtgtcctccctcccccactgtctgggacacaggacaggtgttgcgtctgactctgtctccccctgtccaagagctataggctggttgaggcaagtggaaccttatcagtgacttggccaacaagggaagccttggggcctcagaattcattgaaaatttgttttggaacaggttctgagagggggcttctaggaaggccccagccctagtcctaggcgacttgaataaagtgggaggtcaaacatgggccttcggcattgggtttctagggaatatggctcagtagggcctgccccttcaagggcagcaagaacgaagcaggatgttgtcactcccgtctgaataaagctccatgagctgggttggaaagctgaacatttatcttgctttcttcttcccacctctttccctggggtccccaggggtgtcttgcctttgttaacccccatcggagacctgagggtctgggggtggttgggcctgcctttctgctgttcccagctgttcccctgctgacatccctaggagtggtggaatgccaggctcctgtcctgtggcctgggggcctggggcatcattgggcctgccttcagactgaggttgctctatgttctcactgcctgaggacagtgtcccgccaccacctgccttcctgaggaccacactcaggctcggcttctcttccccagctgtggcttcccatggtaccctgctgcttatgccacctg

SEQ ID NO: 442924 - DNA, 2382 bp, Homo sapiens
gactgcggtgagggggcgagccgtgaagatggcggcagtggtggaggtggaggttggaggtggtgctgctggggaacgggagctggatgaggttgatatgtcagatctctctccagaagagcaatggagggtcgagcacgcacgcatgcatgccaagcaccgtggccatgaagctatgcatgctgaaatggtcctcatcctcatcgcaaccttggtggtggcccagctgctcctggtgcagtggaagcagaggcacccacgctcctacaatgatcaaaccagaagatgccatggactttggcatctcccttctcttctatggcctctactatggagttctggaacgggactttgcagaaatgtgtgcagactacatggcatctaccatagggttctacagcgagtcgggcatgcctaccaaacatctttcagacagtgtgtgtgctgtgtgtgggcagcagatctttgtggacgtcagtgaagaggggatcattgagaacacgtataggctgtcctgcaatcatgtcttccacgagttctgcatccgtggctggtgcatcgtgggaaagaagcaaacgtgtccctactgcaaagagaaggtagacctcaagaggatgttcagcaatccctgggagaggcctcacgtcatgtatgggcaactgctggactggcttcgatacttggtagcctggcagcctgtcatcattggtgtagtccaaggcatcaactacatcctgggcctggaatagtgatgaagagcatcagtggaaaacccaccccacacgccatggacctcagggcactctcctccctgcccacaaagacctcctgggtgggaaagactcaaaggggcgcttgggccactcaggacccctccggctgtgtcggactggggagggatatgatggagagccagccagtggggctgtcagcagtggggggctttttaaaagaaaactattttgatgaatatatttaaaaaacctttttttattgtggagcataggaattgcccccctccaggcttcaccctccctgcctaagcagggtgggggcagagccatgacatttttggtttaaaggagccttctcatctctggccgagaacactgctgggctcccaggtagctgaaggcctcagcccacccactcccttcttccctgtgtggggctcaagcctggtgcacttagtatagaagagctaacgtactcaggcttgtgccacgggtgagcactgaggccccaggtgtcctccctcccccactgtctgggacacaggacaggtgttgcgtctgactctgtctccccctgtccaagagctataggctggttgaggcaagtggaaccttatcagtgacttggccaacaagggaagccttggggcctcagaattcattgaaaatttgttttgggacaactggaagaatcagcaccatggatactcgcccgtgggcagggctgtggtcagccaagaatagaggtcatatagttgggccatggggcaattgttggcagccatgactgacggccccttgtgcaagctcattcttcagtggatccttcagtggagtggtgacacgtgccagcggtcactctgccacatcacttccttcttgaaagcctaagagtgcgtatgcgtgtgtgtgtgtgtgtgtgtgtacgtgaggcagaagaatatgacagatgtcagcttctccctgtgtcagatgatatgtccttgaagctggcaggggattcccagtccagggaatatccctacatgatttttgtcattcatgggtcctccctgggcctgacaacgggagtggtgggtgggtgagaacaggttctgagagggggcttctaggaaggccccagccctagtcctaggcgacttgaataaagtgggaggtcaaacatgggccttcggcattgggtttctagggaatatggctcagtagggcctgccccttcaagggcagcaagaacgaagcaggatgttgtcactcccgtctgaataaagctccatgagctgggttggaaagctgaacatttatcttgctttcttcttcccacctctttccctggggtccccaggggtgtcttgcctttgttaacccccatcggagacctgagggtctgggggtggttgggcctgcctttctgctgttcccagctgttcccctgctgacatccctaggagtggtggaatgccaggctcctgtcctgtggcctgggggcctggggcatcattgggcctgccttcagactgaggttgctctatgttctcactgcctgaggacagtgtcccgccaccacctgccttcctgaggaccacactcaggctcggcttctcttccccagctgtggcttcccatggtaccctgctgcttatgccacctg

SEQ ID NO: 442925 - DNA, 681 bp, Homo sapiens
gactgcggtgagggggcgagccgtgaagatggcggcagtggtggaggtggaggttggaggtggtgctgctggggaacgggagctggatgaggttgatatgtcagatctctctccagaagagcaatggagggtcgagcacgcacgcatgcatgccaagcaccgtggccatgaagctatgcatgctgaaatggtcctcatcctcatcgcaaccttggtggtggcccagctgctcctggtgcagtggaagcagaggcacccacgctcctacaatatggtgaccctctttcagatgtgggttgttcccctctatttcacagtgaagctgcactggtggaggttcctagtgatctggatcttgttctctgctgtcacagcctttgttaccttccgagccacccgaaaacctctagtacagacaaccccaagaggtgagagtttaagtagtgggaagagcccaggttttccgaagctaatgggttggaatgcatgggaggagcataggtttagactgaaaaaattcctggttttgtctgccaaaattatttggcatggggcctctctaaaacaagctgattggtagaacccctcccctatttatcgattaaaaacctcaaatatttctgtatagcttactttatggtttcaaggtatttttatattaaaggcaaacaaaaataagca

SEQ ID NO: 442926 - DNA, 1620 bp, Homo sapiens
gaatgggcgacgcggccgcagatccgcccggccccgccctgccctgtgagttcctccggccgggctgcggggctccgctcagtccgggagcgcagctgggccgcggcgctccgacctccgctttcccaccgcccgcagctgaagcacatcccgcagcccggcgcggactccgatcgccgcagttgccctctggcgccatgtcgcagaacggagcgcccgggatgcaggaggagagcctgcagggctcctgggtagaactgcacttcagcaataatgggaacgggggcagcgttccagcctcggtttctatttataatggagacatggaaaaaatactgctggacgcacagcatgagtctggacggagtagctccaagagctctcactgtgacagcccacctcgctcgcagacaccacaagataccaacagagcttctgaaacagatacccatagcattggagagaaaaacagctcacagtctgaggaagatgatattgaaagaaggaaagaagttgaaagcatcttgaagaaaaactcagattggatatgggattggtcaagtcggccggaaaatattccccccaaggagttcctctttaaacacccgaagcgcacggccaccctcagcatgaggaacacgagcgtcatgaagaaagggggcatattctctgcagaatttctgaaagttttccttccatctctgctgctctctcatttgctggccatcggattggggatctatattggaaggcgtctgacaacctccaccagcaccttttgatgaagaactggagtctgacttggttcgttagtggattacttctgagcttgcaacatagctcactgaagagctgttagatcctggggtggccacgtcacttgtgtttatttgttctgtaaatgctgcgttcctaatttagtaaaataaaagaatagacactaaaatcatgttgatctataattacacctatgggatcaataagcatgtcagactgattaatgtctactgtgaaaatttggtagtaaattttcatttgatattagatataaatatctgaatataaataattttaatatactagtcatgatgtgtgttgtattttaaaaattatctgcaaccttaattcagctgaagtactttatatttcaaaagaatgaataacattgataataaaatcgctactttaaggggtttgtccaaaataaatattgtggccttatatatcacactattgtagaaagtattatttaatttaaatggatgcaggttgtctactaaagaaagattatatataactatgctaattgttcataatcaacagaaaccaagatagagctacaaactcagctgtacagttcgtacactaaactcttcttgcttttgcattataaggaattaagtctccgattattaggtgatcaccctggatgatcagttttctgctgaaggcacctactcagtatcttttcctctttatcactctgcattggtgaatttaatcctctcctttgtgttcaacttttgtgtgcttttaaaatcagctttattctaagcaaatctgtgtctactttaaaaaactggaaatggaaaaaaaaataaatctttgccaaatccttca

SEQ ID NO: 442927 - DNA, 941 bp, Homo sapiens
  misc_feature (779)..(779): n is a, c, g, or t
  misc_feature (795)..(795): n is a, c, g, or t
  misc_feature (799)..(799): n is a, c, g, or t
  misc_feature (802)..(802): n is a, c, g, or t
gaatgggcgacgcggccgcagatccgcccggccccgccctgccctgtgagttcctccggccgggctgcggggctccgctcagtccgggagcgcagctgggccgcggcgctccgacctccgctttcccaccgcccgcagctgaagcacatcccgcagcccggcgcggactccgatcgccgcagttgccctctggcgccatgtcgcagaacggagcgcccgggatgcaggaggagagcctgcagggctcctgggtagaactgcacttcagcaataatgggaacgggggcagcgttccagcctcggtttctatttataatggagacatggaaaaaatactgctggacgcacagcatgagtctggacggagtagctccaagagctctcactgtgacagcccacctcgctcgcagacaccacaagataccaacagagcttctgaaacagatacccatagcattggagagaaaaacagctcacagtctgaggaagatgatattgaaagaaggaaagaagttgaaagcatcttgaagaaaaactcagattggatatgggattggtcaagtcggccggaaaatattccccccaaggagttcctctttaaacacccgaagcgcacggccaccctcagcatgaggaacacgagcgtcatgaagaaagggggcatattctctgcagaatttctgaaagttttccttccatctctgctgctctctcatttgctggccatcggattgggatctatatgggaaggggttggaaactcacagactttgtgagancgggtctgctggtcgnaggnatnatttgagtgtaatagtcctgagaggttacctggggcgccctggtatggtgaagggcctattgtaaaaaccggtttggggaaaggggtgctcttagttcttagtttttttaattatttatctatttcttttttttatcgt

SEQ ID NO: 442928 - DNA, 592 bp, Homo sapiens
gaatgggcgacgcggccgcagatccgcccggccccgccctgccctgtgagttcctccggccgggctgcggggctccgctcagtccgggagcgcagctgggccgcggcgctccgacctccgctttcccaccgcccgcagctgaagcacatcccgcagcccggcgcggactccgatcgccgcagttgccctctggcgccatgtcgcagaacggagcgcccgggatgcaggaggagagcctgcagggctcctgggtagaactgcacttcagcaataatgggaacgggggcagcgttccagcctcggtttctatttataatggagacatggaaaaaatactgctggacgcacagcatgagtctggacggagtagctccaagagctctcactgtgacagcccacctcgctcgcagacaccacaagataccaacagagcttctgaaacagatacccatagcattggagagaaaaacagctcacaggtaagctggaaggagaatgtgcagttgtaaaagtatttgtgatctgtttgtacaggaaacggttttaaatgtaattgagcacctcagagaaaagtcgggctttaagggtgttt

SEQ ID NO: 442929 - DNA, 685 bp, Homo sapiens
cctttaagcagctacgggcagagtcctgtggagctctggggggcgtgggagacaggcaggaaacccaccgggcaggcaggcaggagcagattccagagtgggtagagaattccatctgcgcccctttttttgtccccatcaggctcctgggtagaactgcacttcagcaataatgggaacgggggcagcgttccagcctcggtttctatttataatggagacatggaaaaaatactgctggacgcacagcatgagtctggacggagtagctccaagagctctcactgtgacaggtaggcgcgcatcaacaagtgtatgtgttacagtgccgatgtcttcagtgggtgacagtcacagctggaagtgcccgtgtcacctctaggacagtgggctgctgttcgcctcgggccgcgttctggactggctcctgctgcagtccgtccttatataggagcctcgccctctttggggatgcagtgacctgggacttagtctgtggggagccatgttcaagtcatcagtaggcagcggaacagccacaaaccccactctgagaaacgcactcacgcgcctcagcggggctgtggtcgcaggaggagcggtccctggttagcagtacttctgagtgactccaaggtagagtggccgacagtggtcaaaggtcgcgtgcccttgagagctgtgc

SEQ ID NO: 442930 - DNA, 1514 bp, Homo sapiens
  misc_feature (1477)..(1477): n is a, c, g, or t
gaatgggcgacgcggccgcagatccgcccggccccgccctgccctgtgagttcctccggccgggctgcggggctccgctcagtccgggagcgcagctgggccgcggcgctccgacctccgctttcccaccgcccgcagctgaagcacatcccgcagcccggcgcggactccgatcgccgcagttgccctctggcgccatgtcgcagaacggagcgcccgggatgcaggaggagagcctgcagggctcctgggtagaactgcacttcagcaataatgggaacgggggcagcgttccagcctcggtttctatttataatggagacatggaaaaaatactgctggacgcacagcatgagtctggacggagtagctccaagagctctcactgtgacagcccacctcgctcgcagacaccacaagataccaacagagcttctgaaacagatacccatagcattggagagaaaaacagctcacagtctgaggaagatgatattgaaagaaggaaagaagttgaaagcatcttgaagaaaaactcagattggatatgggattggtcaagtcggccggaaaatattccccccaaggagttcctctttaaacacccgaagcgcacggccaccctcagcatgaggaacacgagcgtcatgaagaaagggggcatattctctgcagaatttctgaaagttttccttccatctctgctgctctctcatttgctggccatcggattggggatctatattggaaggcgtctgacaacctccaccagcaccttttgatgaagaactggagtctgacttggttcgttagtggattacttctgagcttgcaacatagctcactgaagagctgttagatcctggggtggccacgtcacttgtgtttatttgttctgtaaatgctgcgttcctaatttagtaaaataaaagaatagacactaaaatcatgttgatctataattacacctatgggatcaataagcatgtcagactgattaatgtctactgtgaaaatttggtagtaaattttcatttgatattagatataaatatctgaatataaataattttaatatactagtcatgatgtgtgttgtattttaaaaattatctgcaaccttaattcagctgaagtactttatatttcaaaagaatgaataacattgataataaaatcgctactttaaggggtttgtccaaaataaatattgtggccttatatatcacactattgtagaaagtattatttaatttaaatggatgcaggttgtctactaaagaaagattatatataactatgctaattgttcataatcaacagaaaccaagatagagctacaaactcagctgtacagttcgtacactaaactcttcttgcttttgcattataaggaattaagtctccgattattaggtgatcaccctggatgatcagttttctgctgaaggcacctactcagtatctaccgctggcnctttaaaactggaatggaaaaaaaataaatctttgcc

SEQ ID NO: 442931 - DNA, 1858 bp, Homo sapiens
gaatgggcgacgcggccgcagatccgcccggccccgccctgccctgtgagttcctccggccgggctgcggggctccgctcagtccgggagcgcagctgggccgcggcgctccgacctccgctttcccaccgcccgcagctgaagcacatcccgcagcccggcgcggactccgatcgccgcagttgccctctggcgccatgtcgcagaacggagcgcccgggatgcaggaggagagcctgcagggctcctgggtagaactgcacttcagcaataatgggaacgggggcagcgttccagcctcggtttctatttataatggagacatggaaaaaatactgctggacgcacagcatgagtctggacggagtagctccaagagctctcactgtgacagcccacctcgctcgcagacaccacaagataccaacagagcttctgaaacagatacccatagcattggagagaaaaacagctcacagtctgaggaagatgatattgaaagaaggaaagaagttgaaagcatcttgaagaaaaactcagattggatatgggattggtcaagtcggccggaaaatattccccccaaggagttcctctttaaacacccgaagcgcacggccaccctcagcatgaggaacacgagcgtcatgaagaaagggggcatattctctgcagaatttctgaaagttttccttccatctctgctgctctctcatttgctggccatcggattggggatctatattggaaggcgtctgacaacctccaccagcaccttttgatgaagaactggagtctgacttggttcgttagtggattacttctgagcttgcaacatagctcactgaagagctgttagatcctggggtggccacgtcacttgtgtttatttgttctgtaaatgctgcgttcctaatttagtaaaataaaagaatagacactaaaatcatgttgatctataattacacctatgggatcaataagcatgtcagactgattaatgtctactgtgaaaatttggtagtaaattttcatttgatattagatataaatatctgaatataaataattttaaatagtacctaaaaaaaaaaaaaaaaaaaaaacaaaaacaaaaaaaaaaaaaaaaaaaaaaaaaaaaaaaaaaaaaaaacaaaaaaaaaaaaacacaccgcggcgccgaccctccctcctgggggggggggaaaagagaagggggggaggggggcggcgcgaggcggccagggggccccggcacccccttttttggatagaagagaggagggatataatttcgatggaggtcgcccccactcaagagaaggaggtgagccataataattggtgacgaagagaagggaatagagaatcacctcctttttattgtcctccttcctcgacaatacagaaagacaaagagaataaacagaaaaagcaacagaaggaagaaaaacacaatgagaagcagatcacatatacaatagaaaccaaacaaggaaaatgatgacgatgaaaaagaaacgtacaaaagatagcaaaaagaacaaaataaacaaaaaacacacaaagaaaaaaacaaccataatgaactagaaaatacataataataattctttatataatattaattatcttatatatatgatattatacatgcaatgttattactaataaaatattatacatataaataatataaataaaacaactattctaacaaacattatatacaataaatacatatctattatatctttaaacactattatcacatactaacacaactggaacaacagacaactcaatctcagaaagcccaagtatattaaaagctacaactacaacactctattatacg

SEQ ID NO: 442932 - DNA, 1184 bp, Homo sapiens
ccccagcactgagttggaacaaagcagaagctttctgtgtggaaacagcattcggtttggtgatccttctatgtaagaatacgatctgatgttttctaagttaattaatacaaaatacatattgataaaacactagataaaagatcacagatagattcattacaaaatttttataatgggtataaaatcaccagtccccttgcataagctctaaccacagtgagctaccctgtttcagctgtaacacagtctcctgtgaatcacaagatacattaactactggataatttttctgtgaaggatctatattggaaggcgtctgacaacctccaccagcaccttttgatgaagaactggagtctgacttggttcgttagtggattacttctgagcttgcaacatagctcactgaagagctgttagatcctggggtggccacgtcacttgtgtttatttgttctgtaaatgctgcgttcctaatttagtaaaataaaagaatagacactaaaatcatgttgatctataattacacctatgggatcaataagcatgtcagactgattaatgtctactgtgaaaatttggtagtaaattttcatttgatattagatataaatatctgaatataaataattttaatatactagtcatgatgtgtgttgtattttaaaaattatctgcaaccttaattcagctgaagtactttatatttcaaaagaatgaataacattgataataaaatcgctactttaaggggtttgtccaaaataaatattgtggccttatatatcacactattgtagaaagtattatttaatttaaatggatgcaggttgtctactaaagaaagattatatataactatgctaattgttcataatcaacagaaaccaagatagagctacaaactcagctgtacagttcgtacactaaactcttcttgcttttgcattataaggaattaagtctccgattattaggtgatcaccctggatgatcagttttctgctgaaggcacctactcagtatcttttcctctttatcactctgcattggtgaatttaatcctctcctttgtgttcaacttttgtgtgcttttaaaatcagctttattctaagcaaatctgtgtctactttaaaaaactggaaatggaaaaaaaaataaatctttgccaaatccttca

SEQ ID NO: 442933 - DNA, 1287 bp, Homo sapiens
gaatgggcgacgcggccgcagatccgcccggccccgccctgccctgtgagttcctccggccgggctgcggggctccgctcagtccgggagcgcagctgggccgcggcgctccgacctccgctttcccaccgcccgcagctgaagcacatcccgcagcccggcgcggactccgatcgccgcagttgccctctggcgccatgtcgcagaacggagcgcccgggatgcaggaggagagcctgcagggctcctgggtagaactgcacttcagcaataatgggaacgggggcagcgttccagcctcggtttctatttataatggagacatggaaaaaatactgctggacgcacagcatgagtctggacggagtagctccaagagctctcactgtgacagcccacctcgctcgcagacaccacaagataccaacagagcttctgaaacagatacccatagcattggagagaaaaacagctcacagtctgaggaagatgatattgaaagaaggaaagaagttgaaagcatcttgaagaaaaactcagattggatatgggattggtcaagtcggccggaaaatattccccccaaggagttcctctttaaacacccgaagcgcacggccaccctcagcatgaggaacacgagcgtcatgaagaaagggggcatattctctgcagaatttctgaaagttttccttccatctctgctgctctctcatttgctggccatcggattgggagacggggcttcgccacgttgcccaggctgatctcgaactcaagggatggctcacctcggcctccaaagtgctgggattacaggcgtgagccaccgcgcctggcctttcctggctgcttatactcactcacctgcagaaaacacagagaccaggcaggcgccgctgtgggttctgaagagcgttcgccgcagcggtggtgaagagccagagcgggaagccaaaacggctcctcctcgggctggtcccagcctctcagcggggaggagggctctagtcctggcgtgcagacagtgttctgtggctgccgtgtgttggacagactggaaagaccggaatgccactgggggcaggtgggttaggtaggttggccagagggctcacatctatccgaaccgttccagcaacactcaaacttgtcaaagatgcagtcgttctcatagagagagcagagcttgctgcgcaggtactcgtggacctggtgggtctccaccggcgctgctctccatgttgaggtcccacaccttcaccgacaggtagtctctggtcatca

SEQ ID NO: 442934 - DNA, 1103 bp, Homo sapiens
agtgatttattcgtaacctgtttcctgaagtccagatcatcagttacagcttggtgcattttcacaaacacccacgtagtcactgttcaggtccagaaaccaccagcctgcagcccccaaaggccccagcacaggcgccctgtggtgctgctgtctggcctgacgagtctgcctgttgctcactgaatataaacggagtcaaagcagggcttcttaggtctgacctctttgtcctgtgtgtaggtgaaagcagtctcatttctgtgtagtactgtggcgggaatgcacccagctctgctgtaggtggagggtctcagttacctgctgtacttcctccagacaggactgttgttctagtaactctcagcaatgaaggaaccaatgcagtctccgactttactggcttgagtttcgctcttgttgcccaggctgagtgcaggggcgtgatctcggctcactgcagcctctgcctcctgggttcaagcgactctcctgcctcagcctcctgggtagctgggattacaggtgcccaccaccaggcctggctaatttttgtatttttaatagagacggggcttcgccacgttgcccaggctgatctcgaactcaagggatggctcacctcggcctccaaagtgctgggattacaggcgtgagccaccgcgcctggcctttcctggctgcttatactcactcacctgcagaaaacacagagaccaggcaggcgccgctgtgggttctgaagagcgttcgccgcagcggtggtgaagagccagagcgggaagccaaaacggctcctcctcgggctggtcccagcctctcagcggggaggagggctctagtcctggcgtgcagacagtgttctgtggctgccgtgtgttggacagactggaaagaccggaatgccactgggggcaggtgggttaggtaggttggccagagggctcacatctggggttgaaggaaacgggataaaagccactgagtttcctgggccgggacctgagcgctgcccgtgtctccacctcgccctcccgtgtgcgtggctttctcctagctcttgggcacattctcacgtcccccccataacccgtcaccttcat

SEQ ID NO: 442935 - DNA, 535 bp, Homo sapiens
cttcaagtcggggttgagggatggttcctggtgtggcaccattgctacctcttggaaatggaagggcaggctggttagatatcaagagcagattccagagtgggtagagaattccatctgcgcccctttttttgtccccatcaggctcctgggtagaactgcacttcagcaataatgggaacgggggcagcgttccagcctcggtttctatttataatggagacatggaaaaaatactgctggacgcacagcatgagtctggacggagtagctccaagagctctcactgtgacaggtaggcgcgcatcaacaagtgtatgtgttacagtgccgatgtcttcagtgggtgacagtcacagctggaagtgcccgtgtcacctctaggacagtgggctgctgttcgcctcgggccgcgttctggactggctcctgctgcagtccgtccttatataggagcctcgccctctttggggatgcagtgacctgggacttagtctgtggggagccatgttcaagtcatcagtaggcagcggaa

SEQ ID NO: 442936 - DNA, 257 bp, Homo sapiens
gatgatcagttttctgctgaaggcacctactcagtatcttttcctctttatcactctgcattggtgaatttaatcctctcctttgtgttcaacttttgtgtgcttttaaaatcagctttattctaagcaaatctgtgtctactttaaaaaactggaaatggaaaaaaaaataaatctttgccaaatccttcatcagattactgtatttacatatggtttaaaatcagacgtcatgatagcttcttaatgaaaccagg

SEQ ID NO: 442937 - DNA, 915 bp, Homo sapiens
gaatgggcgacgcggccgcagatccgcccggccccgccctgccctgtgagttcctccggccgggctgcggggctccgctcagtccgggagcgcagctgggccgcggcgctccgacctccgctttcccaccgcccgcagctgaagcacatcccgcagcccggcgcggactccgatcgccgcagttgccctctggcgccatgtcgcagaacggagcgcccgggatgcaggaggagagcctgcagggctcctgggtagaactgcacttcagcaataatgggaacgggggcagcgttccagcctcggtttctatttataatggagacatggaaaaaatactgctggacgcacagcatgagtctggacggagtagctccaagagctctcactgtgacagcccacctcgctcgcagacaccacaagataccaacagagcttctgaaacagatacccatagcattggagagaaaaacagctcacagtctgaggaagatgatattgaaagaaggaaagaagttgaaagcatcttgaagaaaaactcagattggatatgggattggtcaagtcggccggaaaatattccccccaaggagttcctctttaaacacccgaagcgcacggccaccctcagcatgaggaacacgagcgtcatgaagaaagggggcatattctctgcagaatttctgaaagttttccttccatctctgctgctctctcatttgctggccatcggattggggatctatattggaaggcgtctgacaacctccaccagcaccttttgatgaagaactggagtctgacttggttcgttagtggattacttctgagcttgcaacatagctcactgaagagctgttagatcctgggccttcgtggctcgagagactagaatcgcagatacgaaaaccccgcagc

SEQ ID NO: 442938 - DNA, 2358 bp, Homo sapiens
gaatgggcgacgcggccgcagatccgcccggccccgccctgccctgtgagttcctccggccgggctgcggggctccgctcagtccgggagcgcagctgggccgcggcgctccgacctccgctttcccaccgcccgcagctgaagcacatcccgcagcccggcgcggactccgatcgccgcagttgccctctggcgccatgtcgcagaacggagcgcccgggatgcaggaggagagcctgcagggctcctgggtagaactgcacttcagcaataatgggaacgggggcagcgttccagcctcggtttctatttataatggagacatggaaaaaatactgctggacgcacagcatgagtctggacggagtagctccaagagctctcactgtgacagcccacctcgctcgcagacaccacaagataccaacagagcttctgaaacagatacccatagcattggagagaaaaacagctcacagtctgaggaagatgatattgaaagaaggaaagaagttgaaagcatcttgaagaaaaactcagattggatatgggattggtcaagtcggccggaaaatattccccccaaggagttcctctttaaacacccgaagcgcacggccaccctcagcatgaggaacacgagcgtcatgaagaaagggggcatattctctgcagaatttctgaaagttttccttccatctctgctgctctctcatttgctggccatcggattggggatctatattggaaggcgtctgacaacctccaccagcaccttttgatgaagaactggagtctgacttggttcgttagtggattacttctgagcttgcaacatagctcactgaagagctgttagatcctggggtggccacgtcacttgtgtttatttgttctgtaaatgctgcgttcctaatttagtaaaataaaagaatagacactaaaatcatgttgatctataattacacctatgggatcaataagcatgtcagactgattaatgtctactgtgaaaatttggtagtaaattttcatttgatattagatataaatatctgaatataaataattttaatatactagtcatgatgtgtgttgtattttaaaaattatctgcaaccttaattcagctgaagtactttatatttcaaaagaatgaataacattgataataaaatcgctactttaaggggtttgtccaaaataaatattgtggccttatatatcacactattgtagaaagtattatttaatttaaatggatgcaggttgtctactaaagaaagattatatataactatgctaattgttcataatcaacagaaaccaagatagagctacaaactcagctgtacagttcgtacactaaactcttcttgcttttgcattataaggaattaagtctccgattattaggtgatcaccctggatgatcagttttctgctgaaggcacctactcagtatcttttcctctttatcactctgcattggtgaatttaatcctctcctttgtgttcaacttttgtgtgcttttaaaatcagctttattctaagcaaatctgtgtctactttaaaaaactggaaatggaaaaaaaaataaatctttgccaaatccttcaaaaaaaaaaaaaaaaaaaaaaaaaaaaaaaaaaaaaaaacaaaaaaggggggcgcggcccggcccaataatgatctccccccggggggcccccagtatcttacgcccacaccccccagctttttgtttaaccaaggggcccccccattaggaggggcctccgtataataataaggccgacagcgcaagccggggcccgcgcggttattacaacaccctcgcgggaggcggggaaaacagcggtgtcaacgccggggacagtctgtgggaaagcaaccccttcctcctcgtgggggggggcaccaatttatgtcggcgcaacacaatctcccctcaccgaaagaatttataagggcgccctccaggagggaaacattataaacacttctccagcgttttactggtggcgtgttatcaacaaccggcgtaaaatttgctctgcggcgataaagaaaaatttgggcgacgcgaggaatttattatttggggcaacatatttttttttatccgccggcgggctcttagtattataaataaagcgggccctagcatcattcacacatcagcacctcagcccgtgccctcatgacatcaatcaacaagcatccatatcatgcagactcacattacaacatgcaactcatcataacgtactacgtgagatactcatgctaggatctccctacgtacagaacactcaacactcaccgcaccgcactcatacaccgacgcagctata

SEQ ID NO: 442939 - DNA, 1214 bp, Homo sapiens
tacggtgaggtacagctacgggtgaggtacagctacgggtgaggtacagctacgggtgaggtacagctcacagtctgaggaagatgatattgaaagaaggaaagaagttgaaagcatcttgaagaaaaactcagattggatatgggattggtcaagtcggccggaaaatattccccccaaggagttcctctttaaacacccgaagcgcacggccaccctcagcatgaggaacacgagcgtcatgaagaaagggggcatattctctgcagaatttctgaaagttttccttccatctctgctgctctctcatttgctggccatcggattggggatctatattggaaggcgtctgacaacctccaccagcaccttttgatgaagaactggagtctgacttggttcgttagtggattacttctgagcttgcaacatagctcactgaagagctgttagatcctggggtggccacgtcacttgtgtttatttgttctgtaaatgctgcgttcctaatttagtaaaataaaagaatagacactaaaatcatgttgatctataattacacctatgggatcaataagcatgtcagactgattaatgtctactgtgaaaatttggtagtaaattttcatttgatattagatataaatatctgaatataaataattttaatatactagtcatgatgtgtgttgtattttaaaaattatctgcaaccttaattcagctgaagtactttatatttcaaaagaatgaataacattgataataaaatcgctactttaaggggtttgtccaaaataaatattgtggccttatatatcacactattgtagaaagtattatttaatttaaatggatgcaggttgtctactaaagaaagattatatataactatgctaattgttcataatcaacagaaaccaagatagagctacaaactcagctgtacagttcgtacactaaactcttcttgcttttgcattataaggaattaagtctccgattattaggtgatcaccctggatgatcagttttctgctgaaggcacctactcagtatcttttcctctttatcactctgcattggtgaatttaatcctctcctttgtgttcaacttttgtgtgcttttaaaatcagctttattctaagcaaatctgtgtctactttaaaaaactggaaatggaaaaaaaaataaatctttgccaaatccttca

SEQ ID NO: 442940 - DNA, 1272 bp, Homo sapiens
gaatgggcgacgcggccgcagatccgcccggccccgccctgccctgtgagttcctccggccgggctgcggggctccgctcagtccgggagcgcagctgggccgcggcgctccgacctccgctttcccaccgcccgcagctgaagcacatcccgcagcccggcgcggactccgatcgccgcagttgccctctggcgccatgtcgcagaacggagcgcccgggatgcaggaggagagcctgcagggctcctgggtagaactgcacttcagcaataatgggaacgggggcagcgttccagcctcggtttctatttataatggagacatggaaaaaatactgctggacgcacagcatgagtctggacggagtagctccaagagctctcactgtgacagcccacctcgctcgcagacaccacaagataccaacagagcttctgaaacagatacccatagcattggagagaaaaacagctcacagtctgaggaagatgatattgaaagaaggaaagaagttgaaagcatcttgaagaaaaactcagattggatatgggattggtcaagtcggccggaaaatattccccccaaggagttcctctttaaacacccgaagcgcacggccaccctcagcatgaggaacacgagcgtcatgaagaaagggggcatattctctgcagaatttctgaaagttttccttccatctctgctgctctctcatttgctggccatcggattgggagacggggcttcgccacgttgcccaggctgatctcgaactcaagggatggctcacctcggcctccaaagtgctgggattacaggcgtgagccaccgcgcctggcctttcctggctgcttatactcactcacctgcagaaaacacagagaccaggcaggcgccgctgtgggttctgaagagcgttcgccgcagcggtggtgaagagccagagcgggaagccaaaacggctcctcctcgggctggtcccagcctctcagcggggaggagggctctagtcctggcgtgcagacagtgttctgtggctgccgtgtgttggacagactggaaagaccggaatgccactgggggcaggtgggttaggtaggttggccagagggctcacatctggggttgaaggaaacgggataaaagccactgagtttcctgggccgggacctgagcgctgcccgtgtctccacctcgccctcccgtgtgcgtggctttctcctagctcttgggcacattctcacgtcccccccataacccgtcaccttcat

SEQ ID NO: 442941 - DNA, 575 bp, Homo sapiens
aaagaaaaaaaaagatttgggaactgacaagtatagttggttaaaccactaaaatggtagtgatcaactaaagaacaagtacgtgtagacagaagcccaaagactaagccctgggataggcctgtgtttaaggataaaaagaggaggaaaatccagcacaagagatggaggaagagcagtcagtgagctagaaggaaaaccaagagttcctaaagccaaatggggaacatgagcacaccaaattcttcagagaagttgaataagatgaggatgaggaactcatcactggctttggcacatagaggtcactggtccacggtttcattgaagtgttgggatgagagcccatttggaacgggctcaaaagagaacaggaagaggactggagacaaggagtccagacaactctttcaaagagtttagctgaaaaggggtacaaagaaatgggaccatatctggacacggtatatggtcaagagagggagctcttgcagctggcaagtgttctgaagtgctctgtggtgggacacttaggttactattagcacaattattttgctgttataaatagtgct

SEQ ID NO: 442942 - DNA, 3141 bp, Homo sapiens
ctttaagaaagagctgtttttatcttgttattggtgtttgggttgcccagtattgaagcatcatgaccccagtctgccatatttggaacagtatcagattgactgccagcagttcagagcgttgtatcacttgttgagtccctgggctcattctgcaaataaagactcactagctttatggacattcagattgttagatgaaaactctgattgccttataaacttcaaagaattctcctctgcaattgacataatgtgcaatggaagttttactgagaagcttaagctgctttttaagctacatattcctccagcttacactgaagtgaaatctaaggatgcttcaaaaggagatgaactttccaaggaagaattactttatttcagtcagctgcatgtttccaagcctgcaaatgagaaggaagcagaatcagcaaaacacagccctgaaaaaggcaaagggaaaattgatattcaagcatatctaagtcaatggcaagatgagcttttcaaaaaagaagaaaacattaaggatttaccaagaatgaatcagtctcagtttattcagttttcaaagaccctctataacttatttcatgaggaccctgaagaagaatcattatatcaagccattgctgttgtaaccagccttttactcaggatggaagaagttggaaggaaactacatagccctacatcatcagccaaaggattctctggtactgtctgtggttctggaggacccagtgaggaaaaaacagggagccacttggagaaagatccttgttcctttagggaggaacctcagtggtcatttgcatttgaacagattcttgcatcgctgttgaatgaaccagcattggtgaggttttttgagaaacccatagatgtaaaagccaagctggaaaatgcaagaatttctcagttaaggtctagaaccaagatgtaaatccctaggaattgcctatcatagacaagtttactaacattcctgtagctgtcagtttgattcctgtgagtagggctcagggatttatcttgttaccaatgtgtctgaaggccaaaatatatatccagaagcacaatgcatcattcctttgttgttgataatgggctttgttagcactttttaaaacaaacaaacaaacaaaacaaaaaagcaaaccacatttgttatctcaaattttgatgatattctcaaatacaaatatacttttttatatttcacaatatatgcaatatcaggggaatatgctaaatgttaccaccagagggcacaagcatatcacttttagtaaggaaattactagcttgtgttgctatttacatatgaattactgattattttgaaaagacggtgttatgcttgggtgttagtgaggctgatatgtcatgtcaatcgataaaccctactttccaaattatctaaaagattaccatttggggcccttgttttcaagttatctaactgaaatattattaatttttttaagttaatctcattcagtcttctagtaataaatgcttttttaagtaccttctacagtcttcctacctgaggggttcagaggctgctgactcacactgctaactctgttactgacaaaagcaaatcaataactctaaattctgggctgatataaagaaaaaaacaatattggatttggatttaatctgggtaaaatcagccttctgagaagggctaagaaacagttcaattaactgtataggtctttcattagaccgagacatcactagaaattctgggcactgctgtttgtggtatttgtctcagagtagcttatgactgttttggttctagctttagattttggattttcaccagtcatgtgttaatttacattagatagtaaagaatggctacactaagactgaattatcttattagtctggcaagcatataaagtatacttgtatgtaatgattgccaaggtaacagaattgctgacatctgtctaaaaagttttgactatccaatttagatgtgtaatttctatatactttatgctgtttatatttcagtcattacaccaagtccatttagagataatgggctttgttagcactttcaaaaaaaaaaaaagcaaaccatacttgtccactgtcctgtgctattcctaccaaggacaatttattaatcaattgacttagaaaatagggggagaaatcattcattggagcttctttctttagaaaagactttggttataagccttttgacttttctagatgtgaaaccatgaaagggcagacctccttcagagtgactcaagaggtctccctttcttgggagggagttggtacagtcagcctttgggaagaatccactgtgaacaaagcttaacacatgggggcttcatcgctcatagaatatgttatttttcaaagaagttcaagaattttccaagttgagcctttgaaaatcccataaattggttttagctaaacacttactagtagtgtctttaaattatttaatcaaccttgtccttttcaaggaaattacccacttaaagagatagttggtaaataaacatcctatgccttttctcagaaatgatttgctgaactatgtccatattttacagcttagataatagtttatatggaaactattatacatctgctattgtgcaatgattgttaaattatactgaagtagctctagaaagacacatgtatacaaggcactattgtacacactttgctgaatattttgtcagttgtatttacaaagaaaggtactttcttaagagcatatatgttattaatatttgatatgattttaaagtcagaatagtacagattgctgagtattatactttaggctagattaattaaaattgaatactgaaagagattttttgagttgcaaaaagtttataaatgcaaagcaaaaagaaaacatttattttctgagtctgcaggagaaacaaactaaacattatagttttatagctgctatcttgttaaccaaacaggttgttcataatattaaaaatcttacgtagttgtgttaaactgaaccagttcattataccttatgcattaaattaaatatgttataaggtggctttacttgtctttataaaaataaatatatctactaaacatgaaaaa

SEQ ID NO: 442943 - DNA, 405 bp, Homo sapiens
gagtccctgggctcattctgcaaataaagactcactagctttatggacattcagattgttagatgaaaactctgattgccttataaacttcaaagaattctcctctgcaattggtaagatgatttttttaagcaaaaaaaaaaggtgctcctagaaatacttagtactgcctattattgccaatttagtcagattatatcaccatgggttacagtgtgtttagctttagtaataaatggacccttttctgcatttgttgctaaatctaagtattttgatattattttccccaaccctttcagaaaagcaagctgttagatgtgagtgttttaagggttaacataaggaagataacgtcccaattttcccacactcagatgcatgggtactaccgaaggacttccc

SEQ ID NO: 442944 - DNA, 1631 bp, Homo sapiens
aggtggtgctgttgccgtgactgtcttcctcattggcgccgtgcagagaggcggaatgttcaactcctaactgcggcggaaacgtgggagccgcgcgggccgctgtcgtcccaacccccgccgccctcgtcgcgcgcggggcctccgcgcccccggctgctgctcacgccccgcccgggagccagattttgtggaagtataatactttgtcattatgagatgtcgtctctcggtgcctcctttgtgcaaattaaatttgatgacttgcagttttttgaaaactgcggtggaggaagttttgggagtgtttatcgagccaaatggatatcacaggacaaggaggtggctgtaaagaagctcctcaaaatagagaaagaggcagaaatactcagtgtcctcagtcacagaaacatcatccagttttatggagtaattcttgaacctcccaactatggcattgtcacagaatatgcttctctgggatcactctatgattacattaacagtaacagaagtgaggagatggatatggatcacattatgacctgggccactgatgtagccaaaggaatgcattatttacatatggaggctcctgtcaaggtgattcacagagacctcaagtcaagaaacgttgttatagctgctgatggagtattgaagatctgtgactttggtgcctctcggttccataaccatacaacacacatgtccttggttggaactttcccatggatggctccagaagttatccagagtctccctgtgtcagaaacttgtgacacatattcctatggtgtggttctctgggagatgctaacaagggaggtcccctttaaaggtttggaaggattacaagtagcttggcttgtagtggaaaaaaacgagagattaaccattccaagcagttgccccagaagttttgctgaactgttacatcagtgttgggaagctgatgccaagaaacggccatcattcaagcaaatcatttcaatcctggagtccatgtcaaatgacacgagccttcctgacaagtgtaactcattcctacacaacaaggcggagtggaggtgcgaaattgaggcaactcttgagaggctaaagaaactagagcgtgatctcagctttaaggagcaggagcttaaagaacgagaaagacgtttaaagatgtgggagcaaaagctgacagagcagtccaacaccccgcttctcttgcctcttgctgcaagaatgtctgaggagtcttactttgaatctaaaacagaggagtcaaacagtgcagagatgtcatgtcagatcacagcaacaagtaacggggagggccatggcatgaacccaagtctgcaggccatgatgctgatgggctttggggatatcttctcaatgaacaaagcaggagctgtgatgcattctgggatgcagataaacatgcaagccaagcagaattcttccaaaaccacatctaagagaagggggaagaaagtcaacatggctctggggttcagtgattttgacttgtcagaaggtgacgatgatgatgatgatgacggtgaggaggaggataatgacatggataatagtgaatgaaagcagaaagcaaagtaataaaatcacaaatgtttggaaaacac

SEQ ID NO: 442945 - DNA, 817 bp, Homo sapiens
ttaatatatagaagaagttgtgtgcttaattgttttgcccaagtttctacagttggggttggttgtgtctggtaattagatacaattacatgttagataaggtctcagtaatatgtaccaaaaaatataaagtacaaaaataaaaattccattttctttttgttccaggttctctgggagatgctaacaagggaggtcccctttaaaggtttggaaggattacaagtagcttggcttgtagtggaaaaaaacgaggtaagactacgtttctccattcaggtacatagatcagaaaacagtattggggttttgcaaaagactttttcatcttcttcaaattgaaagtaagttcacgcttatggaaagattagcagtaggagctaacacaaagggtcaaagtgatgttattcctcatgaatggaccctttacatctaattgttgcagcttcacgtcgtgatgctgtagatcaaaaattgtacaagtactgtactagtttctcagtctcaattgtaaaacctaggggtttgttcttagtgatgaaagaagccattgcgtccaaggtaggggaacagtttaactccatctcctgcgtttaggacatcttttttactggccgggagttgatatatctgtaagagaccttcagctacttcaacttacctctcccagcaggagtcactatagtacaagaaactgtcgcttagatgagaatttcaaaaataaaagaagaaaaaatagtttcaaaaaagggaaaaattacagttttgccacctacgttgaacactacattgaagatgagctcctcactggaattgg

SEQ ID NO: 442946 - DNA, 3391 bp, Homo sapiens
aggtggtgctgttgccgtgactgtcttcctcattggcgccgtgcagagaggcggaatgttcaactcctaactgcggcggaaacgtgggagccgcgcgggccgctgtcgtcccaacccccgccgccctcgtcgcgcgcggggcctccgcgcccccggctgctgctcacgccccgcccgggagccagattttgtggaagtataatactttgtcattatgagatgtcgtctctcggtgcctcctttgtgcaaattaaatttgatgacttgcagttttttgaaaactgcggtggaggaagttttgggagtgtttatcgagccaaatggatatcacaggacaaggaggtggctgtaaagaagctcctcaaaatagagaaagaggcagaaatactcagtgtcctcagtcacagaaacatcatccagttttatggagtaattcttgaacctcccaactatggcattgtcacagaatatgcttctctgggatcactctatgattacattaacagtaacagaagtgaggagatggatatggatcacattatgacctgggccactgatgtagccaaaggaatgcattatttacatatggaggctcctgtcaaggtgattcacagagacctcaagtcaagaaacgttgttatagctgctgatggagtattgaagatctgtgactttggtgcctctcggttccataaccatacaacacacatgtccttggttggaactttcccatggatggctccagaagttatccagagtctccctgtgtcagaaacttgtgacacatattcctatggtgtggttctctgggagatgctaacaagggaggtcccctttaaaggtttggaaggattacaagtagcttggcttgtagtggaaaaaaacgagagattaaccattccaagcagttgccccagaagttttgctgaactgttacatcagtgttgggaagctgatgccaagaaacggccatcattcaagcaaatcatttcaatcctggagtccatgtcaaatgacacgagccttcctgacaagtgtaactcattcctacacaacaaggcggagtggaggtgcgaaattgaggcaactcttgagaggctaaagaaactagagcgtgatctcagctttaaggagcaggagcttaaagaacgagaaagacgtttaaagatgtgggagcaaaagctgacagagcagtccaacaccccgctgctgccttcctttgagattggtgcatggacggaagacgatgtgtattgttgggttcagcagctcgtcagaaaaggtgactcttcagcagagatgagtgtatatgcaagcttgtttaaagaaaacaacattacagggaagcggctgctgctgctggaggaagaagacctgaaagacatgggcattgtctccaaggggcatatcattcacttcaagtcagccattgagaaattaacccatgattacataaatttgtttcacttcccaccactaattaaggactcaggaggtgaacctgaagaaaatgaggaaaaaatagtgaacctggaactggtttttggttttcacttgaaaccaggaactggcccacaggattgtaagtggaaaatgtatatggagatggatggggatgaaattgcaataacctacataaaagatgtgacattcaacactaacctacctgatgcggagattttaaagatgacaaagccaccatttgtaatggagaagtggattgtaggaatagcaaaaagtcagactgtggagtgcactgtcacatatgagagtgatgttagaactccaaaaagcactaaacatgtccatttgattcagtggagtagaacaaaacctcaggatgaagtgaaagcagtccaacttgccattcagacattattcaccaattcagatggcaaccctggaagcaggtccgactcaagtgctgattgccagtggttagatactctgaggatgcggcagattgcatccaacacttctttacagcgttcccagagcaatcctattctggggtcaccgttcttctcacactttgatggccaggattcctacgctgctgctgtgagacggccccaggtgcccattaagtatcaacagattacacctgtgaaccagtccagaagctcgtctcctactcagtatggactgaccaaaaacttctcttccctacatctcaactctagggacagtggcttttccagtggcaatactgacacctcttcagagaggggtcgatactcagacagaagcaggaacaaatatggacgtggtagtatatcactcaattcttctcctagaggaagatacagtggaaagagtcagcattccactccttcaagaggaagataccctggaaagttctacagggtttctcagtcagcactcaatcctcaccagtcgcctgacttcaagagaagccccagggacctccaccaacccaacaccataccagggatgcctttgcaccctgagactgactcaagagccagtgaagaggacagcaaagtcagcgaagggggctggacaaaagtggaataccggaaaaagccccacaggccatctcccgccaaaaccaataaagagagagccagaggggaccaccgtggatggagaaacttttgatgaattgaactacatagcttttctaagcaggttaaaaaaaaaaaaaaaaagaaatgtaatggtttttgataatatgatcccttcagattgaattaacgaaaagacaacacttccagtttttggattgggaaataccttctaattgagactatagccaaaccagggccaaaattatggatattggtcacccagtgatcataactaggcttgaaaatcactacacatattttctgccttgagtgaacatttttagaggaaaggttatgccatctttttaccctaaccactgatattctggttagcagggccaggacaaggggaaggaaaatgaggtcaacaaaaaaatcaaatttttaggaaaagataagatgaatgttactgatttttccttttggctgaggctgcaatatggcctggcaaggcactgttactgatcttgtctttaacattttgatattttgttcatcataatttttgcatttatttttttaaatattgcattaaaatatcatttagcttgattatcgagttttttggtttgaggttttttgttgcttcttttttcttttctttctttccccctcttttttttggatgtccccttaaattttgtgcccaaggcaggtacctcactcatctcatccttggctcagccctgctggttagtatttagtatttattttagtaagatatttgtgtctgtatgatggtcagagttgaactgatctggcttgtcatttttcagtaataaaaaaagttactgaattta

SEQ ID NO: 442947 - DNA, 2276 bp, Homo sapiens
aggtggtgctgttgccgtgactgtcttcctcattggcgccgtgcagagaggcggaatgttcaactcctaactgcggcggaaacgtgggagccgcgcgggccgctgtcgtcccaacccccgccgccctcgtcgcgcgcggggcctccgcgcccccggctgctgctcacgccccgcccgggagccagattttgtggaagtataatactttgtcattatgagatgtcgtctctcggtgcctcctttgtgcaaattaaatttgatgacttgcagttttttgaaaactgcggtggaggaagttttgggagtgtttatcgagccaaatggatatcacaggacaaggaggtggctgtaaagaagctcctcaaaatagagaaagaggcagaaatactcagtgtcctcagtcacagaaacatcatccagttttatggagtaattcttgaacctcccaactatggcattgtcacagaatatgcttctctgggatcactctatgattacattaacagtaacagaagtgaggagatggatatggatcacattatgacctgggccactgatgtagccaaaggaatgcattatttacatatggaggctcctgtcaaggtgattcacagagacctcaagtcaagaaacgttgttatagctgctgatggagtattgaagatctgtgactttggtgcctctcggttccataaccatacaacacacatgtccttggttggaactttcccatggatggctccagaagttatccagagtctccctgtgtcagaaacttgtgacacatattcctatggtgtggttctctgggagatgctaacaagggaggtcccctttaaaggtttggaaggattacaagtagcttggcttgtagtggaaaaaaacgagagattaaccattccaagcagttgccccagaagttttgctgaactgttacatcagtgttgggaagctgatgccaagaaacggccatcattcaagcaaatcatttcaatcctggagtccatgtcaaatgacacgagccttcctgacaagtgtaactcattcctacacaacaaggcggagtggaggtgcgaaattgaggcaactcttgagaggctaaagaaactagagcgtgatctcagctttaaggagcaggagcttaaagaacgagaaagacgtttaaagatgtgggagcaaaagctgacagagcagtccaacaccccgcttctcttgcctcttgctgcaagaatgtctgaggagtcttactttgaatctaaaacagaggagtcaaacagtgcagagatgtcatgtcagatcacagcaacaagtaacggggagggccatggcatgaacccaagtctgcaggccatgatgctgatgggctttggggatatcttctcaatgaacaaagcaggagctgtgatgcattctgggatgcagataaacatgcaagccaagcagaattcttccaaaaccacatctaagagaagggggaagaaagtcaacatggctctggggttcagtgattttgacttgtcagaaggtgacgatgatgatgatgatgacggtgaggaggaggataatgacatggataatagtgaatgaaagcagaaagcaaagtaataaaatcacaaatgtttggaaaacacaaaagtaacttgtttatctcagtctgtacaaaaacagtaaggaggcagaaagccaagcactgcatttttaggccaatcacatttacatgaccgtaatttcttatcaattctacttttatttttgcttacagaaaaacggggggagaattaagccaaagaagtatatttatgaatcagcaaatgtggtgcctgattatagaaatttgtgatcctatatacaatataggacttttaaagttgtgacattctggctttttcttttaatgaatactttttagtttgtatttgactttatttcctttattcaaatcatttttaaaaacttacattttgaacaaacactcttaactcctaattgttctttgacacgtagtaattctgtgacatactttttttttcttatagcaatacactgtaatatcagaaatggttggcctgagcaacctagtaagacctcgtctctactaataattaaaaaactagctggcatggtagcacacacctgtagtcccagatacttgggaggccaaggcaggaggattgcttgagacctagcaatcagtcagggctgcagtgagccatgatggcaccactgcactctagcctgggcaagagaacaagatcctgtctcaaaaaacaaaaaaa

SEQ ID NO: 442948 - DNA, 2776 bp, Homo sapiens
aggtggtgctgttgccgtgactgtcttcctcattggcgccgtgcagagaggcggaatgttcaactcctaactgcggcggaaacgtgggagccgcgcgggccgctgtcgtcccaacccccgccgccctcgtcgcgcgcggggcctccgcgcccccggctgctgctcacgccccgcccgggagccagattttgtggaagtataatactttgtcattatgagatgtcgtctctcggtgcctcctttgtgcaaattaaatttgatgacttgcagttttttgaaaactgcggtggaggaagttttgggagtgtttatcgagccaaatggatatcacaggacaaggaggtggctgtaaagaagctcctcaaaatagagaaagaggcagaaatactcagtgtcctcagtcacagaaacatcatccagttttatggagtaattcttgaacctcccaactatggcattgtcacagaatatgcttctctgggatcactctatgattacattaacagtaacagaagtgaggagatggatatggatcacattatgacctgggccactgatgtagccaaaggaatgcattatttacatatggaggctcctgtcaaggtgattcacagagacctcaagtcaagaaacgttgttatagctgctgatggagtattgaagatctgtgactttggtgcctctcggttccataaccatacaacacacatgtccttggttggaactttcccatggatggctccagaagttatccagagtctccctgtgtcagaaacttgtgacacatattcctatggtgtggttctctgggagatgctaacaagggaggtcccctttaaaggtttggaaggattacaagtagcttggcttgtagtggaaaaaaacgagagattaaccattccaagcagttgccccagaagttttgctgaactgttacatcagtgttgggaagctgatgccaagaaacggccatcattcaagcaaatcatttcaatcctggagtccatgtcaaatgacacgagccttcctgacaagtgtaactcattcctacacaacaaggcggagtggaggtgcgaaattgaggcaactcttgagaggctaaagaaactagagcgtgatctcagctttaaggagcaggagcttaaagaacgagaaagacgtttaaagatgtgggagcaaaagctgacagagcagtccaacaccccgagtcagcattccactccttcaagaggaagataccctggaaagttctacagggtttctcagtcagcactcaatcctcaccagtcgcctgacttcaagagaagccccagggacctccaccaacccaacaccataccagggatgcctttgcaccctgagactgactcaagagccagtgaagaggacagcaaagtcagcgaagggggctggacaaaagtggaataccggaaaaagccccacaggccatctcccgccaaaaccaataaagagagagccagaggggaccaccgtggatggagaaacttttgatgaattgaactacatagcttttctaagcaggttaaaaaaaaaaaaaaaaagaaatgtaatggtttttgataatatgatcccttcagattgaattaacgaaaagacaacacttccagtttttggattgggaaataccttctaattgagactatagccaaaccagggccaaaattatggatattggtcacccagtgatcataactaggcttgaaaatcactacacatattttctgccttgagtgaacatttttagaggaaaggttatgccatctttttaccctaaccactgatattctggttagcagggccaggacaaggggaaggaaaatgaggtcaacaaaaaaatcaaatttttaggaaaagataagatgaatgttactgatttttccttttggctgaggctgcaatatggcctggcaaggcactgttactgatcttgtctttaacattttgatattttgttcatcataatttttgcatttatttttttaaatattgcattaaaatatcatttagcttgattatcgagttttttggtttgaggttttttgttgcttcttttttcttttctttctttccccctcttttttttggatgtccccttaaattttgtgcccaaggcaggtacctcactcatctcatccttggctcagccctgctggttagtatttagtatttattttagtaagatatttgtgtctgtatgatggtcagagttgaactgatctggcttgtcatttttcagtaataaaaaaagttactgaatttaatgttgaatatgatgcatatctcattcattacgatttatcagaaaccaaagatttaaattgcctagatttgtggttctttctcttcctaagttcccagcgactgctttcaaatactattttctaaatttcaccaaaggagcaaagaggataaaacaacactccataaaggcctcttgggatgtcagaaatctaaaatctaaaagaaaacagacacagagcaagacaataacatcacaagctaaaagccagagaaatttaaaattaccaacatccttgttggagtaagacagtaaatatcagccttgcagcaagacagctctgagcagctgtgggcaaagaggtaaaccagtgggggtgcaaggagactgtctgcagcttagggcagaaatggtgggatccaacttgtgaaatgcttcatgttttacaaaccaaaaagtcaggtagcaacaaacttattgtatgtcaaatcaataaatgttactttcaataaaaaa

SEQ ID NO: 442949 - DNA, 3712 bp, Homo sapiens
acctatggaattgtgaagtttgctgctttttatgtgactgtgactgaatgggtcttgttaagcccaaagtgactcaaagggcatgacctgtgtataactctctggtgattatatacaggattgaaaatcctccaagcctgcttttaaagttgtagcacagcagttttagacatagaaaggctggttttccatcttgtcatacaggcagaaatactcagtgtcctcagtcacagaaacatcatccagttttatggagtaattcttgaacctcccaactatggcattgtcacagaatatgcttctctgggatcactctatgattacattaacagtaacagaagtgaggagatggatatggatcacattatgacctgggccactgatgtagccaaaggaatgcattatttacatatggaggctcctgtcaaggtgattcacagagacctcaagtcaagaaacgttgttatagctgctgatggagtattgaagatctgtgactttggtgcctctcggttccataaccatacaacacacatgtccttggttggaactttcccatggatggctccagaagttatccagagtctccctgtgtcagaaacttgtgacacatattcctatggtgtggttctctgggagatgctaacaagggaggtcccctttaaaggtttggaaggattacaagtagcttggcttgtagtggaaaaaaacgagagattaaccattccaagcagttgccccagaagttttgctgaactgttacatcagtgttgggaagctgatgccaagaaacggccatcattcaagcaaatcatttcaatcctggagtccatgtcaaatgacacgagccttcctgacaagtgtaactcattcctacacaacaaggcggagtggaggtgcgaaattgaggcaactcttgagaggctaaagaaactagagcgtgatctcagctttaaggagcaggagcttaaagaacgagaaagacgtttaaagatgtgggagcaaaagctgacagagcagtccaacaccccgctgctgccttcctttgagattggtgcatggacggaagacgatgtgtattgttgggttcagcagctcgtcagaaaaggtgactcttcagcagagatgagtgtatatgcaagcttgtttaaagaaaacaacattacagggaagcggctgctgctgctggaggaagaagacctgaaagacatgggcattgtctccaaggggcatatcattcacttcaagtcagccattgagaaattaacccatgattacataaatttgtttcacttcccaccactaattaaggactcaggaggtgaacctgaagaaaatgaggaaaaaatagtgaacctggaactggtttttggttttcacttgaaaccaggaactggcccacaggattgtaagtggaaaatgtatatggagatggatggggatgaaattgcaataacctacataaaagatgtgacattcaacactaacctacctgatgcggagattttaaagatgacaaagccaccatttgtaatggagaagtggattgtaggaatagcaaaaagtcagactgtggagtgcactgtcacatatgagagtgatgttagaactccaaaaagcactaaacatgtccatttgattcagtggagtagaacaaaacctcaggatgaagtgaaagcagtccaacttgccattcagacattattcaccaattcagatggcaaccctggaagcaggtccgactcaagtgctgattgccagtggttagatactctgaggatgcggcagattgcatccaacacttctttacagcgttcccagagcaatcctattctggggtcaccgttcttctcacactttgatggccaggattcctacgctgctgctgtgagacggccccaggtgcccattaagtatcaacagattacacctgtgaaccagtccagaagctcgtctcctactcagtatggactgaccaaaaacttctcttccctacatctcaactctagggacagtggcttttccagtggcaatactgacacctcttcagagaggggtcgatactcagacagaagcaggaacaaatatggacgtggtagtatatcactcaattcttctcctagaggaagatacagtggaaagagtcagcattccactccttcaagaggaagataccctggaaagttctacagggtttctcagtcagcactcaatcctcaccagtcgcctgacttcaagagaagccccagggacctccaccaacccaacaccataccagggatgcctttgcaccctgagactgactcaagagccagtgaagaggacagcaaagtcagcgaagggggctggacaaaagtggaataccggaaaaagccccacaggccatctcccgccaaaaccaataaagagagagccagaggggaccaccgtggatggagaaacttttgatgaattgaactacatagcttttctaagcaggttaaaaaaaaaaaaaaaaagaaatgtaatggtttttgataatatgatcccttcagattgaattaacgaaaagacaacacttccagtttttggattgggaaataccttctaattgagactatagccaaaccagggccaaaattatggatattggtcacccagtgatcataactaggcttgaaaatcactacacatattttctgccttgagtgaacatttttagaggaaaggttatgccatctttttaccctaaccactgatattctggttagcagggccaggacaaggggaaggaaaatgaggtcaacaaaaaaatcaaatttttaggaaaagataagatgaatgttactgatttttccttttggctgaggctgcaatatggcctggcaaggcactgttactgatcttgtctttaacattttgatattttgttcatcataatttttgcatttatttttttaaatattgcattaaaatatcatttagcttgattatcgagttttttggtttgaggttttttgttgcttcttttttcttttctttctttccccctcttttttttggatgtccccttaaattttgtgcccaaggcaggtacctcactcatctcatccttggctcagccctgctggttagtatttagtatttattttagtaagatatttgtgtctgtatgatggtcagagttgaactgatctggcttgtcatttttcagtaataaaaaaagttactgaatttaatgttgaatatgatgcatatctcattcattacgatttatcagaaaccaaagatttaaattgcctagatttgtggttctttctcttcctaagttcccagcgactgctttcaaatactattttctaaatttcaccaaaggagcaaagaggataaaacaacactccataaaggcctcttgggatgtcagaaatctaaaatctaaaagaaaacagacacagagcaagacaataacatcacaagctaaaagccagagaaatttaaaattaccaacatccttgttggagtaagacagtaaatatcagccttgcagcaagacagctctgagcagctgtgggcaaagaggtaaaccagtgggggtgcaaggagactgtctgcagcttagggcagaaatggtgggatccaacttgtgaaatgcttcatgttttacaaaccaaaaagtcaggtagcaacaaacttattgtatgtcaaatcaataaatgttactttcaataaaaaa

SEQ ID NO: 442950 - DNA, 3360 bp, Homo sapiens
acatatatcgcaagttgcctataaacatacagtgacatatggttttatatttaatatttaagttccgacttgccccctcctactgtagttctgtttagatattttatgttttgttgcattagttgtactgaacctgacttctccgttcactacagttccctttcaagaaaaagtatgagtctttagagattacagatctaaacataaattgtcacttgtcacatattaatcaatggaagctttaaatttcatgccttatgttcttaaaataactctattatgacccttcagatacggtgtttgctgacattaatgaataaatccctgttttattttgttttgtttccctctgtctattgtagagattaaccattccaagcagttgccccagaagttttgctgaactgttacatcagtgttgggaagctgatgccaagaaacggccatcattcaagcaaatcatttcaatcctggagtccatgtcaaatgacacgagccttcctgacaagtgtaactcattcctacacaacaaggcggagtggaggtgcgaaattgaggcaactcttgagaggctaaagaaactagagcgtgatctcagctttaaggagcaggagcttaaagaacgagaaagacgtttaaagatgtgggagcaaaagctgacagagcagtccaacaccccgctgctgccttcctttgagattggtgcatggacggaagacgatgtgtattgttgggttcagcagctcgtcagaaaaggtgactcttcagcagagatgagtgtatatgcaagcttgtttaaagaaaacaacattacagggaagcggctgctgctgctggaggaagaagacctgaaagacatgggcattgtctccaaggggcatatcattcacttcaagtcagccattgagaaattaacccatgattacataaatttgtttcacttcccaccactaattaaggactcaggaggtgaacctgaagaaaatgaggaaaaaatagtgaacctggaactggtttttggttttcacttgaaaccaggaactggcccacaggattgtaagtggaaaatgtatatggagatggatggggatgaaattgcaataacctacataaaagatgtgacattcaacactaacctacctgatgcggagattttaaagatgacaaagccaccatttgtaatggagaagtggattgtaggaatagcaaaaagtcagactgtggagtgcactgtcacatatgagagtgatgttagaactccaaaaagcactaaacatgtccatttgattcagtggagtagaacaaaacctcaggatgaagtgaaagcagtccaacttgccattcagacattattcaccaattcagatggcaaccctggaagcaggtccgactcaagtgctgattgccagtggttagatactctgaggatgcggcagattgcatccaacacttctttacagcgttcccagagcaatcctattctggggtcaccgttcttctcacactttgatggccaggattcctacgctgctgctgtgagacggccccaggtgcccattaagtatcaacagattacacctgtgaaccagtccagaagctcgtctcctactcagtatggactgaccaaaaacttctcttccctacatctcaactctagggacagtggcttttccagtggcaatactgacacctcttcagagaggggtcgatactcagacagaagcaggaacaaatatggacgtggtagtatatcactcaattcttctcctagaggaagatacagtggaaagagtcagcattccactccttcaagaggaagataccctggaaagttctacagggtttctcagtcagcactcaatcctcaccagtcgcctgacttcaagagaagccccagggacctccaccaacccaacaccataccagggatgcctttgcaccctgagactgactcaagagccagtgaagaggacagcaaagtcagcgaagggggctggacaaaagtggaataccggaaaaagccccacaggccatctcccgccaaaaccaataaagagagagccagaggggaccaccgtggatggagaaacttttgatgaattgaactacatagcttttctaagcaggttaaaaaaaaaaaaaaaaagaaatgtaatggtttttgataatatgatcccttcagattgaattaacgaaaagacaacacttccagtttttggattgggaaataccttctaattgagactatagccaaaccagggccaaaattatggatattggtcacccagtgatcataactaggcttgaaaatcactacacatattttctgccttgagtgaacatttttagaggaaaggttatgccatctttttaccctaaccactgatattctggttagcagggccaggacaaggggaaggaaaatgaggtcaacaaaaaaatcaaatttttaggaaaagataagatgaatgttactgatttttccttttggctgaggctgcaatatggcctggcaaggcactgttactgatcttgtctttaacattttgatattttgttcatcataatttttgcatttatttttttaaatattgcattaaaatatcatttagcttgattatcgagttttttggtttgaggttttttgttgcttcttttttcttttctttctttccccctcttttttttggatgtccccttaaattttgtgcccaaggcaggtacctcactcatctcatccttggctcagccctgctggttagtatttagtatttattttagtaagatatttgtgtctgtatgatggtcagagttgaactgatctggcttgtcatttttcagtaataaaaaaagttactgaatttaatgttgaatatgatgcatatctcattcattacgatttatcagaaaccaaagatttaaattgcctagatttgtggttctttctcttcctaagttcccagcgactgctttcaaatactattttctaaatttcaccaaaggagcaaagaggataaaacaacactccataaaggcctcttgggatgtcagaaatctaaaatctaaaagaaaacagacacagagcaagacaataacatcacaagctaaaagccagagaaatttaaaattaccaacatccttgttggagtaagacagtaaatatcagccttgcagcaagacagctctgagcagctgtgggcaaagaggtaaaccagtgggggtgcaaggagactgtctgcagcttagggcagaaatggtgggatccaacttgtgaaatgcttcatgttttacaaaccaaaaagtcaggtagcaacaaacttattgtatgtcaaatcaataaatgttactttcaataaaaaa

SEQ ID NO: 442951 - DNA, 1450 bp, Homo sapiens
aggtggtgctgttgccgtgactgtcttcctcattggcgccgtgcagagaggcggaatgttcaactcctaactgcggcggaaacgtgggagccgcgcgggccgctgtcgtcccaacccccgccgccctcgtcgcgcgcggggcctccgcgcccccggctgctgctcacgccccgcccgggagccagattttgtggaagtataatactttgtcattatgagatgtcgtctctcggtgcctcctttgtgcaaattaaatttgatgacttgcagttttttgaaaactgcggtggaggaagttttgggagtgtttatcgagccaaatggatatcacaggacaaggaggtggctgtaaagaagctcctcaaaatagagaaagaggcagaaatactcagtgtcctcagtcacagaaacatcatccagttttatggagtaattcttgaacctcccaactatggcattgtcacagaatatgcttctctgggatcactctatgattacattaacagtaacagaagtgaggagatggatatggatcacattatgacctgggccactgatgtagccaaaggaatgcattatttacatatggaggctcctgtcaaggtgattcacagagacctcaagtcaagaaacgttgttatagctgctgatggagtattgaagatctgtgactttggtgcctctcggttccataaccatacaacacacatgtccttggttggaactttcccatggatggctccagaagttatccagagtctccctgtgtcagaaacttgtgacacatattcctatggtgtggttctctgggagatgctaacaagggaggtcccctttaaaggtttggaaggattacaagtagcttggcttgtagtggaaaaaaacgaggtaagactacgtttctccattcaggtacatagatcagaaaacagtattggggttttgcaaaagactttttcatcttcttcaaattgaaagtaagttcacgcttatggaaagattagcagtaggagctaacacaaagggtcaaagtgatgttattcctcatgaatggaccctttacatctaattgttgcagcttcacgtcgtgatgctgtagatcaaaaattgtacaagtactgtactagtttctcagtctcaattgtaaaacctaggggtttgttcttagtgatgaaagaagccattgcgtccaaggtaggggaacagtttaactccatctcctgcgtttaggacatcttttttactggccgggagttgatatatctgtaagagaccttcagctacttcaacttacctctcccagcaggagtcactatagtacaagaaactgtcgcttagatgagaatttcaaaaataaaagaagaaaaaatagtttcaaaaaagggaaaaattacagttttgccacctacgttgaacactacattgaagatgagctcctcactggaattgg

SEQ ID NO: 442952 - DNA, 852 bp, Homo sapiens
aggtggtgctgttgccgtgactgtcttcctcattggcgccgtgcagagaggcggaatgttcaactcctaactgcggcggaaacgtgggagccgcgcgggccgctgtcgtcccaacccccgccgccctcgtcgcgcgcggggcctccgcgcccccggctgctgctcacgccccgcccgggagccagattttgtggaagtataatactttgtcattatgagatgtcgtctctcggtgcctcctttgtgcaaattaaatttgatgacttgcagttttttgaaaactgcggtggaggaagttttgggagtgtttatcgagccaaatggatatcacaggacaaggaggtggctgtaaagaagctcctcaaaatagagaaagaggcagaaatactcagtgtcctcagtcacagaaacatcatccagttttatggagtaattcttgaacctcccaactatggcattgtcacagaatatgcttctctgggatcactctatgattacattaacagtaacagaagtgaggagatggatatggatcacattatgacctgggccactgatgtagccaaaggaatgcattatttacatatggaggctcctgtcaaggtgattcacagagacctcaagtcaagaaacgttgttatagctgctgatggagtattgaagatctgtgactttggtgcctctcggttccataaccatacaacacacatgtccttggttggaactttcccatggatggctccagaagttatccagagtctccctgtgtcagaaacttgtgacacatattcctatggtgtggttctaatgggacactccctgtgttagcatctcccgtcgaccggccgcgaa

SEQ ID NO: 442953 - DNA, 3886 bp, Homo sapiens
aggtggtgctgttgccgtgactgtcttcctcattggcgccgtgcagagaggcggaatgttcaactcctaactgcggcggaaacgtgggagccgcgcgggccgctgtcgtcccaacccccgccgccctcgtcgcgcgcggggcctccgcgcccccggctgctgctcacgccccgcccgggagccagattttgtggaagtataatactttgtcattatgagatgtcgtctctcggtgcctcctttgtgcaaattaaatttgatgacttgcagttttttgaaaactgcggtggaggaagttttgggagtgtttatcgagccaaatggatatcacaggacaaggaggtggctgtaaagaagctcctcaaaatagagaaagaggcagaaatactcagtgtcctcagtcacagaaacatcatccagttttatggagtaattcttgaacctcccaactatggcattgtcacagaatatgcttctctgggatcactctatgattacattaacagtaacagaagtgaggagatggatatggatcacattatgacctgggccactgatgtagccaaaggaatgcattatttacatatggaggctcctgtcaaggtgattcacagagacctcaagtcaagaaacgttgttatagctgctgatggagtattgaagatctgtgactttggtgcctctcggttccataaccatacaacacacatgtccttggttggaactttcccatggatggctccagaagttatccagagtctccctgtgtcagaaacttgtgacacatattcctatggtgtggttctctgggagatgctaacaagggaggtcccctttaaaggtttggaaggattacaagtagcttggcttgtagtggaaaaaaacgagagattaaccattccaagcagttgccccagaagttttgctgaactgttacatcagtgttgggaagctgatgccaagaaacggccatcattcaagcaaatcatttcaatcctggagtccatgtcaaatgacacgagccttcctgacaagtgtaactcattcctacacaacaaggcggagtggaggtgcgaaattgaggcaactcttgagaggctaaagaaactagagcgtgatctcagctttaaggagcaggagcttaaagaacgagaaagacgtttaaagatgtgggagcaaaagctgacagagcagtccaacaccccgctgctgccttcctttgagattggtgcatggacggaagacgatgtgtattgttgggttcagcagctcgtcagaaaaggtgactcttcagcagagatgagtgtatatgcaagcttgtttaaagaaaacaacattacagggaagcggctgctgctgctggaggaagaagacctgaaagacatgggcattgtctccaaggggcatatcattcacttcaagtcagccattgagaaattaacccatgattacataaatttgtttcacttcccaccactaattaaggactcaggaggtgaacctgaagaaaatgaggaaaaaatagtgaacctggaactggtttttggttttcacttgaaaccaggaactggcccacaggattgtaagtggaaaatgtatatggagatggatggggatgaaattgcaataacctacataaaagatgtgacattcaacactaacctacctgatgcggagattttaaagatgacaaagccaccatttgtaatggagaagtggattgtaggaatagcaaaaagtcagactgtggagtgcactgtcacatatgagagtgatgttagaactccaaaaagcactaaacatgtccatttgattcagtggagtagaacaaaacctcaggatgaagtgaaagcagtccaacttgccattcagacattattcaccaattcagatggcaaccctggaagcaggtccgactcaagtgctgattgccagtggttagatactctgaggatgcggcagattgcatccaacacttctttacagcgttcccagagcaatcctattctggggtcaccgttcttctcacactttgatggccaggattcctacgctgctgctgtgagacggccccaggtgcccattaagtatcaacagattacacctgtgaaccagtccagaagctcgtctcctactcagtatggactgaccaaaaacttctcttccctacatctcaactctagggacagtggcttttccagtggcaatactgacacctcttcagagaggggtcgatactcagacagaagcaggaacaaatatggacgtggtagtatatcactcaattcttctcctagaggaagatacagtggaaagagtcagcattccactccttcaagaggaagataccctggaaagttctacagggtttctcagtcagcactcaatcctcaccagtcgcctgacttcaagagaagccccagggacctccaccaacccaacaccataccagggatgcctttgcaccctgagactgactcaagagccagtgaagaggacagcaaagtcagcgaagggggctggacaaaagtggaataccggaaaaagccccacaggccatctcccgccaaaaccaataaagagagagccagaggggaccaccgtggatggagaaacttttgatgaattgaactacatagcttttctaagcaggttaaaaaaaaaaaaaaaaagaaatgtaatggtttttgataatatgatcccttcagattgaattaacgaaaagacaacacttccagtttttggattgggaaataccttctaattgagactatagccaaaccagggccaaaattatggatattggtcacccagtgatcataactaggcttgaaaatcactacacatattttctgccttgagtgaacatttttagaggaaaggttatgccatctttttaccctaaccactgatattctggttagcagggccaggacaaggggaaggaaaatgaggtcaacaaaaaaatcaaatttttaggaaaagataagatgaatgttactgatttttccttttggctgaggctgcaatatggcctggcaaggcactgttactgatcttgtctttaacattttgatattttgttcatcataatttttgcatttatttttttaaatattgcattaaaatatcatttagcttgattatcgagttttttggtttgaggttttttgttgcttcttttttcttttctttctttccccctcttttttttggatgtccccttaaattttgtgcccaaggcaggtacctcactcatctcatccttggctcagccctgctggttagtatttagtatttattttagtaagatatttgtgtctgtatgatggtcagagttgaactgatctggcttgtcatttttcagtaataaaaaaagttactgaatttaatgttgaatatgatgcatatctcattcattacgatttatcagaaaccaaagatttaaattgcctagatttgtggttctttctcttcctaagttcccagcgactgctttcaaatactattttctaaatttcaccaaaggagcaaagaggataaaacaacactccataaaggcctcttgggatgtcagaaatctaaaatctaaaagaaaacagacacagagcaagacaataacatcacaagctaaaagccagagaaatttaaaattaccaacatccttgttggagtaagacagtaaatatcagccttgcagcaagacagctctgagcagctgtgggcaaagaggtaaaccagtgggggtgcaaggagactgtctgcagcttagggcagaaatggtgggatccaacttgtgaaatgcttcatgttttacaaaccaaaaagtcaggtagcaacaaacttattgtatgtcaaatcaataaatgttactttcaataaaaaa

SEQ ID NO: 442954 - DNA, 3879 bp, Homo sapiens
  misc_feature (3850)..(3850): n is a, c, g, or t
aggtggtgctgttgccgtgactgtcttcctcattggcgccgtgcagagaggcggaatgttcaactcctaactgcggcggaaacgtgggagccgcgcgggccgctgtcgtcccaacccccgccgccctcgtcgcgcgcggggcctccgcgcccccggctgctgctcacgccccgcccgggagccagattttgtggaagtataatactttgtcattatgagatgtcgtctctcggtgcctcctttgtgcaaattaaatttgatgacttgcagttttttgaaaactgcggtggaggaagttttgggagtgtttatcgagccaaatggatatcacaggacaaggaggtggctgtaaagaagctcctcaaaatagagaaagaggcagaaatactcagtgtcctcagtcacagaaacatcatccagttttatggagtaattcttgaacctcccaactatggcattgtcacagaatatgcttctctgggatcactctatgattacattaacagtaacagaagtgaggagatggatatggatcacattatgacctgggccactgatgtagccaaaggaatgcattatttacatatggaggctcctgtcaaggtgattcacagagacctcaagtcaagaaacgttgttatagctgctgatggagtattgaagatctgtgactttggtgcctctcggttccataaccatacaacacacatgtccttggttggaactttcccatggatggctccagaagttatccagagtctccctgtgtcagaaacttgtgacacatattcctatggtgtggttctctgggagatgctaacaagggaggtcccctttaaaggtttggaaggattacaagtagcttggcttgtagtggaaaaaaacgagagattaaccattccaagcagttgccccagaagttttgctgaactgttacatcagtgttgggaagctgatgccaagaaacggccatcattcaagcaaatcatttcaatcctggagtccatgtcaaatgacacgagccttcctgacaagtgtaactcattcctacacaacaaggcggagtggaggtgcgaaattgaggcaactcttgagaggctaaagaaactagagcgtgatctcagctttaaggagcaggagcttaaagaacgagaaagacgtttaaagatgtgggagcaaaagctgacagagcagtccaacaccccgctgctgccttcctttgagattggtgcatggacggaagacgatgtgtattgttgggttcagcagctcgtcagaaaaggtgactcttcagcagagatgagtgtatatgcaagcttgtttaaagaaaacaacattacagggaagcggctgctgctgctggaggaagaagacctgaaagacatgggcattgtctccaaggggcatatcattcacttcaagtcagccattgagaaattaacccatgattacataaatttgtttcacttcccaccactaattaaggactcaggaggtgaacctgaagaaaatgaggaaaaaatagtgaacctggaactggtttttggttttcacttgaaaccaggaactggcccacaggattgtaagtggaaaatgtatatggagatggatggggatgaaattgcaataacctacataaaagatgtgacattcaacactaacctacctgatgcggagattttaaagatgacaaagccaccatttgtaatggagaagtggattgtaggaatagcaaaaagtcagactgtggagtgcactgtcacatatgagagtgatgttagaactccaaaaagcactaaacatgtccatttgattcagtggagtagaacaaaacctcaggatgaagtgaaagcagtccaacttgccattcagacattattcaccaattcagatggcaaccctggaagcaggtccgactcaagtgctgattgccagtggttagatactctgaggatgcggcagattgcatccaacacttctttacagcgttcccagagcaatcctattctggggtcaccgttcttctcacactttgatggccaggattcctacgctgctgctgtgagacggccccaggtgcccattaagtatcaacagattacacctgtgaaccagtccagaagctcgtctcctactcagtatggactgaccaaaaacttctcttccctacatctcaactctagggacagtggcttttccagtggcaatactgacacctcttcagagaggggtcgatactcagacagaagcaggaacaaatatggacgtggtagtatatcactcaattcttctcctagaggaagatacagtggaaagagtcagcattccactccttcaagaggaagataccctggaaagttctacagggtttctcagtcagcactcaatcctcaccagtcgcctgacttcaagagaagccccagggacctccaccaacccaacaccataccagggatgcctttgcaccctgagactgactcaagagccagtgaagaggacagcaaagtcagcgaagggggctggacaaaagtggaataccggaaaaagccccacaggccatctcccgccaaaaccaataaagagagagccagaggggaccaccgtggatggagaaacttttgatgaattgaactacatagcttttctaagcaggttaaaaaaaaaaaaaaaaagaaatgtaatggtttttgataatatgatcccttcagattgaattaacgaaaagacaacacttccagtttttggattgggaaataccttctaattgagactatagccaaaccagggccaaaattatggatattggtcacccagtgatcataactaggcttgaaaatcactacacatattttctgccttgagtgaacatttttagaggaaaggttatgccatctttttaccctaaccactgatattctggttagcagggccaggacaaggggaaggaaaatgaggtcaacaaaaaaatcaaatttttaggaaaagataagatgaatgttactgatttttccttttggctgaggctgcaatatggcctggcaaggcactgttactgatcttgtctttaacattttgatattttgttcatcataatttttgcatttatttttttaaatattgcattaaaatatcatttagcttgattatcgagttttttggtttgaggttttttgttgcttcttttttcttttctttctttccccctcttttttttggatgtccccttaaattttgtgcccaaggcaggtacctcactcatctcatccttggctcagccctgctggttagtatttagtatttattttagtaagatatttgtgtctgtatgatggtcagagttgaactgatctggcttgtcatttttcagtaataaaaaaagttactgaatttaatgttgaatatgatgcatatctcattcattacgatttatcagaaaccaaagatttaaattgcctagatttgtggttctttctcttcctaagttcccagcgactgctttcaaatactattttctaaatttcaccaaaggagcaaagaggataaaacaacatctctctatcatgcggctctatcccgcgaagttcatgatagatttacaaatattacagcataaagacaactgagacaagagcgacaacagtatctgtgaataaaagctcagagaatagggcagaatagtatcgcacactacgctcgtatggactgagaccaggtcgagtcaatgcagcgaggacaacgcaggtatgacctggtatagcatacatatagtaaagaacattactgcgagttgccaacggtaacctgttacagtaatgccacgggcaatgtcaggccatgtagagtcccggcnggaataaagagatataagcgagaccacaa

SEQ ID NO: 442955 - DNA, 3833 bp, Homo sapiens
gcagagctccttgggatgagtaggaagtgctgctgcaggttttgtctgggggatatctgagccatttctctgtgggcagctgtgtttcaaagtctgggcaggttgttgttgaattttgcgtgggctgccaggattttgtggaagtataatactttgtcattatgagatgtcgtctctcggtgcctcctttgtgcaaattaaatttgatgacttgcagttttttgaaaactgcggtggaggaagttttgggagtgtttatcgagccaaatggatatcacaggacaaggaggtggctgtaaagaagctcctcaaaatagagaaagaggcagaaatactcagtgtcctcagtcacagaaacatcatccagttttatggagtaattcttgaacctcccaactatggcattgtcacagaatatgcttctctgggatcactctatgattacattaacagtaacagaagtgaggagatggatatggatcacattatgacctgggccactgatgtagccaaaggaatgcattatttacatatggaggctcctgtcaaggtgattcacagagacctcaagtcaagaaacgttgttatagctgctgatggagtattgaagatctgtgactttggtgcctctcggttccataaccatacaacacacatgtccttggttggaactttcccatggatggctccagaagttatccagagtctccctgtgtcagaaacttgtgacacatattcctatggtgtggttctctgggagatgctaacaagggaggtcccctttaaaggtttggaaggattacaagtagcttggcttgtagtggaaaaaaacgagagattaaccattccaagcagttgccccagaagttttgctgaactgttacatcagtgttgggaagctgatgccaagaaacggccatcattcaagcaaatcatttcaatcctggagtccatgtcaaatgacacgagccttcctgacaagtgtaactcattcctacacaacaaggcggagtggaggtgcgaaattgaggcaactcttgagaggctaaagaaactagagcgtgatctcagctttaaggagcaggagcttaaagaacgagaaagacgtttaaagatgtgggagcaaaagctgacagagcagtccaacaccccgctgctgccttcctttgagattggtgcatggacggaagacgatgtgtattgttgggttcagcagctcgtcagaaaaggtgactcttcagcagagatgagtgtatatgcaagcttgtttaaagaaaacaacattacagggaagcggctgctgctgctggaggaagaagacctgaaagacatgggcattgtctccaaggggcatatcattcacttcaagtcagccattgagaaattaacccatgattacataaatttgtttcacttcccaccactaattaaggactcaggaggtgaacctgaagaaaatgaggaaaaaatagtgaacctggaactggtttttggttttcacttgaaaccaggaactggcccacaggattgtaagtggaaaatgtatatggagatggatggggatgaaattgcaataacctacataaaagatgtgacattcaacactaacctacctgatgcggagattttaaagatgacaaagccaccatttgtaatggagaagtggattgtaggaatagcaaaaagtcagactgtggagtgcactgtcacatatgagagtgatgttagaactccaaaaagcactaaacatgtccatttgattcagtggagtagaacaaaacctcaggatgaagtgaaagcagtccaacttgccattcagacattattcaccaattcagatggcaaccctggaagcaggtccgactcaagtgctgattgccagtggttagatactctgaggatgcggcagattgcatccaacacttctttacagcgttcccagagcaatcctattctggggtcaccgttcttctcacactttgatggccaggattcctacgctgctgctgtgagacggccccaggtgcccattaagtatcaacagattacacctgtgaaccagtccagaagctcgtctcctactcagtatggactgaccaaaaacttctcttccctacatctcaactctagggacagtggcttttccagtggcaatactgacacctcttcagagaggggtcgatactcagacagaagcaggaacaaatatggacgtggtagtatatcactcaattcttctcctagaggaagatacagtggaaagagtcagcattccactccttcaagaggaagataccctggaaagttctacagggtttctcagtcagcactcaatcctcaccagtcgcctgacttcaagagaagccccagggacctccaccaacccaacaccataccagggatgcctttgcaccctgagactgactcaagagccagtgaagaggacagcaaagtcagcgaagggggctggacaaaagtggaataccggaaaaagccccacaggccatctcccgccaaaaccaataaagagagagccagaggggaccaccgtggatggagaaacttttgatgaattgaactacatagcttttctaagcaggttaaaaaaaaaaaaaaaaagaaatgtaatggtttttgataatatgatcccttcagattgaattaacgaaaagacaacacttccagtttttggattgggaaataccttctaattgagactatagccaaaccagggccaaaattatggatattggtcacccagtgatcataactaggcttgaaaatcactacacatattttctgccttgagtgaacatttttagaggaaaggttatgccatctttttaccctaaccactgatattctggttagcagggccaggacaaggggaaggaaaatgaggtcaacaaaaaaatcaaatttttaggaaaagataagatgaatgttactgatttttccttttggctgaggctgcaatatggcctggcaaggcactgttactgatcttgtctttaacattttgatattttgttcatcataatttttgcatttatttttttaaatattgcattaaaatatcatttagcttgattatcgagttttttggtttgaggttttttgttgcttcttttttcttttctttctttccccctcttttttttggatgtccccttaaattttgtgcccaaggcaggtacctcactcatctcatccttggctcagccctgctggttagtatttagtatttattttagtaagatatttgtgtctgtatgatggtcagagttgaactgatctggcttgtcatttttcagtaataaaaaaagttactgaatttaatgttgaatatgatgcatatctcattcattacgatttatcagaaaccaaagatttaaattgcctagatttgtggttctttctcttcctaagttcccagcgactgctttcaaatactattttctaaatttcaccaaaggagcaaagaggataaaacaacactccataaaggcctcttgggatgtcagaaatctaaaatctaaaagaaaacagacacagagcaagacaataacatcacaagctaaaagccagagaaatttaaaattaccaacatccttgttggagtaagacagtaaatatcagccttgcagcaagacagctctgagcagctgtgggcaaagaggtaaaccagtgggggtgcaaggagactgtctgcagcttagggcagaaatggtgggatccaacttgtgaaatgcttcatgttttacaaaccaaaaagtcaggtagcaacaaacttattgtatgtcaaatcaataaatgttactttcaataaaaaa

SEQ ID NO: 442956 - DNA, 2201 bp, Homo sapiens
aggtggtgctgttgccgtgactgtcttcctcattggcgccgtgcagagaggcggaatgttcaactcctaactgcggcggaaacgtgggagccgcgcgggccgctgtcgtcccaacccccgccgccctcgtcgcgcgcggggcctccgcgcccccggctgctgctcacgccccgcccgggagccagattttgtggaagtataatactttgtcattatgagatgtcgtctctcggtgcctcctttgtgcaaattaaatttgatgacttgcagttttttgaaaactgcggtggaggaagttttgggagtgtttatcgagccaaatggatatcacaggacaaggaggtggctgtaaagaagctcctcaaaatagagaaagaggcagaaatactcagtgtcctcagtcacagaaacatcatccagttttatggagtaattcttgaacctcccaactatggcattgtcacagaatatgcttctctgggatcactctatgattacattaacagtaacagaagtgaggagatggatatggatcacattatgacctgggccactgatgtagccaaaggaatgcattatttacatatggaggctcctgtcaaggtgattcacagagacctcaagtcaagaaacgttgttatagctgctgatggagtattgaagatctgtgactttggtgcctctcggttccataaccatacaacacacatgtccttggttggaactttcccatggatggctccagaagttatccagagtctccctgtgtcagaaacttgtgacacatattcctatggtgtggttctctgggagatgctaacaagggaggtcccctttaaaggtttggaaggattacaagtagcttggcttgtagtggaaaaaaacgagaaacggccatcattcaagcaaatcatttcaatcctggagtccatgtcaaatgacacgagccttcctgacaagtgtaactcattcctacacaacaaggcggagtggaggtgcgaaattgaggcaactcttgagaggctaaagaaactagagcgtgatctcagctttaaggagcaggagcttaaagaacgagaaagacgtttaaagatgtgggagcaaaagctgacagagcagtccaacaccccgcttctcttgcctcttgctgcaagaatgtctgaggagtcttactttgaatctaaaacagaggagtcaaacagtgcagagatgtcatgtcagatcacagcaacaagtaacggggagggccatggcatgaacccaagtctgcaggccatgatgctgatgggctttggggatatcttctcaatgaacaaagcaggagctgtgatgcattctgggatgcagataaacatgcaagccaagcagaattcttccaaaaccacatctaagagaagggggaagaaagtcaacatggctctggggttcagtgattttgacttgtcagaaggtgacgatgatgatgatgatgacggtgaggaggaggataatgacatggataatagtgaatgaaagcagaaagcaaagtaataaaatcacaaatgtttggaaaacacaaaagtaacttgtttatctcagtctgtacaaaaacagtaaggaggcagaaagccaagcactgcatttttaggccaatcacatttacatgaccgtaatttcttatcaattctacttttatttttgcttacagaaaaacggggggagaattaagccaaagaagtatatttatgaatcagcaaatgtggtgcctgattatagaaatttgtgatcctatatacaatataggacttttaaagttgtgacattctggctttttcttttaatgaatactttttagtttgtatttgactttatttcctttattcaaatcatttttaaaaacttacattttgaacaaacactcttaactcctaattgttctttgacacgtagtaattctgtgacatactttttttttcttatagcaatacactgtaatatcagaaatggttggcctgagcaacctagtaagacctcgtctctactaataattaaaaaactagctggcatggtagcacacacctgtagtcccagatacttgggaggccaaggcaggaggattgcttgagacctagcaatcagtcagggctgcagtgagccatgatggcaccactgcactctagcctgggcaagagaacaagatcctgtctcaaaaaacaaaaaaa

SEQ ID NO: 442957 - DNA, 3618 bp, Homo sapiens
aggtggtgctgttgccgtgactgtcttcctcattggcgccgtgcagagaggcggaatgttcaactcctaactgcggcggaaacgtgggagccgcgcgggccgctgtcgtcccaacccccgccgccctcgtcgcgcgcggggcctccgcgcccccggctgctgctcacgccccgcccgggagccaggcagaaatactcagtgtcctcagtcacagaaacatcatccagttttatggagtaattcttgaacctcccaactatggcattgtcacagaatatgcttctctgggatcactctatgattacattaacagtaacagaagtgaggagatggatatggatcacattatgacctgggccactgatgtagccaaaggaatgcattatttacatatggaggctcctgtcaaggtgattcacagagacctcaagtcaagaaacgttgttatagctgctgatggagtattgaagatctgtgactttggtgcctctcggttccataaccatacaacacacatgtccttggttggaactttcccatggatggctccagaagttatccagagtctccctgtgtcagaaacttgtgacacatattcctatggtgtggttctctgggagatgctaacaagggaggtcccctttaaaggtttggaaggattacaagtagcttggcttgtagtggaaaaaaacgagaaacggccatcattcaagcaaatcatttcaatcctggagtccatgtcaaatgacacgagccttcctgacaagtgtaactcattcctacacaacaaggcggagtggaggtgcgaaattgaggcaactcttgagaggctaaagaaactagagcgtgatctcagctttaaggagcaggagcttaaagaacgagaaagacgtttaaagatgtgggagcaaaagctgacagagcagtccaacaccccgctgctgccttcctttgagattggtgcatggacggaagacgatgtgtattgttgggttcagcagctcgtcagaaaaggtgactcttcagcagagatgagtgtatatgcaagcttgtttaaagaaaacaacattacagggaagcggctgctgctgctggaggaagaagacctgaaagacatgggcattgtctccaaggggcatatcattcacttcaagtcagccattgagaaattaacccatgattacataaatttgtttcacttcccaccactaattaaggactcaggaggtgaacctgaagaaaatgaggaaaaaatagtgaacctggaactggtttttggttttcacttgaaaccaggaactggcccacaggattgtaagtggaaaatgtatatggagatggatggggatgaaattgcaataacctacataaaagatgtgacattcaacactaacctacctgatgcggagattttaaagatgacaaagccaccatttgtaatggagaagtggattgtaggaatagcaaaaagtcagactgtggagtgcactgtcacatatgagagtgatgttagaactccaaaaagcactaaacatgtccatttgattcagtggagtagaacaaaacctcaggatgaagtgaaagcagtccaacttgccattcagacattattcaccaattcagatggcaaccctggaagcaggtccgactcaagtgctgattgccagtggttagatactctgaggatgcggcagattgcatccaacacttctttacagcgttcccagagcaatcctattctggggtcaccgttcttctcacactttgatggccaggattcctacgctgctgctgtgagacggccccaggtgcccattaagtatcaacagattacacctgtgaaccagtccagaagctcgtctcctactcagtatggactgaccaaaaacttctcttccctacatctcaactctagggacagtggcttttccagtggcaatactgacacctcttcagagaggggtcgatactcagacagaagcaggaacaaatatggacgtggtagtatatcactcaattcttctcctagaggaagatacagtggaaagagtcagcattccactccttcaagaggaagataccctggaaagttctacagggtttctcagtcagcactcaatcctcaccagtcgcctgacttcaagagaagccccagggacctccaccaacccaacaccataccagggatgcctttgcaccctgagactgactcaagagccagtgaagaggacagcaaagtcagcgaagggggctggacaaaagtggaataccggaaaaagccccacaggccatctcccgccaaaaccaataaagagagagccagaggggaccaccgtggatggagaaacttttgatgaattgaactacatagcttttctaagcaggttaaaaaaaaaaaaaaaaagaaatgtaatggtttttgataatatgatcccttcagattgaattaacgaaaagacaacacttccagtttttggattgggaaataccttctaattgagactatagccaaaccagggccaaaattatggatattggtcacccagtgatcataactaggcttgaaaatcactacacatattttctgccttgagtgaacatttttagaggaaaggttatgccatctttttaccctaaccactgatattctggttagcagggccaggacaaggggaaggaaaatgaggtcaacaaaaaaatcaaatttttaggaaaagataagatgaatgttactgatttttccttttggctgaggctgcaatatggcctggcaaggcactgttactgatcttgtctttaacattttgatattttgttcatcataatttttgcatttatttttttaaatattgcattaaaatatcatttagcttgattatcgagttttttggtttgaggttttttgttgcttcttttttcttttctttctttccccctcttttttttggatgtccccttaaattttgtgcccaaggcaggtacctcactcatctcatccttggctcagccctgctggttagtatttagtatttattttagtaagatatttgtgtctgtatgatggtcagagttgaactgatctggcttgtcatttttcagtaataaaaaaagttactgaatttaatgttgaatatgatgcatatctcattcattacgatttatcagaaaccaaagatttaaattgcctagatttgtggttctttctcttcctaagttcccagcgactgctttcaaatactattttctaaatttcaccaaaggagcaaagaggataaaacaacactccataaaggcctcttgggatgtcagaaatctaaaatctaaaagaaaacagacacagagcaagacaataacatcacaagctaaaagccagagaaatttaaaattaccaacatccttgttggagtaagacagtaaatatcagccttgcagcaagacagctctgagcagctgtgggcaaagaggtaaaccagtgggggtgcaaggagactgtctgcagcttagggcagaaatggtgggatccaacttgtgaaatgcttcatgttttacaaaccaaaaagtcaggtagcaacaaacttattgtatgtcaaatcaataaatgttactttcaataaaaaa

SEQ ID NO: 442958 - DNA, 1369 bp, Homo sapiens
ctagaggatccccgatgagtaaatcttgggatcacgtgttgggaagctgatgcaagaaacggccatcattcaagcaaatcatttcaatcctggagtccatgtcaaatgacacgagccttcctgacaagtgtaactcattcctacacaacaaggcggagtggaggtgcgaaattgaggcaactcttgagaggctaaagaaactagagcgtgatctcagctttaaggagcaggagcttaaagaacgagaaagacgtttaaagatgtgggagcaaaagctgacagagcagtccaacaccccgcttctcttgcctcttgctgcaagaatgtctgaggagtcttactttgaatctaaaacagaggagtcaaacagtgcagagatgtcatgtcagatcacagcaacaagtaacggggagggccatggcatgaacccaagtctgcaggccatgatgctgatgggctttggggatatcttctcaatgaacaaagcaggagctgtgatgcattctgggatgcagataaacatgcaagccaagcagaattcttccaaaaccacatctaagagaagggggaagaaagtcaacatggctctggggttcagtgattttgacttgtcagaaggtgacgatgatgatgatgatgacggtgaggaggaggataatgacatggataatagtgaatgaaagcagaaagcaaagtaataaaatcacaaatgtttggaaaacacaaaagtaacttgtttatctcagtctgtacaaaaacagtaaggaggcagaaagccaagcactgcatttttaggccaatcacatttacatgaccgtaatttcttatcaattctacttttatttttgcttacagaaaaacggggggagaattaagccaaagaagtatatttatgaatcagcaaatgtggtgcctgattatagaaatttgtgatcctatatacaatataggacttttaaagttgtgacattctggctttttcttttaatgaatactttttagtttgtatttgactttatttcctttattcaaatcatttttaaaaacttacattttgaacaaacactcttaactcctaattgttctttgacacgtagtaattctgtgacatactttttttttcttatagcaatacactgtaatatcagaaatggttggcctgagcaacctagtaagacctcgtctctactaataattaaaaaactagctggcatggtagcacacacctgtagtcccagatacttgggaggccaaggcaggaggattgcttgagacctagcaatcagtcagggctgcagtgagccatgatggcaccactgcactctagcctgggcaagagaacaagatcctgtctcaaaaaacaaaaaaa

SEQ ID NO: 442959 - DNA, 690 bp, Homo sapiens
atctcacacacaaactgagaaaagatttgtatcaaacagaatcagaggcatatgaatggactggaaattgtgaaaaaggtataaatatcctagaccttgatcaactcactttaaactggtctctgattcctcatctgtcaaatgagtataagaccctctgtacttcccatggtgattttgaggagcacatgcataatgtatctgaaaatggcttgacaagcacttgaagccattcttactaaattattagttttgtaattcggttttatccaggaaaatattttagctcctcctatctgctgaattaatttatacagtcacatgttccatgacaccatgttttgccaaggaaaaataaagaaattcctaaatttgaaattgcccacaagatctagcctcatctggagttgctgttattgtccttgttgtctatgatttggaggatatgtaagtacttgtacatgtgctttaactctgggtgaaaaaccccaaccggtgagtctttaaaaccatattagacacattgggcaaagtactgagcagaagctttgaatgtagctgttgttattttaatgcttcgctttctaatgaactttgtacgtccttagcctctgccgggaacagagtgttcatatgctgttagaattttttattgtaaaataaaatgacaaaggctttcataccccaaaa

SEQ ID NO: 442960 - DNA, 783 bp, Homo sapiens
attatggagagaggccatcaacatattttacataaattactgtggccccatcttatttctcctcatttcttccttatgtttaaacacgcccccatctcacacacaaactgagaaaagatttgtatcaaacagaatcagaggcatatgaatggactggaaattgtgaaaaaggtataaatatcctagaccttgatcaactcactttaaactggtctctgattcctcatctgtcaaatgagtataagaccctctgtacttcccatggtgattttgaggagcacatgcataatgtatctgaaaatggcttgacaagcacttgaagccattcttactaaattattagttttgtaattcggttttatccaggaaaatattttagctcctcctatctgctgaattaatttatacagtcacatgttccatgacaccatgttttgccaaggaaaaataaagaaattcctaaatttgaaattgcccacaagatctagcctcatctggagttgctgttattgtccttgttgtctatgatttggaggatatgtaagtacttgtacatgtgctttaactctgggtgaaaaaccccaaccggtgagtctttaaaaccatattagacacattgggcaaagtactgagcagaagctttgaatgtagctgttgttattttaatgcttcgctttctaatgaactttgtacgtccttagcctctgccgggaacagagtgttcatatgctgttagaattttttattgtaaaataaaatgacaaaggctttcataccccaaaa

SEQ ID NO: 442961 - DNA, 1422 bp, Homo sapiens
agcgcgagagttagcggcctccggtgtgggatggccgcggagccgggcggagctggcttgcggctcccggggccggctctccggccggagacatggcccgggggcccggcccgctaggcaggcctcgccccgatacggtcgccatgcccaagagaggaaagcgactcaagttccgggcccacgacgcctgctccggccgagtgaccgtggcggattacgccaactcggatccggcggtcgtgaggtctggacgagtcaagaaagccgtagccaacgctgttcagcaggaagtaaaatctctttgtggcttggaagcctctcaggttcctgcagaggaagctctttctggggctggtgagccctgtgacatcatcgacagcagtgatgagatggatgcccaggaggaaagcatccatgagagaactgtctccagaaaaaagaaaagcaagagacacaaagaagaactggacggggctggaggagaagagtatcccatggatatttggctattgctggcctcctatatccgtcctgaggacattgtgaatttttccctgatttgtaagaatgcctggactgtcacttgcactgctgccttttggaccaggttgtaccgaaggcactacacgctggatgcttccctgcctttgcgtctgcgaccagagtcaatggagaagctgcgctgtctccgggcttgtgtgatccgatctctgtaccatatgtatgagccatttgctgctcgaatctccaagaatccagccattccagaaagcacccccagcacattaaagaattccaaatgcttacttttctggtgcagaaagattgttgggaacagacaggaaccaatgtgggaattcaacttcaagttcaaaaaacagtcccctaggttaaagagcaagtgtacaggaggattgcagcctcccgttcagtacgaagatgttcataccaatccagaccaggactgctgcctactgcaggtcaccaccctcaatttcatctttattccgattgtcatgggaatgatatttactctgtttactatcaatgtgagcacggacatgcggcatcatcgagtgagactggtgttccaagattcccctgtccatggtggtcggaaactgcgcagtgaacagggtgtgcaagtcatcctggacccagtgcacagcgttcggctctttgactggtggcatcctcagtacccattctccctgagagcgtagttactgcttcccatcccttgggggcagcctcgagtgtagtccattagtaatcagattccagtttggacagggtggctggattgtatatctcgttagtaatgtacatgctcttcaggttctagggctcctgttaggggagggagaaatgttgaatcaagagggaaaacaactactatgatttataaacatattttaatgt

SEQ ID NO: 442962 - DNA, 3031 bp, Homo sapiens
agcgcgagagttagcggcctccggtgtgggatggccgcggagccgggcggagctggcttgcggctcccggggccggctctccggccggagacatggcccgggggcccggcccgctaggcaggcctcgccccgatacggtcgccatgcccaagagaggaaagcgactcaagttccgggcccacgacgcctgctccggccgagtgaccgtggcggattacgccaactcggatccggcggtcgtgaggtctggacgagtcaagaaagccgtagccaacgctgttcagcaggaagtaaaatctctttgtggcttggaagcctctcaggttcctgcagaggaagctctttctggggctggtgagccctgtgacatcatcgacagcagtgatgagatggatgcccaggaggaaagcatccatgagagaactgtctccagaaaaaagaaaagcaagagacacaaagaagaactggacggggctggaggagaagagtatcccatggatatttggctattgctggcctcctatatccgtcctgaggacattgtgaatttttccctgatttgtaagaatgcctggactgtcacttgcactgctgccttttggaccaggttgtaccgaaggcactacacgctggatgcttccctgcctttgcgtctgcgaccagagtcaatggagaagctgcgctgtctccgggcttgtgtgatccgatctctgtaccatatgtatgagccatttgctgctcgaatctccaagaatccagccattccagaaagcacccccagcacattaaagaattccaaatgcttacttttctggtgcagaaagattgttgggaacagacaggaaccaatgtgggaattcaacttcaagttcaaaaaacagtcccctaggttaaagagcaagtgtacaggaggattgcagcctcccgttcagtacgaagatgttcataccaatccagaccaggactgctgcctactgcaggtcaccaccctcaatttcatctttattccgattgtcatgggaatgatatttactctgtttactatcaatgtgagcacggacatgcggcatcatcgagtgagactggtgttccaagattcccctgtccatggtggtcggaaactgcgcagtgaacagggtgtgcaagtcatcctggacccagtgcacagcgttcggctctttgactggtggcatcctcagtacccattctccctgagagcgtagttactgcttcccatcccttgggggcagcctcgagtgtagtccattagtaatcagattccagtttggacagggtggctggattgtatatctcgttagtaatgtacatgctcttcaggttctagggctcctgttaggggagggagaaatgttgaatcaagagggaaaacaactactatgatttataaacatattttaatgtaaaaatttgcatttaaaaggagtggccctgttttctgtgttaaaaccccatttggtgctattgagtttgttctttattcttttatcccagtgaaaattgttgatcttgctgtagggaaaaattaaactctttgaatctccaaacaaggaagtttcagcattcccttatggatcagaggaaccttagaggcctgaaattgttgcttccagtttagctgcccctcaaattcaagtgaatattttcccttctccctttacccttctccagaaataaagcaggtgacagggttttcagaatcttaccatattgacttgtgtatcttttttaaaaaataatttgtgatatttattgcatacattttcttttggcagttttggattttaggtatttttttgcatgaggctgataatggtgatgatgactttatacccttggtactatactaggaactttacatagtatctctacttctcacagtcttgcaaagtaggtgatattattcccattttatagttgagaaaacggaattagtgactgtacctataacaccagtaaatgcagagccaagattctgacccaggtctttttgttgtaccataagtttaaaagatgagtctcatttttcttgtggtagatggtggtaaaaaggagtaggcagagtgtacatagataaaaaaaagtaaaagggtaagtaaaaaattgattgtggtatatgttattctaatcagccaaaaaagtttagaagattgatgaaatgatcttttaaatatgtatttctgaataaaatgtaaaaccaagaaagttatttcaggaaggatagtgaccctttccttgaactgttagaagggcatttattaggctaaaacgtcattaacaaaatgcattgcatgttgaaaccagcctcttgaaccataagcacttagcgactttgctctgccctgtactgtgctgcttctgctgtcatcctgtgtgcctacagaagcctggtcttccgtccatgcagaaatgcttatgtcctcctgttgtttagatgactcctattgttcaggtgtactctgagaagagaatcacgtttttctgttttgctaaggagaaaaccttgctgcttgtctctcctcccaccctccaccatccaaaattaaccagtgagctggatattacctggatattgccaggaggtgggcattaagacagtattctttaaaagtgaaaatcttgtgaggcaaactgctaaattcacatttttttttttttttttttaccatcttccctaggaatattcctagaaagcatctgcttaattttgctgctaacagctaaccttatcccacgttgagggtggtattaaaactgttcacacagagtgagcctgggtcagtcaaaaacagaatttgggcatttgagtgataacagacaacctaaggacaatgagcactttgcagatctctacaattaaaagttgcctctttgaggcaggaggagagaagcacagtccctgccaggttgcctgaactaaagatgccatggagcaggagtgtcttggtgcattgttccccgcttaggagtacctttaaaaagggggtgaaataaatttggcttaataattgta

SEQ ID NO: 442963 - DNA, 2231 bp, Homo sapiens
agcgcgagagttagcggcctccggtgtgggatggccgcggagccgggcggagctggcttgcggctcccggggccggctctccggccggagacatggcccgggggcccggcccgctaggcaggcctcgccccgatacggtcgccatgcccaagagaggaaagcgactcaagttccgggcccacgacgcctgctccggccgagtgaccgtggcggattacgccaactcggatccggcggtcgtgaggtctggacgagtcaagaaagccgtagccaacgctgttcagcaggaagtaaaatctctttgtggcttggaagcctctcaggttcctgcagaggaagctctttctggggctggtgagccctgtgacatcatcgacagcagtgatgagatggatgcccaggaggaaagcatccatgagagaactgtctccagaaaaaagaaaagcaagagacacaaagaagaactggacggggctggaggagaagagtatcccatggatatttggctattgctggcctcctatatccgtcctgaggacattgtgaatttttccctgatttgtaagaatgcctggactgtcacttgcactgctgccttttggaccaggttgtaccgaaggcactacacgctggatgcttccctgcctttgcgtctgcgaccagagtcaatggagaagctgcgctgtctccgggcttgtgtgatccgatctctgtaccatatgtatgagccatttgctgctcgaatctccaagaatccagccattccagaaagcacccccagcacattaaagaattccaaatgcttacttttctggtgcagaaagattgttgggaacagacaggaaccaatgtgggaattcaacttcaagttcaaaaaacagtcccctaggttaaagagcaagtgtacaggaggattgcagcctcccgttcagtacgaagatgttcataccaatccagaccaggactgctgcctactgcaggtcaccaccctcaatttcatctttattccgattgtcatgggaatgatatttactctgtttactatcaatgtgagcacggacatgcggcatcatcgagtgagactggtgttccaagattcccctgtccatggtggtcggaaactgcgcagtgaacagggtgtgcaagtcatcctggacccagtgcacagcgttcggctctttgactggtggcatcctcagtacccattctccctgagagcgtagttactgcttcccatcccttgggggcagcctcgagtgtagtccattagtaatcagattccagtttggacagggtggctggattgtatatctcgttagtaatgtacatgctcttcaggttctagggctcctgttaggggagggagaaatgttgaatcaagagggaaaacaactactatgatttataaacatattttaatgtaaaaatttgcatttaaaaggagtggccctgttttctgtgttaaaaccccatttggtgctattgagtttgttctttattcttttatcccagtgaaaattgttgatcttgctgtagggaaaaattaaactctttgaatctccaaacaaggaagtttcagcattcccttatggatcagaggaaccttagaggcctgaaattgttgcttccagtttagctgcccctcaaattcaagtgaatattttcccttctccctttacccttctccagaaataaagcaggtgacagggttttcagaatcttaccatattgacttgtgtatcttttttaaaaaataatttgtgatatttattgcatacattttcttttggcagttttggattttaggtatttttttgcatgaggctgataatggtgatgatgactttatacccttggtactatactaggaactttacatagtatctctacttctcacagtcttgcaaagtaggtgatattattcccattttatagttgagaaaacggaattagtgactgtacctataacaccagtaaatgcagaagtgagcctgggtcagtcaaaaacagaatttgggcatttgagtgataacagacaacctaaggacaatgagcactttgcagatctctacaattaaaagttgcctctttgaggcaggaggagagaagcacagtccctgccaggttgcctgaactaaagatgccatggagcaggagtgtcttggtgcattgttccccgcttaggagtacctttaaaaagggggtgaaataaatttggcttaataattgta

SEQ ID NO: 442964 - DNA, 1750 bp, Homo sapiens
  misc_feature (1715)..(1715): n is a, c, g, or t
  misc_feature (1733)..(1733): n is a, c, g, or t
agcgcgagagttagcggcctccggtgtgggatggccgcggagccgggcggagctggcttgcggctcccggggccggctctccggccggagacatggcccgggggcccggcccgctaggcaggcctcgccccgatacggtcgccatgcccaagagaggaaagcgactcaagttccgggcccacgacgcctgctccggccgagtgaccgtggcggattacgccaactcggatccggcggtcgtgaggtctggacgagtcaagaaagccgtagccaacgctgttcagcaggaagtaaaatctctttgtggcttggaagcctctcaggttcctgcagaggaagctctttctggggctggtgagccctgtgacatcatcgacagcagtgatgagatggatgcccaggaggaaagcatccatgagagaactgtctccagaaaaaagaaaagcaagagacacaaagaagaactggacggggctggaggagaagagtatcccatggatatttggctattgctggcctcctatatccgtcctgaggacattgtgaatttttccctgatttgtaagaatgcctggactgtcacttgcactgctgccttttggaccaggttgtaccgaaggcactacacgctggatgcttccctgcctttgcgtctgcgaccagagtcaatggagaagctgcgctgtctccgggcttgtgtgatccgatctctgtaccatatgtatgagccatttgctgctcgaatctccaagaatccagccattccagaaagcacccccagcacattaaagaattccaaatgcttacttttctggtgcagaaagattgttgggaacagacaggaaccaatgtgggaattcaacttcaagttcaaaaaacagtcccctaggttaaagagcaagtgtacaggaggattgcagcctcccgttcagtacgaagatgttcataccaatccagaccaggactgctgcctactgcaggtcaccaccctcaatttcatctttattccgattgtcatgggaatgatatttactctgtttactatcaatgtgagcacggacatgcggcatcatcgagtgagactggtgttccaagattcccctgtccatggtggtcggaaactgcgcagtgaacagggtgtgcaagtcatcctggacccagtgcacagcgttcggctctttgactggtggcatcctcagtacccattctccctgagagcgtagttactgcttcccatcccttgggggcagcctcgagtgtagtccattagtaatcagattccagtttggacagggtggctggattgtatatctcgttagtaatgtacatgctcttcaggttctagggctcctgttaggggagggagaaatgttgaatcaagagggaaaacaactactatgatttataaacatattttaatgtaaaaatttgcatttaaaaggagtggccctgttttctgtgttaaaaccccatttggtgctattgagtttgttctttattcttttatcccagtgaaaattgttgatcttgctgtagggaaaaattaaactctttgaatctccaaacaaggaagtttcagcattcccttatggatcagaggaaccttagaggcctgaaattgttgcttccagtttagctgcccctcaaattcaagtgaatattttcccttctcccgtgtttaagccacttgataaatacccgcgaggagggattanataagctaccgggttatncatcgggttttttcaat

SEQ ID NO: 442965 - DNA, 2899 bp, Homo sapiens
  misc_feature (34)..(34): n is a, c, g, or t
gatattataagctgctttatttttccacgaatcntgacgtctctgcaatgcacatgtgtgaaaatctgctactgaaacatagagcaagcaaacactggcaggtgggtcaaaacgctactggtagcaggaggaacgactaaagcaaagtattaccataaggttaaaacatatggcctgacaaatgcctgccagggacactacacataaggaatgtcttcagtgtcccttcgtggggccctgcagccacccctgaattcccttggacccctaggatagaaggggtcctgtaaatttctttgcatccacaaaaacgcccccaatttctgtttgctttttctccttttatcctccaccctagccatgttgtcaaattctcttatcatgtcctcattgctgaaattcatatcatgtatggcttccttatattgcttgaggtactgagccagccccttgttggtttttcttttggctttcctgggtatatcatcctcagctgggcgctttcctgcagcccttgtttcactttctggctctccctcactctctggctctctttcactgtctggctctccttcaccctctgcccttccccctctctctggctttccctctgtctttgatcctccctgcatctctgactttcccttcctctctgactttccttctccttttgcctttcccgcactctctggcttttctttatcctttaacggttcctcaactctcttgcccgtgttttctgtgtttccctcgttttctaacttcttgtcttccagaatacaagctacttctggctttccctcgtgcggtggctgttcttcattgtctatctttccttgattcgaaggcattccttcattttcattgaagagtttttccatgtcgagatttcccctccttttcctttcctgcggggattctggacaggttgctcttccttttcaggcctctcagagcgctgggaacaacagacgcgcagacctgcggggacccaggacaggcctgtgcctcctgcggctcgctgaagcccgctcgctgctcccccgccgctcgtgccgaattcggcacgagcgccgcggagccgggcggagctggcttgcggctcccggggccggctctccggccggagacatggcccgggggcccggcccgctaggcaggcctcgccccgatacggtcgccatgcccaagagaggaaagcgactcaagttccgggcccacgacgcctgctccggccgagtgaccgtggcggattacgccaactcggatccggcggtcgtgaggtctggacgagtcaagaaagccgtagccaacgctgttcagcaggaagtaaaatctctttgtggcttggaagcctctcaggttcctgcagaggaagctctttctggggctggtgagccctgtgacatcatcgacagcagtgatgagatggatgcccaggaggaaagcatccatgagagaactgtctccagaaaaaagaaaagcaagagacacaaagaagaactggacggggctggaggagaagagtatcccatggatatttggctattgctggcctcctatatccgtcctgaggacattgtgaatttttccctgatttgtaagaatgcctggactgtcacttgcactgctgccttttggaccaggttgtaccgaaggcactacacgctggatgcttccctgcctttgcgtctgcgaccagagtcaatggagaagctgcgctgtctccgggcttgtgtgatccgatctctgtaccatatgtatgagccatttgctgctcgaatctccaagaatccagccattccagaaagcacccccagcacattaaagaattccaaatagcatagcttgtgtgggacactggagccgttgtgatggcagcagaagtgttttccccttaaagccaagcccattaattttgatggaacagcaggacagctggcacggcggacgacccaccccttatcccctgggagtgcttacttttctggtgcagaaagattgttgggaacagacaggaaccaatgtgggaattcaacttcaagttcaaaaaacagtcccctaggttaaagagcaagtgtacaggaggattgcagcctcccgttcagtacgaagatgttcataccaatccagaccaggactgctgcctactgcaggtcaccaccctcaatttcatctttattccgattgtcatgggaatgatatttactctgtttactatcaatgtgagcacggacatgcggcatcatcgagtgagactggtgttccaagattcccctgtccatggtggtcggaaactgcgcagtgaacagggtgtgcaagtcatcctggacccagtgcacagcgttcggctctttgactggtggcatcctcagtacccattctccctgagagcgtagttactgcttcccatcccttgggggcagcctcgagtgtagtccattagtaatcagattccagtttggacagggtggctggattgtatatctcgttagtaatgtacatgctcttcaggttctagggctcctgttaggggagggagaaatgttgaatcaagagggaaaacaactactatgatttataaacatattttaatgtaaaaatttgcatttaaaaggagtggccctgttttctgtgttaaaaccccatttggtgctattgagtttgttctttattcttttatcccagtgaaaattgttgatcttgctgtagggaaaaattaaactctttgaatctccaaacaaggaagtttcagcattcccttatggatcagaggaaccttagaggcctgaaattgttgcttccagtttagctgcccctcaaattcaagtgaatattttcccttctccctttacccttctccagaaataaagcaggtgacagggttttcagaatctta

SEQ ID NO: 442966 - DNA, 2703 bp, Homo sapiens
  misc_feature (34)..(34): n is a, c, g, or t
gatattataagctgctttatttttccacgaatcntgacgtctctgcaatgcacatgtgtgaaaatctgctactgaaacatagagcaagcaaacactggcaggtgggtcaaaacgctactggtagcaggaggaacgactaaagcaaagtattaccataaggttaaaacatatggcctgacaaatgcctgccagggacactacacataaggaatgtcttcagtgtcccttcgtggggccctgcagccacccctgaattcccttggacccctaggatagaaggggtcctgtaaatttctttgcatccacaaaaacgcccccaatttctgtttgctttttctccttttatcctccaccctagccatgttgtcaaattctcttatcatgtcctcattgctgaaattcatatcatgtatggcttccttatattgcttgaggtactgagccagccccttgttggtttttcttttggctttcctgggtatatcatcctcagctgggcgctttcctgcagcccttgtttcactttctggctctccctcactctctggctctctttcactgtctggctctccttcaccctctgcccttccccctctctctggctttccctctgtctttgatcctccctgcatctctgactttcccttcctctctgactttccttctccttttgcctttcccgcactctctggcttttctttatcctttaacggttcctcaactctcttgcccgtgttttctgtgtttccctcgttttctaacttcttgtcttccagaatacaagctacttctggctttccctcgtgcggtggctgttcttcattgtctatctttccttgattcgaaggcattccttcattttcattgaagagtttttccatgtcgagatttcccctccttttcctttcctgcggggattctggacaggttgctcttccttttcaggcctctcagagcgctgggaacaacagacgcgcagacctgcggggacccaggacaggcctgtgcctcctgcggctcgctgaagcccgctcgctgctcccccgccgctcgtgccgaattcggcacgagcgccgcggagccgggcggagctggcttgcggctcccggggccggctctccggccggagacatggcccgggggcccggcccgctaggcaggcctcgccccgatacggtcgccatgcccaagagaggaaagcgactcaagttccgggcccacgacgcctgctccggccgagtgaccgtggcggattacgccaactcggatccggcggtcgtgaggtctggacgagtcaagaaagccgtagccaacgctgttcagcaggaagtaaaatctctttgtggcttggaagcctctcaggttcctgcagaggaagctctttctggggctggtgagccctgtgacatcatcgacagcagtgatgagatggatgcccaggaggaaagcatccatgagagaactgtctccagacatggatatttggctattgctggcctcctatatccgtcctgaggacattgtgaatttttccctgatttgtaagaatgcctggactgtcacttgcactgctgccttttggaccaggttgtaccgaaggcactacacgctggatgcttccctgcctttgcgtctgcgaccagagtcaatggagaagctgcgctgtctccgggcttgtgtgatccgatctctgtaccatatgtatgagccatttgctgctcgaatctccaagaatccagccattccagaaagcacccccagcacattaaagaattccaaatgcttacttttctggtgcagaaagattgttgggaacagacaggaaccaatgtgggaattcaacttcaagttcaaaaaacagtcccctaggttaaagagcaagtgtacaggaggattgcagcctcccgttcagtacgaagatgttcataccaatccagaccaggactgctgcctactgcaggtcaccaccctcaatttcatctttattccgattgtcatgggaatgatatttactctgtttactatcaatgtgagcacggacatgcggcatcatcgagtgagactggtgttccaagattcccctgtccatggtggtcggaaactgcgcagtgaacagggtgtgcaagtcatcctggacccagtgcacagcgttcggctctttgactggtggcatcctcagtacccattctccctgagagcgtagttactgcttcccatcccttgggggcagcctcgagtgtagtccattagtaatcagattccagtttggacagggtggctggattgtatatctcgttagtaatgtacatgctcttcaggttctagggctcctgttaggggagggagaaatgttgaatcaagagggaaaacaactactatgatttataaacatattttaatgtaaaaatttgcatttaaaaggagtggccctgttttctgtgttaaaaccccatttggtgctattgagtttgttctttattcttttatcccagtgaaaattgttgatcttgctgtagggaaaaattaaactctttgaatctccaaacaaggaagtttcagcattcccttatggatcagaggaaccttagaggcctgaaattgttgcttccagtttagctgcccctcaaattcaagtgaatattttcccttctccctttacccttctccagaaataaagcaggtgacagggttttcagaatctta

SEQ ID NO: 442967 - DNA, 1393 bp, Homo sapiens
caggctatctactggccagtggaatagtgcagtaaagttcatacagagaccaggagtcttagaaaactgacctagagcaggagagacaggtcacatattggtaggagtaatgtgtcatgtttcaggcactacacgctggatgcttccctgcctttgcgtctgcgaccagagtcaatggagaagctgcgctgtctccgggcttgtgtgatccgatctctgtaccatatgtatgagccatttgctgctcgaatctccaagaatccagccattccagaaagcacccccagcacattaaagaattccaaatagcatagcttgtgtgggacactggagccgttgtgatggcagcagaagtgttttccccttaaagccaagcccattaattttgatggaacagcaggacgtacagggcatgtctgaagggcaggacagctggcacggcggacgacccaccccttatcccctgggagtgcttacttttctggtgcagaaagattgttgggaacagacaggaaccaatgtgggaattcaacttcaagttcaaaaaacagtcccctaggttaaagagcaagtgtacaggaggattgcagcctcccgttcagtacgaagatgttcataccaatccagaccaggactgctgcctactgcaggtcaccaccctcaatttcatctttattccgattgtcatgggaatgatatttactctgtttactatcaatgtgagcacggacatgcggcatcatcgagtgagactggtgttccaagattcccctgtccatggtggtcggaaactgcgcagtgaacagggtgtgcaagtcatcctggacccagtgcacagcgttcggctctttgactggtggcatcctcagtacccattctccctgagagcgtagttactgcttcccatcccttgggggcagcctcgagtgtagtccattagtaatcagattccagtttggacagggtggctggattgtatatctcgttagtaatgtacatgctcttcaggttctagggctcctgttaggggagggagaaatgttgaatcaagagggaaaacaactactatgatttataaacatattttaatgtaaaaatttgcatttaaaaggagtggccctgttttctgtgttaaaaccccatttggtgctattgagtttgttctttattcttttatcccagtgaaaattgttgatcttgctgtagggaaaaattaaactctttgaatctccaaacaaggaagtttcagcattcccttatggatcagaggaaccttagaggcctgaaattgttgcttccagtttagctgcccctcaaattcaagtgaatattttcccttctccctttacccttctccagaaataaagcaggtgacagggttttcagaatctta

SEQ ID NO: 442968 - DNA, 952 bp, Homo sapiens
ctcaactggtataatgcaaatattccaaaatctgaaaaaatgggaaacacttctggccccaagcgttttggataagggatactcaatccgaagtgccatgaaaacaaaagtcccctaggttaaagagcaagtgtacaggaggattgcagcctcccgttcagtacgaagatgttcataccaatccagaccaggactgctgcctactgcaggtcaccaccctcaatttcatctttattccgattgtcatgggaatgatatttactctgtttactatcaatgtgagcacggacatgcggcatcatcgagtgagactggtgttccaagattcccctgtccatggtggtcggaaactgcgcagtgaacagggtgtgcaagtcatcctggacccagtgcacagcgttcggctctttgactggtggcatcctcagtacccattctccctgagagcgtagttactgcttcccatcccttgggggcagcctcgagtgtagtccattagtaatcagattccagtttggacagggtggctggattgtatatctcgttagtaatgtacatgctcttcaggttctagggctcctgttaggggagggagaaatgttgaatcaagagggaaaacaactactatgatttataaacatattttaatgtaaaaatttgcatttaaaaggagtggccctgttttctgtgttaaaaccccatttggtgctattgagtttgttctttattcttttatcccagtgaaaattgttgatcttgctgtagggaaaaattaaactctttgaatctccaaacaaggaagtttcagcattcccttatggatcagaggaaccttagaggcctgaaattgttgcttccagtttagctgcccctcaaattcaagtgaatattttcccttctccctttacccttctccagaaataaagcaggtgacagggttttcagaatctta

SEQ ID NO: 442969 - DNA, 1346 bp, Homo sapiens
caggctatctactggccagtggaatagtgcagtaaagttcatacagagaccaggagtcttagaaaactgacctagagcaggagagacaggtcacatattggtaggagtaatgtgtcatgtttcaggcactacacgctggatgcttccctgcctttgcgtctgcgaccagagtcaatggagaagctgcgctgtctccgggcttgtgtgatccgatctctgtaccatatgtatgagccatttgctgctcgaatctccaagaatccagccattccagaaagcacccccagcacattaaagaattccaaatagcatagcttgtgtgggacactggagccgttgtgatggcagcagaagtgttttccccttaaagccaagcccattaattttgatggaacagcaggacgtacagggcatgtctgaagggcaggacagctggcacggcggacgacccaccccttatcccctgggagtgcttacttttctggtgcagaaagattgttgggaacagacaggaaccaatgtgggaattcaacttcaagttcaaaaaacagtcagtacgaagatgttcataccaatccagaccaggactgctgcctactgcaggtcaccaccctcaatttcatctttattccgattgtcatgggaatgatatttactctgtttactatcaatgtgagcacggacatgcggcatcatcgagtgagactggtgttccaagattcccctgtccatggtggtcggaaactgcgcagtgaacagggtgtgcaagtcatcctggacccagtgcacagcgttcggctctttgactggtggcatcctcagtacccattctccctgagagcgtagttactgcttcccatcccttgggggcagcctcgagtgtagtccattagtaatcagattccagtttggacagggtggctggattgtatatctcgttagtaatgtacatgctcttcaggttctagggctcctgttaggggagggagaaatgttgaatcaagagggaaaacaactactatgatttataaacatattttaatgtaaaaatttgcatttaaaaggagtggccctgttttctgtgttaaaaccccatttggtgctattgagtttgttctttattcttttatcccagtgaaaattgttgatcttgctgtagggaaaaattaaactctttgaatctccaaacaaggaagtttcagcattcccttatggatcagaggaaccttagaggcctgaaattgttgcttccagtttagctgcccctcaaattcaagtgaatattttcccttctccctttacccttctccagaaataaagcaggtgacagggttttcagaatctta

SEQ ID NO: 442970 - DNA, 1902 bp, Homo sapiens
  misc_feature (34)..(34): n is a, c, g, or t
gatattataagctgctttatttttccacgaatcntgacgtctctgcaatgcacatgtgtgaaaatctgctactgaaacatagagcaagcaaacactggcaggtgggtcaaaacgctactggtagcaggaggaacgactaaagcaaagtattaccataaggttaaaacatatggcctgacaaatgcctgccagggacactacacataaggaatgtcttcagtgtcccttcgtggggccctgcagccacccctgaattcccttggacccctaggatagaaggggtcctgtaaatttctttgcatccacaaaaacgcccccaatttctgtttgctttttctccttttatcctccaccctagccatgttgtcaaattctcttatcatgtcctcattgctgaaattcatatcatgtatggcttccttatattgcttgaggtactgagccagccccttgttggtttttcttttggctttcctgggtatatcatcctcagctgggcgctttcctgcagcccttgtttcactttctggctctccctcactctctggctctctttcactgtctggctctccttcaccctctgcccttccccctctctctggctttccctctgtctttgatcctccctgcatctctgactttcccttcctctctgactttccttctccttttgcctttcccgcactctctggcttttctttatcctttaacggttcctcaactctcttgcccgtgttttctgtgtttccctcgttttctaacttcttgtcttccagaatacaagctacttctggctttccctcgtgcggtggctgttcttcattgtctatctttccttgattcgaaggcattccttcattttcattgaagagtttttccatgtcgagatttcccctccttttcctttcctgcggggattctggacaggttgctcttccttttcaggcctctcagagcgctgggaacaacagacgcgcagacctgcggggacccaggacaggcctgtgcctcctgcggctcgctgaagcccgctcgctgctcccccgccgctcgtgccgaattcggcacgagcgccgcggagccgggcggagctggcttgcggctcccggggccggctctccggccggagacatggcccgggggcccggcccgctaggcaggcctcgccccgatacggtcgccatgcccaagagaggaaagcgactcaagttccgggcccacgacgcctgctccggccgagtgaccgtggcggattacgccaactcggatccggcggtcgtgaggtctggacgagtcaagaaagccgtagccaacgctgttcagcaggaagtaaaatctctttgtggcttggaagcctctcaggttcctgcagaggaagctctttctggggctggtgagccctgtgacatcatcgacagcagtgatgagatggatgcccaggaggaaagcatccatgagagaactgtctccagaaaaaagaaaagcaagagacacaaagaagaactggacggggctggaggagaagagtatcccatggatatttggctattgctggcctcctatatccgtcctgaggacattgtgaatttttccctgatttgtaagaatgcctggactgtcacttgcactgctgccttttggaccaggttgtaccgaaggcactacacgctggatgcttccctgcctttgcgtctgcgaccagagtcaatggagaagctgcgctgtctccgggcttgtgtgatccgatctctgtaccatatgtatgagccatttgctgctcgaatctccaagaatccagccattccagaaagcacccccagcacattaaagaattccaaatagtatagcttgtgtggacacatggagccgttgtgatgcagccaggtgataagggatctgtag

SEQ ID NO: 442971 - DNA, 1723 bp, Homo sapiens
agcgcgagagttagcggcctccggtgtgggatggccgcggagccgggcggagctggcttgcggctcccggggccggctctccggccggagacatggcccgggggcccggcccgctaggcaggcctcgccccgatacggtcgccatgcccaagagaggaaagcgactcaagttccgggcccacgacgcctgctccggccgagtgaccgtggcggattacgccaactcggatccggcggtcgtgaggtctggacgagtcaagaaagccgtagccaacgctgttcagcaggaagtaaaatctctttgtggcttggaagcctctcaggttcctgcagaggaagctctttctggggctggtgagccctgtgacatcatcgacagcagtgatgagatggatgcccaggaggaaagcatccatgagagaactgtctccagaaaaaagaaaagcaagagacacaaagaagaactggacggggctggaggagaagagtatcccatggatatttggctattgctggcctcctatatccgtcctgaggacattgtgaatttttccctgatttgtaagaatgcctggactgtcacttgcactgctgccttttggaccaggttgtaccgaaggcactacacgctggatgcttccctgcctttgcgtctgcgaccagagtcaatggagaagctgcgctgtctccgggcttgtgtgatccgatctctgtaccatatgtatgagccatttgctgctcgaatctccaagaatccagccattccagaaagcacccccagcacattaaagaattccaaatgcttacttttctggtgcagaaagattgttgggaacagacaggaaccaatgtgggaattcaacttcaagttcaaaaaacagtcccctaggttaaagagcaagtgtacaggaggattgcagcctcccgttcagtacgaagatgttcataccaatccagaccaggactgctgcctactgcaggtcaccaccctcaatttcatctttattccgattgtcatgggaatgatatttactctgtttactatcaatgtgagcacggacatgcggcatcatcgagtgagactggtgttccaagattcccctgtccatggtggtcggaaactgcgcagtgaacagggtgtgcaagtcatcctggacccagtgcacagcgttcggctctttgactggtggcatcctcagtacccattctccctgagagcgtagttactgcttcccatcccttgggggcagcctcgagtgtagtccattagtaatcagattccagtttggacagggtggctggattgtatatctcgttagtaatgtacatgctcttcaggttctagggctcctgttaggggagggagaaatgttgaatcaagagggaaaacaactactatgatttataaacatattttaatgtaaaaatttgcatttaaaaggagtggccctgttttctgtgttaaaaccccatttggtgctattgagtttgttctttattcttttatcccagtgaaaattgttgatcttgctgtagggaaaaattaaactctttgaatctccaaacaaggaagtttcagcattcccttatggatcagaggaaccttagaggcctgaaattgttgcttccagtttagctgcccctcaaattcaagtgaatattttcccttctccctttacccttctccagaaataaagcaggtgacagggttttcagaatctta

SEQ ID NO: 442972 - DNA, 2762 bp, Homo sapiens
  misc_feature (34)..(34): n is a, c, g, or t
gatattataagctgctttatttttccacgaatcntgacgtctctgcaatgcacatgtgtgaaaatctgctactgaaacatagagcaagcaaacactggcaggtgggtcaaaacgctactggtagcaggaggaacgactaaagcaaagtattaccataaggttaaaacatatggcctgacaaatgcctgccagggacactacacataaggaatgtcttcagtgtcccttcgtggggccctgcagccacccctgaattcccttggacccctaggatagaaggggtcctgtaaatttctttgcatccacaaaaacgcccccaatttctgtttgctttttctccttttatcctccaccctagccatgttgtcaaattctcttatcatgtcctcattgctgaaattcatatcatgtatggcttccttatattgcttgaggtactgagccagccccttgttggtttttcttttggctttcctgggtatatcatcctcagctgggcgctttcctgcagcccttgtttcactttctggctctccctcactctctggctctctttcactgtctggctctccttcaccctctgcccttccccctctctctggctttccctctgtctttgatcctccctgcatctctgactttcccttcctctctgactttccttctccttttgcctttcccgcactctctggcttttctttatcctttaacggttcctcaactctcttgcccgtgttttctgtgtttccctcgttttctaacttcttgtcttccagaatacaagctacttctggctttccctcgtgcggtggctgttcttcattgtctatctttccttgattcgaaggcattccttcattttcattgaagagtttttccatgtcgagatttcccctccttttcctttcctgcggggattctggacaggttgctcttccttttcaggcctctcagagcgctgggaacaacagacgcgcagacctgcggggacccaggacaggcctgtgcctcctgcggctcgctgaagcccgctcgctgctcccccgccgctcgtgccgaattcggcacgagcgccgcggagccgggcggagctggcttgcggctcccggggccggctctccggccggagacatggcccgggggcccggcccgctaggcaggcctcgccccgatacggtcgccatgcccaagagaggaaagcgactcaagttccgggcccacgacgcctgctccggccgagtgaccgtggcggattacgccaactcggatccggcggtcgtgaggtctggacgagtcaagaaagccgtagccaacgctgttcagcaggaagtaaaatctctttgtggcttggaagcctctcaggttcctgcagaggaagctctttctggggctggtgagccctgtgacatcatcgacagcagtgatgagatggatgcccaggaggaaagcatccatgagagaactgtctccagaaaaaagaaaagcaagagacacaaagaagaactggacggggctggaggagaagagtatcccatggatatttggctattgctggcctcctatatccgtcctgaggacattgtgaatttttccctgatttgtaagaatgcctggactgtcacttgcactgctgccttttggaccaggttgtaccgaaggcactacacgctggatgcttccctgcctttgcgtctgcgaccagagtcaatggagaagctgcgctgtctccgggcttgtgtgatccgatctctgtaccatatgtatgagccatttgctgctcgaatctccaagaatccagccattccagaaagcacccccagcacattaaagaattccaaatgcttacttttctggtgcagaaagattgttgggaacagacaggaaccaatgtgggaattcaacttcaagttcaaaaaacagtcccctaggttaaagagcaagtgtacaggaggattgcagcctcccgttcagtacgaagatgttcataccaatccagaccaggactgctgcctactgcaggtcaccaccctcaatttcatctttattccgattgtcatgggaatgatatttactctgtttactatcaatgtgagcacggacatgcggcatcatcgagtgagactggtgttccaagattcccctgtccatggtggtcggaaactgcgcagtgaacagggtgtgcaagtcatcctggacccagtgcacagcgttcggctctttgactggtggcatcctcagtacccattctccctgagagcgtagttactgcttcccatcccttgggggcagcctcgagtgtagtccattagtaatcagattccagtttggacagggtggctggattgtatatctcgttagtaatgtacatgctcttcaggttctagggctcctgttaggggagggagaaatgttgaatcaagagggaaaacaactactatgatttataaacatattttaatgtaaaaatttgcatttaaaaggagtggccctgttttctgtgttaaaaccccatttggtgctattgagtttgttctttattcttttatcccagtgaaaattgttgatcttgctgtagggaaaaattaaactctttgaatctccaaacaaggaagtttcagcattcccttatggatcagaggaaccttagaggcctgaaattgttgcttccagtttagctgcccctcaaattcaagtgaatattttcccttctccctttacccttctccagaaataaagcaggtgacagggttttcagaatctta

SEQ ID NO: 442973 - DNA, 3653 bp, Homo sapiens
  misc_feature (3045)..(3045): n is a, c, g, or t
agcgcgagagttagcggcctccggtgtgggatggccgcggagccgggcggagctggcttgcggctcccggggccggctctccggccggagacatggcccgggggcccggcccgctaggcaggcctcgccccgatacggtcgccatgcccaagagaggaaagcgactcaagttccgggcccacgacgcctgctccggccgagtgaccgtggcggattacgccaactcggatccggcggtcgtgaggtctggacgagtcaagaaagccgtagccaacgctgttcagcaggaagtaaaatctctttgtggcttggaagcctctcaggttcctgcagaggaagctctttctggggctggtgagccctgtgacatcatcgacagcagtgatgagatggatgcccaggaggaaagcatccatgagagaactgtctccagaaaaaagaaaagcaagagacacaaagaagaactggacggggctggaggagaagagtatcccatggatatttggctattgctggcctcctatatccgtcctgaggacattgtgaatttttccctgatttgtaagaatgcctggactgtcacttgcactgctgccttttggaccaggttgtaccgaaggcactacacgctggatgcttccctgcctttgcgtctgcgaccagagtcaatggagaagctgcgctgtctccgggcttgtgtgatccgatctctgtaccatatgtatgagccatttgctgctcgaatctccaagaatccagccattccagaaagcacccccagcacattaaagaattccaaatgcttacttttctggtgcagaaagattgttgggaacagacaggaaccaatgtgggaattcaacttcaagttcaaaaaacagtcccctaggttaaagagcaagtgtacaggaggattgcagcctcccgttcagtacgaagatgttcataccaatccagaccaggactgctgcctactgcaggtcaccaccctcaatttcatctttattccgattgtcatgggaatgatatttactctgtttactatcaatgtgagcacggacatgcggcatcatcgagtgagactggtgttccaagattcccctgtccatggtggtcggaaactgcgcagtgaacagggtgtgcaagtcatcctggacccagtgcacagcgttcggctctttgactggtggcatcctcagtacccattctccctgagagcgtagttactgcttcccatcccttgggggcagcctcgagtgtagtccattagtaatcagattccagtttggacagggtggctggattgtatatctcgttagtaatgtacatgctcttcaggttctagggctcctgttaggggagggagaaatgttgaatcaagagggaaaacaactactatgatttataaacatattttaatgtaaaaatttgcatttaaaaggagtggccctgttttctgtgttaaaaccccatttggtgctattgagtttgttctttattcttttatcccagtgaaaattgttgatcttgctgtagggaaaaattaaactctttgaatctccaaacaaggaagtttcagcattcccttatggatcagaggaaccttagaggcctgaaattgttgcttccagtttagctgcccctcaaattcaagtgaatattttcccttctccctttacccttctccagaaataaagcaggtgacagggttttcagaatcttaccatattgacttgtgtatcttttttaaaaaataatttgtgatatttattgcatacattttcttttggcagttttggattttaggtatttttttgcatgaggctgataatggtgatgatgactttatacccttggtactatactaggaactttacatagtatctctacttctcacagtcttgcaaagtaggtgatattattcccattttatagttgagaaaacggaattagtgactgtacctataacaccagtaaatgcagagccaagattctgacccaggtctttttgttgtaccataagtttaaaagatgagtctcatttttcttgtggtagatggtggtaaaaaggagtaggcagagtgtacatagataaaaaaaagtaaaagggtaagtaaaaaattgattgtggtatatgttattctaatcagccaaaaaagtttagaagattgatgaaatgatcttttaaatatgtatttctgaataaaatgtaaaaccaagaaagttatttcaggaaggatagtgaccctttccttgaactgttagaagggcatttattaggctaaaacgtcattaacaaaatgcattgcatgttgaaaccagcctcttgaaccataagcacttagcgactttgctctgccctgtactgtgctgcttctgctgtcatcctgtgtgcctacagaagcctggtcttccgtccatgcagaaatgcttatgtcctcctgttgtttagatgactcctattgttcaggtgtactctgagaagagaatcacgtttttctgttttgctaaggagaaaaccttgctgcttgtctctcctcccaccctccaccatccaaaattaaccagtgagctggatattacctggatattgccaggaggtgggcattaagacagtattctttaaaagtgaaaatcttgtgaggcaaactgctaaattcacatttttttttttttttttttaccatcttccctaggaatattcctagaaagcatctgcttaattttgctgctaacagctaaccttatcccacgttgagggtggtattaaaactgttcacacagagtgagcctgggtcagtcaaaaacagaatttgggcatttgagtgataacagacaacctaaggacaatgagcactttgcagatctctacaattaaaagttgcctctttgaggcaggaggagagaagcacagtccctgccaggttgcctgaactaaagatgccatggagcaggagtgtcttggtgcattgttccccgcttaggagtacctttaaaaagggggtgaaataaatttggcttaataattgtaaaaaaaaaaaaaanaaaaaaaaaaaaaaaaaaaaggggggggggggcaaagaggatttcccgggggggggccccaagcgctttacaggaggtatacccacgggcttatgtgtgggaacaagcggggggcccacatattaggggaggaggcgaatatatataaaggcacaagggagcacgggggcgcgggcggttataaaacacgcggtggtggaggtggggaaaacacgggggcaaaggtgggggaaattcttggggagaggggagacccttaacattttcggggggggggggggagcattatgtggggaggaaaaaattacctcataagagagagagatttaaaaagggtccatagagggggaacatttttaacaattttaaaaggtggtatataatggggtgtgtgtaaaacaataacgaggggagaatatatgagcatagagagcggggtacgtagagaaaatgtataggaggcgaacaaggggagagcataaatgagagtattatatggagaaatatttatttatacacgccagggagagcctactcgtcgcaacaaatcccacaagaacaaagaagaggacagaaaagagaaaaagaaaaaaacaacgaagaacagc

SEQ ID NO: 442974 - DNA, 1604 bp, Homo sapiens
ctgcagcgaggaggaggtgttggcggggaagacgctgacgagagaaggcctcttccttgagggttggtgctgtgttgcagtgtgaccgtggcggattacgccaactcggatccggcggtcgtgaggtctggacgagtcaagaaagccgtagccaacgctgttcagcaggaagtaaaatctctttgtggcttggaagcctctcaggttcctgcagaggaagctctttctggggctggtgagccctgtgacatcatcgacagcagtgatgagatggatgcccaggaggaaagcatccatgagagaactgtctccagaaaaaagaaaagcaagagacacaaagaagaactggacggggctggaggagaagagtatcccatggatatttggctattgctggcctcctatatccgtcctgaggacattgtgaatttttccctgatttgtaagaatgcctggactgtcacttgcactgctgccttttggaccaggttgtaccgaaggcactacacgctggatgcttccctgcctttgcgtctgcgaccagagtcaatggagaagctgcgctgtctccgggcttgtgtgatccgatctctgtaccatatgtatgagccatttgctgctcgaatctccaagaatccagccattccagaaagcacccccagcacattaaagaattccaaatgcttacttttctggtgcagaaagattgttgggaacagacaggaaccaatgtgggaattcaacttcaagttcaaaaaacagtcccctaggttaaagagcaagtgtacaggaggattgcagcctcccgttcagtacgaagatgttcataccaatccagaccaggactgctgcctactgcaggtcaccaccctcaatttcatctttattccgattgtcatgggaatgatatttactctgtttactatcaatgtgagcacggacatgcggcatcatcgagtgagactggtgttccaagattcccctgtccatggtggtcggaaactgcgcagtgaacagggtgtgcaagtcatcctggacccagtgcacagcgttcggctctttgactggtggcatcctcagtacccattctccctgagagcgtagttactgcttcccatcccttgggggcagcctcgagtgtagtccattagtaatcagattccagtttggacagggtggctggattgtatatctcgttagtaatgtacatgctcttcaggttctagggctcctgttaggggagggagaaatgttgaatcaagagggaaaacaactactatgatttataaacatattttaatgtaaaaatttgcatttaaaaggagtggccctgttttctgtgttaaaaccccatttggtgctattgagtttgttctttattcttttatcccagtgaaaattgttgatcttgctgtagggaaaaattaaactctttgaatctccaaacaaggaagtttcagcattcccttatggatcagaggaaccttagaggcctgaaattgttgcttccagtttagctgcccctcaaattcaagtgaatattttcccttctccctttacccttctccagaaataaagcaggtgacagggttttcagaatctta

SEQ ID NO: 442975 - DNA, 2742 bp, Homo sapiens
  misc_feature (34)..(34): n is a, c, g, or t
gatattataagctgctttatttttccacgaatcntgacgtctctgcaatgcacatgtgtgaaaatctgctactgaaacatagagcaagcaaacactggcaggtgggtcaaaacgctactggtagcaggaggaacgactaaagcaaagtattaccataaggttaaaacatatggcctgacaaatgcctgccagggacactacacataaggaatgtcttcagtgtcccttcgtggggccctgcagccacccctgaattcccttggacccctaggatagaaggggtcctgtaaatttctttgcatccacaaaaacgcccccaatttctgtttgctttttctccttttatcctccaccctagccatgttgtcaaattctcttatcatgtcctcattgctgaaattcatatcatgtatggcttccttatattgcttgaggtactgagccagccccttgttggtttttcttttggctttcctgggtatatcatcctcagctgggcgctttcctgcagcccttgtttcactttctggctctccctcactctctggctctctttcactgtctggctctccttcaccctctgcccttccccctctctctggctttccctctgtctttgatcctccctgcatctctgactttcccttcctctctgactttccttctccttttgcctttcccgcactctctggcttttctttatcctttaacggttcctcaactctcttgcccgtgttttctgtgtttccctcgttttctaacttcttgtcttccagaatacaagctacttctggctttccctcgtgcggtggctgttcttcattgtctatctttccttgattcgaaggcattccttcattttcattgaagagtttttccatgtcgagatttcccctccttttcctttcctgcggggattctggacaggttgctcttccttttcaggcctctcagagcgctgggaacaacagacgcgcagacctgcggggacccaggacaggcctgtgcctcctgcggctcgctgaagcccgctcgctgctcccccgccgctcgtgccgaattcggcacgagcgccgcggagccgggcggagctggcttgcggctcccggggccggctctccggccggagacatggcccgggggcccggcccgctaggcaggcctcgccccgatacggtcgccatgcccaagagaggaaagcgactcaagttccgggcccacgacgcctgctccggccgagtgaccgtggcggattacgccaactcggatccggcggtcgtgaggtctggacgagtcaagaaagccgtagccaacgctgttcagcaggaagtaaaatctctttgtggcttggaagcctctcaggttcctgcagaggaagctctttctggggctggtgagccctgtgacatcatcgacagcagtgatgagatggatgcccaggaggaaagcatccatgagagaactgtctccagaaaaaagaaaagcaagagacacaaagaagaactggacggggctggaggagaagagtatcccatggatatttggctattgctggcctcctatatccgtcctgaggacattgtgaatttttccctgatttgtaagaatgcctggactgtcacttgcactgctgccttttggaccaggttgtaccgaaggcactacacgctggatgcttccctgcctttgcgtctgcgaccagagtcaatggagaagctgcgctgtctccgggcttgtgtgatccgatctctgtaccatatgtatgagccatttgctgctcgaatctccaagaatccagccattccagaaagcacccccagcacattaaagaattccaaaaaagattgttgggaacagacaggaaccaatgtgggaattcaacttcaagttcaaaaaacagtcccctaggttaaagagcaagtgtacaggaggattgcagcctcccgttcagtacgaagatgttcataccaatccagaccaggactgctgcctactgcaggtcaccaccctcaatttcatctttattccgattgtcatgggaatgatatttactctgtttactatcaatgtgagcacggacatgcggcatcatcgagtgagactggtgttccaagattcccctgtccatggtggtcggaaactgcgcagtgaacagggtgtgcaagtcatcctggacccagtgcacagcgttcggctctttgactggtggcatcctcagtacccattctccctgagagcgtagttactgcttcccatcccttgggggcagcctcgagtgtagtccattagtaatcagattccagtttggacagggtggctggattgtatatctcgttagtaatgtacatgctcttcaggttctagggctcctgttaggggagggagaaatgttgaatcaagagggaaaacaactactatgatttataaacatattttaatgtaaaaatttgcatttaaaaggagtggccctgttttctgtgttaaaaccccatttggtgctattgagtttgttctttattcttttatcccagtgaaaattgttgatcttgctgtagggaaaaattaaactctttgaatctccaaacaaggaagtttcagcattcccttatggatcagaggaaccttagaggcctgaaattgttgcttccagtttagctgcccctcaaattcaagtgaatattttcccttctccctttacccttctccagaaataaagcaggtgacagggttttcagaatctta

SEQ ID NO: 442976 - DNA, 1366 bp, Homo sapiens
caggctatctactggccagtggaatagtgcagtaaagttcatacagagaccaggagtcttagaaaactgacctagagcaggagagacaggtcacatattggtaggagtaatgtgtcatgtttcaggcactacacgctggatgcttccctgcctttgcgtctgcgaccagagtcaatggagaagctgcgctgtctccgggcttgtgtgatccgatctctgtaccatatgtatgagccatttgctgctcgaatctccaagaatccagccattccagaaagcacccccagcacattaaagaattccaaatagcatagcttgtgtgggacactggagccgttgtgatggcagcagaagtgttttccccttaaagccaagcccattaattttgatggaacagcaggacagctggcacggcggacgacccaccccttatcccctgggagtgcttacttttctggtgcagaaagattgttgggaacagacaggaaccaatgtgggaattcaacttcaagttcaaaaaacagtcccctaggttaaagagcaagtgtacaggaggattgcagcctcccgttcagtacgaagatgttcataccaatccagaccaggactgctgcctactgcaggtcaccaccctcaatttcatctttattccgattgtcatgggaatgatatttactctgtttactatcaatgtgagcacggacatgcggcatcatcgagtgagactggtgttccaagattcccctgtccatggtggtcggaaactgcgcagtgaacagggtgtgcaagtcatcctggacccagtgcacagcgttcggctctttgactggtggcatcctcagtacccattctccctgagagcgtagttactgcttcccatcccttgggggcagcctcgagtgtagtccattagtaatcagattccagtttggacagggtggctggattgtatatctcgttagtaatgtacatgctcttcaggttctagggctcctgttaggggagggagaaatgttgaatcaagagggaaaacaactactatgatttataaacatattttaatgtaaaaatttgcatttaaaaggagtggccctgttttctgtgttaaaaccccatttggtgctattgagtttgttctttattcttttatcccagtgaaaattgttgatcttgctgtagggaaaaattaaactctttgaatctccaaacaaggaagtttcagcattcccttatggatcagaggaaccttagaggcctgaaattgttgcttccagtttagctgcccctcaaattcaagtgaatattttcccttctccctttacccttctccagaaataaagcaggtgacagggttttcagaatctta

SEQ ID NO: 442977 - DNA, 2598 bp, Homo sapiens
  misc_feature (34)..(34): n is a, c, g, or t
gatattataagctgctttatttttccacgaatcntgacgtctctgcaatgcacatgtgtgaaaatctgctactgaaacatagagcaagcaaacactggcaggtgggtcaaaacgctactggtagcaggaggaacgactaaagcaaagtattaccataaggttaaaacatatggcctgacaaatgcctgccagggacactacacataaggaatgtcttcagtgtcccttcgtggggccctgcagccacccctgaattcccttggacccctaggatagaaggggtcctgtaaatttctttgcatccacaaaaacgcccccaatttctgtttgctttttctccttttatcctccaccctagccatgttgtcaaattctcttatcatgtcctcattgctgaaattcatatcatgtatggcttccttatattgcttgaggtactgagccagccccttgttggtttttcttttggctttcctgggtatatcatcctcagctgggcgctttcctgcagcccttgtttcactttctggctctccctcactctctggctctctttcactgtctggctctccttcaccctctgcccttccccctctctctggctttccctctgtctttgatcctccctgcatctctgactttcccttcctctctgactttccttctccttttgcctttcccgcactctctggcttttctttatcctttaacggttcctcaactctcttgcccgtgttttctgtgtttccctcgttttctaacttcttgtcttccagaatacaagctacttctggctttccctcgtgcggtggctgttcttcattgtctatctttccttgattcgaaggcattccttcattttcattgaagagtttttccatgtcgagatttcccctccttttcctttcctgcggggattctggacaggttgctcttccttttcaggcctctcagagcgctgggaacaacagacgcgcagacctgcggggacccaggacaggcctgtgcctcctgcggctcgctgaagcccgctcgctgctcccccgccgctcgtgccgaattcggcacgagcgccgcggagccgggcggagctggcttgcggctcccggggccggctctccggccggagacatggcccgggggcccggcccgctaggcaggcctcgccccgatacggtcgccatgcccaagagaggaaagcgactcaagttccgggcccacgacgcctgctccggccgagtgaccgtggcggattacgccaactcggatccggcggtcgtgaggtctggacgagtcaagaaagccgtagccaacgctgttcagcaggaagtaaaatctctttgtggcttggaagcctctcaggttcctgcagaggaagctctttctggggctggtgagccctgtgacatcatcgacagcagtgatgagatggatgcccaggaggaaagcatccatgagagaactgtctccagaaaaaagaaaagcaagagacacaaagaagaactggacggggctggaggagaagagtatcccatggatatttggctattgctggcctcctatatccgtcctgaggacattgtgaatttttccctgatttgtaagaatgcctggactgtcacttgcactgctgccttttggaccaggttgtaccgaaggcactacacgctggatgcttccctgcctttgcgtctgcgaccagagtcaatggagaagctgcgctgtctccgggcttgtgtgatccgatctctgtaccatatgtatgagccatttgctgctcgaatctccaagaatccagccattccagaaagcacccccagcacattaaagaattccaaatagcatagcttgtgtgggacactggagccgttgtgatggcagcagaagtgttttccccttaaagccaagcccattaattttgatggaacagcaggacagctggcacggcggacgacccaccccttatcccctgggagtgcttacttttctggtgcagaaagattgttgggaacagacaggaaccaatgtgggaattcaacttcaagttcaaaaaacagtcccctaggttaaagagcaagtgtacaggaggattgcagcctcccgttcagtacgaagatgttcataccaatccagaccaggactgctgcctactgcaggtcaccaccctcaatttcatctttattccgattgtcatgggaatgatatttactctgtttactatcaatgtgagcacggacatgcggcatcatcgagtgagactggtgttccaagattcccctgtccatggtggtcggaaactgcgcagtgaacagggtgtgcaagtcatcctggacccagtgcacagcgttcggctctttgactggtggcatcctcagtacccattctccctgagagcgtagttactgcttcccatcccttgggggcagcctcgagtgtagtccattagtaatcagattccagtttggacagggtggctggattgtatatctcgttagtaatgtacatgctcttcaggttctagggctcctgttaggggagggagaaatgttgaatcaagagggaaaacaactactatgatttataaacatattttaatgt

SEQ ID NO: 442978 - DNA, 2181 bp, Homo sapiens
  misc_feature (34)..(34): n is a, c, g, or t
gatattataagctgctttatttttccacgaatcntgacgtctctgcaatgcacatgtgtgaaaatctgctactgaaacatagagcaagcaaacactggcaggtgggtcaaaacgctactggtagcaggaggaacgactaaagcaaagtattaccataaggttaaaacatatggcctgacaaatgcctgccagggacactacacataaggaatgtcttcagtgtcccttcgtggggccctgcagccacccctgaattcccttggacccctaggatagaaggggtcctgtaaatttctttgcatccacaaaaacgcccccaatttctgtttgctttttctccttttatcctccaccctagccatgttgtcaaattctcttatcatgtcctcattgctgaaattcatatcatgtatggcttccttatattgcttgaggtactgagccagccccttgttggtttttcttttggctttcctgggtatatcatcctcagctgggcgctttcctgcagcccttgtttcactttctggctctccctcactctctggctctctttcactgtctggctctccttcaccctctgcccttccccctctctctggctttccctctgtctttgatcctccctgcatctctgactttcccttcctctctgactttccttctccttttgcctttcccgcactctctggcttttctttatcctttaacggttcctcaactctcttgcccgtgttttctgtgtttccctcgttttctaacttcttgtcttccagaatacaagctacttctggctttccctcgtgcggtggctgttcttcattgtctatctttccttgattcgaaggcattccttcattttcattgaagagtttttccatgtcgagatttcccctccttttcctttcctgcggggattctggacaggttgctcttccttttcaggcctctcagagcgctgggaacaacagacgcgcagacctgcggggacccaggacaggcctgtgcctcctgcggctcgctgaagcccgctcgctgctcccccgccgctcgtgccgaattcggcacgagcgccgcggagccgggcggagctggcttgcggctcccggggccggctctccggccggagacatggcccgggggcccggcccgctaggcaggcctcgccccgatacggtcgccatgcccaagagaggaaagcgactcaagttccgggcccacgacgcctgctccggccgagtgaccgtggcggattacgccaactcggatccggcggtcgtgaggtctggacgagtcaagaaagccgtagccaacgctgttcagcaggaagtaaaatctctttgtggcttggaagcctctcaggttcctgcagaggaagctctttctggggctggtgagccctgtgacatcatcgacagcagtgatgagatggatgcccaggaggaaagcatccatgagagaactgtctccagaaaaaagaaaagcaagagacacaaagaagaactggacggggctggaggagaagagtatcccatggatatttggctattgctggcctcctatatccgtcctgaggacattgtgaatttttccctgatttgtaagaatgcctggactgtcacttgcactgctgccttttggaccaggttgtaccgaaggtgcgaccacagagagctcactcttttatctgtgtggctgatttcattactgtttgtgatttggagctactcactggatggtgacctcttttcactttctctactccatgtctgggcatgacccagctttggactccttgagcccctctctaatttaaatttgatattattaattatccaggtaattgtcttccgtgtggttgcctccttccccactccagtatccactttcagcaaaacgtcttgcttcaagtcccagatagaagagtctttgacttttcttcagaggcttattttagctagaatgtttaaagctacagatgcctatctgctcatctttccagctggattaggtgttgcttagatttgctagttgtctttaagtattacacagtttttgtatttatgcagccttatgtatagttgtagtggtgaggagtaggcaaattatatgattagtaaaagggctagttttgatgctaggtatggaagtgtagtgacaattgtaaactgtcaggctgtg

SEQ ID NO: 442979 - DNA, 4057 bp, Homo sapiens
tatcccagcccagctctgcatctgtcaacattctcggcccggcccgaggcgctcgacccgtccccattggccccagcccggcccggcgcccgcccccggggcgcgaacgccgcctcccattggctctgcgggccgccgctctcccttatgtgtcaatttgagggcctgaggcggagggtggcggccgagcgccggagtccgcggagtctggaagtgcggcggccgggcgcgcggggtgggcggcgagcggagccggccggagcgggccgggcagcggccgccgccgtcccggggcggacgggcgcgggcgggaggatggagctgaactccctgctgatcctgctggaggcggccgagtacctggagcgcagggatcgagaggccgagcacggctacgcctcggtgctgcccttcgacggcgacttcgccagggagaaaacaaaggcggccggcctggtgcgcaaggccccgaacaacaggtcttcacacaacgagctagaaaagcacagacgagccaaactcaggctgtaccttgagcagctcaagcaactggtgcccctgggccccgacagcacccgccacaccacgctgagcctcctgaagcgggccaaggtgcacatcaagaaactggaggagcaggaccgccgggcactgagcatcaaggagcagctgcagcaggagcatcgtttcctgaagcggcgcctggagcagctgtcggtgcagagcgtggagcgcgtgcgcacagatagcacgggctctgctgtctccacggacgactcagagcaagaagtggacatagagggcatggagtttggccctggtgagctggacagtgttggcagcagcagtgacgcggacgaccactacagcctgcagagtggcaccggcggcgacagtggcttcgggccccactgccggcggctgggccgccccgccctctcgtaggcccgtgccctctgctccttggcctgcctgcccgccagccacgcgtgtcagccctccagttctccttcagttgacgccagcctctccacaggcccactgctgtgccattctggaagctccagctgctgctgggctgcctggcactgcccgcttgccggtcagggcctgccgagctgcctgccccttccagctgggcagagtcccctgcaaggaggcagggcccagcttccacatccggagccctggtcagcatagccgcccacggtctgttctcagattcctaatcattccagaagtattaaacgtcattgctgcaaacctcggcaggtgccgtgtgaggggcttaatgaccaccacagggagctcagaccccaaccctggatcccaggagaaaggagtggaccgaggaaggaaggaaggcaaggctgtctgtccatccgtccgtctgtccacctacctgtcagtccacataggctcctggcgtggacaaggggtctgtgaagggcgggaactgggtgagcacctggggcaggtgggtggttaaggtccttcccacttcgcaggtgtcagaacctagggctgggctctcggggccaggcaggccagcccagcccacgccgagctgggcagcgtctgctctggtaggactgtcagacgcacacgcgcacgcacctagacacacccactcatgtacatgctcacacatgcagacacacctgggcgtcccgaggtcacatgttctggggatgatggccttcaggggtcatctggcaaacagcccctgggctgtgcctggatccccctctagctcctgctcacccacgcccacccagtagtcctgcctgtctgcacaggagaggggcttctcttcctggctggggctggggtgaactggaggctggttaagttgcagccgctgggtcctcgggggcttactcatctcccttttttaaacaaaaagcaaaaaagtaaaatgctgcactgcccagcagcccggttagggctcctggagccaccttaggaaagggcttctcatgagctctgctgcggcagcttcagctggcagagaggctttcccagaaaaaaaaaaaaaaccatttttaaaaagaagaaagcctaaagactctcggcctagggacgtccgtgtgtgccgcctctgtttcctgtaccagatttttgtattctattttcctagctgttgttgcgtccttgtttgctgaggggtgggagccacccagcgtctcagggacctgtccctccgtcacgtcgtcaaagtgtgccttgtgtcttgtgtcaggccttgcccttcccaccagcatgtccctcgtggctcagggtgccccaggcctgcccagctagtgctgtcctcccatctcctgtgggcagcccctcccggcagccagggcttcctggaggcgatgcagccaggcccctgtgggtggcacggaggggctgtgacctggtccccagtgttgccctccccagtggctggcaggggcctgcttgctcactagagagatggattctcacctgtcacctgactcgagccccctgcttcctggcctaggcgagggttccaggtttcagacactggcagccaatgaagactgtgctcgctgggtggtgcaggcctggcaccaggaggcttgcacccgcctttccttcctgacgtcctctgtccttggggctggcccatagcagtgcctgccgtgcctctggtacatctgtagccaattcccatatcatggggaaaattcgtgtctattttcagtcgtacgcatagacgccccaggatggggggcccactgtggcggaagggggtccctggaaacaactctggcacagaacctgccctgcaggctgtagggggcatggtgcctggagctgaggggcatccgaacgcgttgcgggtggttgtgaggaggcctgtctgcatctccttccggccccactggggtccaggggtgcccagaaaggagcttcccctgcctgcctgagtctgtccccccaggcttcatttcaaacaccgtggcacctccgagcaaggcgggccgtgtgtaaaagcttgcttccccagccagcactgcagggccctgaggtggtcgtgtccctgccctcaattcttgaagcaccagctccctgccccaccctccagtgcctgaggcagctaggggcttctgctctcatctctgaccagcagaatccacccggtgaccagtggtggcccctcagcccaccctcccggcagctcagcctgtggctcttgaggccgtggttcccacgtggactgggaggcagtctcagccacccggggtgctgttcagctgcccctccctgccatcagcaggtgggtgaggggttgcccactgggtgggggcccgtgctaggagtcaccacatgctccaacctcccactgctccctgtcaggggcccaggctgccatcactggaggctgcagggaccaagaggccatcaccgtgtctatagagagcagacagaagcagaacagagcccggggctcctgagcctctgcgtgtgccctcccagcccacaccagtgctctcggccactgagcacccagactcaggcttgggttccccagccttattggaaggcagctcccgcataccaggataacccccgcaaaccacatagcagacccccgccatcctcgcagagtgggagaggctgcagcaaggctttgcctctgcagaccccatcttagtggcacggtgcttgggcctgtgtccccgggtggtggaaccctgtaccggtctgtggccctagggtccctgctctgtctgccccggcccgtgctgtccgctgggtgaggcaggctcccccgtgccctgcctccctctgtcagggaacctgggaccccctccccactgcctgcacagaggaccctgaccctcggccagcagggtggccccaggtccatgttgggcactagggcaggttccgtgccagagtcgggggccacacgagggcctggtgccggtgaggggggcgtgcgctagagggggaaaggggcccccggccacctgtccaccgtgtgggccgtgctgtgtccttatgtcattgtaatataaatacagatttttatatctca

SEQ ID NO: 442980 - DNA, 6829 bp, Homo sapiens
tatcccagcccagctctgcatctgtcaacattctcggcccggcccgaggcgctcgacccgtccccattggccccagcccggcccggcgcccgcccccggggcgcgaacgccgcctcccattggctctgcgggccgccgctctcccttatgtgtcaatttgagggcctgaggcggagggtggcggccgagcgccggagtccgcggagtctggaagtgcggcggccgggcgcgcggggtgggcggcgagcggagccggccggagcgggccgggcagcggccgccgccgtcccggggcggacgggcgcgggcgggaggatggagctgaactccctgctgatcctgctggaggcggccgagtacctggagcgcagggatcgagaggccgagcacggctacgcctcggtgctgcccttcgacggcgacttcgccagggagaaaacaaaggcggccggcctggtgcgcaaggccccgaacaacaggtcttcacacaacgagctagaaaagcacagagaccgcatcccaggcactcagaggctgagccacatcctccactgctccccgcgggcactaacattgccgatgagacttggataaggaggggaccttgttctccatttcctcacttgatctttcacccgacaccacgtacgtaagtcctgtccgcctgcgtcagggcacactcctccaccttctcatccctgatgactgcacaggacacttggctgtgccaccagcgttctttgtgatgaccctctggtttacacagggacttccggacagtcctgcgatgtgccttggtgagcgcagacctttgtggatctggggggatagttttgtaggaccaaggccctagaagtagagatgctggttggcggtcagtgataactgtatcgatggcccttcagacctgtgtccccttttgctctcccaccagcaaaccatcaacgacccctcgaagtggctggcgcaggagccatcccttctcatgtcagcctgtcggagggtgcaagttgtacctccttgtttgtgtgtgcatttcctggctcgggtgagatggagccgggcgttaggttaggttggccctcgtgtcctgcagcctgtttgtgtccttcgcccgttgtgacatcgaggcattctgcttttaatttttgatgtgtatgagctcaaaataccacaaatactaaccatttgtcttttatatgtattgcaaagatttttctacttgttctttgtctctcagctgtgtttttctttcttgtgcaaacgtgtctttctctgattgtcacagcaatgtctgtgtgtgtttttttttaagcgtagaaaacctggaaaatacagaaaagcacaaagctaaagaaataaaattgccgggtgcttcgcctggagacgcacgctccctgtgccttgtttgattctgtcgtctcttgtgtgcgtctgctcttttattttttaaacaaaattgggtcacttgtcacctatgtggttccgtattctaatttttcacttaacattcatgatgtgcatatgtaacacactaaaatgataatgaggttgttttggggtggtggaattcgggggtacttttaatttttttttattttttttcctttttgttgatttgcatttttaaattgttctacagaggtcatatagtgctgatgtaattacatggtgggatggaaagccatttgctagagtggaccagggaaggagacccctggcaacgtccccacttgcaaacctcgtcccagtggtggctgcagtacagtggcgacgcgccttgggaaaggacccctccctgagcagagagagcacgctttggcctcttgcctacacagttcctggggtggggggcggcagggcgctcactcctgttggcggtggggaggctgagcttccaggcactggggtagtcacagagcggcagcctgggacccctttccctgcacctgtgcatgggagacagcgtgggagacgttgaggatcttggccctgttcaggccacctccaggcagacctcccgactggtggggctgttaccgctgcacccagcagccccctccttcttcaggctcctcctctgtccagaggaaatggctgtccctgccgacgttactcccagggggacaagatttgctgggcttgggaacggcaggagcagacatgccaaggctggggtgctcagtgttggcaccacgtggggaaagtcacgtgtgtaggcatcagctgtggcagggcagttgggcggcaggttttcaaaagacaaaaaatattcctgccccttcacctggtcattccactcgtaaggatttacccaaatcaaagtgtcctatatttggaagcagcctctgcggcctgcacgggatgggtgagtccgtggttgaacatggcagtgacaaaacctccgggtgccctgcactgccaggcaggtgcacgtgggcctggccagggtcccaggccgagttgatgcctctgggtgagctgggctccccgcaccccgtgagctccaccagcctcccccgcagacaagcaggccagcagggaaggcggtgtttccacaggggcaggcctaggatgaagccagggcccctctcctgaggtgcccgatgaatgtgtcctggaggattgtggcatgtgagcaagtacccttgagtgtgaacaagcaagcaagcaccactggatgtcatggctccagttttgtggaaagtggattcatctgtggatacggggacagaatctggaatgaggcagtttccaaagggatatgaaacttgggttggaagggcctggtccctggccctcccttgacctaggctgatcatgtttccatggtcacaaaagtgacagagagcacgttgtgcacgatgaggtagagagacgtgaatcttgtctgggtccttccagatctcggtgcagcctgaaaggcaccctcgcctcaccccacccctccctgcatgtggactccagggtggggatgggggatgggggatggcaggggggcgagctggggctcctaggaaatgcctggcggtgacgcgctgaggctttgcaggccatggtgagctgggcgcttctgccaggtgtctgggggctgtgggtgttgggctcctcctgggggtgggggacgggggttcccaaccaggccaggaggggatccttagagagggaccctcagcacatgtgcagcagtggatggtgggggtgggtctgtgcagggccctggaaactgcctgctgccctcccccaccccagcctgatggttctgtctctggctctttcagacgagccaaactcaggctgtaccttgagcagctcaagcaactggtgcccctgggccccgacagcacccgccacaccacgctgagcctcctgaagcgggccaaggtgcacatcaagaaactggaggagcaggaccgccgggcactgagcatcaaggagcagctgcagcaggagcatcgtttcctgaagcggcgcctggagcagctgtcggtgcagagcgtggagcgcgtgcgcacagatagcacgggctctgctgtctccacggacgactcagagcaagaagtggacatagagggcatggagtttggccctggtgagctggacagtgttggcagcagcagtgacgcggacgaccactacagcctgcagagtggcaccggcggcgacagtggcttcgggccccactgccggcggctgggccgccccgccctctcgtaggcccgtgccctctgctccttggcctgcctgcccgccagccacgcgtgtcagccctccagttctccttcagttgacgccagcctctccacaggcccactgctgtgccattctggaagctccagctgctgctgggctgcctggcactgcccgcttgccggtcagggcctgccgagctgcctgccccttccagctgggcagagtcccctgcaaggaggcagggcccagcttccacatccggagccctggtcagcatagccgcccacggtctgttctcagattcctaatcattccagaagtattaaacgtcattgctgcaaacctcggcaggtgccgtgtgaggggcttaatgaccaccacagggagctcagaccccaaccctggatcccaggagaaaggagtggaccgaggaaggaaggaaggcaaggctgtctgtccatccgtccgtctgtccacctacctgtcagtccacataggctcctggcgtggacaaggggtctgtgaagggcgggaactgggtgagcacctggggcaggtgggtggttaaggtccttcccacttcgcaggtgtcagaacctagggctgggctctcggggccaggcaggccagcccagcccacgccgagctgggcagcgtctgctctggtaggactgtcagacgcacacgcgcacgcacctagacacacccactcatgtacatgctcacacatgcagacacacctgggcgtcccgaggtcacatgttctggggatgatggccttcaggggtcatctggcaaacagcccctgggctgtgcctggatccccctctagctcctgctcacccacgcccacccagtagtcctgcctgtctgcacaggagaggggcttctcttcctggctggggctggggtgaactggaggctggttaagttgcagccgctgggtcctcgggggcttactcatctcccttttttaaacaaaaagcaaaaaagtaaaatgctgcactgcccagcagcccggttagggctcctggagccaccttaggaaagggcttctcatgagctctgctgcggcagcttcagctggcagagaggctttcccagaaaaaaaaaaaaaaccatttttaaaaagaagaaagcctaaagactctcggcctagggacgtccgtgtgtgccgcctctgtttcctgtaccagatttttgtattctattttcctagctgttgttgcgtccttgtttgctgaggggtgggagccacccagcgtctcagggacctgtccctccgtcacgtcgtcaaagtgtgccttgtgtcttgtgtcaggccttgcccttcccaccagcatgtccctcgtggctcagggtgccccaggcctgcccagctagtgctgtcctcccatctcctgtgggcagcccctcccggcagccagggcttcctggaggcgatgcagccaggcccctgtgggtggcacggaggggctgtgacctggtccccagtgttgccctccccagtggctggcaggggcctgcttgctcactagagagatggattctcacctgtcacctgactcgagccccctgcttcctggcctaggcgagggttccaggtttcagacactggcagccaatgaagactgtgctcgctgggtggtgcaggcctggcaccaggaggcttgcacccgcctttccttcctgacgtcctctgtccttggggctggcccatagcagtgcctgccgtgcctctggtacatctgtagccaattcccatatcatggggaaaattcgtgtctattttcagtcgtacgcatagacgccccaggatggggggcccactgtggcggaagggggtccctggaaacaactctggcacagaacctgccctgcaggctgtagggggcatggtgcctggagctgaggggcatccgaacgcgttgcgggtggttgtgaggaggcctgtctgcatctccttccggccccactggggtccaggggtgcccagaaaggagcttcccctgcctgcctgagtctgtccccccaggcttcatttcaaacaccgtggcacctccgagcaaggcgggccgtgtgtaaaagcttgcttccccagccagcactgcagggccctgaggtggtcgtgtccctgccctcaattcttgaagcaccagctccctgccccaccctccagtgcctgaggcagctaggggcttctgctctcatctctgaccagcagaatccacccggtgaccagtggtggcccctcagcccaccctcccggcagctcagcctgtggctcttgaggccgtggttcccacgtggactgggaggcagtctcagccacccggggtgctgttcagctgcccctccctgccatcagcaggtgggtgaggggttgcccactgggtgggggcccgtgctaggagtcaccacatgctccaacctcccactgctccctgtcaggggcccaggctgccatcactggaggctgcagggaccaagaggccatcaccgtgtctatagagagcagacagaagcagaacagagcccggggctcctgagcctctgcgtgtgccctcccagcccacaccagtgctctcggccactgagcacccagactcaggcttgggttccccagccttattggaaggcagctcccgcataccaggataacccccgcaaaccacatagcagacccccgccatcctcgcagagtgggagaggctgcagcaaggctttgcctctgcagaccccatcttagtggcacggtgcttgggcctgtgtccccgggtggtggaaccctgtaccggtctgtggccctagggtccctgctctgtctgccccggcccgtgctgtccgctgggtgaggcaggctcccccgtgccctgcctccctctgtcagggaacctgggaccccctccccactgcctgcacagaggaccctgaccctcggccagcagggtggccccaggtccatgttgggcactagggcaggttccgtgccagagtcgggggccacacgagggcctggtgccggtgaggggggcgtgcgctagagggggaaaggggcccccggccacctgtccaccgtgtgggccgtgctgtgtccttatgtcattgtaatataaatacagatttttatatctca

SEQ ID NO: 442981 - DNA, 7002 bp, Homo sapiens
tatcccagcccagctctgcatctgtcaacattctcggcccggcccgaggcgctcgacccgtccccattggccccagcccggcccggcgcccgcccccggggcgcgaacgccgcctcccattggctctgcgggccgccgctctcccttatgtgtcaatttgagggcctgaggcggagggtggcggccgagcgccggagtccgcggagtctggaagtgcggcggccgggcgcgcggggtgggcggcgagcggagccggccggagcgggccgggcagcggccgccgccgtcccggggcggacgggcgcgggcgggaggatggagctgaactccctgctgatcctgctggaggcggccgagtacctggagcgcagggatcgagaggccgagcacggctacgcctcggtgctgcccttcgacggcgacttcgccagggagaaaacaaaggcggccggcctggtgcgcaaggccccgaacaacagcggcatcctgggaggcccgggagccctggctggcctgtggggtcctgcctggacacggaaggtggcctggagctgggagcgaggtccccctgcctcgttatcctccaggcagatgctgtggcacaccctgtggtgctgggaattgtgtgcccgcgtctgaatgggcaagacaggtcttcacacaacgagctagaaaagcacagagaccgcatcccaggcactcagaggctgagccacatcctccactgctccccgcgggcactaacattgccgatgagacttggataaggaggggaccttgttctccatttcctcacttgatctttcacccgacaccacgtacgtaagtcctgtccgcctgcgtcagggcacactcctccaccttctcatccctgatgactgcacaggacacttggctgtgccaccagcgttctttgtgatgaccctctggtttacacagggacttccggacagtcctgcgatgtgccttggtgagcgcagacctttgtggatctggggggatagttttgtaggaccaaggccctagaagtagagatgctggttggcggtcagtgataactgtatcgatggcccttcagacctgtgtccccttttgctctcccaccagcaaaccatcaacgacccctcgaagtggctggcgcaggagccatcccttctcatgtcagcctgtcggagggtgcaagttgtacctccttgtttgtgtgtgcatttcctggctcgggtgagatggagccgggcgttaggttaggttggccctcgtgtcctgcagcctgtttgtgtccttcgcccgttgtgacatcgaggcattctgcttttaatttttgatgtgtatgagctcaaaataccacaaatactaaccatttgtcttttatatgtattgcaaagatttttctacttgttctttgtctctcagctgtgtttttctttcttgtgcaaacgtgtctttctctgattgtcacagcaatgtctgtgtgtgtttttttttaagcgtagaaaacctggaaaatacagaaaagcacaaagctaaagaaataaaattgccgggtgcttcgcctggagacgcacgctccctgtgccttgtttgattctgtcgtctcttgtgtgcgtctgctcttttattttttaaacaaaattgggtcacttgtcacctatgtggttccgtattctaatttttcacttaacattcatgatgtgcatatgtaacacactaaaatgataatgaggttgttttggggtggtggaattcgggggtacttttaatttttttttattttttttcctttttgttgatttgcatttttaaattgttctacagaggtcatatagtgctgatgtaattacatggtgggatggaaagccatttgctagagtggaccagggaaggagacccctggcaacgtccccacttgcaaacctcgtcccagtggtggctgcagtacagtggcgacgcgccttgggaaaggacccctccctgagcagagagagcacgctttggcctcttgcctacacagttcctggggtggggggcggcagggcgctcactcctgttggcggtggggaggctgagcttccaggcactggggtagtcacagagcggcagcctgggacccctttccctgcacctgtgcatgggagacagcgtgggagacgttgaggatcttggccctgttcaggccacctccaggcagacctcccgactggtggggctgttaccgctgcacccagcagccccctccttcttcaggctcctcctctgtccagaggaaatggctgtccctgccgacgttactcccagggggacaagatttgctgggcttgggaacggcaggagcagacatgccaaggctggggtgctcagtgttggcaccacgtggggaaagtcacgtgtgtaggcatcagctgtggcagggcagttgggcggcaggttttcaaaagacaaaaaatattcctgccccttcacctggtcattccactcgtaaggatttacccaaatcaaagtgtcctatatttggaagcagcctctgcggcctgcacgggatgggtgagtccgtggttgaacatggcagtgacaaaacctccgggtgccctgcactgccaggcaggtgcacgtgggcctggccagggtcccaggccgagttgatgcctctgggtgagctgggctccccgcaccccgtgagctccaccagcctcccccgcagacaagcaggccagcagggaaggcggtgtttccacaggggcaggcctaggatgaagccagggcccctctcctgaggtgcccgatgaatgtgtcctggaggattgtggcatgtgagcaagtacccttgagtgtgaacaagcaagcaagcaccactggatgtcatggctccagttttgtggaaagtggattcatctgtggatacggggacagaatctggaatgaggcagtttccaaagggatatgaaacttgggttggaagggcctggtccctggccctcccttgacctaggctgatcatgtttccatggtcacaaaagtgacagagagcacgttgtgcacgatgaggtagagagacgtgaatcttgtctgggtccttccagatctcggtgcagcctgaaaggcaccctcgcctcaccccacccctccctgcatgtggactccagggtggggatgggggatgggggatggcaggggggcgagctggggctcctaggaaatgcctggcggtgacgcgctgaggctttgcaggccatggtgagctgggcgcttctgccaggtgtctgggggctgtgggtgttgggctcctcctgggggtgggggacgggggttcccaaccaggccaggaggggatccttagagagggaccctcagcacatgtgcagcagtggatggtgggggtgggtctgtgcagggccctggaaactgcctgctgccctcccccaccccagcctgatggttctgtctctggctctttcagacgagccaaactcaggctgtaccttgagcagctcaagcaactggtgcccctgggccccgacagcacccgccacaccacgctgagcctcctgaagcgggccaaggtgcacatcaagaaactggaggagcaggaccgccgggcactgagcatcaaggagcagctgcagcaggagcatcgtttcctgaagcggcgcctggagcagctgtcggtgcagagcgtggagcgcgtgcgcacagatagcacgggctctgctgtctccacggacgactcagagcaagaagtggacatagagggcatggagtttggccctggtgagctggacagtgttggcagcagcagtgacgcggacgaccactacagcctgcagagtggcaccggcggcgacagtggcttcgggccccactgccggcggctgggccgccccgccctctcgtaggcccgtgccctctgctccttggcctgcctgcccgccagccacgcgtgtcagccctccagttctccttcagttgacgccagcctctccacaggcccactgctgtgccattctggaagctccagctgctgctgggctgcctggcactgcccgcttgccggtcagggcctgccgagctgcctgccccttccagctgggcagagtcccctgcaaggaggcagggcccagcttccacatccggagccctggtcagcatagccgcccacggtctgttctcagattcctaatcattccagaagtattaaacgtcattgctgcaaacctcggcaggtgccgtgtgaggggcttaatgaccaccacagggagctcagaccccaaccctggatcccaggagaaaggagtggaccgaggaaggaaggaaggcaaggctgtctgtccatccgtccgtctgtccacctacctgtcagtccacataggctcctggcgtggacaaggggtctgtgaagggcgggaactgggtgagcacctggggcaggtgggtggttaaggtccttcccacttcgcaggtgtcagaacctagggctgggctctcggggccaggcaggccagcccagcccacgccgagctgggcagcgtctgctctggtaggactgtcagacgcacacgcgcacgcacctagacacacccactcatgtacatgctcacacatgcagacacacctgggcgtcccgaggtcacatgttctggggatgatggccttcaggggtcatctggcaaacagcccctgggctgtgcctggatccccctctagctcctgctcacccacgcccacccagtagtcctgcctgtctgcacaggagaggggcttctcttcctggctggggctggggtgaactggaggctggttaagttgcagccgctgggtcctcgggggcttactcatctcccttttttaaacaaaaagcaaaaaagtaaaatgctgcactgcccagcagcccggttagggctcctggagccaccttaggaaagggcttctcatgagctctgctgcggcagcttcagctggcagagaggctttcccagaaaaaaaaaaaaaaccatttttaaaaagaagaaagcctaaagactctcggcctagggacgtccgtgtgtgccgcctctgtttcctgtaccagatttttgtattctattttcctagctgttgttgcgtccttgtttgctgaggggtgggagccacccagcgtctcagggacctgtccctccgtcacgtcgtcaaagtgtgccttgtgtcttgtgtcaggccttgcccttcccaccagcatgtccctcgtggctcagggtgccccaggcctgcccagctagtgctgtcctcccatctcctgtgggcagcccctcccggcagccagggcttcctggaggcgatgcagccaggcccctgtgggtggcacggaggggctgtgacctggtccccagtgttgccctccccagtggctggcaggggcctgcttgctcactagagagatggattctcacctgtcacctgactcgagccccctgcttcctggcctaggcgagggttccaggtttcagacactggcagccaatgaagactgtgctcgctgggtggtgcaggcctggcaccaggaggcttgcacccgcctttccttcctgacgtcctctgtccttggggctggcccatagcagtgcctgccgtgcctctggtacatctgtagccaattcccatatcatggggaaaattcgtgtctattttcagtcgtacgcatagacgccccaggatggggggcccactgtggcggaagggggtccctggaaacaactctggcacagaacctgccctgcaggctgtagggggcatggtgcctggagctgaggggcatccgaacgcgttgcgggtggttgtgaggaggcctgtctgcatctccttccggccccactggggtccaggggtgcccagaaaggagcttcccctgcctgcctgagtctgtccccccaggcttcatttcaaacaccgtggcacctccgagcaaggcgggccgtgtgtaaaagcttgcttccccagccagcactgcagggccctgaggtggtcgtgtccctgccctcaattcttgaagcaccagctccctgccccaccctccagtgcctgaggcagctaggggcttctgctctcatctctgaccagcagaatccacccggtgaccagtggtggcccctcagcccaccctcccggcagctcagcctgtggctcttgaggccgtggttcccacgtggactgggaggcagtctcagccacccggggtgctgttcagctgcccctccctgccatcagcaggtgggtgaggggttgcccactgggtgggggcccgtgctaggagtcaccacatgctccaacctcccactgctccctgtcaggggcccaggctgccatcactggaggctgcagggaccaagaggccatcaccgtgtctatagagagcagacagaagcagaacagagcccggggctcctgagcctctgcgtgtgccctcccagcccacaccagtgctctcggccactgagcacccagactcaggcttgggttccccagccttattggaaggcagctcccgcataccaggataacccccgcaaaccacatagcagacccccgccatcctcgcagagtgggagaggctgcagcaaggctttgcctctgcagaccccatcttagtggcacggtgcttgggcctgtgtccccgggtggtggaaccctgtaccggtctgtggccctagggtccctgctctgtctgccccggcccgtgctgtccgctgggtgaggcaggctcccccgtgccctgcctccctctgtcagggaacctgggaccccctccccactgcctgcacagaggaccctgaccctcggccagcagggtggccccaggtccatgttgggcactagggcaggttccgtgccagagtcgggggccacacgagggcctggtgccggtgaggggggcgtgcgctagagggggaaaggggcccccggccacctgtccaccgtgtgggccgtgctgtgtccttatgtcattgtaatataaatacagatttttatatctca

SEQ ID NO: 442982 - DNA, 6711 bp, Homo sapiens
gtcgataccagcccagcgtgctagtcctgcaggcgggttctgcctcctgaatccacacagggttccttcaggaagtggaggttttaaaagccctttggatgcccagggacagccgtggggtgctggcagggggcccagggcactgcagcggcttcaggaggggagggctcagcaggagcccagtgcagccccgggctgaggggcttcatggctcagaggggtgggtggggatcttcctggggtcccgcaaccagccactgtagagttggctccaggccactgctgctctccagggcaggaatttctgaggcctccagccctggcgcccacactcttgggccaggtggacctgttactgggttttggacagtgcgtgtgtgtggtcagatggcttctgtttgtctctcgagaaaggtgttccgtgatttctaaagcggtctgttcacggacctcccctgcaccccaccccagagaccgcatcccaggcactcagaggctgagccacatcctccactgctccccgcgggcactaacattgccgatgagacttggataaggaggggaccttgttctccatttcctcacttgatctttcacccgacaccacgtacgtaagtcctgtccgcctgcgtcagggcacactcctccaccttctcatccctgatgactgcacaggacacttggctgtgccaccagcgttctttgtgatgaccctctggtttacacagggacttccggacagtcctgcgatgtgccttggtgagcgcagacctttgtggatctggggggatagttttgtaggaccaaggccctagaagtagagatgctggttggcggtcagtgataactgtatcgatggcccttcagacctgtgtccccttttgctctcccaccagcaaaccatcaacgacccctcgaagtggctggcgcaggagccatcccttctcatgtcagcctgtcggagggtgcaagttgtacctccttgtttgtgtgtgcatttcctggctcgggtgagatggagccgggcgttaggttaggttggccctcgtgtcctgcagcctgtttgtgtccttcgcccgttgtgacatcgaggcattctgcttttaatttttgatgtgtatgagctcaaaataccacaaatactaaccatttgtcttttatatgtattgcaaagatttttctacttgttctttgtctctcagctgtgtttttctttcttgtgcaaacgtgtctttctctgattgtcacagcaatgtctgtgtgtgtttttttttaagcgtagaaaacctggaaaatacagaaaagcacaaagctaaagaaataaaattgccgggtgcttcgcctggagacgcacgctccctgtgccttgtttgattctgtcgtctcttgtgtgcgtctgctcttttattttttaaacaaaattgggtcacttgtcacctatgtggttccgtattctaatttttcacttaacattcatgatgtgcatatgtaacacactaaaatgataatgaggttgttttggggtggtggaattcgggggtacttttaatttttttttattttttttcctttttgttgatttgcatttttaaattgttctacagaggtcatatagtgctgatgtaattacatggtgggatggaaagccatttgctagagtggaccagggaaggagacccctggcaacgtccccacttgcaaacctcgtcccagtggtggctgcagtacagtggcgacgcgccttgggaaaggacccctccctgagcagagagagcacgctttggcctcttgcctacacagttcctggggtggggggcggcagggcgctcactcctgttggcggtggggaggctgagcttccaggcactggggtagtcacagagcggcagcctgggacccctttccctgcacctgtgcatgggagacagcgtgggagacgttgaggatcttggccctgttcaggccacctccaggcagacctcccgactggtggggctgttaccgctgcacccagcagccccctccttcttcaggctcctcctctgtccagaggaaatggctgtccctgccgacgttactcccagggggacaagatttgctgggcttgggaacggcaggagcagacatgccaaggctggggtgctcagtgttggcaccacgtggggaaagtcacgtgtgtaggcatcagctgtggcagggcagttgggcggcaggttttcaaaagacaaaaaatattcctgccccttcacctggtcattccactcgtaaggatttacccaaatcaaagtgtcctatatttggaagcagcctctgcggcctgcacgggatgggtgagtccgtggttgaacatggcagtgacaaaacctccgggtgccctgcactgccaggcaggtgcacgtgggcctggccagggtcccaggccgagttgatgcctctgggtgagctgggctccccgcaccccgtgagctccaccagcctcccccgcagacaagcaggccagcagggaaggcggtgtttccacaggggcaggcctaggatgaagccagggcccctctcctgaggtgcccgatgaatgtgtcctggaggattgtggcatgtgagcaagtacccttgagtgtgaacaagcaagcaagcaccactggatgtcatggctccagttttgtggaaagtggattcatctgtggatacggggacagaatctggaatgaggcagtttccaaagggatatgaaacttgggttggaagggcctggtccctggccctcccttgacctaggctgatcatgtttccatggtcacaaaagtgacagagagcacgttgtgcacgatgaggtagagagacgtgaatcttgtctgggtccttccagatctcggtgcagcctgaaaggcaccctcgcctcaccccacccctccctgcatgtggactccagggtggggatgggggatgggggatggcaggggggcgagctggggctcctaggaaatgcctggcggtgacgcgctgaggctttgcaggccatggtgagctgggcgcttctgccaggtgtctgggggctgtgggtgttgggctcctcctgggggtgggggacgggggttcccaaccaggccaggaggggatccttagagagggaccctcagcacatgtgcagcagtggatggtgggggtgggtctgtgcagggccctggaaactgcctgctgccctcccccaccccagcctgatggttctgtctctggctctttcagacgagccaaactcaggctgtaccttgagcagctcaagcaactggtgcccctgggccccgacagcacccgccacaccacgctgagcctcctgaagcgggccaaggtgcacatcaagaaactggaggagcaggaccgccgggcactgagcatcaaggagcagctgcagcaggagcatcgtttcctgaagcggcgcctggagcagctgtcggtgcagagcgtggagcgcgtgcgcacagatagcacgggctctgctgtctccacggacgactcagagcaagaagtggacatagagggcatggagtttggccctggtgagctggacagtgttggcagcagcagtgacgcggacgaccactacagcctgcagagtggcaccggcggcgacagtggcttcgggccccactgccggcggctgggccgccccgccctctcgtaggcccgtgccctctgctccttggcctgcctgcccgccagccacgcgtgtcagccctccagttctccttcagttgacgccagcctctccacaggcccactgctgtgccattctggaagctccagctgctgctgggctgcctggcactgcccgcttgccggtcagggcctgccgagctgcctgccccttccagctgggcagagtcccctgcaaggaggcagggcccagcttccacatccggagccctggtcagcatagccgcccacggtctgttctcagattcctaatcattccagaagtattaaacgtcattgctgcaaacctcggcaggtgccgtgtgaggggcttaatgaccaccacagggagctcagaccccaaccctggatcccaggagaaaggagtggaccgaggaaggaaggaaggcaaggctgtctgtccatccgtccgtctgtccacctacctgtcagtccacataggctcctggcgtggacaaggggtctgtgaagggcgggaactgggtgagcacctggggcaggtgggtggttaaggtccttcccacttcgcaggtgtcagaacctagggctgggctctcggggccaggcaggccagcccagcccacgccgagctgggcagcgtctgctctggtaggactgtcagacgcacacgcgcacgcacctagacacacccactcatgtacatgctcacacatgcagacacacctgggcgtcccgaggtcacatgttctggggatgatggccttcaggggtcatctggcaaacagcccctgggctgtgcctggatccccctctagctcctgctcacccacgcccacccagtagtcctgcctgtctgcacaggagaggggcttctcttcctggctggggctggggtgaactggaggctggttaagttgcagccgctgggtcctcgggggcttactcatctcccttttttaaacaaaaagcaaaaaagtaaaatgctgcactgcccagcagcccggttagggctcctggagccaccttaggaaagggcttctcatgagctctgctgcggcagcttcagctggcagagaggctttcccagaaaaaaaaaaaaaaccatttttaaaaagaagaaagcctaaagactctcggcctagggacgtccgtgtgtgccgcctctgtttcctgtaccagatttttgtattctattttcctagctgttgttgcgtccttgtttgctgaggggtgggagccacccagcgtctcagggacctgtccctccgtcacgtcgtcaaagtgtgccttgtgtcttgtgtcaggccttgcccttcccaccagcatgtccctcgtggctcagggtgccccaggcctgcccagctagtgctgtcctcccatctcctgtgggcagcccctcccggcagccagggcttcctggaggcgatgcagccaggcccctgtgggtggcacggaggggctgtgacctggtccccagtgttgccctccccagtggctggcaggggcctgcttgctcactagagagatggattctcacctgtcacctgactcgagccccctgcttcctggcctaggcgagggttccaggtttcagacactggcagccaatgaagactgtgctcgctgggtggtgcaggcctggcaccaggaggcttgcacccgcctttccttcctgacgtcctctgtccttggggctggcccatagcagtgcctgccgtgcctctggtacatctgtagccaattcccatatcatggggaaaattcgtgtctattttcagtcgtacgcatagacgccccaggatggggggcccactgtggcggaagggggtccctggaaacaactctggcacagaacctgccctgcaggctgtagggggcatggtgcctggagctgaggggcatccgaacgcgttgcgggtggttgtgaggaggcctgtctgcatctccttccggccccactggggtccaggggtgcccagaaaggagcttcccctgcctgcctgagtctgtccccccaggcttcatttcaaacaccgtggcacctccgagcaaggcgggccgtgtgtaaaagcttgcttccccagccagcactgcagggccctgaggtggtcgtgtccctgccctcaattcttgaagcaccagctccctgccccaccctccagtgcctgaggcagctaggggcttctgctctcatctctgaccagcagaatccacccggtgaccagtggtggcccctcagcccaccctcccggcagctcagcctgtggctcttgaggccgtggttcccacgtggactgggaggcagtctcagccacccggggtgctgttcagctgcccctccctgccatcagcaggggcccaggctgccatcactggaggctgcagggaccaagaggccatcaccgtgtctatagagagcagacagaagcagaacagagcccggggctcctgagcctctgcgtgtgccctcccagcccacaccagtgctctcggccactgagcacccagactcaggcttgggttccccagccttattggaaggcagctcccgcataccaggataacccccgcaaaccacatagcagacccccgccatcctcgcagagtgggagaggctgcagcaaggctttgcctctgcagaccccatcttagtggcacggtgcttgggcctgtgtccccgggtggtggaaccctgtaccggtctgtggccctagggtccctgctctgtctgccccggcccgtgctgtccgctgggtgaggcaggctcccccgtgccctgcctccctctgtcagggaacctgggaccccctccccactgcctgcacagaggaccctgaccctcggccagcagggtggccccaggtccatgttgggcactagggcaggttccgtgccagagtcgggggccacacgagggcctggtgccggtgaggggggcgtgcgctagagggggaaaggggcccccggccacctgtccaccgtgtgggccgtgctgtgtccttatgtcattgtaatataaatacagatttttatatctca

SEQ ID NO: 442983 - DNA, 5602 bp, Homo sapiens
gtcgataccagcccagcgtgctagtcctgcaggcgggttctgcctcctgaatccacacagggttccttcaggaagtggaggttttaaaagccctttggatgcccagggacagccgtggggtgctggcagggggcccagggcactgcagcggcttcaggaggggagggctcagcaggagcccagtgcagccccgggctgaggggcttcatggctcagaggggtgggtggggatcttcctggggtcccgcaaccagccactgtagagttggctccaggccactgctgctctccagggcaggaatttctgaggcctccagccctggcgcccacactcttgggccaggtggacctgttactgggttttggacagtgcgtgtgtgtggtcagatggcttctgtttgtctctcgagaaaggtgttccgtgatttctaaagcggtctgttcacggacctcccctgcaccccaccccagagaccgcatcccaggcactcagaggctgagccacatcctccactgctccccgcgggcactaacattgccgatgagacttggataaggaggggaccttgttctccatttcctcacttgatctttcacccgacaccacgtacgtaagtcctgtccgcctgcgtcagggcacactcctccaccttctcatccctgatgactgcacaggacacttggctgtgccaccagcgttctttgtgatgaccctctggtttacacagggacttccggacagtcctgcgatgtgccttggtgagcgcagacctttgtggatctggggggatagttttgtaggaccaaggccctagaagtagagatgctggttggcggtcagtgataactgtatcgatggcccttcagacctgtgtccccttttgctctcccaccagcaaaccatcaacgacccctcgaagtggctggcgcaggagccatcccttctcatgtcagcctgtcggagggtgcaagttgtacctccttgtttgtgtgtgcatttcctggctcgggtgagatggagccgggcgttaggttaggttggccctcgtgtcctgcagcctgtttgtgtccttcgcccgttgtgacatcgaggcattctgcttttaatttttgatgtgtatgagctcaaaataccacaaatactaaccatttgtcttttatatgtattgcaaagatttttctacttgttctttgtctctcagctgtgtttttctttcttgtgcaaacgtgtctttctctgattgtcacagcaatgtctgtgtgtgtttttttttaagcgtagaaaacctggaaaatacagaaaagcacaaagctaaagaaataaaattgccgggtgcttcgcctggagacgcacgctccctgtgccttgtttgattctgtcgtctcttgtgtgcgtctgctcttttattttttaaacaaaattgggtcacttgtcacctatgtggttccgtattctaatttttcacttaacattcatgatgtgcatatgtaacacactaaaatgataatgaggttgttttggggtggtggaattcgggggtacttttaatttttttttattttttttcctttttgttgatttgcatttttaaattgttctacagaggtcatatagtgctgatgtaattacatggtgggatggaaagccatttgctagagtggaccagggaaggagacccctggcaacgtccccacttgcaaacctcgtcccagtggtggctgcagtacagtggcgacgcgccttgggaaaggacccctccctgagcagagagagcacgctttggcctcttgcctacacagttcctggggtggggggcggcagggcgctcactcctgttggcggtggggaggctgagcttccaggcactggggtagtcacagagcggcagcctgggacccctttccctgcacctgtgcatgggagacagcgtgggagacgttgaggatcttggccctgttcaggccacctccaggcagacctcccgactggtggggctgttaccgctgcacccagcagccccctccttcttcaggctcctcctctgtccagaggaaatggctgtccctgccgacgttactcccagggggacaagatttgctgggcttgggaacggcaggagcagacatgccaaggctggggtgctcagtgttggcaccacgtggggaaagtcacgtgtgtaggcatcagctgtggcagggcagttgggcggcaggttttcaaaagacaaaaaatattcctgccccttcacctggtcattccactcgtaaggatttacccaaatcaaagtgtcctatatttggaagcagcctctgcggcctgcacgggatgggtgagtccgtggttgaacatggcagtgacaaaacctccgggtgccctgcactgccaggcaggtgcacgtgggcctggccagggtcccaggccgagttgatgcctctgggtgagctgggctccccgcaccccgtgagctccaccagcctcccccgcagacaagcaggccagcagggaaggcggtgtttccacaggggcaggcctaggatgaagccagggcccctctcctgaggtgcccgatgaatgtgtcctggaggattgtggcatgtgagcaagtacccttgagtgtgaacaagcaagcaagcaccactggatgtcatggctccagttttgtggaaagtggattcatctgtggatacggggacagaatctggaatgaggcagtttccaaagggatatgaaacttgggttggaagggcctggtccctggccctcccttgacctaggctgatcatgtttccatggtcacaaaagtgacagagagcacgttgtgcacgatgaggtagagagacgtgaatcttgtctgggtccttccagatctcggtgcagcctgaaaggcaccctcgcctcaccccacccctccctgcatgtggactccagggtggggatgggggatgggggatggcaggggggcgagctggggctcctaggaaatgcctggcggtgacgcgctgaggctttgcaggccatggtgagctgggcgcttctgccaggtgtctgggggctgtgggtgttgggctcctcctgggggtgggggacgggggttcccaaccaggccaggaggggatccttagagagggaccctcagcacatgtgcagcagtggatggtgggggtgggtctgtgcagggccctggaaactgcctgctgccctcccccaccccagcctgatggttctgtctctggctctttcagacgagccaaactcaggctgtaccttgagcagctcaagcaactggtgcccctgggccccgacagcacccgccacaccacgctgagcctcctgaagcgggccaaggtgcacatcaagaaactggaggagcaggaccgccgggcactgagcatcaaggagcagctgcagcaggagcatcgtttcctgaagcggcgcctggagcagctgtcggtgcagagcgtggagcgcgtgcgcacagatagcacgggctctgctgtctccacggacgactcagagcaagaagtggacatagagggcatggagtttggccctggtgagctggacagtgttggcagcagcagtgacgcggacgaccactacagcctgcagagtggcaccggcggcgacagtggcttcgggccccactgccggcggctgggccgccccgccctctcgtaggcccgtgccctctgctccttggcctgcctgcccgccagccacgcgtgtcagccctccagttctccttcagttgacgccagcctctccacaggcccactgctgtgccattctggaagctccagctgctgctgggctgcctggcactgcccgcttgccggtcagggcctgccgagctgcctgccccttccagctgggcagagtcccctgcaaggaggcagggcccagcttccacatccggagccctggtcagcatagccgcccacggtctgttctcagattcctaatcattccagaagtattaaacgtcattgctgcaaacctcggcaggtgccgtgtgaggggcttaatgaccaccacagggagctcagaccccaaccctggatcccaggagaaaggagtggaccgaggaaggaaggaaggcaaggctgtctgtccatccgtccgtctgtccacctacctgtcagtccacataggctcctggcgtggacaaggggtctgtgaagggcgggaactgggtgagcacctggggcaggtgggtggttaaggtccttcccacttcgcaggtgtcagaacctagggctgggctctcggggccaggcaggccagcccagcccacgccgagctgggcagcgtctgctctggtaggactgtcagacgcacacgcgcacgcacctagacacacccactcatgtacatgctcacacatgcagacacacctgggcgtcccgaggtcacatgttctggggatgatggccttcaggggtcatctggcaaacagcccctgggctgtgcctggatccccctctagctcctgctcacccacgcccacccagtagtcctgcctgtctgcacaggagaggggcttctcttcctggctggggctggggtgaactggaggctggttaagttgcagccgctgggtcctcgggggcttactcatctcccttttttaaacaaaaagcaaaaaagtaaaatgctgcactgcccagcagcccggttagggctcctggagccaccttaggaaagggcttctcatgagctctgctgcggcagcttcagctggcagagaggctttcccagaaaaaaaaaaaaaaccatttttaaaaagaagaaagcctaaagactctcggcctagggacgtccgtgtgtgccgcctctgtttcctgtaccagatttttgtattctattttcctagctgttgttgcgtccttgtttgctgaggggtgggagccacccagcgtctcagggacctgtccctccgtcacgtcgtcaaagtgtgccttgtgtcttgtgtcaggccttgcccttcccaccagcatgtccctcgtggtcctgagcctctgcgtgtgccctcccagcccacaccagtgctctcggccactgagcacccagactcaggcttgggttccccagccttattggaaggcagctcccgcataccaggataacccccgcaaaccacatagcagacccccgccatcctcgcagagtgggagaggctgcagcaaggctttgcctctgcagaccccatcttagtggcacggtgcttgggcctgtgtccccgggtggtggaaccctgtaccggtctgtggccctagggtccctgctctgtctgccccggcccgtgctgtccgctgggtgaggcaggctcccccgtgccctgcctccctctgtcagggaacctgggaccccctccccactgcctgcacagaggaccctgaccctcggccagcagggtggccccaggtccatgttgggcactagggcaggttccgtgccagagtcgggggccacacgagggcctggtgccggtgaggggggcgtgcgctagagggggaaaggggcccccggccacctgtccaccgtgtgggccgtgctgtgtccttatgtcattgtaatataaatacagatttttatatctca

SEQ ID NO: 442984 - DNA, 3711 bp, Homo sapiens
tatcccagcccagctctgcatctgtcaacattctcggcccggcccgaggcgctcgacccgtccccattggccccagcccggcccggcgcccgcccccggggcgcgaacgccgcctcccattggctctgcgggccgccgctctcccttatgtgtcaatttgagggcctgaggcggagggtggcggccgagcgccggagtccgcggagtctggaagtgcggcggccgggcgcgcggggtgggcggcgagcggagccggccggagcgggccgggcagcggccgccgccgtcccggggcggacgggcgcgggcgggaggatggagctgaactccctgctgatcctgctggaggcggccgagtacctggagcgcagggatcgagaggccgagcacggctacgcctcggtgctgcccttcgacggcgacttcgccagggagaaaacaaaggcggccggcctggtgcgcaaggccccgaacaacaggcctcctcagtgagcaagcccggcccccgctgccgcttctctccaaaccaagtccctgacccgtggagaactctggggcgtgagctggggctcccccagcatggagaatccaaagctgacaaccagcgtcctggccaaggctgcccgaacactgcctctatgctgagcgtttcacacatgcagccagttcatcttcaccccaggctcagagaggtcttgctgtgccattctggaagctccagctgctgctgggctgcctggcactgcccgcttgccggtcagggcctgccgagctgcctgccccttccagctgggcagagtcccctgcaaggaggcagggcccagcttccacatccggagccctggtcagcatagccgcccacggtctgttctcagattcctaatcattccagaagtattaaacgtcattgctgcaaacctcggcaggtgccgtgtgaggggcttaatgaccaccacagggagctcagaccccaaccctggatcccaggagaaaggagtggaccgaggaaggaaggaaggcaaggctgtctgtccatccgtccgtctgtccacctacctgtcagtccacataggctcctggcgtggacaaggggtctgtgaagggcgggaactgggtgagcacctggggcaggtgggtggttaaggtccttcccacttcgcaggtgtcagaacctagggctgggctctcggggccaggcaggccagcccagcccacgccgagctgggcagcgtctgctctggtaggactgtcagacgcacacgcgcacgcacctagacacacccactcatgtacatgctcacacatgcagacacacctgggcgtcccgaggtcacatgttctggggatgatggccttcaggggtcatctggcaaacagcccctgggctgtgcctggatccccctctagctcctgctcacccacgcccacccagtagtcctgcctgtctgcacaggagaggggcttctcttcctggctggggctggggtgaactggaggctggttaagttgcagccgctgggtcctcgggggcttactcatctcccttttttaaacaaaaagcaaaaaagtaaaatgctgcactgcccagcagcccggttagggctcctggagccaccttaggaaagggcttctcatgagctctgctgcggcagcttcagctggcagagaggctttcccagaaaaaaaaaaaaaaccatttttaaaaagaagaaagcctaaagactctcggcctagggacgtccgtgtgtgccgcctctgtttcctgtaccagatttttgtattctattttcctagctgttgttgcgtccttgtttgctgaggggtgggagccacccagcgtctcagggacctgtccctccgtcacgtcgtcaaagtgtgccttgtgtcttgtgtcaggccttgcccttcccaccagcatgtccctcgtggctcagggtgccccaggcctgcccagctagtgctgtcctcccatctcctgtgggcagcccctcccggcagccagggcttcctggaggcgatgcagccaggcccctgtgggtggcacggaggggctgtgacctggtccccagtgttgccctccccagtggctggcaggggcctgcttgctcactagagagatggattctcacctgtcacctgactcgagccccctgcttcctggcctaggcgagggttccaggtttcagacactggcagccaatgaagactgtgctcgctgggtggtgcaggcctggcaccaggaggcttgcacccgcctttccttcctgacgtcctctgtccttggggctggcccatagcagtgcctgccgtgcctctggtacatctgtagccaattcccatatcatggggaaaattcgtgtctattttcagtcgtacgcatagacgccccaggatggggggcccactgtggcggaagggggtccctggaaacaactctggcacagaacctgccctgcaggctgtagggggcatggtgcctggagctgaggggcatccgaacgcgttgcgggtggttgtgaggaggcctgtctgcatctccttccggccccactggggtccaggggtgcccagaaaggagcttcccctgcctgcctgagtctgtccccccaggcttcatttcaaacaccgtggcacctccgagcaaggcgggccgtgtgtaaaagcttgcttccccagccagcactgcagggccctgaggtggtcgtgtccctgccctcaattcttgaagcaccagctccctgccccaccctccagtgcctgaggcagctaggggcttctgctctcatctctgaccagcagaatccacccggtgaccagtggtggcccctcagcccaccctcccggcagctcagcctgtggctcttgaggccgtggttcccacgtggactgggaggcagtctcagccacccggggtgctgttcagctgcccctccctgccatcagcaggtgggtgaggggttgcccactgggtgggggcccgtgctaggagtcaccacatgctccaacctcccactgctccctgtcaggggcccaggctgccatcactggaggctgcagggaccaagaggccatcaccgtgtctatagagagcagacagaagcagaacagagcccggggctcctgagcctctgcgtgtgccctcccagcccacaccagtgctctcggccactgagcacccagactcaggcttgggttccccagccttattggaaggcagctcccgcataccaggataacccccgcaaaccacatagcagacccccgccatcctcgcagagtgggagaggctgcagcaaggctttgcctctgcagaccccatcttagtggcacggtgcttgggcctgtgtccccgggtggtggaaccctgtaccggtctgtggccctagggtccctgctctgtctgccccggcccgtgctgtccgctgggtgaggcaggctcccccgtgccctgcctccctctgtcagggaacctgggaccccctccccactgcctgcacagaggaccctgaccctcggccagcagggtggccccaggtccatgttgggcactagggcaggttccgtgccagagtcgggggccacacgagggcctggtgccggtgaggggggcgtgcgctagagggggaaaggggcccccggccacctgtccaccgtgtgggccgtgctgtgtccttatgtcattgtaatataaatacagatttttatatctca

SEQ ID NO: 442985 - DNA, 4256 bp, Homo sapiens
tatcccagcccagctctgcatctgtcaacattctcggcccggcccgaggcgctcgacccgtccccattggccccagcccggcccggcgcccgcccccggggcgcgaacgccgcctcccattggctctgcgggccgccgctctcccttatgtgtcaatttgagggcctgaggcggagggtggcggccgagcgccggagtccgcggagtctggaagtgcggcggccgggcgcgcggggtgggcggcgagcggagccggccggagcgggccgggcagcggccgccgccgtcccggggcggacgggcgcgggcgggaggatggagctgaactccctgctgatcctgctggaggcggccgagtacctggagcgcagggatcgagaggccgagcacggctacgcctcggtgctgcccttcgacggcgacttcgccagggagaaaacaaaggcggccggcctggtgcgcaaggccccgaacaacaggtcttcacacaacgagctagaaaagcacagaaaggtgttccgtgatttctaaagcggtctgttcacggacctcccctgcaccccaccccagagaccgcatcccaggcactcagaggctgagccacatcctccactgctccccgcgggcactaacattgccgatgagacttggataaggaggggaccttgttctccatttcctcacttgatctttcacccgacaccacgtacgagccaaactcaggctgtaccttgagcagctcaagcaactggtgcccctgggccccgacagcacccgccacaccacgctgagcctcctgaagcgggccaaggtgcacatcaagaaactggaggagcaggaccgccgggcactgagcatcaaggagcagctgcagcaggagcatcgtttcctgaagcggcgcctggagcagctgtcggtgcagagcgtggagcgcgtgcgcacagatagcacgggctctgctgtctccacggacgactcagagcaagaagtggacatagagggcatggagtttggccctggtgagctggacagtgttggcagcagcagtgacgcggacgaccactacagcctgcagagtggcaccggcggcgacagtggcttcgggccccactgccggcggctgggccgccccgccctctcgtaggcccgtgccctctgctccttggcctgcctgcccgccagccacgcgtgtcagccctccagttctccttcagttgacgccagcctctccacaggcccactgctgtgccattctggaagctccagctgctgctgggctgcctggcactgcccgcttgccggtcagggcctgccgagctgcctgccccttccagctgggcagagtcccctgcaaggaggcagggcccagcttccacatccggagccctggtcagcatagccgcccacggtctgttctcagattcctaatcattccagaagtattaaacgtcattgctgcaaacctcggcaggtgccgtgtgaggggcttaatgaccaccacagggagctcagaccccaaccctggatcccaggagaaaggagtggaccgaggaaggaaggaaggcaaggctgtctgtccatccgtccgtctgtccacctacctgtcagtccacataggctcctggcgtggacaaggggtctgtgaagggcgggaactgggtgagcacctggggcaggtgggtggttaaggtccttcccacttcgcaggtgtcagaacctagggctgggctctcggggccaggcaggccagcccagcccacgccgagctgggcagcgtctgctctggtaggactgtcagacgcacacgcgcacgcacctagacacacccactcatgtacatgctcacacatgcagacacacctgggcgtcccgaggtcacatgttctggggatgatggccttcaggggtcatctggcaaacagcccctgggctgtgcctggatccccctctagctcctgctcacccacgcccacccagtagtcctgcctgtctgcacaggagaggggcttctcttcctggctggggctggggtgaactggaggctggttaagttgcagccgctgggtcctcgggggcttactcatctcccttttttaaacaaaaagcaaaaaagtaaaatgctgcactgcccagcagcccggttagggctcctggagccaccttaggaaagggcttctcatgagctctgctgcggcagcttcagctggcagagaggctttcccagaaaaaaaaaaaaaaccatttttaaaaagaagaaagcctaaagactctcggcctagggacgtccgtgtgtgccgcctctgtttcctgtaccagatttttgtattctattttcctagctgttgttgcgtccttgtttgctgaggggtgggagccacccagcgtctcagggacctgtccctccgtcacgtcgtcaaagtgtgccttgtgtcttgtgtcaggccttgcccttcccaccagcatgtccctcgtggctcagggtgccccaggcctgcccagctagtgctgtcctcccatctcctgtgggcagcccctcccggcagccagggcttcctggaggcgatgcagccaggcccctgtgggtggcacggaggggctgtgacctggtccccagtgttgccctccccagtggctggcaggggcctgcttgctcactagagagatggattctcacctgtcacctgactcgagccccctgcttcctggcctaggcgagggttccaggtttcagacactggcagccaatgaagactgtgctcgctgggtggtgcaggcctggcaccaggaggcttgcacccgcctttccttcctgacgtcctctgtccttggggctggcccatagcagtgcctgccgtgcctctggtacatctgtagccaattcccatatcatggggaaaattcgtgtctattttcagtcgtacgcatagacgccccaggatggggggcccactgtggcggaagggggtccctggaaacaactctggcacagaacctgccctgcaggctgtagggggcatggtgcctggagctgaggggcatccgaacgcgttgcgggtggttgtgaggaggcctgtctgcatctccttccggccccactggggtccaggggtgcccagaaaggagcttcccctgcctgcctgagtctgtccccccaggcttcatttcaaacaccgtggcacctccgagcaaggcgggccgtgtgtaaaagcttgcttccccagccagcactgcagggccctgaggtggtcgtgtccctgccctcaattcttgaagcaccagctccctgccccaccctccagtgcctgaggcagctaggggcttctgctctcatctctgaccagcagaatccacccggtgaccagtggtggcccctcagcccaccctcccggcagctcagcctgtggctcttgaggccgtggttcccacgtggactgggaggcagtctcagccacccggggtgctgttcagctgcccctccctgccatcagcaggtgggtgaggggttgcccactgggtgggggcccgtgctaggagtcaccacatgctccaacctcccactgctccctgtcaggggcccaggctgccatcactggaggctgcagggaccaagaggccatcaccgtgtctatagagagcagacagaagcagaacagagcccggggctcctgagcctctgcgtgtgccctcccagcccacaccagtgctctcggccactgagcacccagactcaggcttgggttccccagccttattggaaggcagctcccgcataccaggataacccccgcaaaccacatagcagacccccgccatcctcgcagagtgggagaggctgcagcaaggctttgcctctgcagaccccatcttagtggcacggtgcttgggcctgtgtccccgggtggtggaaccctgtaccggtctgtggccctagggtccctgctctgtctgccccggcccgtgctgtccgctgggtgaggcaggctcccccgtgccctgcctccctctgtcagggaacctgggaccccctccccactgcctgcacagaggaccctgaccctcggccagcagggtggccccaggtccatgttgggcactagggcaggttccgtgccagagtcgggggccacacgagggcctggtgccggtgaggggggcgtgcgctagagggggaaaggggcccccggccacctgtccaccgtgtgggccgtgctgtgtccttatgtcattgtaatataaatacagatttttatatctca

SEQ ID NO: 442986 - DNA, 6452 bp, Homo sapiens
gtcgataccagcccagcgtgctagtcctgcaggcgggttctgcctcctgaatccacacagggttccttcaggaagtggaggttttaaaagccctttggatgcccagggacagccgtggggtgctggcagggggcccagggcactgcagcggcttcaggaggggagggctcagcaggagcccagtgcagccccgggctgaggggcttcatggctcagaggggtgggtggggatcttcctggggtcccgcaaccagccactgtagagttggctccaggccactgctgctctccagggcaggaatttctgaggcctccagccctggcgcccacactcttgggccaggtggacctgttactgggttttggacagtgcgtgtgtgtggtcagatggcttctgtttgtctctcgagaaaggtgttccgtgatttctaaagcggtctgttcacggacctcccctgcaccccaccccagagaccgcatcccaggcactcagaggctgagccacatcctccactgctccccgcgggcactaacattgccgatgagacttggataaggaggggaccttgttctccatttcctcacttgatctttcacccgacaccacgtacgtaagtcctgtccgcctgcgtcagggcacactcctccaccttctcatccctgatgactgcacaggacacttggctgtgccaccagcgttctttgtgatgaccctctggtttacacagggacttccggacagtcctgcgatgtgccttggtgagcgcagacctttgtggatctggggggatagttttgtaggaccaaggccctagaagtagagatgctggttggcggtcagtgataactgtatcgatggcccttcagacctgtgtccccttttgctctcccaccagcaaaccatcaacgacccctcgaagtggctggcgcaggagccatcccttctcatgtcagcctgtcggagggtgcaagttgtacctccttgtttgtgtgtgcatttcctggctcgggtgagatggagccgggcgttaggttaggttggccctcgtgtcctgcagcctgtttgtgtccttcgcccgttgtgacatcgaggcattctgcttttaatttttgatgtgtatgagctcaaaataccacaaatactaaccatttgtcttttatatgtattgcaaagatttttctacttgttctttgtctctcagctgtgtttttctttcttgtgcaaacgtgtctttctctgattgtcacagcaatgtctgtgtgtgtttttttttaagcgtagaaaacctggaaaatacagaaaagcacaaagctaaagaaataaaattgccgggtgcttcgcctggagacgcacgctccctgtgccttgtttgattctgtcgtctcttgtgtgcgtctgctcttttattttttaaacaaaattgggtcacttgtcacctatgtggttccgtattctaatttttcacttaacattcatgatgtgcatatgtaacacactaaaatgataatgaggttgttttggggtggtggaattcgggggtacttttaatttttttttattttttttcctttttgttgatttgcatttttaaattgttctacagaggtcatatagtgctgatgtaattacatggtgggatggaaagccatttgctagagtggaccagggaaggagacccctggcaacgtccccacttgcaaacctcgtcccagtggtggctgcagtacagtggcgacgcgccttgggaaaggacccctccctgagcagagagagcacgctttggcctcttgcctacacagttcctggggtggggggcggcagggcgctcactcctgttggcggtggggaggctgagcttccaggcactggggtagtcacagagcggcagcctgggacccctttccctgcacctgtgcatgggagacagcgtgggagacgttgaggatcttggccctgttcaggccacctccaggcagacctcccgactggtggggctgttaccgctgcacccagcagccccctccttcttcaggctcctcctctgtccagaggaaatggctgtccctgccgacgttactcccagggggacaagatttgctgggcttgggaacggcaggagcagacatgccaaggctggggtgctcagtgttggcaccacgtggggaaagtcacgtgtgtaggcatcagctgtggcagggcagttgggcggcaggttttcaaaagacaaaaaatattcctgccccttcacctggtcattccactcgtaaggatttacccaaatcaaagtgtcctatatttggaagcagcctctgcggcctgcacgggatgggtgagtccgtggttgaacatggcagtgacaaaacctccgggtgccctgcactgccaggcaggtgcacgtgggcctggccagggtcccaggccgagttgatgcctctgggtgagctgggctccccgcaccccgtgagctccaccagcctcccccgcagacaagcaggccagcagggaaggcggtgtttccacaggggcaggcctaggatgaagccagggcccctctcctgaggtgcccgatgaatgtgtcctggaggattgtggcatgtgagcaagtacccttgagtgtgaacaagcaagcaagcaccactggatgtcatggctccagttttgtggaaagtggattcatctgtggatacggggacagaatctggaatgaggcagtttccaaagggatatgaaacttgggttggaagggcctggtccctggccctcccttgacctaggctgatcatgtttccatggtcacaaaagtgacagagagcacgttgtgcacgatgaggtagagagacgtgaatcttgtctgggtccttccagatctcggtgcagcctgaaaggcaccctcgcctcaccccacccctccctgcatgtggactccagggtggggatgggggatgggggatggcaggggggcgagctggggctcctaggaaatgcctggcggtgacgcgctgaggctttgcaggccatggtgagctgggcgcttctgccaggtgtctgggggctgtgggtgttgggctcctcctgggggtgggggacgggggttcccaaccaggccaggaggggatccttagagagggaccctcagcacatgtgcagcagtggatggtgggggtgggtctgtgcagggccctggaaactgcctgctgccctcccccaccccagcctgatggttctgtctctggctctttcagacgagccaaactcaggctgtaccttgagcagctcaagcaactggtgcccctgggccccgacagcacccgccacaccacgctgagcctcctgaagcgggccaaggtgcacatcaagaaactggaggagcaggaccgccgggcactgagcatcaaggagcagctgcagcaggagcatcgtttcctgaagcggcgcctggagcagctgtcggtgcagagcgtggagcgcgtgcgcacagatagcacgggctctgctgtctccacggacgactcagagcaagaagtggacatagagggcatggagtttggccctggtgagctggacagtgttggcagcagcagtgacgcggacgaccactacagcctgcagagtggcaccggcggcgacagtggcttcgggccccactgccggcggctgggccgccccgccctctcgtaggcccgtgccctctgctccttggcctgcctgcccgccagccacgcgtgtcagccctccagttctccttcagttgacgccagcctctccacaggcccactgctgtgccattctggaagctccagctgctgctgggctgcctggcactgcccgcttgccggtcagggcctgccgagctgcctgccccttccagctgggcagagtcccctgcaaggaggcagggcccagcttccacatccggagccctggtcagcatagccgcccacggtctgttctcagattcctaatcattccagaagtattaaacgtcattgctgcaaacctcggcaggtgccgtgtgaggggcttaatgaccaccacagggagctcagaccccaaccctggatcccaggagaaaggagtggaccgaggaaggaaggaaggcaaggctgtctgtccatccgtccgtctgtccacctacctgtcagtccacataggctcctggcgtggacaaggggtctgtgaagggcgggaactgggtgagcacctggggcaggtgggtggttaaggtccttcccacttcgcaggtgtcagaacctagggctgggctctcggggccaggcaggccagcccagcccacgccgagctgggcagcgtctgctctggtaggactgtcagacgcacacgcgcacgcacctagacacacccactcatgtacatgctcacacatgcagacacacctgggcgtcccgaggtcacatgttctggggatgatggccttcaggggtcatctggcaaacagcccctgggctgtgcctggatccccctctagctcctgctcacccacgcccacccagtagtcctgcctgtctgcacaggagaggggcttctcttcctggctggggctggggtgaactggaggctggttaagttgcagccgctgggtcctcgggggcttactcatctcccttttttaaacaaaaagcaaaaaagtaaaatgctgcactgcccagcagcccggttagggctcctggagccaccttaggaaagggcttctcatgagctctgctgcggcagcttcagctggcagagaggctttcccagaaaaaaaaaaaaaaccatttttaaaaagaagaaagcctaaagactctcggcctagggacgtccgtgtgtgccgcctctgtttcctgtaccagatttttgtattctattttcctagctgttgttgcgtccttgtttgctgaggggtgggagccacccagcgtctcagggacctgtccctccgtcacgtcgtcaaagtgtgccttgtgtcttgtgtcaggccttgcccttcccaccagcatgtccctcgtggctcagggtgccccaggcctgcccagctagtgctgtcctcccatctcctgtgggcagcccctcccggcagccagggcttcctggaggcgatgcagccaggcccctgtgggtggcacggaggggctgtgacctggtccccagtgttgccctccccagtggctggcaggggcctgcttgctcactagagagatggattctcacctgtcacctgactcgagccccctgcttcctggcctaggcgagggttccaggtttcagacactggcagccaatgaagactgtgctcgctgggtggtgcaggcctggcaccaggaggcttgcacccgcctttccttcctgacgtcctctgtccttggggctggcccatagcagtgcctgccgtgcctctggtacatctgtagccaattcccatatcatggggaaaattcgtgtctattttcagtcgtacgcatagacgccccaggatggggggcccactgtggcggaagggggtccctggaaacaactctggcacagaacctgccctgcaggctgtagggggcatggtgcctggagctgaggggcatccgaacgcgttgcgggtggttgtgaggaggcctgtctgcatctccttccggccccactggggtccaggggtgcccagaaaggagcttcccctgcctgcctgagtctgtccccccaggcttcatttcaaacaccgtggcacctccgagcaaggcgggccgtgtgtaaaagcttgcttccccagccagcactgcagggccctgaggtggtcgtgtccctgccctcaattcttgaagcaccagctccctgccccaccctccagtgcctgaggcagctaggggcttctgctctcatctctgaccagcagaatccacccggtgaccagtggtggcccctcagcccaccctcccggcagctcagcctgtggctcttgaggccgtggttcccacgtggactgggaggcagtctcagccacccggggtgctgttcagctgcccctccctgccatcagcaggtgggtgaggggttgcccactgggtgggggcccgtgctaggagtcaccacatgctccaacctcccactgctccctgtcaggggcccaggctgccatcactggaggctgcagggaccaagaggccatcaccgtgtctatagagagcagacagaagcagaacagagcccggggctcctgagcctctgcgtgtgccctcccagcccacaccagtgctctcggccactgagcacccagactcaggcttgggttccccagccttattggaagggcaggttccgtgccagagtcgggggccacacgagggcctggtgccggtgaggggggcgtgcgctagagggggaaaggggcccccggccacctgtccaccgtgtgggccgtgctgtgtccttatgtcattgtaatataaatacagatttttatatctca

SEQ ID NO: 442987 - DNA, 6393 bp, Homo sapiens
gtcgataccagcccagcgtgctagtcctgcaggcgggttctgcctcctgaatccacacagggttccttcaggaagtggaggttttaaaagccctttggatgcccagggacagccgtggggtgctggcagggggcccagggcactgcagcggcttcaggaggggagggctcagcaggagcccagtgcagccccgggctgaggggcttcatggctcagaggggtgggtggggatcttcctggggtcccgcaaccagccactgtagagttggctccaggccactgctgctctccagggcaggaatttctgaggcctccagccctggcgcccacactcttgggccaggtggacctgttactgggttttggacagtgcgtgtgtgtggtcagatggcttctgtttgtctctcgagaaaggtgttccgtgatttctaaagcggtctgttcacggacctcccctgcaccccaccccagagaccgcatcccaggcactcagaggctgagccacatcctccactgctccccgcgggcactaacattgccgatgagacttggataaggaggggaccttgttctccatttcctcacttgatctttcacccgacaccacgtacgtaagtcctgtccgcctgcgtcagggcacactcctccaccttctcatccctgatgactgcacaggacacttggctgtgccaccagcgttctttgtgatgaccctctggtttacacagggacttccggacagtcctgcgatgtgccttggtgagcgcagacctttgtggatctggggggatagttttgtaggaccaaggccctagaagtagagatgctggttggcggtcagtgataactgtatcgatggcccttcagacctgtgtccccttttgctctcccaccagcaaaccatcaacgacccctcgaagtggctggcgcaggagccatcccttctcatgtcagcctgtcggagggtgcaagttgtacctccttgtttgtgtgtgcatttcctggctcgggtgagatggagccgggcgttaggttaggttggccctcgtgtcctgcagcctgtttgtgtccttcgcccgttgtgacatcgaggcattctgcttttaatttttgatgtgtatgagctcaaaataccacaaatactaaccatttgtcttttatatgtattgcaaagatttttctacttgttctttgtctctcagctgtgtttttctttcttgtgcaaacgtgtctttctctgattgtcacagcaatgtctgtgtgtgtttttttttaagcgtagaaaacctggaaaatacagaaaagcacaaagctaaagaaataaaattgccgggtgcttcgcctggagacgcacgctccctgtgccttgtttgattctgtcgtctcttgtgtgcgtctgctcttttattttttaaacaaaattgggtcacttgtcacctatgtggttccgtattctaatttttcacttaacattcatgatgtgcatatgtaacacactaaaatgataatgaggttgttttggggtggtggaattcgggggtacttttaatttttttttattttttttcctttttgttgatttgcatttttaaattgttctacagaggtcatatagtgctgatgtaattacatggtgggatggaaagccatttgctagagtggaccagggaaggagacccctggcaacgtccccacttgcaaacctcgtcccagtggtggctgcagtacagtggcgacgcgccttgggaaaggacccctccctgagcagagagagcacgctttggcctcttgcctacacagttcctggggtggggggcggcagggcgctcactcctgttggcggtggggaggctgagcttccaggcactggggtagtcacagagcggcagcctgggacccctttccctgcacctgtgcatgggagacagcgtgggagacgttgaggatcttggccctgttcaggccacctccaggcagacctcccgactggtggggctgttaccgctgcacccagcagccccctccttcttcaggctcctcctctgtccagaggaaatggctgtccctgccgacgttactcccagggggacaagatttgctgggcttgggaacggcaggagcagacatgccaaggctggggtgctcagtgttggcaccacgtggggaaagtcacgtgtgtaggcatcagctgtggcagggcagttgggcggcaggttttcaaaagacaaaaaatattcctgccccttcacctggtcattccactcgtaaggatttacccaaatcaaagtgtcctatatttggaagcagcctctgcggcctgcacgggatgggtgagtccgtggttgaacatggcagtgacaaaacctccgggtgccctgcactgccaggcaggtgcacgtgggcctggccagggtcccaggccgagttgatgcctctgggtgagctgggctccccgcaccccgtgagctccaccagcctcccccgcagacaagcaggccagcagggaaggcggtgtttccacaggggcaggcctaggatgaagccagggcccctctcctgaggtgcccgatgaatgtgtcctggaggattgtggcatgtgagcaagtacccttgagtgtgaacaagcaagcaagcaccactggatgtcatggctccagttttgtggaaagtggattcatctgtggatacggggacagaatctggaatgaggcagtttccaaagggatatgaaacttgggttggaagggcctggtccctggccctcccttgacctaggctgatcatgtttccatggtcacaaaagtgacagagagcacgttgtgcacgatgaggtagagagacgtgaatcttgtctgggtccttccagatctcggtgcagcctgaaaggcaccctcgcctcaccccacccctccctgcatgtggactccagggtggggatgggggatgggggatggcaggggggcgagctggggctcctaggaaatgcctggcggtgacgcgctgaggctttgcaggccatggtgagctgggcgcttctgccaggtgtctgggggctgtgggtgttgggctcctcctgggggtgggggacgggggttcccaaccaggccaggaggggatccttagagagggaccctcagcacatgtgcagcagtggatggtgggggtgggtctgtgcagggccctggaaactgcctgctgccctcccccaccccagcctgatggttctgtctctggctctttcagacgagccaaactcaggctgtaccttgagcagctcaagcaactggtgcccctgggccccgacagcacccgccacaccacgctgagcctcctgaagcgggccaaggtgcacatcaagaaactggaggagcaggaccgccgggcactgagcatcaaggagcagctgcagcaggagcatcgtttcctgaagcggcgcctggagcagctgtcggtgcagagcgtggagcgcgtgcgcacagatagcacgggctctgctgtctccacggacgactcagagcaagaagtggacatagagggcatggagtttggccctggtgagctggacagtgttggcagcagcagtgacgcggacgaccactacagcctgcagagtggcaccggcggcgacagtggcttcgggccccactgccggcggctgggccgccccgccctctcgtaggcccgtgccctctgctccttggcctgcctgcccgccagccacgcgtgtcagccctccagttctccttcagttgacgccagcctctccacaggcccactgctgtgccattctggaagctccagctgctgctgggctgcctggcactgcccgcttgccggtcagggcctgccgagctgcctgccccttccagctgggcagagtcccctgcaaggaggcagggcccagcttccacatccggagccctggtcagcatagccgcccacggtctgttctcagattcctaatcattccagaagtattaaacgtcattgctgcaaacctcggcaggtgccgtgtgaggggcttaatgaccaccacagggagctcagaccccaaccctggatcccaggagaaaggagtggaccgaggaaggaaggaaggcaaggctgtctgtccatccgtccgtctgtccacctacctgtcagtccacataggctcctggcgtggacaaggggtctgtgaagggcgggaactgggtgagcacctggggcaggtgggtggttaaggtccttcccacttcgcaggtgtcagaacctagggctgggctctcggggccaggcaggccagcccagcccacgccgagctgggcagcgtctgctctggtaggactgtcagacgcacacgcgcacgcacctagacacacccactcatgtacatgctcacacatgcagacacacctgggcgtcccgaggtcacatgttctggggatgatggccttcaggggtcatctggcaaacagcccctgggctgtgcctggatccccctctagctcctgctcacccacgcccacccagtagtcctgcctgtctgcacaggagaggggcttctcttcctggctggggctggggtgaactggaggctggttaagttgcagccgctgggtcctcgggggcttactcatctcccttttttaaacaaaaagcaaaaaagtaaaatgctgcactgcccagcagcccggttagggctcctggagccaccttaggaaagggcttctcatgagctctgctgcggcagcttcagctggcagagaggctttcccagaaaaaaaaaaaaaaccatttttaaaaagaagaaagcctaaagactctcggcctagggacgtccgtgtgtgccgcctctgtttcctgtaccagatttttgtattctattttcctagctgttgttgcgtccttgtttgctgaggggtgggagccacccagcgtctcagggacctgtccctccgtcacgtcgtcaaagtgtgccttgtgtcttgtgtcaggccttgcccttcccaccagcatgtccctcgtggctcagggtgccccaggcctgcccagctagtgctgtcctcccatctcctgtgggcagcccctcccggcagccagggcttcctggaggcgatgcagccaggcccctgtgggtggcacggaggggctgtgacctggtccccagtgttgccctccccagtggctggcaggggcctgcttgctcactagagagatggattctcacctgtcacctgactcgagccccctgcttcctggcctaggcgagggttccaggtttcagacactggcagccaatgaagactgtgctcgctgggtggtgcaggcctggcaccaggaggcttgcacccgcctttccttcctgacgtcctctgtccttggggctggcccatagcagtgcctgccgtgcctctggtacatctgtagccaattcccatatcatggggaaaattcgtgtctattttcagtcgtacgcatagacgccccaggatggggggcccactgtggcggaagggggtccctggaaacaactctggcacagaacctgccctgcaggctgtagggggcatggtgcctggagctgaggggcatccgaacgcgttgcgggtggttgtgaggaggcctgtctgcatctccttccggccccactggggtccaggggtgcccagaaaggagcttcccctgcctgcctgagtctgtccccccaggcttcatttcaaacaccgtggcacctccgagcaaggcgggccgtgtgtaaaagcttgcttccccagccagcactgcagggccctgaggtggtcgtgtccctgccctcaattcttgaagcaccagctccctgccccaccctccagtgcctgaggcagctaggggcttctgctctcatctctgaccagcagaatccacccggtgaccagtggtggcccctcagcccaccctcccggcagctcagcctgtggctcttgaggccgtggttcccacgtggactgggaggcagtctcagccacccggggtgctgttcagctgcccctccctgccatcagcaggtgggtgaggggttgcccactgggtgggggcccgtgctaggagtcaccacctctgtctgccccggcccgtgctgtccgctgggtgaggcaggctcccccgtgccctgcctccctctgtcagggaacctgggaccccctccccactgcctgcacagaggaccctgaccctcggccagcagggtggccccaggtccatgttgggcactagggcaggttccgtgccagagtcgggggccacacgagggcctggtgccggtgaggggggcgtgcgctagagggggaaaggggcccccggccacctgtccaccgtgtgggccgtgctgtgtccttatgtcattgtaatataaatacagatttttatatctca

SEQ ID NO: 442988 - DNA, 6183 bp, Homo sapiens
gtcgataccagcccagcgtgctagtcctgcaggcgggttctgcctcctgaatccacacagggttccttcaggaagtggaggttttaaaagccctttggatgcccagggacagccgtggggtgctggcagggggcccagggcactgcagcggcttcaggaggggagggctcagcaggagcccagtgcagccccgggctgaggggcttcatggctcagaggggtgggtggggatcttcctggggtcccgcaaccagccactgtagagttggctccaggccactgctgctctccagggcaggaatttctgaggcctccagccctggcgcccacactcttgggccaggtggacctgttactgggttttggacagtgcgtgtgtgtggtcagatggcttctgtttgtctctcgagaaaggtgttccgtgatttctaaagcggtctgttcacggacctcccctgcaccccaccccagagaccgcatcccaggcactcagaggctgagccacatcctccactgctccccgcgggcactaacattgccgatgagacttggataaggaggggaccttgttctccatttcctcacttgatctttcacccgacaccacgtacgtaagtcctgtccgcctgcgtcagggcacactcctccaccttctcatccctgatgactgcacaggacacttggctgtgccaccagcgttctttgtgatgaccctctggtttacacagggacttccggacagtcctgcgatgtgccttggtgagcgcagacctttgtggatctggggggatagttttgtaggaccaaggccctagaagtagagatgctggttggcggtcagtgataactgtatcgatggcccttcagacctgtgtccccttttgctctcccaccagcaaaccatcaacgacccctcgaagtggctggcgcaggagccatcccttctcatgtcagcctgtcggagggtgcaagttgtacctccttgtttgtgtgtgcatttcctggctcgggtgagatggagccgggcgttaggttaggttggccctcgtgtcctgcagcctgtttgtgtccttcgcccgttgtgacatcgaggcattctgcttttaatttttgatgtgtatgagctcaaaataccacaaatactaaccatttgtcttttatatgtattgcaaagatttttctacttgttctttgtctctcagctgtgtttttctttcttgtgcaaacgtgtctttctctgattgtcacagcaatgtctgtgtgtgtttttttttaagcgtagaaaacctggaaaatacagaaaagcacaaagctaaagaaataaaattgccgggtgcttcgcctggagacgcacgctccctgtgccttgtttgattctgtcgtctcttgtgtgcgtctgctcttttattttttaaacaaaattgggtcacttgtcacctatgtggttccgtattctaatttttcacttaacattcatgatgtgcatatgtaacacactaaaatgataatgaggttgttttggggtggtggaattcgggggtacttttaatttttttttattttttttcctttttgttgatttgcatttttaaattgttctacagaggtcatatagtgctgatgtaattacatggtgggatggaaagccatttgctagagtggaccagggaaggagacccctggcaacgtccccacttgcaaacctcgtcccagtggtggctgcagtacagtggcgacgcgccttgggaaaggacccctccctgagcagagagagcacgctttggcctcttgcctacacagttcctggggtggggggcggcagggcgctcactcctgttggcggtggggaggctgagcttccaggcactggggtagtcacagagcggcagcctgggacccctttccctgcacctgtgcatgggagacagcgtgggagacgttgaggatcttggccctgttcaggccacctccaggcagacctcccgactggtggggctgttaccgctgcacccagcagccccctccttcttcaggctcctcctctgtccagaggaaatggctgtccctgccgacgttactcccagggggacaagatttgctgggcttgggaacggcaggagcagacatgccaaggctggggtgctcagtgttggcaccacgtggggaaagtcacgtgtgtaggcatcagctgtggcagggcagttgggcggcaggttttcaaaagacaaaaaatattcctgccccttcacctggtcattccactcgtaaggatttacccaaatcaaagtgtcctatatttggaagcagcctctgcggcctgcacgggatgggtgagtccgtggttgaacatggcagtgacaaaacctccgggtgccctgcactgccaggcaggtgcacgtgggcctggccagggtcccaggccgagttgatgcctctgggtgagctgggctccccgcaccccgtgagctccaccagcctcccccgcagacaagcaggccagcagggaaggcggtgtttccacaggggcaggcctaggatgaagccagggcccctctcctgaggtgcccgatgaatgtgtcctggaggattgtggcatgtgagcaagtacccttgagtgtgaacaagcaagcaagcaccactggatgtcatggctccagttttgtggaaagtggattcatctgtggatacggggacagaatctggaatgaggcagtttccaaagggatatgaaacttgggttggaagggcctggtccctggccctcccttgacctaggctgatcatgtttccatggtcacaaaagtgacagagagcacgttgtgcacgatgaggtagagagacgtgaatcttgtctgggtccttccagatctcggtgcagcctgaaaggcaccctcgcctcaccccacccctccctgcatgtggactccagggtggggatgggggatgggggatggcaggggggcgagctggggctcctaggaaatgcctggcggtgacgcgctgaggctttgcaggccatggtgagctgggcgcttctgccaggtgtctgggggctgtgggtgttgggctcctcctgggggtgggggacgggggttcccaaccaggccaggaggggatccttagagagggaccctcagcacatgtgcagcagtggatggtgggggtgggtctgtgcagggccctggaaactgcctgctgccctcccccaccccagcctgatggttctgtctctggctctttcagacgagccaaactcaggctgtaccttgagcagctcaagcaactggtgcccctgggccccgacagcacccgccacaccacgctgagcctcctgaagcgggccaaggtgcacatcaagaaactggaggagcaggaccgccgggcactgagcatcaaggagcagctgcagcaggagcatcgtttcctgaagcggcgcctggagcagctgtcggtgcagagcgtggagcgcgtgcgcacagatagcacgggctctgctgtctccacggacgactcagagcaagaagtggacatagagggcatggagtttggccctggtgagctggacagtgttggcagcagcagtgacgcggacgaccactacagcctgcagagtggcaccggcggcgacagtggcttcgggccccactgccggcggctgggccgccccgccctctcgtaggcccgtgccctctgctccttggcctgcctgcccgccagccacgcgtgtcagccctccagttctccttcagttgacgccagcctctccacaggcccactgctgtgccattctggaagctccagctgctgctgggctgcctggcactgcccgcttgccggtcagggcctgccgagctgcctgccccttccagctgggcagagtcccctgcaaggaggcagggcccagcttccacatccggagccctggtcagcatagccgcccacggtctgttctcagattcctaatcattccagaagtattaaacgtcattgctgcaaacctcggcaggtgccgtgtgaggggcttaatgaccaccacagggagctcagaccccaaccctggatcccaggagaaaggagtggaccgaggaaggaaggaaggcaaggctgtctgtccatccgtccgtctgtccacctacctgtcagtccacataggctcctggcgtggacaaggggtctgtgaagggcgggaactgggtgagcacctggggcaggtgggtggttaaggtccttcccacttcgcaggtgtcagaacctagggctgggctctcggggccaggcaggccagcccagcccacgccgagctgggcagcgtctgctctggtaggactgtcagacgcacacgcgcacgcacctagacacacccactcatgtacatgctcacacatgcagacacacctgggcgtcccgaggtcacatgttctggggatgatggccttcaggggtcatctggcaaacagcccctgggctgtgcctggatccccctctagctcctgctcacccacgcccacccagtagtcctgcctgtctgcacaggagaggggcttctcttcctggctggggctggggtgaactggaggctggttaagttgcagccgctgggtcctcgggggcttactcatctcccttttttaaacaaaaagcaaaaaagtaaaatgctgcactgcccagcagcccggttagggctcctggagccaccttaggaaagggcttctcatgagctctgctgcggcagcttcagctggcagagaggctttcccagaaaaaaaaaaaaaaccatttttaaaaagaagaaagcctaaagactctcggcctagggacgtccgtgtgtgccgcctctgtttcctgtaccagatttttgtattctattttcctagctgttgttgcgtccttgtttgctgaggggtgggagccacccagcgtctcagggacctgtccctccgtcacgtcgtcaaagtgtgccttgtgtcttgtgtcaggccttgcccttcccaccagcatgtccctcgtggctcagggtgccccaggcctgcccagctagtgctgtcctcccatctcctgtgggcagcccctcccggcagccagggcttcctggaggcgatgcagccaggcccctgtgggtggcacggaggggctgtgacctggtccccagtgttgccctccccagtggctggcaggggcctgcttgctcactagagagatggattctcacctgtcacctgactcgagccccctgcttcctggcctaggcgagggttccaggtttcagacactggcagccaatgaagactgtgctcgctgggtggtgcaggcctggcaccaggaggcttgcacccgcctttccttcctgacgtcctctgtccttggggctggcccatagcagtgcctgccgtgcctctggtacatctgtagccaattcccatatcatggggaaaattcgtgtctattttcagtcgtacgcatagacgccccaggatggggggcccactgtggcggaagggggtccctggaaacaactctggcacagaacctgccctgcaggctgtagggggcatggtgcctggagctgaggggcatccgaacgcgttgcgggtggttgtgaggaggcctgtctgcatctccttccggccccactggggtccaggggtgcccagaaaggagcttcccctgcctgcctgagtctgtccccccaggcttcatttcaaacaccgtggcacctccgagcaaggcgggccgtgtgtaaaagcttgcttccccagccagcactgcagggccctgaggtggtcgtgtccctgccctcaattcttgaagcaccagctccctgccccaccctccagtgcctgaggcagctaggggcttctgctctcatctctgaccagcagaatccacccggtgaccagtggtggcccctcagcccaccctcccggcagctcagcctgtggctcttgaggccgtggttcccacgtggactgggaggcagtctcagccacccggggtgctgttcagctgcccctccctgccatcagcaggtgggtgaggggttgcccactgggtgggggcccgtgctaggagtcaccacgggggcgtgcgctagagggggaaaggggcccccggccacctgtccaccgtgtgggccgtgctgtgtccttatgtcattgtaatataaatacagatttttatatctca

SEQ ID NO: 442989 - DNA, 3107 bp, Homo sapiens
tatcccagcccagctctgcatctgtcaacattctcggcccggcccgaggcgctcgacccgtccccattggccccagcccggcccggcgcccgcccccggggcgcgaacgccgcctcccattggctctgcgggccgccgctctcccttatgtgtcaatttgagggcctgaggcggagggtggcggccgagcgccggagtccgcggagtctggaagtgcggcggccgggcgcgcggggtgggcggcgagcggagccggccggagcgggccgggcagcggccgccgccgtcccggggcggacgggcgcgggcgggaggatggagctgaactccctgctgatcctgctggaggcggccgagtacctggagcgcagggatcgagaggccgagcacggctacgcctcggtgctgcccttcgacggcgacttcgccagggagaaaacaaaggcggccggcctggtgcgcaaggccccgaacaacaggtcttcacacaacgagctagaaaagcacagagaccgcatcccaggcactcagaggctgagccacatcctccactgctccccgcgggcactaacattgccgatgagacttggataaggaggggaccttgttctccatttcctcacttgatctttcacccgacaccacgtacgtaagtcctgtccgcctgcgtcagggcacactcctccaccttctcatccctgatgaacacacctgggcgtcccgaggtcacatgttctggggatgatggccttcaggggtcatctggcaaacagcccctgggctgtgcctggatccccctctagctcctgctcacccacgcccacccagtagtcctgcctgtctgcacaggagaggggcttctcttcctggctggggctggggtgaactggaggctggttaagttgcagccgctgggtcctcgggggcttactcatctcccttttttaaacaaaaagcaaaaaagtaaaatgctgcactgcccagcagcccggttagggctcctggagccaccttaggaaagggcttctcatgagctctgctgcggcagcttcagctggcagagaggctttcccagaaaaaaaaaaaaaaccatttttaaaaagaagaaagcctaaagactctcggcctagggacgtccgtgtgtgccgcctctgtttcctgtaccagatttttgtattctattttcctagctgttgttgcgtccttgtttgctgaggggtgggagccacccagcgtctcagggacctgtccctccgtcacgtcgtcaaagtgtgccttgtgtcttgtgtcaggccttgcccttcccaccagcatgtccctcgtggctcagggtgccccaggcctgcccagctagtgctgtcctcccatctcctgtgggcagcccctcccggcagccagggcttcctggaggcgatgcagccaggcccctgtgggtggcacggaggggctgtgacctggtccccagtgttgccctccccagtggctggcaggggcctgcttgctcactagagagatggattctcacctgtcacctgactcgagccccctgcttcctggcctaggcgagggttccaggtttcagacactggcagccaatgaagactgtgctcgctgggtggtgcaggcctggcaccaggaggcttgcacccgcctttccttcctgacgtcctctgtccttggggctggcccatagcagtgcctgccgtgcctctggtacatctgtagccaattcccatatcatggggaaaattcgtgtctattttcagtcgtacgcatagacgccccaggatggggggcccactgtggcggaagggggtccctggaaacaactctggcacagaacctgccctgcaggctgtagggggcatggtgcctggagctgaggggcatccgaacgcgttgcgggtggttgtgaggaggcctgtctgcatctccttccggccccactggggtccaggggtgcccagaaaggagcttcccctgcctgcctgagtctgtccccccaggcttcatttcaaacaccgtggcacctccgagcaaggcgggccgtgtgtaaaagcttgcttccccagccagcactgcagggccctgaggtggtcgtgtccctgccctcaattcttgaagcaccagctccctgccccaccctccagtgcctgaggcagctaggggcttctgctctcatctctgaccagcagaatccacccggtgaccagtggtggcccctcagcccaccctcccggcagctcagcctgtggctcttgaggccgtggttcccacgtggactgggaggcagtctcagccacccggggtgctgttcagctgcccctccctgccatcagcaggtgggtgaggggttgcccactgggtgggggcccgtgctaggagtcaccacatgctccaacctcccactgctccctgtcaggggcccaggctgccatcactggaggctgcagggaccaagaggccatcaccgtgtctatagagagcagacagaagcagaacagagcccggggctcctgagcctctgcgtgtgccctcccagcccacaccagtgctctcggccactgagcacccagactcaggcttgggttccccagccttattggaaggcagctcccgcataccaggataacccccgcaaaccacatagcagacccccgccatcctcgcagagtgggagaggctgcagcaaggctttgcctctgcagaccccatcttagtggcacggtgcttgggcctgtgtccccgggtggtggaaccctgtaccggtctgtggccctagggtccctgctctgtctgccccggcccgtgctgtccgctgggtgaggcaggctcccccgtgccctgcctccctctgtcagggaacctgggaccccctccccactgcctgcacagaggaccctgaccctcggccagcagggtggccccaggtccatgttgggcactagggcaggttccgtgccagagtcgggggccacacgagggcctggtgccggtgaggggggcgtgcgctagagggggaaaggggcccccggccacctgtccaccgtgtgggccgtgctgtgtccttatgtcattgtaatataaatacagatttttatatctca

SEQ ID NO: 442990 - DNA, 4002 bp, Homo sapiens
gtcgataccagcccagcgtgctagtcctgcaggcgggttctgcctcctgaatccacacagggttccttcaggaagtggaggttttaaaagccctttggatgcccagggacagccgtggggtgctggcagggggcccagggcactgcagcggcttcaggaggggagggctcagcaggagcccagtgcagccccgggctgaggggcttcatggctcagaggggtgggtggggatcttcctggggtcccgcaaccagccactgtagagttggctccaggccactgctgctctccagggcaggaatttctgaggcctccagccctggcgcccacactcttgggccaggtggacctgttactgggttttggacagtgcgtgtgtgtggtcagatggcttctgtttgtctctcgagaaaggtgttccgtgatttctaaagcggtctgttcacggacctcccctgcaccccaccccagagaccgcatcccaggcactcagaggctgagccacatcctccactgctccccgcgggcactaacattgccgatgagacttggataaggaggggaccttgttctccatttcctcacttgatctttcacccgacaccacgtacgtaagtcctgtccgcctgcgtcagggcacactcctccaccttctcatccctgatgactgcacaggacacttggctgtgccaccagcgttctttgtgatgaccctctggtttacacagggacttccggacagtcctgcgatgtgccttggtgagcgcagacctttgtggatctggggggatagttttgtaggaccaaggccctagaagtagagatgctggttggcggtcagtgataactgtatcgatggcccttcagacctgtgtccccttttgctctcccaccagcaaaccatcaacgacccctcgaagtggctggcgcaggagccatcccttctcatgtcagcctgtcggagggtgcaagttgtacctccttgtttgtgtgtgcatttcctggctcgggtgagatggagccgggcgttaggttaggttggccctcgtgtcctgcagcctgtttgtgtccttcgcccgttgtgacatcgaggcattctgcttttaatttttgatgtgtatgagctcaaaataccacaaatactaaccatttgtcttttatatgtattgcaaagatttttctacttgttctttgtctctcagctgtgtttttctttcttgtgcaaacgtgtctttctctgattgtcacagcaatgtctgtgtgtgtttttttttaagcgtagaaaacctggaaaatacagaaaagcacaaagctaaagaaataaaattgccgggtgcttcgcctggagacgcacgctccctgtgccttgtttgattctgtcgtctcttgtgtgcgtctgctcttttattttttaaacaaaattgggtcacttgtcacctatgtggttccgtattctaatttttcacttaacattcatgatgtgcatatgtaacacactaaaatgataatgaggttgttttggggtggtggaattcgggggtacttttaatttttttttattttttttcctttttgttgatttgcatttttaaattgttctacagaggtcatatagtgctgatgtaattacatggtgggatggaaagccatttgctagagtggaccagggaaggagacccctggcaacgtccccacttgcaaacctcgtcccagtggtggctgcagtacagtggcgacgcgccttgggaaaggacccctccctgagcagagagagcacgctttggcctcttgcctacacagttcctggggtggggggcggcagggcgctcactcctgttggcggtggggaggctgagcttccaggcactggggtagtcacagagcggcagcctgggacccctttccctgcacctgtgcatgggagacagcgtgggagacgttgaggatcttggccctgttcaggccacctccaggcagacctcccgactggtggggctgttaccgctgcacccagcagccccctccttcttcaggctcctcctctgtccagaggaaatggctgtccctgccgacgttactcccagggggacaagatttgctgggcttgggaacggcaggagcagacatgccaaggctggggtgctcagtgttggcaccacgtggggaaagtcacgtgtgtaggcatcagctgtggcagggcagttgggcggcaggttttcaaaagacaaaaaatattcctgccccttcacctggtcattccactcgtaaggatttacccaaatcaaagtgtcctatatttggaagcagcctctgcggcctgcacgggatgggtgagtccgtggttgaacatggcagtgacaaaacctccgggtgccctgcactgccaggcaggtgcacgtgggcctggccagggtcccaggccgagttgatgcctctgggtgagctgggctccccgcaccccgtgagctccaccagcctcccccgcagacaagcaggccagcagggaaggcggtgtttccacaggggcaggcctaggatgaagccagggcccctctcctgaggtgcccgatgaatgtgtcctggaggattgtggcatgtgagcaagtacccttgagtgtgaacaagcaagcaagcaccactggatgtcatggctccagttttgtggaaagtggattcatctgtggatacggggacagaatctggaatgaggcagtttccaaagggatatgaaacttgggttggaagggcctggtccctggccctcccttgacctaggctgatcatgtttccatggtcacaaaagtgacagagagcacgttgtgcacgatgaggtagagagacgtgaatcttgtctgggtccttccagatctcggtgcagcctgaaaggcaccctcgcctcaccccacccctccctgcatgtggactccagggtggggatgggggatgggggatggcaggggggcgagctggggctcctaggaaatgcctggcggtgacgcgctgaggctttgcaggccatggtgagctgggcgcttctgccaggtgtctgggggctgtgggtgttgggctcctcctgggggtgggggacgggggttcccaaccaggccaggaggggatccttagagagggaccctcagcacatgtgcagcagtggatggtgggggtgggtctgtgcagggccctggaaactgcctgctgccctcccccaccccagcctgatggttctgtctctggctctttcagacgagccaaactcaggctgtaccttgagcagctcaagcaactggtgcccctgggccccgacagcacccgccacaccacgctgagcctcctgaagcgggccaaggtgcacatcaagaaactggaggagcaggaccgccgggcactgagcatcaaggagcagctgcagcaggagcatcgtttcctgaagcggcgcctggagcagctgtcggtgcagagcgtggagcgcgtgcgcacagatagcacgggctctgctgtctccacggacgactcagagcaagaagtggacatagagggcatggagtttggccctggtgagctggacagtgttggcagcagcagtgacgcggacgaccactacagcctgcagagtggcaccggcggcgacagtggcttcgggccccactgccggcggctgggccgccccgccctatgctgtctccacggacgactcagagcaagaagtggacatagagggcatggagtttggccctggtgagctggacagtgttggcagcagcagtgacgcggacgaccagctgtgccattctggaagctccagctgctgctgggctgcctggcactgcccgcttgccggtcagggcctgccgagctgcctgccccttccagctgggcagagtcccctgcaaggaggcagggcccagcttccacatccggagccctggtcagcatagccgcccacggtctgttctcagattcctaatcattccagaagtattaaacgtcattgctgcaaacctc

SEQ ID NO: 442991 - DNA, 3789 bp, Homo sapiens
gtcgataccagcccagcgtgctagtcctgcaggcgggttctgcctcctgaatccacacagggttccttcaggaagtggaggttttaaaagccctttggatgcccagggacagccgtggggtgctggcagggggcccagggcactgcagcggcttcaggaggggagggctcagcaggagcccagtgcagccccgggctgaggggcttcatggctcagaggggtgggtggggatcttcctggggtcccgcaaccagccactgtagagttggctccaggccactgctgctctccagggcaggaatttctgaggcctccagccctggcgcccacactcttgggccaggtggacctgttactgggttttggacagtgcgtgtgtgtggtcagatggcttctgtttgtctctcgagaaaggtgttccgtgatttctaaagcggtctgttcacggacctcccctgcaccccaccccagagaccgcatcccaggcactcagaggctgagccacatcctccactgctccccgcgggcactaacattgccgatgagacttggataaggaggggaccttgttctccatttcctcacttgatctttcacccgacaccacgtacgtaagtcctgtccgcctgcgtcagggcacactcctccaccttctcatccctgatgactgcacaggacacttggctgtgccaccagcgttctttgtgatgaccctctggtttacacagggacttccggacagtcctgcgatgtgccttggtgagcgcagacctttgtggatctggggggatagttttgtaggaccaaggccctagaagtagagatgctggttggcggtcagtgataactgtatcgatggcccttcagacctgtgtccccttttgctctcccaccagcaaaccatcaacgacccctcgaagtggctggcgcaggagccatcccttctcatgtcagcctgtcggagggtgcaagttgtacctccttgtttgtgtgtgcatttcctggctcgggtgagatggagccgggcgttaggttaggttggccctcgtgtcctgcagcctgtttgtgtccttcgcccgttgtgacatcgaggcattctgcttttaatttttgatgtgtatgagctcaaaataccacaaatactaaccatttgtcttttatatgtattgcaaagatttttctacttgttctttgtctctcagctgtgtttttctttcttgtgcaaacgtgtctttctctgattgtcacagcaatgtctgtgtgtgtttttttttaagcgtagaaaacctggaaaatacagaaaagcacaaagctaaagaaataaaattgccgggtgcttcgcctggagacgcacgctccctgtgccttgtttgattctgtcgtctcttgtgtgcgtctgctcttttattttttaaacaaaattgggtcacttgtcacctatgtggttccgtattctaatttttcacttaacattcatgatgtgcatatgtaacacactaaaatgataatgaggttgttttggggtggtggaattcgggggtacttttaatttttttttattttttttcctttttgttgatttgcatttttaaattgttctacagaggtcatatagtgctgatgtaattacatggtgggatggaaagccatttgctagagtggaccagggaaggagacccctggcaacgtccccacttgcaaacctcgtcccagtggtggctgcagtacagtggcgacgcgccttgggaaaggacccctccctgagcagagagagcacgctttggcctcttgcctacacagttcctggggtggggggcggcagggcgctcactcctgttggcggtggggaggctgagcttccaggcactggggtagtcacagagcggcagcctgggacccctttccctgcacctgtgcatgggagacagcgtgggagacgttgaggatcttggccctgttcaggccacctccaggcagacctcccgactggtggggctgttaccgctgcacccagcagccccctccttcttcaggctcctcctctgtccagaggaaatggctgtccctgccgacgttactcccagggggacaagatttgctgggcttgggaacggcaggagcagacatgccaaggctggggtgctcagtgttggcaccacgtggggaaagtcacgtgtgtaggcatcagctgtggcagggcagttgggcggcaggttttcaaaagacaaaaaatattcctgccccttcacctggtcattccactcgtaaggatttacccaaatcaaagtgtcctatatttggaagcagcctctgcggcctgcacgggatgggtgagtccgtggttgaacatggcagtgacaaaacctccgggtgccctgcactgccaggcaggtgcacgtgggcctggccagggtcccaggccgagttgatgcctctgggtgagctgggctccccgcaccccgtgagctccaccagcctcccccgcagacaagcaggccagcagggaaggcggtgtttccacaggggcaggcctaggatgaagccagggcccctctcctgaggtgcccgatgaatgtgtcctggaggattgtggcatgtgagcaagtacccttgagtgtgaacaagcaagcaagcaccactggatgtcatggctccagttttgtggaaagtggattcatctgtggatacggggacagaatctggaatgaggcagtttccaaagggatatgaaacttgggttggaagggcctggtccctggccctcccttgacctaggctgatcatgtttccatggtcacaaaagtgacagagagcacgttgtgcacgatgaggtagagagacgtgaatcttgtctgggtccttccagatctcggtgcagcctgaaaggcaccctcgcctcaccccacccctccctgcatgtggactccagggtggggatgggggatgggggatggcaggggggcgagctggggctcctaggaaatgcctggcggtgacgcgctgaggctttgcaggccatggtgagctgggcgcttctgccaggtgtctgggggctgtgggtgttgggctcctcctgggggtgggggacgggggttcccaaccaggccaggaggggatccttagagagggaccctcagcacatgtgcagcagtggatggtgggggtgggtctgtgcagggccctggaaactgcctgctgccctcccccaccccagcctgatggttctgtctctggctctttcagacgagccaaactcaggctgtaccttgagcagctcaagcaactggtgcccctgggccccgacagcacccgccacaccacgctgagcctcctgaagcgggccaaggtgcacatcaagaaactggaggagcaggaccgccgggcactgagcatcaaggagcagctgcagcaggagcatcgtttcctgaagcggcgcctggagcagctgtcggtgcagagcgtggagcgcgtgcgcacagatagcacgggctctgctgtctccacggacgactcagagcaagaagtggacatagagggcatggagtttggccctggtgagctggacgctgtgccattctggaagctccagctgctgctgggctgcctggcactgcccgcttgccggtcagggcctgccgagctgcctgccccttccagctgggcagagtcccctgcaaggaggcagggcccagcttccacatccggagccctggtcagcatagccgcccacggtctgttctcagattcctaatcattccagaagtattaaacgtcattgctgcaaacctc

SEQ ID NO: 442992 - DNA, 317 bp, Homo sapiens
tggtgcttctgaggccgggttctcagccagagccctcctggcgtctgctgccccagggcccagacagcgccctccgcacttctgcccctctgcctagagcttctgcttccagaaaagggagaaatgggctggcaccctcagagtggcctgaccccatccccactctattctccctagaagtggacatagagggcatggagtttggccctggtgagctggacagtgttggcagcagcagtgacgcggacgaccactacagcctgcagagtggcaccggcggcgacagtggcttcgggccccactgccggcggctgggc

SEQ ID NO: 442993 - DNA, 266 bp, Homo sapiens
gatccccctctagctcctgctcacccacgcccacccagtagtcctgcctgtctgcacaggagaggggcttctcttcctggctggggctggggtgaactggaggctggttaagttgcagccgctgggtcctcgggggcttactcatctcccttttttaaacaaaaagcaaaaaagtaaaatgctgcactgcccagcagcccggttagggctcctggagccaccttaggaaagggcttctcatgagctctgctgcggcagcttcagct

SEQ ID NO: 442994 - DNA, 6791 bp, Homo sapiens
gtcgataccagcccagcgtgctagtcctgcaggcgggttctgcctcctgaatccacacagggttccttcaggaagtggaggttttaaaagccctttggatgcccagggacagccgtggggtgctggcagggggcccagggcactgcagcggcttcaggaggggagggctcagcaggagcccagtgcagccccgggctgaggggcttcatggctcagaggggtgggtggggatcttcctggggtcccgcaaccagccactgtagagttggctccaggccactgctgctctccagggcaggaatttctgaggcctccagccctggcgcccacactcttgggccaggtggacctgttactgggttttggacagtgcgtgtgtgtggtcagatggcttctgtttgtctctcgagaaaggtgttccgtgatttctaaagcggtctgttcacggacctcccctgcaccccaccccagagaccgcatcccaggcactcagaggctgagccacatcctccactgctccccgcgggcactaacattgccgatgagacttggataaggaggggaccttgttctccatttcctcacttgatctttcacccgacaccacgtacgtaagtcctgtccgcctgcgtcagggcacactcctccaccttctcatccctgatgactgcacaggacacttggctgtgccaccagcgttctttgtgatgaccctctggtttacacagggacttccggacagtcctgcgatgtgccttggtgagcgcagacctttgtggatctggggggatagttttgtaggaccaaggccctagaagtagagatgctggttggcggtcagtgataactgtatcgatggcccttcagacctgtgtccccttttgctctcccaccagcaaaccatcaacgacccctcgaagtggctggcgcaggagccatcccttctcatgtcagcctgtcggagggtgcaagttgtacctccttgtttgtgtgtgcatttcctggctcgggtgagatggagccgggcgttaggttaggttggccctcgtgtcctgcagcctgtttgtgtccttcgcccgttgtgacatcgaggcattctgcttttaatttttgatgtgtatgagctcaaaataccacaaatactaaccatttgtcttttatatgtattgcaaagatttttctacttgttctttgtctctcagctgtgtttttctttcttgtgcaaacgtgtctttctctgattgtcacagcaatgtctgtgtgtgtttttttttaagcgtagaaaacctggaaaatacagaaaagcacaaagctaaagaaataaaattgccgggtgcttcgcctggagacgcacgctccctgtgccttgtttgattctgtcgtctcttgtgtgcgtctgctcttttattttttaaacaaaattgggtcacttgtcacctatgtggttccgtattctaatttttcacttaacattcatgatgtgcatatgtaacacactaaaatgataatgaggttgttttggggtggtggaattcgggggtacttttaatttttttttattttttttcctttttgttgatttgcatttttaaattgttctacagaggtcatatagtgctgatgtaattacatggtgggatggaaagccatttgctagagtggaccagggaaggagacccctggcaacgtccccacttgcaaacctcgtcccagtggtggctgcagtacagtggcgacgcgccttgggaaaggacccctccctgagcagagagagcacgctttggcctcttgcctacacagttcctggggtggggggcggcagggcgctcactcctgttggcggtggggaggctgagcttccaggcactggggtagtcacagagcggcagcctgggacccctttccctgcacctgtgcatgggagacagcgtgggagacgttgaggatcttggccctgttcaggccacctccaggcagacctcccgactggtggggctgttaccgctgcacccagcagccccctccttcttcaggctcctcctctgtccagaggaaatggctgtccctgccgacgttactcccagggggacaagatttgctgggcttgggaacggcaggagcagacatgccaaggctggggtgctcagtgttggcaccacgtggggaaagtcacgtgtgtaggcatcagctgtggcagggcagttgggcggcaggttttcaaaagacaaaaaatattcctgccccttcacctggtcattccactcgtaaggatttacccaaatcaaagtgtcctatatttggaagcagcctctgcggcctgcacgggatgggtgagtccgtggttgaacatggcagtgacaaaacctccgggtgccctgcactgccaggcaggtgcacgtgggcctggccagggtcccaggccgagttgatgcctctgggtgagctgggctccccgcaccccgtgagctccaccagcctcccccgcagacaagcaggccagcagggaaggcggtgtttccacaggggcaggcctaggatgaagccagggcccctctcctgaggtgcccgatgaatgtgtcctggaggattgtggcatgtgagcaagtacccttgagtgtgaacaagcaagcaagcaccactggatgtcatggctccagttttgtggaaagtggattcatctgtggatacggggacagaatctggaatgaggcagtttccaaagggatatgaaacttgggttggaagggcctggtccctggccctcccttgacctaggctgatcatgtttccatggtcacaaaagtgacagagagcacgttgtgcacgatgaggtagagagacgtgaatcttgtctgggtccttccagatctcggtgcagcctgaaaggcaccctcgcctcaccccacccctccctgcatgtggactccagggtggggatgggggatgggggatggcaggggggcgagctggggctcctaggaaatgcctggcggtgacgcgctgaggctttgcaggccatggtgagctgggcgcttctgccaggtgtctgggggctgtgggtgttgggctcctcctgggggtgggggacgggggttcccaaccaggccaggaggggatccttagagagggaccctcagcacatgtgcagcagtggatggtgggggtgggtctgtgcagggccctggaaactgcctgctgccctcccccaccccagcctgatggttctgtctctggctctttcagacgagccaaactcaggctgtaccttgagcagctcaagcaactggtgcccctgggccccgacagcacccgccacaccacgctgagcctcctgaagcgggccaaggtgcacatcaagaaactggaggagcaggaccgccgggcactgagcatcaaggagcagctgcagcaggagcatcgtttcctgaagcggcgcctggagcagctgtcggtgcagagcgtggagcgcgtgcgcacagatagcacgggctctgctgtctccacggacgactcagagcaagaagtggacatagagggcatggagtttggccctggtgagctggacagtgttggcagcagcagtgacgcggacgaccactacagcctgcagagtggcaccggcggcgacagtggcttcgggccccactgccggcggctgggccgccccgccctctcgtaggcccgtgccctctgctccttggcctgcctgcccgccagccacgcgtgtcagccctccagttctccttcagttgacgccagcctctccacaggcccactgctgtgccattctggaagctccagctgctgctgggctgcctggcactgcccgcttgccggtcagggcctgccgagctgcctgccccttccagctgggcagagtcccctgcaaggaggcagggcccagcttccacatccggagccctggtcagcatagccgcccacggtctgttctcagattcctaatcattccagaagtattaaacgtcattgctgcaaacctcggcaggtgccgtgtgaggggcttaatgaccaccacagggagctcagaccccaaccctggatcccaggagaaaggagtggaccgaggaaggaaggaaggcaaggctgtctgtccatccgtccgtctgtccacctacctgtcagtccacataggctcctggcgtggacaaggggtctgtgaagggcgggaactgggtgagcacctggggcaggtgggtggttaaggtccttcccacttcgcaggtgtcagaacctagggctgggctctcggggccaggcaggccagcccagcccacgccgagctgggcagcgtctgctctggtaggactgtcagacgcacacgcgcacgcacctagacacacccactcatgtacatgctcacacatgcagacacacctgggcgtcccgaggtcacatgttctggggatgatggccttcaggggtcatctggcaaacagcccctgggctgtgcctggatccccctctagctcctgctcacccacgcccacccagtagtcctgcctgtctgcacaggagaggggcttctcttcctggctggggctggggtgaactggaggctggttaagttgcagccgctgggtcctcgggggcttactcatctcccttttttaaacaaaaagcaaaaaagtaaaatgctgcactgcccagcagcccggttagggctcctggagccaccttaggaaagggcttctcatgagctctgctgcggcagcttcagctggcagagaggctttcccagaaaaaaaaaaaaaaccatttttaaaaagaagaaagcctaaagactctcggcctagggacgtccgtgtgtgccgcctctgtttcctgtaccagatttttgtattctattttcctagctgttgttgcgtccttgtttgctgaggggtgggagccacccagcgtctcagggacctgtccctccgtcacgtcgtcaaagtgtgccttgtgtcttgtgtcaggccttgcccttcccaccagcatgtccctcgtggctcagggtgccccaggcctgcccagctagtgctgtcctcccatctcctgtgggcagcccctcccggcagccagggcttcctggaggcgatgcagccaggcccctgtgggtggcacggaggggctgtgacctggtccccagtgttgccctccccagtggctggcaggggcctgcttgctcactagagagatggattctcacctgtcacctgactcgagccccctgcttcctggcctaggcgagggttccaggtttcagacactggcagccaatgaagactgtgctcgctgggtggtgcaggcctggcaccaggaggcttgcacccgcctttccttcctgacgtcctctgtccttggggctggcccatagcagtgcctgccgtgcctctggtacatctgtagccaattcccatatcatggggaaaattcgtgtctattttcagtcgtacgcatagacgccccaggatggggggcccactgtggcggaagggggtccctggaaacaactctggcacagaacctgccctgcaggctgtagggggcatggtgcctggagctgaggggcatccgaacgcgttgcgggtggttgtgaggaggcctgtctgcatctccttccggccccactggggtccaggggtgcccagaaaggagcttcccctgcctgcctgagtctgtccccccaggcttcatttcaaacaccgtggcacctccgagcaaggcgggccgtgtgtaaaagcttgcttccccagccagcactgcagggccctgaggtggtcgtgtccctgccctcaattcttgaagcaccagctccctgccccaccctccagtgcctgaggcagctaggggcttctgctctcatctctgaccagcagaatccacccggtgaccagtggtggcccctcagcccaccctcccggcagctcagcctgtggctcttgaggccgtggttcccacgtggactgggaggcagtctcagccacccggggtgctgttcagctgcccctccctgccatcagcaggtgggtgaggggttgcccactgggtgggggcccgtgctaggagtcaccacatgctccaacctcccactgctccctgtcaggggcccaggctgccatcactggaggctgcagggaccaagaggccatcaccgtgtctatagagagcagacagaagcagaacagagcccggggctcctgagcctctgcgtgtgccctcccagcccacaccagtgctctcggccactgagcacccagactcaggcttgggttccccagccttattggaaggcagctcccgcataccaggataacccccgcaaaccacatagcagacccccgccatcctcgcagagtgggagaggctgcagcaaggctttgcctctgcagaccccatcttagtggcacggtgcttgggcctgtgtccccgggtggtggaaccctgtaccggtctgtggccctagggtccctgctctgtctgccccggcccgtgctgtccgctgggtgaggcaggctcccccgtgccctgcctccctctgtcagggaacctgggaccccctccccactgcctgcacagaggaccctgaccctcggccagcagggtggccccaggtccatgttgggcactagggcaggttccgtgccagagtcgggggccacacgagggcctggtgccggtgaggggggcgtgcgctagagggggaaaggggcccccggccacctgtccaccgtgtgggccgtgctgtgtccttatgtcattgtaatataaatacagatttttatatctca

SEQ ID NO: 442995 - DNA, 6890 bp, Homo sapiens
tatcccagcccagctctgcatctgtcaacattctcggcccggcccgaggcgctcgacccgtccccattggccccagcccggcccggcgcccgcccccggggcgcgaacgccgcctcccattggctctgcgggccgccgctctcccttatgtgtcaatttgagggcctgaggcggagggtggcggccgagcgccggagtccgcggagtctggaagtgcggcggccgggcgcgcggggtgggcggcgagcggagccggccggagcgggccgggcagcggccgccgccgtcccggggcggacgggcgcgggcgggaggatggagctgaactccctgctgatcctgctggaggcggccgagtacctggagcgcagggatcgagaggccgagcacggctacgcctcggtgctgcccttcgacggcgacttcgccagggagaaaacaaaggcggccggcctggtgcgcaaggccccgaacaacaggtcttcacacaacgagctagaaaagcacagaaaggtgttccgtgatttctaaagcggtctgttcacggacctcccctgcaccccaccccagagaccgcatcccaggcactcagaggctgagccacatcctccactgctccccgcgggcactaacattgccgatgagacttggataaggaggggaccttgttctccatttcctcacttgatctttcacccgacaccacgtacgtaagtcctgtccgcctgcgtcagggcacactcctccaccttctcatccctgatgactgcacaggacacttggctgtgccaccagcgttctttgtgatgaccctctggtttacacagggacttccggacagtcctgcgatgtgccttggtgagcgcagacctttgtggatctggggggatagttttgtaggaccaaggccctagaagtagagatgctggttggcggtcagtgataactgtatcgatggcccttcagacctgtgtccccttttgctctcccaccagcaaaccatcaacgacccctcgaagtggctggcgcaggagccatcccttctcatgtcagcctgtcggagggtgcaagttgtacctccttgtttgtgtgtgcatttcctggctcgggtgagatggagccgggcgttaggttaggttggccctcgtgtcctgcagcctgtttgtgtccttcgcccgttgtgacatcgaggcattctgcttttaatttttgatgtgtatgagctcaaaataccacaaatactaaccatttgtcttttatatgtattgcaaagatttttctacttgttctttgtctctcagctgtgtttttctttcttgtgcaaacgtgtctttctctgattgtcacagcaatgtctgtgtgtgtttttttttaagcgtagaaaacctggaaaatacagaaaagcacaaagctaaagaaataaaattgccgggtgcttcgcctggagacgcacgctccctgtgccttgtttgattctgtcgtctcttgtgtgcgtctgctcttttattttttaaacaaaattgggtcacttgtcacctatgtggttccgtattctaatttttcacttaacattcatgatgtgcatatgtaacacactaaaatgataatgaggttgttttggggtggtggaattcgggggtacttttaatttttttttattttttttcctttttgttgatttgcatttttaaattgttctacagaggtcatatagtgctgatgtaattacatggtgggatggaaagccatttgctagagtggaccagggaaggagacccctggcaacgtccccacttgcaaacctcgtcccagtggtggctgcagtacagtggcgacgcgccttgggaaaggacccctccctgagcagagagagcacgctttggcctcttgcctacacagttcctggggtggggggcggcagggcgctcactcctgttggcggtggggaggctgagcttccaggcactggggtagtcacagagcggcagcctgggacccctttccctgcacctgtgcatgggagacagcgtgggagacgttgaggatcttggccctgttcaggccacctccaggcagacctcccgactggtggggctgttaccgctgcacccagcagccccctccttcttcaggctcctcctctgtccagaggaaatggctgtccctgccgacgttactcccagggggacaagatttgctgggcttgggaacggcaggagcagacatgccaaggctggggtgctcagtgttggcaccacgtggggaaagtcacgtgtgtaggcatcagctgtggcagggcagttgggcggcaggttttcaaaagacaaaaaatattcctgccccttcacctggtcattccactcgtaaggatttacccaaatcaaagtgtcctatatttggaagcagcctctgcggcctgcacgggatgggtgagtccgtggttgaacatggcagtgacaaaacctccgggtgccctgcactgccaggcaggtgcacgtgggcctggccagggtcccaggccgagttgatgcctctgggtgagctgggctccccgcaccccgtgagctccaccagcctcccccgcagacaagcaggccagcagggaaggcggtgtttccacaggggcaggcctaggatgaagccagggcccctctcctgaggtgcccgatgaatgtgtcctggaggattgtggcatgtgagcaagtacccttgagtgtgaacaagcaagcaagcaccactggatgtcatggctccagttttgtggaaagtggattcatctgtggatacggggacagaatctggaatgaggcagtttccaaagggatatgaaacttgggttggaagggcctggtccctggccctcccttgacctaggctgatcatgtttccatggtcacaaaagtgacagagagcacgttgtgcacgatgaggtagagagacgtgaatcttgtctgggtccttccagatctcggtgcagcctgaaaggcaccctcgcctcaccccacccctccctgcatgtggactccagggtggggatgggggatgggggatggcaggggggcgagctggggctcctaggaaatgcctggcggtgacgcgctgaggctttgcaggccatggtgagctgggcgcttctgccaggtgtctgggggctgtgggtgttgggctcctcctgggggtgggggacgggggttcccaaccaggccaggaggggatccttagagagggaccctcagcacatgtgcagcagtggatggtgggggtgggtctgtgcagggccctggaaactgcctgctgccctcccccaccccagcctgatggttctgtctctggctctttcagacgagccaaactcaggctgtaccttgagcagctcaagcaactggtgcccctgggccccgacagcacccgccacaccacgctgagcctcctgaagcgggccaaggtgcacatcaagaaactggaggagcaggaccgccgggcactgagcatcaaggagcagctgcagcaggagcatcgtttcctgaagcggcgcctggagcagctgtcggtgcagagcgtggagcgcgtgcgcacagatagcacgggctctgctgtctccacggacgactcagagcaagaagtggacatagagggcatggagtttggccctggtgagctggacagtgttggcagcagcagtgacgcggacgaccactacagcctgcagagtggcaccggcggcgacagtggcttcgggccccactgccggcggctgggccgccccgccctctcgtaggcccgtgccctctgctccttggcctgcctgcccgccagccacgcgtgtcagccctccagttctccttcagttgacgccagcctctccacaggcccactgctgtgccattctggaagctccagctgctgctgggctgcctggcactgcccgcttgccggtcagggcctgccgagctgcctgccccttccagctgggcagagtcccctgcaaggaggcagggcccagcttccacatccggagccctggtcagcatagccgcccacggtctgttctcagattcctaatcattccagaagtattaaacgtcattgctgcaaacctcggcaggtgccgtgtgaggggcttaatgaccaccacagggagctcagaccccaaccctggatcccaggagaaaggagtggaccgaggaaggaaggaaggcaaggctgtctgtccatccgtccgtctgtccacctacctgtcagtccacataggctcctggcgtggacaaggggtctgtgaagggcgggaactgggtgagcacctggggcaggtgggtggttaaggtccttcccacttcgcaggtgtcagaacctagggctgggctctcggggccaggcaggccagcccagcccacgccgagctgggcagcgtctgctctggtaggactgtcagacgcacacgcgcacgcacctagacacacccactcatgtacatgctcacacatgcagacacacctgggcgtcccgaggtcacatgttctggggatgatggccttcaggggtcatctggcaaacagcccctgggctgtgcctggatccccctctagctcctgctcacccacgcccacccagtagtcctgcctgtctgcacaggagaggggcttctcttcctggctggggctggggtgaactggaggctggttaagttgcagccgctgggtcctcgggggcttactcatctcccttttttaaacaaaaagcaaaaaagtaaaatgctgcactgcccagcagcccggttagggctcctggagccaccttaggaaagggcttctcatgagctctgctgcggcagcttcagctggcagagaggctttcccagaaaaaaaaaaaaaaccatttttaaaaagaagaaagcctaaagactctcggcctagggacgtccgtgtgtgccgcctctgtttcctgtaccagatttttgtattctattttcctagctgttgttgcgtccttgtttgctgaggggtgggagccacccagcgtctcagggacctgtccctccgtcacgtcgtcaaagtgtgccttgtgtcttgtgtcaggccttgcccttcccaccagcatgtccctcgtggctcagggtgccccaggcctgcccagctagtgctgtcctcccatctcctgtgggcagcccctcccggcagccagggcttcctggaggcgatgcagccaggcccctgtgggtggcacggaggggctgtgacctggtccccagtgttgccctccccagtggctggcaggggcctgcttgctcactagagagatggattctcacctgtcacctgactcgagccccctgcttcctggcctaggcgagggttccaggtttcagacactggcagccaatgaagactgtgctcgctgggtggtgcaggcctggcaccaggaggcttgcacccgcctttccttcctgacgtcctctgtccttggggctggcccatagcagtgcctgccgtgcctctggtacatctgtagccaattcccatatcatggggaaaattcgtgtctattttcagtcgtacgcatagacgccccaggatggggggcccactgtggcggaagggggtccctggaaacaactctggcacagaacctgccctgcaggctgtagggggcatggtgcctggagctgaggggcatccgaacgcgttgcgggtggttgtgaggaggcctgtctgcatctccttccggccccactggggtccaggggtgcccagaaaggagcttcccctgcctgcctgagtctgtccccccaggcttcatttcaaacaccgtggcacctccgagcaaggcgggccgtgtgtaaaagcttgcttccccagccagcactgcagggccctgaggtggtcgtgtccctgccctcaattcttgaagcaccagctccctgccccaccctccagtgcctgaggcagctaggggcttctgctctcatctctgaccagcagaatccacccggtgaccagtggtggcccctcagcccaccctcccggcagctcagcctgtggctcttgaggccgtggttcccacgtggactgggaggcagtctcagccacccggggtgctgttcagctgcccctccctgccatcagcaggtgggtgaggggttgcccactgggtgggggcccgtgctaggagtcaccacatgctccaacctcccactgctccctgtcaggggcccaggctgccatcactggaggctgcagggaccaagaggccatcaccgtgtctatagagagcagacagaagcagaacagagcccggggctcctgagcctctgcgtgtgccctcccagcccacaccagtgctctcggccactgagcacccagactcaggcttgggttccccagccttattggaaggcagctcccgcataccaggataacccccgcaaaccacatagcagacccccgccatcctcgcagagtgggagaggctgcagcaaggctttgcctctgcagaccccatcttagtggcacggtgcttgggcctgtgtccccgggtggtggaaccctgtaccggtctgtggccctagggtccctgctctgtctgccccggcccgtgctgtccgctgggtgaggcaggctcccccgtgccctgcctccctctgtcagggaacctgggaccccctccccactgcctgcacagaggaccctgaccctcggccagcagggtggccccaggtccatgttgggcactagggcaggttccgtgccagagtcgggggccacacgagggcctggtgccggtgaggggggcgtgcgctagagggggaaaggggcccccggccacctgtccaccgtgtgggccgtgctgtgtccttatgtcattgtaatataaatacagatttttatatctca

SEQ ID NO: 442996 - DNA, 6579 bp, Homo sapiens
gtcgataccagcccagcgtgctagtcctgcaggcgggttctgcctcctgaatccacacagggttccttcaggaagtggaggttttaaaagccctttggatgcccagggacagccgtggggtgctggcagggggcccagggcactgcagcggcttcaggaggggagggctcagcaggagcccagtgcagccccgggctgaggggcttcatggctcagaggggtgggtggggatcttcctggggtcccgcaaccagccactgtagagttggctccaggccactgctgctctccagggcaggaatttctgaggcctccagccctggcgcccacactcttgggccaggtggacctgttactgggttttggacagtgcgtgtgtgtggtcagatggcttctgtttgtctctcgagaaaggtgttccgtgatttctaaagcggtctgttcacggacctcccctgcaccccaccccagagaccgcatcccaggcactcagaggctgagccacatcctccactgctccccgcgggcactaacattgccgatgagacttggataaggaggggaccttgttctccatttcctcacttgatctttcacccgacaccacgtacgtaagtcctgtccgcctgcgtcagggcacactcctccaccttctcatccctgatgactgcacaggacacttggctgtgccaccagcgttctttgtgatgaccctctggtttacacagggacttccggacagtcctgcgatgtgccttggtgagcgcagacctttgtggatctggggggatagttttgtaggaccaaggccctagaagtagagatgctggttggcggtcagtgataactgtatcgatggcccttcagacctgtgtccccttttgctctcccaccagcaaaccatcaacgacccctcgaagtggctggcgcaggagccatcccttctcatgtcagcctgtcggagggtgcaagttgtacctccttgtttgtgtgtgcatttcctggctcgggtgagatggagccgggcgttaggttaggttggccctcgtgtcctgcagcctgtttgtgtccttcgcccgttgtgacatcgaggcattctgcttttaatttttgatgtgtatgagctcaaaataccacaaatactaaccatttgtcttttatatgtattgcaaagatttttctacttgttctttgtctctcagctgtgtttttctttcttgtgcaaacgtgtctttctctgattgtcacagcaatgtctgtgtgtgtttttttttaagcgtagaaaacctggaaaatacagaaaagcacaaagctaaagaaataaaattgccgggtgcttcgcctggagacgcacgctccctgtgccttgtttgattctgtcgtctcttgtgtgcgtctgctcttttattttttaaacaaaattgggtcacttgtcacctatgtggttccgtattctaatttttcacttaacattcatgatgtgcatatgtaacacactaaaatgataatgaggttgttttggggtggtggaattcgggggtacttttaatttttttttattttttttcctttttgttgatttgcatttttaaattgttctacagaggtcatatagtgctgatgtaattacatggtgggatggaaagccatttgctagagtggaccagggaaggagacccctggcaacgtccccacttgcaaacctcgtcccagtggtggctgcagtacagtggcgacgcgccttgggaaaggacccctccctgagcagagagagcacgctttggcctcttgcctacacagttcctggggtggggggcggcagggcgctcactcctgttggcggtggggaggctgagcttccaggcactggggtagtcacagagcggcagcctgggacccctttccctgcacctgtgcatgggagacagcgtgggagacgttgaggatcttggccctgttcaggccacctccaggcagacctcccgactggtggggctgttaccgctgcacccagcagccccctccttcttcaggctcctcctctgtccagaggaaatggctgtccctgccgacgttactcccagggggacaagatttgctgggcttgggaacggcaggagcagacatgccaaggctggggtgctcagtgttggcaccacgtggggaaagtcacgtgtgtaggcatcagctgtggcagggcagttgggcggcaggttttcaaaagacaaaaaatattcctgccccttcacctggtcattccactcgtaaggatttacccaaatcaaagtgtcctatatttggaagcagcctctgcggcctgcacgggatgggtgagtccgtggttgaacatggcagtgacaaaacctccgggtgccctgcactgccaggcaggtgcacgtgggcctggccagggtcccaggccgagttgatgcctctgggtgagctgggctccccgcaccccgtgagctccaccagcctcccccgcagacaagcaggccagcagggaaggcggtgtttccacaggggcaggcctaggatgaagccagggcccctctcctgaggtgcccgatgaatgtgtcctggaggattgtggcatgtgagcaagtacccttgagtgtgaacaagcaagcaagcaccactggatgtcatggctccagttttgtggaaagtggattcatctgtggatacggggacagaatctggaatgaggcagtttccaaagggatatgaaacttgggttggaagggcctggtccctggccctcccttgacctaggctgatcatgtttccatggtcacaaaagtgacagagagcacgttgtgcacgatgaggtagagagacgtgaatcttgtctgggtccttccagatctcggtgcagcctgaaaggcaccctcgcctcaccccacccctccctgcatgtggactccagggtggggatgggggatgggggatggcaggggggcgagctggggctcctaggaaatgcctggcggtgacgcgctgaggctttgcaggccatggtgagctgggcgcttctgccaggtgtctgggggctgtgggtgttgggctcctcctgggggtgggggacgggggttcccaaccaggccaggaggggatccttagagagggaccctcagcacatgtgcagcagtggatggtgggggtgggtctgtgcagggccctggaaactgcctgctgccctcccccaccccagcctgatggttctgtctctggctctttcagacgagccaaactcaggctgtaccttgagcagctcaagcaactggtgcccctgggccccgacagcacccgccacaccacgctgagcctcctgaagcgggccaaggtgcacatcaagaaactggaggagcaggaccgccgggcactgagcatcaaggagcagctgcagcaggagcatcgtttcctgaagcggcgcctggagcagctgtcggtgcagagcgtggagcgcgtgcgcacagatagcacgggctctgctgtctccacggacgactcagagcaagaagtggacatagagggcatggagtttggccctggtgagctggacgctgtgccattctggaagctccagctgctgctgggctgcctggcactgcccgcttgccggtcagggcctgccgagctgcctgccccttccagctgggcagagtcccctgcaaggaggcagggcccagcttccacatccggagccctggtcagcatagccgcccacggtctgttctcagattcctaatcattccagaagtattaaacgtcattgctgcaaacctcggcaggtgccgtgtgaggggcttaatgaccaccacagggagctcagaccccaaccctggatcccaggagaaaggagtggaccgaggaaggaaggaaggcaaggctgtctgtccatccgtccgtctgtccacctacctgtcagtccacataggctcctggcgtggacaaggggtctgtgaagggcgggaactgggtgagcacctggggcaggtgggtggttaaggtccttcccacttcgcaggtgtcagaacctagggctgggctctcggggccaggcaggccagcccagcccacgccgagctgggcagcgtctgctctggtaggactgtcagacgcacacgcgcacgcacctagacacacccactcatgtacatgctcacacatgcagacacacctgggcgtcccgaggtcacatgttctggggatgatggccttcaggggtcatctggcaaacagcccctgggctgtgcctggatccccctctagctcctgctcacccacgcccacccagtagtcctgcctgtctgcacaggagaggggcttctcttcctggctggggctggggtgaactggaggctggttaagttgcagccgctgggtcctcgggggcttactcatctcccttttttaaacaaaaagcaaaaaagtaaaatgctgcactgcccagcagcccggttagggctcctggagccaccttaggaaagggcttctcatgagctctgctgcggcagcttcagctggcagagaggctttcccagaaaaaaaaaaaaaaccatttttaaaaagaagaaagcctaaagactctcggcctagggacgtccgtgtgtgccgcctctgtttcctgtaccagatttttgtattctattttcctagctgttgttgcgtccttgtttgctgaggggtgggagccacccagcgtctcagggacctgtccctccgtcacgtcgtcaaagtgtgccttgtgtcttgtgtcaggccttgcccttcccaccagcatgtccctcgtggctcagggtgccccaggcctgcccagctagtgctgtcctcccatctcctgtgggcagcccctcccggcagccagggcttcctggaggcgatgcagccaggcccctgtgggtggcacggaggggctgtgacctggtccccagtgttgccctccccagtggctggcaggggcctgcttgctcactagagagatggattctcacctgtcacctgactcgagccccctgcttcctggcctaggcgagggttccaggtttcagacactggcagccaatgaagactgtgctcgctgggtggtgcaggcctggcaccaggaggcttgcacccgcctttccttcctgacgtcctctgtccttggggctggcccatagcagtgcctgccgtgcctctggtacatctgtagccaattcccatatcatggggaaaattcgtgtctattttcagtcgtacgcatagacgccccaggatggggggcccactgtggcggaagggggtccctggaaacaactctggcacagaacctgccctgcaggctgtagggggcatggtgcctggagctgaggggcatccgaacgcgttgcgggtggttgtgaggaggcctgtctgcatctccttccggccccactggggtccaggggtgcccagaaaggagcttcccctgcctgcctgagtctgtccccccaggcttcatttcaaacaccgtggcacctccgagcaaggcgggccgtgtgtaaaagcttgcttccccagccagcactgcagggccctgaggtggtcgtgtccctgccctcaattcttgaagcaccagctccctgccccaccctccagtgcctgaggcagctaggggcttctgctctcatctctgaccagcagaatccacccggtgaccagtggtggcccctcagcccaccctcccggcagctcagcctgtggctcttgaggccgtggttcccacgtggactgggaggcagtctcagccacccggggtgctgttcagctgcccctccctgccatcagcaggtgggtgaggggttgcccactgggtgggggcccgtgctaggagtcaccacatgctccaacctcccactgctccctgtcaggggcccaggctgccatcactggaggctgcagggaccaagaggccatcaccgtgtctatagagagcagacagaagcagaacagagcccggggctcctgagcctctgcgtgtgccctcccagcccacaccagtgctctcggccactgagcacccagactcaggcttgggttccccagccttattggaaggcagctcccgcataccaggataacccccgcaaaccacatagcagacccccgccatcctcgcagagtgggagaggctgcagcaaggctttgcctctgcagaccccatcttagtggcacggtgcttgggcctgtgtccccgggtggtggaaccctgtaccggtctgtggccctagggtccctgctctgtctgccccggcccgtgctgtccgctgggtgaggcaggctcccccgtgccctgcctccctctgtcagggaacctgggaccccctccccactgcctgcacagaggaccctgaccctcggccagcagggtggccccaggtccatgttgggcactagggcaggttccgtgccagagtcgggggccacacgagggcctggtgccggtgaggggggcgtgcgctagagggggaaaggggcccccggccacctgtccaccgtgtgggccgtgctgtgtccttatgtcattgtaatataaatacagatttttatatctca

SEQ ID NO: 442997 - DNA, 4195 bp, Homo sapiens
tatcccagcccagctctgcatctgtcaacattctcggcccggcccgaggcgctcgacccgtccccattggccccagcccggcccggcgcccgcccccggggcgcgaacgccgcctcccattggctctgcgggccgccgctctcccttatgtgtcaatttgagggcctgaggcggagggtggcggccgagcgccggagtccgcggagtctggaagtgcggcggccgggcgcgcggggtgggcggcgagcggagccggccggagcgggccgggcagcggccgccgccgtcccggggcggacgggcgcgggcgggaggatggagctgaactccctgctgatcctgctggaggcggccgagtacctggagcgcagggatcgagaggccgagcacggctacgcctcggtgctgcccttcgacggcgacttcgccagggagaaaacaaaggcggccggcctggtgcgcaaggccccgaacaacaggtcttcacacaacgagctagaaaagcacagagaccgcatcccaggcactcagaggctgagccacatcctccactgctccccgcgggcactaacattgccgatgagacttggataaggaggggaccttgttctccatttcctcacttgatctttcacccgacaccacgtacgagccaaactcaggctgtaccttgagcagctcaagcaactggtgcccctgggccccgacagcacccgccacaccacgctgagcctcctgaagcgggccaaggtgcacatcaagaaactggaggagcaggaccgccgggcactgagcatcaaggagcagctgcagcaggagcatcgtttcctgaagcggcgcctggagcagctgtcggtgcagagcgtggagcgcgtgcgcacagatagcacgggctctgctgtctccacggacgactcagagcaagaagtggacatagagggcatggagtttggccctggtgagctggacagtgttggcagcagcagtgacgcggacgaccactacagcctgcagagtggcaccggcggcgacagtggcttcgggccccactgccggcggctgggccgccccgccctctcgtaggcccgtgccctctgctccttggcctgcctgcccgccagccacgcgtgtcagccctccagttctccttcagttgacgccagcctctccacaggcccactgctgtgccattctggaagctccagctgctgctgggctgcctggcactgcccgcttgccggtcagggcctgccgagctgcctgccccttccagctgggcagagtcccctgcaaggaggcagggcccagcttccacatccggagccctggtcagcatagccgcccacggtctgttctcagattcctaatcattccagaagtattaaacgtcattgctgcaaacctcggcaggtgccgtgtgaggggcttaatgaccaccacagggagctcagaccccaaccctggatcccaggagaaaggagtggaccgaggaaggaaggaaggcaaggctgtctgtccatccgtccgtctgtccacctacctgtcagtccacataggctcctggcgtggacaaggggtctgtgaagggcgggaactgggtgagcacctggggcaggtgggtggttaaggtccttcccacttcgcaggtgtcagaacctagggctgggctctcggggccaggcaggccagcccagcccacgccgagctgggcagcgtctgctctggtaggactgtcagacgcacacgcgcacgcacctagacacacccactcatgtacatgctcacacatgcagacacacctgggcgtcccgaggtcacatgttctggggatgatggccttcaggggtcatctggcaaacagcccctgggctgtgcctggatccccctctagctcctgctcacccacgcccacccagtagtcctgcctgtctgcacaggagaggggcttctcttcctggctggggctggggtgaactggaggctggttaagttgcagccgctgggtcctcgggggcttactcatctcccttttttaaacaaaaagcaaaaaagtaaaatgctgcactgcccagcagcccggttagggctcctggagccaccttaggaaagggcttctcatgagctctgctgcggcagcttcagctggcagagaggctttcccagaaaaaaaaaaaaaaccatttttaaaaagaagaaagcctaaagactctcggcctagggacgtccgtgtgtgccgcctctgtttcctgtaccagatttttgtattctattttcctagctgttgttgcgtccttgtttgctgaggggtgggagccacccagcgtctcagggacctgtccctccgtcacgtcgtcaaagtgtgccttgtgtcttgtgtcaggccttgcccttcccaccagcatgtccctcgtggctcagggtgccccaggcctgcccagctagtgctgtcctcccatctcctgtgggcagcccctcccggcagccagggcttcctggaggcgatgcagccaggcccctgtgggtggcacggaggggctgtgacctggtccccagtgttgccctccccagtggctggcaggggcctgcttgctcactagagagatggattctcacctgtcacctgactcgagccccctgcttcctggcctaggcgagggttccaggtttcagacactggcagccaatgaagactgtgctcgctgggtggtgcaggcctggcaccaggaggcttgcacccgcctttccttcctgacgtcctctgtccttggggctggcccatagcagtgcctgccgtgcctctggtacatctgtagccaattcccatatcatggggaaaattcgtgtctattttcagtcgtacgcatagacgccccaggatggggggcccactgtggcggaagggggtccctggaaacaactctggcacagaacctgccctgcaggctgtagggggcatggtgcctggagctgaggggcatccgaacgcgttgcgggtggttgtgaggaggcctgtctgcatctccttccggccccactggggtccaggggtgcccagaaaggagcttcccctgcctgcctgagtctgtccccccaggcttcatttcaaacaccgtggcacctccgagcaaggcgggccgtgtgtaaaagcttgcttccccagccagcactgcagggccctgaggtggtcgtgtccctgccctcaattcttgaagcaccagctccctgccccaccctccagtgcctgaggcagctaggggcttctgctctcatctctgaccagcagaatccacccggtgaccagtggtggcccctcagcccaccctcccggcagctcagcctgtggctcttgaggccgtggttcccacgtggactgggaggcagtctcagccacccggggtgctgttcagctgcccctccctgccatcagcaggtgggtgaggggttgcccactgggtgggggcccgtgctaggagtcaccacatgctccaacctcccactgctccctgtcaggggcccaggctgccatcactggaggctgcagggaccaagaggccatcaccgtgtctatagagagcagacagaagcagaacagagcccggggctcctgagcctctgcgtgtgccctcccagcccacaccagtgctctcggccactgagcacccagactcaggcttgggttccccagccttattggaaggcagctcccgcataccaggataacccccgcaaaccacatagcagacccccgccatcctcgcagagtgggagaggctgcagcaaggctttgcctctgcagaccccatcttagtggcacggtgcttgggcctgtgtccccgggtggtggaaccctgtaccggtctgtggccctagggtccctgctctgtctgccccggcccgtgctgtccgctgggtgaggcaggctcccccgtgccctgcctccctctgtcagggaacctgggaccccctccccactgcctgcacagaggaccctgaccctcggccagcagggtggccccaggtccatgttgggcactagggcaggttccgtgccagagtcgggggccacacgagggcctggtgccggtgaggggggcgtgcgctagagggggaaaggggcccccggccacctgtccaccgtgtgggccgtgctgtgtccttatgtcattgtaatataaatacagatttttatatctca

SEQ ID NO: 442998 - DNA, 3393 bp, Homo sapiens
tatcccagcccagctctgcatctgtcaacattctcggcccggcccgaggcgctcgacccgtccccattggccccagcccggcccggcgcccgcccccggggcgcgaacgccgcctcccattggctctgcgggccgccgctctcccttatgtgtcaatttgagggcctgaggcggagggtggcggccgagcgccggagtccgcggagtctggaagtgcggcggccgggcgcgcggggtgggcggcgagcggagccggccggagcgggccgggcagcggccgccgccgtcccggggcggacgggcgcgggcgggaggatggagctgaactccctgctgatcctgctggaggcggccgagtacctggagcgcagggatcgaggctgtgccattctggaagctccagctgctgctgggctgcctggcactgcccgcttgccggtcagggcctgccgagctgcctgccccttccagctgggcagagtcccctgcaaggaggcagggcccagcttccacatccggagccctggtcagcatagccgcccacggtctgttctcagattcctaatcattccagaagtattaaacgtcattgctgcaaacctcggcaggtgccgtgtgaggggcttaatgaccaccacagggagctcagaccccaaccctggatcccaggagaaaggagtggaccgaggaaggaaggaaggcaaggctgtctgtccatccgtccgtctgtccacctacctgtcagtccacataggctcctggcgtggacaaggggtctgtgaagggcgggaactgggtgagcacctggggcaggtgggtggttaaggtccttcccacttcgcaggtgtcagaacctagggctgggctctcggggccaggcaggccagcccagcccacgccgagctgggcagcgtctgctctggtaggactgtcagacgcacacgcgcacgcacctagacacacccactcatgtacatgctcacacatgcagacacacctgggcgtcccgaggtcacatgttctggggatgatggccttcaggggtcatctggcaaacagcccctgggctgtgcctggatccccctctagctcctgctcacccacgcccacccagtagtcctgcctgtctgcacaggagaggggcttctcttcctggctggggctggggtgaactggaggctggttaagttgcagccgctgggtcctcgggggcttactcatctcccttttttaaacaaaaagcaaaaaagtaaaatgctgcactgcccagcagcccggttagggctcctggagccaccttaggaaagggcttctcatgagctctgctgcggcagcttcagctggcagagaggctttcccagaaaaaaaaaaaaaaccatttttaaaaagaagaaagcctaaagactctcggcctagggacgtccgtgtgtgccgcctctgtttcctgtaccagatttttgtattctattttcctagctgttgttgcgtccttgtttgctgaggggtgggagccacccagcgtctcagggacctgtccctccgtcacgtcgtcaaagtgtgccttgtgtcttgtgtcaggccttgcccttcccaccagcatgtccctcgtggctcagggtgccccaggcctgcccagctagtgctgtcctcccatctcctgtgggcagcccctcccggcagccagggcttcctggaggcgatgcagccaggcccctgtgggtggcacggaggggctgtgacctggtccccagtgttgccctccccagtggctggcaggggcctgcttgctcactagagagatggattctcacctgtcacctgactcgagccccctgcttcctggcctaggcgagggttccaggtttcagacactggcagccaatgaagactgtgctcgctgggtggtgcaggcctggcaccaggaggcttgcacccgcctttccttcctgacgtcctctgtccttggggctggcccatagcagtgcctgccgtgcctctggtacatctgtagccaattcccatatcatggggaaaattcgtgtctattttcagtcgtacgcatagacgccccaggatggggggcccactgtggcggaagggggtccctggaaacaactctggcacagaacctgccctgcaggctgtagggggcatggtgcctggagctgaggggcatccgaacgcgttgcgggtggttgtgaggaggcctgtctgcatctccttccggccccactggggtccaggggtgcccagaaaggagcttcccctgcctgcctgagtctgtccccccaggcttcatttcaaacaccgtggcacctccgagcaaggcgggccgtgtgtaaaagcttgcttccccagccagcactgcagggccctgaggtggtcgtgtccctgccctcaattcttgaagcaccagctccctgccccaccctccagtgcctgaggcagctaggggcttctgctctcatctctgaccagcagaatccacccggtgaccagtggtggcccctcagcccaccctcccggcagctcagcctgtggctcttgaggccgtggttcccacgtggactgggaggcagtctcagccacccggggtgctgttcagctgcccctccctgccatcagcaggtgggtgaggggttgcccactgggtgggggcccgtgctaggagtcaccacatgctccaacctcccactgctccctgtcaggggcccaggctgccatcactggaggctgcagggaccaagaggccatcaccgtgtctatagagagcagacagaagcagaacagagcccggggctcctgagcctctgcgtgtgccctcccagcccacaccagtgctctcggccactgagcacccagactcaggcttgggttccccagccttattggaaggcagctcccgcataccaggataacccccgcaaaccacatagcagacccccgccatcctcgcagagtgggagaggctgcagcaaggctttgcctctgcagaccccatcttagtggcacggtgcttgggcctgtgtccccgggtggtggaaccctgtaccggtctgtggccctagggtccctgctctgtctgccccggcccgtgctgtccgctgggtgaggcaggctcccccgtgccctgcctccctctgtcagggaacctgggaccccctccccactgcctgcacagaggaccctgaccctcggccagcagggtggccccaggtccatgttgggcactagggcaggttccgtgccagagtcgggggccacacgagggcctggtgccggtgaggggggcgtgcgctagagggggaaaggggcccccggccacctgtccaccgtgtgggccgtgctgtgtccttatgtcattgtaatataaatacagatttttatatctca

SEQ ID NO: 442999 - DNA, 6307 bp, Homo sapiens
gtcgataccagcccagcgtgctagtcctgcaggcgggttctgcctcctgaatccacacagggttccttcaggaagtggaggttttaaaagccctttggatgcccagggacagccgtggggtgctggcagggggcccagggcactgcagcggcttcaggaggggagggctcagcaggagcccagtgcagccccgggctgaggggcttcatggctcagaggggtgggtggggatcttcctggggtcccgcaaccagccactgtagagttggctccaggccactgctgctctccagggcaggaatttctgaggcctccagccctggcgcccacactcttgggccaggtggacctgttactgggttttggacagtgcgtgtgtgtggtcagatggcttctgtttgtctctcgagaaaggtgttccgtgatttctaaagcggtctgttcacggacctcccctgcaccccaccccagagaccgcatcccaggcactcagaggctgagccacatcctccactgctccccgcgggcactaacattgccgatgagacttggataaggaggggaccttgttctccatttcctcacttgatctttcacccgacaccacgtacgtaagtcctgtccgcctgcgtcagggcacactcctccaccttctcatccctgatgactgcacaggacacttggctgtgccaccagcgttctttgtgatgaccctctggtttacacagggacttccggacagtcctgcgatgtgccttggtgagcgcagacctttgtggatctggggggatagttttgtaggaccaaggccctagaagtagagatgctggttggcggtcagtgataactgtatcgatggcccttcagacctgtgtccccttttgctctcccaccagcaaaccatcaacgacccctcgaagtggctggcgcaggagccatcccttctcatgtcagcctgtcggagggtgcaagttgtacctccttgtttgtgtgtgcatttcctggctcgggtgagatggagccgggcgttaggttaggttggccctcgtgtcctgcagcctgtttgtgtccttcgcccgttgtgacatcgaggcattctgcttttaatttttgatgtgtatgagctcaaaataccacaaatactaaccatttgtcttttatatgtattgcaaagatttttctacttgttctttgtctctcagctgtgtttttctttcttgtgcaaacgtgtctttctctgattgtcacagcaatgtctgtgtgtgtttttttttaagcgtagaaaacctggaaaatacagaaaagcacaaagctaaagaaataaaattgccgggtgcttcgcctggagacgcacgctccctgtgccttgtttgattctgtcgtctcttgtgtgcgtctgctcttttattttttaaacaaaattgggtcacttgtcacctatgtggttccgtattctaatttttcacttaacattcatgatgtgcatatgtaacacactaaaatgataatgaggttgttttggggtggtggaattcgggggtacttttaatttttttttattttttttcctttttgttgatttgcatttttaaattgttctacagaggtcatatagtgctgatgtaattacatggtgggatggaaagccatttgctagagtggaccagggaaggagacccctggcaacgtccccacttgcaaacctcgtcccagtggtggctgcagtacagtggcgacgcgccttgggaaaggacccctccctgagcagagagagcacgctttggcctcttgcctacacagttcctggggtggggggcggcagggcgctcactcctgttggcggtggggaggctgagcttccaggcactggggtagtcacagagcggcagcctgggacccctttccctgcacctgtgcatgggagacagcgtgggagacgttgaggatcttggccctgttcaggccacctccaggcagacctcccgactggtggggctgttaccgctgcacccagcagccccctccttcttcaggctcctcctctgtccagaggaaatggctgtccctgccgacgttactcccagggggacaagatttgctgggcttgggaacggcaggagcagacatgccaaggctggggtgctcagtgttggcaccacgtggggaaagtcacgtgtgtaggcatcagctgtggcagggcagttgggcggcaggttttcaaaagacaaaaaatattcctgccccttcacctggtcattccactcgtaaggatttacccaaatcaaagtgtcctatatttggaagcagcctctgcggcctgcacgggatgggtgagtccgtggttgaacatggcagtgacaaaacctccgggtgccctgcactgccaggcaggtgcacgtgggcctggccagggtcccaggccgagttgatgcctctgggtgagctgggctccccgcaccccgtgagctccaccagcctcccccgcagacaagcaggccagcagggaaggcggtgtttccacaggggcaggcctaggatgaagccagggcccctctcctgaggtgcccgatgaatgtgtcctggaggattgtggcatgtgagcaagtacccttgagtgtgaacaagcaagcaagcaccactggatgtcatggctccagttttgtggaaagtggattcatctgtggatacggggacagaatctggaatgaggcagtttccaaagggatatgaaacttgggttggaagggcctggtccctggccctcccttgacctaggctgatcatgtttccatggtcacaaaagtgacagagagcacgttgtgcacgatgaggtagagagacgtgaatcttgtctgggtccttccagatctcggtgcagcctgaaaggcaccctcgcctcaccccacccctccctgcatgtggactccagggtggggatgggggatgggggatggcaggggggcgagctggggctcctaggaaatgcctggcggtgacgcgctgaggctttgcaggccatggtgagctgggcgcttctgccaggtgtctgggggctgtgggtgttgggctcctcctgggggtgggggacgggggttcccaaccaggccaggaggggatccttagagagggaccctcagcacatgtgcagcagtggatggtgggggtgggtctgtgcagggccctggaaactgcctgctgccctcccccaccccagcctgatggttctgtctctggctctttcagacgagccaaactcaggctgtaccttgagcagctcaagcaactggtgcccctgggccccgacagcacccgccacaccacgctgagcctcctgaagcgggccaaggtgcacatcaagaaactggaggagcaggaccgccgggcactgagcatcaaggagcagctgcagcaggagcatcgtttcctgaagcggcgcctggagcagctgtcggtgcagagcgtggagcgcgtgcgcacagatagcacgggctctgctgtctccacggacgactcagagcaagaagtggacatagagggcatggagtttggccctggtgagctggacagtgttggcagcagcagtgacgcggacgaccactacagcctgcagagtggcaccggcggcgacagtggcttcgggccccactgccggcggctgggccgccccgccctctcgtaggcccgtgccctctgctccttggcctgcctgcccgccagccacgcgtgtcagccctccagttctccttcagttgacgccagcctctccacaggcccactgctgtgccattctggaagctccagctgctgctgggctgcctggcactgcccgcttgccggtcagggcctgccgagctgcctgccccttccagctgggcagagtcccctgcaaggaggcagggcccagcttccacatccggagccctggtcagcatagccgcccacggtctgttctcagattcctaatcattccagaagtattaaacgtcattgctgcaaacctcggcaggtgccgtgtgaggggcttaatgaccaccacagggagctcagaccccaaccctggatcccaggagaaaggagtggaccgaggaaggaaggaaggcaaggctgtctgtccatccgtccgtctgtccacctacctgtcagtccacataggctcctggcgtggacaaggggtctgtgaagggcgggaactgggtgagcacctggggcaggtgggtggttaaggtccttcccacttcgcaggtgtcagaacctagggctgggctctcggggccaggcaggccagcccagcccacgccgagctgggcagcgtctgctctggtaggactgtcagacgcacacgcgcacgcacctagacacacccactcatgtacatgctcacacatgcagacacacctgggcgtcccgaggtcacatgttctggggatgatggccttcaggggtcatctggcaaacagcccctgggctgtgcctggatccccctctagctcctgctcacccacgcccacccagtagtcctgcctgtctgcacaggagaggggcttctcttcctggctggggctggggtgaactggaggctggttaagttgcagccgctgggtcctcgggggcttactcatctcccttttttaaacaaaaagcaaaaaagtaaaatgctgcactgcccagcagcccggttagggctcctggagccaccttaggaaagggcttctcatgagctctgctgcggcagcttcagctggcagagaggctttcccagaaaaaaaaaaaaaaccatttttaaaaagaagaaagcctaaagactctcggcctagggacgtccgtgtgtgccgcctctgtttcctgtaccagatttttgtattctattttcctagctgttgttgcgtccttgtttgctgaggggtgggagccacccagcgtctcagggacctgtccctccgtcacgtcgtcaaagtgtgccttgtgtcttgtgtcaggccttgcccttcccaccagcatgtccctcgtggctcagggtgccccaggcctgcccagctagtgctgtcctcccatctcctgtgggcagcccctcccggcagccagggcttcctggaggcgatgcagccaggcccctgtgggtggcacggaggggctgtgacctggtccccagtgttgccctccccagtggctggcaggggcctgcttgctcactagagagatggattctcacctgtcacctgactcgagccccctgcttcctggcctaggcgagggttccaggtttcagacactggcagccaatgaagactgtgctcgctgggtggtgcaggcctggcaccaggaggcttgcacccgcctttccttcctgacgtcctctgtccttggggctggcccatagcagtgcctgccgtgcctctggtacatctgtagccaattcccatatcatggggaaaattcgtgtctattttcagtcgtacgcatagacgccccaggatggggggcccactgtggcggaagggggtccctggaaacaactctggcacagaacctgccctgcaggctgtagggggcatggtgcctggagctgaggggcatccgaacgcgttgcgggtggttgtgaggaggcctgtctgcatctccttccggccccactggggtccaggggtgcccagaaaggagcttcccctgcctgcctgagtctgtccccccaggcttcatttcaaacaccgtggcacctccgagcaaggcgggccgtgtgtaaaagcttgcttccccagccagcactgcagggccctgaggtggtcgtgtccctgccctcaattcttgaagcaccagctccctgccccaccctccagtgcctgaggcagctaggggcttctgctctcatctctgaccagcagaatccacccggtgaccagtggtggcccctcagcccaccctcccggcagctcagcctgtggctcttgaggccgtggttcccacgtggactgggaggcagtctcagccacccggggtgctgttcagctgcccctccctgccatcagcaggtgggtgaggggttgcccactgggtgggggcccgtgctaggagtcaccacctccccactgcctgcacagaggaccctgaccctcggccagcagggtggccccaggtccatgttgggcactagggcaggttccgtgccagagtcgggggccacacgagggcctggtgccggtgaggggggcgtgcgctagagggggaaaggggcccccggccacctgtccaccgtgtgggccgtgctgtgtccttatgtcattgtaatataaatacagatttttatatctca

SEQ ID NO: 443000 - DNA, 5568 bp, Homo sapiens
gtcgataccagcccagcgtgctagtcctgcaggcgggttctgcctcctgaatccacacagggttccttcaggaagtggaggttttaaaagccctttggatgcccagggacagccgtggggtgctggcagggggcccagggcactgcagcggcttcaggaggggagggctcagcaggagcccagtgcagccccgggctgaggggcttcatggctcagaggggtgggtggggatcttcctggggtcccgcaaccagccactgtagagttggctccaggccactgctgctctccagggcaggaatttctgaggcctccagccctggcgcccacactcttgggccaggtggacctgttactgggttttggacagtgcgtgtgtgtggtcagatggcttctgtttgtctctcgagaaaggtgttccgtgatttctaaagcggtctgttcacggacctcccctgcaccccaccccagagaccgcatcccaggcactcagaggctgagccacatcctccactgctccccgcgggcactaacattgccgatgagacttggataaggaggggaccttgttctccatttcctcacttgatctttcacccgacaccacgtacgtaagtcctgtccgcctgcgtcagggcacactcctccaccttctcatccctgatgactgcacaggacacttggctgtgccaccagcgttctttgtgatgaccctctggtttacacagggacttccggacagtcctgcgatgtgccttggtgagcgcagacctttgtggatctggggggatagttttgtaggaccaaggccctagaagtagagatgctggttggcggtcagtgataactgtatcgatggcccttcagacctgtgtccccttttgctctcccaccagcaaaccatcaacgacccctcgaagtggctggcgcaggagccatcccttctcatgtcagcctgtcggagggtgcaagttgtacctccttgtttgtgtgtgcatttcctggctcgggtgagatggagccgggcgttaggttaggttggccctcgtgtcctgcagcctgtttgtgtccttcgcccgttgtgacatcgaggcattctgcttttaatttttgatgtgtatgagctcaaaataccacaaatactaaccatttgtcttttatatgtattgcaaagatttttctacttgttctttgtctctcagctgtgtttttctttcttgtgcaaacgtgtctttctctgattgtcacagcaatgtctgtgtgtgtttttttttaagcgtagaaaacctggaaaatacagaaaagcacaaagctaaagaaataaaattgccgggtgcttcgcctggagacgcacgctccctgtgccttgtttgattctgtcgtctcttgtgtgcgtctgctcttttattttttaaacaaaattgggtcacttgtcacctatgtggttccgtattctaatttttcacttaacattcatgatgtgcatatgtaacacactaaaatgataatgaggttgttttggggtggtggaattcgggggtacttttaatttttttttattttttttcctttttgttgatttgcatttttaaattgttctacagaggtcatatagtgctgatgtaattacatggtgggatggaaagccatttgctagagtggaccagggaaggagacccctggcaacgtccccacttgcaaacctcgtcccagtggtggctgcagtacagtggcgacgcgccttgggaaaggacccctccctgagcagagagagcacgctttggcctcttgcctacacagttcctggggtggggggcggcagggcgctcactcctgttggcggtggggaggctgagcttccaggcactggggtagtcacagagcggcagcctgggacccctttccctgcacctgtgcatgggagacagcgtgggagacgttgaggatcttggccctgttcaggccacctccaggcagacctcccgactggtggggctgttaccgctgcacccagcagccccctccttcttcaggctcctcctctgtccagaggaaatggctgtccctgccgacgttactcccagggggacaagatttgctgggcttgggaacggcaggagcagacatgccaaggctggggtgctcagtgttggcaccacgtggggaaagtcacgtgtgtaggcatcagctgtggcagggcagttgggcggcaggttttcaaaagacaaaaaatattcctgccccttcacctggtcattccactcgtaaggatttacccaaatcaaagtgtcctatatttggaagcagcctctgcggcctgcacgggatgggtgagtccgtggttgaacatggcagtgacaaaacctccgggtgccctgcactgccaggcaggtgcacgtgggcctggccagggtcccaggccgagttgatgcctctgggtgagctgggctccccgcaccccgtgagctccaccagcctcccccgcagacaagcaggccagcagggaaggcggtgtttccacaggggcaggcctaggatgaagccagggcccctctcctgaggtgcccgatgaatgtgtcctggaggattgtggcatgtgagcaagtacccttgagtgtgaacaagcaagcaagcaccactggatgtcatggctccagttttgtggaaagtggattcatctgtggatacggggacagaatctggaatgaggcagtttccaaagggatatgaaacttgggttggaagggcctggtccctggccctcccttgacctaggctgatcatgtttccatggtcacaaaagtgacagagagcacgttgtgcacgatgaggtagagagacgtgaatcttgtctgggtccttccagatctcggtgcagcctgaaaggcaccctcgcctcaccccacccctccctgcatgtggactccagggtggggatgggggatgggggatggcaggggggcgagctggggctcctaggaaatgcctggcggtgacgcgctgaggctttgcaggccatggtgagctgggcgcttctgccaggtgtctgggggctgtgggtgttgggctcctcctgggggtgggggacgggggttcccaaccaggccaggaggggatccttagagagggaccctcagcacatgtgcagcagtggatggtgggggtgggtctgtgcagggccctggaaactgcctgctgccctcccccaccccagcctgatggttctgtctctggctctttcagacgagccaaactcaggctgtaccttgagcagctcaagcaactggtgcccctgggccccgacagcacccgccacaccacgctgagcctcctgaagcgggccaaggtgcacatcaagaaactggaggagcaggaccgccgggcactgagcatcaaggagcagctgcagcaggagcatcgtttcctgaagcggcgcctggagcagctgtcggtgcagagcgtggagcgcgtgcgcacagatagcacgggctctgctgtctccacggacgactcagagcaagaagtggacatagagggcatggagtttggccctggtgagctggacagtgttggcagcagcagtgacgcggacgaccactacagcctgcagagtggcaccggcggcgacagtggcttcgggccccactgccggcggctgggccgccccgccctctcgtaggcccgtgccctctgctccttggcctgcctgcccgccagccacgcgtgtcagccctccagttctccttcagttgacgccagcctctccacaggcccactgctgtgccattctggaagctccagctgctgctgggctgcctggcactgcccgcttgccggtcagggcctgccgagctgcctgccccttccagctgggcagagtcccctgcaaggaggcagggcccagcttccacatccggagccctggtcagcatagccgcccacggtctgttctcagattcctaatcattccagaagtattaaacgtcattgctgcaaacctcggcaggtgccgtgtgaggggcttaatgaccaccacagggagctcagaccccaaccctggatcccaggagaaaggagtggaccgaggaaggaaggaaggcaaggctgtctgtccatccgtccgtctgtccacctacctgtcagtccacataggctcctggcgtggacaaggggtctgtgaagggcgggaactgggtgagcacctggggcaggtgggtggttaaggtccttcccacttcgcaggtgtcagaacctagggctgggctctcggggccaggcaggccagcccagcccacgccgagctgggcagcgtctgctctggtaggactgtcagacgcacacgcgcacgcacctagacacacccactcatgtacatgctcacacatgcagacacacctgggcgtcccgaggtcacatgttctggggatgatggccttcaggggtcatctggcaaacagcccctgggctgtgcctggatccccctctagctcctgctcacccacgcccacccagtagtcctgcctgtctgcacaggagaggggcttctcttcctggctggggctggggtgaactggaggctggttaagttgcagccgctgggtcctcgggggcttactcatctcccttttttaaacaaaaagcaaaaaagtaaaatgctgcactgcccagcagcccggttagggctcctggagccaccttaggaaagggcttctcatgagctctgctgcggcagcttcagctggcagagaggctttcccagaaaaaaaaaaaaaaccatttttaaaaagaagaaagcctaaagactctcggcctagggacgtccgtgtgtgccgcctctgtttcctgtaccagatttttgtattctattttcctagctgttgttgcgtccttgtttgctgaggggtgggagccacccagcgtctcagggacctgtccctccgtcacgtcgtcaaagtgtgccttgtgtcttgtgtcaggccttgcccttcccaccagcatgtccctcgtggctcagggtgccccaggcctgcccagctagtgctgtcctcccatctcctgtgggcagcccctcccggcagccagggcttcctggaggcgatgcagccaggcccctgtgggtggcacggaggggctgtgacctggtccccagtgttgccctccccagtggctggcaggggcctgcttgctcactagagagatggattctcacctgtcacctgactcgagccccctgcttcctggcctaggcgagggttccaggtttcagacactggcagccaatgaagactgtgctcgctgggtggtgcaggcctggcaccaggaggcttgcacccgcctttccttcctgacgtcctctgtccttggggctggcccatagcagtgcctgccgtgcctctggtacatctgtagccaattcccatatcatggggaaaattcgtgtctattttcagtcgtacgcatagacgccccaggatggggggcccactgggcccccggccacctgtccaccgtgtgggccgtgctgtgtccttatgtcattgtaatataaatacagatttttatatctca

SEQ ID NO: 443001 - DNA, 1267 bp, Homo sapiens
tatcccagcccagctctgcatctgtcaacattctcggcccggcccgaggcgctcgacccgtccccattggccccagcccggcccggcgcccgcccccggggcgcgaacgccgcctcccattggctctgcgggccgccgctctcccttatgtgtcaatttgagggcctgaggcggagggtggcggccgagcgccggagtccgcggagtctggaagtgcggcggccgggcgcgcggggtgggcggcgagcggagccggccggagcgggccgggcagcggccgccgccgtcccggggcggacgggcgcgggcgggaggatggagctgaactccctgctgatcctgctggaggcggccgagtacctggagcgcagggatcgagaggccgagcacggctacgcctcggtgctgcccttcgacggcgacttcgccagggagaaaacaaaggcggccggcctggtgcgcaaggccccgaacaacaggtcttcacacaacgagctagaaaagcacagacgagccaaactcaggctgtaccttgagcagctcaagcaactggtgcccctgggccccgacagcacccgccacaccacgctgagcctcctgaagcgggccaaggtgcacatcaagaaactggaggagcaggaccgccgggcactgagcatcaaggagcagctgcagcaggagcatcgtttcctgaagcggcgcctggagcagctgtcggtgcagagcgtggagcgcgtgcgcacagatagcacgggctctgctgtctccacggacgactcagagcaagaagtggacatagagggcatggagtttggccctggtgagctggacagtgttggcagcagcagtgacgcggacgaccactacagcctgcagagtggcaccggcggcgacagtggcttcgggccccactgccggcggctgggccgccccgccctctcgtaggcccgtgccctctgctccttggcctgcctgcccgccagccacgcgtgtcagccctccagttctccttcagttgacgccagcctctccacaggcccactgctgtgccattctggaagctccagctgctgctgggctgcctggcactgcccgcttgccggtcagggcctgccgagctgcctgccccttccagctgggcagagtcccctgcaaggaggcagggcccagcttccacatccggagccctggtcagcatagccgcccacggtctgttctcagattcctaatcattccagaagtattaaacgtcattgctgcaaacctc

SEQ ID NO: 443002 - DNA, 1232 bp, Homo sapiens
tatcccagcccagctctgcatctgtcaacattctcggcccggcccgaggcgctcgacccgtccccattggccccagcccggcccggcgcccgcccccggggcgcgaacgccgcctcccattggctctgcgggccgccgctctcccttatgtgtcaatttgagggcctgaggcggagggtggcggccgagcgccggagtccgcggagtctggaagtgcggcggccgggcgcgcggggtgggcggcgagcggagccggccggagcgggccgggcagcggccgccgccgtcccggggcggacgggcgcgggcgggaggatggagctgaactccctgctgatcctgctggaggcggccgagtacctggagcgcagggatcgagaggccgagcacggctacgcctcggtgctgcccttcgacggcgacttcgccagggagaaaacaaaggcggccggcctggtgcgcaaggccccgaacaacaggtcttcacacaacgagctagaaaagcacagagaccgcatcccaggcactcagaggctgagccacatcctccactgctccccgcgggcactaacattgccgatgagacttggataaggaggggaccttgttctccatttcctcacttgatctttcacccgacaccacgtacgagccaaactcaggctgtaccttgagcagctcaagcaactggtgcccctgggccccgacagcacccgccacaccacgctgagcctcctgaagcgggccaaggtgcacatcaagaaactggaggagcaggaccgccgggcactgagcatcaaggagcagctgcagcaggagcatcgtttcctgaagcggcgcctggagcagctgtcggtgcagagcgtggagcgcgtgcgcacagatagcacgggctctgctgtctccacggacgactcagagcaagaagtggacatagagggcatggagtttggccctggtgagctggacagtgttggcagcagcagtgacgcggacgaccactacagcgctgtgccattctggaagctccagctgctgctgggctgcctggcactgcccgcttgccggtcagggcctgccgagctgcctgccccttccagctgggcagagtcccctgcaaggaggcagggcccagcttccacatccggagccctggtcagcatagccgcccacggtctgttctcagattcctaatcattccagaagtattaaacgtcattgctgcaaacctc

SEQ ID NO: 443003 - DNA, 1350 bp, Homo sapiens
ggctggtctggaactgacctcaaatgatctgcccacctcagcctcccaaagtgttgggattaacaggtgtgagccaccacgcctgtcccagtatattgtttaacaagtttattttgggtgaaaaattctctttaatgggaagaagaggggctagaatgtgaattcatatctaaaaggacaaactgaaacaaaattcaataacaagattaagttttctgctattaagttgagctgtttcaagatagaataccggattaggttttgagttacagtagtccctccttatctgtggggtgtaagacctacagtggatgcctgaaagagccaagagtattgaagccttgttttttcctatacatacgcaactgtgataaagtttaatttataaattaggcacagtaagattaacagcaataatgagaacatttataactagtaagttttgtgaatgtggtctgaaaatactgtactgtgggaaagtgaagccatggtaagggaggattactgtatatcttcattttggtcttaagctttagaattatgggtaactaagaagccgtttgagatggttatattccatgactaaacttacctgggaattgtattatttacggggaaggcagttattttaaaaatgcttgtttaaggaagcagttgctgtatttgaattaagataactttcattagagattattagtgaaggttggccatctggttggctatgtgcttatagaattatagaagtaagctatttgttgacaattttagagttaaatttgacaatcttggttacctaccaaactttaaaatagaagtcaggatttctgttacccaaccatgggagctttggttgtctcatattcggtaagataattctctgttaaatagtggggtattagaacaaatggacttaagtaaaatcttcaatcatctttatgattgccctctattaattatattctgagtgggagagacctcccaaagccatgaaagaattgataaattggcctacataaaaataagaaatcttacattcagacttggggctttcacttatcataagatgaaaactaattttcagtgtttcctggtggtagatgacttaatatgctaaaacatttggggtaatctattttagatactacctatgtctgagacccagttccctacctctaccaaatgctagcagtatgaactttacctacttcacagtgttttaatggtcgaagtgttattttaaagtagtaactactgcataaaggatatcgaataagagtttctaaaactgaaatagagtaagtaagtttgtttatttaagaatttctaaataaattagatccaagaggcaga

SEQ ID NO: 443004 - DNA, 1542 bp, Homo sapiens
caatcagattagtggggatgtggcccgtggcctagctcgtcaagttgccgtggcgcggagaactctgcaaaacaagaggctgaggattgcgttagagataaaccagttcacgccggagccccgtgagggaagcgtctccgttgggtccggccgctctgcgggactctgaggaaaagctcgcaccaggtggacgcggatctgtcaacatgggtaaaggagaccccaacaagccgcggggcaaaatgtcctcgtacgccttcttcgtgcagacctgccgggaagagcacaagaagaaacacccggactcttccgtcaatttcgcggaattctccaagaagtgttcggagagatggaagaccatgtctgcaaaggagaagtcgaagtttgaagatatggcaaaaagtgacaaagctcgctatgacagggagatgaaaaattacgttcctcccaaaggtgataagaaggggaagaaaaaggaccccaatgctcctaaaaggccaccatctgccttcttcctgttttgctctgaacatcgcccaaagatcaaaagtgaacaccctggcctatccattggggatactgcaaagaaattgggtgaaatgtggtctgagcagtcagccaaagataaacaaccatatgaacagaaagcagctaagctaaaggagaaatatgaaaaggatattgctgcatatcgtgccaagggcaaaagtgaagcaggaaagaagggccctggcaggccaacaggctcaaagaagaagaacgaaccagaagatgaggaggaggaggaggaagaagaagatgaagatgaggaggaagaggatgaagatgaagaataaatggctatcctttaatgatgcgtgtggaatgtgtgtgtgtgctcaggcaattattttgctaagaatgtgaattcaagtgcagctcaatactagcttcagtataaaaactgtacagatttttgtatagctgataagattctctgtagagaaaatacttttaaaaaatgcaggttgtagctttttgatgggctactcatacagttagattttacagcttctgatgttgaatgttcctaaatatttaatggtttttttaatttcttgtgtatggtagcacagcaaacttgtaggaattagtatcaatagtaaattttgggttttttaggatgttgcatttcgtttttttaaaaaaaattttgtaataaaattatgtatattatttctattgtctttgtcttaatatgctaagttaattttcactttaaaaaagccatttgaagaccagagctatgttgatttttttcggtatttctgcctagtagttcttagacacagttgacctagtaaaatgtttgagaattaaaaccaaacatgctcatatttgcaaaatgttctttaaaagttacatgttgaactcagtgaactttataagaatttatgcagttttacagaacgttaagttttgtacttgacgtttctgtttattagctaaattgttcctcaggtgtgtgtatatatatatacatatatatatatatatatatgt

SEQ ID NO: 443005 - DNA, 209 bp, Homo sapiens
taatggtttttttaatttcttgtgtatggtagcacagcaaacttgtaggaattaaaaaaaccattaaatatttaatggtttttttaatttcttgtgtatggtagcacagcaaacttgtaggaattagtatcaatagtaaattttgggttttttaggatgttgcatttcgtttttttaaaaaaaattttgtaataaaattatgtatatta

SEQ ID NO: 443006 - DNA, 1341 bp, Homo sapiens
caatcagattagtggggatgtggcccgtggcctagctcgtcaagttgccgtggcgcggagaactctgcaaaacaagaggctgaggattgcgttagagataaaccagttcacgccggagccccgtgagggaagcgtctccgttgggtccggccgctctgcgggactctgaggaaaagctcgcaccaggtggacgcggatctgtcaacatgggtaaaggagaccccaacaagccgcggggcaaaatgtcctcgtacgccttcttcgtgcagacctgccgggaagagcacaagaagaaacacccggactcttccgtcaatttcgcggaattctccaagaagtgttcggagagatggaagaccatgtctgcaaaggagaagtcgaagtttgaagatatggcaaaaagtgacaaagctcgctatgacagggagatgaaaaattacgttcctcccaaaggtgataagaaggggaagaaaaaggaccccaatgctcctaaaaggccaccatctgccttcttcctgttttgctctgaacatcgcccaaagatcaaaagtgaacaccctggcctatccattggggatactgcaaagaaattgggtgaaatgtggtctgagcagtcagccaaagataaacaaccatatgaacagaaagcagctaagctaaaggagaaatatgaaaaggatattgctgcatatcgtgccaagggcaaaagtgaagcaggaaagaagggccctggcaggccaacaggctcaaagaagaagaacgaaccagaagatgaggaggaggaggaggaagaagaagatgaagatgaggaggaagaggatgaagatgaagaataaatggctatcctttaatgatgcgtgtggaatgtgtgtgtgtgctcaggcaattattttgctaagaatgtgaattcaagtgcagctcaatactagcttcagtataaaaactgtacagatttttgtatagctgataagattctctgtagagaaaatacttttaaaaaatgcaggttgtagctttttgatgggctactcatacagttagattttacagcttctgatgttgaatgttcctaaatatttaatggtttttttaatttcttgtgtatggtagcacagcaaacttgtaggaattagtatcaatagtaaattttgggttttttaggatgttgcatttcgtttttttaaaaaaaattttgtaataaaattatgtatattaaaagcagggagcagaatgttaaagaagctcctatttgaccccttgtattttcctagtgaaagcggaggtatttactggttaaaaatatatggaatgggcagggagcagtggctcacacctgaattc

SEQ ID NO: 443007 - DNA, 1350 bp, Homo sapiens
caatcagattagtggggatgtggcccgtggcctagctcgtcaagttgccgtggcgcggagaactctgcaaaacaagaggctgaggattgcgttagagataaaccagttcacgccggagccccgtgagggaagcgtctccgttgggtccggccgctctgcgggactctgaggaaaagctcgcaccaggtggacgcggatctgtcaacatgggtaaaggagaccccaacaagccgcggggcaaaatgtcctcgtacgccttcttcgtgcagacctgccgggaagagcacaagaagaaacacccggactcttccgtcaatttcgcggaattctccaagaagtgttcggagagatggaagaccatgtctgcaaaggagaagtcgaagtttgaagatatggcaaaaagtgacaaagctcgctatgacagggagatgaaaaattacgttcctcccaaaggtgataagaaggggaagaaaaaggaccccaatgctcctaaaaggccaccatctgccttcttcctgttttgctctgaacatcgcccaaagatcaaaagtgaacaccctggcctatccattggggatactgcaaagaaattgggtgaaatgtggtctgagcagtcagccaaagataaacaaccatatgaacagaaagcagctaagctaaaggagaaatatgaaaaggatattgctgcatatcgtgccaagggcaaaagtgaagcaggaaagaagggccctggcaggccaacaggctcaaagaagaagaacgaaccagaagatgaggaggaggaggaggaagaagaagatgaagatgaggaggaagaggatgaagatgaagaataaatggctatcctttaatgatgcgtgtggaatgtgtgtgtgtgctcaggcaattattttgctaagaatgtgaattcaagtgcagctcaatactagcttcagtataaaaactgtacagatttttgtatagctgataagattctctgtagagaaaatacttttaaaaaatgcaggttgtagctttttgatgggctactcatacagttagattttacagcttctgatgttgaatgttcctaaatatttaatggtttttttaatttcttgtgtatggtagcacagcaaacttgtaggaattagtatcaatagtaaattttgggttttttaggatgttgcatttcgtttttttaaaaaaaattttgtaataaaattatgtatattatttctattgtctttgtcttaatatgctaagttaattttgcataaaggatatcgaataagagtttctaaaactgaaatagagtaagtaagtttgtttatttaagaatttctaaataaattagatccaagaggcaga

SEQ ID NO: 443008 - DNA, 1154 bp, Homo sapiens
gtagctgattacggatgctttgaatcgacggtttctcagcgataacgttttcagcggccccgtgagggaagcgtctccgttgggtccggccgctctgcgggactctgaggaaaagctcgcaccaggtggacgcggatctgtcaacatgggtaaaggagaccccaacaagccgcggggcaaaatgtcctcgtacgccttcttcgtgcagacctgccgggaagagcacaagaagaaacacccggactcttccgtcaatttcgcggaattctccaagaagtgttcggagagatggaagaccatgtctgcaaaggagaagtcgaagtttgaagatatggcaaaaagtgacaaagctcgctatgacagggagatgaaaaattacgttcctcccaaaggtgataagaaggggaagaaaaaggaccccaatgctcctaaaaggccaccatctgccttcttcctgttttgctctgaacatcgcccaaagatcaaaagtgaacaccctggcctatccattggggatactgcaaagaaattgggtgaaatgtggtctgagcagtcagccaaagataaacaaccatatgaacagaaagcagctaagctaaaggagaaatatgaaaaggatattgctgcatatcgtgccaagggcaaaagtgaagcaggaaagaagggccctggcaggccaacaggctcaaagaagaagaacgaaccagaagatgaggaggaggaggaggaagaagaagatgaagatgaggaggaagaggatgaagatgaagaataaatggctatcctttaatgatgcgtgtggaatgtgtgtgtgtgctcaggcaattattttgctaagaatgtgaattcaagtgcagctcaatactagcttcagtataaaaactgtacagatttttgtatagctgataagattctctgtagagaaaatacttttaaaaaatgcaggttgtagctttttgatgggctactcatacagttagattttacagcttctgatgttgaatgttcctaaatatttaatggtttttttaatttcttgtgtatggtagcacagcaaacttgtaggaattagtatcaatagtaaattttgggttttttaggatgttgcatttcgtttttttaaaaaaaattttgtaataaaattatgtatatta

SEQ ID NO: 443009 - DNA, 1753 bp, Homo sapiens
caatcagattagtggggatgtggcccgtggcctagctcgtcaagttgccgtggcgcggagaactctgcaaaacaagaggctgaggattgcgttagagataaaccagttcacgccggagccccgtgagggaagcgtctccgttgggtccggccgctctgcgggactctgaggaaaagctcgcaccaggtggacgcggatctgtcaacatgggtaaaggagaccccaacaagccgcggggcaaaatgtcctcgtacgccttcttcgtgcagacctgccgggaagagcacaagaagaaacacccggactcttccgtcaatttcgcggaattctccaagaagtgttcggagagatggaagaccatgtctgcaaaggagaagtcgaagtttgaagatatggcaaaaagtgacaaagctcgctatgacagggagatgaaaaattacgttcctcccaaaggtgataagaaggggaagaaaaaggaccccaatgctcctaaaaggccaccatctgccttcttcctgttttgctctgaacatcgcccaaagatcaaaagtgaacaccctggcctatccattggggatactgcaaagaaattgggtgaaatgtggtctgagcagtcagccaaagataaacaaccatatgaacagaaagcagctaagctaaaggagaaatatgaaaaggatattgctgcatatcgtgccaagggcaaaagtgaagcaggaaagaagggccctggcaggccaacaggctcaaagaagaagaacgaaccagaagatgaggaggaggaggaggaagaagaagatgaagatgaggaggaagaggatgaagatgaagaataaatggctatcctttaatgatgcgtgtggaatgtgtgtgtgtgctcaggcaattattttgctaagaatgtgaattcaagtgcagctcaatactagcttcagtataaaaactgtacagatttttgtatagctgataagattctctgtagagaaaatacttttaaaaaatgcaggttgtagctttttgatgggctactcatacagttagattttacagcttctgatgttgaatgttcctaaatatttaatggtttttttaatttcttgtgtatggtagcacagcaaacttgtacagttagattttacagcttctgatgttgaatgttcctaaatatttaacctggttttctttaatttcttgtgtattggtagcacagcagacttggacacagatgcagactactgcatcgcgctcagacacgtgcgctggctccgtccacagtcgactacgatcccagagcagtaaggccccagatacttgaccattgtcagcaaggaggtcattgccatggactaggttcacacagcaagttcggggagcctttcatatcatctccttggaatgatgactgaatcagaaggacagaagcactccaccgaaacgcgaaacatggcactacaataccaacaacgcaaacacaccacacaacacacgagcgcgcccaaaataacagggaaagggaacaccccaagactagtgaacacataccaccaacgagctagacaccgaaagaacaggactcaatatggactgcaccctgacccctggaagtcaacaggggcggatgcagcgcatgcatcgccaagacaaacaacggcacagggcaggacctcgcaatgccgtaaccaagaatcaaagagagaataaatacatcacaagcgccaactcgcgcctccaacgaagcaaaatgaagcagtag

SEQ ID NO: 443010 - DNA, 1241 bp, Homo sapiens
caatcagattagtggggatgtggcccgtggcctagctcgtcaagttgccgtggcgcggagaactctgcaaaacaagaggctgaggattgcgttagagataaaccagttcacgccggagccccgtgagggaagcgtctccgttgggtccggccgctctgcgggactctgaggaaaagctcgcaccaggcaagaataccctccaataccctcgggtggacgcggatctgtcaacatgggtaaaggagaccccaacaagccgcggggcaaaatgtcctcgtacgccttcttcgtgcagacctgccgggaagagcacaagaagaaacacccggactcttccgtcaatttcgcggaattctccaagaagtgttcggagagatggaagaccatgtctgcaaaggagaagtcgaagtttgaagatatggcaaaaagtgacaaagctcgctatgacagggagatgaaaaattacgttcctcccaaaggtgataagaaggggaagaaaaaggaccccaatgctcctaaaaggccaccatctgccttcttcctgttttgctctgaacatcgcccaaagatcaaaagtgaacaccctggcctatccattggggatactgcaaagaaattgggtgaaatgtggtctgagcagtcagccaaagataaacaaccatatgaacagaaagcagctaagctaaaggagaaatatgaaaaggatattgctgcatatcgtgccaagggcaaaagtgaagcaggaaagaagggccctggcaggccaacaggctcaaagaagaagaacgaaccagaagatgaggaggaggaggaggaagaagaagatgaagatgaggaggaagaggatgaagatgaagaataaatggctatcctttaatgatgcgtgtggaatgtgtgtgtgtgctcaggcaattattttgctaagaatgtgaattcaagtgcagctcaatactagcttcagtataaaaactgtacagatttttgtatagctgataagattctctgtagagaaaatacttttaaaaaatgcaggttgtagctttttgatgggctactcatacagttagattttacagcttctgatgttgaatgttcctaaatatttaatggtttttttaatttcttgtgtatggtagcacagcaaacttgtaggaattagtatcaatagtaaattttgggttttttaggatgttgcatttcgtttttttaaaaaaaattttgtaataaaattatgtatatta

SEQ ID NO: 443011 - DNA, 1186 bp, Homo sapiens
gcggccgcccttgggaggacgccctcgggaggaggggggcgcgggcagggcgggagcggatttgggcgggaagcggagccccgccagcgcccgccctggcagctgcgggctccgcgccgaccctccggcttcccctctcccccctcggccccgtcaggtggacgcggatctgtcaacatgggtaaaggagaccccaacaagccgcggggcaaaatgtcctcgtacgccttcttcgtgcagacctgccgggaagagcacaagaagaaacacccggactcttccgtcaatttcgcggaattctccaagaagtgttcggagagatggaagaccatgtctgcaaaggagaagtcgaagtttgaagatatggcaaaaagtgacaaagctcgctatgacagggagatgaaaaattacgttcctcccaaaggtgataagaaggggaagaaaaaggaccccaatgctcctaaaaggccaccatctgccttcttcctgttttgctctgaacatcgcccaaagatcaaaagtgaacaccctggcctatccattggggatactgcaaagaaattgggtgaaatgtggtctgagcagtcagccaaagataaacaaccatatgaacagaaagcagctaagctaaaggagaaatatgaaaaggatattgctgcatatcgtgccaagggcaaaagtgaagcaggaaagaagggccctggcaggccaacaggctcaaagaagaagaacgaaccagaagatgaggaggaggaggaggaagaagaagatgaagatgaggaggaagaggatgaagatgaagaataaatggctatcctttaatgatgcgtgtggaatgtgtgtgtgtgctcaggcaattattttgctaagaatgtgaattcaagtgcagctcaatactagcttcagtataaaaactgtacagatttttgtatagctgataagattctctgtagagaaaatacttttaaaaaatgcaggttgtagctttttgatgggctactcatacagttagattttacagcttctgatgttgaatgttcctaaatatttaatggtttttttaatttcttgtgtatggtagcacagcaaacttgtaggaattagtatcaatagtaaattttgggttttttaggatgttgcatttcgtttttttaaaaaaaattttgtaataaaattatgtatatta

SEQ ID NO: 443012 - DNA, 1071 bp, Homo sapiens
gtagctgattacggatgctttgaatcgacggtttctcagcgataacgttttcagcggccccgtgagggaagcgtctccgttgggtccggccgctctgcgggactctgaggaaaagctcgcaccagacctgccgggaagagcacaagaagaaacacccggactcttccgtcaatttcgcggaattctccaagaagtgttcggagagatggaagaccatgtctgcaaaggagaagtcgaagtttgaagatatggcaaaaagtgacaaagctcgctatgacagggagatgaaaaattacgttcctcccaaaggtgataagaaggggaagaaaaaggaccccaatgctcctaaaaggccaccatctgccttcttcctgttttgctctgaacatcgcccaaagatcaaaagtgaacaccctggcctatccattggggatactgcaaagaaattgggtgaaatgtggtctgagcagtcagccaaagataaacaaccatatgaacagaaagcagctaagctaaaggagaaatatgaaaaggatattgctgcatatcgtgccaagggcaaaagtgaagcaggaaagaagggccctggcaggccaacaggctcaaagaagaagaacgaaccagaagatgaggaggaggaggaggaagaagaagatgaagatgaggaggaagaggatgaagatgaagaataaatggctatcctttaatgatgcgtgtggaatgtgtgtgtgtgctcaggcaattattttgctaagaatgtgaattcaagtgcagctcaatactagcttcagtataaaaactgtacagatttttgtatagctgataagattctctgtagagaaaatacttttaaaaaatgcaggttgtagctttttgatgggctactcatacagttagattttacagcttctgatgttgaatgttcctaaatatttaatggtttttttaatttcttgtgtatggtagcacagcaaacttgtaggaattagtatcaatagtaaattttgggttttttaggatgttgcatttcgtttttttaaaaaaaattttgtaataaaattatgtatatta

SEQ ID NO: 443013 - DNA, 1799 bp, Homo sapiens
caatcagattagtggggatgtggcccgtggcctagctcgtcaagttgccgtggcgcggagaactctgcaaaacaagaggctgaggattgcgttagagataaaccagttcacgccggagccccgtgagggaagcgtctccgttgggtccggccgctctgcgggactctgaggaaaagctcgcaccaggtggacgcggatctgtcaacatgggtaaaggagaccccaacaagccgcggggcaaaatgtcctcgtacgccttcttcgtgcagacctgccgggaagagcacaagaagaaacacccggactcttccgtcaatttcgcggaattctccaagaagtgttcggagagatggaagaccatgtctgcaaaggagaagtcgaagtttgaagatatggcaaaaagtgacaaagctcgctatgacagggagatgaaaaattacgttcctcccaaaggtgataagaaggggaagaaaaaggaccccaatgctcctaaaaggccaccatctgccttcttcctgttttgctctgaacatcgcccaaagatcaaaagtgaacaccctggcctatccattggggatactgcaaagaaattgggtgaaatgtggtctgagcagtcagccaaagataaacaaccatatgaacagaaagcagctaagctaaaggagaaatatgaaaagggtacagtgtcatcttttttaaagccgtggataagactaggtataggtaataactgtagaaaacctgggaaatttagttaatcttgtattaatggttgtcagctatgttttgaaaaggcctaatgaaaattgtacacttcaacacaaggtaattgaaaccttccttttgactgaaaccagtgtttgtagcactagtatattcctgcagacagacttgtagttacttgtagttattgtatagtctgtatagtctgttatttttttttttaagcagagagtcaaagaaattgttttatgtagatatatataaaatgtgaaggtacaggagggactatggcactgtgtgtgatgtaaaagggtattggtagtgaaagtactgatactgctgtatcgcaacccttgtcattttacgtcattaacttgttaaagcctagtgggataagtgctctaaaaacttagactggttacctttttagacagttattagggttattggtcaatcatcttagagttgtttacaactaagtggtttttcacagttgagtaatgataccggatgctttatttttttgacaatatttcaggatattgctgcatatcgtgccaagggcaaaagtgaagcaggaaagaagggccctggcaggccaacaggctcaaagaagaagaacgaaccagaagatgaggaggaggaggaggaagaagaagatgaagatgaggaggaagaggatgaagatgaagaataaatggctatcctttaatgatgcgtgtggaatgtgtgtgtgtgctcaggcaattattttgctaagaatgtgaattcaagtgcagctcaatactagcttcagtataaaaactgtacagatttttgtatagctgataagattctctgtagagaaaatacttttaaaaaatgcaggttgtagctttttgatgggctactcatacagttagattttacagcttctgatgttgaatgttcctaaatatttaatggtttttttaatttcttgtgtatggtagcacagcaaacttgtaggaattagtatcaatagtaaattttgggttttttaggatgttgcatttcgtttttttaaaaaaaattttgtaataaaattatgtatatta

SEQ ID NO: 443014 - DNA, 1288 bp, Homo sapiens
caatcagattagtggggatgtggcccgtggcctagctcgtcaagttgccgtggcgcggagaactctgcaaaacaagaggctgaggattgcgttagagataaaccagttcacgccggagccccgtgagggaagcgtctccgttgggtccggccgctctgcgggactctgaggaaaagctcgcaccaggtggacgcggatctgtcaacatgggtaaaggagaccccaacaagccgcggggcaaaatgtcctcgtacgccttcttcgtgcagacctgccgggaagagcacaagaagaaacacccggactcttccgtcaatttcgcggaattctccaagaagtgttcggagagatggaagaccatgtctgcaaaggagaagtcgaagtttgaagatatggcaaaaagtgacaaagctcgctatgacagggagatgaaaaattacgttcctcccaaaggtgataagaaggggaagaaaaaggaccccaatgctcctaaaaggccaccgtaagtttaaaataacccaaattgctccttggatttttccttcagtttattaaactctgttgcttcctttcagatctgccttcttcctgttttgctctgaacatcgcccaaagatcaaaagtgaacaccctggcctatccattggggatactgcaaagaaattgggtgaaatgtggtctgagcagtcagccaaagataaacaaccatatgaacagaaagcagctaagctaaaggagaaatatgaaaaggatattgctgcatatcgtgccaagggcaaaagtgaagcaggaaagaagggccctggcaggccaacaggctcaaagaagaagaacgaaccagaagatgaggaggaggaggaggaagaagaagatgaagatgaggaggaagaggatgaagatgaagaataaatggctatcctttaatgatgcgtgtggaatgtgtgtgtgtgctcaggcaattattttgctaagaatgtgaattcaagtgcagctcaatactagcttcagtataaaaactgtacagatttttgtatagctgataagattctctgtagagaaaatacttttaaaaaatgcaggttgtagctttttgatgggctactcatacagttagattttacagcttctgatgttgaatgttcctaaatatttaatggtttttttaatttcttgtgtatggtagcacagcaaacttgtaggaattagtatcaatagtaaattttgggttttttaggatgttgcatttcgtttttttaaaaaaaattttgtaataaaattatgtatatta

SEQ ID NO: 443015 - DNA, 1166 bp, Homo sapiens
caatcagattagtggggatgtggcccgtggcctagctcgtcaagttgccgtggcgcggagaactctgcaaaacaagaggctgaggattgcgttagagataaaccagttcacgccggagccccgtgagggaagcgtctccgttgggtccggccgctctgcgggactctgaggaaaagctcgcaccaggtggacgcggatctgtcaacatgggtaaaggagaccccaacaagccgcggggcaaaatgtcctcgtacgccttcttcgtgcagacctgccgggaagagcacaagaagaaacacccggactcttccgtcaatttcgcggaattctccaagaagtgttcggagagatggaagaccatgtctgcaaaggagaagtcgaagtttgaagatatggcaaaaagtgacaaagctcgctatgacagggagatgaaaaattacgttcctcccaaagatctgccttcttcctgttttgctctgaacatcgcccaaagatcaaaagtgaacaccctggcctatccattggggatactgcaaagaaattgggtgaaatgtggtctgagcagtcagccaaagataaacaaccatatgaacagaaagcagctaagctaaaggagaaatatgaaaaggatattgctgcatatcgtgccaagggcaaaagtgaagcaggaaagaagggccctggcaggccaacaggctcaaagaagaagaacgaaccagaagatgaggaggaggaggaggaagaagaagatgaagatgaggaggaagaggatgaagatgaagaataaatggctatcctttaatgatgcgtgtggaatgtgtgtgtgtgctcaggcaattattttgctaagaatgtgaattcaagtgcagctcaatactagcttcagtataaaaactgtacagatttttgtatagctgataagattctctgtagagaaaatacttttaaaaaatgcaggttgtagctttttgatgggctactcatacagttagattttacagcttctgatgttgaatgttcctaaatatttaatggtttttttaatttcttgtgtatggtagcacagcaaacttgtaggaattagtatcaatagtaaattttgggttttttaggatgttgcatttcgtttttttaaaaaaaattttgtaataaaattatgtatatta

SEQ ID NO: 443016 - DNA, 1574 bp, Homo sapiens
caatcagattagtggggatgtggcccgtggcctagctcgtcaagttgccgtggcgcggagaactctgcaaaacaagaggctgaggattgcgttagagataaaccagttcacgccggagccccgtgagggaagcgtctccgttgggtccggccgctctgcgggactctgaggaaaagctcgcaccaggtggacgcggatctgtcaacatgggtaaaggagaccccaacaagccgcggggcaaaatgtcctcgtacgccttcttcgtgcagacctgccgggaagagcacaagaagaaacacccggactcttccgtcaatttcgcggaattctccaagaagtgttcggagagatggaaggtgaggcaggagagggacggagctcagggggtgcaggtgtggttttcggctaggagggccttaggcaggtagtaggcaactcatgagcttcaactttgccaccccagtgactcacctgaatatcttaagagttccaggcagacgattttaggtttttacttatataagacttcgaaagcaaaatgctgttaagggaaaatgtggtccttaaagatgatcttgtcgtctttggatgtttataggtaacaattttgctgtatttttggctcttattttatgtccacagaccatgtctgcaaaggagaagtcgaagtttgaagatatggcaaaaagtgacaaagctcgctatgacagggagatgaaaaattacgttcctcccaaaggtgataagaaggggaagaaaaaggaccccaatgctcctaaaaggccaccgtaagtttaaaataacccaaattgctccttggatttttccttcagtttattaaactctgttgcttcctttcagatctgccttcttcctgttttgctctgaacatcgcccaaagatcaaaagtgaacaccctggcctatccattggggatactgcaaagaaattgggtgaaatgtggtctgagcagtcagccaaagataaacaaccatatgaacagaaagcagctaagctaaaggagaaatatgaaaaggatattgctgcatatcgtgccaagggcaaaagtgaagcaggaaagaagggccctggcaggccaacaggctcaaagaagaagaacgaaccagaagatgaggaggaggaggaggaagaagaagatgaagatgaggaggaagaggatgaagatgaagaataaatggctatcctttaatgatgcgtgtggaatgtgtgtgtgtgctcaggcaattattttgctaagaatgtgaattcaagtgcagctcaatactagcttcagtataaaaactgtacagatttttgtatagctgataagattctctgtagagaaaatacttttaaaaaatgcaggttgtagctttttgatgggctactcatacagttagattttacagcttctgatgttgaatgttcctaaatatttaatggtttttttaatttcttgtgtatggtagcacagcaaacttgtaggaattagtatcaatagtaaattttgggttttttaggatgttgcatttcgtttttttaaaaaaaattttgtaataaaattatgtatatta

SEQ ID NO: 443017 - DNA, 1148 bp, Homo sapiens
caatcagattagtggggatgtggcccgtggcctagctcgtcaagttgccgtggcgcggagaactctgcaaaacaagaggctgaggattgcgttagagataaaccagttcacgccggagccccgtgagggaagcgtctccgttgggtccggccgctctgcgggactctgaggaaaagctcgcaccaggtggacgcggatctgtcaacatgggtaaaggagaccccaacaagccgcggggcaaaatgtcctcgtacgccttcttcgtgcagacctgccgggaagagcacaagaagaaacacccggactcttccgtcaatttcgcggaattctccaagaagtgttcggagagatggaagaccatgtctgcaaaggagaagtcgaagtttgaagatatggcaaaaagtgacaaagctcgctatgacagggagatgaaaaattacgttcctcccaaaggtgataagaaggggaagaaaaaggaccccaatgctcctaaaaggccaccatctgccttcttcctgttttgctctgaacatcgcccaaagatcaaaagtgaacaccctggcctatccattggggatactgcaaagaaattgggtgaaatgtggtctgagcagtcagccaaagataaacaaccatatgaacagaaagcagctaagctaaaggagaaatatgaaaaggatattgctgcatatcgtgccaagggcaaaagtgaagcaggaaagaagggccctggcaggccaacaggctcaaagaagaagatgaagaataaatggctatcctttaatgatgcgtgtggaatgtgtgtgtgtgctcaggcaattattttgctaagaatgtgaattcaagtgcagctcaatactagcttcagtataaaaactgtacagatttttgtatagctgataagattctctgtagagaaaatacttttaaaaaatgcaggttgtagctttttgatgggctactcatacagttagattttacagcttctgatgttgaatgttcctaaatatttaatggtttttttaatttcttgtgtatggtagcacagcaaacttgtaggaattagtatcaatagtaaattttgggttttttaggatgttgcatttcgtttttttaaaaaaaattttgtaataaaattatgtatatta

SEQ ID NO: 443018 - DNA, 699 bp, Homo sapiens
caatcagattagtggggatgtggcccgtggcctagctcgtcaagttgccgtggcgcggagaactctgcaaaacaagaggctgaggattgcgttagagataaaccagttcacgccggagccccgtgagggaagcgtctccgttgggtccggccgctctgcgggactctgaggaaaagctcgcaccaggtggacgcggatctgtcaacatgggtaaaggagaccccaacaagccgcggggcaaaatgtcctcgtacgccttcttcgtgcagacctgccgggaagagcacaagaagaaacacccggactcttccgtcaatttcgcggaattctccaagaagtgttcggagagatggaagaccatgtctgcaaaggagaagtcgaagtttgaagatatggcaaaaagtgacaaagctcgctatgacagggagatgaaaaattacgttcctcccaaaggtgataagaaggggaagaaaaaggaccccaatgctcctaaaaggccaccatctgccttcttcctgttttgctctgaacatcgcccaaagatcaaaagtgaacaccctggcctatccattggggatactgcaaagaaattgggtgaaatgtggtctgagcagtcagccaaagataaacaaccatatgaacagaaagcagctaagctaaaggagaaatatgaaaagccgtcgattcgagagatccttg

SEQ ID NO: 443019 - DNA, 1283 bp, Homo sapiens
caatcagattagtggggatgtggcccgtggcctagctcgtcaagttgccgtggcgcggagaactctgcaaaacaagaggctgaggattgcgttagagataaaccagttcacgccggagccccgtgagggaagcgtctccgttgggtccggccgctctgcgggactctgaggaaaagctcgcaccaggtggacgcggatctgtcaacatgggtaaaggagaccccaacaagccgcggggcaaaatgtcctcgtacgccttcttcgtgcagacctgccgggaagagcacaagaagaaacacccggactcttccgtcaatttcgcggaattctccaagaagtgttcggagagatggaagaccatgtctgcaaaggagaagtcgaagtttgaagatatggcaaaaagtgacaaagctcgctatgacagggagatgaaaaattacgttcctcccaaaggtgataagaaggggaagaaaaaggaccccaatgctcctaaaaggccaccatctgccttcttcctgttttgctctgaacatcgcccaaagatcaaaagtgaacaccctggcctatccattggggatactgcaaagaaattgggtgaaatgtggtctgagcagtcagccaaagataaacaaccataaccaatactaccaatcaatactcatcattaataatcataatggctatagcaataaaactaggaataagccccctttcacttctgagtcccagaagttacccaaggcacccctctgacatccggctgcttcttctcacattgacaaaaactaggcgcccaatctcaaatcatattaccgaatcttcttccctcactaaacgtaagcctttctcctcaattctcttcaatcttattccatcattagcagccgttgaggtgggactaaacaaaaccaaggtagccaaatcttagaaaatcctcaaataccccattggatgaatataggcagtcctacttattcctcttttaactaataactctttattaagaaaaaaaaaaagacaaacaacaacagaaaacaaaagcgggcgcgctatttgtggggggagaacaagagatatagaggcgaagagcgatagttttcaacaacactttttagagagagaatagcgggacacctatagggatactataagggagacgagcataagcagatctatgataagttgatgaagagaagaaagaggataaagaggagagatgagtaacgaagagatgaaacgaaagacagatgagaaacaagagaatgatcagcatgaatgatgac

SEQ ID NO: 443020 - DNA, 585 bp, Homo sapiens
  misc_feature (133)..(133): n is a, c, g, or t
aggctgggtaaatttattaagggggggaggtctgtttggccccatggttctgccgggctgtacaggaagcctggtgcccggcatctattccagcttctggtgaggccctcaggctgtgtcccactcatggtangagggtgaaggagagctggcatgtgcagagatcacatgaagatgaggaggaagaggatgaagatgaagaataaatggctatcctttaatgatgcgtgtggaatgtgtgtgtgtgctcaggcaattattttgctaagaatgtgaattcaagtgcagctcaatactagcttcagtataaaaactgtacagatttttgtatagctgataagattctctgtagagaaaatacttttaaaaaatgcaggttgtagctttttgatgggctactcatacagttagattttacagcttctgatgttgaatgttcctaaatatttaatggtttttttaatttcttgtgtatggtagcacagcaaacttgtaggaattagtatcaatagtaaattttgggttttttaggatgttgcatttcgtttttttaaaaaaaattttgtaataaaattatgtatatta

SEQ ID NO: 443021 - DNA, 573 bp, Homo sapiens
caatcagattagtggggatgtggcccgtggcctagctcgtcaagttgccgtggcgcggagaactctgcaaaacaagaggctgaggattgcgttagagataaaccagttcacgccggagccccgtgagggaagcgtctccgttgggtccggccgctctgcgggactctgaggaaaagctcgcaccaggcaagaataccctccaataccctcgggttcgtggacctgcctttccccattccctcagagcctctactcggtctcggcgcagtggctctcggggtctgacccggcgagcggcatttggggtgcgggccggcgagggctgggtctgtggagggccggcgggcagtcggaggaggcggaaactgcccctgaccgggcccggttctgggagttttcaatgtcggtcacgaggtgcttagcggttaagtgaggctcgcgacgtgggagctgggggacatttctgtcaggaaaggcgttttgagggcgcttgcggagtcaccggactcggtgaagggcgggcggcggcgtctcgggccccgggagccacttgctgggctgagccgcggccgc

SEQ ID NO: 443022 - DNA, 1215 bp, Homo sapiens
caatcagattagtggggatgtggcccgtggcctagctcgtcaagttgccgtggcgcggagaactctgcaaaacaagaggctgaggattgcgttagagataaaccagttcacgccggagccccgtgagggaagcgtctccgttgggtccggccgctctgcgggactctgaggaaaagctcgcaccaggtggacgcggatctgtcaacatgggtaaaggagaccccaacaagccgcggggcaaaatgtcctcgtacgccttcttcgtgcagacctgccgggaagagcacaagaagaaacacccggactcttccgtcaatttcgcggaattctccaagaagtgttcggagagatggaagaccatgtctgcaaaggagaagtcgaagtttgaagatatggcaaaaagtgacaaagctcgctatgacagggagatgaaaaattacgttcctcccaaaggtgataagaaggggaagaaaaaggaccccaatgctcctaaaaggccaccatctgccttcttcctgttttgctctgaacatcgcccaaagatcaaaagtgaacaccctggcctatccattggggatactgcaaagaaattgggtgaaatgtggtctgagcagtcagccaaagataaacaaccatatgaacagaaagcagctaagctaaaggagaaatatgaaaaggatattgctgcatatcgtgccaagggcaaaagtgaagcaggaaagaagggccctggcaggccaacaggctcaaagaagaagaacgaaccagaagatgaggaggaggaggaggaagaagaagatgaagatgaggaggaagaggatgaagatgaagaataaatggctatcctttaatgatgcgtgtggaatgtgtgtgtgtgctcaggcaattattttgctaagaatgtgaattcaagtgcagctcaatactagcttcagtataaaaactgtacagatttttgtatagctgataagattctctgtagagaaaatacttttaaaaaatgcaggttgtagctttttgatgggctactcatacagttagattttacagcttctgatgttgaatgttcctaaatatttaatggtttttttaatttcttgtgtatggtagcacagcaaacttgtaggaattagtatcaatagtaaattttgggttttttaggatgttgcatttcgtttttttaaaaaaaattttgtaataaaattatgtatatta

SEQ ID NO: 443023 - DNA, 1241 bp, Homo sapiens
caatcagattagtggggatgtggcccgtggcctagctcgtcaagttgccgtggcgcggagaactctgcaaaacaagaggctgaggattgcgttagagataaaccagttcacgccggagccccgtgagggaagcgtctccgttgggtccggccgctctgcgggactctgaggaaaagctcgcaccaggtggacgcggatctgtcaacatgggtaaaggagaccccaacaagccgcggggcaaaatgtcctcgtacgccttcttcgtgcagacctgccgggaagagcacaagaagaaacacccggactcttccgtcaatttcgcggaattctccaagaagtgttcggagagatggaagaccatgtctgcaaaggagaagtcgaagtttgaagatatggcaaaaagtgacaaagctcgctatgacagggagatgaaaaattacgttcctcccaaaggtgataagaaggggaagaaaaaggaccccaatgctcctaaaaggccaccatctgccttcttcctgttttgctctgaacatcgcccaaagatcaaaagtgaacaccctggcctatccattggggatactgcaaagaaattgggtgaaatgtggtctgagcagtcagccaaagataaacaaccatatgaacagaaagcagctaagctaaaggagaaatatgaaaaggatattgctgcatatcgtgccaagggcaaaagtgaagcaggaaagaagggccctggcaggccaacaggctcaaagaagaagaacgaaccagaagatgaggaggaggaggaggaagaagaagatgaagatgaggaggaagaggatgaagatgaagaataaatggctatcctttaatgatgcgtgtggaatgtgtgtgtgtgctcaggcaattattttgctaagaatgtgaattcaagtgcagctcaatactagcttcagtataaaaactgtacagatttttgtatagctgataagattctctgtagagaaaatacttttaaaaaatgcaggttgtagctttttgatgggctactcatacagttagattttacagcttctgatgttgaatgttcctaaatatttaatggtttttttaatttcttgtgtatggtagcacagcaaacttgtaggaattagtatcaatagtaaattttgggttttttaggatgttgcatttcgtttttttaaaaaaaattttgtaataaaattatgtatattaacaaacaaaaaaacaaaaaaaagggg

SEQ ID NO: 443024 - DNA, 1194 bp, Homo sapiens
  misc_feature (1171)..(1171): n is a, c, g, or t
  misc_feature (1179)..(1179): n is a, c, g, or t
caatcagattagtggggatgtggcccgtggcctagctcgtcaagttgccgtggcgcggagaactctgcaaaacaagaggctgaggattgcgttagagataaaccagttcacgccggagccccgtgagggaagcgtctccgttgggtccggccgctctgcgggactctgaggaaaagctcgcaccaggtggacgcggatctgtcaacatgggtaaaggagaccccaacaagccgcggggcaaaatgtcctcgtacgccttcttcgtgcagacctgccgggaagagcacaagaagaaacacccggactcttccgtcaatttcgcggaattctccaagaagtgttcggagagatggaagaccatgtctgcaaaggagaagtcgaagtttgaagatatggcaaaaagtgacaaagctcgctatgacagggagatgaaaaattacgttcctcccaaaggtgataagaaggggaagaaaaaggaccccaatgctcctaaaaggccaccatctgccttcttcctgttttgctctgaacatcgcccaaagatcaaaagtgaacaccctggcctatccattggggatactgcaaagaaattgggtgaaatgtggtctgagcagtcagccaaagataaacaaccatatgaacagaaagcagctaagctaaaggagaaatatgaaaaggatattgctgcatatcgtgccaagggcaaaagtgaagcaggaaagaagggccctggcaggccaacaggctcaaagaagaagaacgaaccagaagatgaggaggaggaggaggaagaagaagatgaagatgaggaggaagaggatgaagatgaagaataaatggctatcctttaatgatgcgtgtggaatgtgtgtgtgtgctcaggcaattattttgctaagaatgtgaattcaagtgcagctcaatactagcttcagtataaaaactgtacagatttttgtatagctgataagattctctgtagagaaaatacttttaaaaaatgcaggttgtagctttttgatgggctactcatacagttagattttacagcttctgatgttgaatgttcctaaatatttaatggtttttttaatttcttgtgtatggtagcacagcaaacttgtaggaattagtatcaatagtaaattttgggttttttagggggggcagnctaaaaanggacaagccgattga

SEQ ID NO: 443025 - DNA, 1185 bp, Homo sapiens
caatcagattagtggggatgtggcccgtggcctagctcgtcaagttgccgtggcgcggagaactctgcaaaacaagaggctgaggattgcgttagagataaaccagttcacgccggagccccgtgagggaagcgtctccgttgggtccggccgctctgcgggactctgaggaaaagctcgcaccaggtggacgcggatctgtcaacatgggtaaaggagaccccaacaagccgcggggcaaaatgtcctcgtacgccttcttcgtgcagacctgccgggaagagcacaagaagaaacacccggactcttccgtcaatttcgcggaattctccaagaagtgttcggagagatggaagaccatgtctgcaaaggagaagtcgaagtttgaagatatggcaaaaagtgacaaagctcgctatgacagggagatgaaaaattacgttcctcccaaaggtgataagaaggggaagaaaaaggaccccaatgctcctaaaaggccaccatctgccttcttcctgttttgctctgaacatcgcccaaagatcaaaagtgaacaccctggcctatccattggggatactgcaaagaaattgggtgaaatgtggtctgagcagtcagccaaagataaacaaccatatgaacagaaagcagctaagctaaaggagaaatatgaaaaggatattgctgcatatcgtgccaagggcaaaagtgaagcaggaaagaagggccctggcaggccaacaggctcaaagaagaagaacgaaccagaagatgaggaggaggaggaggaagaagaagatgaagatgaggaggaagaggatgaagatgaagaataaatggctatcctttaatgatgcgtgtggaatgtgtgtgtgtgctcaggcaattattttgctaagaatgtgaattcaagtgcagctcaatactagcttcagtataaaaactgtacagatttttgtatagctgataagattctctgtagagaaaatacttttaaaaaatgcaggttgtagctttttgatgggctactgccataggaacagatccagagcaatgcatttcaattgctttgaatgagatggctaagctccattacataccaccatctaaagaagatacctcattgatggagcttttctacacataatagagggctgtcttgcattggttcacaatgacctgttg

SEQ ID NO: 443026 - DNA, 1185 bp, Homo sapiens
caatcagattagtggggatgtggcccgtggcctagctcgtcaagttgccgtggcgcggagaactctgcaaaacaagaggctgaggattgcgttagagataaaccagttcacgccggagccccgtgagggaagcgtctccgttgggtccggccgctctgcgggactctgaggaaaagctcgcaccaggagaccccaacaagccgcggggcaaaatgtcctcgtacgccttcttcgtgcagacctgccgggaagagcacaagaagaaacacccggactcttccgtcaatttcgcggaattctccaagaagtgttcggagagatggaagaccatgtctgcaaaggagaagtcgaagtttgaagatatggcaaaaagtgacaaagctcgctatgacagggagatgaaaaattacgttcctcccaaaggtgataagaaggggaagaaaaaggaccccaatgctcctaaaaggccaccatctgccttcttcctgttttgctctgaacatcgcccaaagatcaaaagtgaacaccctggcctatccattggggatactgcaaagaaattgggtgaaatgtggtctgagcagtcagccaaagataaacaaccatatgaacagaaagcagctaagctaaaggagaaatatgaaaaggatattgctgcatatcgtgccaagggcaaaagtgaagcaggaaagaagggccctggcaggccaacaggctcaaagaagaagaacgaaccagaagatgaggaggaggaggaggaagaagaagatgaagatgaggaggaagaggatgaagatgaagaataaatggctatcctttaatgatgcgtgtggaatgtgtgtgtgtgctcaggcaattattttgctaagaatgtgaattcaagtgcagctcaatactagcttcagtataaaaactgtacagatttttgtatagctgataagattctctgtagagaaaatacttttaaaaaatgcaggttgtagctttttgatgggctactcatacagttagattttacagcttctgatgttgaatgttcctaaatatttaatggtttttttaatttcttgtgtatggtagcacagcaaacttgtaggaattagtatcaatagtaaattttgggttttttaggatgttgcatttcgtttttttaaaaaaaattttgtaataaaattatgtatatta

SEQ ID NO: 443027 - DNA, 1472 bp, Homo sapiens
gcggccgcccttgggaggacgccctcgggaggaggggggcgcgggcagggcgggagcggatttgggcgggaagcggagccccgccagcgcccgccctggcagctgcgggctccgcgccgaccctccggcttcccctctcccccctcggccccgtcaggtggacgcggatctgtcaacatgggtaaaggagaccccaacaagccgcggggcaaaatgtcctcgtacgccttcttcgtgcagacctgccgggaagagcacaagaagaaacacccggactcttccgtcaatttcgcggaattctccaagaagtgttcggagagatggaaggtgaggcaggagagggacggagctcagggggtgcaggtgtggttttcggctaggagggccttaggcaggtagtaggcaactcatgagcttcaactttgccaccccagtgactcacctgaatatcttaagagttccaggcagacgattttaggtttttacttatataagacttcgaaagcaaaatgctgttaagggaaaatgtggtccttaaagatgatcttgtcgtctttggatgtttataggtaacaattttgctgtatttttggctcttattttatgtccacagaccatgtctgcaaaggagaagtcgaagtttgaagatatggcaaaaagtgacaaagctcgctatgacagggagatgaaaaattacgttcctcccaaaggtgataagaaggggaagaaaaaggaccccaatgctcctaaaaggccaccatctgccttcttcctgttttgctctgaacatcgcccaaagatcaaaagtgaacaccctggcctatccattggggatactgcaaagaaattgggtgaaatgtggtctgagcagtcagccaaagataaacaaccatatgaacagaaagcagctaagctaaaggagaaatatgaaaaggatattgctgcatatcgtgccaagggcaaaagtgaagcaggaaagaagggccctggcaggccaacaggctcaaagaagaagaacgaaccagaagatgaggaggaggaggaggaagaagaagatgaagatgaggaggaagaggatgaagatgaagaataaatggctatcctttaatgatgcgtgtggaatgtgtgtgtgtgctcaggcaattattttgctaagaatgtgaattcaagtgcagctcaatactagcttcagtataaaaactgtacagatttttgtatagctgataagattctctgtagagaaaatacttttaaaaaatgcaggttgtagctttttgatgggctactcatacagttagattttacagcttctgatgttgaatgttcctaaatatttaatggtttttttaatttcttgtgtatggtagcacagcaaacttgtaggaattagtatcaatagtaaattttgggttttttaggatgttgcatttcgtttttttaaaaaaaattttgtaataaaattatgtatatta

SEQ ID NO: 443028 - DNA, 959 bp, Homo sapiens
  misc_feature (850)..(850): n is a, c, g, or t
caatcagattagtggggatgtggcccgtggcctagctcgtcaagttgccgtggcgcggagaactctgcaaaacaagaggctgaggattgcgttagagataaaccagttcacgccggagccccgtgagggaagcgtctccgttgggtccggccgctctgcgggactctgaggaaaagctcgcaccaggtggacgcggatctgtcaacatgggtaaaggagaccccaacaagccgcggggcaaaatgtcctcgtacgccttcttcgtgcagacctgccgggaagagcacaagaagaaacacccggactcttccgtcaatttcgcggaattctccaagaagtgttcggagagatggaagaccatgtctgcaaaggagaagtcgaagtttgaagatatggcaaaaagtgacaaagctcgctatgacagggagatgaaaaattacgttcctcccaaaggtgataagaaggggaagaaaaaggaccccaatgctcctaaaaggccaccatctgccttcttcctgttttgctctgaacatcgcccaaagatcaaaagtgaacaccctggcctatccattggggatactgcaaagaaattgggtgaaatgtggtctgagcagtcagccaaagataaacaaccatatgaacagaaagcagctaagctaaaggagaaatatgaaaaggatattgctgcatatcgtgccaagggcaaaagtgaagcaggaaagaagggccctggcaggccaacaggctcaaagaagaagaacgaaccagaagatgaggaggaggaggaggaagaagaaggagggaaggaaggaaggagagaaagaaaagaaaggaaggaagaaagaaaganagaaaagaaagaaagagaattttcacagatttagttccaagcaacagatgctacctcaggggcagaaagggaatttattgagaggatttggggtcactcacagaatccc

SEQ ID NO: 443029 - DNA, 1167 bp, Homo sapiens
caatcagattagtggggatgtggcccgtggcctagctcgtcaagttgccgtggcgcggagaactctgcaaaacaagaggctgaggattgcgttagagataaaccagttcacgccggagccccgtgagggaagcgtctccgttgggtccggccgctctgcgggactctgaggaaaagctcgcaccaggtggacgcggatctgtcaacatgggtaaaggagaccccaacaagccgcggggcaaaatgtcctcgtacgccttcttcgtgcagacctgccgggaagagcacaagaagaaacacccggactcttccgtcaatttcgcggaattctccaagaagtgttcggagagatggaagaccatgtctgcaaaggagaagtcgaagtttgaagatatggcaaaaagtgacaaagctcgctatgacagggagatgaaaaattacgttcctcccaaaggtgataagaaggggaagaaaaaggaccccaatgctcctaaaaggccaccatctgccttcttcctgttttgctctgaacatcgcccaaagatcaaaagtgaacaccctggcctatccattggggatactgcaaagaaattgggtgaaatgtggtctgagcagtcagccaaagataaacaaccatatgaacagaaagcagctaagctaaaggagaaatatgaaaagggccctggcaggccaacaggctcaaagaagaagaacgaaccagaagatgaggaggaggaggaggaagaagaagatgaagatgaggaggaagaggatgaagatgaagaataaatggctatcctttaatgatgcgtgtggaatgtgtgtgtgtgctcaggcaattattttgctaagaatgtgaattcaagtgcagctcaatactagcttcagtataaaaactgtacagatttttgtatagctgataagattctctgtagagaaaatacttttaaaaaatgcaggttgtagctttttgatgggctactcatacagttagattttacagcttctgatgttgaatgttcctaaatatttaatggtttttttaatttcttgtgtatggtagcacagcaaacttgtaggaattagtatcaatagtaaattttgggttttttaggatgttgcatttcgtttttttaaaaaaaattttgtaataaaattatgtatatta

SEQ ID NO: 443030 - DNA, 814 bp, Homo sapiens
caatcagattagtggggatgtggcccgtggcctagctcgtcaagttgccgtggcgcggagaactctgcaaaacaagaggctgaggattgcgttagagataaaccagttcacgccggagccccgtgagggaagcgtctccgttgggtccggccgctctgcgggactctgaggaaaagctcgcaccaggtggacgcggatctgtcaacatgggtaaaggagaccccaacaagccgcggggcaaaatgtcctcgtacgccttcttcgtgcagacctgccgggaagagcacaagaagaaacacccggactcttccgtcaatttcgcggaattctccaagaagtgttcggagagatggaagaccatgtctgcaaaggagaagtcgaagtttgaagatatggcaaaaagtgacaaagctcgctatgacagggagatgaaaaattacgttcctcccaaaggtgataagaaggggaagaaaaaggaccccaatgctcctaaaaggccaccatctgccttcttcctgttttgctctgaacatcgcccaaagatcaaaagtgaacaccctggcctatccattggggatactgcaaagaaattgggtgaaatgtggtctgagcagtcagccaaagataaacaaccatatgaacagaaagcagctaagctaaaggagaaatatgaaaaggatattgctgcatatcgtgccaagggcaaaagtgaagcaggaaagaagggccctggcaggccaacaggctcaaagaagaagaacgaaccagaagatgaggagtcgacgcggccgcggtcgacgcggccgcgaattta

SEQ ID NO: 443031 - DNA, 1494 bp, Homo sapiens
caatcagattagtggggatgtggcccgtggcctagctcgtcaagttgccgtggcgcggagaactctgcaaaacaagaggctgaggattgcgttagagataaaccagttcacgccggagccccgtgagggaagcgtctccgttgggtccggccgctctgcgggactctgaggaaaagctcgcaccaggtggacgcggatctgtcaacatgggtaaaggagaccccaacaagccgcggggcaaaatgtcctcgtacgccttcttcgtgcagacctgccgggaagagcacaagaagaaacacccggactcttccgtcaatttcgcggaattctccaagaagtgttcggagagatggaagaccatgtctgcaaaggagaagtcgaagtttgaagatatggcaaaaagtgacaaagctcgctatgacagggagatgaaaaattacgttcctcccaaaggtgataagaaggggaagaaaaaggaccccaatgctcctaaaaggccaccatctgccttcttcctgttttgctctgaacatcgcccaaagatcaaaagtgaacaccctggcctatccattggggatactgcaaagaaattgggtgaaatgtggtctgagcagtcagccaaagataaacaaccatatgaacagaaagcagctaagctaaaggagaaatatgaaaagggtacagtgtcatcttttttaaagccgtggataagactaggtataggtaataactgtagaaaacctgggaaatttagttaatcttgtattaatggttgtcagctatgttttgaaaaggcctaatgaaaattgtacacttcaacacaaggtaattgaaaccttccttttgactgaaaccagtgtttgtagcactagtatattcctgcagacagacttgtagttacttgtagttattgtatagtctgtatagtctgttatttttttttttaagcagagagtcaaagaaattgttttatgtagatatatataaaatgtgaaggtacaggagggactatggcactgtgtgtgatgtaaaagggtattggtagtgaaagtactgatactgctgtatcgcaacccttgtcattttacgtcattaacttgttaaagcctagtgggataagtgctctaaaaacttagactggttacctttttagacagttattagggttattggtcaatcatcttagagttgtttacaactaagtggtttttcacagttgagtaatgataccggatgctttatttttttgacaatatttcaggatattgctgcatatcgtgccaagggcaaaagtgaagcaggaaagaagggccctggcaggccaacaggctcaaagaagaagaacgaaccagaagatgaggaggaggaggaggaagaagaagatgaagatgaggaggaagaggatgaagatgaagaataaatggctatcctttaatgatgcgtgtggaatgtgtgtgtgtgctcagcctctggagttgatctgggtcagattcc

SEQ ID NO: 443032 - DNA, 750 bp, Homo sapiens
caatcagattagtggggatgtggcccgtggcctagctcgtcaagttgccgtggcgcggagaactctgcaaaacaagaggctgaggattgcgttagagataaaccagttcacgccggagccccgtgagggaagcgtctccgttgggtccggccgctctgcgggactctgaggaaaagctcgcaccaggtggacgcggatctgtcaacatgggtaaaggagaccccaacaagccgcggggcaaaatgtcctcgtacgccttcttcgtgcagacctgccgggaagagcacaagaagaaacacccggactcttccgtcaatttcgcggaattctccaagaagtgttcggagagatggaagaccatgtctgcaaaggagaagtcgaagtttgaagatatggcaaaaagtgacaaagctcgctatgaaaaaaaaaaaaaaaaaaaaaacagaagaacacagtgtgtgggggcgcggccggggcccccgcgagaagagagccttcgagaaaacaatgggaggtggggcagagggcacacgtaaggcgaacagtaaacagggggcaaagagggtgtaccctagcgagaaaccggggacaatacacaagggcaggggactctccccggatagaaaaaagacccgggagggcaaccgggagggttcgggagaaagagcccgaggggagcccgagggacacaaacgggagaacgccaaacaggggagtccaagcggaacacaggagacaaatgtgacgcgg

SEQ ID NO: 443033 - DNA, 597 bp, Homo sapiens
gagttcggcacgatgctagatgggttaaggcgcagactacagagcagtacctcctcactgcaggtagtctgcgccttaaccctctgcagggagactgactgtagcaccaagctacctgcagtgaggaggtactgcttgtagcatatagagcctctccctagctttggttatggaggctttgaggttttgcaaacctgaccaatttaagccataagatctggtcaaagggatacccttcccactaaggacttggtttctcaggaaattatatgtacagtgcttgctggcagttagatgtcaggacagtctaagctgagaaaaccccttctctgcccaccttaacagacctctagggttcttaacccagcaatcaagtttgcctatcctagaggtggcggatttgatcatttggtgtgttgggcaatttttgttttactgtctggttccttctgcgtgaattaccaccaccaccacttgtgcatctcagtcttgtgtgttgtctggttacgtattccctgggtgataccattcaatgtcttaatgtacttgtggctcagacctgagtgcaaggtggaaataaacatcaaacatcttttc

SEQ ID NO: 443034 - DNA, 766 bp, Homo sapiens
  misc_feature (20)..(20): n is a, c, g, or t
  misc_feature (22)..(22): n is a, c, g, or t
ggggggtaaactacggctangnagcgaggctgggtggtgccgaggaaaaccgtgtactattagccatggtcaaccccaccgtgttcttcgacattgccgtcgacggcgagcccttgggccgcgtctcctttgagctgtttgcagacaaggtcccaaagacagcagaaaattttcgtgctctgagcactggagagaaaggatttggttataagggttcctgctttcacagaattattccagggtttatgtgtcagggtggtgacttcacacgccataatggcactggtggcaagtccatctatggggagaaatttgaagatgagaacttcatcctaaagcatacgggtcctggcatcttgtccatggcaaatgctggacccaacacaaatggttcccagtttttcatctgcactgccaagactgagtggttggatggcaagcatgtggtgtttggcaaagtgaaagaaggcatgaatattgtggaggccatggagcgctttgggtccaggaatggcaagaccagcaagaagatcaccattgctgactgtggacaactcgaataagtttgacttgtgttttatcttaaccaccagatcattccttctgtagctcaggagagcacccctccaccccatttgctcgcagtatcctagaatctttgtgctctcgctgcagttccctttgggttccatgttttccttgttccctcccatgcctagctggattgcagagttaagtttatgattatgaaataaaaactaaataa

SEQ ID NO: 443035 - DNA, 770 bp, Homo sapiens
  misc_feature (3)..(3): n is a, c, g, or t
  misc_feature (22)..(23): n is a, c, g, or t
aanagggtatcaacgcagagtnnccattacggccgggggttttccgaggaaaaccgtgtactattagccatggtcaaccccaccgtgttcttcgacattgccgtcgacggcgagcccttgggccgcgtctcctttgagctgtttgcagacaaggtcccaaagacagcagaaaattttcgtgctctgagcactggagagaaaggatttggttataagggttcctgctttcacagaattattccagggtttatgtgtcagggtggtgacttcacacgccataatggcactggtggcaagtccatctatggggagaaatttgaagatgagaacttcatcctaaagcatacgggtcctggcatcttgtccatggcaaatgctggacccaacacaaatggttcccagtttttcatctgcactgccaagactgagtggttggatggcaagcatgtggtgtttggcaaagtgaaagaaggcatgaatattgtggaggccatggagcgctttgggtccaggaatggcaagaccagcaagaagatcaccattgctgactgtggacaactcgaataagtttgacttgtgttttatcttaaccaccagatcattccttctgtagctcaggagagcacccctccaccccatttgctcgcagtatcctagaatctttgtgctctcgctgcagttccctttgggttccatgttttccttgttccctcccatgcctagctggattgcagagttaagtttatgattatgaaataaaaactaaataa

SEQ ID NO: 443036 - DNA, 772 bp, Homo sapiens
tatcggcttaggttagcgaggcccgcgcggttaatcggccgaggcccgaggaaaaccgtgtactattagccatggtcaaccccaccgtgttcttcgacattgccgtcgacggcgagcccttgggccgcgtctcctttgagctgtttgcagacaaggtcccaaagacagcagaaaattttcgtgctctgagcactggagagaaaggatttggttataagggttcctgctttcacagaattattccagggtttatgtgtcagggtggtgacttcacacgccataatggcactggtggcaagtccatctatggggagaaatttgaagatgagaacttcatcctaaagcatacgggtcctggcatcttgtccatggcaaatgctggacccaacacaaatggttcccagtttttcatctgcactgccaagactgagtggttggatggcaagcatgtggtgtttggcaaagtgaaagaaggcatgaatattgtggaggccatggagcgctttgggtccaggaatggcaagaccagcaagaagatcaccattgctgactgtggacaactcgaataagtttgacttgtgttttatcttaaccaccagatcattccttctgtagctcaggagagcacccctccaccccatttgctcgcagtatcctagaatctttgtgctctcgctgcagttccctttgggttccatgttttccttgttccctcccatgcctagctggattgcagagttaagtttatgattatgaaataaaaactaaataa

SEQ ID NO: 443037 - DNA, 791 bp, Homo sapiens
  misc_feature (20)..(20): n is a, c, g, or t
  misc_feature (22)..(22): n is a, c, g, or t
  misc_feature (780)..(780): n is a, c, g, or t
  misc_feature (785)..(785): n is a, c, g, or t
ggggggtaaactacggctangnagcgaggctgggtggtgccgaggaaaaccgtgtactattagccatggtcaaccccaccgtgttcttcgacattgccgtcgacggcgagcccttgggccgcgtctcctttgagctgtttgcagacaaggtcccaaagacagcagaaaattttcgtgctctgagcactggagagaaaggatttggttataagggttcctgctttcacagaattattccagggtttatgtgtcagggtggtgacttcacacgccataatggcactggtggcaagtccatctatggggagaaatttgaagatgagaacttcatcctaaagcatacgggtcctggcatcttgtccatggcaaatgctggacccaacacaaatggttcccagtttttcatctgcactgccaagactgagtggttggatggcaagcatgtggtgtttggcaaagtgaaagaaggcatgaatattgtggaggccatggagcgctttgggtccaggaatggcaagaccagcaagaagatcaccattgctgactgtggacaactcgaataagtttgacttgtgttttatcttaaccaccagatcattccttctgtagctcaggagagcacccctccaccccatttgctcgcagtatcctagaatctttgtgctctcgctgcagttccctttgggttccatgttttccttgttccctcccatgcctagctggattgcagagttaagtttatgattatgaaataaaaactaaataaaaaaaaaaaccggnttttngggggg

SEQ ID NO: 443038 - DNA, 827 bp, Homo sapiens
  misc_feature (3)..(3): n is a, c, g, or t
  misc_feature (22)..(23): n is a, c, g, or t
aanagggtatcaacgcagagtnnccattacggccgggggttttccgaggaaaaccgtgtactattagccatggtcaaccccaccgtgttcttcgacattgccgtcgacggcgagcccttgggccgcgtctcctttgagctgtttgcagacaaggtcccaaagacagcagaaaattttcgtgctctgagcactggagagaaaggatttggttataagggttcctgctttcacagaattattccagggtttatgtgtcagggtggtgacttcacacgccataatggcactggtggcaagtccatctatggggagaaatttgaagatgagaacttcatcctaaagcatacgggtcctggcatcttgtccatggcaaatgctggacccaacacaaatggttcccagtttttcatctgcactgccaagactgagtggttggatggcaagcatgtggtgtttggcaaagtgaaagaaggcatgaatattgtggaggccatggagcgctttgggtccaggaatggcaagaccagcaagaagatcaccattgctgactgtggacaactcgaataagtttgacttgtgttttatcttaaccaccagatcattccttctgtagctcaggagagcacccctccaccccatttgctcgcagtatcctagaatctttgtgctctcgctgcagttccctttgggttccatgttttccttgttccctcccatgcctagctggattgcagagttaagtttatgattatgaaataaaaactaaataataccattgccacaacaagagagaaaaaaaaatttgtgggccacaggcctcgagaaag

SEQ ID NO: 443039 - DNA, 784 bp, Homo sapiens
gaacgtggtataaaaggggcgggaggcaggctcgtgcccgttttgcagacgccaccgccgaggaaaaccgtgtactattagccatggtcaaccccaccgtgttcttcgacattgccgtcgacggcgagcccttgggccgcgtctcctttgagctgtttgcagacaaggtcccaaagacagcagaaaattttcgtgctctgagcactggagagaaaggatttggttataagggttcctgctttcacagaattattccagggtttatgtgtcagggtggtgacttcacacgccataatggcactggtggcaagtccatctatggggagaaatttgaagatgagaacttcatcctaaagcatacgggtcctggcatcttgtccatggcaaatgctggacccaacacaaatggttcccagtttttcatctgcactgccaagactgagtggttggatggcaagcatgtggtgtttggcaaagtgaaagaaggcatgaatattgtggaggccatggagcgctttgggtccaggaatggcaagaccagcaagaagatcaccattgctgactgtggacaactcgaataagtttgacttgtgttttatcttaaccaccagatcattccttctgtagctcaggagagcacccctccaccccatttgctcgcagtatcctagaatctttgtgctctcgctgcagttccctttgggttccatgttttccttgttccctcccatgcctagctggattgcagagttaagtttatgattatgaaataaaaactaaataa

SEQ ID NO: 443040 - DNA, 546 bp, Homo sapiens
gtagttaattcagtcacatctgtgaaatagcttataaaatgctacttttaaacaagctgtttttatgaaagggcttgtaaatgtttatggtatttaagctacctctctagccataacgtattatacattcaagaaaggttcaaaaccagatatactagaaaccaatctttattttttaccccactactaggtaaggggcctggataccaagaagtgactgctcatctaatccataaagctatgttaacagattggaggtagtagcattttcattacaagtgactaaaagaacagctgtttacccctgatcgtgcagcagtgcttgctgttccttagaattttgccttgtaagttctagctcaagttggggggtggtgatagacatttaagaagccatatatcttttcagaagtaggtgtgatgtactaaaagtttgagacactttctagaagtctcactatttaagttatgactagtattggatttttggcatgtctttgggtttcatgtttcttaacccaactgcctgcagggccttatggctgt

SEQ ID NO: 443041 - DNA, 737 bp, Homo sapiens
ggagaaaagagagagagagagaaagcaagagtacgagccagacgcagaggagctacggaaaaaggccgacaaacgggcagagcccttggagccgcgtctccttagagctgtttgcagacaaggtcccaaagacagcaaaattttcgtgctctgagcactggagagaaaggatttggttataagggttcctgctttcacagaattattccagggtttatgtgtcagggtggtgacttcacacgccataatggcactggtggcaagtccatctatggggagaaatttgaagatgagaacttcatcctaaagcatacgggtcctggcatcttgtccatggcaaatgctggacccaacacaaatggttcccagtttttcatctgcactgccaagactgagtggttggatggcaagcatgtggtgtttggcaaagtgaaagaaggcatgaatattgtggaggccatggagcgctttgggtccaggaatggcaagaccagcaagaagatcaccattgctgactgtggacaactcgaataagtttgacttgtgttttatcttaaccaccagatcattccttctgtagctcaggagagcacccctccaccccatttgctcgcagtatcctagaatctttgtgctctcgctgcagttccctttgggttccatgttttccttgttccctcccatgcctagctggattgcagagttaagtttatgattatgaaataaaaactaaataa

SEQ ID NO: 443042 - DNA, 900 bp, Homo sapiens
  misc_feature (900)..(900): n is a, c, g, or t
gaacgtggtataaaaggggcgggaggcaggctcgtgcccgttttgcagacgccaccgccgaggaaaaccgtgtactattagccatggtcaaccccaccgtgttcttcgacattgccgtcgacggcgagcccttgggccgcgtctcctttgagctgtttgcagacaaggtcccaaagacagcagaaaattttcgtgctctgagcactggagagaaaggatttggttataagggttcctgctttcacagaattattccagggtttatgtgtcagggtggtgacttcacacgccataatggcactggtggcaagtccatctatggggagaaatttgaagatgagaacttcatcctaaagcatacgggtcctggcatcttgtccatggcaaatgctggacccaacacaaatggttcccagtttttcatctgcactgccaagactgagtggttggatggcaagcatgtggtgtttggcaaagtgaaagaaggcatgaatattgtggaggccatggagcgctttgggtccaggaatggcaagaccagcaagaagatcaccattgctgactgtggacaactcgaataagtttgacttgtgttttatcttaaccaccagatcattccttctgtagctcaggagagcacccctccaccccatttgctcgcagtatcctagaatctttgtgctctcgctgcagttccctttgggttccatgttttccttgttccctcccatgcctagctggattgcagagttaagtttatgattatgaaataaaaactaaataactaatatccaaaagaaacaaaaaaaaaattggggggctctgcgcgagaagttaaccatctgtgggcgggcgaggatgagcaaggatagtcccaagcacgcgactgttgtccccacn

SEQ ID NO: 443043 - DNA, 1083 bp, Homo sapiens
gaacgtggtataaaaggggcgggaggcaggctcgtgcccgttttgcagacgccaccgccgaggaaaaccgtgtactattagccatggtcaaccccaccgtgttcttcgacattgccgtcgacggcgagcccttgggccgcgtctcctttgaggtaaggggcctggataccaagaagtgactgctcatctaatccataaagctatgttaacagattggaggtagtagcattttcattacaagtgactaaaagaacagctgtttacccctgatcgtgcagcagtgcttgctgttccttagaattttgccttctgtttgcagacaaggtcccaaagacagcagaaaattttcgtgctctgagcactggagagaaaggatttggttataagggttcctgctttcacagaattattccagggtttatgtgtcagggtggtgacttcacacgccataatggcactggtggcaagtccatctatggggagaaatttgaagatgagaacttcatcctaaagcatacgggtcctggcatcttgtccatggcaaatgctggacccaacacaaatggttcccagtttttcatctgcactgccaagactgagtggttggatggcaagcatgtggtgtttggcaaagtgaaagaaggcatgaatattgtggaggccatggagcgctttgggtccaggaatggcaagaccagcaagaagatcaccattgctgactgtggacaactcgaataagtttgacttgtgttttatcttaaccaccagatcattccttctgtagctcaggagagcacccctccaccccatttgctcgcagtatcctagaatctttgtgctctcgctgcagttccctttgggttccatgttttccttgttccctcccatgcctagctggattgcagagttaagtttatgattatgaaataaaaactaaataattacatgtcaacaaaaaagggggcggcaaatatcctgaggccatttcctaccgttttgtaaaggccaaaggcgtaaaaagacggcgtaacggggaaagctggtctggaccctgtggagaaccaaagcggaaatttttacctg

SEQ ID NO: 443044 - DNA, 941 bp, Homo sapiens
gaacgtggtataaaaggggcgggaggcaggctcgtgcccgttttgcagacgccaccgccgaggaaaaccgtgtactattagccatggtcaaccccaccgtgttcttcgacattgccgtcgacggcgagcccttgggccgcgtctcctttgaggtaaggggcctggataccaagaagtgactgctcatctaatccataaagctatgttaacagattggaggtagtagcattttcattacaagtgactaaaagaacagctgtttacccctgatcgtgcagcagtgcttgctgttccttagaattttgccttctgtttgcagacaaggtcccaaagacagcagaaaattttcgtgctctgagcactggagagaaaggatttggttataagggttcctgctttcacagaattattccagggtttatgtgtcagggtggtgacttcacacgccataatggcactggtggcaagtccatctatggggagaaatttgaagatgagaacttcatcctaaagcatacgggtcctggcatcttgtccatggcaaatgctggacccaacacaaatggttcccagtttttcatctgcactgccaagactgagtggttggatggcaagcatgtggtgtttggcaaagtgaaagaaggcatgaatattgtggaggccatggagcgctttgggtccaggaatggcaagaccagcaagaagatcaccattgctgactgtggacaactcgaataagtttgacttgtgttttatcttaaccaccagatcattccttctgtagctcaggagagcacccctccaccccatttgctcgcagtatcctagaatctttgtgctctcgctgcagttccctttgggttccatgttttccttgttccctcccatgcctagctggattgcagagttaagtttatgattatgaaataaaaactaaataa

SEQ ID NO: 443045 - DNA, 785 bp, Homo sapiens
aaaagtcatacctgtggtcaggctctccttagggactgaaagttgtagcactgtcccgaacacagattaaaatgctggtgctctgcgctctgcacagataagataaggtcttcctggtacctgctttcacagaataattccagagatttatgtgtcagggtggtgacttcacacgccataatggcactggtggcaagtccatctatggggagaaatttgaagatgagaacttcatcctaaagcatacgggtcctggcatcttgtccatggcaaatgctggacccaacacaaatggttcccagtttttcatctgcactgccaagactgagtggttggatggcaagcatgtggtgtttggcaaagtgaaagaaggcatgaatattgtggaggccatggagcgctttgggtccaggaatggcaagaccagcaagaagatcaccattgctgactgtggacaactcgaataagtttgacttgtgttttatcttaaccaccagatcattccttctgtagctcaggagagcacccctccaccccatttgctcgcagtatcctagaatctttgtgctctcgctgcagttccctttgggttccatgttttccttgttccctcccatgcccttaatgcccggtcaggtctggcatgaactaacctcatccattacccacagcaacagcggacacccaacaaaaaagcctgcagtctccgggcgcatccacgggcgcgcagcgccctacgggcgacattacaggtggcaccttacagataacacagtgagccactc

SEQ ID NO: 443046 - DNA, 2298 bp, Homo sapiens
  misc_feature (65)..(65): n is a, c, g, or t
  misc_feature (67)..(67): n is a, c, g, or t
gagagagagagagagagagagagagagagagagagagagagagagagagagagagagagagagananagagagagagagagcccgaggaaaaccgtgtactattagccatggtcaaccccaccgtgttcttcgacattgccgtcgacggcgagcccttgggccgcgtctcctttgagctgtttgcagacaaggtcccaaagacagcagaaaattttcgtgctctgagcactggagagaaaggatttggttataagggttcctgctttcacagaattattccagggtttatgtgtcagggtggtgacttcacacgccataatggcactggtggcaagtccatctatggggagaaatttgaagatgagaacttcatcctaaagcatacgggtcctggcatcttgtccatggcaaatgctggacccaacacaaatggttcccagtttttcatctgcactgccaagactgagtggttggatggcaagcatgtggtgtttggcaaagtgaaagaaggcatgaatattgtggaggccatggagcgctttgggtccaggaatggcaagaccagcaagaagatcaccattgctgactgtggacaactcgaataagtttgacttgtgttttatcttaaccaccagatcattccttctgtagctcaggagagcacccctccaccccatttgctcgcagtatcctagaatctttgtgctctcgctgcagttccctttgggttccatgttttccttgttccctcccatgcctagctggattgcagagttaagtttatgattatgaaataaaaactaaataacaattgtcctcgtttgagttaagtgttgatgtaggctttattttaagcagtaatgggttacttctgaaacatcacttgtttgcttaattctacacagtacttagattttttttactttccagtcccaggaagtgtcaatgtttgttgagtggaatattgaaaatgtaggcagcaactgggcatggtggctcactgtctgtaatgtattacctgaggcagaagaccacctgagggtaggagtcaagatcagcctgggcaacatggtgagacgctgtctctacaaaaaataattagcctggcctggtggtgcatgcctagtcctagctgatctggaggctgacgtgggaggattgcttgagcctagagtgagctattatcatgccactgtacagcctgggtgttcacagatcttgtgtctccaaggtaggcagaggcaggaaaagcaaggagccagaattaagaggttgggtcagtctgcagtgagttcatgcatttagaggtgttcttcaagatgactaatgtcaaaaattgagacatctgttgcggttcttttttttttttttttttcccctggaatgcagtggcgtgatctcagctcactgcagcctccgcctcctgggttcaagtgattctagtgcctcagcctcctgagtagctgggataacgggcgtgtgccaccatgcccagctaatttttgtatttttagtatagatggggtttcatcattttgaccaggctggtctcaaactcttgacctcagctgatgcgcctgccttggcctcccaaactgctgagattacagatgtgagccaccgcaccctacctcattttctgtaacaaagctaagcttgaacactgttgatgttcttgagggaagcatattgggctttaggctgtaggtcaagtttatacatcttaattatggtggaattcctatgtagagtctaaaaagccaggtacttggtgctacagtcagtctccctgcagagggttaaggcgcagactacctgcagtgaggaggtactgcttgtagcatatagagcctctccctagctttggttatggaggctttgaggttttgcaaacctgaccaatttaagccataagatctggtcaaagggatacccttcccactaaggacttggtttctcaggaaattatatgtacagtgcttgctggcagttagatgtcaggacagtctaagctgagaaaaccccttctctgcccaccttaacagacctctagggttcttaacccagcaatcaagtttgcctatcctagaggtggcggatttgatcatttggtgtgttgggcaatttttgttttactgtctggttccttctgcgtgaattaccaccaccaccacttgtgcatctcagtcttgtgtgttgtctggttacgtattccctgggtgataccattcaatgtcttaatgtacttgtggctcagacctgagtgcaaggtggaaataaacatcaaacatcttttc

SEQ ID NO: 443047 - DNA, 2259 bp, Homo sapiens
  misc_feature (3)..(3): n is a, c, g, or t
  misc_feature (22)..(23): n is a, c, g, or t
aanagggtatcaacgcagagtnnccattacggccgggggttttccgaggaaaaccgtgtactattagccatggtcaaccccaccgtgttcttcgacattgccgtcgacggcgagcccttgggccgcgtctcctttgagctgtttgcagacaaggtcccaaagacagcagaaaattttcgtgctctgagcactggagagaaaggatttggttataagggttcctgctttcacagaattattccagggtttatgtgtcagggtggtgacttcacacgccataatggcactggtggcaagtccatctatggggagaaatttgaagatgagaacttcatcctaaagcatacgggtcctggcatcttgtccatggcaaatgctggacccaacacaaatggttcccagtttttcatctgcactgccaagactgagtggttggatggcaagcatgtggtgtttggcaaagtgaaagaaggcatgaatattgtggaggccatggagcgctttgggtccaggaatggcaagaccagcaagaagatcaccattgctgactgtggacaactcgaataagtttgacttgtgttttatcttaaccaccagatcattccttctgtagctcaggagagcacccctccaccccatttgctcgcagtatcctagaatctttgtgctctcgctgcagttccctttgggttccatgttttccttgttccctcccatgcctagctggattgcagagttaagtttatgattatgaaataaaaactaaataacaattgtcctcgtttgagttaagtgttgatgtaggctttattttaagcagtaatgggttacttctgaaacatcacttgtttgcttaattctacacagtacttagattttttttactttccagtcccaggaagtgtcaatgtttgttgagtggaatattgaaaatgtaggcagcaactgggcatggtggctcactgtctgtaatgtattacctgaggcagaagaccacctgagggtaggagtcaagatcagcctgggcaacatggtgagacgctgtctctacaaaaaataattagcctggcctggtggtgcatgcctagtcctagctgatctggaggctgacgtgggaggattgcttgagcctagagtgagctattatcatgccactgtacagcctgggtgttcacagatcttgtgtctccaaggtaggcagaggcaggaaaagcaaggagccagaattaagaggttgggtcagtctgcagtgagttcatgcatttagaggtgttcttcaagatgactaatgtcaaaaattgagacatctgttgcggttcttttttttttttttttttcccctggaatgcagtggcgtgatctcagctcactgcagcctccgcctcctgggttcaagtgattctagtgcctcagcctcctgagtagctgggataacgggcgtgtgccaccatgcccagctaatttttgtatttttagtatagatggggtttcatcattttgaccaggctggtctcaaactcttgacctcagctgatgcgcctgccttggcctcccaaactgctgagattacagatgtgagccaccgcaccctacctcattttctgtaacaaagctaagcttgaacactgttgatgttcttgagggaagcatattgggctttaggctgtaggtcaagtttatacatcttaattatggtggaattcctatgtagagtctaaaaagccaggtacttggtgctacagtcagtctccctgcagagggttaaggcgcagactacctgcagtgaggaggtactgcttgtagcatatagagcctctccctagctttggttatggaggctttgaggttttgcaaacctgaccaatttaagccataagatctggtcaaagggatacccttcccactaaggacttggtttctcaggaaattatatgtacagtgcttgctggcagttagatgtcaggacagtctaagctgagaaaaccccttctctgcccaccttaacagacctctagggttcttaacccagcaatcaagtttgcctatcctagaggtggcggatttgatcatttggtgtgttgggcaatttttgttttactgtctggttccttctgcgtgaattaccaccaccaccacttgtgcatctcagtcttgtgtgttgtctggttacgtattccctgggtgataccattcaatgtcttaatgtacttgtggctcagacctgagtgcaaggtggaaataaacatcaaacatcttttc

SEQ ID NO: 443048 - DNA, 2249 bp, Homo sapiens
caaacaattaggctagtacgaggccggggttgaccgaggaaaaccgtgtactattagccatggtcaaccccaccgtgttcttcgacattgccgtcgacggcgagcccttgggccgcgtctcctttgagctgtttgcagacaaggtcccaaagacagcagaaaattttcgtgctctgagcactggagagaaaggatttggttataagggttcctgctttcacagaattattccagggtttatgtgtcagggtggtgacttcacacgccataatggcactggtggcaagtccatctatggggagaaatttgaagatgagaacttcatcctaaagcatacgggtcctggcatcttgtccatggcaaatgctggacccaacacaaatggttcccagtttttcatctgcactgccaagactgagtggttggatggcaagcatgtggtgtttggcaaagtgaaagaaggcatgaatattgtggaggccatggagcgctttgggtccaggaatggcaagaccagcaagaagatcaccattgctgactgtggacaactcgaataagtttgacttgtgttttatcttaaccaccagatcattccttctgtagctcaggagagcacccctccaccccatttgctcgcagtatcctagaatctttgtgctctcgctgcagttccctttgggttccatgttttccttgttccctcccatgcctagctggattgcagagttaagtttatgattatgaaataaaaactaaataacaattgtcctcgtttgagttaagtgttgatgtaggctttattttaagcagtaatgggttacttctgaaacatcacttgtttgcttaattctacacagtacttagattttttttactttccagtcccaggaagtgtcaatgtttgttgagtggaatattgaaaatgtaggcagcaactgggcatggtggctcactgtctgtaatgtattacctgaggcagaagaccacctgagggtaggagtcaagatcagcctgggcaacatggtgagacgctgtctctacaaaaaataattagcctggcctggtggtgcatgcctagtcctagctgatctggaggctgacgtgggaggattgcttgagcctagagtgagctattatcatgccactgtacagcctgggtgttcacagatcttgtgtctccaaggtaggcagaggcaggaaaagcaaggagccagaattaagaggttgggtcagtctgcagtgagttcatgcatttagaggtgttcttcaagatgactaatgtcaaaaattgagacatctgttgcggttcttttttttttttttttttcccctggaatgcagtggcgtgatctcagctcactgcagcctccgcctcctgggttcaagtgattctagtgcctcagcctcctgagtagctgggataacgggcgtgtgccaccatgcccagctaatttttgtatttttagtatagatggggtttcatcattttgaccaggctggtctcaaactcttgacctcagctgatgcgcctgccttggcctcccaaactgctgagattacagatgtgagccaccgcaccctacctcattttctgtaacaaagctaagcttgaacactgttgatgttcttgagggaagcatattgggctttaggctgtaggtcaagtttatacatcttaattatggtggaattcctatgtagagtctaaaaagccaggtacttggtgctacagtcagtctccctgcagagggttaaggcgcagactacctgcagtgaggaggtactgcttgtagcatatagagcctctccctagctttggttatggaggctttgaggttttgcaaacctgaccaatttaagccataagatctggtcaaagggatacccttcccactaaggacttggtttctcaggaaattatatgtacagtgcttgctggcagttagatgtcaggacagtctaagctgagaaaaccccttctctgcccaccttaacagacctctagggttcttaacccagcaatcaagtttgcctatcctagaggtggcggatttgatcatttggtgtgttgggcaatttttgttttactgtctggttccttctgcgtgaattaccaccaccaccacttgtgcatctcagtcttgtgtgttgtctggttacgtattccctgggtgataccattcaatgtcttaatgtacttgtggctcagacctgagtgcaaggtggaaataaacatcaaacatcttttc

SEQ ID NO: 443049 - DNA, 2255 bp, Homo sapiens
  misc_feature (20)..(20): n is a, c, g, or t
  misc_feature (22)..(22): n is a, c, g, or t
ggggggtaaactacggctangnagcgaggctgggtggtgccgaggaaaaccgtgtactattagccatggtcaaccccaccgtgttcttcgacattgccgtcgacggcgagcccttgggccgcgtctcctttgagctgtttgcagacaaggtcccaaagacagcagaaaattttcgtgctctgagcactggagagaaaggatttggttataagggttcctgctttcacagaattattccagggtttatgtgtcagggtggtgacttcacacgccataatggcactggtggcaagtccatctatggggagaaatttgaagatgagaacttcatcctaaagcatacgggtcctggcatcttgtccatggcaaatgctggacccaacacaaatggttcccagtttttcatctgcactgccaagactgagtggttggatggcaagcatgtggtgtttggcaaagtgaaagaaggcatgaatattgtggaggccatggagcgctttgggtccaggaatggcaagaccagcaagaagatcaccattgctgactgtggacaactcgaataagtttgacttgtgttttatcttaaccaccagatcattccttctgtagctcaggagagcacccctccaccccatttgctcgcagtatcctagaatctttgtgctctcgctgcagttccctttgggttccatgttttccttgttccctcccatgcctagctggattgcagagttaagtttatgattatgaaataaaaactaaataacaattgtcctcgtttgagttaagtgttgatgtaggctttattttaagcagtaatgggttacttctgaaacatcacttgtttgcttaattctacacagtacttagattttttttactttccagtcccaggaagtgtcaatgtttgttgagtggaatattgaaaatgtaggcagcaactgggcatggtggctcactgtctgtaatgtattacctgaggcagaagaccacctgagggtaggagtcaagatcagcctgggcaacatggtgagacgctgtctctacaaaaaataattagcctggcctggtggtgcatgcctagtcctagctgatctggaggctgacgtgggaggattgcttgagcctagagtgagctattatcatgccactgtacagcctgggtgttcacagatcttgtgtctccaaggtaggcagaggcaggaaaagcaaggagccagaattaagaggttgggtcagtctgcagtgagttcatgcatttagaggtgttcttcaagatgactaatgtcaaaaattgagacatctgttgcggttcttttttttttttttttttcccctggaatgcagtggcgtgatctcagctcactgcagcctccgcctcctgggttcaagtgattctagtgcctcagcctcctgagtagctgggataacgggcgtgtgccaccatgcccagctaatttttgtatttttagtatagatggggtttcatcattttgaccaggctggtctcaaactcttgacctcagctgatgcgcctgccttggcctcccaaactgctgagattacagatgtgagccaccgcaccctacctcattttctgtaacaaagctaagcttgaacactgttgatgttcttgagggaagcatattgggctttaggctgtaggtcaagtttatacatcttaattatggtggaattcctatgtagagtctaaaaagccaggtacttggtgctacagtcagtctccctgcagagggttaaggcgcagactacctgcagtgaggaggtactgcttgtagcatatagagcctctccctagctttggttatggaggctttgaggttttgcaaacctgaccaatttaagccataagatctggtcaaagggatacccttcccactaaggacttggtttctcaggaaattatatgtacagtgcttgctggcagttagatgtcaggacagtctaagctgagaaaaccccttctctgcccaccttaacagacctctagggttcttaacccagcaatcaagtttgcctatcctagaggtggcggatttgatcatttggtgtgttgggcaatttttgttttactgtctggttccttctgcgtgaattaccaccaccaccacttgtgcatctcagtcttgtgtgttgtctggttacgtattccctgggtgataccattcaatgtcttaatgtacttgtggctcagacctgagtgcaaggtggaaataaacatcaaacatcttttc

SEQ ID NO: 443050 - DNA, 2261 bp, Homo sapiens
tatcggcttaggttagcgaggcccgcgcggttaatcggccgaggcccgaggaaaaccgtgtactattagccatggtcaaccccaccgtgttcttcgacattgccgtcgacggcgagcccttgggccgcgtctcctttgagctgtttgcagacaaggtcccaaagacagcagaaaattttcgtgctctgagcactggagagaaaggatttggttataagggttcctgctttcacagaattattccagggtttatgtgtcagggtggtgacttcacacgccataatggcactggtggcaagtccatctatggggagaaatttgaagatgagaacttcatcctaaagcatacgggtcctggcatcttgtccatggcaaatgctggacccaacacaaatggttcccagtttttcatctgcactgccaagactgagtggttggatggcaagcatgtggtgtttggcaaagtgaaagaaggcatgaatattgtggaggccatggagcgctttgggtccaggaatggcaagaccagcaagaagatcaccattgctgactgtggacaactcgaataagtttgacttgtgttttatcttaaccaccagatcattccttctgtagctcaggagagcacccctccaccccatttgctcgcagtatcctagaatctttgtgctctcgctgcagttccctttgggttccatgttttccttgttccctcccatgcctagctggattgcagagttaagtttatgattatgaaataaaaactaaataacaattgtcctcgtttgagttaagtgttgatgtaggctttattttaagcagtaatgggttacttctgaaacatcacttgtttgcttaattctacacagtacttagattttttttactttccagtcccaggaagtgtcaatgtttgttgagtggaatattgaaaatgtaggcagcaactgggcatggtggctcactgtctgtaatgtattacctgaggcagaagaccacctgagggtaggagtcaagatcagcctgggcaacatggtgagacgctgtctctacaaaaaataattagcctggcctggtggtgcatgcctagtcctagctgatctggaggctgacgtgggaggattgcttgagcctagagtgagctattatcatgccactgtacagcctgggtgttcacagatcttgtgtctccaaggtaggcagaggcaggaaaagcaaggagccagaattaagaggttgggtcagtctgcagtgagttcatgcatttagaggtgttcttcaagatgactaatgtcaaaaattgagacatctgttgcggttcttttttttttttttttttcccctggaatgcagtggcgtgatctcagctcactgcagcctccgcctcctgggttcaagtgattctagtgcctcagcctcctgagtagctgggataacgggcgtgtgccaccatgcccagctaatttttgtatttttagtatagatggggtttcatcattttgaccaggctggtctcaaactcttgacctcagctgatgcgcctgccttggcctcccaaactgctgagattacagatgtgagccaccgcaccctacctcattttctgtaacaaagctaagcttgaacactgttgatgttcttgagggaagcatattgggctttaggctgtaggtcaagtttatacatcttaattatggtggaattcctatgtagagtctaaaaagccaggtacttggtgctacagtcagtctccctgcagagggttaaggcgcagactacctgcagtgaggaggtactgcttgtagcatatagagcctctccctagctttggttatggaggctttgaggttttgcaaacctgaccaatttaagccataagatctggtcaaagggatacccttcccactaaggacttggtttctcaggaaattatatgtacagtgcttgctggcagttagatgtcaggacagtctaagctgagaaaaccccttctctgcccaccttaacagacctctagggttcttaacccagcaatcaagtttgcctatcctagaggtggcggatttgatcatttggtgtgttgggcaatttttgttttactgtctggttccttctgcgtgaattaccaccaccaccacttgtgcatctcagtcttgtgtgttgtctggttacgtattccctgggtgataccattcaatgtcttaatgtacttgtggctcagacctgagtgcaaggtggaaataaacatcaaacatcttttc

SEQ ID NO: 443051 - DNA, 2495 bp, Homo sapiens
  misc_feature (65)..(65): n is a, c, g, or t
  misc_feature (67)..(67): n is a, c, g, or t
gagagagagagagagagagagagagagagagagagagagagagagagagagagagagagagagananagagagagagagagcccgaggaaaaccgtgtactattagccatggtcaaccccaccgtgttcttcgacattgccgtcgacggcgagcccttgggccgcgtctcctttgagctgtttgcagacaaggtcccaaagacagcagaaaattttcgtgctctgagcactggagagaaaggatttggttataagggttcctgctttcacagaattattccagggtttatgtgtcagggtggtgacttcacacgccataatggcactggtggcaagtccatctatggggagaaatttgaagatgagaacttcatcctaaagcatacgggtcctggcatcttgtccatggcaaatgctggacccaacacaaatggttcccagtttttcatctgcactgccaagactgagtggttggatggcaagcatgtggtgtttggcaaagtgaaagaaggcatgaatattgtggaggccatggagcgctttgggtccaggaatggcaagaccagcaagaagatcaccattgctgactgtggacaactcgaataagtttgacttgtgttttatcttaaccaccagatcattccttctgtagctcaggagagcacccctccaccccatttgctcgcagtatcctagaatctttgtgctctcgctgcagttccctttgggttccatgttttccttgttccctcccatgcctagctggattgcagagttaagtttatgattatgaaataaaaactaaataacaattgtcctcgtttgagttaagtgttgatgtaggctttattttaagcagtaatgggttacttctgaaacatcacttgtttgcttaattctacacagtacttagattttttttactttccagtcccaggaagtgtcaatgtttgttgagtggaatattgaaaatgtaggcagcaactgggcatggtggctcactgtctgtaatgtattacctgaggcagaagaccacctgagggtaggagtcaagatcagcctgggcaacatggtgagacgctgtctctacaaaaaataattagcctggcctggtggtgcatgcctagtcctagctgatctggaggctgacgtgggaggattgcttgagcctagagtgagctattatcatgccactgtacagcctgggtgttcacagatcttgtgtctccaaggtaggcagaggcaggaaaagcaaggagccagaattaagaggttgggtcagtctgcagtgagttcatgcatttagaggtgttcttcaagatgactaatgtcaaaaattgagacatctgttgcggttcttttttttttttttttttcccctggaatgcagtggcgtgatctcagctcactgcagcctccgcctcctgggttcaagtgattctagtgcctcagcctcctgagtagctgggataacgggcgtgtgccaccatgcccagctaatttttgtatttttagtatagatggggtttcatcattttgaccaggctggtctcaaactcttgacctcagctgatgcgcctgccttggcctcccaaactgctgagattacagatgtgagccaccgcaccctacctcattttctgtaacaaagctaagcttgaacactgttgatgttcttgagggaagcatattgggctttaggctgtaggtcaagtttatacatcttaattatggtggaattcctatgtagagtctaaaaagccaggtacttggtgctacagtcagtctccctgcagagggttaaggcgcagactacctgcagtgaggaggtactgcttgtagcatatagagcctctccctagctttggttatggaggctttgaggttttgcaaacctgaccaatttaagccataagatctggtcaaagggatacccttcccactaaggacttggtttctcaggaaattatatgtacagtgcttgctggcagttagatgtcaggacagtctaagctgagaaaaccccttctctgcccaccttaacagacctctagggttcttaacccagcaatcaagtttgcctatcctagaggtggcggatttgatcatttggtgtgttgggcaatttttgttttactgtctggttccttctgcgtgaattaccaccaccaccacttgtgcatctcagtcttgtgtgttgtctggttacgtattccctgggtgataccattcaatgtcttaatgtacttgtggctcagacctgagtgcaaggtggaaataaacatcaaacatcttttcccacacacacacgaaaaaaaaaatttttgcgggccgcccagaaattttaaccctgtttggggccgccctatttatgaactgtccagtcgcaagaaaccgctaaagggggtcccaaaaacgggccggtcgaacccaggttcgctcgtctcagccctcccccgccccgccccgccccacaacacagcaagcccaagaca

SEQ ID NO: 443052 - DNA, 809 bp, Homo sapiens
  misc_feature (65)..(65): n is a, c, g, or t
  misc_feature (67)..(67): n is a, c, g, or t
gagagagagagagagagagagagagagagagagagagagagagagagagagagagagagagagananagagagagagagagcccgaggaaaaccgtgtactattagccatggtcaaccccaccgtgttcttcgacattgccgtcgacggcgagcccttgggccgcgtctcctttgagctgtttgcagacaaggtcccaaagacagcagaaaattttcgtgctctgagcactggagagaaaggatttggttataagggttcctgctttcacagaattattccagggtttatgtgtcagggtggtgacttcacacgccataatggcactggtggcaagtccatctatggggagaaatttgaagatgagaacttcatcctaaagcatacgggtcctggcatcttgtccatggcaaatgctggacccaacacaaatggttcccagtttttcatctgcactgccaagactgagtggttggatggcaagcatgtggtgtttggcaaagtgaaagaaggcatgaatattgtggaggccatggagcgctttgggtccaggaatggcaagaccagcaagaagatcaccattgctgactgtggacaactcgaataagtttgacttgtgttttatcttaaccaccagatcattccttctgtagctcaggagagcacccctccaccccatttgctcgcagtatcctagaatctttgtgctctcgctgcagttccctttgggttccatgttttccttgttccctcccatgcctagctggattgcagagttaagtttatgattatgaaataaaaactaaataa

SEQ ID NO: 443053 - DNA, 1569 bp, Homo sapiens
  misc_feature (65)..(65): n is a, c, g, or t
  misc_feature (67)..(67): n is a, c, g, or t
gagagagagagagagagagagagagagagagagagagagagagagagagagagagagagagagananagagagagagagagcccgaggaaaaccgtgtactattagccatggtcaaccccaccgtgttcttcgacattgccgtcgacggcgagcccttgggccgcgtctcctttgagctgtttgcagacaaggtcccaaagacagcagaaaattttcgtgctctgagcactggagagaaaggatttggttataagggttcctgctttcacagaattattccagggtttatgtgtcagggtggtgacttcacacgccataatggcactggtggcaagtccatctatggggagaaatttgaagatgagaacttcatcctaaagcatacgggtcctggcatcttgtccatggcaaatgctggacccaacacaaatggttcccagtttttcatctgcactgccaagactgagtggttggatggcaagcatgtggtgtttggcaaagtgaaagaaggcatgaatattgtggaggccatggagcgctttgggtccaggaatggcaagaccagcaagaagatcaccattgctgactgtggacaactcgaataagtttgacttgtgttttatcttaaccaccagatcattccttctgtagctcaggagagcacccctccaccccatttgctcgcagtatcctagaatctttgtgctctcgctgcagttccctttgggttccatgttttccttgttccctcccatgcctagctggattgcagagttaagtttatgattatgaaataaaaactaaataacaattgtcctcgtttgagttaagtgttgatgtaggctttattttaagcagtaatgggttacttctgaaacatcacttgtttgcttaattctacacagtacttagattttttttactttccagtcccaggaagtgtcaatgtttgttgagtggaatattgaaaatgtaggcagcaactgggcatggtggctcactgtctgtaatgtattacctgaggcagaagaccacctgagggtaggagtcaagatcagcctgggcaacatggtgagacgctgtctctacaaaaaataattagcctggcctggtggtgcatgcctagtcctagctgatctggaggctgacgtgggaggattgcttgagcctagagtgagctattatcatgccactgtacagcctgggtgttcacagatcttgtgtctccaaggtaggcagaggcaggaaaagcaaggagccagaattaagaggttgggtcagtctgcagtgagttcatgcatttagaggtgttcttcaagatgactaatgtcaaaaattgagacatctgttgcggttcttttttttttcttgttgaaaataaaattaaccccgggaaaaatgaaagagggggtgaataccacagaaaagtgggggccccgccccctgggggtccaagcgaatcatggcacaaaagtccctggaataccgaaaaaacggggttggccccaagcccacgcacactgggaccaccaacgacgggatcacaatgagcaaccggtcaaacaaga

SEQ ID NO: 443054 - DNA, 2037 bp, Homo sapiens
  misc_feature (65)..(65): n is a, c, g, or t
  misc_feature (67)..(67): n is a, c, g, or t
gagagagagagagagagagagagagagagagagagagagagagagagagagagagagagagagananagagagagagagagcccgaggaaaaccgtgtactattagccatggtcaaccccaccgtgttcttcgacattgccgtcgacggcgagcccttgggccgcgtctcctttgagctgtttgcagacaaggtcccaaagacagcagaaaattttcgtgctctgagcactggagagaaaggatttggttataagggttcctgctttcacagaattattccagggtttatgtgtcagggtggtgacttcacacgccataatggcactggtggcaagtccatctatggggagaaatttgaagatgagaacttcatcctaaagcatacgggtcctggcatcttgtccatggcaaatgctggacccaacacaaatggttcccagtttttcatctgcactgccaagactgagtggttggatggcaagcatgtggtgtttggcaaagtgaaagaaggcatgaatattgtggaggccatggagcgctttgggtccaggaatggcaagaccagcaagaagatcaccattgctgactgtggacaactcgaataagtttgacttgtgttttatcttaaccaccagatcattccttctgtagctcaggagagcacccctccaccccatttgctcgcagtatcctagaatctttgtgctctcgctgcagttccctttgggttccatgttttccttgttccctcccatgcctagctggattgcagagttaagtttatgattatgaaataaaaactaaataacaattgtcctcgtttgagttaagtgttgatgtaggctttattttaagcagtaatgggttacttctgaaacatcacttgtttgcttaattctacacagtacttagattttttttactttccagtcccaggaagtgtcaatgtttgttgagtggaatattgaaaatgtaggcagcaactgggcatggtggctcactgtctgtaatgtattacctgaggcagaagaccacctgagggtaggagtcaagatcagcctgggcaacatggtgagacgctgtctctacaaaaaataattagcctggcctggtggtgcatgcctagtcctagctgatctggaggctgacgtgggaggattgcttgagcctagagtgagctattatcatgccactgtacagcctgggtgttcacagatcttgtgtctccaaggtaggcagaggcaggaaaagcaaggagccagaattaagaggttgggtcagtctgcagtgagttcatgcatttagaggtgttcttcaagatgactaatgtcaaaaattgagacatctgttgcggttctttttttttttctccccgggaatgtgcgaggtggcgtgtgactcctcgagcgctcaagcgtggcgagcctctccgcctctcctggggtttcgaggtgttgattctagtgtgccttcgagccctccgtgaagttagcgtgggaataacgggcgtgtgtgcccaccatgtgccacagtgctttaatgtttgtgtggtattttttaggttttataagatgtgggggttccgatctacattttgtgacccagggggtgtggctcctcaaaactgtctgtgtgacctctcaggctgtgatgtgccgcctgtgcctgtgtgcgcctctccgcaaagcggtgctgtgaggatttcacaggatgtgtgtgaggccaccggccaccctcacctgcttttctctggtacagcagaacgctaagcgcttagaaccactggtggagatggtcctggaggggagggcatatcggggcttaaaggcgctggtagggctcaagtgtttgtaccttcctcactttgttgggggggactccctattgtggatgtctaaaagagcccgggtcctgggggcgcaccggccaggtcccctgcagaggggtttagggcggcagctccctgccgggggggagggacgggtgggcatttagaggctttcccagcttggatgggggcttgggttttggacttc

SEQ ID NO: 443055 - DNA, 1235 bp, Homo sapiens
  misc_feature (65)..(65): n is a, c, g, or t
  misc_feature (67)..(67): n is a, c, g, or t
gagagagagagagagagagagagagagagagagagagagagagagagagagagagagagagagananagagagagagagagcccgaggaaaaccgtgtactattagccatggtcaaccccaccgtgttcttcgacattgccgtcgacggcgagcccttgggccgcgtctcctttgagctgtttgcagacaaggtcccaaagacagcagaaaattttcgtgctctgagcactggagagaaaggatttggttataagggttcctgctttcacagaattattccagggtttatgtgtcagggtggtgacttcacacgccataatggcactggtggcaagtccatctatggggagaaatttgaagatgagaacttcatcctaaagcatacgggtcctggcatcttgtccatggcaaatgctggacccaacacaaatggttcccagtttttcatctgcactgccaagactgagtggttggatggcaagcatgtggtgtttggcaaagtgaaagaaggcatgaatattgtggaggccatggagcgctttgggtccaggaatggcaagaccagcaagaagatcaccattgctgactgtggacaactcgaataagtttgacttgtgttttatcttaaccaccagatcattccttctgtagctcaggagagcacccctccaccccatttgctcgcagtatcctagaatctttgtgctctcgctgcagttccctttgggttccatgttttccttgttccctcccatgcctagctggattgcagagttaagtttatgattatgaaataaaaactaaataacaattgtcctcgtttgagttaagtgttgatgtaggctttattttaagcagtaatgggttacttctgaaacatcacttgtttgcttaattctacacagtacttagattttttttactttccagtcccaggaagtgtcaatgtttgttgagtggaatattgaaaatgtaggcagcaactgggcatggtggctcactgtctgtaatgtattacctgaggcaggagaactgcttgaaaccagaaagcacaatgagccaagatcgtgccactgcactccagcctgggagacagaatatgagagactctgtcccaaaaaaaaaaaaggtccggctgtggtgtctcatacctgtaatcccggcacttcgggaggccaaggcctgaggaccttgagccaaggagtttgagaccagcctgggcaatataggggga

SEQ ID NO: 443056 - DNA, 848 bp, Homo sapiens
  misc_feature (65)..(65): n is a, c, g, or t
  misc_feature (67)..(67): n is a, c, g, or t
  misc_feature (828)..(828): n is a, c, g, or t
gagagagagagagagagagagagagagagagagagagagagagagagagagagagagagagagananagagagagagagagcccgaggaaaaccgtgtactattagccatggtcaaccccaccgtgttcttcgacattgccgtcgacggcgagcccttgggccgcgtctcctttgagctgtttgcagacaaggtcccaaagacagcagaaaattttcgtgctctgagcactggagagaaaggatttggttataagggttcctgctttcacagaattattccagggtttatgtgtcagggtggtgacttcacacgccataatggcactggtggcaagtccatctatggggagaaatttgaagatgagaacttcatcctaaagcatacgggtcctggcatcttgtccatggcaaatgctggacccaacacaaatggttcccagtttttcatctgcactgccaagactgagtggttggatggcaagcatgtggtgtttggcaaagtgaaagaaggcatgaatattgtggaggccatggagcgctttgggtccaggaatggcaagaccagcaagaagatcaccattgctgactgtggacaactcgaataagtttgacttgtgttttatcttaaccaccagatcattccttctgtagctcaggagagcacccctccaccccatttgctcgcagtatcctagaatctttgtgctctcgctgcagttccctttgggttccatgttttccttgttccctcccatgcctagctggattgcagagttaagtttatgattatgaaataaaaactaaataacatgtcaaaaaaaaacatnatacatattaaaaaaataaa

SEQ ID NO: 443057 - DNA, 834 bp, Homo sapiens
  misc_feature (65)..(65): n is a, c, g, or t
  misc_feature (67)..(67): n is a, c, g, or t
  misc_feature (823)..(823): n is a, c, g, or t
  misc_feature (828)..(828): n is a, c, g, or t
gagagagagagagagagagagagagagagagagagagagagagagagagagagagagagagagananagagagagagagagcccgaggaaaaccgtgtactattagccatggtcaaccccaccgtgttcttcgacattgccgtcgacggcgagcccttgggccgcgtctcctttgagctgtttgcagacaaggtcccaaagacagcagaaaattttcgtgctctgagcactggagagaaaggatttggttataagggttcctgctttcacagaattattccagggtttatgtgtcagggtggtgacttcacacgccataatggcactggtggcaagtccatctatggggagaaatttgaagatgagaacttcatcctaaagcatacgggtcctggcatcttgtccatggcaaatgctggacccaacacaaatggttcccagtttttcatctgcactgccaagactgagtggttggatggcaagcatgtggtgtttggcaaagtgaaagaaggcatgaatattgtggaggccatggagcgctttgggtccaggaatggcaagaccagcaagaagatcaccattgctgactgtggacaactcgaataagtttgacttgtgttttatcttaaccaccagatcattccttctgtagctcaggagagcacccctccaccccatttgctcgcagtatcctagaatctttgtgctctcgctgcagttccctttgggttccatgttttccttgttccctcccatgcctagctggattgcagagttaagtttatgattatgaaataaaaactaaataaaaaaaaaaaccggnttttngggggg

SEQ ID NO: 443058 - DNA, 925 bp, Homo sapiens
  misc_feature (65)..(65): n is a, c, g, or t
  misc_feature (67)..(67): n is a, c, g, or t
gagagagagagagagagagagagagagagagagagagagagagagagagagagagagagagagananagagagagagagagcccgaggaaaaccgtgtactattagccatggtcaaccccaccgtgttcttcgacattgccgtcgacggcgagcccttgggccgcgtctcctttgagctgtttgcagacaaggtcccaaagacagcagaaaattttcgtgctctgagcactggagagaaaggatttggttataagggttcctgctttcacagaattattccagggtttatgtgtcagggtggtgacttcacacgccataatggcactggtggcaagtccatctatggggagaaatttgaagatgagaacttcatcctaaagcatacgggtcctggcatcttgtccatggcaaatgctggacccaacacaaatggttcccagtttttcatctgcactgccaagactgagtggttggatggcaagcatgtggtgtttggcaaagtgaaagaaggcatgaatattgtggaggccatggagcgctttgggtccaggaatggcaagaccagcaagaagatcaccattgctgactgtggacaactcgaataagtttgacttgtgttttatcttaaccaccagatcattccttctgtagctcaggagagcacccctccaccccatttgctcgcagtatcctagaatctttgtgctctcgctgcagttccctttgggttccatgttttccttgttccctcccatgcctagctggattgcagagttaagtttatgattatgaaataaaaactaaataaaacaaaaaaaacaacaaacacacacaaacactacaaacatacaacacacatcctcactaactacacacacacatacatacactctatatcataataccaacacattataaaataag

SEQ ID NO: 443059 - DNA, 1021 bp, Homo sapiens
  misc_feature (65)..(65): n is a, c, g, or t
  misc_feature (67)..(67): n is a, c, g, or t
gagagagagagagagagagagagagagagagagagagagagagagagagagagagagagagagananagagagagagagagcccgaggaaaaccgtgtactattagccatggtcaaccccaccgtgttcttcgacattgccgtcgacggcgagcccttgggccgcgtctcctttgagctgtttgcagacaaggtcccaaagacagcagaaaattttcgtgctctgagcactggagagaaaggatttggttataagggttcctgctttcacagaattattccagggtttatgtgtcagggtggtgacttcacacgccataatggcactggtggcaagtccatctatggggagaaatttgaagatgagaacttcatcctaaagcatacgggtcctggcatcttgtccatggcaaatgctggacccaacacaaatggttcccagtttttcatctgcactgccaagactgagtggttggatggcaagcatgtggtgtttggcaaagtgaaagaaggcatgaatattgtggaggccatggagcgctttgggtccaggaatggcaagaccagcaagaagatcaccattgctgactgtggacaactcgaataagtttgacttgtgttttatcttaaccaccagatcattccttctgtagctcaggagagcacccctccaccccatttgctcgcagtatcctagaatctttgtgctctcgctgcagttccctttgggttccatgttttccttgttccctcccatgcctagctggattgcagagttaagtttatgattatgaaataaaaactaaataaaaaaaaaaaagaaaaacgtcagagggaaccccttggaggtgtttggacgccgttctgggaaagctcttctgggtctgacccgagaggaatcacccctccctagaagccgcttaccacccgggtaattggagaggacgcctcaaaacttcgatttggtatgcttaaacagaggtatccaaaagcgctaacgggctaaaggtcacctctgatgg

SEQ ID NO: 443060 - DNA, 2201 bp, Homo sapiens
  misc_feature (20)..(20): n is a, c, g, or t
  misc_feature (22)..(22): n is a, c, g, or t
ggggggtaaactacggctangnagcgaggctgggtggtgccgaggaaaaccgtgtactattagccatggtcaaccccaccgtgttcttcgacattgccgtcgacggcgagcccttgggccgcgtctcctttgagctgtttgcagacaaggtcccaaagacagcaggctttcacagaattattccagggtttatgtgtcagggtggtgacttcacacgccataatggcactggtggcaagtccatctatggggagaaatttgaagatgagaacttcatcctaaagcatacgggtcctggcatcttgtccatggcaaatgctggacccaacacaaatggttcccagtttttcatctgcactgccaagactgagtggttggatggcaagcatgtggtgtttggcaaagtgaaagaaggcatgaatattgtggaggccatggagcgctttgggtccaggaatggcaagaccagcaagaagatcaccattgctgactgtggacaactcgaataagtttgacttgtgttttatcttaaccaccagatcattccttctgtagctcaggagagcacccctccaccccatttgctcgcagtatcctagaatctttgtgctctcgctgcagttccctttgggttccatgttttccttgttccctcccatgcctagctggattgcagagttaagtttatgattatgaaataaaaactaaataacaattgtcctcgtttgagttaagtgttgatgtaggctttattttaagcagtaatgggttacttctgaaacatcacttgtttgcttaattctacacagtacttagattttttttactttccagtcccaggaagtgtcaatgtttgttgagtggaatattgaaaatgtaggcagcaactgggcatggtggctcactgtctgtaatgtattacctgaggcagaagaccacctgagggtaggagtcaagatcagcctgggcaacatggtgagacgctgtctctacaaaaaataattagcctggcctggtggtgcatgcctagtcctagctgatctggaggctgacgtgggaggattgcttgagcctagagtgagctattatcatgccactgtacagcctgggtgttcacagatcttgtgtctccaaggtaggcagaggcaggaaaagcaaggagccagaattaagaggttgggtcagtctgcagtgagttcatgcatttagaggtgttcttcaagatgactaatgtcaaaaattgagacatctgttgcggttcttttttttttttttttttcccctggaatgcagtggcgtgatctcagctcactgcagcctccgcctcctgggttcaagtgattctagtgcctcagcctcctgagtagctgggataacgggcgtgtgccaccatgcccagctaatttttgtatttttagtatagatggggtttcatcattttgaccaggctggtctcaaactcttgacctcagctgatgcgcctgccttggcctcccaaactgctgagattacagatgtgagccaccgcaccctacctcattttctgtaacaaagctaagcttgaacactgttgatgttcttgagggaagcatattgggctttaggctgtaggtcaagtttatacatcttaattatggtggaattcctatgtagagtctaaaaagccaggtacttggtgctacagtcagtctccctgcagagggttaaggcgcagactacctgcagtgaggaggtactgcttgtagcatatagagcctctccctagctttggttatggaggctttgaggttttgcaaacctgaccaatttaagccataagatctggtcaaagggatacccttcccactaaggacttggtttctcaggaaattatatgtacagtgcttgctggcagttagatgtcaggacagtctaagctgagaaaaccccttctctgcccaccttaacagacctctagggttcttaacccagcaatcaagtttgcctatcctagaggtggcggatttgatcatttggtgtgttgggcaatttttgttttactgtctggttccttctgcgtgaattaccaccaccaccacttgtgcatctcagtcttgtgtgttgtctggttacgtattccctgggtgataccattcaatgtcttaatgtacttgtggctcagacctgagtgcaaggtggaaataaacatcaaacatcttttc

SEQ ID NO: 443061 - DNA, 2412 bp, Homo sapiens
  misc_feature (20)..(20): n is a, c, g, or t
  misc_feature (22)..(22): n is a, c, g, or t
ggggggtaaactacggctangnagcgaggctgggtggtgccgaggaaaaccgtgtactattagccatggtcaaccccaccgtgttcttcgacattgccgtcgacggcgagcccttgggccgcgtctcctttgaggtaaggggcctggataccaagaagtgactgctcatctaatccataaagctatgttaacagattggaggtagtagcattttcattacaagtgactaaaagaacagctgtttacccctgatcgtgcagcagtgcttgctgttccttagaattttgccttctgtttgcagacaaggtcccaaagacagcagaaaattttcgtgctctgagcactggagagaaaggatttggttataagggttcctgctttcacagaattattccagggtttatgtgtcagggtggtgacttcacacgccataatggcactggtggcaagtccatctatggggagaaatttgaagatgagaacttcatcctaaagcatacgggtcctggcatcttgtccatggcaaatgctggacccaacacaaatggttcccagtttttcatctgcactgccaagactgagtggttggatggcaagcatgtggtgtttggcaaagtgaaagaaggcatgaatattgtggaggccatggagcgctttgggtccaggaatggcaagaccagcaagaagatcaccattgctgactgtggacaactcgaataagtttgacttgtgttttatcttaaccaccagatcattccttctgtagctcaggagagcacccctccaccccatttgctcgcagtatcctagaatctttgtgctctcgctgcagttccctttgggttccatgttttccttgttccctcccatgcctagctggattgcagagttaagtttatgattatgaaataaaaactaaataacaattgtcctcgtttgagttaagtgttgatgtaggctttattttaagcagtaatgggttacttctgaaacatcacttgtttgcttaattctacacagtacttagattttttttactttccagtcccaggaagtgtcaatgtttgttgagtggaatattgaaaatgtaggcagcaactgggcatggtggctcactgtctgtaatgtattacctgaggcagaagaccacctgagggtaggagtcaagatcagcctgggcaacatggtgagacgctgtctctacaaaaaataattagcctggcctggtggtgcatgcctagtcctagctgatctggaggctgacgtgggaggattgcttgagcctagagtgagctattatcatgccactgtacagcctgggtgttcacagatcttgtgtctccaaggtaggcagaggcaggaaaagcaaggagccagaattaagaggttgggtcagtctgcagtgagttcatgcatttagaggtgttcttcaagatgactaatgtcaaaaattgagacatctgttgcggttcttttttttttttttttttcccctggaatgcagtggcgtgatctcagctcactgcagcctccgcctcctgggttcaagtgattctagtgcctcagcctcctgagtagctgggataacgggcgtgtgccaccatgcccagctaatttttgtatttttagtatagatggggtttcatcattttgaccaggctggtctcaaactcttgacctcagctgatgcgcctgccttggcctcccaaactgctgagattacagatgtgagccaccgcaccctacctcattttctgtaacaaagctaagcttgaacactgttgatgttcttgagggaagcatattgggctttaggctgtaggtcaagtttatacatcttaattatggtggaattcctatgtagagtctaaaaagccaggtacttggtgctacagtcagtctccctgcagagggttaaggcgcagactacctgcagtgaggaggtactgcttgtagcatatagagcctctccctagctttggttatggaggctttgaggttttgcaaacctgaccaatttaagccataagatctggtcaaagggatacccttcccactaaggacttggtttctcaggaaattatatgtacagtgcttgctggcagttagatgtcaggacagtctaagctgagaaaaccccttctctgcccaccttaacagacctctagggttcttaacccagcaatcaagtttgcctatcctagaggtggcggatttgatcatttggtgtgttgggcaatttttgttttactgtctggttccttctgcgtgaattaccaccaccaccacttgtgcatctcagtcttgtgtgttgtctggttacgtattccctgggtgataccattcaatgtcttaatgtacttgtggctcagacctgagtgcaaggtggaaataaacatcaaacatcttttc

SEQ ID NO: 443062 - DNA, 2322 bp, Homo sapiens
  misc_feature (20)..(20): n is a, c, g, or t
  misc_feature (22)..(22): n is a, c, g, or t
ggggggtaaactacggctangnagcgaggctgggtggtgccgaggaaaaccgtgtactattagccatggtcaaccccaccgtgttcttcgacattgccgtcgacggcgagcccttgggccgcgtctcctttgaggtaaggggcctggataccaagaagtgactgctcatctaatccataaagctatgttaacagattggagctgtttgcagacaaggtcccaaagacagcagaaaattttcgtgctctgagcactggagagaaaggatttggttataagggttcctgctttcacagaattattccagggtttatgtgtcagggtggtgacttcacacgccataatggcactggtggcaagtccatctatggggagaaatttgaagatgagaacttcatcctaaagcatacgggtcctggcatcttgtccatggcaaatgctggacccaacacaaatggttcccagtttttcatctgcactgccaagactgagtggttggatggcaagcatgtggtgtttggcaaagtgaaagaaggcatgaatattgtggaggccatggagcgctttgggtccaggaatggcaagaccagcaagaagatcaccattgctgactgtggacaactcgaataagtttgacttgtgttttatcttaaccaccagatcattccttctgtagctcaggagagcacccctccaccccatttgctcgcagtatcctagaatctttgtgctctcgctgcagttccctttgggttccatgttttccttgttccctcccatgcctagctggattgcagagttaagtttatgattatgaaataaaaactaaataacaattgtcctcgtttgagttaagtgttgatgtaggctttattttaagcagtaatgggttacttctgaaacatcacttgtttgcttaattctacacagtacttagattttttttactttccagtcccaggaagtgtcaatgtttgttgagtggaatattgaaaatgtaggcagcaactgggcatggtggctcactgtctgtaatgtattacctgaggcagaagaccacctgagggtaggagtcaagatcagcctgggcaacatggtgagacgctgtctctacaaaaaataattagcctggcctggtggtgcatgcctagtcctagctgatctggaggctgacgtgggaggattgcttgagcctagagtgagctattatcatgccactgtacagcctgggtgttcacagatcttgtgtctccaaggtaggcagaggcaggaaaagcaaggagccagaattaagaggttgggtcagtctgcagtgagttcatgcatttagaggtgttcttcaagatgactaatgtcaaaaattgagacatctgttgcggttcttttttttttttttttttcccctggaatgcagtggcgtgatctcagctcactgcagcctccgcctcctgggttcaagtgattctagtgcctcagcctcctgagtagctgggataacgggcgtgtgccaccatgcccagctaatttttgtatttttagtatagatggggtttcatcattttgaccaggctggtctcaaactcttgacctcagctgatgcgcctgccttggcctcccaaactgctgagattacagatgtgagccaccgcaccctacctcattttctgtaacaaagctaagcttgaacactgttgatgttcttgagggaagcatattgggctttaggctgtaggtcaagtttatacatcttaattatggtggaattcctatgtagagtctaaaaagccaggtacttggtgctacagtcagtctccctgcagagggttaaggcgcagactacctgcagtgaggaggtactgcttgtagcatatagagcctctccctagctttggttatggaggctttgaggttttgcaaacctgaccaatttaagccataagatctggtcaaagggatacccttcccactaaggacttggtttctcaggaaattatatgtacagtgcttgctggcagttagatgtcaggacagtctaagctgagaaaaccccttctctgcccaccttaacagacctctagggttcttaacccagcaatcaagtttgcctatcctagaggtggcggatttgatcatttggtgtgttgggcaatttttgttttactgtctggttccttctgcgtgaattaccaccaccaccacttgtgcatctcagtcttgtgtgttgtctggttacgtattccctgggtgataccattcaatgtcttaatgtacttgtggctcagacctgagtgcaaggtggaaataaacatcaaacatcttttc

SEQ ID NO: 443063 - DNA, 3083 bp, Homo sapiens
  misc_feature (20)..(20): n is a, c, g, or t
  misc_feature (22)..(22): n is a, c, g, or t
ggggggtaaactacggctangnagcgaggctgggtggtgccgaggaaaaccgtgtactattagccatggtcaaccccaccgtgttcttcgacattgccgtcgacggcgagcccttgggccgcgtctcctttgaggtcgggcgggcggcggcgtgcgggaatggggcccagaaagtgggccggggtcggggtgggtggtagcgccccaaaggcccgggcgcggggcgaccctgcttgaggggcgagcgcgggcgggctgcggcgccatttcctgacgaggggccattttgggaggtccgcgagtcgcggggaggaggccgggacggcggcggacaaaggcaggcggggcggctgcgaggccgttgggggagggggcccgcgtccgcccgcccgcctcatgtggccgcgccctgtcctgtccgacgcacgtgctcggcggccgcgctcaggtccgcgccttgagagtcgttgggctccgccctagcttggcctgggcgccgcagaccggagccagaagcacgctcgcgggggcttgcgaccgccttcctgggaagctgtcccctggcaggcatgggtgctttacatcctgagctgggaagctgtttgcttgagggtttttctcaaggatcgaggcgcggtgtgagcccgtccatgctcggtcctgtagatcccgggaggccatgttataaaaggagacttgctgggatgtgacgggttgccacttgaaatatcttccatttggataaagtaggaatatttatacatgtgccccaaacgtccctccgtgtcccccacccccaagcggaaatgtgaaaatgggccttgcctttgctggtgcccaaggaccgccttccactgcagtgacggcgctggcgggggaggcgctcttgagcccctcccgattgtccctctgcctagcaagcaagttgcgactggccacaaggcaggcctcttccgaccaagctgtttgcagacaaggtcccaaagacagcagaaaattttcgtgctctgagcactggagagaaaggatttggttataagggttcctgctttcacagaattattccagggtttatgtgtcagggtggtgacttcacacgccataatggcactggtggcaagtccatctatggggagaaatttgaagatgagaacttcatcctaaagcatacgggtcctggcatcttgtccatggcaaatgctggacccaacacaaatggttcccagtttttcatctgcactgccaagactgagtggttggatggcaagcatgtggtgtttggcaaagtgaaagaaggcatgaatattgtggaggccatggagcgctttgggtccaggaatggcaagaccagcaagaagatcaccattgctgactgtggacaactcgaataagtttgacttgtgttttatcttaaccaccagatcattccttctgtagctcaggagagcacccctccaccccatttgctcgcagtatcctagaatctttgtgctctcgctgcagttccctttgggttccatgttttccttgttccctcccatgcctagctggattgcagagttaagtttatgattatgaaataaaaactaaataacaattgtcctcgtttgagttaagtgttgatgtaggctttattttaagcagtaatgggttacttctgaaacatcacttgtttgcttaattctacacagtacttagattttttttactttccagtcccaggaagtgtcaatgtttgttgagtggaatattgaaaatgtaggcagcaactgggcatggtggctcactgtctgtaatgtattacctgaggcagaagaccacctgagggtaggagtcaagatcagcctgggcaacatggtgagacgctgtctctacaaaaaataattagcctggcctggtggtgcatgcctagtcctagctgatctggaggctgacgtgggaggattgcttgagcctagagtgagctattatcatgccactgtacagcctgggtgttcacagatcttgtgtctccaaggtaggcagaggcaggaaaagcaaggagccagaattaagaggttgggtcagtctgcagtgagttcatgcatttagaggtgttcttcaagatgactaatgtcaaaaattgagacatctgttgcggttcttttttttttttttttttcccctggaatgcagtggcgtgatctcagctcactgcagcctccgcctcctgggttcaagtgattctagtgcctcagcctcctgagtagctgggataacgggcgtgtgccaccatgcccagctaatttttgtatttttagtatagatggggtttcatcattttgaccaggctggtctcaaactcttgacctcagctgatgcgcctgccttggcctcccaaactgctgagattacagatgtgagccaccgcaccctacctcattttctgtaacaaagctaagcttgaacactgttgatgttcttgagggaagcatattgggctttaggctgtaggtcaagtttatacatcttaattatggtggaattcctatgtagagtctaaaaagccaggtacttggtgctacagtcagtctccctgcagagggttaaggcgcagactacctgcagtgaggaggtactgcttgtagcatatagagcctctccctagctttggttatggaggctttgaggttttgcaaacctgaccaatttaagccataagatctggtcaaagggatacccttcccactaaggacttggtttctcaggaaattatatgtacagtgcttgctggcagttagatgtcaggacagtctaagctgagaaaaccccttctctgcccaccttaacagacctctagggttcttaacccagcaatcaagtttgcctatcctagaggtggcggatttgatcatttggtgtgttgggcaatttttgttttactgtctggttccttctgcgtgaattaccaccaccaccacttgtgcatctcagtcttgtgtgttgtctggttacgtattccctgggtgataccattcaatgtcttaatgtacttgtggctcagacctgagtgcaaggtggaaataaacatcaaacatcttttc

SEQ ID NO: 443064 - DNA, 2434 bp, Homo sapiens
  misc_feature (20)..(20): n is a, c, g, or t
  misc_feature (22)..(22): n is a, c, g, or t
ggggggtaaactacggctangnagcgaggctgggtggtgccgaggaaaaccgtgtactattagccatggtcaaccccaccgtgttcttcgacattgccgtcgacggcgagcccttgggccgcgtctcctttgaggtaaggggcctggataccaagaagtgactgctcatctaatccataaagctatgttaacagattggaggtagtagcattttcattacaagtgactaaaagaacagctgtttacccctgatcgtgcagcagtgcttgctgttccttagaattttgccttctgtttgcagacaaggtcccaaagacagcaggtgtttaatttttttttaaacaaaaattttcgtgctctgagcactggagagaaaggatttggttataagggttcctgctttcacagaattattccagggtttatgtgtcagggtggtgacttcacacgccataatggcactggtggcaagtccatctatggggagaaatttgaagatgagaacttcatcctaaagcatacgggtcctggcatcttgtccatggcaaatgctggacccaacacaaatggttcccagtttttcatctgcactgccaagactgagtggttggatggcaagcatgtggtgtttggcaaagtgaaagaaggcatgaatattgtggaggccatggagcgctttgggtccaggaatggcaagaccagcaagaagatcaccattgctgactgtggacaactcgaataagtttgacttgtgttttatcttaaccaccagatcattccttctgtagctcaggagagcacccctccaccccatttgctcgcagtatcctagaatctttgtgctctcgctgcagttccctttgggttccatgttttccttgttccctcccatgcctagctggattgcagagttaagtttatgattatgaaataaaaactaaataacaattgtcctcgtttgagttaagtgttgatgtaggctttattttaagcagtaatgggttacttctgaaacatcacttgtttgcttaattctacacagtacttagattttttttactttccagtcccaggaagtgtcaatgtttgttgagtggaatattgaaaatgtaggcagcaactgggcatggtggctcactgtctgtaatgtattacctgaggcagaagaccacctgagggtaggagtcaagatcagcctgggcaacatggtgagacgctgtctctacaaaaaataattagcctggcctggtggtgcatgcctagtcctagctgatctggaggctgacgtgggaggattgcttgagcctagagtgagctattatcatgccactgtacagcctgggtgttcacagatcttgtgtctccaaggtaggcagaggcaggaaaagcaaggagccagaattaagaggttgggtcagtctgcagtgagttcatgcatttagaggtgttcttcaagatgactaatgtcaaaaattgagacatctgttgcggttcttttttttttttttttttcccctggaatgcagtggcgtgatctcagctcactgcagcctccgcctcctgggttcaagtgattctagtgcctcagcctcctgagtagctgggataacgggcgtgtgccaccatgcccagctaatttttgtatttttagtatagatggggtttcatcattttgaccaggctggtctcaaactcttgacctcagctgatgcgcctgccttggcctcccaaactgctgagattacagatgtgagccaccgcaccctacctcattttctgtaacaaagctaagcttgaacactgttgatgttcttgagggaagcatattgggctttaggctgtaggtcaagtttatacatcttaattatggtggaattcctatgtagagtctaaaaagccaggtacttggtgctacagtcagtctccctgcagagggttaaggcgcagactacctgcagtgaggaggtactgcttgtagcatatagagcctctccctagctttggttatggaggctttgaggttttgcaaacctgaccaatttaagccataagatctggtcaaagggatacccttcccactaaggacttggtttctcaggaaattatatgtacagtgcttgctggcagttagatgtcaggacagtctaagctgagaaaaccccttctctgcccaccttaacagacctctagggttcttaacccagcaatcaagtttgcctatcctagaggtggcggatttgatcatttggtgtgttgggcaatttttgttttactgtctggttccttctgcgtgaattaccaccaccaccacttgtgcatctcagtcttgtgtgttgtctggttacgtattccctgggtgataccattcaatgtcttaatgtacttgtggctcagacctgagtgcaaggtggaaataaacatcaaacatcttttc

SEQ ID NO: 443065 - DNA, 3122 bp, Homo sapiens
  misc_feature (3)..(3): n is a, c, g, or t
  misc_feature (22)..(23): n is a, c, g, or t
aanagggtatcaacgcagagtnnccattacggccgggggttttccgaggaaaaccgtgtactattagccatggtcaaccccaccgtgttcttcgacattgccgtcgacggcgagcccttgggccgcgtctcctttgagctgtttgcagacaaggtcccaaagacagcagaaaattttcgtgctctgagcactggagagaaaggatttggttataagggttcctgctttcacagaattattccagggtttatgtgtcagggtggtgacttcacacgccataatggcactggtggcaagtccatctatggggagaaatttgaagatgagaacttcatcctaaagcatacgggtcctggcatcttgtccatggcaaatgctggacccaacacaaatggttcccagtttttcatctgcactgccaagactgagtgactggatctcgctcttatctcccaggttggagtgcagtggtgccatctcagctcactgcaacctcctcccgggttcaagcaattcttctgcctcagcctctcaagtagctggaactacaggcatgcaccaccactcccagctaaattgtgtattattagtagagcgggatttaccatgttgtccaggctggtctcgaactcctgggctcaagtgatctgcctgccttgacccccccaaagtgctgggattacaggcatgagccactgtgcccacccaattaagtgctgcttttatgttactattaataacatgcggttggttgggttttttgtttctttggggtttttgttttgttttgtttgtttttgggggaggggggcgcaattcattctatatgtgtaactcttttttgagatggagtttcgctctgtcgcccaggctggagtgcagtggcgcgatctcggctcactgcaagctccgcctcccaggttcacgccattctcctgcctcagcctcccgagtagctgggactataggcacacgccaccatgcccggctaattttttgtatttttagtagagacagggtttcaccgtgttagccaggatggtctcgatctcctgacctcgtgatccgcccgccttggcctcccaaagtgctgggattacaggcgtgagccaccgcacccggcctatatgtgtaactctttaatggtaattggagaatcatgtttaatgacatttagtacaaaaggcttcagttaaaaaaaaaaaaaaaagctacctttctcgtcttggttcatgacacatggaggctgcttgtttgtggttgccagtcatagtgattgttcttccttttcaaggttggatggcaagcatgtggtgtttggcaaagtgaaagaaggcatgaatattgtggaggccatggagcgctttgggtccaggaatggcaagaccagcaagaagatcaccattgctgactgtggacaactcgaataagtttgacttgtgttttatcttaaccaccagatcattccttctgtagctcaggagagcacccctccaccccatttgctcgcagtatcctagaatctttgtgctctcgctgcagttccctttgggttccatgttttccttgttccctcccatgcctagctggattgcagagttaagtttatgattatgaaataaaaactaaataacaattgtcctcgtttgagttaagtgttgatgtaggctttattttaagcagtaatgggttacttctgaaacatcacttgtttgcttaattctacacagtacttagattttttttactttccagtcccaggaagtgtcaatgtttgttgagtggaatattgaaaatgtaggcagcaactgggcatggtggctcactgtctgtaatgtattacctgaggcagaagaccacctgagggtaggagtcaagatcagcctgggcaacatggtgagacgctgtctctacaaaaaataattagcctggcctggtggtgcatgcctagtcctagctgatctggaggctgacgtgggaggattgcttgagcctagagtgagctattatcatgccactgtacagcctgggtgttcacagatcttgtgtctccaaggtaggcagaggcaggaaaagcaaggagccagaattaagaggttgggtcagtctgcagtgagttcatgcatttagaggtgttcttcaagatgactaatgtcaaaaattgagacatctgttgcggttcttttttttttttttttttcccctggaatgcagtggcgtgatctcagctcactgcagcctccgcctcctgggttcaagtgattctagtgcctcagcctcctgagtagctgggataacgggcgtgtgccaccatgcccagctaatttttgtatttttagtatagatggggtttcatcattttgaccaggctggtctcaaactcttgacctcagctgatgcgcctgccttggcctcccaaactgctgagattacagatgtgagccaccgcaccctacctcattttctgtaacaaagctaagcttgaacactgttgatgttcttgagggaagcatattgggctttaggctgtaggtcaagtttatacatcttaattatggtggaattcctatgtagagtctaaaaagccaggtacttggtgctacagtcagtctccctgcagagggttaaggcgcagactacctgcagtgaggaggtactgcttgtagcatatagagcctctccctagctttggttatggaggctttgaggttttgcaaacctgaccaatttaagccataagatctggtcaaagggatacccttcccactaaggacttggtttctcaggaaattatatgtacagtgcttgctggcagttagatgtcaggacagtctaagctgagaaaaccccttctctgcccaccttaacagacctctagggttcttaacccagcaatcaagtttgcctatcctagaggtggcggatttgatcatttggtgtgttgggcaatttttgttttactgtctggttccttctgcgtgaattaccaccaccaccacttgtgcatctcagtcttgtgtgttgtctggttacgtattccctgggtgataccattcaatgtcttaatgtacttgtggctcagacctgagtgcaaggtggaaataaacatcaaacatcttttc

SEQ ID NO: 443066 - DNA, 2239 bp, Homo sapiens
  misc_feature (65)..(65): n is a, c, g, or t
  misc_feature (67)..(67): n is a, c, g, or t
gagagagagagagagagagagagagagagagagagagagagagagagagagagagagagagagananagagagagagagagcccgaggaaaaccgtgtactattagccatggtcaaccccaccgtgttcttcgacattgccgtcgacggcgagcccttgggccgcgtctcctttgagctgtttgcagacaaggtcccaaagacagcagaaaattttcgtgctctgagcactggagagaaaggatttggttataagggttcctgctttcacagaattattccagggtttatgtgtcagggtggtgacttcacacgccataatggcactggtggcaagtccatctatggggagaaatttgaagatgagaacttcatcctaaagcatacgggtcctggcatcttgtccatggcaaatgctggacccaacacaaatggttcccagtttttcatctgcactgccaagactgagtggttggatggcaagcatgtggtgtttggcaaagtgaaagaaggcatgaatattgtggaggccatggagcgctttgggtccaggaatggcaagacatcttaaccaccagatcattccttctgtagctcaggagagcacccctccaccccatttgctcgcagtatcctagaatctttgtgctctcgctgcagttccctttgggttccatgttttccttgttccctcccatgcctagctggattgcagagttaagtttatgattatgaaataaaaactaaataacaattgtcctcgtttgagttaagtgttgatgtaggctttattttaagcagtaatgggttacttctgaaacatcacttgtttgcttaattctacacagtacttagattttttttactttccagtcccaggaagtgtcaatgtttgttgagtggaatattgaaaatgtaggcagcaactgggcatggtggctcactgtctgtaatgtattacctgaggcagaagaccacctgagggtaggagtcaagatcagcctgggcaacatggtgagacgctgtctctacaaaaaataattagcctggcctggtggtgcatgcctagtcctagctgatctggaggctgacgtgggaggattgcttgagcctagagtgagctattatcatgccactgtacagcctgggtgttcacagatcttgtgtctccaaggtaggcagaggcaggaaaagcaaggagccagaattaagaggttgggtcagtctgcagtgagttcatgcatttagaggtgttcttcaagatgactaatgtcaaaaattgagacatctgttgcggttcttttttttttttttttttcccctggaatgcagtggcgtgatctcagctcactgcagcctccgcctcctgggttcaagtgattctagtgcctcagcctcctgagtagctgggataacgggcgtgtgccaccatgcccagctaatttttgtatttttagtatagatggggtttcatcattttgaccaggctggtctcaaactcttgacctcagctgatgcgcctgccttggcctcccaaactgctgagattacagatgtgagccaccgcaccctacctcattttctgtaacaaagctaagcttgaacactgttgatgttcttgagggaagcatattgggctttaggctgtaggtcaagtttatacatcttaattatggtggaattcctatgtagagtctaaaaagccaggtacttggtgctacagtcagtctccctgcagagggttaaggcgcagactacctgcagtgaggaggtactgcttgtagcatatagagcctctccctagctttggttatggaggctttgaggttttgcaaacctgaccaatttaagccataagatctggtcaaagggatacccttcccactaaggacttggtttctcaggaaattatatgtacagtgcttgctggcagttagatgtcaggacagtctaagctgagaaaaccccttctctgcccaccttaacagacctctagggttcttaacccagcaatcaagtttgcctatcctagaggtggcggatttgatcatttggtgtgttgggcaatttttgttttactgtctggttccttctgcgtgaattaccaccaccaccacttgtgcatctcagtcttgtgtgttgtctggttacgtattccctgggtgataccattcaatgtcttaatgtacttgtggctcagacctgagtgcaaggtggaaataaacatcaaacatcttttc

SEQ ID NO: 443067 - DNA, 1993 bp, Homo sapiens
  misc_feature (20)..(20): n is a, c, g, or t
  misc_feature (22)..(22): n is a, c, g, or t
ggggggtaaactacggctangnagcgaggctgggtggtgccgaggaaaaccgtgtactattagccatggtcaaccccaccgtgttcttcgacattgccgtcgacggcgagcccttgggccgcgtctcctttgagctgtttgcagacaaggtcccaaagacagcaggttggatggcaagcatgtggtgtttggcaaagtgaaagaaggcatgaatattgtggaggccatggagcgctttgggtccaggaatggcaagaccagcaagaagatcaccattgctgactgtggacaactcgaataagtttgacttgtgttttatcttaaccaccagatcattccttctgtagctcaggagagcacccctccaccccatttgctcgcagtatcctagaatctttgtgctctcgctgcagttccctttgggttccatgttttccttgttccctcccatgcctagctggattgcagagttaagtttatgattatgaaataaaaactaaataacaattgtcctcgtttgagttaagtgttgatgtaggctttattttaagcagtaatgggttacttctgaaacatcacttgtttgcttaattctacacagtacttagattttttttactttccagtcccaggaagtgtcaatgtttgttgagtggaatattgaaaatgtaggcagcaactgggcatggtggctcactgtctgtaatgtattacctgaggcagaagaccacctgagggtaggagtcaagatcagcctgggcaacatggtgagacgctgtctctacaaaaaataattagcctggcctggtggtgcatgcctagtcctagctgatctggaggctgacgtgggaggattgcttgagcctagagtgagctattatcatgccactgtacagcctgggtgttcacagatcttgtgtctccaaggtaggcagaggcaggaaaagcaaggagccagaattaagaggttgggtcagtctgcagtgagttcatgcatttagaggtgttcttcaagatgactaatgtcaaaaattgagacatctgttgcggttcttttttttttttttttttcccctggaatgcagtggcgtgatctcagctcactgcagcctccgcctcctgggttcaagtgattctagtgcctcagcctcctgagtagctgggataacgggcgtgtgccaccatgcccagctaatttttgtatttttagtatagatggggtttcatcattttgaccaggctggtctcaaactcttgacctcagctgatgcgcctgccttggcctcccaaactgctgagattacagatgtgagccaccgcaccctacctcattttctgtaacaaagctaagcttgaacactgttgatgttcttgagggaagcatattgggctttaggctgtaggtcaagtttatacatcttaattatggtggaattcctatgtagagtctaaaaagccaggtacttggtgctacagtcagtctccctgcagagggttaaggcgcagactacctgcagtgaggaggtactgcttgtagcatatagagcctctccctagctttggttatggaggctttgaggttttgcaaacctgaccaatttaagccataagatctggtcaaagggatacccttcccactaaggacttggtttctcaggaaattatatgtacagtgcttgctggcagttagatgtcaggacagtctaagctgagaaaaccccttctctgcccaccttaacagacctctagggttcttaacccagcaatcaagtttgcctatcctagaggtggcggatttgatcatttggtgtgttgggcaatttttgttttactgtctggttccttctgcgtgaattaccaccaccaccacttgtgcatctcagtcttgtgtgttgtctggttacgtattccctgggtgataccattcaatgtcttaatgtacttgtggctcagacctgagtgcaaggtggaaataaacatcaaacatcttttc

SEQ ID NO: 443068 - DNA, 923 bp, Homo sapiens
  misc_feature (20)..(20): n is a, c, g, or t
  misc_feature (22)..(22): n is a, c, g, or t
ggggggtaaactacggctangnagcgaggctgggtggtgccgaggaaaaccgtgtactattagccatggtcaaccccaccgtgttcttcgacattgccgtcgacggcgagcccttgggccgcgtctcctttgaggtaaggggcctggataccaagaagtgactgctcatctaatccataaagctatgttaacagattggaggtagtagcattttcattacaagtgactaaaagaacagctgtttacccctgatcgtgcagcagtgcttgctgttccttagaattttgccttctgtttgcagacaaggtcccaaagacagcagaaaattttcgtgctctgagcactggagagaaaggatttggttataagggttcctgctttcacagaattattccagggtttatgtgtcagggtggtgacttcacacgccataatggcactggtggcaagtccatctatggggagaaatttgaagatgagaacttcatcctaaagcatacgggtcctggcatcttgtccatggcaaatgctggacccaacacaaatggttcccagtttttcatctgcactgccaagactgagtggttggatggcaagcatgtggtgtttggcaaagtgaaagaaggcatgaatattgtggaggccatggagcgctttgggtccaggaatggcaagaccagcaagaagatcaccattgctgactgtggacaactcgaataagtttgacttgtgttttatcttaaccaccagatcattccttctgtagctcaggagagcacccctccaccccatttgctcgcagtatcctagaatctttgtgctctcgctgcagttccctttgggttccatgttttccttgttccctcccatgcctagctggattgcagagttaagtttatgattatgaaataaaaactaaataa

SEQ ID NO: 443069 - DNA, 1065 bp, Homo sapiens
  misc_feature (20)..(20): n is a, c, g, or t
  misc_feature (22)..(22): n is a, c, g, or t
ggggggtaaactacggctangnagcgaggctgggtggtgccgaggaaaaccgtgtactattagccatggtcaaccccaccgtgttcttcgacattgccgtcgacggcgagcccttgggccgcgtctcctttgaggtaaggggcctggataccaagaagtgactgctcatctaatccataaagctatgttaacagattggaggtagtagcattttcattacaagtgactaaaagaacagctgtttacccctgatcgtgcagcagtgcttgctgttccttagaattttgccttctgtttgcagacaaggtcccaaagacagcagaaaattttcgtgctctgagcactggagagaaaggatttggttataagggttcctgctttcacagaattattccagggtttatgtgtcagggtggtgacttcacacgccataatggcactggtggcaagtccatctatggggagaaatttgaagatgagaacttcatcctaaagcatacgggtcctggcatcttgtccatggcaaatgctggacccaacacaaatggttcccagtttttcatctgcactgccaagactgagtggttggatggcaagcatgtggtgtttggcaaagtgaaagaaggcatgaatattgtggaggccatggagcgctttgggtccaggaatggcaagaccagcaagaagatcaccattgctgactgtggacaactcgaataagtttgacttgtgttttatcttaaccaccagatcattccttctgtagctcaggagagcacccctccaccccatttgctcgcagtatcctagaatctttgtgctctcgctgcagttccctttgggttccatgttttccttgttccctcccatgcctagctggattgcagagttaagtttatgattatgaaataaaaactaaataattacatgtcaacaaaaaagggggcggcaaatatcctgaggccatttcctaccgttttgtaaaggccaaaggcgtaaaaagacggcgtaacggggaaagctggtctggaccctgtggagaaccaaagcggaaatttttacctg

SEQ ID NO: 443070 - DNA, 938 bp, Homo sapiens
  misc_feature (20)..(20): n is a, c, g, or t
  misc_feature (22)..(22): n is a, c, g, or t
  misc_feature (927)..(927): n is a, c, g, or t
  misc_feature (932)..(932): n is a, c, g, or t
ggggggtaaactacggctangnagcgaggctgggtggtgccgaggaaaaccgtgtactattagccatggtcaaccccaccgtgttcttcgacattgccgtcgacggcgagcccttgggccgcgtctcctttgaggtaaggggcctggataccaagaagtgactgctcatctaatccataaagctatgttaacagattggaggtagtagcattttcattacaagtgactaaaagaacagctgtttacccctgatcgtgcagcagtgcttgctgttccttagaattttgccttctgtttgcagacaaggtcccaaagacagcagaaaattttcgtgctctgagcactggagagaaaggatttggttataagggttcctgctttcacagaattattccagggtttatgtgtcagggtggtgacttcacacgccataatggcactggtggcaagtccatctatggggagaaatttgaagatgagaacttcatcctaaagcatacgggtcctggcatcttgtccatggcaaatgctggacccaacacaaatggttcccagtttttcatctgcactgccaagactgagtggttggatggcaagcatgtggtgtttggcaaagtgaaagaaggcatgaatattgtggaggccatggagcgctttgggtccaggaatggcaagaccagcaagaagatcaccattgctgactgtggacaactcgaataagtttgacttgtgttttatcttaaccaccagatcattccttctgtagctcaggagagcacccctccaccccatttgctcgcagtatcctagaatctttgtgctctcgctgcagttccctttgggttccatgttttccttgttccctcccatgcctagtgatgggagttattttgatttgaataaataattcaaaaaaaaaaaaccggnttttngggggg

SEQ ID NO: 443071 - DNA, 1633 bp, Homo sapiens
  misc_feature (3)..(3): n is a, c, g, or t
  misc_feature (22)..(23): n is a, c, g, or t
aanagggtatcaacgcagagtnnccattacggccgggggttttccgaggaaaaccgtgtactattagccatggtcaaccccaccgtgttcttcgacattgccgtcgacggcgagcccttgggccgcgtctcctttgagctgtttgcagacaaggtcccaaagacagcagaaaattttcgtgctctgagcactggagagaaaggatttggttataagggttcctgctttcacagaattattccagggtttatgtgtcagggtggtgacttcacacgccataatggcactggtggcaagtccatctatggggagaaatttgaagatgagaacttcatcctaaagcatacgggtcctggcatcttgtccatggcaaatgctggacccaacacaaatggttcccagtttttcatctgcactgccaagactgagtgactggatctcgctcttatctcccaggttggagtgcagtggtgccatctcagctcactgcaacctcctcccgggttcaagcaattcttctgcctcagcctctcaagtagctggaactacaggcatgcaccaccactcccagctaaattgtgtattattagtagagcgggatttaccatgttgtccaggctggtctcgaactcctgggctcaagtgatctgcctgccttgacccccccaaagtgctgggattacaggcatgagccactgtgcccacccaattaagtgctgcttttatgttactattaataacatgcggttggttgggttttttgtttctttggggtttttgttttgttttgtttgtttttgggggaggggggcgcaattcattctatatgtgtaactcttttttgagatggagtttcgctctgtcgcccaggctggagtgcagtggcgcgatctcggctcactgcaagctccgcctcccaggttcacgccattctcctgcctcagcctcccgagtagctgggactataggcacacgccaccatgcccggctaattttttgtatttttagtagagacagggtttcaccgtgttagccaggatggtctcgatctcctgacctcgtgatccgcccgccttggcctcccaaagtgctgggattacaggcgtgagccaccgcacccggcctatatgtgtaactctttaatggtaattggagaatcatgtttaatgacatttagtacaaaaggcttcagttaaaaaaaaaaaaaaaagctacctttctcgtcttggttcatgacacatggaggctgcttgtttgtggttgccagtcatagtgattgttcttccttttcaaggttggatggcaagcatgtggtgtttggcaaagtgaaagaaggcatgaatattgtggaggccatggagcgctttgggtccaggaatggcaagaccagcaagaagatcaccattgctgactgtggacaactcgaataagtttgacttgtgttttatcttaaccaccagatcattccttctgtagctcaggagagcacccctccaccccatttgctcgcagtatcctagaatctttgtgctctcgctgcagttccctttgggttccatgttttccttgttccctcccatgcctagctggattgcagagttaagtttatgattatgaaataaaaactaaataa

SEQ ID NO: 443072 - DNA, 1043 bp, Homo sapiens
  misc_feature (20)..(20): n is a, c, g, or t
  misc_feature (22)..(22): n is a, c, g, or t
ggggggtaaactacggctangnagcgaggctgggtggtgccgaggaaaaccgtgtactattagccatggtcaaccccaccgtgttcttcgacattgccgtcgacggcgagcccttgggccgcgtctcctttgaggtaaggggcctggataccaagaagtgactgctcatctaatccataaagctatgttaacagattggaggtagtagcattttcattacaagtgactaaaagaacagctgtttacccctgatcgtgcagcagtgcttgctgttccttagaattttgccttctgtttgcagacaaggtcccaaagacagcagaaaattttcgtgctctgagcactggagagaaaggatttggttataagggttcctgctttcacagaattattccagggtttatgtgtcagggtggtgacttcacacgccataatggcactggtggcaagtccatctatggggagaaatttgaagatgagaacttcatcctaaagcatacgggtcctggcatcttgtccatggcaaatgctggacccaacacaaatggttcccagtttttcatctgcactgccaagactgagtgactggatctcgctcttatctcccaggttggagtgcagtggtgccatctcagctcactgcaacctcctcccgggttcaagcaattcttctgcctcagcctctcaagtagctggaactacaggttggatggcaagcatgtggtgtttggcaaagtgaaagaaggcatgaatattgtggaggccatggagcgctttgggtccaggaatggcaagaccagcaagaagatcaccattgctgactgtggacaactcgaataagtttgacttgtgttttatcttaaccaccagatcattccttctgtagctcaggagagcacccctccaccccatttgctcgcagtatcctagaatctttgtgctctcgctgcagttccctttgggttccatgttttccttgttccctcccatgcctagctggattgcagagttaagtttatgattatgaaataaaaactaaataa

SEQ ID NO: 443073 - DNA, 504 bp, Homo sapiens
  misc_feature (20)..(20): n is a, c, g, or t
  misc_feature (22)..(22): n is a, c, g, or t
ggggggtaaactacggctangnagcgaggctgggtggtgccgaggaaaaccgtgtactattagccatggtcaaccccaccgtgttcttcgacattgccgtcgacggcgagcccttgggccgcgtctcctttgagctgtttgcagacaaggtcccaaagacagcaggttggatggcaagcatgtggtgtttggcaaagtgaaagaaggcatgaatattgtggaggccatggagcgctttgggtccaggaatggcaagaccagcaagaagatcaccattgctgactgtggacaactcgaataagtttgacttgtgttttatcttaaccaccagatcattccttctgtagctcaggagagcacccctccaccccatttgctcgcagtatcctagaatctttgtgctctcgctgcagttccctttgggttccatgttttccttgttccctcccatgcctagctggattgcagagttaagtttatgattatgaaataaaaactaaataa

SEQ ID NO: 443074 - DNA, 1851 bp, Homo sapiens
  misc_feature (20)..(20): n is a, c, g, or t
  misc_feature (22)..(22): n is a, c, g, or t
ggggggtaaactacggctangnagcgaggctgggtggtgccgaggaaaaccgtgtactattagccatggtcaaccccaccgtgttcttcgacattgccgtcgacggcgagcccttgggccgcgtctcctttgaggtcgggcgggcggcggcgtgcgggaatggggcccagaaagtgggccggggtcggggtgggtggtagcgccccaaaggcccgggcgcggggcgaccctgcttgaggggcgagcgcgggcgggctgcggcgccatttcctgacgaggggccattttgggaggtccgcgagtcgcggggaggaggccgggacggcggcggacaaaggcaggcggggcggctgcgaggccgttgggggagggggcccgcgtccgcccgcccgcctcatgtggccgcgccctgtcctgtccgacgcacgtgctcggcggccgcgctcaggtccgcgccttgagagtcgttgggctccgccctagcttggcctgggcgccgcagaccggagccagaagcacgctcgcgggggcttgcgaccgccttcctgggaagctgtcccctggcaggcatgggtgctttacatcctgagctgggaagctgtttgcttgagggtttttctcaaggatcgaggcgcggtgtgagcccgtccatgctcggtcctgtagatcccgggaggccatgttataaaaggagacttgctgggatgtgacgggttgccacttgaaatatcttccatttggataaagtaggaatatttatacatgtgccccaaacgtccctccgtgtcccccacccccaagcggaaatgtgaaaatgggccttgcctttgctggtgcccaaggaccgccttccactgcagtgacggcgctggcgggggaggcgctcttgagcccctcccgattgtccctctgcctagcaagcaagttgcgactggccacaaggcaggcctcttccgaccaaggtggattaccagtgattacctaattagttttgagagcgttaaatgagttcttaaagatcagttgtaattatagcatagtatctaaacttggcgcgtgtcttcaaagttaaatattgagtacgattccgttccagttaacatggatagaccttagggagtagcgaaataggatgttagtggttttattcctttaaatcacatctcaaaaggccaccaatggctagtttgggatcttattccgaaaatagattgatcctcatgcagtcttcgtgaggacagagcgatttccttgttgcctaccctgtccatagtgcctggcacataggcactgaaacactgcatgttaatccacaccccaccccacctatgagtgtagtcaaagctggtaagtgacaagggctttcgtggaaacttggcctgacctaatgttgggcatcaggttacccaaagagcttcagggaaatgagaaaggacttgcaggtcttgatgagaatggaggggtaactgccaatgagggctttggctttagcgaaagtctgaaagggaagccataggaacttaaacgtaccgactataaagctctgagaaaagctgatgttttagaaagaccatacattctaggtacaaatacctaaaaactaaaaaataagtacgttggccaggcgggcggatcacgaagtcaggagattgagaccgtcctggccaacatggtgaaaccccacctctattaaaaatacaaaaattagctgggcgtggtggcgcttgcctgtaatctcagctactctagaggctgaggcaggagaatcgcttgaaccccggaggcggaggctgcagtgagccgagatcgtgccactgcactccagcctggtgacagtgagactcttgtctc

SEQ ID NO: 443075 - DNA, 999 bp, Homo sapiens
  misc_feature (65)..(65): n is a, c, g, or t
  misc_feature (67)..(67): n is a, c, g, or t
  misc_feature (601)..(601): n is a, c, g, or t
gagagagagagagagagagagagagagagagagagagagagagagagagagagagagagagagananagagagagagagagcccgaggaaaaccgtgtactattagccatggtcaaccccaccgtgttcttcgacattgccgtcgacggcgagcccttgggccgcgtctcctttgagctgtttgcagacaaggtcccaaagacagcagaaaattttcgtgctctgagcactggagagaaaggatttggttataagggttcctgctttcacagaattattccagggtttatgtgtcagggtggtgactatcacacgccataaatggccactgggtggcaagtccaatctatggggggagaaaatttcggaaagaattgaagaaactttcaattccttaaaaggccattaaccggggttccttgggccattcttgtgtcccattggggcaaattggcttgggaaaccacaaaaccaaattggtttccacagtttattcactctggcacttgccaaagaactggacgtcggttggagatggcgcacagcattgtaggtggtattgggcaacaggtgcaacagcaagcgcatggaactatgtgtngcgagcgaccattgtgacgcgctatatgggttaccacggaaattggcaaggacgcagacaatgaaagattcaccgatttgcttgacttgtgagacgaagctacgaattaagtttctgacatatgtgtcaactatctgtaaaccaaccagaatcgattgcctatctgttagtctacaggcaagagcgaccaccttcgcagcacacatgttggctacgcaaggtatctcatcagagatacttttgtaggctactcgactagcaagttatcacctatatgaggttccaatgtatttgcactatgattccactaccacatagccttagccttgggattggcaggagtttctaagtcttatagatgtatgacaatgaaaaaactagattaaccaacagaaaaa

SEQ ID NO: 443076 - DNA, 811 bp, Homo sapiens
ttttcattacaagtgactaaaagaacagctgtttacccctgatcgtgcagcagtgcttgctgttccttagaattttgccttgtaagttctagctcaagttggggggtggtgatagacatttaagaagccatatatcttttcagaagtaggtgtgatgtactaaaagtttgagacactttctagaagtctcactatttaagttatgactagtattggatttttggcatgtctttgggtttcatgtttcttaacccaactgcctgcagggccttatggctgtcaggagcagttcttgggaattaaagtaattactgaagaagtattctagtgagaaaatgaatttatgactcagaagcccctaaagacatgggtactaagcaacaaaataagcagatgttaattaactgtaattttctcttacagctgtttgcagacaaggtcccaaagacagcaggttggtccattttctaagtttaacaaagatgttccaattgtgacagtttgtgtgtgtgtgtgtatatatatatttttatgtatgtatatatgtgtttaatttttttttaaacaaaaattttcgtgctctgagcactggagagaaaggatttggttataagggttcctgctttcacagaattattccagggtttatgtgtcaggtacgaaatttactgaattttattttatttgggttgctcccttcatttgggattgagccagaatatttcaggatacacatatctgaactgttactctaccatttcggttctatttaacccttctattcagtttgaacttgggtttaaagtttgaa

SEQ ID NO: 443077 - DNA, 619 bp, Homo sapiens
ctcctctctctcttgtctccctctctctcttttgctctgccactactgacgtgctcggcctggcaagcgttggatggcaagcatgtggtgtttggcaaagtgaaagaaggcatgaatattgtggaggccatggagcgctttgggtccaggaatggcaagaccagcaagaagatcaccattgctgactgtggacaactcgaataagtttgacttgtgttttatcttaaccaccagatcattccttctgtagctcaggagagcacccctccaccccatttgctcgcagtatcctagaatctttgtgctctcgctgcagttccctttgggttccatgttttccttgttccctcccatgcctagctggattgcagagttaagtttatgattatgaaataaaaactaaataaaaaaaaaaaagaaaaacgtcagagggaaccccttggaggtgtttggacgccgttctgggaaagctcttctgggtctgacccgagaggaatcacccctccctagaagccgcttaccacccgggtaattggagaggacgcctcaaaacttcgatttggtatgcttaaacagaggtatccaaaagcgctaacgggctaaaggtcacctctgatgg

SEQ ID NO: 443078 - DNA, 547 bp, Homo sapiens
gaacgtggtataaaaggggcgggaggcaggctcgtgcccgttttgcagacgccaccgccgaggaaaaccgtgtactattagccatggtcaaccccaccgtgttcttcgacattgccgtcgacggcgagcccttgggccgcgtctcctttgagctgtttgcagacaaggtcccaaagacagcagaaaattttcgtgctctgagcactggagagaaaggatttggttataagggttcctgctttcacagaattattccagggtttatgtgtcagggtggtgacttcacacgccataatggcactggtggcaagtccatctatggggactgaagatgaacgaagaggatgatgaggacgaggatgacgacgacgacgacagatcacgaagacgaccgcatgacgcacgaatgactgaaggacggacggcacgaagcaggcacgcacgaagagaccgacaaccgaacgcacccgcacacccgcccgccccgcgccactggcacccaacaaacgcactcacgacagccacaaccaagtggaaggcacaaaac

SEQ ID NO: 443079 - DNA, 815 bp, Homo sapiens
  misc_feature (807)..(807): n is a, c, g, or t
gaacgtggtataaaaggggcgggaggcaggctcgtgcccgttttgcagacgccaccgccgaggaaaaccgtgtactattagccatggtcaaccccaccgtgttcttcgacattgccgtcgacggcgagcccttgggccgcgtctcctttgagctgtttgcagacaaggtcccaaagacagcagaaaattttcgtgctctgagcactggagagaaaggatttggttataagggttcctgctttcacagaattattccagggtttatgtgtcagggtggtgacttcacacgccataatggcactggtggcaagtccatctatggggagaaatttgaagatgagaacttcatcctaaagcatacgggtcctggcatcttgtccatggcaaatgctggacccaacacaaatggttcccagtttttcatctgcactgccaagactgagtggttggatggcaagcatgtggtgtttggcaaagtgaaagaaggcatgaatattgtggaggccatggagcgctttgggtccaggaatggcaagaccagcaagaagatcaccattgctgactgtggacaactcgaataagtttgacttgtgttttatcttaaccaccagatcattccttctgtagctcaggagagcacccctccaccccatttgctcgcagtatcctagaatctttgtgctctcgctgcagttccctttgggttccatgttttccttgttccctcccatgcctagctggattgcagagttaagtttatgattatgaaataaaaactaaataatgtcaaaaaagaaaaaaaatctncagcgctg

SEQ ID NO: 443080 - DNA, 2379 bp, Homo sapiens
  misc_feature (3)..(3): n is a, c, g, or t
  misc_feature (22)..(23): n is a, c, g, or t
aanagggtatcaacgcagagtnnccattacggccgggggttttccgaggaaaaccgtgtactattagccatggtcaaccccaccgtgttcttcgacattgccgtcgacggcgagcccttgggccgcgtctcctttgagctgtttgcagacaaggtcccaaagacagcagaaaattttcgtgctctgagcactggagagaaaggatttggttataagggttcctgctttcacagaattattccagggtttatgtgtcagggtggtgacttcacacgccataatggcactggtggcaagtccatctatggggagaaatttgaagatgagaacttcatcctaaagcatacgggtcctggcatcttgtccatggcaaatgctggacccaacacaaatggttcccagtttttcatctgcactgccaagactgagtgactggatctcgctcttatctcccaggttggagtgcagtggtgccatctcagctcactgcaacctcctcccgggttcaagcaattcttctgcctcagcctctcaagtagctggaactacaggttggatggcaagcatgtggtgtttggcaaagtgaaagaaggcatgaatattgtggaggccatggagcgctttgggtccaggaatggcaagaccagcaagaagatcaccattgctgactgtggacaactcgaataagtttgacttgtgttttatcttaaccaccagatcattccttctgtagctcaggagagcacccctccaccccatttgctcgcagtatcctagaatctttgtgctctcgctgcagttccctttgggttccatgttttccttgttccctcccatgcctagctggattgcagagttaagtttatgattatgaaataaaaactaaataacaattgtcctcgtttgagttaagtgttgatgtaggctttattttaagcagtaatgggttacttctgaaacatcacttgtttgcttaattctacacagtacttagattttttttactttccagtcccaggaagtgtcaatgtttgttgagtggaatattgaaaatgtaggcagcaactgggcatggtggctcactgtctgtaatgtattacctgaggcagaagaccacctgagggtaggagtcaagatcagcctgggcaacatggtgagacgctgtctctacaaaaaataattagcctggcctggtggtgcatgcctagtcctagctgatctggaggctgacgtgggaggattgcttgagcctagagtgagctattatcatgccactgtacagcctgggtgttcacagatcttgtgtctccaaggtaggcagaggcaggaaaagcaaggagccagaattaagaggttgggtcagtctgcagtgagttcatgcatttagaggtgttcttcaagatgactaatgtcaaaaattgagacatctgttgcggttcttttttttttttttttttcccctggaatgcagtggcgtgatctcagctcactgcagcctccgcctcctgggttcaagtgattctagtgcctcagcctcctgagtagctgggataacgggcgtgtgccaccatgcccagctaatttttgtatttttagtatagatggggtttcatcattttgaccaggctggtctcaaactcttgacctcagctgatgcgcctgccttggcctcccaaactgctgagattacagatgtgagccaccgcaccctacctcattttctgtaacaaagctaagcttgaacactgttgatgttcttgagggaagcatattgggctttaggctgtaggtcaagtttatacatcttaattatggtggaattcctatgtagagtctaaaaagccaggtacttggtgctacagtcagtctccctgcagagggttaaggcgcagactacctgcagtgaggaggtactgcttgtagcatatagagcctctccctagctttggttatggaggctttgaggttttgcaaacctgaccaatttaagccataagatctggtcaaagggatacccttcccactaaggacttggtttctcaggaaattatatgtacagtgcttgctggcagttagatgtcaggacagtctaagctgagaaaaccccttctctgcccaccttaacagacctctagggttcttaacccagcaatcaagtttgcctatcctagaggtggcggatttgatcatttggtgtgttgggcaatttttgttttactgtctggttccttctgcgtgaattaccaccaccaccacttgtgcatctcagtcttgtgtgttgtctggttacgtattccctgggtgataccattcaatgtcttaatgtacttgtggctcagacctgagtgcaaggtggaaataaacatcaaacatcttttc

SEQ ID NO: 443081 - DNA, 2177 bp, Homo sapiens
  misc_feature (3)..(3): n is a, c, g, or t
  misc_feature (22)..(23): n is a, c, g, or t
aanagggtatcaacgcagagtnnccattacggccgggggttttccgaggaaaaccgtgtactattagccatggtcaaccccaccgtgttcttcgacattgccgtcgacggcgagcccttgggccgcgtctcctttgagctgtttgcagacaaggtcccaaagacagcagaaaattttcgtgctctgagcactggagagaaaggatttggttataagggttcctgctttcacagaattattccagggtttatgtgtcagggtggtgacttcacacgccataatggcactggtggcaagtccatctatggggagaaatttgaagatgagaacttcatcctaaagcatacgggtcctggcatcttgtccatggcaaatgctggacccaacacaaatggttcccagtttttcatctgcactgccaagactgagtgactggatctcgctcttatctcccaggttggagtgcagtggtgccatctcagctcactgcaacctcctcccgggttcaagcaattcttctgcctcagcctctcaagtagctggaactacaggcatgcaccaccactcccagctaaattgtgtattattagtagagcgggatttaccatgttgtccaggctggtctcgaactcctgggctcaagtgatctgcctgccttgacccccccaaagtgctgggattacaggcatgagccactgtgcccacccaattaagtgctgcttttatgttactattaataacatgcggttggttgggttttttgtttctttggggtttttgttttgttttgtttgtttttgggggaggggggcgcaattcattctatatgtgtaactcttttttgagatggagtttcgctctgtcgcccaggctggagtgcagtggcgcgatctcggctcactgcaagctccgcctcccaggttcacgccattctcctgcctcagcctcccgagtagctgggactataggcacacgccaccatgcccggctaattttttgtatttttagtagagacagggtttcaccgtgttagccaggatggtctcgatctcctgacctcgtgatccgcccgccttggcctcccaaagtgctgggattacaggcgtgagccaccgcacccggcctatatgtgtaactctttaatggtaattggagaatcatgtttaatgacatttagtacaaaaggcttcagttaaaaaaaaaaaaaaaagctacctttctcgtcttggttcatgacacatggaggctgcttgtttgtggttgccagtcatagtgattgttcttccttttcaaggttggatggcaagcatgtggtgtttggcaaagtgaaagaaggcatgaatattgtggaggccatggagcgctttgggtccaggaatggcaagaccagcaagaagatcaccattgctgactgtggacaactcgaataagtttgacttgtgttttatcttaaccaccagatcattccttctgtagctcaggagagcacccctccaccccatttgctcgcagtatcctagaatctttgtgctctcgctgcagttccctttgggttccatgttttccttgttccctcccatgcctagctggattgcagagttaagtttatgattatgaaataaaaactaaataaaaaaaaaaaaaaaaaaaaaacaaaaaaaacaaaaaaaccaacaatacaaaaacatagaaagaacaatacaaatagtacataaacaaactacaaaatagaattcacaacaaaaacaaacaaaagccatcgaaaaaatacactaataacgaataaccacatacaaacataaaataaaaaatatagaggcgcccacaatttatctctaactatctacagcccaagcacaatcacaccacccacatatttctttatatcgaccacactcctatcagatatatttattctcatccaggccgcccctacatccgcagggaggagagaaccactcctcgtcgttgttgcaggactcctttctgtgggtcgatacgccggcccccatgctgcactgtacgtgatgcaacatgtgtgtgcggataacccgattgtagctgaggcgctcgatgattaaatatgacggaagagcgagggggcgtaggtgactgagctcggctgcggggacgacgggcagaggagcgacgagtaggagagagagaggcagtggagt

SEQ ID NO: 443082 - DNA, 919 bp, Homo sapiens
gcctgggtggatagaagggggacaaggaggcacacccaggccggcaaagagcagctcagtgagtactgggtatgtgtcacattgccaaatcccggatcacaagtctccatgaactgctggtgagctaggataataaaacccctgacatcaccattccagaagcttcacaagactgcatatataaggggctggctgtagctgcagctgaaggagctgaccagccagctgacccctcacactcacctagccaccatggacatcgccatccaccacccctggatccgccgccccttctttcctttccactcccccagccgcctctttgaccagttcttcggagagcacctgttggagtctgatcttttcccgacgtctacttccctgagtcccttctaccttcggccaccctccttcctgcgggcacccagctggtttgacactggactctcagagatgcgcctggagaaggacaggttctctgtcaacctggatgtgaagcacttctccccagaggaactcaaagttaaggtgttgggagatgtgattgaggtgcatggaaaacatgaagagcgccaggatgaacatggtttcatctccagggagttccacaggaaataccggatcccagctgatgtagaccctctcaccattacttcatccctgtcatctgatggggtcctcactgtgaatggaccaaggaaacaggtctctggccctgagcgcaccattcccatcacccgtgaagagaagcctgctgtcaccgcagcccccaagaaatagatgccctttcttgaattgcattttttaaaacaagaaagtttccccaccagtgaatgaaagtcttgtgactagtgctgaagcttattaatgctaagggcaggcccaaattatcaagctaataaaatatcattcagcaaca

SEQ ID NO: 443083 - DNA, 764 bp, Homo sapiens
agagaggcagcagatgccaggcttgcacccatccttgcgactggtcccctgggtgatctgtcttcttctctgtccctgtaaataaagtttgggtctgatcaccatgagccttaggtatcactgtggtggctccctgaagcagacagctatgtttatttaaaaaggagattttttaagcagagaagagaaggatgaattacccggacagaaagcagctctgcagaataagacagcacctgtgtaatcagtatttttgccctctttctcccatcccattcccttaccttgctatttctagatgcgcctggagaaggacaggttctctgtcaacctggatgtgaagcacttctccccagaggaactcaaagttaaggtgttgggagatgtgattgaggtgcatggaaaacatgaagagcgccaggatgaacatggtttcatctccagggagttccacaggaaataccggatcccagctgatgtagaccctctcaccattacttcatccctgtcatctgatggggtcctcactgtgaatggaccaaggaaacaggtctctggccctgagcgcaccattcccatcacccgtgaagagaagcctgctgtcaccgcagcccccaagaaatagatgccctttcttgaattgcattttttaaaacaagaaagtttccccaccagtgaatgaaagtcttgtgactagtgctgaagcttattaatgctaagggcaggcccaaattatcaagctaataaaatatcattcagcaaca

SEQ ID NO: 443084 - DNA, 1168 bp, Homo sapiens
tgagttgtgacttctcttttagctgtgcaagaatccgtgtctcttctttagcccatcttaatgctgaactacttggtttgtctaaatttcagagctgtgctcagtctttaatcccctacagcccatgtggtaatcagttaacgagagcctgtttggctacatgcttgagagtcagcaggcatacgggttaaggtcatctactctttgggggagttctgacaaatggaacagcttgttatgactttataagagggctttaaaattgcttctcaccatttaacgatagctcagaacctgtgcgtcaaccagtacagtttgtcctcagtaatgtcctcaggctgtttcaattttgcttatatgatttaggtttgggtcatagtctccttggatggagtcatttttttttttttttaatttcagcagcagtcctattgttctggaaccttctgggacattcctgaagagtcaggacaatttcagggcttcctcagggactcagattctaaatgagattccaaattctgtaggcccagccaacattgatctaaacctttgggaaatacccctaaacatatctatgcctcagggtttgaaaaacaatgaagtgttggactgtttcagacttctcagattctcactggtaggagtgactacctaggcaatttcatcttagctgcaaccctgaaacgaagctctatttatttttcctatgttgtcatggcatttggtctcacctaaggggaaatcaggatgcctgagttctgggcaggtgataatagttcctgttcttatctctctgcctctttcctcattcttttgggttaggatgaacatggtttcatctccagggagttccacaggaaataccggatcccagctgatgtagaccctctcaccattacttcatccctgtcatctgatggggtcctcactgtgaatggaccaaggaaacaggtctctggccctgagcgcaccattcccatcacccgtgaagagaagcctgctgtcaccgcagcccccaagaaatagatgccctttcttgaattgcattttttaaaacaagaaagtttccccaccagtgaatgaaagtcttgtgactagtgctgaagcttattaatgctaagggcaggcccaaattatcaagctaataaaatatcattcagcaaca

SEQ ID NO: 443085 - DNA, 983 bp, Homo sapiens
tgagttgtgacttctcttttagctgtgcaagaatccgtgtctcttctttagcccatcttaatgctgaactacttggtttgtctaaatttcagagctgtgctcagtctttaatcccctacagcccatgtggtaatcagttaacgagagcctgtttggctacatgcttgagagtcagcaggcatacgggttaaggtcatctactctttgggggagttctgacaaatggaacagcttgttatgactttataagagggctttaaaattgcttctcaccatttaacgatagctcagaacctgtgcgtcaaccagtacagtttgtcctcagtaatgtcctcaggctgtttcaattttgcttatatgatttaggtttgggtcatagtctccttggatggagtcatttttttttttttttaatttcagcagcagtcctattgttctggaaccttctgggacattcctgaagagtcaggacaatttcagggcttcctcagggactcagattctaaatgagattccaaattctgtaggcccagccaacattgatctaaacctttgggaaatacccctaaacatatctatgcctcagggtttgaaaaacaatgaagtgttggactgtttcagacttctcagattctcactggatgaacatggtttcatctccagggagttccacaggaaataccggatcccagctgatgtagaccctctcaccattacttcatccctgtcatctgatggggtcctcactgtgaatggaccaaggaaacaggtctctggccctgagcgcaccattcccatcacccgtgaagagaagcctgctgtcaccgcagcccccaagaaatagatgccctttcttgaattgcattttttaaaacaagaaagtttccccaccagtgaatgaaagtcttgtgactagtgctgaagcttattaatgctaagggcaggcccaaattatcaagctaataaaatatcattcagcaaca

SEQ ID NO: 443086 - DNA, 823 bp, Homo sapiens
agagaggcagcagatgccaggcttgcacccatccttgcgactggtcccctgggtgatctgtcttcttctctgtccctgtaaataaagtttgggtctgatcaccatgagccttaggtatcactgtggtggctccctgaagcagacagctatgtttatttaaaaaggagattttttaagcagagaagagaaggatgaattacccggacagaaagcagctctgcagaataagacagcacctgtgtaatcagtatttttgccctctttctcccatcccattcccttaccttgctatttctagatgcgcctggagaaggacaggttctctgtcaacctggatgtgaagcacttctccccagaggaactcaaagttaaggtgttgggagatgtgattgaggtgcatggaaaacatgaagagcgccaggatgaacatggtttcatctccagggagttccacaggaaataccggatcccagctgatgtagaccctctcaccattacttcatccctgtcatctgatggggtcctcactgtgaatggaccaaggaaacaggtctctggccctgagcgcaccattcccatcacccgtgaagagaagcctgctgtcaccgcagcccccaagaaatagatgccctttcttgaattgcattttttaaaacaagaaagtttccccaccagtgaatgaaagtcttgtgactagtgctgaagcttattaatgctaagggcaggcccaaattatcaagctaataaaatatcattcagcaacaaaaactgtcttgtgtttgaatattccacacacttttaaataaatatacagataccacag

SEQ ID NO: 443087 - DNA, 499 bp, Homo sapiens
agatagaatcgagctggtaccccccgactagcccgacaggtgctctcttgacagttcttcggagagcacctgttggagtctgatcttttcccgacgtctacttccctgagtcccttctaccttcggccaccctccttcctgcgggcacccagctggtttgacactggactctcagagatgcgcctggagaaggacaggttctctgtcaacctggatgtgaagcacttctccccagaggaactcaaagttaaggtgttgggagatgtgattgaggtgcatggaaaacatgaagagcgccaggatgaacatggtttcatctccagggagttccacaggaaataccggatcccagctgatgtagaccctctcaccattacttcatccctgtcatctgatgggggtgcgagatgtgaaagagtcagaggagaagggttgctggctcggagcgggccgttgttataaaccgtgagagaaagggctgttgtcgggctagtcgggg

SEQ ID NO: 443088 - DNA, 591 bp, Homo sapiens
agagaggcagcagatgccaggcttgcacccatccttgcgactggtcccctgggtgatctgtcttcttctctgtccctgtaaataaagtttgggtctgatcaccatgagccttaggtatcactgtggtggctccctgaagcagacagctatgtttatttaaaaaggagattttttaagcagagaagagaaggatgaattacccggacagaaagcagctctgcagaataagacagcacctgtgtaatcagtatttttgccctctttctcccatcccattcccttaccttgctatttctagatgcgcctggagaaggacaggttctctgtcaacctggatgtgaagcacttctccccagaggaactcaaagttaaggtgttgggagatgtgattgaggtgcatggaaaacatgaagagcgccaggtatgtagcttgtttttttgttttctgctcattcattcagtgcatactgtaatagtccaggtagtgctatcagctttggaggctggctacattccagtcccaagccataacagtcgggatcaggggttacaaatcaatgtctagaagactaagttaggatagacatattg

SEQ ID NO: 443089 - DNA, 217 bp, Homo sapiens
tgccttacgacggctaaaagtatggtttgtcagataactagaaagaaaagcctcagagtggaactctggccagtataaaagtctacgaatgaattgcattttttaaaacaagaaagtttccccaccagtgaatgaaagtcttgtgactagtgctgaagcttattaatgctaagggcaggcccaaattatcaagctaataaaatatcattcagcaaca

SEQ ID NO: 443090 - DNA, 953 bp, Homo sapiens
gcctgggtggatagaagggggacaaggaggcacacccaggccggcaaagagcaggtatcagcactgcaagcaccaagtgtgtcttgagctcagtgagtactgggtatgtgtcacattgccaaatcccggatcacaagtctccatgaactgctggtgagctaggataataaaacccctgacatcaccattccagaagcttcacaagactgcatatataaggggctggctgtagctgcagctgaaggagctgaccagccagctgacccctcacactcacctagccaccatggacatcgccatccaccacccctggatccgccgccccttctttcctttccactcccccagccgcctctttgaccagttcttcggagagcacctgttggagtctgatcttttcccgacgtctacttccctgagtcccttctaccttcggccaccctccttcctgcgggcacccagctggtttgacactggactctcagagatgcgcctggagaaggacaggttctctgtcaacctggatgtgaagcacttctccccagaggaactcaaagttaaggtgttgggagatgtgattgaggtgcatggaaaacatgaagagcgccaggatgaacatggtttcatctccagggagttccacaggaaataccggatcccagctgatgtagaccctctcaccattacttcatccctgtcatctgatggggtcctcactgtgaatggaccaaggaaacaggtctctggccctgagcgcaccattcccatcacccgtgaagagaagcctgctgtcaccgcagcccccaagaaatagatgccctttcttgaattgcattttttaaaacaagaaagtttccccaccagtgaatgaaagtcttgtgactagtgctgaagcttattaatgctaagggcaggcccaaattatcaagctaataaaatatcattcagcaaca

SEQ ID NO: 443091 - DNA, 899 bp, Homo sapiens
gcctgggtggatagaagggggacaaggaggcacacccaggccggcaaagagcaggtatcagcactgcaagcaccaagtgtgtcttgagctcagtgagtactgggtatgtgtcacattgccaaatcccggatcacaagtctccatgaactgctggtgagctaggataatctggctgtagctgcagctgaaggagctgaccagccagctgacccctcacactcacctagccaccatggacatcgccatccaccacccctggatccgccgccccttctttcctttccactcccccagccgcctctttgaccagttcttcggagagcacctgttggagtctgatcttttcccgacgtctacttccctgagtcccttctaccttcggccaccctccttcctgcgggcacccagctggtttgacactggactctcagagatgcgcctggagaaggacaggttctctgtcaacctggatgtgaagcacttctccccagaggaactcaaagttaaggtgttgggagatgtgattgaggtgcatggaaaacatgaagagcgccaggatgaacatggtttcatctccagggagttccacaggaaataccggatcccagctgatgtagaccctctcaccattacttcatccctgtcatctgatggggtcctcactgtgaatggaccaaggaaacaggtctctggccctgagcgcaccattcccatcacccgtgaagagaagcctgctgtcaccgcagcccccaagaaatagatgccctttcttgaattgcattttttaaaacaagaaagtttccccaccagtgaatgaaagtcttgtgactagtgctgaagcttattaatgctaagggcaggcccaaattatcaagctaataaaatatcattcagcaaca

SEQ ID NO: 443092 - DNA, 1678 bp, Homo sapiens
gcctgggtggatagaagggggacaaggaggcacacccaggccggcaaagagcaggtatcagcactgcaagcaccaagtgtgtcttgagctcagtgagtactgggtatgtgtcacattgccaaatcccggatcacaagtctccatgaactgctggtgagctaggataataaaacccctgacatcaccattccagaagcttcacaagactgcatatataaggggctggctgtagctgcagctgaaggagctgaccagccagctgacccctcacactcacctagccaccatggacatcgccatccaccacccctggatccgccgccccttctttcctttccactcccccagccgcctctttgaccagttcttcggagagcacctgttggagtctgatcttttcccgacgtctacttccctgagtcccttctaccttcggccaccctccttcctgcgggcacccagctggtttgacactggactctcagagatgcgcctggagaaggacaggttctctgtcaacctggatgtgaagcacttctccccagaggaactcaaagttaaggtgttgggagatgtgattgaggtgcatggaaaacatgaagagcgccaggatgaacatggtttcatctccagggagttccacaggaaataccggatcccagctgatgtagaccctctcaccattacttcatccctgtcatctgatggggtcctcactgtgaatggaccaaggaaacaggtctctggccctgagcgcaccattcccatcacccgtgaagagaagcctgctgtcaccgcagcccccaagaaatagatgccctttcttgaattgcattttttaaaacaagaaagtttccccaccagtgaatgaaagtcttgtgactagtgctgaagcttattaatgctaagggcaggcccaaattatcaagctaataaaatatcattcagcaacaaaaaaaaaaaaaaaaaaaaaaaaaaaaaaaaaaaaaaaaaaaaaaaggggggggggggggggcgagaaaaatttaaaaaaaatggtgggggggggcgggaggcggcggaccgcgtgtagggtaactagacaacatggggcccaacacacggccgtccccagaggaaaacacccgcggaacaagaagatgaggccgggtggtggttttccccccaacaataaaaaaaacgccgcggggggcgagcaacccgaggggcttctttgggaaacaaccaaccgaaggggcgtcgacaggaggaacagacgactggccttcaaaacaggaggcgacccacacagagaacgccggcatttaacaatgacgcccacccgcacggggggagagaaaatgagcaaaacacaaaagaaaagacaaacaagcaaccaaggcagcgaggtgaaagtcgaagcataatttataaaaacaagaagcgagtatgagaagatacgcaaacagcaaaaaaccaaggaagacatcacgaacagcagttaacgatatacggatcagatcaagatccggaacgcgaaatgcgagaagaatactcactacggtaggagtataaagaacgtagatagtcagagagagaataatacgacaaataaaaagaagacaacaaaaacgataaataaagaatacataagaagagaagcggagaagaaaagaaagaaacagcatcgcattttatg

SEQ ID NO: 443093 - DNA, 1092 bp, Homo sapiens
  misc_feature (977)..(977): n is a, c, g, or t
  misc_feature (1008)..(1008): n is a, c, g, or t
  misc_feature (1033)..(1033): n is a, c, g, or t
  misc_feature (1060)..(1060): n is a, c, g, or t
gcctgggtggatagaagggggacaaggaggcacacccaggccggcaaagagcaggtatcagcactgcaagcaccaagtgtgtcttgagctcagtgagtactgggtatgtgtcacattgccaaatcccggatcacaagtctccatgaactgctggtgagctaggataataaaacccctgacatcaccattccagaagcttcacaagactgcatatataaggggctggctgtagctgcagctgaaggagctgaccagccagctgacccctcacactcacctagccaccatggacatcgccatccaccacccctggatccgccgccccttctttcctttccactcccccagccgcctctttgaccagttcttcggagagcacctgttggagtctgatcttttcccgacgtctacttccctgagtcccttctaccttcggccaccctccttcctgcgggcacccagctggtttgacactggactctcagagatgcgcctggagaaggacaggttctctgtcaacctggatgtgaagcacttctccccagaggaactcaaagttaaggtgttgggagatgtgattgaggtgcatggaaaacatgaagagcgccaggatgaacatggtttcatctccagggagttccacaggaaataccggatcccagctgatgtagaccctctcaccattacttcatccctgtcatctgatggggtcctcactgtgaatggaccaaggaaacaggtctctggccctgagcgcaccattcccatcacccgtgaagagaagcctgctgtcaccgcagcccccaagaaatagatgccctttcttgaattgcattttttaaaacaagaaagtttccccaccagtgaatgaaagtcttgtgactagtgctgaagcttattaatgctaagggcaggcccaaattatcaagctaataaaatatcattcagcaacaaaaaaaaaaaaaaaaaaaactcgngactagttctctctctcctcgtgccgaattnggcagggccaggactcagaggggancccaccatggtgctgtcttctgccganaagaccaacgtcaaggccgcctggggtaaggt

SEQ ID NO: 443094 - DNA, 712 bp, Homo sapiens
taatctgttctcacgaatctcagattgatgattcttcaatcaatcttctaaggtgagatcacagaacttcataaaatggatcccttctttcctttccactcccccagccgcctctttgaccagttcttcggagagcacctgttggagtctgatcttttcccgacgtctacttccctgagtcccttctaccttcggccaccctccttcctgcgggcacccagctggtttgacactggactctcagagatgcgcctggagaaggacaggttctctgtcaacctggatgtgaagcacttctccccagaggaactcaaagttaaggtgttgggagatgtgattgaggtgcatggaaaacatgaagagcgccaggatgaacatggtttcatctccagggagttccacaggaaataccggatcccagctgatgtagaccctctcaccattacttcatccctgtcatctgatggggtcctcactgtgaatggaccaaggaaacaggtctctggccctgagcgcaccattcccatcacccgtgaagagaagcctgctgtcaccgcagcccccaagaaatagatgccctttcttgaattgcattttttaaaacaagaaagtttccccaccagtgaatgaaagtcttgtgactagtgctgaagcttattaatgctaagggcaggcccaaattatcaagctaataaaatatcattcagcaaca

SEQ ID NO: 443095 - DNA, 1060 bp, Homo sapiens
  misc_feature (913)..(913): n is a, c, g, or t
  misc_feature (961)..(961): n is a, c, g, or t
  misc_feature (972)..(972): n is a, c, g, or t
  misc_feature (975)..(976): n is a, c, g, or t
  misc_feature (986)..(986): n is a, c, g, or t
  misc_feature (990)..(990): n is a, c, g, or t
  misc_feature (993)..(993): n is a, c, g, or t
  misc_feature (995)..(995): n is a, c, g, or t
  misc_feature (1001)..(1002): n is a, c, g, or t
  misc_feature (1008)..(1010): n is a, c, g, or t
  misc_feature (1017)..(1017): n is a, c, g, or t
  misc_feature (1020)..(1020): n is a, c, g, or t
  misc_feature (1025)..(1025): n is a, c, g, or t
  misc_feature (1031)..(1031): n is a, c, g, or t
gcctgggtggatagaagggggacaaggaggcacacccaggccggcaaagagcaggtatcagcactgcaagcaccaagtgtgtcttgagctcagtgagtactgggtatgtgtcacattgccaaatcccggatcacaagtctccatgaactgctggtgagctaggataataaaacccctgacatcaccattccagaagcttcacaagactgcatatataaggggctggctgtagctgcagctgaaggagctgaccagccagctgacccctcacactcacctagccaccatggacatcgccatccaccacccctggatccgccgccccttctttcctttccactcccccagccgcctctttgaccagttcttcggagagcacctgttggagtctgatcttttcccgacgtctacttccctgagtcccttctaccttcggccaccctccttcctgcgggcacccagctggtttgacactggactctcagagatgcgcctggagaaggacaggttctctgtcaacctggatgtgaagcacttctccccagaggaactcaaagttaaggtgttgggagatgtgattgaggtgcatggaaaacatgaagagcgccaggatgaacatggtttcatctccagggagttccacaggaaataccggatcccagctgatgtagaccctctcaccattacttcatccctgtcatctgatggggtcctcactgtgaatggaccaaggaaacaggtctctggccctgagcgcaccattcccatcacccgtgaagagaagcctgctgtcaccgcagcccccaagaaatagatgccctttcttgaattgcattttttaaaacaagaaagtttccccaccagtgaatgaaagtcttgtgactagtgctgaagcttattatgaggagccaantatcagtataaattatcaggaaaaaaaaaaaaaaaaaaatggggggcngcgaaatttanatnnggggggggcnggangangnaaggcnnaacggnnngggggtnccnaaacnggcggntgaaacagtggtggtaagggcacacgcgg

SEQ ID NO: 443096 - DNA, 968 bp, Homo sapiens
gcctgggtggatagaagggggacaaggaggcacacccaggccggcaaagagcaggtatcagcactgcaagcaccaagtgtgtcttgagctcagtgagtactgggtatgtgtcacattgccaaatcccggatcacaagtctccatgaactgctggtgagctaggataataaaacccctgacatcaccattccagaagcttcacaagactgcatatataaggggctggctgtagctgcagctgaaggagctgaccagccagctgacccctcacactcacctagccaccatggacatcgccatccaccacccctggatccgccgccccttctttcctttccactcccccagccgcctctttgaccagttcttcggagagcacctgttggagtctgatcttttcccgacgtctacttccctgagtcccttctaccttcggccaccctccttcctgcgggcacccagctggtttgacactggactctcagagatgcgcctggagaaggacaggttctctgtcaacctggatgtgaagcacttctccccagaggaactcaaagttaaggtgttgggagatgtgattgaggtgcatggaaaacatgaagagcgccaggatgaacatggtttcatctccagggagttccacaggaaataccggatcccagctgatgtagaccctctcaccattacttcatccctgtcatctgatggggtcctcactgtgaatggaccaaggaaacaggtctctggccctgagcgcaccattcccatcacccgtgaagagaagcctgctgtcaccgcagcccccaagaaatagatgccctttcttgaattgcattttttaaaacaagaaagtttccccaccagtgtggagagagctctctccacactgggtataattgaatcacatagaagatatatgttcgcagagggacagatggatgacttggtgtgctttgaggaattgacag

SEQ ID NO: 443097 - DNA, 900 bp, Homo sapiens
gcctgggtggatagaagggggacaaggaggcacacccaggccggcaaagagcaggtatcagcactgcaagcaccaagtgtgtcttgagctcagtgagtactgggtatgtgtcacattgccaaatcccggatcacaagtctccatgaactgctggtgagctaggataataaaacccctgacatcaccattccagaagcttcacaagactgcatatataaggggctggctgtagctgcagctgaaggagctgaccagccagctgacccctcacactcacctagccaccatggacatcgccatccaccacccctggatccgccgccccttctttcctttccactcccccagccgcctctttgaccagttcttcggagagcacctgttggagtctgatcttttcccgacgtctacttccctgagtcccttctaccttcggccaccctccttcctgcgggcacccagctggtttgacactggactctcagagatgcgcctggagaaggacaggttctctgtcaacctggatgtgaagcacttctccccagaggaactcaaagttaaggtgttgggagatgtgattgaggtgcatggaaaacatgaagagcgccaggatgaacatggtttcatctccagggagttccacaggaaataccggatcccagctgatgtagaccctctcaccattacttcatccctgtcatctgatggggtcctcactgtgaatggaccaaggaaacaggtctctggccctgagcgcaccattcccatcacccgtgaagagaagcttaaaacaagaaagtttccccaccagtgaatgaaagtcttgtgactagtgctgaagcttattaatgctaagggcaggcccaaattatcaagctaataaaatatcattcagcaaca

SEQ ID NO: 443098 - DNA, 652 bp, Homo sapiens
ctttgacatctgtcagtcactggaggctagagaagttgactttaccttggctttctgtgggttcccgatgggcttggaagtgccgtctacttcctaagcatcctgtctaaagctttgtggcaccctcagtgcaacctcagaacagacaaatcatgaatgagctggtttgacactggactctcagagatgcgcctggagaaggacaggttctctgtcaacctggatgtgaagcacttctccccagaggaactcaaagttaaggtgttgggagatgtgattgaggtgcatggaaaacatgaagagcgccaggatgaacatggtttcatctccagggagttccacaggaaataccggatcccagctgatgtagaccctctcaccattacttcatccctgtcatctgatggggtcctcactgtgaatggaccaaggaaacaggtctctggccctgagcgcaccattcccatcacccgtgaagagaagcctgctgtcaccgcagcccccaagaaatagatgccctttcttgaattgcattttttaaaacaagaaagtttccccaccagtgaatgaaagtcttgtgactagtgctgaagcttattaatgctaagggcaggcccaaattatcaagctaataaaatatcattcagcaaca

SEQ ID NO: 443099 - DNA, 550 bp, Homo sapiens
gtgctgtccctcctctgtgctgtcggacagcgcataggagggtggccgagggtggaagggactcagggaagtagacgtcggaaaatgcgcctggagaaggacaggttctctgtcaacctggatgtgaagcacttctccccagaggaactcaaagttaaggtgttgggagatgtgattgaggtgcatggaaaacatgaagagcgccaggatgaacatggtttcatctccagggagttccacaggaaataccggatcccagctgatgtagaccctctcaccattacttcatccctgtcatctgatggggtcctcactgtgaatggaccaaggaaacaggtctctggccctgagcgcaccattcccatcacccgtgaagagaagcctgctgtcaccgcagcccccaagaaatagatgccctttcttgaattgcattttttaaaacaagaaagtttccccaccagtgaatgaaagtcttgtgactagtgctgaagcttattaatgctaagggcaggcccaaattatcaagctaataaaatatcattcagcaaca

SEQ ID NO: 443100 - DNA, 914 bp, Homo sapiens
agaacaggggtgggggtgggtgccattgggtgtggacagaaagctagtgaaacaagaccatgacaagtcactggccggctcagacgtgtttgtgtctctcttttcttagctcagtgagtactgggtatgtgtcacattgccaaatcccggatcacaagtctccatgaactgctggtgagctaggataataaaacccctgacatcaccattccagaagcttcacaagactgcatatataaggggctggctgtagctgcagctgaaggagctgaccagccagctgacccctcacactcacctagccaccatggacatcgccatccaccacccctggatccgccgccccttctttcctttccactcccccagccgcctctttgaccagttcttcggagagcacctgttggagtctgatcttttcccgacgtctacttccctgagtcccttctaccttcggccaccctccttcctgcgggcacccagctggtttgacactggactctcagaggaactcaaagttaaggtgttgggagatgtgattgaggtgcatggaaaacatgaagagcgccaggatgaacatggtttcatctccagggagttccacaggaaataccggatcccagctgatgtagaccctctcaccattacttcatccctgtcatctgatggggtcctcactgtgaatggaccaaggaaacaggtctctggccctgagcgcaccattcccatcacccgtgaagagaagcctgctgtcaccgcagcccccaagaaatagatgccctttcttgaattgcattttttaaaacaagaaagtttccccaccagtgaatgaaagtcttgtgactagtgctgaagcttattaatgctaagggcaggcccaaattatcaagctaataaaatatcattcagcaaca

SEQ ID NO: 443101 - DNA, 764 bp, Homo sapiens
gcctgggtggatagaagggggacaaggaggcacacccaggccggcaaagagcaggtatcagcactgcaagcaccaagtgtgtcttgagctcagtgagtactgggtatgtgtcacattgccaaatcccggatcacaagtctccatgaactgctggtgagctaggataataaaacccctgacatcaccattccagaagcttcacaagactgcatatataaggggctggctgtagctgcagctgaaggagctgaccagccagctgacccctcacactcacctagccaccatggacatcgccatccaccacccctggatccgccgccccttctttcctttccactcccccagccgcctctttgaccagttcttcggagagcacctgttggagtctgatcttttcccgacgtctacttccctgagtcccttctaccttcggccaccctccttcctgcgggcacccagctggtttgacactggactctcagagatgcgcctggagaaggacaggttctctgtcaacctggatgtgaagcacttctccccagaggaactcaaagttaaggtgttgggagatgtgattgaggtgcatggaaaacatgaagagcgccaggatgaacatggtttcatctccagggagttccacaggaaataccggatcccagctgatgtagaccctctcaccattacttcatccctgtcatctgatggggtctactgtatgacaggacagtctctgcctagcaccatcatcacgtaggagctct

SEQ ID NO: 443102 - DNA, 554 bp, Homo sapiens
ggaaatgggtgaacgtgataaagacacaagtctcaggacccaattagagaagatatgagtaggcccatcactagaggtgctaatggagaaacctaagtcaaccagtgttggcatcgaattatgcaagtggaacatacatctgtagagcgaactcaaagttaaggtgttgggagatgtgattgaggtgcatggaaaacatgaagagcgccaggatgaacatggtttcatctccagggagttccacaggaaataccggatcccagctgatgtagaccctctcaccattacttcatccctgtcatctgatggggtcctcactgtgaatggaccaaggaaacaggtctctggccctgagcgcaccattcccatcacccgtgaagagaagcctgctgtcaccgcagcccccaagaaatagatgccctttcttgaattgcattttttaaaacaagaaagtttccccaccagtgaatgaaagtcttgtgactagtgctgaagcttattaatgctaagggcaggcccaaattatcaagctaataaaatatcattcagcaaca

SEQ ID NO: 443103 - DNA, 441 bp, Homo sapiens
tggtagtctcacggttcggtcgctctacgacggactctccaagattaaatggttgggacgatgtgcttgaggtgcatggcaaacatgaagagcgccaggatgaacatggtttcatctccagggagttccacaggaaataccggatcccagctgatgtagaccctctcaccattacttcatccctgtcatctgatggggtcctcactgtgaatggaccaaggaaacaggtctctggccctgagcgcaccattcccatcacccgtgaagagaagcctgctgtcaccgcagcccccaagaaatagatgccctttcttgaattgcattttttaaaacaagaaagtttccccaccagtgaatgaaagtcttgtgactagtgctgaagcttattaatgctaagggcaggcccaaattatcaagctaataaaatatcattcagcaaca

SEQ ID NO: 443104 - DNA, 780 bp, Homo sapiens
gcctgggtggatagaagggggacaaggaggcacacccaggccggcaaagagcaggtatcagcactgcaagcaccaagtgtgtcttgagctcagtgagtactgggtatgtgtcacattgccaaatcccggatcacaagtctccatgaactgctggtgagctaggataataaaacccctgacatcaccattccagaagcttcacaagactgcatatataaggggctggctgtagctgcagctgaaggagctgaccagccagctgacccctcacactcacctagccaccatggacatcgccatccaccacccctggatccgccgccccttctttcctttccactcccccagccgcctctttgaccagttcttcggagagcacctgttggagtctgatcttttcccgacgtctacttccctgagtcccttctaccttcggccaccctccttcctgcgggcacccagctggtttgacactggactctcagagatgcgcctggagaaggacaggttctctgtcaacctggatgtgaagcacttctccccagaggaactcaaagttaaggtgttgggagatgtgattgaggtgcatggaaaacatgaagagcgccaggtatgtagcttgtttttttgttttctgctcattcattcagtgcatactgtaatagtccaggtagtgctatcagctttggaggctggctacattccagtcccaagccataacagtcgggatcaggggttacaaatcaatgtctagaagactaagttaggatagacatattg

SEQ ID NO: 443105 - DNA, 1893 bp, Homo sapiens
tgagttgtgacttctcttttagctgtgcaagaatccgtgtctcttctttagcccatcttaatgctgaactacttggtttgtctaaatttcagagctgtgctcagtctttaatcccctacagcccatgtggtaatcagttaacgagagcctgtttggctacatgcttgagagtcagcaggcatacgggttaaggtcatctactctttgggggagttctgacaaatggaacagcttgttatgactttataagagggctttaaaattgcttctcaccatttaacgatagctcagaacctgtgcgtcaaccagtacagtttgtcctcagtaatgtcctcaggctgtttcaattttgcttatatgatttaggtttgggtcatagtctccttggatggagtcatttttttttttttttaatttcagcagcagtcctattgttctggaaccttctgggacattcctgaagagtcaggacaatttcagggcttcctcagggactcagattctaaatgagattccaaattctgtaggcccagccaacattgatctaaacctttgggaaatacccctaaacatatctatgcctcagggtttgaaaaacaatgaagtgttggactgtttcagacttctcagattctcactggtaggagtgactacctaggcaatttcatcttagctgcaaccctgaaacgaagctctatttatttttcctatgttgtcatggcatttggtctcacctaaggggaaatcaggatgcctgagttctgggcaggtgataatagttcctgttcttatctctctgcctctttcctcattcttttgggttaggatgaacatggtttcatctccagggagttccacaggaaataccggatcccagctgatgtagaccctctcaccattacttcatccctgtcatctgatggggtcctcactgtgaatggaccaaggaaacaggtctctggccctgagcgcaccattcccatcacccgtgaagagaagcctgctgtcaccgcagcccccaagaaatagatgccctttcttgaattgcattttttaaaacaagaaagtttccccaccagtgaatgaaagtcttgtgactagtgctgaagcttattaatgctaagggcaggcccaaattatcaagctaataaaatatcattcagcaacaaaaaaaaaaaaaaaaaaaaaaaaaaaaaaaaaaaaaaaaaaaaaaaggggggggggggggggcgagaaaaatttaaaaaaaatggtgggggggggcgggaggcggcggaccgcgtgtagggtaactagacaacatggggcccaacacacggccgtccccagaggaaaacacccgcggaacaagaagatgaggccgggtggtggttttccccccaacaataaaaaaaacgccgcggggggcgagcaacccgaggggcttctttgggaaacaaccaaccgaaggggcgtcgacaggaggaacagacgactggccttcaaaacaggaggcgacccacacagagaacgccggcatttaacaatgacgcccacccgcacggggggagagaaaatgagcaaaacacaaaagaaaagacaaacaagcaaccaaggcagcgaggtgaaagtcgaagcataatttataaaaacaagaagcgagtatgagaagatacgcaaacagcaaaaaaccaaggaagacatcacgaacagcagttaacgatatacggatcagatcaagatccggaacgcgaaatgcgagaagaatactcactacggtaggagtataaagaacgtagatagtcagagagagaataatacgacaaataaaaagaagacaacaaaaacgataaataaagaatacataagaagagaagcggagaagaaaagaaagaaacagcatcgcattttatg

SEQ ID NO: 443106 - DNA, 1665 bp, Homo sapiens
agaacaggggtgggggtgggtgccattgggtgtggacagaaagctagtgaaacaagaccatgacaagtcactggccggctcagacgtgtttgtgtctctcttttcttagctcagtgagtactgggtatgtgtcacattgccaaatcccggatcacaagtctccatgaactgctggtgagctaggataataaaacccctgacatcaccattccagaagcttcacaagactgcatatataaggggctggctgtagctgcagctgaaggagctgaccagccagctgacccctcacactcacctagccaccatggacatcgccatccaccacccctggatccgccgccccttctttcctttccactcccccagccgcctctttgaccagttcttcggagagcacctgttggagtctgatcttttcccgacgtctacttccctgagtcccttctaccttcggccaccctccttcctgcgggcacccagctggtttgacactggactctcagaggtgagtctccccacagctaggacgggagagtccttactggaacctcctggaaacttctccatccattttcctttcctaccctgcctaaaccattttaggcacatgtgtgtccaaatgtgaagaaaaatgaggaggttgctagtgccttcctcccccatcacctgtttctatttgatagtcctctgtatcccatttattacattttttcatgcactgtcaagtttatcctccgtcccctaacttctctacaggatacccctttctggtttggttcatgacaatctgcagggaaagagctgccttcaaactcctttgcttatctcttccaacaccttggactcttgaccgattttaccatctcaggtttcagagccaggagagagccctgcctcatcctgagctgttcatccccatgggtattttctgcctttctattccctcttctatgattttctgggtttctcagggctacgacagggcgctggcctgggtccaatcaagccctacgaggaaacaatatagggacgcccatttgtcctaagagggtggaagaacagggtgaacaaataaggttgacagagctgtcacagataacactctggtttaaaaatattcaagtgtgagtaaacaggagctgagtgggcaagggctttggaaggacaagcaggaccagcagaacattccagattggatgcgcctggagaaggacaggttctctgtcaacctggatgtgaagcacttctccccagaggaactcaaagttaaggtgttgggagatgtgattgaggtgcatggaaaacatgaagagcgccaggatgaacatggtttcatctccagggagttccacaggaaataccggatcccagctgatgtagaccctctcaccattacttcatccctgtcatctgatggggtcctcactgtgaatggaccaaggaaacaggtctctggccctgagcgcaccattcccatcacccgtgaagagaagcctgctgtcaccgcagcccccaagaaatagatgccctttcttgaattgcattttttaaaacaagaaagtttccccaccagtgaatgaaagtcttgtgactagtgctgaagcttattaatgctaagggcaggcccaaattatcaagctaataaaatatcattcagcaaca

SEQ ID NO: 443107 - DNA, 1012 bp, Homo sapiens
gcctgggtggatagaagggggacaaggaggcacacccaggccggcaaagagcaggtatcagcactgcaagcaccaagtgtgtcttgagctcagtgagtactgggtatgtgtcacattgccaaatcccggatcacaagtctccatgaactgctggtgagctaggataataaaacccctgacatcaccattccagaagcttcacaagactgcatatataaggggctggctgtagctgcagctgaaggagctgaccagccagctgacccctcacactcacctagccaccatggacatcgccatccaccacccctggatccgccgccccttctttcctttccactcccccagccgcctctttgaccagttcttcggagagcacctgttggagtctgatcttttcccgacgtctacttccctgagtcccttctaccttcggccaccctccttcctgcgggcacccagctggtttgacactggactctcagagatgcgcctggagaaggacaggttctctgtcaacctggatgtgaagcacttctccccagaggaactcaaagttaaggtgttgggagatgtgattgaggtgcatggaaaacatgaagagcgccaggatgaacatggtttcatctccagggagttccacaggaaataccggatcccagctgatgtagaccctctcaccattacttcatccctgtcatctgatggggtcctcactgtgaatggaccaaggaaacaggtctctggccctgagcgcaccattcccatcacccgtgaagagaagcctgctgtcaccgcagcccccaagaaatagatgccctttcttgaattgcattttttaaaacaagaaagtttccccaccagtgaatgaaagtcttgtgactagtgctgaagcttattaatgctaagggcaggcccaaattatcaagctaataaaatatcattcagcaacaaaaactgtcttgtgtttgaatattccacacacttttaaataaatatacagataccacag

SEQ ID NO: 443108 - DNA, 1250 bp, Homo sapiens
gcctgggtggatagaagggggacaaggaggcacacccaggccggcaaagagcaggtatcagcactgcaagcaccaagtgtgtcttgagctcagtgagtactgggtatgtgtcacattgccaaatcccggatcacaagtctccatgaactgctggtgagctaggataataaaacccctgacatcaccattccagaagcttcacaagactgcatatataaggggctggctgtagctgcagctgaaggagctgaccagccagctgacccctcacactcacctagccaccatggacatcgccatccaccacccctggatccgccgccccttctttcctttccactcccccagccgcctctttgaccagttcttcggagagcacctgttggagtctgatcttttcccgacgtctacttccctgagtcccttctaccttcggccaccctccttcctgcgggcacccagctggtttgacactggactctcagagatgcgcctggagaaggacaggttctctgtcaacctggatgtgaagcacttctccccagaggaactcaaagttaaggtgttgggagatgtgattgaggtgcatggaaaacatgaagagcgccaggatgaacatggtttcatctccagggagttccacaggaaataccggatcccagctgatgtagaccctctcaccattacttcatccctgtcatctgatggggtcctcactgtgaatggaccaaggaaacaggtctctggccctgagcgcaccattcccatcacccgtgaagagaagcctgctgtcaccgcagcccccaagaaatagatgccctttcttgaattgcattttttaaaacaagaaagtttccccaccagtgaatgaaagtcttgtgactagtgctgaagcttattaatgctaagggcaggcccaaattatcaagctaataaaatatcattcagcaacaaaaaaaaaaaaaaaaaaaaaaaatttttgggcggccgggcccgaaaaattcttctataacccattcggtttggggaccgggccgcggagtggggtatatgtaaccgttgggtccatatagcgtgtttccctaagaaaaacccggggctaagagaataagtgtgctgggttttctccccaatattaaaaaagcccggcggggaacccgagcgtttcgtaacaaatcccgaagggagttcgacgcaagtcggggttttataacagaagtcaaagggacgccatataatacgcccgggga

SEQ ID NO: 443109 - DNA, 974 bp, Homo sapiens
agaacaggggtgggggtgggtgccattgggtgtggacagaaagctagtgaaacaagaccatgacaagtcactggccggctcagacgtgtttgtgtctctcttttcttagctcagtgagtactgggtatgtgtcacattgccaaatcccggatcacaagtctccatgaactgctggtgagctaggataataaaacccctgacatcaccattccagaagcttcacaagactgcatatataaggggctggctgtagctgcagctgaaggagctgaccagccagctgacccctcacactcacctagccaccatggacatcgccatccaccacccctggatccgccgccccttctttcctttccactcccccagccgcctctttgaccagttcttcggagagcacctgttggagtctgatcttttcccgacgtctacttccctgagtcccttctaccttcggccaccctccttcctgcgggcacccagctggtttgacactggactctcagagatgcgcctggagaaggacaggttctctgtcaacctggatgtgaagcacttctccccagaggaactcaaagttaaggtgttgggagatgtgattgaggtgcatggaaaacatgaagagcgccaggatgaacatggtttcatctccagggagttccacaggaaataccggatcccagctgatgtagaccctctcaccattacttcatccctgtcatctgatggggtcctcactgtgaatggaccaaggaaacaggtctctggccctgagcgcaccattcccatcacccgtgaagagaagcctgctgtcaccgcagcccccaagaaatagatgccctttcttgaattgcattttttaaaacaagaaagtttccccaccagtgaatgaaagtcttgtgactagtgctgaagcttattaatgctaagggcaggcccaaattatcaagctaataaaatatcattcagcaaca

SEQ ID NO: 443110 - DNA, 1685 bp, Homo sapiens
gaaacaagcactggattccatatcccactgccaaaaccgcatggttcagattatcgctattgcagctttcatcataatacacacctttgctgccgaaacgaagccagacaacagatttccatcagcaggatgtgggggctcaaggttctgctgctacctgtggtgagctttgctctgtaccctgaggagatactggacacccactgggagctatggaagaagacccacaggaagcaatataacaacaaggtggatgaaatctctcggcgtttaatttgggaaaaaaacctgaagtatatttccatccataaccttgaggcttctcttggtgtccatacatatgaactggctatgaaccacctgggggacatgaccagtgaagaggtggttcagaagatgactggactcaaagtacccctgtctcattcccgcagtaatgacaccctttatatcccagaatgggaaggtagagccccagactctgtcgactatcgaaagaaaggatatgttactcctgtcaaaaatcagggtcagtgtggttcctgttgggcttttagctctgtgggtgccctggagggccaactcaagaagaaaactggcaaactcttaaatctgagtccccagaacctagtggattgtgtgtctgagaatgatggctgtggagggggctacatgaccaatgccttccaatatgtgcagaagaaccggggtattgactctgaagatgcctacccatatgtgggacaggaagagagttgtatgtacaacccaacaggcaaggcagctaaatgcagagggtacagagagatccccgaggggaatgagaaagccctgaagagggcagtggcccgagtgggacctgtctctgtggccattgatgcaagcctgacctccttccagttttacagcaaaggtgtgtattatgatgaaagctgcaatagcgataatctgaaccatgcggttttggcagtgggatatggaatccagaagggaaacaagcactggataattaaaaacagctggggagaaaactggggaaacaaaggatatatcctcatggctcgaaataagaacaacgcctgtggcattgccaacctggccagcttccccaagatgtgactccagccagccaaatccatcctgctcttccatttcttccacgatggtgcagtgtaacgatgcactttggaagggagttggtgtgctatttttgaagcagatgtggtgatactgagattgtctgttcagtttccccatttgtttgtgcttcaaatgatccttcctactttgcttctctccacccatgacctttttcactgtggccatcaggactttccctgacagctgtgtactcttaggctaagagatgtgactacagcctgcccctgactgtgttgtcccagggctgatgctgtacaggtacaggctggagattttcacataggttagattctcattcacgggactagttagctttaagcaccctagaggactagggtaatctgacttctcacttcctaagttcccttctatatcctcaaggtagaaatgtctatgttttctactccaattcataaatctattcataagtctttggtacaagtttacatgataaaaagaaatgtgatttgtcttcccttctttgcacttttgaaataaagtatttatctcctgtctacagttta

SEQ ID NO: 443111 - DNA, 648 bp, Homo sapiens
  misc_feature (619)..(619): n is a, c, g, or t
gtgtgtgtgtgtgtgtgagagagagagacagagagagaaacagagagagtgtgtgttgcctaaatctcccgagagagagagagagagagaaagagagaaatggctaaatccccctagatcaaagtccttggaaccagatgtaccagcatcctatctaaacacaggcccctcctgactatcattgttttatcaccctttttccgtctacctttctcttcctcataaagcctagttttcctctgtttccctgccaaatggaagagttttccctaactacattcttctgcaggatgtgggggctcaaggttctgctgctacctgtggtgagctttgctctgtaccctgaggagatactggacacccactgggagctatggaagaagacccacaggaagcaatataacaacaaggtgcctggggtcctggagggggcatggcaggaaggctgagacctgagctctctcatcttagcttccagactcccttcttcaatccaaatgctttattccaagcaaatcagtccctcttccctaactcatgttaacatacggttttcattcctatgcttcaaatcatcctctggcgtcctaggattaatggcgttaaactataagccatntatctggcttttcacaaactttgggttgc

SEQ ID NO: 443112 - DNA, 622 bp, Homo sapiens
gtgtgtgtgtgtgtgtgagagagagagacagagagagaaacagagagagtgtgtgttgcctaaatctcccgagagagagagagagagagaaagagagaaatggctaaatccccctagatcaaagtccttggaaccagatgtaccagcatcctatctaaacacaggcccctcctgactatcattgttttatcaccctttttccgtctacctttctcttcctcataaagcctagttttcctctgtttccctgccaaatggaagagttttccctaactacattcttctgcaggatgtgggggctcaaggttctgctgctacctgtggtgagctttgctctgtaccctgaggagatactggacacccactgggagctatggaagaagacccacaggaagcaatataacaacaaggtgcctggggtcctggagggggcatggcaggaaggctgagacctgagctctctcatcttagcttccagactcccttcttcaatccaaatgctttattccaagcaaatcagtccctcttccctaactcatgttaacatacggttttcattcctatgcttatttctcttttgggaagagttctaagattaatgctgttaatctataagcaattt

SEQ ID NO: 443113 - DNA, 1843 bp, Homo sapiens
gcgcactcacagtcgcaacctttccccttcctgacttcccgctgacttccgcaatcccgatggaataaatctagcacccctgatggtgtgcccacactttgctgccgaaacgaagccagacaacagatttccatcagcaggatgtgggggctcaaggttctgctgctacctgtggtgagctttgctctgtaccctgaggagatactggacacccactgggagctatggaagaagacccacaggaagcaatataacaacaaggtggatgaaatctctcggcgtttaatttgggaaaaaaacctgaagtatatttccatccataaccttgaggcttctcttggtgtccatacatatgaactggctatgaaccacctgggggacatgaccagtgaagaggtggttcagaagatgactggactcaaagtacccctgtctcattcccgcagtaatgacaccctttatatcccagaatgggaaggtagagccccagactctgtcgactatcgaaagaaaggatatgttactcctgtcaaaaatcagggtcagtgtggttcctgttgggcttttagctctgtgggtgccctggagggccaactcaagaagaaaactggcaaactcttaaatctgagtccccagaacctagtggattgtgtgtctgagaatgatggctgtggagggggctacatgaccaatgccttccaatatgtgcagaagaaccggggtattgactctgaagatgcctacccatatgtgggacaggaagagagttgtatgtacaacccaacaggcaaggcagctaaatgcagagggtacagagagatccccgaggggaatgagaaagccctgaagagggcagtggcccgagtgggacctgtctctgtggccattgatgcaagcctgacctccttccagttttacagcaaaggtgtgtattatgatgaaagctgcaatagcgataatctgaaccatgcggttttggcagtgggatatggaatccagaagggaaacaagcactggataattaaaaacagctggggagaaaactggggaaacaaaggatatatcctcatggctcgaaataagaacaacgcctgtggcattgccaacctggccagcttccccaagatgtgactccagccagccaaatccatcctgctcttccatttcttccacgatggtgcagtgtaacgatgcactttggaagggagttggtgtgctatttttgaagcagatgtggtgatactgagattgtctgttcagtttccccatttgtttgtgcttcaaatgatccttcctactttgcttctctccacccatgacctttttcactgtggccatcaggactttccctgacagctgtgtactcttaggctaagagatgtgactacagcctgcccctgactgtgttgtcccagggctgatgctgtacaggtacaggctggagattttcacataggttagattctcattcacgggactagttagctttaagcaccctagaggactagggtaatctgacttctcacttcctaagttcccttctatatcctcaaggtagaaatgtctatgttttctactccaattcataaatctattcataagtctttggtacaagtttacatgataaaaagaaatgtgatttgtcttcccttctttgcacttttgaaataaagtatttatctcctgtctacagtttaataaatagcatctagtacacattcattttgtgttggatactgtgttaggtgctggaggaaaaaagatgaatagaacatcttctatgtacttgatgcgctcacagtctggttgtagagactgtcacataaacatttcatcccaattc

SEQ ID NO: 443114 - DNA, 1699 bp, Homo sapiens
agcggtcctcctcttacccaaattttccagccgatcactggagctgacttccgcaatcccgatggaataaatctagcacccctgatggtgtgcccacactttgctgccgaaacgaagccagacaacagatttccatcagcaggatgtgggggctcaaggttctgctgctacctgtggtgagctttgctctgtaccctgaggagatactggacacccactgggagctatggaagaagacccacaggaagcaatataacaacaaggtggatgaaatctctcggcgtttaatttgggaaaaaaacctgaagtatatttccatccataaccttgaggcttctcttggtgtccatacatatgaactggctatgaaccacctgggggacatgaccagtgaagaggtggttcagaagatgactggactcaaagtacccctgtctcattcccgcagtaatgacaccctttatatcccagaatgggaaggtagagccccagactctgtcgactatcgaaagaaaggatatgttactcctgtcaaaaatcagggtcagtgtggttcctgttgggcttttagctctgtgggtgccctggagggccaactcaagaagaaaactggcaaactcttaaatctgagtccccagaacctagtggattgtgtgtctgagaatgatggctgtggagggggctacatgaccaatgccttccaatatgtgcagaagaaccggggtattgactctgaagatgcctacccatatgtgggacaggaagagagttgtatgtacaacccaacaggcaaggcagctaaatgcagagggtacagagagatccccgaggggaatgagaaagccctgaagagggcagtggcccgagtgggacctgtctctgtggccattgatgcaagcctgacctccttccagttttacagcaaaggtgtgtattatgatgaaagctgcaatagcgataatctgaaccatgcggttttggcagtgggatatggaatccagaagggaaacaagcactggataattaaaaacagctggggagaaaactggggaaacaaaggatatatcctcatggctcgaaataagaacaacgcctgtggcattgccaacctggccagcttccccaagatgtgactccagccagccaaatccatcctgctcttccatttcttccacgatggtgcagtgtaacgatgcactttggaagggagttggtgtgctatttttgaagcagatgtggtgatactgagattgtctgttcagtttccccatttgtttgtgcttcaaatgatccttcctactttgcttctctccacccatgacctttttcactgtggccatcaggactttccctgacagctgtgtactcttaggctaagagatgtgactacagcctgcccctgactgtgttgtcccagggctgatgctgtacaggtacaggctggagattttcacataggttagattctcattcacgggactagttagctttaagcaccctagaggactagggtaatctgacttctcacttcctaagttcccttctatatcctcaaggtagaaatgtctatgttttctactccaattcataaatctattcataagtctttggtacaagtttacatgataaaaagaaatgtgatttgtcttcccttctttgcacttttgaaataaagtatttatctcctgtctacagttta

SEQ ID NO: 443115 - DNA, 1992 bp, Homo sapiens
gtgtgtgtgtgtgtgtgagagagagagacagagagagaaacagagagagtgtgtgttgcctaaatctcccgagagagagagagagagagaaagagagaaatggctaaatccccctagatcaaagtccttggaaccagatgtaccagcatcctatctaaacacaggcccctcctgactatcattgttttatcaccctttttccgtctacctttctcttcctcataaagcctagttttcctctgtttccctgccaaatggaagagttttccctaactacattcttctgcaggatgtgggggctcaaggttctgctgctacctgtggtgagctttgctctgtaccctgaggagatactggacacccactgggagctatggaagaagacccacaggaagcaatataacaacaaggtggatgaaatctctcggcgtttaatttgggaaaaaaacctgaagtatatttccatccataaccttgaggcttctcttggtgtccatacatatgaactggctatgaaccacctgggggacatgaccagtgaagaggtggttcagaagatgactggactcaaagtacccctgtctcattcccgcagtaatgacaccctttatatcccagaatgggaaggtagagccccagactctgtcgactatcgaaagaaaggatatgttactcctgtcaaaaatcagggtcagtgtggttcctgttgggcttttagctctgtgggtgccctggagggccaactcaagaagaaaactggcaaactcttaaatctgagtccccagaacctagtggattgtgtgtctgagaatgatggctgtggagggggctacatgaccaatgccttccaatatgtgcagaagaaccggggtattgactctgaagatgcctacccatatgtgggacaggaagagagttgtatgtacaacccaacaggcaaggcagctaaatgcagagggtacagagagatccccgaggggaatgagaaagccctgaagagggcagtggcccgagtgggacctgtctctgtggccattgatgcaagcctgacctccttccagttttacagcaaaggtgtgtattatgatgaaagctgcaatagcgataatctgaaccatgcggttttggcagtgggatatggaatccagaagggaaacaagcactggataattaaaaacagctggggagaaaactggggaaacaaaggatatatcctcatggctcgaaataagaacaacgcctgtggcattgccaacctggccagcttccccaagatgtgactccagccagccaaatccatcctgctcttccatttcttccacgatggtgcagtgtaacgatgcactttggaagggagttggtgtgctatttttgaagcagatgtggtgatactgagattgtctgttcagtttccccatttgtttgtgcttcaaatgatccttcctactttgcttctctccacccatgacctttttcactgtggccatcaggactttccctgacagctgtgtactcttaggctaagagatgtgactacagcctgcccctgactgtgttgtcccagggctgatgctgtacaggtacaggctggagattttcacataggttagattctcattcacgggactagttagctttaagcaccctagaggactagggtaatctgacttctcacttcctaagttcccttctatatcctcaaggtagaaatgtctatgttttctactccaattcataaatctattcataagtctttggtacaagtttacatgataaaaagaaatgtgatttgtcttcccttctttgcacttttgaaataaagtatttatctcctgtctacagtttaataaatagcatctagtacacattcattttgtgttggatactgtgttaggtgctggaggaaaaaagatgaatagaacatcttctatgtacttgatgcgctcacagtctggttgtagagactgtcacataaacatttcatcccaattc

SEQ ID NO: 443116 - DNA, 1789 bp, Homo sapiens
gcgcactcacagtcgcaacctttccccttcctgacttcccgctgacttccgcaatcccgatggaataaatctagcacccctgatggtgtgcccacactttgctgccgaaacgaagccagacaacagatttccatcagcaggatgtgggggctcaaggttctgctgctacctgtggtgagctttgctctgtaccctgaggagatactggacacccactgggagctatggaagaagacccacaggaagcaatataacaacaaggtggatgaaatctctcggcgtttaatttgggaaaaatatgaactggctatgaaccacctgggggacatgaccagtgaagaggtggttcagaagatgactggactcaaagtacccctgtctcattcccgcagtaatgacaccctttatatcccagaatgggaaggtagagccccagactctgtcgactatcgaaagaaaggatatgttactcctgtcaaaaatcagggtcagtgtggttcctgttgggcttttagctctgtgggtgccctggagggccaactcaagaagaaaactggcaaactcttaaatctgagtccccagaacctagtggattgtgtgtctgagaatgatggctgtggagggggctacatgaccaatgccttccaatatgtgcagaagaaccggggtattgactctgaagatgcctacccatatgtgggacaggaagagagttgtatgtacaacccaacaggcaaggcagctaaatgcagagggtacagagagatccccgaggggaatgagaaagccctgaagagggcagtggcccgagtgggacctgtctctgtggccattgatgcaagcctgacctccttccagttttacagcaaaggtgtgtattatgatgaaagctgcaatagcgataatctgaaccatgcggttttggcagtgggatatggaatccagaagggaaacaagcactggataattaaaaacagctggggagaaaactggggaaacaaaggatatatcctcatggctcgaaataagaacaacgcctgtggcattgccaacctggccagcttccccaagatgtgactccagccagccaaatccatcctgctcttccatttcttccacgatggtgcagtgtaacgatgcactttggaagggagttggtgtgctatttttgaagcagatgtggtgatactgagattgtctgttcagtttccccatttgtttgtgcttcaaatgatccttcctactttgcttctctccacccatgacctttttcactgtggccatcaggactttccctgacagctgtgtactcttaggctaagagatgtgactacagcctgcccctgactgtgttgtcccagggctgatgctgtacaggtacaggctggagattttcacataggttagattctcattcacgggactagttagctttaagcaccctagaggactagggtaatctgacttctcacttcctaagttcccttctatatcctcaaggtagaaatgtctatgttttctactccaattcataaatctattcataagtctttggtacaagtttacatgataaaaagaaatgtgatttgtcttcccttctttgcacttttgaaataaagtatttatctcctgtctacagtttaataaatagcatctagtacacattcattttgtgttggatactgtgttaggtgctggaggaaaaaagatgaatagaacatcttctatgtacttgatgcgctcacagtctggttgtagagactgtcacataaacatttcatcccaattc

SEQ ID NO: 443117 - DNA, 1869 bp, Homo sapiens
gtgtgtgtgtgtgtgtgagagagagagacagagagagaaacagagagagtgtgtgttgcctaaatctcccgagagagagagagagagagaaagagagaaatggctaaatccccctagatcaaagtccttggaaccagatgtaccagcatcctatctaaacacaggcccctcctgactatcattgttttatcaccctttttccgtctacctttctcttcctcataaagcctagttttcctctgtttccctgccaaatggaagagttttccctaactacattcttctgcaggatgtgggggctcaaggttctgctgctacctgtggtgagctttgctctgtaccctgaggagatactggacacccactgggagctatggaagaagacccacaggaagcaatataacaacaagaccagtgaagaggtggttcagaagatgactggactcaaagtacccctgtctcattcccgcagtaatgacaccctttatatcccagaatgggaaggtagagccccagactctgtcgactatcgaaagaaaggatatgttactcctgtcaaaaatcagggtcagtgtggttcctgttgggcttttagctctgtgggtgccctggagggccaactcaagaagaaaactggcaaactcttaaatctgagtccccagaacctagtggattgtgtgtctgagaatgatggctgtggagggggctacatgaccaatgccttccaatatgtgcagaagaaccggggtattgactctgaagatgcctacccatatgtgggacaggaagagagttgtatgtacaacccaacaggcaaggcagctaaatgcagagggtacagagagatccccgaggggaatgagaaagccctgaagagggcagtggcccgagtgggacctgtctctgtggccattgatgcaagcctgacctccttccagttttacagcaaaggtgtgtattatgatgaaagctgcaatagcgataatctgaaccatgcggttttggcagtgggatatggaatccagaagggaaacaagcactggataattaaaaacagctggggagaaaactggggaaacaaaggatatatcctcatggctcgaaataagaacaacgcctgtggcattgccaacctggccagcttccccaagatgtgactccagccagccaaatccatcctgctcttccatttcttccacgatggtgcagtgtaacgatgcactttggaagggagttggtgtgctatttttgaagcagatgtggtgatactgagattgtctgttcagtttccccatttgtttgtgcttcaaatgatccttcctactttgcttctctccacccatgacctttttcactgtggccatcaggactttccctgacagctgtgtactcttaggctaagagatgtgactacagcctgcccctgactgtgttgtcccagggctgatgctgtacaggtacaggctggagattttcacataggttagattctcattcacgggactagttagctttaagcaccctagaggactagggtaatctgacttctcacttcctaagttcccttctatatcctcaaggtagaaatgtctatgttttctactccaattcataaatctattcataagtctttggtacaagtttacatgataaaaagaaatgtgatttgtcttcccttctttgcacttttgaaataaagtatttatctcctgtctacagtttaataaatagcatctagtacacattcattttgtgttggatactgtgttaggtgctggaggaaaaaagatgaatagaacatcttctatgtacttgatgcgctcacagtctggttgtagagactgtcacataaacatttcatcccaattc

SEQ ID NO: 443118 - DNA, 1877 bp, Homo sapiens
agcggtcctcctcttacccaaattttccagccgatcactggagctgacttccgcaatcccgatggaataaatctagcacccctgatggtgtgcccacactttgctgccgaaacgaagccagacaacagatttccatcagcaggatgtgggggctcaaggttctgctgctacctgtggtgagctttgctctgtaccctgaggagatactggacacccactgggagctatggaagaagacccacaggaagcaatataacaacaaggtggatgaaatctctcggcgtttaatttgggaaaaaaacctgaagtatatttccatccataaccttgaggcttctcttggtgtccatacatatgaactggctatgaaccacctgggggacatgaccagtgaagaggtggttcagaagatgactggactcaaagtacccctgtctcattcccgcagtaatgacaccctttatatcccagaatgggaaggtagagccccagactctgtcgactatcgaaagaaaggatatgttactcctgtcaaaaatcagggtcagtgtggttcctgttgggcttttagctctgtgggtgccctggagggccaactcaagaagaaaactggcaaactcttaaatctgagtccccagaacctagtggattgtgtgtctgagaatgatggctgtggagggggctacatgaccaatgccttccaatatgtgcagaagaaccggggtattgactctgaagatgcctacccatatgtgggacaggaagagagttgtatgtacaacccaacaggcaaggcagctaaatgcagagggtacagagagatccccgaggggaatgagaaagccctgaagagggcagtggcccgagtgggacctgtctctgtggccattgatgcaagcctgacctccttccagttttacagcaaaggtgtgtattatgatgaaagctgcaatagcgataatctgaaccatgcggttttggcagtgggatatggaatccagaagggaaacaagcactggataattaaaaacagctggggagaaaactggggaaacaaaggatatatcctcatggctcgaaataagaacaacgcctgtggcattgccaacctggccagcttccccaagatgtgactccagccagccaaatccatcctgctcttccatttcttccacgatggtgcagtgtaacgatgcactttggaagggagttggtgtgctatttttgaagcagatgtggtgatactgagattgtctgttcagtttccccatttgtttgtgcttcaaatgatccttcctactttgcttctctccacccatgacctttttcactgtggccatcaggactttccctgacagctgtgtactcttaggctaagagatgtgactacagcctgcccctgactgtgttgtcccagggctgatgctgtacaggtacaggctggagattttcacataggttagattctcattcacgggactagttagctttaagcaccctagaggactagggtaatctgacttctcacttcctaagttcccttctatatcctcaaggtagaaatgtctatgttttctactccaattcataaatctattcataagtctttggtacaagtttacatgataaaaagaaatgtgatttgtcttcccttctttgcacttttgaaataaagtatttatctcctgtctacagtttactagatgctatttattaaactgtagacaggagataaatagcatctagtacacattcattttgtgttggatactgtgttaggtgctggaggaaaaaagatgaatagaacatcttctatgtacttgatgcgctcacagtctggttgtagagactgtcacataaacatttcatcccaattc

SEQ ID NO: 443119 - DNA, 1483 bp, Homo sapiens
agcggtcctcctcttacccaaattttccagccgatcactggagctgacttccgcaatcccgatggaataaatctagcacccctgatggtgtgcccacactttgctgccgaaacgaagccagacaacagatttccatcagcaggatgtgggggctcaaggttctgctgctacctgtggtgagctttgctctgtaccctgaggagatactggacacccactgggagctatggaagaagacccacaggaagcaatataacaacaaggtggatgaaatctctcggcgtttaatttgggaaaaaaacctgaagtatatttccatccataaccttgaggcttctcttggtgtccatacatatgaactggctatgaaccacctgggggacatgaccagtgaagaggtggttcagaagatgactggactcaaagtacccctgtctcattcccgcagtaatgacaccctttatatcccagaatgggaaggtagagccccagactctgtcgactatcgaaagaaaggatatgttactcctgtcaaaaatcagggtcagtgtggttcctgttgggcttttagctctgtgggtgccctggagggccaactcaagaagaaaactggcaaactcttaaatctgagtccccagaacctagtggattgtgtgtctgagaatgatggctgtggagggggctacatgaccaatgccttccaatatgtgcagaagaaccggggtattgactctgaagatgcctacccatatgtgggacaggaagagagttgtatgtacaacccaacaggcaaggcagctaaatgcagagggtacagagagatccccgaggggaatgagaaagccctgaagagggcagtggcccgagtgggacctgtctctgtggccattgatgcaagcctgacctccttccagttttacagcaaaggtgtgtattatgatgaaagctgcaatagcgataatctgaaccatgcggttttggcagtgggatatggaatccagaagggaaacaagcactggataattaaaaacagctggggagaaaactggggaaacaaaggatatatcctcatggctcgaaataagaacaacgcctgtggcattgccaacctggccagcttccccaagatgtgactccagccagccaaatccatcctgctcttccatttcttccacgatggtgcagtgtaacgatgcactttggaagggagttggtgtgctatttttgaagcagatgtggtgatactgagattgtctgttcagtttccccatttgtttgtgcttcaaatgatgtataaagacggccatgtggtcagccatgcacgattttaaatgcgtccgtcaggacagtcaataatcagctatgtactcattggataaatagattgtgatcacatcgtgcccctgagcgtgttacttcctgggttgaacgagtacaaggtacgcgctagagcttcttctacatgagtaaattctcattggac

SEQ ID NO: 443120 - DNA, 729 bp, Homo sapiens
gcgcactcacagtcgcaacctttccccttcctgacttcccgctgacttccgcaatcccgatggaataaatctagcacccctgatggtgtgcccacactttgctgccgaaacgaagccagacaacagatttccatcagcaggtaacgtttgcaacttcctagatcttttagcttttcattcctgtcaattctctgagtattagggatgtagtgacttgaggatcacaataaacttttagcctctgcagatgaaaacagagatgcacttcttaggtcattccctggctaaataaaatctgcctggaaatctgtagaattccttgtatgatttatatatatacatacatgattgttagtaaaagcaaagtatatagggaatcatttccccatccttcaagagtggcctttctgcagtgttttctactttggccaacaaggatcaaaacggttaactccttagtgaggaggaggagagtggtatggggaggtagtagctcagtgcttcctgttcactgagacatctcaaagcccttaacactctagtttttaaatgtcctactggacattttgccagtttgcaaaattacatgtaaatggactataagcaattgtgtaagccatatgtcatgctgcaggctgcaaattgttcttaaaatggaggatttgtaattaagaaagccaatgcaagaaatgagtgaagctaactagagtaaacttatgaaaagctgtg

SEQ ID NO: 443121 - DNA, 1751 bp, Homo sapiens
gtcgtcgaggacccgtcgacgaagcgtagaacagatttccatcagcaggatgtgggggctcaaggttctgctgctacctgtggtgagctttgctctgtaccctgaggagatactggacacccactgggagctatggaagaagacccacaggaagcaatataacaacaaggtggatgaaatctctcggcgtttaatttgggaaaaaaacctgaagtatatttccatccataaccttgaggcttctcttggtgtccatacatatgaactggctatgaaccacctgggggacatgaccagtgaagaggtggttcagaagatgactggactcaaagtacccctgtctcattcccgcagtaatgacaccctttatatcccagaatgggaaggtagagccccagactctgtcgactatcgaaagaaaggatatgttactcctgtcaaaaatcagggtcagtgtggttcctgttgggcttttagctctgtgggtgccctggagggccaactcaagaagaaaactggcaaactcttaaatctgagtccccagaacctagtggattgtgtgtctgagaatgatggctgtggagggggctacatgaccaatgccttccaatatgtgcagaagaaccggggtattgactctgaagatgcctacccatatgtgggacaggaagagagttgtatgtacaacccaacaggcaaggcagctaaatgcagagggtacagagagatccccgaggggaatgagaaagccctgaagagggcagtggcccgagtgggacctgtctctgtggccattgatgcaagcctgacctccttccagttttacagcaaaggtgtgtattatgatgaaagctgcaatagcgataatctgaaccatgcggttttggcagtgggatatggaatccagaagggaaacaagcactggataattaaaaacagctggggagaaaactggggaaacaaaggatatatcctcatggctcgaaataagaacaacgcctgtggcattgccaacctggccagcttccccaagatgtgactccagccagccaaatccatcctgctcttccatttcttccacgatggtgcagtgtaacgatgcactttggaagggagttggtgtgctatttttgaagcagatgtggtgatactgagattgtctgttcagtttccccatttgtttgtgcttcaaatgatccttcctactttgcttctctccacccatgacctttttcactgtggccatcaggactttccctgacagctgtgtactcttaggctaagagatgtgactacagcctgcccctgactgtgttgtcccagggctgatgctgtacaggtacaggctggagattttcacataggttagattctcattcacgggactagttagctttaagcaccctagaggactagggtaatctgacttctcacttcctaagttcccttctatatcctcaaggtagaaatgtctatgttttctactccaattcataaatctattcataagtctttggtacaagtttacatgataaaaagaaatgtgatttgtcttcccttctttgcacttttgaaataaagtatttatctcctgtctacagtttaataaatagcatctagtacacattcattttgtgttggatactgtgttaggtgctggaggaaaaaagatgaatagaacatcttctatgtacttgatgcgctcacagtctggttgtagagactgtcacataaacatttcatcccaattc

SEQ ID NO: 443122 - DNA, 1845 bp, Homo sapiens
agcggtcctcctcttacccaaattttccagccgatcactggagctgacttccgcaatcccgatggaataaatctagcacccctgatggtgtgcccacactttgctgccgaaacgaagccagacaacagatttccatcagcaggatgtgggggctcaaggttctgctgctacctgtggtgagctttgctctgtaccctgaggagatactggacacccactgggagctatggaagaagacccacaggaagcaatataacaacaaggtggatgaaatctctcggcgtttaatttgggaaaaaaacctgaagtatatttccatccataaccttgaggcttctcttggtgtccatacatatgaactggctatgaaccacctgggggacatgaccagtgaagaggtggttcagaagatgactggactcaaagtacccctgtctcattcccgcagtaatgacaccctttatatcccagaatgggaaggtagagccccagactctgtcgactatcgaaagaaaggatatgttactcctgtcaaaaatcagggtcagtgtggttcctgttgggcttttagctctgtgggtgccctggagggccaactcaagaagaaaactggcaaactcttaaatctgagtccccagaacctagtggattgtgtgtctgagaatgatggctgtggagggggctacatgaccaatgccttccaatatgtgcagaagaaccggggtattgactctgaagatgcctacccatatgtgggacaggaagagagttgtatgtacaacccaacaggcaaggcagctaaatgcagagggtacagagagatccccgaggggaatgagaaagccctgaagagggcagtggcccgagtgggacctgtctctgtggccattgatgcaagcctgacctccttccagttttacagcaaaggtgtgtattatgatgaaagctgcaatagcgataatctgaaccatgcggttttggcagtgggatatggaatccagaagggaaacaagcactggataattaaaaacagctggggagaaaactggggaaacaaaggatatatcctcatggctcgaaataagaacaacgcctgtggcattgccaacctggccagcttccccaagatgtgactccagccagccaaatccatcctgctcttccatttcttccacgatggtgcagtgtaacgatgcactttggaagggagttggtgtgctatttttgaagcagatgtggtgatactgagattgtctgttcagtttccccatttgtttgtgcttcaaatgatccttcctactttgcttctctccacccatgacctttttcactgtggccatcaggactttccctgacagctgtgtactcttaggctaagagatgtgactacagcctgcccctgactgtgttgtcccagggctgatgctgtacaggtacaggctggagattttcacataggttagattctcattcacgggactagttagctttaagcaccctagaggactagggtaatctgacttctcacttcctaagttcccttctatatcctcaaggtagaaatgtctatgttttctactccaattcataaatctattcataagtctttggtacaagtttacatgataaaaagaaatgtgatttgtcttcccttctttgcacttttgaaataaagtatttatctcctgtctacagtttaataaatagcatctagtacacattcattttgtgttggatactgtgttaggtgctggaggaaaaaagatgaatagaacatcttctatgtacttgatgcgctcacagtctggttgtagagactgtcacataaacatttcatcccaattc

SEQ ID NO: 443123 - DNA, 1889 bp, Homo sapiens
ggaagaagaaatgcataaggagaatgaggagatatacaatgtctcagaaaacaggaaacattgtcctattttcccttgtcctcttctgacaagatctgggaaagtaccagaatttaggcacgaaagagaagaacgcctcgaagaaatgatcaggaggcaaaacttagacggaaatctctcctttgtgatgtgggggctcaaggttctgctgctacctgtggtgagctttgctctgtaccctgaggagatactggacacccactgggagctatggaagaagacccacaggaagcaatataacaacaaggtggatgaaatctctcggcgtttaatttgggaaaaaaacctgaagtatatttccatccataaccttgaggcttctcttggtgtccatacatatgaactggctatgaaccacctgggggacatgaccagtgaagaggtggttcagaagatgactggactcaaagtacccctgtctcattcccgcagtaatgacaccctttatatcccagaatgggaaggtagagccccagactctgtcgactatcgaaagaaaggatatgttactcctgtcaaaaatcagggtcagtgtggttcctgttgggcttttagctctgtgggtgccctggagggccaactcaagaagaaaactggcaaactcttaaatctgagtccccagaacctagtggattgtgtgtctgagaatgatggctgtggagggggctacatgaccaatgccttccaatatgtgcagaagaaccggggtattgactctgaagatgcctacccatatgtgggacaggaagagagttgtatgtacaacccaacaggcaaggcagctaaatgcagagggtacagagagatccccgaggggaatgagaaagccctgaagagggcagtggcccgagtgggacctgtctctgtggccattgatgcaagcctgacctccttccagttttacagcaaaggtgtgtattatgatgaaagctgcaatagcgataatctgaaccatgcggttttggcagtgggatatggaatccagaagggaaacaagcactggataattaaaaacagctggggagaaaactggggaaacaaaggatatatcctcatggctcgaaataagaacaacgcctgtggcattgccaacctggccagcttccccaagatgtgactccagccagccaaatccatcctgctcttccatttcttccacgatggtgcagtgtaacgatgcactttggaagggagttggtgtgctatttttgaagcagatgtggtgatactgagattgtctgttcagtttccccatttgtttgtgcttcaaatgatccttcctactttgcttctctccacccatgacctttttcactgtggccatcaggactttccctgacagctgtgtactcttaggctaagagatgtgactacagcctgcccctgactgtgttgtcccagggctgatgctgtacaggtacaggctggagattttcacataggttagattctcattcacgggactagttagctttaagcaccctagaggactagggtaatctgacttctcacttcctaagttcccttctatatcctcaaggtagaaatgtctatgttttctactccaattcataaatctattcataagtctttggtacaagtttacatgataaaaagaaatgtgatttgtcttcccttctttgcacttttgaaataaagtatttatctcctgtctacagtttaataaatagcatctagtacacattcattttgtgttggatactgtgttaggtgctggaggaaaaaagatgaatagaacatcttctatgtacttgatgcgctcacagtctggttgtagagactgtcacataaacatttcatcccaattc

SEQ ID NO: 443124 - DNA, 1790 bp, Homo sapiens
agcggtcctcctcttacccaaattttccagccgatcactggagctgacttccgcaatcccgatggaataaatctagcacccctgatggtgtgcccacactttgctgccgaaacgaagccagacaacagatttccatcagcaggatgtgggggctcaaggttctgctgctacctgtggtgagctttgctctgtaccctgaggagatactggacacccactgggagctatggaagaagacccacaggaagcaatataacaacaaggtggatgaaatctctcggcgtttaatttgggaaaaaaacctgaagtatatttccatccataaccttgaggcttctcttggtgtccatacatatgaactggctatgaaccacctgggggacatgaccagtgaagaggtggttcagaagatgactggactcaaagtacccctgtctcattcccgcagtaatgacaccctttatatcccagaatgggaaggtagagccccagactctgtcgactatcgaaagaaaggatatgttactcctgtcaaaaatcagggtcagtgtggttcctgttgggcttttagctctgtgggtgccctggagggccaactcaagaagaaaatgatggctgtggagggggctacatgaccaatgccttccaatatgtgcagaagaaccggggtattgactctgaagatgcctacccatatgtgggacaggaagagagttgtatgtacaacccaacaggcaaggcagctaaatgcagagggtacagagagatccccgaggggaatgagaaagccctgaagagggcagtggcccgagtgggacctgtctctgtggccattgatgcaagcctgacctccttccagttttacagcaaaggtgtgtattatgatgaaagctgcaatagcgataatctgaaccatgcggttttggcagtgggatatggaatccagaagggaaacaagcactggataattaaaaacagctggggagaaaactggggaaacaaaggatatatcctcatggctcgaaataagaacaacgcctgtggcattgccaacctggccagcttccccaagatgtgactccagccagccaaatccatcctgctcttccatttcttccacgatggtgcagtgtaacgatgcactttggaagggagttggtgtgctatttttgaagcagatgtggtgatactgagattgtctgttcagtttccccatttgtttgtgcttcaaatgatccttcctactttgcttctctccacccatgacctttttcactgtggccatcaggactttccctgacagctgtgtactcttaggctaagagatgtgactacagcctgcccctgactgtgttgtcccagggctgatgctgtacaggtacaggctggagattttcacataggttagattctcattcacgggactagttagctttaagcaccctagaggactagggtaatctgacttctcacttcctaagttcccttctatatcctcaaggtagaaatgtctatgttttctactccaattcataaatctattcataagtctttggtacaagtttacatgataaaaagaaatgtgatttgtcttcccttctttgcacttttgaaataaagtatttatctcctgtctacagtttaataaatagcatctagtacacattcattttgtgttggatactgtgttaggtgctggaggaaaaaagatgaatagaacatcttctatgtacttgatgcgctcacagtctggttgtagagactgtcacataaacatttcatcccaattc

SEQ ID NO: 443125 - DNA, 1637 bp, Homo sapiens
gagggtaccaggatgcagcgcaagtagtgctacaggaaggaatataacaagcaaggtggatgaaatctctcggcgtttaatttgggaaaaaaacctgaagtatatttccatccataaccttgaggcttctcttggtgtccatacatatgaactggctatgaaccacctgggggacatgaccagtgaagaggtggttcagaagatgactggactcaaagtacccctgtctcattcccgcagtaatgacaccctttatatcccagaatgggaaggtagagccccagactctgtcgactatcgaaagaaaggatatgttactcctgtcaaaaatcagggtcagtgtggttcctgttgggcttttagctctgtgggtgccctggagggccaactcaagaagaaaactggcaaactcttaaatctgagtccccagaacctagtggattgtgtgtctgagaatgatggctgtggagggggctacatgaccaatgccttccaatatgtgcagaagaaccggggtattgactctgaagatgcctacccatatgtgggacaggaagagagttgtatgtacaacccaacaggcaaggcagctaaatgcagagggtacagagagatccccgaggggaatgagaaagccctgaagagggcagtggcccgagtgggacctgtctctgtggccattgatgcaagcctgacctccttccagttttacagcaaaggtgtgtattatgatgaaagctgcaatagcgataatctgaaccatgcggttttggcagtgggatatggaatccagaagggaaacaagcactggataattaaaaacagctggggagaaaactggggaaacaaaggatatatcctcatggctcgaaataagaacaacgcctgtggcattgccaacctggccagcttccccaagatgtgactccagccagccaaatccatcctgctcttccatttcttccacgatggtgcagtgtaacgatgcactttggaagggagttggtgtgctatttttgaagcagatgtggtgatactgagattgtctgttcagtttccccatttgtttgtgcttcaaatgatccttcctactttgcttctctccacccatgacctttttcactgtggccatcaggactttccctgacagctgtgtactcttaggctaagagatgtgactacagcctgcccctgactgtgttgtcccagggctgatgctgtacaggtacaggctggagattttcacataggttagattctcattcacgggactagttagctttaagcaccctagaggactagggtaatctgacttctcacttcctaagttcccttctatatcctcaaggtagaaatgtctatgttttctactccaattcataaatctattcataagtctttggtacaagtttacatgataaaaagaaatgtgatttgtcttcccttctttgcacttttgaaataaagtatttatctcctgtctacagtttaataaatagcatctagtacacattcattttgtgttggatactgtgttaggtgctggaggaaaaaagatgaatagaacatcttctatgtacttgatgcgctcacagtctggttgtagagactgtcacataaacatttcatcccaattc

SEQ ID NO: 443126 - DNA, 918 bp, Homo sapiens
cccccacctgctcataaatcacgataatctgagcctatgcgctgatggcagctggtgatatcggaatcctttatcggtaccacgcactgttataattgcacaatagctggtgagcgatcagacgataccttggatatatcctcatggctcgaaataagaacaacgcctgtggcattgccaacctggccagcttccccaagatgtgactccagccagccaaatccatcctgctcttccatttcttccacgatggtgcagtgtaacgatgcactttggaagggagttggtgtgctatttttgaagcagatgtggtgatactgagattgtctgttcagtttccccatttgtttgtgcttcaaatgatccttcctactttgcttctctccacccatgacctttttcactgtggccatcaggactttccctgacagctgtgtactcttaggctaagagatgtgactacagcctgcccctgactgtgttgtcccagggctgatgctgtacaggtacaggctggagattttcacataggttagattctcattcacgggactagttagctttaagcaccctagaggactagggtaatctgacttctcacttcctaagttcccttctatatcctcaaggtagaaatgtctatgttttctactccaattcataaatctattcataagtctttggtacaagtttacatgataaaaagaaatgtgatttgtcttcccttctttgcacttttgaaataaagtatttatctcctgtctacagtttaataaatagcatctagtacacattcattttgtgttggatactgtgttaggtgctggaggaaaaaagatgaatagaacatcttctatgtacttgatgcgctcacagtctggttgtagagactgtcacataaacatttcatcccaattc

SEQ ID NO: 443127 - DNA, 882 bp, Homo sapiens
agcggtcctcctcttacccaaattttccagccgatcactggagctgacttccgcaatcccgatggaataaatctagcacccctgatggtgtgcccacactttgctgccgaaacgaagccagacaacagatttccatcagcaggatgtgggggctcaaggttctgctgctacctgtggtgagctttgctctgtaccctgaggagatactggacacccactgggagctatggaagaagacccacaggaagcaatataacaacaaggtggatgaaatctctcggcgtttaatttgggaaaaaaacctgaagtatatttccatccataaccttgaggcttctcttggtgtccatacatatgaactggctatgaaccacctgggggacatgaccagtgaagaggtggttcagaagatgactggactcaaagtacccctgtctcattcccgcagtaatgacaccctttatatcccagaatgggaaggtagagccccagactctgtcgactatcgaaagaaaggatatgttactcctgtcaaaaatcagggtcagtgtggttcctgttgggcttttagctctgtgggtgccctggagggccaactcaagaagaaaactggcaaactcttaaatctgagtccccagaacctagtggattgtgtgtctgagaatgatggctgtggagggggctacatgaccaatgccttccaatatgtgcagaagaaccggggtattgactctgaagatgcctacccatatgtgggacaggaagagagttgtatgtacaacccaacaggcaaggcagctaaatgcagagggtacagagacaggtcccactcgggccactgtatcttcagggctttctcattcccctcgtaactgtgccgag

SEQ ID NO: 443128 - DNA, 555 bp, Homo sapiens
catggcactgagttggggccagaacatggtttgtggagagtgggtcagcactggggtggggcagaggcatatagctgggcccaaattatagtttctgcaattagccagcatcaggcagaatggaaatggggggaggtggctggctttgtggagctgcagccagaaggcaactttcagggcgagcagaaactcaaaagcaggaactgttcttttaccatcgcagaactaacatcacgctcctaacagcagcatccgttcagcgcctcggacagctcccaggaagccaacaacctggacagctatgaaaggacttttcactccacttttaaagtagtggcatccaccttggggataaaatgcagaccaggaagttacaacctacagccccccaggagctctcagttcctgacataagtaaaatcattcattcattcactcatggtacactctttgagagcctcttaatgggcagggctcacacttgcaggatgctccttgggtgtgcctgcatctacagtgggagggactaggtgcaggtgggtaatcctgctcgag

SEQ ID NO: 443129 - DNA, 591 bp, Homo sapiens
ggaacttgagcatccgtggatttttgtatccatagagagtcctggaaccattcctccacagataccatgggatgactgtagttggtcatcccaatgacagtggtaagtgcctatgaatttttccctatcccactttgtacccagatgttccagtgatcagttctggagtttgttaactcactgaatgtgtttcctctcctaggttaatagttactaatgttgctgcctgttgcttcctgctttatttaggtttcatgtccttagcaagctactgagtttcatggcacctattgaccatactacaatgaatgatgatgccaggacagaactgtaccgctctctttttggccagctccaccctcccgacgaaggccacggggattgacatcgcccacctccgacacccagtgggcgccttggctggtgtggctgctggtccagatggaggaaaccagtgactttatggggctgagctagtagggaagcccctggaaagatgctgcgttccgaacctgtgcctaatacacgcaagggcgctgtcccgcccaaccccgcctttaaacgccacaaataaagagcattgttaccgcc

SEQ ID NO: 443130 - DNA, 1647 bp, Homo sapiens
tgttttctggcctgcactttcactgcctgtccctcccgcggtccccaacatgataaggctagcttacatttgtggcttctgtagttcttccttaagatgtttttcttttgacttttttaaagctttgatactctattccttttgttggatttcctaattgtagtacctttattcctatccataactatagtagggtgacttcaaaaaaagaccagtagttttttgtgttgaagccttgctgtttgaaaggtggggttttttggttttgcttttaaagtctgatgtgccgatgctgaccctcagatgatgagagcacttttaaaacaagacggcaggctggaatttgagttccatcttgagaatatccgagcaggtgtagatttcttctggggctcctggcccatgacctcagccctgtgtgcgcctgccctgtctctgtgagggctaccggctgggccttctgcagggcgtggacatggatggctgcctctgcggccacgtgctacacgcccacctccctgatgacagggacgtcctcacacgggtcttgcctgcttggaacctcatgggtccctcatgtctctgcagggaggatctgctctgtatccacaggggaaagtgttctggagcttctgtctcaacgataggaaagatccctgccccacccacaccccttttaggttttccaggccttgacacatggctttggccgatgtttgtgtgtatgttgcatttaaaagagtttgaaagtggtcatttacttttctttttaggggcccaagaccctggcatgttattgttttaatgtcaaaacccaactttagaaataaattagccaatcatattatttattagactgagaatagagacagggcagctggggagtgtggaagaagcttggttctcttcctgaacaactgcacagatgatagtaattggaatcgtgttgctggctcattttcattgtttttcaagtactgccaagtccaagaaaatgtatgaaaactaaattatatccccctacatcccatgtctgattgaatcctcctcatcggatggcggtctcctacatcctattaaaatattcaatcttgttttcttacttgaagagcctgtctgcaaagggcaaacttacagaacactcattccctgggagacgggtgtccagccgcactggaccatttacatattttactgtttgattgggtttcttccttctgttgtatttgtgagtaagagctgtggggtgcatttttaattacatggctgtgttttcaacagaagaaacagaatggggtattttccagcttctgcgttcctttttaaccttgaatagtgaaccagtgtgttaaccagtttgctgtgtttgtcttttaggacagaactgtaccgctctctttttggccagctccaccctcccgacgaaggccacggggattgacatcgcccacctccgacacccagtgggcgccttggctggtgtggctgctggtccagatggaggaaaccagtgactttatggggctgagctagtagggaagcccctggaaagatgctgcgttccgaacctgtgcctaatacacgcaagggcgctgtcccgcccaaccccgcctttaaacgccacaaataaagagcattgttaccgcc

SEQ ID NO: 443131 - DNA, 2118 bp, Homo sapiens
agcgggccttcatgctagcaacgcccgcagtgacgcgcaggccccgccccctcccgcgcgcctcccggaagtggccggtccagagctgtggggtggcctccgcgcggtctctggcggagtcggggaatcggatcaaggcgagaggatccggcagggaaggagcttcggggccgggggttgggccgcacatttacgtgcgcgaagcggagtggaccgggagctggtgacgatggcggggccgcagcccctggcgctgcaactggaacagttgttgaacccgcgaccaagcgaggcggaccctgaagcggaccccgaggaagccactgctgccagggtgattgacaggtttgatgaaggggaagatggggaaggtgatttcctagtagtgggtagcattagaaaactggcatcagcctccctcttggacacggacaaaaggtattgcggcaaaaccacctctagaaaagcatggaatgaagaccattgggagcagactctgccaggatcgtctgatgaggaaatatctgatgaggaagggtctggagatgaagattcagagggactgggtctggaggaatatgatgaggacgacctgggtgctgctgaggaacaggagtgtggtgatcacagggagagcaagaagagcagaagccactctgcaaaaacaccgggcttcagtgtccagagtatcagtgactttgagaaatttaccaagggaatggatgaccttgggagcagtgaggaggaggaagacgaagagagtggcatggaagaaggggatgacgcggaagactcccaaggcgagagtgaggaagacagggctggagatagaaacagtgaggatgatggtgtggtgatgaccttctctagtgtcaaagtttctgaggaagtggagaaaggaagagccgtgaagaaccagatagcactgtgggaccagctcttggaaggaaggatcaaactacaaaaagctctgttgaccaccaaccagcttcctcaaccagatgttttcccattgttcaaggacaaaggtggcccagaattttccagtgccctgaaaaatagtcacaaggcacttaaagcattgttgaggtcattggtaggtcttcaggaagagttgcttttccagtacccagacactagatatctagtagatgggacaaagcccaatgcgggaagtgaggagatttctagtgaagatgatgagctggtagaagagaagaagcagcaacgaagaagggtccctgcaaagaggaagctggagatggaggactatcccagcttcatggcaaagcgctttgccgactttacagtctacaggaaccgcacacttcagaaatggcacgataagaccaaactggcttctggaaaactggggaagggttttggtgcctttgaacgctcaatcttgactcagatcgaccatattctgatggacaaagagagattacttcgaaggacacagaccaagcgctccgtctatcgagttcttggcaaacctgagccagcagctcagcctgtcccagagagtttgccaggggaaccggagatccttcctcaagcccctgctaatgctcatctgaaggacttggatgaagaaatctttgatgatgatgacttttaccaccagctccttcgagaactcatagaacggaagaccagctccttggatcccaacgatcaggtggccatgggaaggcagtggcttgcaatccagaagttacgaagcaaaatccacaaaaaagtagataggaaagccagcaaaggcaggaaacttcggtttcatgtccttagcaagctactgagtttcatggcacctattgaccatactacaatgaatgatgatgccaggacagaactgtaccgctctctttttggccagctccaccctcccgacgaaggccacggggattgacatcgcccacctccgacacccagtgggcgccttggctggtgtggctgctggtccagatggaggaaaccagtgactttatggggctgagctagtagggaagcccctggaaagatgctgcgttccgaacctgtgcctaatacacgcaagggcgctgtcccgcccaaccccgcctttaaacgccacaaataaagagcattgttaccgcc

SEQ ID NO: 443132 - DNA, 381 bp, Homo sapiens
  misc_feature (1)..(1): n is a, c, g, or t
ntgtgctgcaacgactctcttaattttccaccgctacacgtttcatgtccttagcaagctactgagtttcatggcacctattgaccatactacaatgaatgatgatgccaggacagaactgtaccgctctctttttggccagctccaccctcccgacgaaggccacggggattgacatcgcccacctccgacacccagtgggcgccttggctggtgtggctgctggtccagatggaggaaaccagtgactttatggggctgagctagtagggaagcccctggaaagatgctgcgttccgaacctgtgcctaatacacgcaagggcgctgtcccgcccaaccccgcctttaaacgccacaaataaagagcattgttaccgcc

SEQ ID NO: 443133 - DNA, 943 bp, Homo sapiens
  misc_feature (31)..(31): n is a, c, g, or t
gtaacttaatctcgggcagtaagggggaganagaaaagttatgggcaacgactctcttaattaccaccgctacagctccttcgagaactcatagaacggaagaccagctccttggatcccaacgatcaggtggccatgggaaggcagtggcttgcaatccagaagttacgaagcaaaatccacaaaaaagtagataggaaagccagcaaaggcaggaaacttcggtttcatgtccttagcaagctactgagtttcatggcacctattgaccatactacaatgaatgatgatgccaggacagaactgtaccgctctctttttggccagctccaccctcccgacgaaggccacggggattgacatcgcccacctccgacacccagtgggcgccttggctggtgtggctgctggtccagatggaggaaaccagtgactttatggggctgagctagtagggaagcccctggaaagatgctgcgttccgaacctgtgcctaatacacgcaagggcgctgtcccgcccaaccccgcctttaaacgccacaaataaagagcattgttaccgccgatgcgggccgcttttcgttttatgagggttaatttaatgatcctttattaattgtttcggttgtgcttcagtcctagagggtgggggtgaagcggaatccagcttacctcaagaggcgtgaattgcgggtattcctgagagactacggggaatacgggcagcaaaataccttgtggagtaactggccttttaagtagcaaaatcttgaaaaaggggccggtttggagcgtttattatataagcttccccccgcgtgatagagctgacaaaatcacacgctaagttcaaagggcgcgaagcccctggtggttcaatataactcggctcgttcccttgtatagctctctgtgtgttttttagagacactcctatcgtt

SEQ ID NO: 443134 - DNA, 415 bp, Homo sapiens
  misc_feature (31)..(33): n is a, c, g, or t
  misc_feature (35)..(35): n is a, c, g, or t
gaaagacgctaccctttaatttttgttgccnnncnaaatttggttcaagccctaccatctactgagtttcatggcacctattgaccatactacaatgaatgatgatgccaggacagaactgtaccgctctctttttggccagctccaccctcccgacgaaggccacggggattgacatcgcccacctccgacacccagtgggcgccttggctggtgtggctgctggtccagatggaggaaaccagtgactttatggggctgagctagtagggaagcccctggaaagatgctgcgttccgaacctgtgcctaatacacgcaagggcgctgtcccgcccaaccccgcctttaaacgccacaaataaagagcattgttaccgccgcaaaaaaaaaaataattggccctgttggcctaa

SEQ ID NO: 443135 - DNA, 517 bp, Homo sapiens
ataattatttaaaaattagcaaaaattggaaagcacaagaaaaagcactggaggattaccaaagggaaagttagattttaaaaattcatgcattcaaaccaaccagcagttgcaacattagtaacagaacatgctgcatagctaaaacattaaaagaaaacccaagtagctctactaaatctgatgggtttgcctgcagactggtagatttagtgcttgtcacagcaactccaaatactaaggagcattgtgaaccaaatttgctgtagaatttcccagctgccgtttgtttttttaccattgcacaaatcctgttcaattgattagtcagtttggccccaaactagcttgaggaacttgatgtaggttgatgatttctttctgcagggttgttagaataattccaatttgtcaatatgtataactatttctgttagtgatgatgcataacattgcttgtgaattttccaggcagtggcttgcaatccagaagttacagggggtcctctagacacct

SEQ ID NO: 443136 - DNA, 807 bp, Homo sapiens
ataattatttaaaaattagcaaaaattggaaagcacaagaaaaagcactggaggattaccaaagggaaagttagattttaaaaattcatgcattcaaaccaaccagcagttgcaacattagtaacagaacatgctgcatagctaaaacattaaaagaaaacccaagtagctctactaaatctgatgggtttgcctgcagactggtagatttagtgcttgtcacagcaactccaaatactaaggagcattgtgaaccaaatttgctgtagaatttcccagctgccgtttgtttttttaccattgcacaaatcctgttcaattgattagtcagtttggccccaaactagcttgaggaacttgatgtaggttgatgatttctttctgcagggttgttagaataattccaatttgtcaatatgtataactatttctgttagtgatgatgcataacattgcttgtgaattttccaggcagtggcttgcaatccagaagttacgaagcaaaatccacaaaaaagtagataggaaagccagcaaaggcaggaaacttcggtgagttacttttcggaaaaaatgtcaacatatattgtatatgtatctcgtctcttacattctggctgttatgtcatttttctttttcttctgatgattctgtttttaaggatcagaaaaataaacaatatttgaaggtttattgcaactcagtttttcttattctaaaatggaaatatagtttcattgacttttgtgctactgttgtaatagatgggtgaaataatatatgcattcccttgaaagagaaaaaat

SEQ ID NO: 443137 - DNA, 2392 bp, Homo sapiens
  misc_feature (2125)..(2125): n is a, c, g, or t
  misc_feature (2179)..(2179): n is a, c, g, or t
  misc_feature (2392)..(2392): n is a, c, g, or t
agcgggccttcatgctagcaacgcccgcagtgacgcgcaggccccgccccctcccgcgcgcctcccggaagtggccggtccagagctgtggggtggcctccgcgcggtctctggcggagtcggggaatcggatcaaggcgagaggatccggcagggaaggagcttcggggccgggggttgggccgcacatttacgtgcgcgaagcggagtggaccgggagctggtgacgatggcggggccgcagcccctggcgctgcaactggaacagttgttgaacccgcgaccaagcgaggcggaccctgaagcggaccccgaggaagccactgctgccagggtgattgacaggtttgatgaaggggaagatggggaaggtgatttcctagtagtgggtagcattagaaaactggcatcagcctccctcttggacacggacaaaaggtattgcggcaaaaccacctctagaaaagcatggaatgaagaccattgggagcagactctgccaggatcgtctgatgaggaaatatctgatgaggaagggtctggagatgaagattcagagggactgggtctggaggaatatgatgaggacgacctgggtgctgctgaggaacaggagtgtggtgatcacagggagagcaagaagagcagaagccactctgcaaaaacaccgggcttcagtgtccagagtatcagtgactttgagaaatttaccaagggaatggatgaccttgggagcagtgaggaggaggaagacgaagagagtggcatggaagaaggggatgacgcggaagactcccaaggcgagagtgaggaagacagggctggagatagaaacagtgaggatgatggtgtggtgatgaccttctctagtgtcaaagtttctgaggaagtggagaaaggaagagccgtgaagaaccagatagcactgtgggaccagctcttggaaggaaggatcaaactacaaaaagctctgttgaccaccaaccagcttcctcaaccagatgttttcccattgttcaaggacaaaggtggcccagaattttccagtgccctgaaaaatagtcacaaggcacttaaagcattgttgaggtcattggtaggtcttcaggaagagttgcttttccagtacccagacactagatatctagtagatgggacaaagcccaatgcgggaagtgaggagatttctagtgaagatgatgagctggtagaagagaagaagcagcaacgaagaagggtccctgcaaagaggaagctggagatggaggactatcccagcttcatggcaaagcgctttgccgactttacagtctacaggaaccgcacacttcagaaatggcacgataagaccaaactggcttctggaaaactggggaagggttttggtgcctttgaacgctcaatcttgactcagatcgaccatattctgatggacaaagagagattacttcgaaggacacagaccaagcgctccgtctatcgagttcttggcaaacctgagccagcagctcagcctgtcccagagagtttgccaggggaaccggagatccttcctcaagcccctgctaatgctcatctgaaggacttggatgaagaaatctttgatgatgatgacttttaccaccagctccttcgagaactcatagaacggaagaccagctccttggatcccaacgatcaggtggccatgggaaggcagtggcttgcaatccagaagttacgaagcaaaatccacaaaaaagtagataggaaagccagcaaaggcaggaaacttcggtttcatgtccttagcaagctactgagtttcatggcacctattgaccatactacaatgaatgatgatgccaggacagaactgtaccgctctctttttggccagctccaccctcccgacgaaggccacggggattgacatcgcccacctccgacacccagtgggcgccttggctggtgtggctgctggtccagatggaggaaaccagtgactttatggggctgagctagtagggaagcccctggaaagatgctgcgttccgaacctgtgcctaatacacgcaagggcgctgtcccgcccaaccccgcctttaaacgccacaaataaagagcattgttaccgccaaaaaantaattaagagtagtggggtgatgaagaggaataagaggtaaaatatatatattnaaattggcctcgttggcctcagcggtggagctctgcggccggatccttgtatggggggtaattcatgaacctggcttcactaactcgtgcgcttggcccgtcgggtggggcgagcggatcacctcactctaaggcggggttacgggtttcccccaatccgggggatatccatggaaggacatttgatctaaagggcacggtaagggcaggaan

SEQ ID NO: 443138 - DNA, 2495 bp, Homo sapiens
agcgggccttcatgctagcaacgcccgcagtgacgcgcaggccccgccccctcccgcgcgcctcccggaagtggccggtccagagctgtggggtggcctccgcgcggtctctggcggagtcggggaatcggatcaaggcgagaggatccggcagggaaggagcttcggggccgggggttgggccgcacatttacgtgcgcgaagcggagtggaccgggagctggtgacgatggcggggccgcagcccctggcgctgcaactggaacagttgttgaacccgcgaccaagcgaggcggaccctgaagcggaccccgaggaagccactgctgccagggtgattgacaggtttgatgaaggggaagatggggaaggtgatttcctagtagtgggtagcattagaaaactggcatcagcctccctcttggacacggacaaaaggtattgcggcaaaaccacctctagaaaagcatggaatgaagaccattgggagcagactctgccaggatcgtctgatgaggaaatatctgatgaggaagggtctggagatgaagattcagagggactgggtctggaggaatatgatgaggacgacctgggtgctgctgaggaacaggagtgtggtgatcacagggagagcaagaagagcagaagccactctgcaaaaacaccgggcttcagtgtccagagtatcagtgactttgagaaatttaccaagggaatggatgaccttgggagcagtgaggaggaggaagacgaagagagtggcatggaagaaggggatgacgcggaagactcccaaggcgagagtgaggaagacagggctggagatagaaacagtgaggatgatggtgtggtgatgaccttctctagtgtcaaagtttctgaggaagtggagaaaggaagagccgtgaagaaccagatagcactgtgggaccagctcttggaaggaaggatcaaactacaaaaagctctgttgaccaccaaccagcttcctcaaccagatgttttcccattgttcaaggacaaaggtggcccagaattttccagtgccctgaaaaatagtcacaaggcacttaaagcattgttgaggtcattggtaggtcttcaggaagagttgcttttccagtacccagacactagatatctagtagatgggacaaagcccaatgcgggaagtgaggagatttctagtgaagatgatgagctggtagaagagaagaagcagcaacgaagaagggtccctgcaaagaggaagctggagatggaggactatcccagcttcatggcaaagcgctttgccgactttacagtctacaggaaccgcacacttcagaaatggcacgataagaccaaactggcttctggaaaactggggaagggttttggtgcctttgaacgctcaatcttgactcagatcgaccatattctgatggacaaagagagattacttcgaaggacacagaccaagcgctccgtctatcgagttcttggcaaacctgagccagcagctcagcctgtcccagagagtttgccaggggaaccggagatccttcctcaagcccctgctaatgctcatctgaaggacttggatgaagaaatctttgatgatgatgacttttaccaccagctccttcgagaactcatagaacggaagaccagctccttggatcccaacgatcaggtggccatgggaaggcagtggcttgcaatccagaagttacgaagcaaaatccacaaaaaagtagataggaaagccagcaaaggcaggaaacttcggtttcatgtccttagcaagctactgagtttcatggcacctattgaccatactacaatgaatgatgatgccaggacagaactgtaccgctctctttttggccagctccaccctcccgacgaaggccacggggattgacatcgcccacctccgacacccagtgggcgccttggctggtgtggctgctggtccagatggaggaaaccagtgactttatggggctgagctagtagggaagcccctggaaagatgctgcgttccgaacctgtgcctaatacacgcaagggcgctgtcccgcccaaccccgcctttaaacgccacaaataaagagcattgttaccgccgatgcgggccgcttttcgttttatgagggttaatttaatgatcctttattaattgtttcggttgtgcttcagtcctagagggtgggggtgaagcggaatccagcttacctcaagaggcgtgaattgcgggtattcctgagagactacggggaatacgggcagcaaaataccttgtggagtaactggccttttaagtagcaaaatcttgaaaaaggggccggtttggagcgtttattatataagcttccccccgcgtgatagagctgacaaaatcacacgctaagttcaaagggcgcgaagcccctggtggttcaatataactcggctcgttcccttgtatagctctctgtgtgttttttagagacactcctatcgtt

SEQ ID NO: 443139 - DNA, 2327 bp, Homo sapiens
  misc_feature (2327)..(2327): n is a, c, g, or t
agcgggccttcatgctagcaacgcccgcagtgacgcgcaggccccgccccctcccgcgcgcctcccggaagtggccggtccagagctgtggggtggcctccgcgcggtctctggcggagtcggggaatcggatcaaggcgagaggatccggcagggaaggagcttcggggccgggggttgggccgcacatttacgtgcgcgaagcggagtggaccgggagctggtgacgatggcggggccgcagcccctggcgctgcaactggaacagttgttgaacccgcgaccaagcgaggcggaccctgaagcggaccccgaggaagccactgctgccagggtgattgacaggtttgatgaaggggaagatggggaaggtgatttcctagtagtgggtagcattagaaaactggcatcagcctccctcttggacacggacaaaaggtattgcggcaaaaccacctctagaaaagcatggaatgaagaccattgggagcagactctgccaggatcgtctgatgaggaaatatctgatgaggaagggtctggagatgaagattcagagggactgggtctggaggaatatgatgaggacgacctgggtgctgctgaggaacaggagtgtggtgatcacagggagagcaagaagagcagaagccactctgcaaaaacaccgggcttcagtgtccagagtatcagtgactttgagaaatttaccaagggaatggatgaccttgggagcagtgaggaggaggaagacgaagagagtggcatggaagaaggggatgacgcggaagactcccaaggcgagagtgaggaagacagggctggagatagaaacagtgaggatgatggtgtggtgatgaccttctctagtgtcaaagtttctgaggaagtggagaaaggaagagccgtgaagaaccagatagcactgtgggaccagctcttggaaggaaggatcaaactacaaaaagctctgttgaccaccaaccagcttcctcaaccagatgttttcccattgttcaaggacaaaggtggcccagaattttccagtgccctgaaaaatagtcacaaggcacttaaagcattgttgaggtcattggtaggtcttcaggaagagttgcttttccagtacccagacactagatatctagtagatgggacaaagcccaatgcgggaagtgaggagatttctagtgaagatgatgagctggtagaagagaagaagcagcaacgaagaagggtccctgcaaagaggaagctggagatggaggactatcccagcttcatggcaaagcgctttgccgactttacagtctacaggaaccgcacacttcagaaatggcacgataagaccaaactggcttctggaaaactggggaagggttttggtgcctttgaacgctcaatcttgactcagatcgaccatattctgatggacaaagagagattacttcgaaggacacagaccaagcgctccgtctatcgagttcttggcaaacctgagccagcagctcagcctgtcccagagagtttgccaggggaaccggagatccttcctcaagcccctgctaatgctcatctgaaggacttggatgaagaaatctttgatgatgatgacttttaccaccagctccttcgagaactcatagaacggaagaccagctccttggatcccaacgatcaggtggccatgggaaggcagtggcttgcaatccagaagttacgaagcaaaatccacaaaaaagtagataggaaagccagcaaaggcaggaaacttcggtttcatgtccttagcaagctactgagtttcatggcacctattgaccatactacaatgaatgatgatgccaggacagaactgtaccgctctctttttggccagctccaccctcccgacgaaggccacggggattgacatcgcccacctccgacacccagtgggcgccttggctggtgtggctgctggtccagatggaggaaaccagtgactttatggggctgagctagtagggaagcccctggaaagatgctgcgttccgaacctgtgcctaatacacgcaagggcgctgtcccgcccaaccccgcctttaaacgccacaaataaagagcattgttaccgcctggcctcgttggcctcagcggtggagctctgcggccggatccttgtatggggggtaattcatgaacctggcttcactaactcgtgcgcttggcccgtcgggtggggcgagcggatcacctcactctaaggcggggttacgggtttcccccaatccgggggatatccatggaaggacatttgatctaaagggcacggtaagggcaggaan

SEQ ID NO: 443140 - DNA, 2177 bp, Homo sapiens
agcgggccttcatgctagcaacgcccgcagtgacgcgcaggccccgccccctcccgcgcgcctcccggaagtggccggtccagagctgtggggtggcctccgcgcggtctctggcggagtcggggaatcggatcaaggcgagaggatccggcagggaaggagcttcggggccgggggttgggccgcacatttacgtgcgcgaagcggagtggaccgggagctggtgacgatggcggggccgcagcccctggcgctgcaactggaacagttgttgaacccgcgaccaagcgaggcggaccctgaagcggaccccgaggaagccactgctgccagggtgattgacaggtttgatgaaggggaagatggggaaggtgatttcctagtagtgggtagcattagaaaactggcatcagcctccctcttggacacggacaaaaggtattgcggcaaaaccacctctagaaaagcatggaatgaagaccattgggagcagactctgccaggatcgtctgatgaggaaatatctgatgaggaagggtctggagatgaagattcagagggactgggtctggaggaatatgatgaggacgacctgggtgctgctgaggaacaggagtgtggtgatcacagggagagcaagaagagcagaagccactctgcaaaaacaccgggcttcagtgtccagagtatcagtgactttgagaaatttaccaagggaatggatgaccttgggagcagtgaggaggaggaagacgaagagagtggcatggaagaaggggatgacgcggaagactcccaaggcgagagtgaggaagacagggctggagatagaaacagtgaggatgatggtgtggtgatgaccttctctagtgtcaaagtttctgaggaagtggagaaaggaagagccgtgaagaaccagatagcactgtgggaccagctcttggaaggaaggatcaaactacaaaaagctctgttgaccaccaaccagcttcctcaaccagatgttttcccattgttcaaggacaaaggtggcccagaattttccagtgccctgaaaaatagtcacaaggcacttaaagcattgttgaggtcattggtaggtcttcaggaagagttgcttttccagtacccagacactagatatctagtagatgggacaaagcccaatgcgggaagtgaggagatttctagtgaagatgatgagctggtagaagagaagaagcagcaacgaagaagggtccctgcaaagaggaagctggagatggaggactatcccagcttcatggcaaagcgctttgccgactttacagtctacaggaaccgcacacttcagaaatggcacgataagaccaaactggcttctggaaaactggggaagggttttggtgcctttgaacgctcaatcttgactcagatcgaccatattctgatggacaaagagagattacttcgaaggacacagaccaagcgctccgtctatcgagttcttggcaaacctgagccagcagctcagcctgtcccagagagtttgccaggggaaccggagatccttcctcaagcccctgctaatgctcatctgaaggacttggatgaagaaatctttgatgatgatgacttttaccaccagctccttcgagaactcatagaacggaagaccagctccttggatcccaacgatcaggtggccatgggaaggcagtggcttgcaatccagaagttacgaagcaaaatccacaaaaaagtagataggaaagccagcaaaggcaggaaacttcggtttcatgtccttagcaagctactgagtttcatggcacctattgaccatactacaatgaatgatgatgccaggacagaactgtaccgctctctttttggccagctccaccctcccgacgaaggccacggggattgacatcgcccacctccgacacccagtgggcgccttggctggtgtggctgctggtccagatggaggaaaccagtgactttatggggctgagctagtagggaagcccctggaaagatgctgcgttccgaacctgtgcctaatacacgcaagggcgctgtcccgcccaaccccgcctttaaacgccacaaataaagagcattgttaccgcccgcgacgcgtcaagtttttgttattaatccagtgaagaaccagatcgtttttgctctag

SEQ ID NO: 443141 - DNA, 2350 bp, Homo sapiens
agcgggccttcatgctagcaacgcccgcagtgacgcgcaggccccgccccctcccgcgcgcctcccggaagtggccggtccagagctgtggggtggcctccgcgcggtctctggcggagtcggggaatcggatcaaggcgagaggatccggcagggaaggagcttcggggccgggggttgggccgcacatttacgtgcgcgaagcggagtggaccgggagctggtgacgatggcggggccgcagcccctggcgctgcaactggaacagttgttgaacccgcgaccaagcgaggcggaccctgaagcggaccccgaggaagccactgctgccagggtgattgacaggtttgatgaaggggaagatggggaaggtgatttcctagtagtgggtagcattagaaaactggcatcagcctccctcttggacacggacaaaaggtattgcggcaaaaccacctctagaaaagcatggaatgaagaccattgggagcagactctgccaggatcgtctgatgaggaaatatctgatgaggaagggtctggagatgaagattcagagggactgggtctggaggaatatgatgaggacgacctgggtgctgctgaggaacaggagtgtggtgatcacagggagagcaagaagagcagaagccactctgcaaaaacaccgggcttcagtgtccagagtatcagtgactttgagaaatttaccaagggaatggatgaccttgggagcagtgaggaggaggaagacgaagagagtggcatggaagaaggggatgacgcggaagactcccaaggcgagagtgaggaagacagggctggagatagaaacagtgaggatgatggtgtggtgatgaccttctctagtgtcaaagtttctgaggaagtggagaaaggaagagccgtgaagaaccagatagcactgtgggaccagctcttggaaggaaggatcaaactacaaaaagctctgttgaccaccaaccagcttcctcaaccagatgttttcccattgttcaaggacaaaggtggcccagaattttccagtgccctgaaaaatagtcacaaggcacttaaagcattgttgaggtcattggtaggtcttcaggaagagttgcttttccagtacccagacactagatatctagtagatgggacaaagcccaatgcgggaagtgaggagatttctagtgaagatgatgagctggtagaagagaagaagcagcaacgaagaagggtccctgcaaagaggaagctggagatggaggactatcccagcttcatggcaaagcgctttgccgactttacagtctacaggaaccgcacacttcagaaatggcacgataagaccaaactggcttctggaaaactggggaagggttttggtgcctttgaacgctcaatcttgactcagatcgaccatattctgatggacaaagagagattacttcgaaggacacagaccaagcgctccgtctatcgagttcttggcaaacctgagccagcagctcagcctgtcccagagagtttgccaggggaaccggagatccttcctcaagcccctgctaatgctcatctgaaggacttggatgaagaaatctttgatgatgatgacttttaccaccagctccttcgagaactcatagaacggaagaccagctccttggatcccaacgatcaggtggccatgggaaggcagtggcttgcaatccagaagttacgaagcaaaatccacaaaaaagtagataggaaagccagcaaaggcaggaaacttcggtttcatgtccttagcaagctactgagtttcatggcacctattgaccatactacaatgaatgatgatgccaggacagaactgtaccgctctctttttggccagctccaccctcccgacgaaggccacggggattgacatcgcccacctccgacacccagtgggcgccttggctggtgtggctgctggtccagatggaggaaaccagtgactttatggggctgagctagtagggaagcccctggaaagatgctgcgttccgaacctgtgcctaatacacgcaagggcgctgtcccgcccaaccgcttaaagccaaaataagagatgttacgcaaaaaaaaaaaaaggggggcgctaaagtacctggagggcagttacggttccagttttggcaaggggccaaagggcggtaaaggaggcgaggcgcggtaacagggcggaacggctggactcggggcccactcggggcccatgggccccagtagcgcggaaaaaaaggaggggaaccttttcgcgattgcgtgacaaacctccacagaagccagagaagtagagaaaaaggggtatactccagag

SEQ ID NO: 443142 - DNA, 2076 bp, Homo sapiens
agcgggccttcatgctagcaacgcccgcagtgacgcgcaggccccgccccctcccgcgcgcctcccggaagtggccggtccagagctgtggggtggcctccgcgcggtctctggcggagtcggggaatcggatcaaggcgagaggatccggcagggaaggagcttcggggccgggggttgggccgcacatttacgtgcgcgaagcggagtggaccgggagctggtgacgatggcggggccgcagcccctggcgctgcaactggaacagttgttgaacccgcgaccaagcgaggcggaccctgaagcggaccccgaggaagccactgctgccagggtgattgacaggtttgatgaaggggaagatggggaaggtgatttcctagtagtgggtagcattagaaaactggcatcagcctccctcttggacacggacaaaaggtattgcggcaaaaccacctctagaaaagcatggaatgaagaccattgggagcagactctgccaggatcgtctgatgaggaaatatctgatgaggaagggtctggagatgaagattcagagggactgggtctggaggaatatgatgaggacgacctgggtgctgctgaggaacaggagtgtggtgatcacagggagagcaagaagagcagaagccactctgcaaaaacaccgggcttcagtgtccagagtatcagtgactttgagaaatttaccaagggaatggatgaccttgggagcagtgaggaggaggaagacgaagagagtggcatggaagaaggggctggagatagaaacagtgaggatgatggtgtggtgatgaccttctctagtgtcaaagtttctgaggaagtggagaaaggaagagccgtgaagaaccagatagcactgtgggaccagctcttggaaggaaggatcaaactacaaaaagctctgttgaccaccaaccagcttcctcaaccagatgttttcccattgttcaaggacaaaggtggcccagaattttccagtgccctgaaaaatagtcacaaggcacttaaagcattgttgaggtcattggtaggtcttcaggaagagttgcttttccagtacccagacactagatatctagtagatgggacaaagcccaatgcgggaagtgaggagatttctagtgaagatgatgagctggtagaagagaagaagcagcaacgaagaagggtccctgcaaagaggaagctggagatggaggactatcccagcttcatggcaaagcgctttgccgactttacagtctacaggaaccgcacacttcagaaatggcacgataagaccaaactggcttctggaaaactggggaagggttttggtgcctttgaacgctcaatcttgactcagatcgaccatattctgatggacaaagagagattacttcgaaggacacagaccaagcgctccgtctatcgagttcttggcaaacctgagccagcagctcagcctgtcccagagagtttgccaggggaaccggagatccttcctcaagcccctgctaatgctcatctgaaggacttggatgaagaaatctttgatgatgatgacttttaccaccagctccttcgagaactcatagaacggaagaccagctccttggatcccaacgatcaggtggccatgggaaggcagtggcttgcaatccagaagttacgaagcaaaatccacaaaaaagtagataggaaagccagcaaaggcaggaaacttcggtttcatgtccttagcaagctactgagtttcatggcacctattgaccatactacaatgaatgatgatgccaggacagaactgtaccgctctctttttggccagctccaccctcccgacgaaggccacggggattgacatcgcccacctccgacacccagtgggcgccttggctggtgtggctgctggtccagatggaggaaaccagtgactttatggggctgagctagtagggaagcccctggaaagatgctgcgttccgaacctgtgcctaatacacgcaagggcgctgtcccgcccaaccccgcctttaaacgccacaaataaagagcattgttaccgcc

SEQ ID NO: 443143 - DNA, 1549 bp, Homo sapiens
agcgggccttcatgctagcaacgcccgcagtgacgcgcaggccccgccccctcccgcgcgcctcccggaagtggccggtccagagctgtggggtggcctccgcgcggtctctggcggagtcggggaatcggatcaaggcgagaggatccggcagggaaggagcttcggggccgggggttgggccgcacatttacgtgcgcgaagcggagtggaccgggagctggtgacgatggcggggccgcagcccctggcgctgcaactggaacagttgttgaacccgcgaccaagcgaggcggaccctgaagcggaccccgaggaagccactgctgccagggtgattgacaggtttgatgaaggggaagatggggaaggtgatttcctagatcaaactacaaaaagctctgttgaccaccaaccagcttcctcaaccagatgttttcccattgttcaaggacaaaggtggcccagaattttccagtgccctgaaaaatagtcacaaggcacttaaagcattgttgaggtcattggtaggtcttcaggaagagttgcttttccagtacccagacactagatatctagtagatgggacaaagcccaatgcgggaagtgaggagatttctagtgaagatgatgagctggtagaagagaagaagcagcaacgaagaagggtccctgcaaagaggaagctggagatggaggactatcccagcttcatggcaaagcgctttgccgactttacagtctacaggaaccgcacacttcagaaatggcacgataagaccaaactggcttctggaaaactggggaagggttttggtgcctttgaacgctcaatcttgactcagatcgaccatattctgatggacaaagagagattacttcgaaggacacagaccaagcgctccgtctatcgagttcttggcaaacctgagccagcagctcagcctgtcccagagagtttgccaggggaaccggagatccttcctcaagcccctgctaatgctcatctgaaggacttggatgaagaaatctttgatgatgatgacttttaccaccagctccttcgagaactcatagaacggaagaccagctccttggatcccaacgatcaggtggccatgggaaggcagtggcttgcaatccagaagttacgaagcaaaatccacaaaaaagtagataggaaagccagcaaaggcaggaaacttcggtttcatgtccttagcaagctactgagtttcatggcacctattgaccatactacaatgaatgatgatgccaggacagaactgtaccgctctctttttggccagctccaccctcccgacgaaggccacggggattgacatcgcccacctccgacacccagtgggcgccttggctggtgtggctgctggtccagatggaggaaaccagtgactttatggggctgagctagtagggaagcccctggaaagatgctgcgttccgaacctgtgcctaatacacgcaagggcgctgtcccgcccaaccccgcctttaaacgccacaaataaagagcattgttaccgcc

SEQ ID NO: 443144 - DNA, 2100 bp, Homo sapiens
agcgggccttcatgctagcaacgcccgcagtgacgcgcaggccccgccccctcccgcgcgcctcccggaagtggccggtccagagctgtggggtggcctccgcgcggtctctggcggagtcggggaatcggatcaaggcgagaggatccggcagggaaggagcttcggggccgggggttgggccgcacatttacgtgcgcgaagcggagtggaccgggagctggtgacgatggcggggccgcagcccctggcgctgcaactggaacagttgttgaacccgcgaccaagcgaggcggaccctgaagcggaccccgaggaagccactgctgccagggtgattgacaggtttgatgaaggggaagatggggaaggtgatttcctagtagtgggtagcattagaaaactggcatcagcctccctcttggacacggacaaaaggtattgcggcaaaaccacctctagaaaagcatggaatgaagaccattgggagcagactctgccaggatcgtctgatgaggaaatatctgatgaggaagggtctggagatgaagattcagagggactgggtctggaggaatatgatgaggacgacctgggtgctgctgaggaacaggagtgtggtgatcacagggagagcaagaagagcagaagccactctgcaaaaacaccgggcttcagtgtccagagtatcagtgactttgagaaatttaccaagggaatggatgaccttgggagcagtgaggaggaggaagacgaagagagtggcatggaagaaggggatgacgcggaagactcccaaggcgagagtgaggaagacagggctggagatagaaacagtgaggatgatggtgtggtgatgaccttctctagtgtcaaagtttctgaggaagtggagaaaggaagagccgtgaagaaccagatagcactgtgggaccagctcttggaaggaaggatcaaactacaaaaagctctgttgaccaccaaccagcttcctcaaccagatgttttcccattgttcaaggacaaaggtggcccagaattttccagtgccctgaaaaatagtcacaaggcacttaaagcattgttgaggtcattggtaggtcttcaggaagagttgcttttccagtacccagacactagatatctagtagatgggacaaagcccaatgcgggaagtgaggagatttctagtgaagatgatgagctggtagaagagaagaagcagcaacgaagaagggtccctgcaaagaggaagctggagatggaggactatcccagcttcatggcaaagcgctttgccgactttacagtctacaggaaccgcacacttcagaaatggcacgataagaccaaactggcttctggaaaactggggaagggttttggtgcctttgaacgctcaatcttgactcagatcgaccatattctgatggacaaagagagattacttcgaaggacacagaccaagcgctccgtctatcgagttcttggcaaacctgagccagcagctcagcctgtcccagagagtttgccaggggaaccggagatccttcctcaagcccctgctaatgctcatctgaaggacttggatgaagaaatctttgatgatgatgacttttaccaccagctccttcgagaactcatagaacggaagaccagctccttggatcccaacgatcaggtggccatgggaaggcagtggcttgcaatccagaagttacaagtagataggaaagccagcaaaggcaggaaacttcggtttcatgtccttagcaagctactgagtttcatggcacctattgaccatactacaatgaatgatgatgccaggacagaactgtaccgctctctttttggccagctccaccctcccgacgaaggccacggggattgacatcgcccacctccgacacccagtgggcgccttggctggtgtggctgctggtccagatggaggaaaccagtgactttatggggctgagctagtagggaagcccctggaaagatgctgcgttccgaacctgtgcctaatacacgcaagggcgctgtcccgcccaaccccgcctttaaacgccacaaataaagagcattgttaccgcc

SEQ ID NO: 443145 - DNA, 1012 bp, Homo sapiens
ctcgcgaccccgacgtggcttacccagacactagatatctagtagatgggacaaagcccaatgcgggaagtgaggagatttctagtgaagatgatgagctggtagaagagaagaagcagcaacgaagaagggtccctgcaaagaggaagctggagatggaggactatcccagcttcatggcaaagcgctttgccgactttacagtctacaggaaccgcacacttcagaaatggcacgataagaccaaactggcttctggaaaactggggaagggttttggtgcctttgaacgctcaatcttgactcagatcgaccatattctgatggacaaagagagattacttcgaaggacacagaccaagcgctccgtctatcgagttcttggcaaacctgagccagcagctcagcctgtcccagagagtttgccaggggaaccggagatccttcctcaagcccctgctaatgctcatctgaaggacttggatgaagaaatctttgatgatgatgacttttaccaccagctccttcgagaactcatagaacggaagaccagctccttggatcccaacgatcaggtggccatgggaaggcagtggcttgcaatccagaagttacgaagcaaaatccacaaaaaagtagataggaaagccagcaaaggcaggaaacttcggtttcatgtccttagcaagctactgagtttcatggcacctattgaccatactacaatgaatgatgatgccaggacagaactgtaccgctctctttttggccagctccaccctcccgacgaaggccacggggattgacatcgcccacctccgacacccagtgggcgccttggctggtgtggctgctggtccagatggaggaaaccagtgactttatggggctgagctagtagggaagcccctggaaagatgctgcgttccgaacctgtgcctaatacacgcaagggcgctgtcccgcccaaccccgcctttaaacgccacaaataaagagcattgttaccgcc

SEQ ID NO: 443146 - DNA, 981 bp, Homo sapiens
  misc_feature (1)..(1): n is a, c, g, or t
ntgtgctgcaacgactctcttaattttccaccgctacactgaggagatttctagtgaagatgatgagctggtagaagagaagaagcagcaacgaagaagggtccctgcaaagaggaagctggagatggaggactatcccagcttcatggcaaagcgctttgccgactttacagtctacaggaaccgcacacttcagaaatggcacgataagaccaaactggcttctggaaaactggggaagggttttggtgcctttgaacgctcaatcttgactcagatcgaccatattctgatggacaaagagagattacttcgaaggacacagaccaagcgctccgtctatcgagttcttggcaaacctgagccagcagctcagcctgtcccagagagtttgccaggggaaccggagatccttcctcaagcccctgctaatgctcatctgaaggacttggatgaagaaatctttgatgatgatgacttttaccaccagctccttcgagaactcatagaacggaagaccagctccttggatcccaacgatcaggtggccatgggaaggcagtggcttgcaatccagaagttacgaagcaaaatccacaaaaaagtagataggaaagccagcaaaggcaggaaacttcggtttcatgtccttagcaagctactgagtttcatggcacctattgaccatactacaatgaatgatgatgccaggacagaactgtaccgctctctttttggccagctccaccctcccgacgaaggccacggggattgacatcgcccacctccgacacccagtgggcgccttggctggtgtggctgctggtccagatggaggaaaccagtgactttatggggctgagctagtagggaagcccctggaaagatgctgcgttccgaacctgtgcctaatacacgcaagggcgctgtcccgcccaaccccgcctttaaacgccacaaataaagagcattgttaccgcc

SEQ ID NO: 443147 - DNA, 2037 bp, Homo sapiens
agcgggccttcatgctagcaacgcccgcagtgacgcgcaggccccgccccctcccgcgcgcctcccggaagtggccggtccagagctgtggggtggcctccgcgcggtctctggcggagtcggggaatcggatcaaggcgagaggatccggcagggaaggagcttcggggccgggggttgggccgcacatttacgtgcgcgaagcggagtggaccgggagctggtgacgatggcggggccgcagcccctggcgctgcaactggaacagttgttgaacccgcgaccaagcgaggcggaccctgaagcggaccccgaggaagccactgctgccagggtgattgacaggtttgatgaaggggaagatggggaaggtgatttcctagtagtgggtagcattagaaaactggcatcagcctccctcttggacacggacaaaaggtattgcggcaaaaccacctctagaaaagcatggaatgaagaccattgggagcagactctgccaggatcgtctgatgaggaaatatctgatgaggaagggtctggagatgaagattcagagggactgggtctggaggaatatgatgaggacgacctgggtgctgctgaggaacaggagtgtggtgatcacagggagagcaagaagagcagaagccactctgcaaaaacaccgggcttcagtgtccagagtatcagtgactttgagaaatttaccaagggaatggatgaccttgggagcagtgaggaggaggaagacgaagagagtggcatggaagaaggggatgacgcggaagactcccaaggcgagagtgaggaagacagggctggagatagaaacagtgaggatgatggtgtggtgatgaccttctctagtgtcaaagtttctgaggaagtggagaaaggaagagccgtgaagaaccagatagcactgtgggaccagctcttggaaggaaggatcaaactacaaaaagctctgttgaccaccaaccagcttcctcaaccagatgttttcccattgttcaaggacaaaggtggcccagaattttccagtgccctgaaaaatagtcacaaggcacttaaagcattgttgaggtcattggtaggtcttcaggaagagttgcttttccagtacccagacactagatatctagtagatgggacaaagcccaatgcgggaagtgaggagatttctagtgaagatgatgagctggtagaagagaagaagcagcaacgaagaagggtccctgcaaagaggaagctggagatggaggactatcccagcttcatggcaaagcgctttgccgactttacagtctacaggaaccgcacacttcagaaatggcacgataagaccaaactggcttctggaaaactggggaagggttttggtgcctttgaacgctcaatcttgactcagatcgaccatattctgatggacaaagagagattacttcgaaggacacagaccaagcgctccgtctatcgagttcttggcaaacctgagccagcagctcagcctgtcccagagagtttgccaggggaaccggagatccttcctcaagcccctgctaatgctcatctgaaggacttggatgaagaaatctttgatgatgatgacttttaccaccagctccttcgagaactcatagaacggaagaccagctccttggatcccaacgatcaggtggccatgggaaggcagtggcttgcaatccagaagttacgaagcaaaatccacaaaaaagtagataggaaagccagcaaaggcaggaaacttcggtttcatgtccttagcaagctactgagtttcatggcacctattgaccatactacaatgaatgatgatgccagacccagtgggcgccttggctggtgtggctgctggtccagatggaggaaaccagtgactttatggggctgagctagtagggaagcccctggaaagatgctgcgttccgaacctgtgcctaatacacgcaagggcgctgtcccgcccaaccccgcctttaaacgccacaaataaagagcattgttaccgcc

SEQ ID NO: 443148 - DNA, 1772 bp, Homo sapiens
agcgggccttcatgctagcaacgcccgcagtgacgcgcaggccccgccccctcccgcgcgcctcccggaagtggccggtccagagctgtggggtggcctccgcgcggtctctggcggagtcggggaatcggatcaaggcgagaggatccggcagggaaggagcttcggggccgggggttgggccgcacatttacgtgcgcgaagcggagtggaccgggagctggtgacgatggcggggccgcagcccctggcgctgcaactggaacagttgttgaacccgcgaccaagcgaggcggaccctgaagcggaccccgaggaagccactgctgccagggtgattgacaggtttgatgaaggggaagatggggaaggtgatttcctagtagtgggtagcattagaaaactggcatcagcctccctcttggacacggacaaaaggtattgcggcaaaaccacctctagaaaagcatggaatgaagaccattgggagcagactctgccaggatcgtctgatgaggaaatatctgatgaggaagggtctggagatgaagattcagagggactgggtctggaggaatatgatgaggacgacctgggtgctgctgaggaacaggagtgtggtgatcacagggagagcaagaagagcagaagccactctgcaaaaacaccgggcttcagtgtccagagtatcagtgactttgagaaatttaccaagggaatggatgaccttgggagcagtgaggaggaggaagacgaagagagtggcatggaagaaggggatgacgcggaagactcccaaggcgagagtgaggaagacagggctggagatagaaacagtgaggatgatggtgtggtgatgaccttctctagtgtcaaagtttctgaggaagtggagaaaggaagagccgtgaagaaccagatagcactgtgggaccagctcttggaaggaaggatcaaactacaaaaagctctgttgaccaccaaccagcttcctcaaccagatgttttcccattgttcaaggacaaaggtggcccagaattttccagtgccctgaaaaatagtcacaaggcacttaaagcattgttgaggtcattggtaggtcttcaggaagagttgcttttccagtacccagacactagatatctagtagatgggacaaagcccaatgcgggaagtgaggagatttctagtgaagatgatgagctggtagaagagaagaagcagcaacgaagaagggtccctgcaaagaggaagctggagatggaggactatcccagcttcatggcaaagcgctttgccgactttacagtctacaggaaccgcacacttcagaaatggcacgataagaccaaactggcttctggaaaactggggaagggttttggtgcctttgaacgctcaatcttgactcagatcgaccatattctgatggacaaagagagattacttcgaaggacacagaccaagcgctccgtctatcgagttcttggcaaacctgagccagcagctcagcctgtcccagagagtttgccaggggaaccggagatccttcctcaagcccctgctaatgctcatctgaaggacttggatgaagaaatctttgatgatgatgacttttaccaccagtttcttcgagaactcatagaagggaagacagtccttggatccaagatcagggggcatggaacgccgggttgcatccagaagtagaagaaaatcacaaaagtaattgaaaccgcaggcgggaatcggtagtctagaggaagggcag

SEQ ID NO: 443149 - DNA, 567 bp, Homo sapiens
gtaatgaatgtttcccctcttagctaatggggaggggagggctagctgcacgtctctcttattttcaccgctacagctccttcgagaactcatagaacggaagaccagctccttggatcccaacgatcaggtggccatgggaaggcagtggcttgcaatccagaagttacgaagcaaaatccacaaaaaagtagataggaaagccagcaaaggcaggaaacttcggtttcatgtccttagcaagctactgagtttcatggcacctattgaccatactacaatgaatgatgatgccaggacagaactgtaccgctctctttttggccagctccaccctcccgacgaaggccacggggattgacatcgcccacctccgacacccagtgggcgccttggctggtgtggctgctggtccagatggaggaaaccagtgactttatggggctgagctagtagggaagcccctggaaagatgctgcgttccgaacctgtgcctaatacacgcaagggcgctgtcccgcccaaccccgcctttaaacgccacaaataaagagcattgttaccgcc

SEQ ID NO: 443150 - DNA, 404 bp, Homo sapiens
  misc_feature (27)..(27): n is a, c, g, or t
  misc_feature (69)..(69): n is a, c, g, or t
  misc_feature (81)..(81): n is a, c, g, or t
ggccggaggggccgtttggggtagaanagttagagtctttggaaaaagccctcctgtagtataacactnctctttgacagnctactgagtttcatggcacctattgaccatactacaatgaatgatgatgccaggacagaactgtaccgctctctttttggccagctccaccctcccgacgaaggccacggggattgacatcgcccacctccgacacccagtgggcgccttggctggtgtggctgctggtccagatggaggaaaccagtgactttatggggctgagctagtagggaagcccctggaaagatgctgcgttccgaacctgtgcctaatacacgcaagggcgctgtcccgcccaaccccgcctttaaacgccacaaataaagagcattgttaccgcc

SEQ ID NO: 443151 - DNA, 349 bp, Homo sapiens
  misc_feature (21)..(21): n is a, c, g, or t
  misc_feature (52)..(52): n is a, c, g, or t
aagccgcaaagcagaaacggntcagtccttagcagttatgagctggcacctntgacctactacatgaatgatgatgccggacagaactgtaccgctctctttttggccagctccaccctcccgacgaaggccacggggattgacatcgcccacctccgacacccagtgggcgccttggctggtgtggctgctggtccagatggaggaaaccagtgactttatggggctgagctagtagggaagcccctggaaagatgctgcgttccgaacctgtgcctaatacacgcaagggcgctgtcccgcccaaccccgcctttaaacgccacaaataaagagcattgttaccgcc

SEQ ID NO: 443152 - DNA, 2167 bp, Homo sapiens
agcgggccttcatgctagcaacgcccgcagtgacgcgcaggccccgccccctcccgcgcgcctcccggaagtggccggtccagagctgtggggtggcctccgcgcggtctctggcggagtcggggaatcggatcaaggcgagaggatccggcagggaaggagcttcggggccgggggttgggccgcacatttacgtgcgcgaagcggagtggaccgggagctggtgacgatggcggggccgcagcccctggcgctgcaactggaacagttgttgaacccgcgaccaagcgaggcggaccctgaagcggaccccgaggaagccactgctgccagggtgattgacaggtttgatgaaggggaagatggggaaggtgatttcctagtagtgggtagcattagaaaactggcatcagcctccctcttggacacggacaaaaggtattgcggcaaaaccacctctagaaaagcatggaatgaagaccattgggagcagactctgccaggatcgtctgatgaggaaatatctgatgaggaagggtctggagatgaagattcagagggactgggtctggaggaatatgatgaggacgacctgggtgctgctgaggaacaggagtgtggtgatcacagggagagcaagaagagcagaagccactctgcaaaaacaccgggcttcagtgtccagagtatcagtgactttgagaaatttaccaagggaatggatgaccttgggagcagtgaggaggaggaagacgaagagagtggcatggaagaaggggatgacgcggaagactcccaaggcgagagtgaggaagacagggctggagatagaaacagtgaggatgatggtgtggtgatgaccttctctagtgtcaaagtttctgaggaagtggagaaaggaagagccgtgaagaaccagatagcactgtgggaccagctcttggaaggaaggatcaaactacaaaaagctctgttgaccaccaaccagcttcctcaaccagatgttttcccattgttcaaggacaaaggtggcccagaattttccagtgccctgaaaaatagtcacaaggcacttaaagcattgttgaggtcattggtaggtcttcaggaagagttgcttttccagtacccagacactagatatctagtagatgggacaaagcccaatgcgggaagtgaggagatttctagtgaagatgatgagctggtagaagagaagaagcagcaacgaagaagggtccctgcaaagaggaagctggagatggaggactatcccagcttcatggcaaagcgctttgccgactttacagtctacaggaaccgcacacttcagaaatggcacgataagaccaaactggcttctggaaaactggggaagggttttggtgcctttgaacgctcaatcttgactcagatcgaccatattctgatggacaaagagagattacttcgaaggacacagaccaagcgctccgtctatcgagttcttggcaaacctgagccagcagctcagcctgtcccagagagtttgccaggggaaccggagatccttcctcaagcccctgctaatgctcatctgaaggacttggatgaagaaatctttgatgatgatgacttttaccaccagctccttcgagaactcatagaacggaagaccagctccttggatcccaacgatcaggtggccatgggaaggcagtggcttgcaatccagaagttacgaagcaaaatccacaaaaaagtagataggaaagccagcaaaggcaggaaacttcggtttcatgtccttagcaagctactgagtttcatggcacctattgaccatactacaatgaatgatgatgccaggacagaactgtaccgctctctttttggccagctccaccctcccgacgaaggccacggggattgacatcgcccacctccgacacccagtgggcgccttggctggtgtggctgctggtccagatggaggaaaccagtgactttatggggctgagctagtagggaagcccctggaaagatgctgcgttccgaacctgtgcctaatacacgcaagggcgctgtcccgcccaaccccgcctttaaacgccacaaataaagagcattgttaccgccggatcggctagtcctcgccgcgtatgtggctttgtcttggtcgtgcaga

SEQ ID NO: 443153 - DNA, 2167 bp, Homo sapiens
agcgggccttcatgctagcaacgcccgcagtgacgcgcaggccccgccccctcccgcgcgcctcccggaagtggccggtccagagctgtggggtggcctccgcgcggtctctggcggagtcggggaatcggatcaaggcgagaggatccggcagggaaggagcttcggggccgggggttgggccgcacatttacgtgcgcgaagcggagtggaccgggagctggtgacgatggcggggccgcagcccctggcgctgcaactggaacagttgttgaacccgcgaccaagcgaggcggaccctgaagcggaccccgaggaagccactgctgccagggtgattgacaggtttgatgaaggggaagatggggaaggtgatttcctagtagtgggtagcattagaaaactggcatcagcctccctcttggacacggacaaaaggtattgcggcaaaaccacctctagaaaagcatggaatgaagaccattgggagcagactctgccaggatcgtctgatgaggaaatatctgatgaggaagggtctggagatgaagattcagagggactgggtctggaggaatatgatgaggacgacctgggtgctgctgaggaacaggagtgtggtgatcacagggagagcaagaagagcagaagccactctgcaaaaacaccgggcttcagtgtccagagtatcagtgactttgagaaatttaccaagggaatggatgaccttgggagcagtgaggaggaggaagacgaagagagtggcatggaagaaggggatgacgcggaagactcccaaggcgagagtgaggaagacagggctggagatagaaacagtgaggatgatggtgtggtgatgaccttctctagtgtcaaagtttctgaggaagtggagaaaggaagagccgtgaagaaccagatagcactgtgggaccagctcttggaaggaaggatcaaactacaaaaagctctgttgaccaccaaccagcttcctcaaccagatgttttcccattgttcaaggacaaaggtggcccagaattttccagtgccctgaaaaatagtcacaaggcacttaaagcattgttgaggtcattggtaggtcttcaggaagagttgcttttccagtacccagacactagatatctagtagatgggacaaagcccaatgcgggaagtgaggagatttctagtgaagatgatgagctggtagaagagaagaagcagcaacgaagaagggtccctgcaaagaggaagctggagatggaggactatcccagcttcatggcaaagcgctttgccgactttacagtctacaggaaccgcacacttcagaaatggcacgataagaccaaactggcttctggaaaactggggaagggttttggtgcctttgaacgctcaatcttgactcagatcgaccatattctgatggacaaagagagattacttcgaaggacacagaccaagcgctccgtctatcgagttcttggcaaacctgagccagcagctcagcctgtcccagagagtttgccaggggaaccggagatccttcctcaagcccctgctaatgctcatctgaaggacttggatgaagaaatctttgatgatgatgacttttaccaccagctccttcgagaactcatagaacggaagaccagctccttggatcccaacgatcaggtggccatgggaaggcagtggcttgcaatccagaagttacgaagcaaaatccacaaaaaagtagataggaaagccagcaaaggcaggaaacttcggtttcatgtccttagcaagctactgagtttcatggcacctattgaccatactacaatgaatgatgatgccaggacagaactgtaccgctctctttttggccagctccaccctcccgacgaaggccacggggattgacatcgcccacctccgacacccagtgggcgccttggctggtgtggctgctggtccagatggaggaaaccagtgactttatggggctgagctagtagggaagcccctggaaagatgctgcgttccgaacctgtgcctaatacacgcaagggcgctgtcccgcccaaccccgcctttaaacgccacaaataaagagcattgttaccgccggatgcggccgaactctttatcatatttgttgtatgtccccaccccccg

SEQ ID NO: 443154 - DNA, 1772 bp, Homo sapiens
ggcgtctagaggatcccgctgcgctactactacctagtagtgggtagcattagaaaactggcatcagcctccctcttggacacggacaaaaggtattgcggcaaaaccacctctagaaaagcatggaatgaagaccattgggagcagactctgccaggatcgtctgatgaggaaatatctgatgaggaagggtctggagatgaagattcagagggactgggtctggaggaatatgatgaggacgacctgggtgctgctgaggaacaggagtgtggtgatcacagggagagcaagaagagcagaagccactctgcaaaaacaccgggcttcagtgtccagagtatcagtgactttgagaaatttaccaagggaatggatgaccttgggagcagtgaggaggaggaagacgaagagagtggcatggaagaaggggatgacgcggaagactcccaaggcgagagtgaggaagacagggctggagatagaaacagtgaggatgatggtgtggtgatgaccttctctagtgtcaaagtttctgaggaagtggagaaaggaagagccgtgaagaaccagatagcactgtgggaccagctcttggaaggaaggatcaaactacaaaaagctctgttgaccaccaaccagcttcctcaaccagatgttttcccattgttcaaggacaaaggtggcccagaattttccagtgccctgaaaaatagtcacaaggcacttaaagcattgttgaggtcattggtaggtcttcaggaagagttgcttttccagtacccagacactagatatctagtagatgggacaaagcccaatgcgggaagtgaggagatttctagtgaagatgatgagctggtagaagagaagaagcagcaacgaagaagggtccctgcaaagaggaagctggagatggaggactatcccagcttcatggcaaagcgctttgccgactttacagtctacaggaaccgcacacttcagaaatggcacgataagaccaaactggcttctggaaaactggggaagggttttggtgcctttgaacgctcaatcttgactcagatcgaccatattctgatggacaaagagagattacttcgaaggacacagaccaagcgctccgtctatcgagttcttggcaaacctgagccagcagctcagcctgtcccagagagtttgccaggggaaccggagatccttcctcaagcccctgctaatgctcatctgaaggacttggatgaagaaatctttgatgatgatgacttttaccaccagctccttcgagaactcatagaacggaagaccagctccttggatcccaacgatcaggtggccatgggaaggcagtggcttgcaatccagaagttacgaagcaaaatccacaaaaaagtagataggaaagccagcaaaggcaggaaacttcggtttcatgtccttagcaagctactgagtttcatggcacctattgaccatactacaatgaatgatgatgccaggacagaactgtaccgctctctttttggccagctccaccctcccgacgaaggccacggggattgacatcgcccacctccgacacccagtgggcgccttggctggtgtggctgctggtccagatggaggaaaccagtgactttatggggctgagctagtagggaagcccctggaaagatgctgcgttccgaacctgtgcctaatacacgcaagggcgctgtcccgcccaaccccgcctttaaacgccacaaataaagagcattgttaccgcc

SEQ ID NO: 443155 - DNA, 1437 bp, Homo sapiens
tgtgctgaggtgatctagaggatcccagttcgacggagactctcgccttgggagcagtgaggaggaggaagacgaagagagtggcatggaagaaggggatgacgcggaagactcccaaggcgagagtgaggaagacagggctggagatagaaacagtgaggatgatggtgtggtgatgaccttctctagtgtcaaagtttctgaggaagtggagaaaggaagagccgtgaagaaccagatagcactgtgggaccagctcttggaaggaaggatcaaactacaaaaagctctgttgaccaccaaccagcttcctcaaccagatgttttcccattgttcaaggacaaaggtggcccagaattttccagtgccctgaaaaatagtcacaaggcacttaaagcattgttgaggtcattggtaggtcttcaggaagagttgcttttccagtacccagacactagatatctagtagatgggacaaagcccaatgcgggaagtgaggagatttctagtgaagatgatgagctggtagaagagaagaagcagcaacgaagaagggtccctgcaaagaggaagctggagatggaggactatcccagcttcatggcaaagcgctttgccgactttacagtctacaggaaccgcacacttcagaaatggcacgataagaccaaactggcttctggaaaactggggaagggttttggtgcctttgaacgctcaatcttgactcagatcgaccatattctgatggacaaagagagattacttcgaaggacacagaccaagcgctccgtctatcgagttcttggcaaacctgagccagcagctcagcctgtcccagagagtttgccaggggaaccggagatccttcctcaagcccctgctaatgctcatctgaaggacttggatgaagaaatctttgatgatgatgacttttaccaccagctccttcgagaactcatagaacggaagaccagctccttggatcccaacgatcaggtggccatgggaaggcagtggcttgcaatccagaagttacgaagcaaaatccacaaaaaagtagataggaaagccagcaaaggcaggaaacttcggtttcatgtccttagcaagctactgagtttcatggcacctattgaccatactacaatgaatgatgatgccaggacagaactgtaccgctctctttttggccagctccaccctcccgacgaaggccacggggattgacatcgcccacctccgacacccagtgggcgccttggctggtgtggctgctggtccagatggaggaaaccagtgactttatggggctgagctagtagggaagcccctggaaagatgctgcgttccgaacctgtgcctaatacacgcaagggcgctgtcccgcccaaccccgcctttaaacgccacaaataaagagcattgttaccgcc

SEQ ID NO: 443156 - DNA, 1176 bp, Homo sapiens
attggtggtcaacagagctttttgtagtttgatccttccttccaagagctggtcccacagtgctatctggttcttcacggacaaaggtggcccagaattttccagtgccctgaaaaatagtcacaaggcacttaaagcattgttgaggtcattggtaggtcttcaggaagagttgcttttccagtacccagacactagatatctagtagatgggacaaagcccaatgcgggaagtgaggagatttctagtgaagatgatgagctggtagaagagaagaagcagcaacgaagaagggtccctgcaaagaggaagctggagatggaggactatcccagcttcatggcaaagcgctttgccgactttacagtctacaggaaccgcacacttcagaaatggcacgataagaccaaactggcttctggaaaactggggaagggttttggtgcctttgaacgctcaatcttgactcagatcgaccatattctgatggacaaagagagattacttcgaaggacacagaccaagcgctccgtctatcgagttcttggcaaacctgagccagcagctcagcctgtcccagagagtttgccaggggaaccggagatccttcctcaagcccctgctaatgctcatctgaaggacttggatgaagaaatctttgatgatgatgacttttaccaccagctccttcgagaactcatagaacggaagaccagctccttggatcccaacgatcaggtggccatgggaaggcagtggcttgcaatccagaagttacgaagcaaaatccacaaaaaagtagataggaaagccagcaaaggcaggaaacttcggtttcatgtccttagcaagctactgagtttcatggcacctattgaccatactacaatgaatgatgatgccaggacagaactgtaccgctctctttttggccagctccaccctcccgacgaaggccacggggattgacatcgcccacctccgacacccagtgggcgccttggctggtgtggctgctggtccagatggaggaaaccagtgactttatggggctgagctagtagggaagcccctggaaagatgctgcgttccgaacctgtgcctaatacacgcaagggcgctgtcccgcccaaccccgcctttaaacgccacaaataaagagcattgttaccgcc

SEQ ID NO: 443157 - DNA, 1065 bp, Homo sapiens
catcttgttgcctgccctcgctctagaggatccccgagtgggtcagtgtcttcaggaagagttgcttttccagtacccagacactagatatctagtagatgggacaaagcccaatgcgggaagtgaggagatttctagtgaagatgatgagctggtagaagagaagaagcagcaacgaagaagggtccctgcaaagaggaagctggagatggaggactatcccagcttcatggcaaagcgctttgccgactttacagtctacaggaaccgcacacttcagaaatggcacgataagaccaaactggcttctggaaaactggggaagggttttggtgcctttgaacgctcaatcttgactcagatcgaccatattctgatggacaaagagagattacttcgaaggacacagaccaagcgctccgtctatcgagttcttggcaaacctgagccagcagctcagcctgtcccagagagtttgccaggggaaccggagatccttcctcaagcccctgctaatgctcatctgaaggacttggatgaagaaatctttgatgatgatgacttttaccaccagctccttcgagaactcatagaacggaagaccagctccttggatcccaacgatcaggtggccatgggaaggcagtggcttgcaatccagaagttacgaagcaaaatccacaaaaaagtagataggaaagccagcaaaggcaggaaacttcggtttcatgtccttagcaagctactgagtttcatggcacctattgaccatactacaatgaatgatgatgccaggacagaactgtaccgctctctttttggccagctccaccctcccgacgaaggccacggggattgacatcgcccacctccgacacccagtgggcgccttggctggtgtggctgctggtccagatggaggaaaccagtgactttatggggctgagctagtagggaagcccctggaaagatgctgcgttccgaacctgtgcctaatacacgcaagggcgctgtcccgcccaaccccgcctttaaacgccacaaataaagagcattgttaccgcc

SEQ ID NO: 443158 - DNA, 2046 bp, Homo sapiens
agcgggccttcatgctagcaacgcccgcagtgacgcgcaggccccgccccctcccgcgcgcctcccggaagtggccggtccagagctgtggggtggcctccgcgcggtctctggcggagtcggggaatcggatcaaggcgagaggatccggcagggaaggagcttcggggccgggggttgggccgcacatttacgtgcgcgaagcggagtggaccgggagctggtgacgatggcggggccgcagcccctggcgctgcaactggaacagttgttgaacccgcgaccaagcgaggcggaccctgaagcggaccccgaggaagccactgctgccagggtgattgacaggtttgatgaaggggaagatggggaaggtgatttcctagtagtgggtagcattagaaaactggcatcagcctccctcttggacacggacaaaaggtattgcggcaaaaccacctctagaaaagcatggaatgaagaccattgggagcagactctgccaggatcgtctgatgaggaaatatctgatgaggaagggtctggagatgaagattcagagggactgggtctggaggaatatgatgaggacgacctgggtgctgctgaggaacaggagtgtggtgatcacagggagagcaagaagagcagaagccactctgcaaaaacaccgggcttcagtgtccagagtatcagtgactttgagaaatttaccaagggaatggatgaccttgggagcagtgaggaggaggaagacgaagagagtggcatggaagaaggggatgacgcggaagactcccaaggcgagagtgaggaagacagggctggagatagaaacagtgaggatgatggtgtggtgatgaccttctctagtgtcaaagtttctgaggaagtggagaaaggaagagccgtgaagaaccagatagcactgtgggaccagctcttggaaggaaggatcaaactacaaaaagctctgttgaccaccaaccagcttcctcaaccagatgttttcccattgttcaaggacaaaggtggcccagaattttccagtgccctgaaaaatagtcacaaggcacttaaagcattgttgaggtcattggtaggtcttcaggaagagttgcttttccagtacccagacactagatatctagtagatgggacaaagcccaatgcgggaagtgaggagatttctagtgaagatgatgagctggtagaagagaagaagcagcaacgaagaagggtccctgcaaagaggaagctggagatggaggactatcccagcttcatggcaaagcgctttgccgactttacagtctacaggaaccgcacacttcagaaatggcacgataagaccaaactggcttctggaaaactggggaagggttttggtgcctttgaacgctcaatcttgactcagatcgaccatattctgatggacaaagagagattacttcgaaggacacagaccaagcgctccgtctatcgagttcttggcaaacctgagccagcagctcagcctgtcccagagagtttgccaggggaaccggagatccttcctcaagcccctgctaatgctcatctgaaggacttggatgaagaaatctttgatgatgatgacttttaccaccagctccttcgagaactcatagaacggaagaccagctccttggatcccaacgatcaggtggccatgggaaggcagtggcttgcaatccagaagttacgaagcaaaatccacaaaaaagtagataggaaagccagcaaaggcaggaaacttcggacagaactgtaccgctctctttttggccagctccaccctcccgacgaaggccacggggattgacatcgcccacctccgacacccagtgggcgccttggctggtgtggctgctggtccagatggaggaaaccagtgactttatggggctgagctagtagggaagcccctggaaagatgctgcgttccgaacctgtgcctaatacacgcaagggcgctgtcccgcccaaccccgcctttaaacgccacaaataaagagcattgttaccgcc

SEQ ID NO: 443159 - DNA, 2255 bp, Homo sapiens
  misc_feature (2255)..(2255): n is a, c, g, or t
agcgggccttcatgctagcaacgcccgcagtgacgcgcaggccccgccccctcccgcgcgcctcccggaagtggccggtccagagctgtggggtggcctccgcgcggtctctggcggagtcggggaatcggatcaaggcgagaggatccggcagggaaggagcttcggggccgggggttgggccgcacatttacgtgcgcgaagcggagtggaccgggagctggtgacgatggcggggccgcagcccctggcgctgcaactggaacagttgttgaacccgcgaccaagcgaggcggaccctgaagcggaccccgaggaagccactgctgccagggtgattgacaggtttgatgaaggggaagatggggaaggtgatttcctagtagtgggtagcattagaaaactggcatcagcctccctcttggacacggacaaaaggtattgcggcaaaaccacctctagaaaagcatggaatgaagaccattgggagcagactctgccaggatcgtctgatgaggaaatatctgatgaggaagggtctggagatgaagattcagagggactgggtctggaggaatatgatgaggacgacctgggtgctgctgaggaacaggagtgtggtgatcacagggagagcaagaagagcagaagccactctgcaaaaacaccgggcttcagtgtccagagtatcagtgactttgagaaatttaccaagggaatggatgaccttgggagcagtgaggaggaggaagacgaagagagtggcatggaagaaggggatgacgcggaagactcccaaggcgagagtgaggaagacagggctggagatagaaacagtgaggatgatggtgtggtgatgaccttctctagtgtcaaagtttctgaggaagtggagaaaggaagagccgtgaagaaccagatagcactgtgggaccagctcttggaaggaaggatcaaactacaaaaagctctgttgaccaccaaccagcttcctcaaccagatgttttcccattgttcaaggacaaaggtggcccagaattttccagtgccctgaaaaatagtcacaaggcacttaaagcattgttgaggtcattggtaggtcttcaggaagagttgcttttccagtacccagacactagatatctagtagatgggacaaagcccaatgcgggaagtgaggagatttctagtgaagatgatgagctggtagaagagaagaagcagcaacgaagaagggtccctgcaaagaggaagctggagatggaggactatcccagcttcatggcaaagcgctttgccgactttacagtctacaggaaccgcacacttcagaaatggcacgataagaccaaactggcttctggaaaactggggaagggttttggtgcctttgaacgctcaatcttgactcagatcgaccatattctgatggacaaagagagattacttcgaaggacacagaccaagcgctccgtctatcgagttcttggcaaacctgagccagcagctcagcctgtcccagagagtttgccaggggaaccggagatccttcctcaagcccctgctaatgctcatctgaaggacttggatgaagaaatctttgatgatgatgacttttaccaccagctccttcgagaactcatagaacggaagaccagctccttggatcccaacgatcaggtggccatgggaaggcagtggcttgcaatccagaagttacgaagcaaaatccacaaaaaagtagataggaaagccagcaaaggcaggaaacttcggacagaactgtaccgctctctttttggccagctccaccctcccgacgaaggccacggggattgacatcgcccacctccgacacccagtgggcgccttggctggtgtggctgctggtccagatggaggaaaccagtgactttatggggctgagctagtagggaagcccctggaaagatgctgcgttccgaacctgtgcctaatacacgcaagggcgctgtcccgcccaaccccgcctttaaacgccacaaataaagagcattgttaccgcctggcctcgttggcctcagcggtggagctctgcggccggatccttgtatggggggtaattcatgaacctggcttcactaactcgtgcgcttggcccgtcgggtggggcgagcggatcacctcactctaaggcggggttacgggtttcccccaatccgggggatatccatggaaggacatttgatctaaagggcacggtaagggcaggaan

SEQ ID NO: 443160 - DNA, 1629 bp, Homo sapiens
agcgggccttcatgctagcaacgcccgcagtgacgcgcaggccccgccccctcccgcgcgcctcccggaagtggccggtccagagctgtggggtggcctccgcgcggtctctggcggagtcggggaatcggatcaaggcgagaggatccggcagggaaggagcttcggggccgggggttgggccgcacatttacgtgcgcgaagcggagtggaccgggagctggtgacgatggcggggccgcagcccctggcgctgcaactggaacagttgttgaacccgcgaccaagcgaggcggaccctgaagcggaccccgaggaagccactgctgccagggtgattgacaggtttgatgaaggggaagatggggaaggtgatttcctagtagtgggtagcattagaaaactggcatcagcctccctcttggacacggacaaaaggtattgcggcaaaaccacctctagaaaagcatggaatgaagaccattgggagcagactctgccaggatcgtctgatgaggaaatatctgatgaggaagggtctggagatgaagattcagagggactgggtctggaggaatatgatgaggacgacctgggtgctgctgaggaacaggagtgtggtgatcacagggagagcaagaagagcagaagccactctgcaaaaacaccgggcttcagtgtccagagtatcagtgactttgagaaatttaccaagggaatggatgaccttgggagcagtgaggaggaggaagacgaagagagtggcatggaagaaggggatgacgcggaagactcccaaggcgagagtgaggaagacagggctggagatagaaacagtgaggatgatggtgtggtgatgaccttctctagtgtcaaagtttctgaggaagtggagaaaggaagagccgtgaagaaccagatagcactgtgggaccagctcttggaaggaaggatcaaactacaaaaagctctgttgaccaccaaccagcttcctcaaccagatgttttcccattgttcaaggacaaaggtggcccagaattttccagtgccctgaaaaatagtcacaaggcacttaaagcattgttgaggtcattggtaggtcttcaggaagagttgcttttccagtacccagacactagatatctagtagatgggacaaagcccaatgcgggaagtgaggagatttctagtgaagatgatgagctggtagaagagaagaagcagcaacgaagaagggtccctgcaaagaggaagctggagatggaggactatcccagcttcatggcaaagcgctttgccgactttacagtctacaggaaccgcacacttcagaaatggcacgataagaccaaactggcttctggaaaactggggaagggttttggtgcctttgaacgctcaatcttgactcagatcgaccatattctgatggacaaagagagattacttcgaaggacacagaccaagcgctccgtctatcgagttcttggatctttctcagcccctgttatggttattgaagacttggtgaagaaatttttatgaagaagacttttacaccagttcttgggaacttattaaacgaaaccccttccttggatccaacatcagggggcatgggagggaaa

SEQ ID NO: 443161 - DNA, 661 bp, Homo sapiens
agagatccccttcgattggcgggccacttatgcacgcttaactatcttaacaagctttgagtgcaagagattgaagagttcaaatctgaccaagatgttgatgttggataagagaattctctgctccccacctctaagttgcccgcccatcgaatcgattggcgggcaacttacttggagttagagccaagctgtcagacggtgcccagcacacattaatgttagcttctttctgagaaaaaaatacctcttccaggccctgaaacaaaaaatacatttgctgtgaagattgaaaatgaacaaagttagaaaaaaaaacagcaaaatcagtgatttagtcagatgagtttttcgttgtaggagcacttgatttctagtgtgttttgtacagtatataactacaagatagtacattttgtagcagttcaaagccaaagttgctagcatcattttgctgttgtgccagttaatcataggatcccattaaatcagatcaactgtccgccaatcgattcgattggcgggcaacttatgcacgcttaactatcttaacagctttgagtgcagagattgaagagttcaaatctgaccagatgttgatgttggataagagattctctgctccccacctctaagtgcccgccaatcgaaggaccgctga

SEQ ID NO: 443162 - DNA, 360 bp, Homo sapiens
  misc_feature (11)..(11): n is a, c, g, or t
gagctgcgtcnggtagccaagccccattcctgcgagacacctgttgtgcctacttgcggatttcaccgcgcccgttcctccgccccccacttcccacacaaaagcccatgaatgtgggcttatcagaaactcaaaatggaggcatgtctcaagaagcagtgggaaatataaaagttacaaagtctccccagaaatccactgtattaaccaatggagaagcagcaatgcagtcttccaattcagaatcaaaaaagaaaaagaagaaaaagagaaaaatggtgaatgatgctgagcctgatacgaataagcctcactgttactaaggggagtctgaagtagcaagataccgggatacatcaa

SEQ ID NO: 443163 - DNA, 4027 bp, Homo sapiens
agctgaccacgtgcggccggaagggaagtaacgtcagcctgagaactgagtagctgtactgtgtggcgccttattctaggcacttgttgggcagaatgtcacacctgccgatgaaactcctgcgtaagaagatcgagaagcggaacctcaaattgcggcagcggaacctaaagtttcagggggcctcaaatctgaccctatcggaaactcaaaatggagatgtatctgaagaaacaatgggaagtagaaaggttaaaaaatcaaaacaaaagcccatgaatgtgggcttatcagaaactcaaaatggaggcatgtctcaagaagcagtgggaaatataaaagttacaaagtctccccagaaatccactgtattaaccaatggagaagcagcaatgcagtcttccaattcagaatcaaaaaagaaaaagaagaaaaagagaaaaatggtgaatgatgctgagcctgatacgaaaaaagcaaaaactgaaaacaaagggaaatctgaagaagaaagtgccgagactactaaagaaacagaaaataatgtggagaagccagataatgatgaagatgagagtgaggtgcccagtctgcccctgggactgacaggagcttttgaggatacttcgtttgcttctctatgtaatcttgtcaatgaaaacactctgaaggcaataaaagaaatgggttttacaaacatgactgaaattcagcataaaagtatcagaccacttctggaaggcagggatcttctagcagctgcaaaaacaggcagtggtaaaaccctggcttttctcatccctgcagttgaactcattgttaagttaaggttcatgcccaggaatggaacaggagtccttattctctcacctactagagaactagccatgcaaacctttggtgttcttaaggagctgatgactcaccacgtgcatacctatggcttgataatgggtggcagtaacagatctgctgaagcacagaaacttggtaatgggatcaacatcattgtggccacaccaggccgtctgctggaccatatgcagaataccccaggatttatgtataaaaacctgcagtgtctggttattgatgaagctgatcgtatcttggatgtggggtttgaagaggaattaaagcaaattattaaacttttgccaacacgtagacagactatgctcttttctgccacccaaactcgaaaagttgaagacctggcaaggatttctctgaaaaaggagccattgtatgttggcgttgatgatgataaagcgaatgcaacagtggatggtcttgaacagggatatgttgtttgtccttctgaaaagagattccttctgctctttacattccttaagaagaaccgaaagaagaagcttatggtcttcttttcatcttgtatgtctgtgaaataccactatgagttgctgaactacattgatttgcccgtcttggccattcatggaaagcaaaagcaaaataagcgtacaaccacattcttccagttctgcaatgcagattcgggaacactattgtgtacggatgtggcagcgagaggactagacattcctgaagtcgactggattgttcagtatgaccctccggatgaccctaaggaatatattcatcgtgtgggtagaacagccagaggcctaaatgggagagggcatgccttgctcattttgcgcccagaagaattgggttttcttcgctacttgaaacaatccaaggttccattaagtgaatttgacttttcctggtctaaaatttctgacattcagtctcagcttgagaaattgattgaaaagaattactttcttcataagtcagcccaggaagcatataagtcatacatacgagcctatgattcccattctctgaaacagatctttaatgttaataacctaaatttgcctcaggttgctctgtcatttggtttcaaggtgcctcccttcgttgatctgaacgtcaacagtaatgaaggcaagcagaaaaagcgaggaggtggtggtggatttggctaccagaaaaccaagaaagttgagaaatccaaaatctttaaacacattagcaagaaatcatctgacagcaggcagttctctcactgaacacatgccttcctttcatcttgaataactttgtcctaaaatgaattttttttccccttgatttaacaggatttttgtagactttagaatttggacttacctaacaagagtataaattgacttgggttgcaagcactgagcactgttacttctatcacgtctctcttttatttctgggatataaaacaggctttaagtttcttggttgcccaagggcagagcaaggaatatctggtgtttcttgtgatgataatattttaattttaaatatccctccctcatacaagtgtatgttaccattttaatataattctttttgtacctttccttcttgttttgtgaagatttttgtggcatggattgctgtgctcactgctgtaaaaggtgacctagtgtactgggcagctggtggcggtgcagaaaagagtctcaggttattttttgtttttagttatttcttggaccttgacagtatctaatgactcctcctgaaaatgctgcagtataaaagagcaaagagctttgggaaatacctaagaagcaccttaagattagggtggcattgcttttatagattcttgattttaaagcaacaggcctttctcaggtgttgcattttttggagcaaaaactatgggttgtaatttgaataaagtgtcactaagcagttataacgtttgatggctggggggtaggaagaggatggaattgagatgtttgagcctcatttacatcaatagaggtgtaatgtactgcatttcttcatttggtaacataacaaagactttcatacaaagaacgatgatgctcctcattaagatttgtttaattcaaggtggtttggatttggtaagcctttgcactctgtagagtacttagaagacaagggcaacttacttggagttagagccaagctgtcagacggtgcccagcacacattaatgttagcttctttctgagaaaaaaatacctcttccaggccctgaaacaaaaaatacatttgctgtgaagattgaaaatgaacaaagttagaaaaaaaaacagcaaaatcagtgatttagtcagatgagtttttcgttgtaggagcacttgatttctagtgtgttttgtacagtatataactacaagatagtacattttgtagcagttcaaagccaaagttgctagcatcattttgctgttgtgccagttaatcataggatcccattaaataagtgtgctaacatcgaatatagagaaaactggtaaagaacattccagtaggaaaagaaaagaacaatcttccatttctgggcttggccaccatcaccctggtcggacctgtcctggacttccaaccttgactgctgagctcctggcttagcttcttgggttcctaattcctggtgtttaataattctctccacgatcatgtttttctgattttttttttcagaaataatgttttttaaaagacaaaaacaaagggaagaatatttaattactgagcagaagtaaatactgttggtattttgtacataatctaatttttatatgcatgttcatgctttttaatttttttatcaaaaattaagtcatctacctactacttgtaaccagcttgtttcataacatgttattttcctgtgtcattaaataattacttcaatgttgtaaaaaaaaaaaaaaaaaaacctcgtgccgaattcggcacgaggcttttcatgtctttgatctggttttattcctgtaattcagccacctgattttgtgaggggggggaataatatgtggtttttgtacaaacatgtttctcagtgtgttgttattttggaaaaaatgaggggagggagtttggcaagaatggagaaaatgaatgaagaaggcctaaactctctctttttcagtgaataaatggaaccccaaataaagaaaaaaaa

SEQ ID NO: 443164 - DNA, 3387 bp, Homo sapiens
agctgaccacgtgcggccggaagggaagtaacgtcagcctgagaactgagtagctgtactgtgtggcgccttattctaggcacttgttgggcagaatgtcacacctgccgatgaaactcctgcgtaagaagatcgagaagcggaacctcaaattgcggcagcggaacctaaagtttcagggggcctcaaatctgaccctatcggaaactcaaaatggagatgtatctgaagaaacaatgggaagtagaaaggttaaaaaatcaaaacaaaagcccatgaatgtgggcttatcagaaactcaaaatggaggcatgtctcaagaagcagtgggaaatataaaagttacaaagtctccccagaaatccactgtattaaccaatggagaagcagcaatgcagtcttccaattcagaatcaaaaaagaaaaagaagaaaaagagaaaaatggtgaatgatgctgagcctgatacgaaaaaagcaaaaactgaaaacaaagggaaatctgaagaagaaagtgccgagactactaaagaaacagaaaataatgtggagaagccagataatgatgaagatgagagtgaggtgcccagtctgcccctgggactgacaggagcttttgaggatacttcgtttgcttctctatgtaatcttgtcaatgaaaacactctgaaggcaataaaagaaatgggttttacaaacatgactgaaattcagcataaaagtatcagaccacttctggaaggcagggatcttctagcagctgcaaaaacaggcagtggtaaaaccctggcttttctcatccctgcagttgaactcattgttaagttaaggttcatgcccaggaatggaacaggagtccttattctctcacctactagagaactagccatgcaaacctttggtgttcttaaggagctgatgactcaccacgtgcatacctatggcttgataatgggtggcagtaacagatctgctgaagcacagaaacttggtaatgggatcaacatcattgtggccacaccaggccgtctgctggaccatatgcagaataccccaggatttatgtataaaaacctgcagtgtctggttattgatgaagctgatcgtatcttggatgtggggtttgaagaggaattaaagcaaattattaaacttttgccaacacgtagacagactatgctcttttctgccacccaaactcgaaaagttgaagacctggcaaggatttctctgaaaaaggagccattgtatgttggcgttgatgatgataaagcgaatgcaacagtggatggtcttgaacagggatatgttgtttgtccttctgaaaagagattccttctgctctttacattccttaagaagaaccgaaagaagaagcttatggtcttcttttcatcttgtatgtctgtgaaataccactatgagttgctgaactacattgatttgcccgtcttggccattcatggaaagcaaaagcaaaataagcgtacaaccacattcttccagttctgcaatgcagattcgggaacactattgtgtacggatgtggcagcgagaggactagacattcctgaagtcgactggattgttcagtatgaccctccggatgaccctaaggaatatattcatcgtgtgggtagaacagccagaggcctaaatgggagagggcatgccttgctcattttgcgcccagaagaattgggttttcttcgctacttgaaacaatccaaggttccattaagtgaatttgacttttcctggtctaaaatttctgacattcagtctcagcttgagaaattgattgaaaagaattactttcttcataagtcagcccaggaagcatataagtcatacatacgagcctatgattcccattctctgaaacagatctttaatgttaataacctaaatttgcctcaggttgctctgtcatttggtttcaaggtgcctcccttcgttgatctgaacgtcaacagtaatgaaggcaagcagaaaaagcgaggaggtggtggtggatttggctaccagaaaaccaagaaagttgagaaatccaaaatctttaaacacattagcaagaaatcatctgacagcaggcagttctctcactgaacacatgccttcctttcatcttgaataactttgtcctaaaatgaattttttttccccttgatttaacaggatttttgtagactttagaatttggacttacctaacaagagtataaattgacttgggttgcaagcactgagcactgttacttctatcacgtctctcttttatttctgggatataaaacaggctttaagtttcttggttgcccaagggcagagcaaggaatatctggtgtttcttgtgatgataatattttaattttaaatatccctccctcatacaagtgtatgttaccattttaatataattctttttgtacctttccttcttgttttgtgaagatttttgtggcatggattgctgtgctcactgctgtaaaaggtgacctagtgtactgggcagctggtggcggtgcagaaaagagtctcaggttattttttatttgtttaattcaaggtggtttggatttggtaagcctttgcactctgtagagtacttagaagacaagggcaacttacttggagttagagccaagctgtcagacggtgcccagcacacattaatgttagcttctttctgagaaaaaaatacctcttccaggccctgaaacaaaaaatacatttgctgtgaagattgaaaatgaacaaagttagaaaaaaaaacagcaaaatcagtgatttagtcagatgagtttttcgttgtaggagcacttgatttctagtgtgttttgtacagtatataactacaagatagtacattttgtagcagttcaaagccaaagttgctagcatcattttgctgttgtgccagttaatcataggatcccattaaataagtgtgctaacatcgaatatagagaaaactggtaaagaacattccagtaggaaaagaaaagaacaatcttccatttctgggcttggccaccatcaccctggtcggacctgtcctggacttccaaccttgactgctgagctcctggcttagcttcttgggttcctaattcctggtgtttaataattctctccacgatcatgtttttctgattttttttttcagaaataatgttttttaaaagacaaaaacaaagggaagaatatttaattactgagcagaagtaaatactgttggtattttgtacataatctaatttttatatgcatgttcatgctttttaatttttttatcaaaaattaagtcatctacctactacttgtaaccagcttgtttcataacatgttattttcctgtgtcattaaataattacttcaatgttgta

SEQ ID NO: 443165 - DNA, 4113 bp, Homo sapiens
agctgaccacgtgcggccggaagggaagtaacgtcagcctgagaactgagtagctgtactgtgtggcgccttattctaggcacttgttgggcagaatgtcacacctgccgatgaaactcctgcgtaagaagatcgagaagcggaacctcaaattgcggcagcggaacctaaagtttcagggggcctcaaatctgaccctatcggaaactcaaaatggagatgtatctgaagaaacaatgggaagtagaaaggttaaaaaatcaaaacaaaagcccatgaatgtgggcttatcagaaactcaaaatggaggcatgtctcaagaagcagtgggaaatataaaagttacaaagtctccccagaaatccactgtattaaccaatggagaagcagcaatgcagtcttccaattcagaatcaaaaaagaaaaagaagaaaaagagaaaaatggtgaatgatgctgagcctgatacgaaaaaagcaaaaactgaaaacaaagggaaatctgaagaagaaagtgccgagactactaaagaaacagaaaataatgtggagaagccagataatgatgaagatgagagtgaggtgcccagtctgcccctgggactgacaggagcttttgaggatacttcgtttgcttctctatgtaatcttgtcaatgaaaacactctgaaggcaataaaagaaatgggttttacaaacatgactgaaattcagcataaaagtatcagaccacttctggaaggcagggatcttctagcagctgcaaaaacaggcagtggtaaaaccctggcttttctcatccctgcagttgaactcattgttaagttaaggttcatgcccaggaatggaacaggagtccttattctctcacctactagagaactagccatgcaaacctttggtgttcttaaggagctgatgactcaccacgtgcatacctatggcttgataatgggtggcagtaacagatctgctgaagcacagaaacttggtaatgggatcaacatcattgtggccacaccaggccgtctgctggaccatatgcagaataccccaggatttatgtataaaaacctgcagtgtctggttattgatgaagctgatcgtatcttggatgtggggtttgaagaggaattaaagcaaattattaaacttttgccaacacgtagacagactatgctcttttctgccacccaaactcgaaaagttgaagacctggcaaggatttctctgaaaaaggagccattgtatgttggcgttgatgatgataaagcgaatgcaacagtggatggtcttgaacagggatatgttgtttgtccttctgaaaagagattccttctgctctttacattccttaagaagaaccgaaagaagaagcttatggtcttcttttcatcttgtatgtctgtgaaataccactatgagttgctgaactacattgatttgcccgtcttggccattcatgtaagtgatgatgatgagctcattgaaaacagggtatgcttattaaatcctatagattgtaggattggaggtattgccctctcctggaaacattgttctgagtagtttgatcaccactagatgatggatcctgtgtgggggagcgctgctgggtgtggaggggtatgaggactttcgaagagtgcaagacaccatcctccttgaggggcttgcggaacagttggggaaataggacataggccaagggatgagctcgaaataaagtagggtaacagttccacaatttgggggttctactgctagtcttcctcaagattccagctctaatggatgtttttatttaattctagggaaagcaaaagcaaaataagcgtacaaccacattcttccagttctgcaatgcagattcgggaacactattgtgtacggatgtggcagcgagaggactagacattcctgaagtcgactggattgttcagtatgaccctccggatgaccctaaggaatatattcatcgtgtgggtagaacagccagaggcctaaatgggagagggcatgccttgctcattttgcgcccagaagaattgggttttcttcgctacttgaaacaatccaaggttccattaagtgaatttgacttttcctggtctaaaatttctgacattcagtctcagcttgagaaattgattgaaaagaattactttcttcataagtcagcccaggaagcatataagtcatacatacgagcctatgattcccattctctgaaacagatctttaatgttaataacctaaatttgcctcaggttgctctgtcatttggtttcaaggtgcctcccttcgttgatctgaacgtcaacagtaatgaaggcaagcagaaaaagcgaggaggtggtggtggatttggctaccagaaaaccaagaaagttgagaaatccaaaatctttaaacacattagcaagaaatcatctgacagcaggcagttctctcactgaacacatgccttcctttcatcttgaataactttgtcctaaaatgaattttttttccccttgatttaacaggatttttgtagactttagaatttggacttacctaacaagagtataaattgacttgggttgcaagcactgagcactgttacttctatcacgtctctcttttatttctgggatataaaacaggctttaagtttcttggttgcccaagggcagagcaaggaatatctggtgtttcttgtgatgataatattttaattttaaatatccctccctcatacaagtgtatgttaccattttaatataattctttttgtacctttccttcttgttttgtgaagatttttgtggcatggattgctgtgctcactgctgtaaaaggtgacctagtgtactgggcagctggtggcggtgcagaaaagagtctcaggttattttttgtttttagttatttcttggaccttgacagtatctaatgactcctcctgaaaatgctgcagtataaaagagcaaagagctttgggaaatacctaagaagcaccttaagattagggtggcattgcttttatagattcttgattttaaagcaacaggcctttctcaggtgttgcattttttggagcaaaaactatgggttgtaatttgaataaagtgtcactaagcagttataacgtttgatggctggggggtaggaagaggatggaattgagatgtttgagcctcatttacatcaatagaggtgtaatgtactgcatttcttcatttggtaacataacaaagactttcatacaaagaacgatgatgctcctcattaagatttgtttaattcaaggtggtttggatttggtaagcctttgcactctgtagagtacttagaagacaagggcaacttacttggagttagagccaagctgtcagacggtgcccagcacacattaatgttagcttctttctgagaaaaaaatacctcttccaggccctgaaacaaaaaatacatttgctgtgaagattgaaaatgaacaaagttagaaaaaaaaacagcaaaatcagtgatttagtcagatgagtttttcgttgtaggagcacttgatttctagtgtgttttgtacagtatataactacaagatagtacattttgtagcagttcaaagccaaagttgctagcatcattttgctgttgtgccagttaatcataggatcccattaaataagtgtgctaacatcgaatatagagaaaactggtaaagaacattccagtaggaaaagaaaagaacaatcttccatttctgggcttggccaccatcaccctggtcggacctgtcctggacttccaaccttgactgctgagctcctggcttagcttcttgggttcctaattcctggtgtttaataattctctccacgatcatgtttttctgattttttttttcagaaataatgttttttaaaagacaaaaacaaagggaagaatatttaattactgagcagaagtaaatactgttggtattttgtacataatctaatttttatatgcatgttcatgctttttaatttttttatcaaaaattaagtcatctacctactacttgtaaccagcttgtttcataacatgttattttcctgtgtcattaaataattacttcaatgttgta

SEQ ID NO: 443166 - DNA, 3507 bp, Homo sapiens
agctgaccacgtgcggccggaagggaagtaacgtcagcctgagaactgagtagctgtactgtgtggcgccttattctaggcacttgttgggcagaatgtcacacctgccgatgaaactcctgcgtaagaagatcgagaagcggaacctcaaattgcggcagcggaacctaaagtttcagggggcctcaaatctgaccctatcggaaactcaaaatggagatgtatctgaagaaacaatgggaagtagaaaggttaaaaaatcaaaacaaaagcccatgaatgtgggcttatcagaaactcaaaatggaggcatgtctcaagaagcagtgggaaatataaaagttacaaagtctccccagaaatccactgtattaaccaatggagaagcagcaatgcagtcttccaattcagaatcaaaaaagaaaaagaagaaaaagagaaaaatggtgaatgatgctgagcctgatacgaaaaaagcaaaaactgaaaacaaagggaaatctgaagaagaaagtgccgagactactaaagaaacagaaaataatgtggagaagccagataatgatgaagatgagagtgaggtgcccagtctgcccctgggactgacaggagcttttgaggatacttcgtttgcttctctatgtaatcttgtcaatgaaaacactctgaaggcaataaaagaaatgggttttacaaacatgactgaaattcagcataaaagtatcagaccacttctggaaggcagggatcttctagcagctgcaaaaacaggcagtggtaaaaccctggcttttctcatccctgcagttgaactcattgttaagttaaggttcatgcccaggaatggaacaggagtccttattctctcacctactagagaactagccatgcaaacctttggtgttcttaaggagctgatgactcaccacgtgcatacctatggcttgataatgggtggcagtaacagatctgctgaagcacagaaacttggtaatgggatcaacatcattgtggccacaccaggccgtctgctggaccatatgcagaataccccaggatttatgtataaaaacctgcagtgtctggttattgatgaagctgatcgtatcttggatgtggggtttgaagaggaattaaagcaaattattaaacttttgccaacacgtagacagactatgctcttttctgccacccaaactcgaaaagttgaagacctggcaaggatttctctgaaaaaggagccattgtatgttggcgttgatgatgataaagcgaatgcaacagtggatggtcttgaacagggatatgttgtttgtccttctgaaaagagattccttctgctctttacattccttaagaagaaccgaaagaagaagcttatggtcttcttttcatcttgtatgtctgtgaaataccactatgagttgctgaactacattgatttgcccgtcttggccattcatggaaagcaaaagcaaaataagcgtacaaccacattcttccagttctgcaatgcagattcgggaacactattgtgtacggatgtggcagcgagaggactagacattcctgaagtcgactggattgttcagtatgaccctccggatgaccctaaggaatatattcatcgtgtgggtagaacagccagaggcctaaatgggagagggcatgccttgctcattttgcgcccagaagaattgggttttcttcgctacttgaaacaatccaaggttccattaagtgaatttgacttttcctggtctaaaatttctgacattcagtctcagcttgagaaattgattgaaaagaattactttcttcataagtcagcccaggaagcatataagtcatacatacgagcctatgattcccattctctgaaacagatctttaatgttaataacctaaatttgcctcaggttgctctgtcatttggtttcaaggtgcctcccttcgttgatctgaacgtcaacagtaatgaaggcaagcagaaaaagcgaggaggtggtggtggatttggctaccagaaaaccaagaaagttgagaaatccaaaatctttaaacacattagcaagaaatcatctgacagcaggcagttctctcactgaacacatgccttcctttcatcttgaataactttgtcctaaaatgaattttttttccccttgatttaacaggatttttgtagactttagaatttggacttacctaacaagagtataaattgacttgggttgcaagcactgagcactgttacttctatcacgtctctcttttatttctgggatataaaacaggctttaagtttcttggttgcccaagggcagagcaaggaatatctggtgtttcttgtgatgataatattttaattttaaatatccctccctcatacaagtgtatgttaccattttaatataattctttttgtacctttccttcttgttttgtgaagatttttgtggcatggattgctgtgctcactgctgtaaaaggtgacctagtgtactgggcagctggtggcggtgcagaaaagagtctcaggttattttttgtttttagttatttcttggaccttgacagtatctaatgactcctcctgaaaatgctgcagtataaaagagcaaagagctttgggaaatacctaagaagcaccttaagattagggtggcattgcttttatagattcttgattttaaagcaacaggcctttctcaggtgttgcattttttggagcaaaaactatgggttgtaatttgaataaagtgtcactaagcagttataacgtttgatggctggggggtaggaagaggatggaattgagatgtttgagcctcatttacatcaatagaggtgtaatgtactgcatttcttcatttggtaacataacaaagactttcatacaaagaacgatgatgctcctcattaagatttgtttaattcaaggtggtttggatttggtaagcctttgcactctgtagagtacttagaagacaagggcaacttacttggagttagagccaagctgtcagacggtgcccagcacacattaatgttagcttctttctgagaaaaaaatacctcttccaggccctgaaacaaaaaatacatttgctgtgaagattgaaaatgaacaaagttagaaaaaaaaacagcaaaatcagtgatttagtcagatgagtttttcgttgtaggagcacttgatttctagtgtgttttgtacagtatataactacaagatagtacattttgtagcagttcaaagccaaagttgctagcatcattttgctgttgtgccagttaatcataggatcccattaaataagtgtgctaacatcgaatatagagaaaactggtaaagaacattccagtaggaaaagaaaagaacaatcttccatttctgggcttggccaccatcaccctggtcggacctgtcctggaattaggaacccaagaagctaagccaggagctcagcattcaaggttggaagtccaggacaggtccggttc

SEQ ID NO: 443167 - DNA, 3737 bp, Homo sapiens
  misc_feature (18)..(18): n is a, c, g, or t
  misc_feature (21)..(21): n is a, c, g, or t
attacgttcccccccggntantccgaggcctggtggccactcggacgagggtaggacttggtattcagaatgtcacacctgccgatgaaactcctgcgtaagaagatcgagaagcggaacctcaaattgcggcagcggaacctaaagtttcagggggcctcaaatctgaccctatcggaaactcaaaatggagatgtatctgaagaaacaatgggaagtagaaaggttaaaaaatcaaaacaaaagcccatgaatgtgggcttatcagaaactcaaaatggaggcatgtctcaagaagcagtgggaaatataaaagttacaaagtctccccagaaatccactgtattaaccaatggagaagcagcaatgcagtcttccaattcagaatcaaaaaagaaaaagaagaaaaagagaaaaatggtgaatgatgctgagcctgatacgaaaaaagcaaaaactgaaaacaaagggaaatctgaagaagaaagtgccgagactactaaagaaacagaaaataatgtggagaagccagataatgatgaagatgagagtgaggtgcccagtctgcccctgggactgacaggagcttttgaggatacttcgtttgcttctctatgtaatcttgtcaatgaaaacactctgaaggcaataaaagaaatgggttttacaaacatgactgaaattcagcataaaagtatcagaccacttctggaaggcagggatcttctagcagctgcaaaaacaggcagtggtaaaaccctggcttttctcatccctgcagttgaactcattgttaagttaaggttcatgcccaggaatggaacaggagtccttattctctcacctactagagaactagccatgcaaacctttggtgttcttaaggagctgatgactcaccacgtgcatacctatggcttgataatgggtggcagtaacagatctgctgaagcacagaaacttggtaatgggatcaacatcattgtggccacaccaggccgtctgctggaccatatgcagaataccccaggatttatgtataaaaacctgcagtgtctggttattgatgaagctgatcgtatcttggatgtggggtttgaagaggaattaaagcaaattattaaacttttgccaacacgtagacagactatgctcttttctgccacccaaactcgaaaagttgaagacctggcaaggatttctctgaaaaaggagccattgtatgttggcgttgatgatgataaagcgaatgcaacagtggatggtcttgaacagggatatgttgtttgtccttctgaaaagagattccttctgctctttacattccttaagaagaaccgaaagaagaagcttatggtcttcttttcatcttgtatgtctgtgaaataccactatgagttgctgaactacattgatttgcccgtcttggccattcatggaaagcaaaagcaaaataagcgtacaaccacattcttccagttctgcaatgcagattcgggaacactattgtgtacggatgtggcagcgagaggactagacattcctgaagtcgactggattgttcagtatgaccctccggatgaccctaaggaatatattcatcgtgtgggtagaacagccagaggcctaaatgggagagggcatgccttgctcattttgcgcccagaagaattgggttttcttcgctacttgaaacaatccaaggttccattaagtgaatttgacttttcctggtctaaaatttctgacattcagtctcagcttgagaaattgattgaaaagaattactttcttcataagtcagcccaggaagcatataagtcatacatacgagcctatgattcccattctctgaaacagatctttaatgttaataacctaaatttgcctcaggttgctctgtcatttggtttcaaggtgcctcccttcgttgatctgaacgtcaacagtaatgaaggcaagcagaaaaagcgaggaggtggtggtggatttggctaccagaaaaccaagaaagttgagaaatccaaaatctttaaacacattagcaagaaatcatctgacagcaggcagttctctcactgaacacatgccttcctttcatcttgaataactttgtcctaaaatgaattttttttccccttgatttaacaggatttttgtagactttagaatttggacttacctaacaagagtataaattgacttgggttgcaagcactgagcactgttacttctatcacgtctctcttttatttctgggatataaaacaggctttaagtttcttggttgcccaagggcagagcaaggaatatctggtgtttcttgtgatgataatattttaattttaaatatccctccctcatacaagtgtatgttaccattttaatataattctttttgtacctttccttcttgttttgtgaagatttttgtggcatggattgctgtgctcactgctgtaaaaggtgacctagtgtactgggcagctggtggcggtgcagaaaagagtctcaggttattttttgtttttagttatttcttggaccttgacagtatctaatgactcctcctgaaaatgctgcagtataaaagagcaaagagctttgggaaatacctaagaagcaccttaagattagggtggcattgcttttatagattcttgattttaaagcaacaggcctttctcaggtgttgcattttttggagcaaaaactatgggttgtaatttgaataaagtgtcactaagcagttataacgtttgatggctggggggtaggaagaggatggaattgagatgtttgagcctcatttacatcaatagaggtgtaatgtactgcatttcttcatttggtaacataacaaagactttcatacaaagaacgatgatgctcctcattaagatttgtttaattcaaggtggtttggatttggtaagcctttgcactctgtagagtacttagaagacaagggcaacttacttggagttagagccaagctgtcagacggtgcccagcacacattaatgttagcttctttctgagaaaaaaatacctcttccaggccctgaaacaaaaaatacatttgctgtgaagattgaaaatgaacaaagttagaaaaaaaaacagcaaaatcagtgatttagtcagatgagtttttcgttgtaggagcacttgatttctagtgtgttttgtacagtatataactacaagatagtacattttgtagcagttcaaagccaaagttgctagcatcattttgctgttgtgccagttaatcataggatcccattaaataagtgtgctaacatcgaatatagagaaaactggtaaagaacattccagtaggaaaagaaaagaacaatcttccatttctgggcttggccaccatcaccctggtcggacctgtcctggacttccaaccttgactgctgagctcctggcttagcttcttgggttcctaattcctggtgtttaataattctctccacgatcatgtttttctgattttttttttcagaaataatgttttttaaaagacaaaaacaaagggaagaatatttaattactgagcagaagtaaatactgttggtattttgtacataatctaatttttatatgcatgttcatgctttttaatttttttatcaaaaattaagtcatctacctactacttgtaaccagcttgtttcataacatgttattttcctgtgtcattaaataattacttcaatgttgta

SEQ ID NO: 443168 - DNA, 2416 bp, Homo sapiens
agagaagcccaacttcagctacatcatcgggaagaacacttgggtggagcactggcctgaggaggacgaatgccaagacgaagagaaccagaaacaatgccgggacctcggcgccttcaccgagagcatggttgtctttgggtgccccaactgaccacacccccattcccccactcccgtaccagctggtacgggatgtggcagcgagaggactagacattcctgaagtcgactggattgttcagtatgaccctccggatgaccctaaggaatatattcatcgtgtgggtagaacagccagaggcctaaatgggagagggcatgccttgctcattttgcgcccagaagaattgggttttcttcgctacttgaaacaatccaaggttccattaagtgaatttgacttttcctggtctaaaatttctgacattcagtctcagcttgagaaattgattgaaaagaattactttcttcataagtcagcccaggaagcatataagtcatacatacgagcctatgattcccattctctgaaacagatctttaatgttaataacctaaatttgcctcaggttgctctgtcatttggtttcaaggtgcctcccttcgttgatctgaacgtcaacagtaatgaaggcaagcagaaaaagcgaggaggtggtggtggatttggctaccagaaaaccaagaaagttgagaaatccaaaatctttaaacacattagcaagaaatcatctgacagcaggcagttctctcactgaacacatgccttcctttcatcttgaataactttgtcctaaaatgaattttttttccccttgatttaacaggatttttgtagactttagaatttggacttacctaacaagagtataaattgacttgggttgcaagcactgagcactgttacttctatcacgtctctcttttatttctgggatataaaacaggctttaagtttcttggttgcccaagggcagagcaaggaatatctggtgtttcttgtgatgataatattttaattttaaatatccctccctcatacaagtgtatgttaccattttaatataattctttttgtacctttccttcttgttttgtgaagatttttgtggcatggattgctgtgctcactgctgtaaaaggtgacctagtgtactgggcagctggtggcggtgcagaaaagagtctcaggttattttttgtttttagttatttcttggaccttgacagtatctaatgactcctcctgaaaatgctgcagtataaaagagcaaagagctttgggaaatacctaagaagcaccttaagattagggtggcattgcttttatagattcttgattttaaagcaacaggcctttctcaggtgttgcattttttggagcaaaaactatgggttgtaatttgaataaagtgtcactaagcagttataacgtttgatggctggggggtaggaagaggatggaattgagatgtttgagcctcatttacatcaatagaggtgtaatgtactgcatttcttcatttggtaacataacaaagactttcatacaaagaacgatgatgctcctcattaagatttgtttaattcaaggtggtttggatttggtaagcctttgcactctgtagagtacttagaagacaagggcaacttacttggagttagagccaagctgtcagacggtgcccagcacacattaatgttagcttctttctgagaaaaaaatacctcttccaggccctgaaacaaaaaatacatttgctgtgaagattgaaaatgaacaaagttagaaaaaaaaacagcaaaatcagtgatttagtcagatgagtttttcgttgtaggagcacttgatttctagtgtgttttgtacagtatataactacaagatagtacattttgtagcagttcaaagccaaagttgctagcatcattttgctgttgtgccagttaatcataggatcccattaaataagtgtgctaacatcgaatatagagaaaactggtaaagaacattccagtaggaaaagaaaagaacaatcttccatttctgggcttggccaccatcaccctggtcggacctgtcctggacttccaaccttgactgctgagctcctggcttagcttcttgggttcctaattcctggtgtttaataattctctccacgatcatgtttttctgattttttttttcagaaataatgttttttaaaagacaaaaacaaagggaagaatatttaattactgagcagaagtaaatactgttggtattttgtacataatctaatttttatatgcatgttcatgctttttaatttttttatcaaaaattaagtcatctacctactacttgtaaccagcttgtttcataacatgttattttcctgtgtcattaaataattacttcaatgttgta

SEQ ID NO: 443169 - DNA, 2071 bp, Homo sapiens
agctgaccacgtgcggccggaagggaagtaacgtcagcctgagaactgagtagctgtactgtgtggcgccttattctaggcacttgttgggcagaatgtcacacctgccgatgaaactcctgcgtaagaagatcgagaagcggaacctcaaattgcggcagcggaacctaaagtttcagggggcctcaaatctgaccctatcggaaactcaaaatggagatgtatctgaagaaacaatgggaagtagaaaggttaaaaaatcaaaacaaaagcccatgaatgtgggcttatcagaaactcaaaatggaggcatgtctcaagaagcagtgggaaatataaaagttacaaagtctccccagaaatccactgtattaaccaatggagaagcagcaatgcagtcttccaattcagaatcaaaaaagaaaaagaagaaaaagagaaaaatggtgaatgatgctgagcctgatacgaaaaaagcaaaaactgaaaacaaagggaaatctgaagaagaaagtgccgagactactaaagaaacagaaaataatgtggagaagccagataatgatgaagatgagagtgaggtgcccagtctgcccctgggactgacaggagcttttgaggatacttcgtttgcttctctatgtaatcttgtcaatgaaaacactctgaaggcaataaaagaaatgggttttacaaacatgactgaaattcagcataaaagtatcagaccacttctggaaggcagggatcttctagcagctgcaaaaacaggcagtggtaaaaccctggcttttctcatccctgcagttgaactcattgttaagttaaggttcatgcccaggaatggaacaggagtccttattctctcacctactagagaactagccatgcaaacctttggtgttcttaaggagctgatgactcaccacgtgcatacctatggcttgataatgggtggcagtaacagatctgctgaagcacagaaacttggtaatgggatcaacatcattgtggccacaccaggccgtctgctggaccatatgcagaataccccaggatttatgtataaaaacctgcagtgtctggttattgatgaagctgatcgtatcttggatgtggggtttgaagaggaattaaagcaaattattaaacttttgccaacacgtagacagactatgctcttttctgccacccaaactcgaaaagttgaagacctggcaaggatttctctgaaaaaggagccattgtatgttggcgttgatgatgataaagcgaatgcaacagtggatggtcttgaacagggatatgttgtttgtccttctgaaaagagattccttctgctctttacattccttaagaagaaccgaaagaagaagcttatggtcttcttttcatcttgtatgtctgtgaaataccactatgagttgctgaactacattgatttgcccgtcttggccattcatggaaagcaaaagcaaaataagcgtacaaccacattcttccagttctgcaatgcagattcgggaacactattgtgtacggatgtggcagcgagaggactagacattcctgaagtcgactggattgttcagtatgaccctccggatgaccctaaggaatatattcatcgtgtgggtagaacagccagaggcctaaatgggagagggcatgccttgctcattttgcgcccagaagaattgggttttcttcgctacttgaaacaatccaaggttccattaagtgaatttgacttttcctggtctaaaatttctgacattcagtctcagcttgagaaattgattgaaaagaattactttcttcataagtcagcccaggaagcatataagtcatacatacgagcctatgattcccattctctgaaacagatctttaatgttaataacctaaatttgcctcaggttgctctgtcatttggtttcaaggtgcctcccttcgttgatctgaacgtcaacagtaatgaaggcaagcagaaaaagcgaggaggtggtggtggatttggctaccagaaaaccaagaaagttgaggtatccgtgagggggtaccgagccga

SEQ ID NO: 443170 - DNA, 917 bp, Homo sapiens
ccttcgatgggcgggcacttagaggtggggagcagagaatctcttatcaacatcaacatctggtcagattgaactcttcaatctctgcactcaaagctgttaagatagttaagcgtgcataagtgcccgccaatcgaattcgatgggcgggcaacttacttggagttagagccaagctgtcagacggtgcccagcacacattaatgttagcttctttctgagaaaaaaatacctcttccaggccctgaaacaaaaaatacatttgctgtgaagattgaaaatgaacaaagttagaaaaaaaaacagcaaaatcagtgatttagtcagatgagtttttcgttgtaggagcacttgatttctagtgtgttttgtacagtatataactacaagatagtacattttgtagcagttcaaagccaaagttgctagcatcattttgctgttgtgccagttaatcataggatcccattaaataagtgtgctaacatcgaatatagagaaaactggtaaagaacattccagtaggaaaagaaaagaacaatcttccatttctgggcttggccaccatcaccctggtcggacctgtcctggacttccaaccttgactgctgagctcctggcttagcttcttgggttcctaattcctggtgtttaataattctctccacgatcatgtttttctgattttttttttcagaaataatgttttttaaaagacaaaaacaaagggaagaatatttaattactgagcagaagtaaatactgttggtattttgtacataatctaatttttatatgcatgttcatgctttttaatttttttatcaaaaattaagtcatctacctactacttgtaaccagcttgtttcataacatgttattttcctgtgtcattaaataattacttcaatgttgta

SEQ ID NO: 443171 - DNA, 960 bp, Homo sapiens
agctgaccacgtgcggccggaagggaagtaacgtcagcctgagaactgagtagctgtactgtgtggcgccttattctaggcacttgttgggcagaatgtcacacctgccgatgaaactcctgcgtaagaagatcgagaagcggaacctcaaattgcggcagcggaacctaaagtttcagggggcctcaaatctgaccctatcggaaactcaaaatggagatgtatctgaagaaacaatgggaagtagaaaggttaaaaaatcaaaacaaaagcccatgaatgtgggcttatcagaaactcaaaatggaggcatgtctcaagaagcagtgggaaatataaaagttacaaagtctccccagaaatccactgtattaaccaatggagaagcagcaatgcagtcttccaattcagaatcaaaaaagaaaaaaaacacaacaaaaaaaactcttttgggcggcttgggccctggaaaagttttttaacccttcggtttgtggccgcgcgcggcccccatgcgtgccatgtggaaccacggtgtccatataggctgttcccgaggagaaactcggggccgggaactgagggctcggagatttcccccctttaaaaaggcccggggggaaacccgaaggttctcgtgaccacaatctcccgaatattggagcttctcgagaggggccaatacaggggacattctatccacccggcgaattccccaagggcgaagcttgcaattcccaattagcccccggttgtgtagggtggaacagtaaaagctgacagagcaaataaatcgcacatgaaacaaagaacaacaccacaatgaagccaagaaaacgagatcagaacagtagcatgtgacatagaatccacaccaaaaatgcacaataacacacagcgcatagaacgagcgcgcacccgacgatcttgaaacacacgcaagacgacaacaaacacaaa

SEQ ID NO: 443172 - DNA, 150 bp, Homo sapiens
ctttgtgggggtgtggtgaaggtgtgtgtggcccagcaccgtgggactacaccatctcagtacagacatgcacatactcaggatgcagatacgcaaatgggctcatgtggaagtcactgcgttaactcagattttctttctccaccaaag

SEQ ID NO: 443173 - DNA, 577 bp, Homo sapiens
cttgaggggcttgcggaacagttggggaaataggacataggccaagggatgagctcgaaataaagtagggtaacagttccacaatttgggggttctactgctagtcttcctcaagattccagctctaatggatgtttttatttaattctagggaaagcaaaagcaaaataagcgtacaaccacattcttccagttctgcaatgcagattcgggaacactattgtgtacggatgtggcagcgagaggactagacattcctgaagtcgactggattgttcagtatgaccctccggatgaccctaaggtaactggcatctttggaatatcttcagaatgactctgcattaaaagttcacttattctcccagttccctgacggaaactgcattccacattcaaggtaaagatccctactatacagtgactgcagtatttctctggtattgaaaagtacttaaggcttttcagggctcaaacgggctgtgccagaggattgaaaaggatcagtgggacttaagttatgaaaatgagatccttggaatgatctcttaagaacagcagatgcctgaaggaaata

SEQ ID NO: 443174 - DNA, 2434 bp, Homo sapiens
agctgaccacgtgcggccggaagggaagtaacgtcagcctgagaactgagtagctgtactgtgtggcgccttattctaggcacttgttgggcagaatgtcacacctgccgatgaaactcctgcgtaagaagatcgagaagcggaacctcaaattgcggcagcggaacctaaagtttcagggggcctcaaatctgaccctatcggaaactcaaaatggagatgtatctgaagaaacaatgggaagtagaaaggttaaaaaatcaaaacaaaagcccatgaatgtgggcttatcagaaactcaaaatggaggcatgtctcaagaagcagtgggaaatataaaagttacaaagtctccccagaaatccactgtattaaccaatggagaagcagcaatgcagtcttccaattcagaatcaaaaaagaaaaagaagaaaaagagaaaaatggtgaatgatgctgagcctgatacgaaaaaagcaaaaactgaaaacaaagggaaatctgaagaagaaagtgccgagactactaaagaaacagaaaataatgtggagaagccagataatgatgaagatgagagtgaggtgcccagtctgcccctgggactgacaggagcttttgaggatacttcgtttgcttctctatgtaatcttgtcaatgaaaacactctgaaggcaataaaagaaatgggttttacaaacatgactgaaattcagcataaaagtatcagaccacttctggaaggcagggatcttctagcagctgcaaaaacaggcagtggtaaaaccctggcttttctcatccctgcagttgaactcattgttaagttaaggttcatgcccaggaatggaacaggagtccttattctctcacctactagagaactagccatgcaaacctttggtgttcttaaggagctgatgactcaccacgtgcatacctatggcttgataatgggtggcagtaacagatctgctgaagcacagaaacttggtaatgggatcaacatcattgtggccacaccaggccgtctgctggaccatatgcagaataccccaggatttatgtataaaaacctgcagtgtctggttattgatgaagctgatcgtatcttggatgtggggtttgaagaggaattaaagcaaattattaaacttttgccaacacgtagacagactatgctcttttctgccacccaaactcgaaaagttgaagacctggcaaggatttctctgaaaaaggagccattgtatgttggcgttgatgatgataaagcgaatgcaacagtggatggtcttgaacagggatatgttgtttgtccttctgaaaagagattccttctgctctttacattccttaagaagaaccgaaagaagaagcttatggtcttcttttcatcttgtatgtctgtgaaataccactatgagttgctgaactacattgatttgcccgtcttggccattcatggaaagcaaaagcaaaataagcgtacaaccacattcttccagttctgcaatgcagattcgggaacactattgtgtacggatgtggcagcgagaggactagacattcctgaagtcgactggattgttcagtatgaccctccggatgaccctaaggaatatattcatcgtgtgggtagaacagccagaggcctaaatgggagagggcatgccttgctcattttgcgcccagaagaattgggttttcttcgctacttgaaacaatccaaggttccattaagtgaatttgacttttcctggtctaaaatttctgacattcagtctcagcttgagaaattgattgaaaagaattactttcttcataagtcagcccaggaagcatataagtcatacatacgagcctatgattcccattctctgaaacagatctttaatgttaataacctaaatttgcctcaggttgctctgtcatttggtttcaaggtgcctcccttcgttgatctgaacgtcaacagtaatgaaggcaagcagaaaaagcgaggaggtggtggtggatttggctaccagaaaaccaagaaagttgagaaatccaaaatctttaaacacattagcaagaaatcatctgacagcaggcagttctctcactgaacacatgccttcctttcatcttgaataactttgtcctaaaatgaattttttttccccttgatttaacaggatttttgtagactttagaatttggacttacctaacaagagtataaattgacttgggttgcaagcactgagcactgttacttctatcacgtctctcttttatttctgggatataaaacaggctttaagtttcttggttgcccaagggcagagcaaggaatatctggtgtttcttgtgatgataatattttaattttaaatatccctccctcatacaagtgtatgttaccattttaatataattctttttgtaccttt

SEQ ID NO: 443175 - DNA, 3763 bp, Homo sapiens
agctgaccacgtgcggccggaagggaagtaacgtcagcctgagaactgagtagctgtactgtgtggcgccttattctaggcacttgttgggcagaatgtcacacctgccgatgaaactcctgcgtaagaagatcgagaagcggaacctcaaattgcggcagcggaacctaaagtttcagggggcctcaaatctgaccctatcggaaactcaaaatggagatgtatctgaagaaacaatgggaagtagaaaggttaaaaaatcaaaacaaaagcccatgaatgtgggcttatcagaaactcaaaatggaggcatgtctcaagaagcagtgggaaatataaaagttacaaagtctccccagaaatccactgtattaaccaatggagaagcagcaatgcagtcttccaattcagaatcaaaaaagaaaaagaagaaaaagagaaaaatggtgaatgatgctgagcctgatacgaaaaaagcaaaaactgaaaacaaagggaaatctgaagaagaaagtgccgagactactaaagaaacagaaaataatgtggagaagccagataatgatgaagatgagagtgaggtgcccagtctgcccctgggactgacaggagcttttgaggatacttcgtttgcttctctatgtaatcttgtcaatgaaaacactctgaaggcaataaaagaaatgggttttacaaacatgactgaaattcagcataaaagtatcagaccacttctggaaggcagggatcttctagcagctgcaaaaacaggcagtggtaaaaccctggcttttctcatccctgcagttgaactcattgttaagttaaggttcatgcccaggaatggaacaggagtccttattctctcacctactagagaactagccatgcaaacctttggtgttcttaaggagctgatgactcaccacgtgcatacctatggcttgataatgggtggcagtaacagatctgctgaagcacagaaacttggtaatgggatcaacatcattgtggccacaccaggccgtctgctggaccatatgcagaataccccaggatttatgtataaaaacctgcagtgtctggttattgatgaagctgatcgtatcttggatgtggggtttgaagaggaattaaagcaaattattaaacttttgccaacacgtagacagactatgctcttttctgccacccaaactcgaaaagttgaagacctggcaaggatttctctgaaaaaggagccattgtatgttggcgttgatgatgataaagcgaatgcaacagtggatggtcttgaacagggatatgttgtttgtccttctgaaaagagattccttctgctctttacattccttaagaagaaccgaaagaagaagcttatggtcttcttttcatcttgtatgtctgtgaaataccactatgagttgctgaactacattgatttgcccgtcttggccattcatggaaagcaaaagcaaaataagcgtacaaccacattcttccagttctgcaatgcagattcgggaacactattgtgtacggatgtggcagcgagaggactagacattcctgaagtcgactggattgttcagtatgaccctccggatgaccctaaggaatatattcatcgtgtgggtagaacagccagaggcctaaatgggagagggcatgccttgctcattttgcgcccagaagaattgggttttcttcgctacttgaaacaatccaaggttccattaagtgaatttgacttttcctggtctaaaatttctgacattcagtctcagcttgagaaattgattgaaaagaattactttcttcataagtcagcccaggaagcatataagtcatacatacgagcctatgattcccattctctgaaacagatctttaatgttaataacctaaatttgcctcaggttgctctgtcatttggtttcaaggtgcctcccttcgttgatctgaacgtcaacagtaatgaaggcaagcagaaaaagcgaggaggtggtggtggatttggctaccagaaaaccaagaaagttgagaaatccaaaatctttaaacacattagcaagaaatcatctgacagcaggcagttctctcactgaacacatgccttcctttcatcttgaataactttgtcctaaaatgaattttttttccccttgatttaacaggatttttgtagactttagaatttggacttacctaacaagagtataaattgacttgggttgcaagcactgagcactgttacttctatcacgtctctcttttatttctgggatataaaacaggctttaagtttcttggttgcccaagggcagagcaaggaatatctggtgtttcttgtgatgataatattttaattttaaatatccctccctcatacaagtgtatgttaccattttaatataattctttttgtacctttccttcttgttttgtgaagatttttgtggcatggattgctgtgctcactgctgtaaaaggtgacctagtgtactgggcagctggtggcggtgcagaaaagagtctcaggttattttttgtttttagttatttcttggaccttgacagtatctaatgactcctcctgaaaatgctgcagtataaaagagcaaagagctttgggaaatacctaagaagcaccttaagattagggtggcattgcttttatagattcttgattttaaagcaacaggcctttctcaggtgttgcattttttggagcaaaaactatgggttgtaatttgaataaagtgtcactaagcagttataacgtttgatggctggggggtaggaagaggatggaattgagatgtttgagcctcatttacatcaatagaggtgtaatgtactgcatttcttcatttggtaacataacaaagactttcatacaaagaacgatgatgctcctcattaagatttgtttaattcaaggtggtttggatttggtaagcctttgcactctgtagagtacttagaagacaagggcaacttacttggagttagagccaagctgtcagacggtgcccagcacacattaatgttagcttctttctgagaaaaaaatacctcttccaggccctgaaacaaaaaatacatttgctgtgaagattgaaaatgaacaaagttagaaaaaaaaacagcaaaatcagtgatttagtcagatgagtttttcgttgtaggagcacttgatttctagtgtgttttgtacagtatataactacaagatagtacattttgtagcagttcaaagccaaagttgctagcatcattttgctgttgtgccagttaatcataggatcccattaaataagtgtgctaacatcgaatatagagaaaactggtaaagaacattccagtaggaaaagaaaagaacaatcttccatttctgggcttggccaccatcaccctggtcggacctgtcctggacttccaaccttgactgctgagctcctggcttagcttcttgggttcctaattcctggtgtttaataattctctccacgatcatgtttttctgattttttttttcagaaataatgttttttaaaagacaaaaacaaagggaagaatatttaattactgagcagaagtaaatactgttggtattttgtacataatctaatttttatatgcatgttcatgctttttaatttttttatcaaaaattaagtcatctacctactacttgtaaccagcttgtttcataacatgttattttcctgtgtcattaaataattacttcaatgttgta

SEQ ID NO: 443176 - DNA, 4270 bp, Homo sapiens
agctgaccacgtgcggccggaagggaagtaacgtcagcctgagaactgagtagctgtactgtgtggcgccttattctaggcacttgttgggcagaatgtcacacctgccgatgaaactcctgcgtaagaagatcgagaagcggaacctcaaattgcggcagcggaacctaaagtttcagggggcctcaaatctgaccctatcggaaactcaaaatggagatgtatctgaagaaacaatgggaagtagaaaggttaaaaaatcaaaacaaaagcccatgaatgtgggcttatcagaaactcaaaatggaggcatgtctcaagaagcagtgggaaatataaaagttacaaagtctccccagaaatccactgtattaaccaatggagaagcagcaatgcagtcttccaattcagaatcaaaaaagaaaaagaagaaaaagagaaaaatggtgaatgatgctgagcctgatacgaaaaaagcaaaaactgaaaacaaagggaaatctgaagaagaaagtgccgagactactaaagaaacagaaaataatgtggagaagccagataatgatgaagatgagagtgaggtgcccagtctgcccctgggactgacaggagcttttgaggatacttcgtttgcttctctatgtaatcttgtcaatgaaaacactctgaaggcaataaaagaaatgggttttacaaacatgactgaaattcagcataaaagtatcagaccacttctggaaggcagggatcttctagcagctgcaaaaacaggcagtggtaaaaccctggcttttctcatccctgcagttgaactcattgttaagttaaggttcatgcccaggaatggaacaggagtccttattctctcacctactagagaactagccatgcaaacctttggtgttcttaaggagctgatgactcaccacgtgcatacctatggcttgataatgggtggcagtaacagatctgctgaagcacagaaacttggtaatgggatcaacatcattgtggccacaccaggccgtctgctggaccatatgcagaataccccaggatttatgtataaaaacctgcagtgtctggttattgatgaagctgatcgtatcttggatgtggggtttgaagaggaattaaagcaaattattaaacttttgccaacacgtagacagactatgctcttttctgccacccaaactcgaaaagttgaagacctggcaaggatttctctgaaaaaggagccattgtatgttggcgttgatgatgataaagcgaatgcaacagtggatggtcttgaacagggatatgttgtttgtccttctgaaaagagattccttctgctctttacattccttaagaagaaccgaaagaagaagcttatggtcttcttttcatcttgtatgtctgtgaaataccactatgagttgctgaactacattgatttgcccgtcttggccattcatggaaagcaaaagcaaaataagcgtacaaccacattcttccagttctgcaatgcagattcgggaacactattgtgtacggatgtggcagcgagaggactagacattcctgaagtcgactggattgttcagtatgaccctccggatgaccctaaggaatatattcatcgtgtgggtagaacagccagaggcctaaatgggagagggcatgccttgctcattttgcgcccagaagaattgggttttcttcgctacttgaaacaatccaaggttccattaagtgaatttgacttttcctggtctaaaatttctgacattcagtctcagcttgagaaattgattgaaaagaattactttcttcataagtcagcccaggaagcatataagtcatacatacgagcctatgattcccattctctgaaacagatctttaatgttaataacctaaatttgcctcaggttgctctgtcatttggtttcaaggtgcctcccttcgttgatctgaacgtcaacagtaatgaaggcaagcagaaaaagcgaggaggtggtggtggatttggctaccagaaaaccaagaaagttgagaaatccaaaatctttaaacacattagcaagaaatcatctgacagcaggcagttctctcactgaacacatgccttcctttcatcttgaataactttgtcctaaaatgaattttttttccccttgatttaacaggatttttgtagactttagaatttggacttacctaacaagagtataaattgacttgggttgcaagcactgagcactgttacttctatcacgtctctcttttatttctgggatataaaacaggctttaagtttcttggttgcccaagggcagagcaaggaatatctggtgtttcttgtgatgataatattttaattttaaatatccctccctcatacaagtgtatgttaccattttaatataattctttttgtacctttccttcttgttttgtgaagatttttgtggcatggattgctgtgctcactgctgtaaaaggtgacctagtgtactgggcagctggtggcggtgcagaaaagagtctcaggttattttttgtttttagttatttcttggaccttgacagtatctaatgactcctcctgaaaatgctgcagtataaaagagcaaagagctttgggaaatacctaagaagcaccttaagattagggtggcattgcttttatagattcttgattttaaagcaacaggcctttctcaggtgttgcattttttggagcaaaaactatgggttgtaatttgaataaagtgtcactaagcagttataacgtttgatggctggggggtaggaagaggatggaattgagatgtttgagcctcatttacatcaatagaggtgtaatgtactgcatttcttcatttggtaacataacaaagactttcatacaaagaacgatgatgctcctcattaagatttgtttaattcaaggtggtttggatttggtaagcctttgcactctgtagagtacttagaagacaagggcaacttacttggagttagagccaagctgtcagacggtgcccagcacacattaatgttagcttctttctgagaaaaaaatacctcttccaggccctgaaacaaaaaatacatttgctgtgaagattgaaaatgaacaaagttagaaaaaaaaacagcaaaatcagtgatttagtcagatgagtttttcgttgtaggagcacttgatttctagtgtgttttgtacagtatataactacaagatagtacattttgtagcagttcaaagccaaagttgctagcatcattttgctgttgtgccagttaatcataggatcccattaaataagtgtgctaacatcgaatatagagaaaactggtaaagaacattccagtaggaaaagaaaagaacaatcttccatttctgggcttggccaccatcaccctggtcggacctgtcctggacttccaaccttgactgctgagctcctggcttagcttcttgggttcctaattcctggtgtttaataattctctccacgatcatgtttttctgattttttttttcagaaataatgttttttaaaagacaaaaacaaagggaagaatatttaattactgagcagaagtaaatactgttggtattttgtacataatctaatttttatatgcatgttcatgctttttaatttttttatcaaaaattaagtcatctacctactacttgtaaccagcttgtttcataacatgttattttcctgtgtcattaaataattacttcaatgttgtatgtaaaaacacaaaaacaaaaaacaaacaaaaaaaataaatcacacaacacacataaacaaacaaaggagaacaacagaaatcaaaagtagaaccataggcagtacgcactagagaagagcagagagaggagagcacccaaacacgagggcacgccattccagcgggcacgacgagggtgcgagggcgggccgccgcgccgagcgccgggggggggaggggacgccgcggatatgcaccgatccgctcagcctaagggtctagttgcccggaatgacaaagagggatgcagtcgcccacagcatgagttatctgtgccagactctccaacaagtggacgacatcgaccagccagcgtggcgtgtgcggcgtccggtcgactcaggctggagcggtcgacacggaaggctctgccggccgccgcacgagctgggccccgagccatgggcgagggtgaccctggagcgagacacagtccgcaaggtgggcccgtcgtcgcgcatgtccg

SEQ ID NO: 443177 - DNA, 3706 bp, Homo sapiens
agctgaccacgtgcggccggaagggaagtaacgtcagcctgagaactgagtagctgtactgtgtggcgccttattctaggcacttgttgggcagaatgtcacacctgccgatgaaactcctgcgtaagaagatcgagaagcggaacctcaaattgcggcagcggaacctaaagtttcagggggcctcaaatctgaccctatcggaaactcaaaatggagatgtatctgaagaaacaatgggaagtagaaaggttaaaaaatcaaaacaaaagcccatgaatgtgggcttatcagaaactcaaaatggaggcatgtctcaagaagcagtgggaaatataaaagttacaaagtctccccagaaatccactgtattaaccaatggagaagcagcaatgcagtcttccaattcagaatcaaaaaagaaaaagaagaaaaagagaaaaatggtgaatgatgctgagcctgatacgaaaaaagcaaaaactgaaaacaaagggaaatctgaagaagaaagtgccgagactactaaagaaacagaaaataatgtggagaagccagataatgatgaagatgagagtgaggtgcccagtctgcccctgggactgacaggagcttttgaggatacttcgtttgcttctctatgtaatcttgtcaatgaaaacactctgaaggcaataaaagaaatgggttttacaaacatgactgaaattcagcataaaagtatcagaccacttctggaaggcagggatcttctagcagctgcaaaaacaggcagtggtaaaaccctggcttttctcatccctgcagttgaactcattgttaagttaaggttcatgcccaggaatggaacaggagtccttattctctcacctactagagaactagccatgcaaacctttggtgttcttaaggagctgatgactcaccacgtgcatacctatggcttgataatgggtggcagtaacagatctgctgaagcacagaaacttggtaatgggatcaacatcattgtggccacaccaggccgtctgctggaccatatgcagaataccccaggatttatgtataaaaacctgcagtgtctggttattgatgaagctgatcgtatcttggatgtggggtttgaagaggaattaaagcaaattattaaacttttgccaacacgtagacagactatgctcttttctgccacccaaactcgaaaagttgaagacctggcaaggatttctctgaaaaaggagccattgtatgttggcgttgatgatgataaagcgaatgcaacagtggatggtcttgaacagaagaaccgaaagaagaagcttatggtcttcttttcatcttgtatgtctgtgaaataccactatgagttgctgaactacattgatttgcccgtcttggccattcatggaaagcaaaagcaaaataagcgtacaaccacattcttccagttctgcaatgcagattcgggaacactattgtgtacggatgtggcagcgagaggactagacattcctgaagtcgactggattgttcagtatgaccctccggatgaccctaaggaatatattcatcgtgtgggtagaacagccagaggcctaaatgggagagggcatgccttgctcattttgcgcccagaagaattgggttttcttcgctacttgaaacaatccaaggttccattaagtgaatttgacttttcctggtctaaaatttctgacattcagtctcagcttgagaaattgattgaaaagaattactttcttcataagtcagcccaggaagcatataagtcatacatacgagcctatgattcccattctctgaaacagatctttaatgttaataacctaaatttgcctcaggttgctctgtcatttggtttcaaggtgcctcccttcgttgatctgaacgtcaacagtaatgaaggcaagcagaaaaagcgaggaggtggtggtggatttggctaccagaaaaccaagaaagttgagaaatccaaaatctttaaacacattagcaagaaatcatctgacagcaggcagttctctcactgaacacatgccttcctttcatcttgaataactttgtcctaaaatgaattttttttccccttgatttaacaggatttttgtagactttagaatttggacttacctaacaagagtataaattgacttgggttgcaagcactgagcactgttacttctatcacgtctctcttttatttctgggatataaaacaggctttaagtttcttggttgcccaagggcagagcaaggaatatctggtgtttcttgtgatgataatattttaattttaaatatccctccctcatacaagtgtatgttaccattttaatataattctttttgtacctttccttcttgttttgtgaagatttttgtggcatggattgctgtgctcactgctgtaaaaggtgacctagtgtactgggcagctggtggcggtgcagaaaagagtctcaggttattttttgtttttagttatttcttggaccttgacagtatctaatgactcctcctgaaaatgctgcagtataaaagagcaaagagctttgggaaatacctaagaagcaccttaagattagggtggcattgcttttatagattcttgattttaaagcaacaggcctttctcaggtgttgcattttttggagcaaaaactatgggttgtaatttgaataaagtgtcactaagcagttataacgtttgatggctggggggtaggaagaggatggaattgagatgtttgagcctcatttacatcaatagaggtgtaatgtactgcatttcttcatttggtaacataacaaagactttcatacaaagaacgatgatgctcctcattaagatttgtttaattcaaggtggtttggatttggtaagcctttgcactctgtagagtacttagaagacaagggcaacttacttggagttagagccaagctgtcagacggtgcccagcacacattaatgttagcttctttctgagaaaaaaatacctcttccaggccctgaaacaaaaaatacatttgctgtgaagattgaaaatgaacaaagttagaaaaaaaaacagcaaaatcagtgatttagtcagatgagtttttcgttgtaggagcacttgatttctagtgtgttttgtacagtatataactacaagatagtacattttgtagcagttcaaagccaaagttgctagcatcattttgctgttgtgccagttaatcataggatcccattaaataagtgtgctaacatcgaatatagagaaaactggtaaagaacattccagtaggaaaagaaaagaacaatcttccatttctgggcttggccaccatcaccctggtcggacctgtcctggacttccaaccttgactgctgagctcctggcttagcttcttgggttcctaattcctggtgtttaataattctctccacgatcatgtttttctgattttttttttcagaaataatgttttttaaaagacaaaaacaaagggaagaatatttaattactgagcagaagtaaatactgttggtattttgtacataatctaatttttatatgcatgttcatgctttttaatttttttatcaaaaattaagtcatctacctactacttgtaaccagcttgtttcataacatgttattttcctgtgtcattaaataattacttcaatgttgta

SEQ ID NO: 443178 - DNA, 3359 bp, Homo sapiens
agctgaccacgtgcggccggaagggaagtaacgtcagcctgagaactgagtagctgtactgtgtggcgccttattctaggcacttgttgggcagaatgtcacacctgccgatgaaactcctgcgtaagaagatcgagaagcggaacctcaaattgcggcagcggaacctaaagtttcagggggcctcaaatctgaccctatcggaaactcaaaatggagatgtatctgaagaaacaatgggaagtagaaaggttaaaaaatcaaaacaaaagcccatgaatgtgggcttatcagaaactcaaaatggaggcatgtctcaagaagcagtgggaaatataaaagttacaaagtctccccagaaatccactgtattaaccaatggagaagcagcaatgcagtcttccaattcagaatcaaaaaagaaaaagaagaaaaagagaaaaatggtgaatgatgctgagcctgatacgaaaaaagcaaaaactgaaaacaaagggaaatctgaagaagaaagtgccgagactactaaagaaacagaaaataatgtggagaagccagataatgatgaagatgagagtgaggtgcccagtctgcccctgggactgacaggagcttttgaggatacttcgtttgcttctctatgtaatcttgtcaatgaaaacactctgaaggcaataaaagaaatgggttttacaaacatgactgaaattcagcataaaagtatcagaccacttctggaaggcagggatcttctagcagctgcaaaaacaggcagtggtaaaaccctggcttttctcatccctgcagttgaactcattgttaagttaaggttcatgcccaggaatggaacaggagtccttattctctcacctactagagaactagccatgcaaacctttggtgttcttaaggagctgatgactcaccacgtgcatacctatggcttgataatgggtggcagtaacagatctgctgaagcacagaaacttggtaatgggatcaacatcattgtggccacaccaggccgtctgctggaccatatgcagaataccccaggatttatgtataaaaacctgcagtgtctggttattgatgaagctgatcgtatcttggatgtggggtttgaagaggaattaaagcaaattattaaacttttgccaacacgtagacagactatgctcttttctgccacccaaactcgaaaagttgaagacctggcaaggatttctctgaaaaaggagccattgtatgttggcgttgatgatgataaagcgaatgcaacagtggatggtcttgaacagggatatgttgtttgtccttctgaaaagagattccttctgctctttacattccttaagaagaaccgaaagaagaagcttatggtcttcttttcatcttgtatgtctgtgaaataccactatgagttgctgaactacattgatttgcccgtcttggccattcatggaaagcaaaagcaaaataagcgtacaaccacattcttccagttctgcaatgcagattcgggaacactattgtgtacggatgtggcagcgagaggactagacattcctgaagtcgactggattgttcagtatgaccctccggatgaccctaaggaatatattcatcgtgtgggtagaacagccagaggcctaaatgggagagggcatgccttgctcattttgcgcccagaagaattgggttttcttcgctacttgaaacaatccaaggttccattaagtgaatttgacttttcctggtctaaaatttctgacattcagtctcagcttgagaaattgattgaaaagaattactttcttcataagtcagcccaggaagcatataagtcatacatacgagcctatgattcccattctctgaaacagatctttaatgttaataacctaaatttgcctcaggttgctctgtcatttggtttcaaggtgcctcccttcgttgatctgaacgtcaacagtaatgaaggcaagcagaaaaagcgaggaggtggtggtggatttggctaccagaaaaccaagaaagttgagaaatccaaaatctttaaacacattagcaagaaatcatctgacagcaggcagttctctcactgaacacatgccttcctttcatcttgaataactttgtcctaaaatgaattttttttccccttgatttaacaggatttttgtagactttagaatttggacttacctaacaagagtataaattgacttgggttgcaagcactgagcactgttacttctatcacgtctctcttttatttctgggatataaaacaggctttaagtttcttggttgcccaagggcagagcaaggaatatctggtgtttcttgtgatgataatattttaattttaaatatccctccctcatacaagtgtatgttaccattttaatataattctttttgtacctttccttcttgttttgtgaagatttttgtggcatggattgctgtgctcactgctgtaaaaggtgacctagtgtactgggcagctggtggcggtgcagaaaagagtctcaggttattttttgtttttagttatttcttggaccttgacagtatctaatgactcctcctgaaaatgctgcagtataaaagagcaaagagctttgggaaatacctaagaagcaccttaagattagggtggcattgcttttatagattcttgattttaaagcaacaggcctttctcaggtgttgcattttttggagcaaaaactatgggttgtaatttgaataaagtgtcactaagcagttataacgtttgatggctggggggtaggaagaggatggaattgagatgtttgagcctcatttacatcaatagaggtgtaatgtactgcatttcttcatttggtaacataacaaagactttcatacaaagaacgatgatgctcctcattaagatttgtttaattcaaggtggtttggatttggtaagcctttgcactctgtagagtacttagaagacaagggcaacttacttggagttagagccaagctgtcagacggtgcccagcacacattaatgttagcttctttctgagaaaaaaatacctcttccaggccctgaaacaaaaaatacatttgctgtgaagattgaaaatgaacaaagttagaaaaaaaaacagcaaaatcagtgatttagtcagatgagtttttcgttgtaggagcacttgatttctagtgtgttttgtacagtatataactacaagatagtacattttgtagcagttcaaagccaaagttgctagcatcattttgctgttgtgccagttaatcataggatcccattaaatgcccgccaatcgaagggcaacttatgtaatacaatagtg

SEQ ID NO: 443179 - DNA, 2238 bp, Homo sapiens
agctgaccacgtgcggccggaagggaagtaacgtcagcctgagaactgagtagctgtactgtgtggcgccttattctaggcacttgttgggcagaatgtcacacctgccgatgaaactcctgcgtaagaagatcgagaagcggaacctcaaattgcggcagcggaacctaaagtttcagggggcctcaaatctgaccctatcggaaactcaaaatggagatgtatctgaagaaacaatgggaagtagaaaggttaaaaaatcaaaacaaaagcccatgaatgtgggcttatcagaaactcaaaatggaggcatgtctcaagaagcagtgggaaatataaaagttacaaagtctccccagaaatccactgtattaaccaatggagaagcagcaatgcagtcttccaattcagaatcaaaaaagaaaaagaagaaaaagagaaaaatggtgaatgatgctgagcctgatacgaaaaaagcaaaaactgaaaacaaagggaaatctgaagaagaaagtgccgagactactaaagaaacagaaaataatgtggagaagccagataatgatgaagatgagagtgaggtgcccagtctgcccctgggactgacaggagcttttgaggatacttcgtttgcttctctatgtaatcttgtcaatgaaaacactctgaaggcaataaaagaaatgggttttacaaacatgactgaaattcagcataaaagtatcagaccacttctggaaggcagggatcttctagcagctgcaaaaacaggcagtggtaaaaccctggcttttctcatccctgcagttgaactcattgttaagttaaggttcatgcccaggaatggaacaggagtccttattctctcacctactagagaactagccatgcaaacctttggtgttcttaaggagctgatgactcaccacgtgcatacctatggcttgataatgggtggcagtaacagatctgctgaagcacagaaacttggtaatgggatcaacatcattgtggccacaccaggccgtctgctggaccatatgcagaataccccaggatttatgtataaaaacctgcagtgtctggttattgatgaagctgatcgtatcttggatgtggggtttgaagaggaattaaagcaaattattaaacttttgccaacacgtagacagactatgctcttttctgccacccaaactcgaaaagttgaagacctggcaaggatttctctgaaaaaggagccattgtatgttggcgttgatgatgataaagcgaatgcaacagtggatggtcttgaacagggatatgttgtttgtccttctgaaaagagattccttctgctctttacattccttaagaagaaccgaaagaagaagcttatggtcttcttttcatcttgtatgtctgtgaaataccactatgagttgctgaactacattgatttgcccgtcttggccattcatggaaagcaaaagcaaaataagcgtacaaccacattcttccagttctgcaatgcagattcgggaacactattgtgtacggatgtggcagcgagaggactagacattcctgaagtcgactggattgttcagtatgaccctccggatgaccctaaggaatatattcatcgtgtgggtagaacagccagaggcctaaatgggagagggcatgccttgctcattttgcgcccagaagaattgggttttcttcgctacttgaaacaatccaaggttccattaagtgaatttgacttttcctggtctaaaatttctgacattcagtctcagcttgagaaattgattgaaaagaattactttcttcataagtcagcccaggaagcatataagtcatacatacgagcctatgattcccattctctgaaacagatctttaatgttaataacctaaatttgcctcaggttgctctgtcatttggtttcaaggtgcctcccttcgttgatctgaacgtcaacagtaatgaaggcaagcagaaaaagcgaggaggtggtggtggatttggctaccagaaaaccaagaaagttgagaaatccaaaatctttaaacacattagcaagaaatcatctgacagcaggcagttctctcactgaacacatgccttcctttcatcttgaataactttgtcctaaaatgaattttttttccccttgatttaacaggatttttgtagactttagaatttggacttacctaacaagagtataaattgacttgggttgc

SEQ ID NO: 443180 - DNA, 1940 bp, Homo sapiens
  misc_feature (1912)..(1912): n is a, c, g, or t
agctgaccacgtgcggccggaagggaagtaacgtcagcctgagaactgagtagctgtactgtgtggcgccttattctaggcacttgttgggcagaatgtcacacctgccgatgaaactcctgcgtaagaagatcgagaagcggaacctcaaattgcggcagcggaacctaaagtttcagggggcctcaaatctgaccctatcggaaactcaaaatggagatgtatctgaagaaacaatgggaagtagaaaggttaaaaaatcaaaacaaaagcccatgaatgtgggcttatcagaaactcaaaatggaggcatgtctcaagaagcagtgggaaatataaaagttacaaagtctccccagaaatccactgtattaaccaatggagaagcagcaatgcagtcttccaattcagaatcaaaaaagaaaaagaagaaaaagagaaaaatggtgaatgatgctgagcctgatacgaaaaaagcaaaaactgaaaacaaagggaaatctgaagaagaaagtgccgagactactaaagaaacagaaaataatgtggagaagccagataatgatgaagatgagagtgaggtgcccagtctgcccctgggactgacaggagcttttgaggatacttcgtttgcttctctatgtaatcttgtcaatgaaaacactctgaaggcaataaaagaaatgggttttacaaacatgactgaaattcagcataaaagtatcagaccacttctggaaggcagggatcttctagcagctgcaaaaacaggcagtggtaaaaccctggcttttctcatccctgcagttgaactcattgttaagttaaggttcatgcccaggaatggaacaggagtccttattctctcacctactagagaactagccatgcaaacctttggtgttcttaaggagctgatgactcaccacgtgcatacctatggcttgataatgggtggcagtaacagatctgctgaagcacagaaacttggtaatgggatcaacatcattgtggccacaccaggccgtctgctggaccatatgcagaataccccaggatttatgtataaaaacctgcagtgtctggttattgatgaagctgatcgtatcttggatgtggggtttgaagaggaattaaagcaaattattaaacttttgccaacacgtagacagactatgctcttttctgccacccaaactcgaaaagttgaagacctggcaaggatttctctgaaaaaggagccattgtatgttggcgttgatgatgataaagcgaatgcaacagtggatggtcttgaacagggatatgttgtttgtccttctgaaaagagattccttctgctctttacattccttaagaagaaccgaaagaagaagcttatggtcttcttttcatcttgtatgtctgtgaaataccactatgagttgctgaactacattgatttgcccgtcttggccattcatggaaagcaaaagcaaaataagcgtacaaccacattcttccagttctgcaatgcagattcgggaacactattgtgtacggatgtggcagcgagaggactagacattcctgaagtcgactggattgttcagtatgaccctccggatgaccctaaggaatatattcatcgtgtgggtagaacagccagaggcctaaatgggagagggcatgccttgctcattttgcgcccagaagaattgggttttcttcgctacttgaaacaatccaaggttccattaagtgaatttgacttttcctggtctaaaatttctgacattcagtctcagcttgagaaattgattgaaaagaattactttcttcataagtcagcccaggaagcatataagtcatacatacgagcctatgattcccattctttgttttcgattttaaggagccttccctcgcttancctgaacgccaaatttttttatgcatta

SEQ ID NO: 443181 - DNA, 528 bp, Homo sapiens
agctgaccacgtgcggccggaagggaagtaacgtcagcctgagaactgagtagctgtactgtgtggcgccttattctaggcacttgttgggcagaatgtcacacctgccgatgaaactcctgcgtaagaagatcgagaagcggaacctcaaattgcggcagcggaacctaaagtttcagggggcctcaaatctgaccctatcggaaactcaaaatggagatgtatctgaagaaacaatgggaagtagaaaggttaaaaaatcaaaacaaaagcccatgaatgtgggcttatcagaaactcaaaatggaggcatgtctcaagaagcagtgggaaatataaaagttacaaagtctccccagaaatccactgtattaaccaatggagaagcagcaatgcagtcttccaattcagaatcaaaaaagaaaaagaagaaaaagagaaaaatggtgaatgatgctgagcctgatacgaataagcctcactgttactaaggggagtctgaagtagcaagataccgggatacatcaa

SEQ ID NO: 443182 - DNA, 920 bp, Homo sapiens
ctctcacgtgacccctgcgcgctcccgcgggggagcgtagtctcggaggcggcgccgcaggggattgaggggttgactgagcgttgcgagccttagctttctcccgaacgccagcgctgaggacacgatgtcgcggctctcccgctcactgctttgggccgccacctgcctgggcgtgctctgcgtgctgtccgcggacaagaacacgacccagcacccgaacgtgacgactttagcgcccatctccaacgtaacctcggcgccggtgacgtccctcccgctggtcaccactccggcaccagaaacctgtgaaggtcgaaacagctgcgtttcctgttttaatgttagcgttgttaatactacctgcttttggatagaatgtaaagatgagagctattgttcacataactcaacagttagtgattgtcaagtggggaacacgacagacttctgttccgtttccacggccactccagtgccaacagccaattctacagctaaacccacagttcagccctccccttctacaacttccaagacagttactacatcaggtacaacaaataacactgtgactccaacctcacaacctgtgcgaaagtctacctttgatgcagccagtttcattggaggaattgtcctggtcttgggtgtgcaggctgtaattttctttctttataaattctgcaaatctaaagaacgaaattaccacactctgtaaacagacccattgaattaataaggactggtgattcatttgtgtaactcactgaagccaaaatactatcttttaagatgtcccacatggaagacgctattccaggatctttaaatttccatggatgcatataggatgtttgggagcatcatccgtgaagaaaaaatcaattaaatcattgtgttcaacaggaatatttaaa

SEQ ID NO: 443183 - DNA, 3000 bp, Homo sapiens
ctctcacgtgacccctgcgcgctcccgcgggggagcgtagtctcggaggcggcgccgcaggggattgaggggttgactgagcgttgcgagccttagctttctcccgaacgccagcgctgaggacacgatgtcgcggctctcccgctcactgctttgggccgccacctgcctgggcgtgctctgcgtgctgtccgcggacaagaacacgacccagcacccgaacgtgacgactttagcgcccatctccaacgtaacctcggcgccggtgacgtccctcccgctggtcaccactccggcaccagaaacctgtgaaggtcgaaacagctgcgtttcctgttttaatgttagcgttgttaatactacctgcttttggatagaatgtaaagatgagagctattgttcacataactcaacagttagtgattgtcaagtggggaacacgacagacttctgttccgtttccacggccactccagtgccaacagccaattctacaggtacaacaaataacactgtgactccaacctcacaacctgtgcgaaagtctacctttgatgcagccagtttcattggaggaattgtcctggtcttgggtgtgcaggctgtaattttctttctttataaattctgcaaatctaaagaacgaaattaccacactctgtaaacagacccattgaattaataaggactggtgattcatttgtgtaactcactgaagccaaaatactatcttttaagatgtcccacatggaagacgctattccaggatctttaaatttccatggatgcatataggatgtttgggagcatcatccgtgaagaaaaaatcaattaaatcattgtgttcaacaggaatatttaaaatattctgcatgaatcctgtggctgtcttattttaaatagctgctgctgtgggattatattttttttccttaacatgccaaatataactttctgaaagtgatggaaaatgttgtcttgtgcagacaacatcatggctcttggcagtttaaatttagtaattttaatttagtgaacagaattgagaagaacgtgccaaatgagaatcaattaggtggatttttggctgtcatttcaaaagtggaataaatttattaatttagtagtactaaatggtatccttagattaaaattttgtgcttgataacagctgttttttctacattagaaataagatgccacacaaggaactacattccagatttaaagaaatgaaaggataccattagtgtgtataacagattattgttcatacttgtaaagcatcttatgtcattgagaatataaagaacagtgccttagaagacagtgaaaggtaagctctagcttaatgtctatgatttgttctttgacattaaggaaggtaaggattggtcagaggatgtaacttgatgtgagcagtagtaaacctgttttagatatcatactgttaatattttattgaaaatttatttcagagcggagaaacttaagctaaagtctgttatacagaattgaaagccttcgtatcttgaacctcccaacatttttcttatggctgttgaaaagtatagagctaaattgatttaattacactttcctttgtactttaaaaaaaagtatgctagcactattgtaccttgaaaggatttccaccagactgtcttgagtagtgacttctttggtgaggcaagaaggatatacattattttagaatcatttactatttaaatgagacaatcatattattttagaatcatttattttaaatgagacaatcattttaagttttaagataacagaagtgaccaatgtaatttcacaacacctaaggattttttggttgatcaggttactgtagatttttactgattgtcctggatgaatagactgtgctttttctttttctctcccttccttcttggtttcccatagtataataagcatgcatactttaacttctatagttttctcctttagagggtcgtcttcagttttagaggtttacttctcccttgcctttgactcattggactagtgcagaggctttaagtagtttaaaatgggctttgcttttctaggtcattaacgttttttatttagtttctttagccaatagtggctgagtttcgcacttgattttcaatattttatagtaagaaatgacaaactgctttgtttcatttcataaacaaactctgcatttagataactattaaaggttgttaagatgaagatttactgtttctttgttactcgttggtacagctgtttgttttacttgcacatttgtacatatacttaatgttttcaagtgccttaattgtttaaaatctctggcttcaaagtttcttggggaaaggtcggtttacctcacattttttgtttccattagtaatattctaggtacctcacaaaatgtattatggtgccatggctgttagtttttagtgagtgctgtaggattaattcgaaaataggcagaattccattcctcccaaggtggcaaaaattagctatactgatgtaattgtcatttacctgggtatgaattccctgacacacattcatgtcaacatatgtagcaaattttgtgaaaacataacaatttgaagcttctgtaattttgagcactgctctaacaacaagcataatataaaattagttagattttgcaagtctacaaatgagctcttgcaacagaactcacagcctttttacttttttcccctaactttagcaatgtagtatcttgagccattaatttttgggtttttttaaaatccagaaggtatatagaaaccttttcagatttttcatctgatttgttcttgcagatgttcttctatcaaataccttattttaccttacagatatttgttgcacaggcagatactgctgtatttagacatttctatttcagttcattaaaaactgcaaaaccaatctgtatcatgtaccaaactgacttaaaataaatctacatgtttattgaattaa

SEQ ID NO: 443184 - DNA, 582 bp, Homo sapiens
ggacgcgtgggtcgaccacgcgtcgcccacgcgtccgacagaattgaaagtatcttgagccattaatttttgggtttttttaaaatccagaaggtatatagaaaccttttcagatttttcatctgatttgttcttgcagatgttcttctatcaaataccttattttaccttacagatatttgttgcacaggcagatactgctgtatttagacatttctatttcagttcattaaaaactgcaaaaccaatctgtatcatgtaccaaactgacttaaaataaatctacatgtttattgaattaaaaaaaaaaaaaaaaaaaaaaaaaaaaaaaaaaaaaaaaaaaaaaacaacaagaagcgacgaaccaaagaagaaagccaaagagaaaacaaggaaaaacaaaaagcgaaatatcaaaaaaagagaaacaaaaagagaaagcaaaacacaaaaaaaacatggaagcaaaagcccaaacggaaaagagaaaaaggacgacaacaatcacaaagcagaagacaaaaagagaggagagcaaaaatgcaaagggaaacaaagaggacaacaagaaagaaaagcaac

SEQ ID NO: 443185 - DNA, 327 bp, Homo sapiens
agctgacgtttgagcacgtagttagtgaaaacttcacacttcaaagtatgcgaaaaggaagaaaagtacccataaacctgtgaaggtcgaaacagctgcgtttcctgttttaatgttagcgttgttaatactacctgcttttggatagaatgtaaagatgagagctattgttcacataactcaacagttagtgattgtcaagtggggaacacgacagacttctgttccgtttcacggcactcagtgccacagccaatctcagctaaccacagtcagcctccctctcacttcaggcagttctcataggtcacaaatcactttctcacc

SEQ ID NO: 443186 - DNA, 3015 bp, Homo sapiens
ctctcacgtgacccctgcgcgctcccgcgggggagcgtagtctcggaggcggcgccgcaggggattgaggggttgactgagcgttgcgagccttagctttctcccgaacgccagcgctgaggacacgatgtcgcggctctcccgctcactgctttgggccgccacctgcctgggcgtgctctgcgtgctgtccgcggacaagaacacgacccagcacccgaacgtgacgactttagcgcccatctccaacgtaacctcggcgccggtgacgtccctcccgctggtcaccactccggcaccagaaacctgtgaaggtcgaaacagctgcgtttcctgttttaatgttagcgttgttaatactacctgcttttggatagaatgtaaagatgagagctattgttcacataactcaacagttagtgattgtcaagtggggaacacgacagacttctgttccgtttccacggccactccagtgccaacagccaattctacagctaaacccacagttcagccctccccttctacaacttccaagacagttactacatcaggtacaacaaataacactgtgactccaacctcacaacctgtgcgaaagtctacctttgatgcagccagtttcattggaggaattgtcctggtcttgggtgtgcaggctgtaattttctttctttataaattctgcaaatctaaagaacgaaattaccacactctgtaaacagacccattgaattaataaggactggtgattcatttgtgtaactcactgaagccaaaatactatcttttaagatgtcccacatggaagacgctattccaggatctttaaatttccatggatgcatataggatgtttgggagcatcatccgtgaagaaaaaatcaattaaatcattgtgttcaacaggaatatttaaaatattctgcatgaatcctgtggctgtcttattttaaatagctgctgctgtgggattatattttttttccttaacatgccaaatataactttctgaaagtgatggaaaatgttgtcttgtgcagacaacatcatggctcttggcagtttaaatttagtaattttaatttagtgaacagaattgagaagaacgtgccaaatgagaatcaattaggtggatttttggctgtcatttcaaaagtggaataaatttattaatttagtagtactaaatggtatccttagattaaaattttgtgcttgataacagctgttttttctacattagaaataagatgccacacaaggaactacattccagatttaaagaaatgaaaggataccattagtgtgtataacagattattgttcatacttgtaaagcatcttatgtcattgagaatataaagaacagtgccttagaagacagtgaaaggtaagctctagcttaatgtctatgatttgttctttgacattaaggaaggtaaggattggtcagaggatgtaacttgatgtgagcagtagtaaacctgttttagatatcatactgttaatattttattgaaaatttatttcagaccttcgtatcttgaacctcccaacatttttcttatggctgttgaaaagtatagagctaaattgatttaattacactttcctttgtactttaaaaaaaagtatgctagcactattgtaccttgaaaggatttccaccagactgtcttgagtagtgacttctttggtgaggcaagaaggatatacattattttagaatcatttactatttaaatgagacaatcatattattttagaatcatttattttaaatgagacaatcattttaagttttaagataacagaagtgaccaatgtaatttcacaacacctaaggattttttggttgatcaggttactgtagatttttactgattgtcctggatgaatagactgtgctttttctttttctctcccttccttcttggtttcccatagtataataagcatgcatactttaacttctatagttttctcctttagagggtcgtcttcagttttagaggtttacttctcccttgcctttgactcattggactagtgcagaggctttaagtagtttaaaatgggctttgcttttctaggtcattaacgttttttatttagtttctttagccaatagtggctgagtttcgcacttgattttcaatattttatagtaagaaatgacaaactgctttgtttcatttcataaacaaactctgcatttagataactattaaaggttgttaagatgaagatttactgtttctttgttactcgttggtacagctgtttgttttacttgcacatttgtacatatacttaatgttttcaagtgccttaattgtttaaaatctctggcttcaaagtttcttggggaaaggtcggtttacctcacattttttgtttccattagtaatattctaggtacctcacaaaatgtattatggtgccatggctgttagtttttagtgagtgctgtaggattaattcgaaaataggcagaattccattcctcccaaggtggcaaaaattagctatactgatgtaattgtcatttacctgggtatgaattccctgacacacattcatgtcaacatatgtagcaaattttgtgaaaacataacaatttgaagcttctgtaattttgagcactgctctaacaacaagcataatataaaattagttagattttgcaagtctacaaatgagctcttgcaacagaactcacagcctttttacttttttcccctaactttagcaatgtagtatcttgagccattaatttttgggtttttttaaaatccagaaggtatatagaaaccttttcagatttttcatctgatttgttcttgcagatgttcttctatcaaataccttattttaccttacagatatttgttgcacaggcagatactgctgtatttagacatttctatttcagttcattaaaaactgcaaaaccaatctgtatcatgtaccaaactgacttaaaataaatctacatgtttattgaattaa

SEQ ID NO: 443187 - DNA, 2857 bp, Homo sapiens
catataatgagcacagtctgagagagcgtgacgactatgagggccgatcgtcggtgtaatctctcgtggcgtgtgacgaccctcgcggtggtcaccactccgaaacctgtgaaggtcgaaacagctgcgtttcctgttttaatgttagcgttgttaatactacctgcttttggatagaatgtaaagatgagagctattgttcacataactcaacagttagtgattgtcaagtggggaacacgacagacttctgttccgtttccacggccactccagtgccaacagccaattctacagctaaacccacagttcagccctccccttctacaacttccaagacagttactacatcaggtacaacaaataacactgtgactccaacctcacaacctgtgcgaaagtctacctttgatgcagccagtttcattggaggaattgtcctggtcttgggtgtgcaggctgtaattttctttctttataaattctgcaaatctaaagaacgaaattaccacactctgtaaacagacccattgaattaataaggactggtgattcatttgtgtaactcactgaagccaaaatactatcttttaagatgtcccacatggaagacgctattccaggatctttaaatttccatggatgcatataggatgtttgggagcatcatccgtgaagaaaaaatcaattaaatcattgtgttcaacaggaatatttaaaatattctgcatgaatcctgtggctgtcttattttaaatagctgctgctgtgggattatattttttttccttaacatgccaaatataactttctgaaagtgatggaaaatgttgtcttgtgcagacaacatcatggctcttggcagtttaaatttagtaattttaatttagtgaacagaattgagaagaacgtgccaaatgagaatcaattaggtggatttttggctgtcatttcaaaagtggaataaatttattaatttagtagtactaaatggtatccttagattaaaattttgtgcttgataacagctgttttttctacattagaaataagatgccacacaaggaactacattccagatttaaagaaatgaaaggataccattagtgtgtataacagattattgttcatacttgtaaagcatcttatgtcattgagaatataaagaacagtgccttagaagacagtgaaaggtaagctctagcttaatgtctatgatttgttctttgacattaaggaaggtaaggattggtcagaggatgtaacttgatgtgagcagtagtaaacctgttttagatatcatactgttaatattttattgaaaatttatttcagagcggagaaacttaagctaaagtctgttatacagaattgaaagccttcgtatcttgaacctcccaacatttttcttatggctgttgaaaagtatagagctaaattgatttaattacactttcctttgtactttaaaaaaaagtatgctagcactattgtaccttgaaaggatttccaccagactgtcttgagtagtgacttctttggtgaggcaagaaggatatacattattttagaatcatttactatttaaatgagacaatcatattattttagaatcatttattttaaatgagacaatcattttaagttttaagataacagaagtgaccaatgtaatttcacaacacctaaggattttttggttgatcaggttactgtagatttttactgattgtcctggatgaatagactgtgctttttctttttctctcccttccttcttggtttcccatagtataataagcatgcatactttaacttctatagttttctcctttagagggtcgtcttcagttttagaggtttacttctcccttgcctttgactcattggactagtgcagaggctttaagtagtttaaaatgggctttgcttttctaggtcattaacgttttttatttagtttctttagccaatagtggctgagtttcgcacttgattttcaatattttatagtaagaaatgacaaactgctttgtttcatttcataaacaaactctgcatttagataactattaaaggttgttaagatgaagatttactgtttctttgttactcgttggtacagctgtttgttttacttgcacatttgtacatatacttaatgttttcaagtgccttaattgtttaaaatctctggcttcaaagtttcttggggaaaggtcggtttacctcacattttttgtttccattagtaatattctaggtacctcacaaaatgtattatggtgccatggctgttagtttttagtgagtgctgtaggattaattcgaaaataggcagaattccattcctcccaaggtggcaaaaattagctatactgatgtaattgtcatttacctgggtatgaattccctgacacacattcatgtcaacatatgtagcaaattttgtgaaaacataacaatttgaagcttctgtaattttgagcactgctctaacaacaagcataatataaaattagttagattttgcaagtctacaaatgagctcttgcaacagaactcacagcctttttacttttttcccctaactttagcaatgtagtatcttgagccattaatttttgggtttttttaaaatccagaaggtatatagaaaccttttcagatttttcatctgatttgttcttgcagatgttcttctatcaaataccttattttaccttacagatatttgttgcacaggcagatactgctgtatttagacatttctatttcagttcattaaaaactgcaaaaccaatctgtatcatgtaccaaactgacttaaaataaatctacatgtttattgaattaa

SEQ ID NO: 443188 - DNA, 3743 bp, Homo sapiens
ctctcacgtgacccctgcgcgctcccgcgggggagcgtagtctcggaggcggcgccgcaggggattgaggggttgactgagcgttgcgagccttagctttctcccgaacgccagcgctgaggacacgatgtcgcggctctcccgctcactgctttgggccgccacctgcctgggcgtgctctgcgtgctgtccgcggacaagaacacgacccagcacccgaacgtgacgactttagcgcccatctccaacgtaacctcggcgccggtgacgtccctcccgctggtcaccactccggcaccagaaacctgtgaaggtcgaaacagctgcgtttcctgttttaatgttagcgttgttaatactacctgcttttggatagaatgtaaagatgagagctattgttcacataactcaacagttagtgattgtcaagtggggaacacgacagacttctgttccgtttccacggccactccagtgccaacagccaattctacagctaaacccacagttcagccctccccttctacaacttccaagacagttactacatcaggtacaacaaataacactgtgactccaacctcacaacctgtgcgaaagtctacctttgatgcagccagtttcattggaggaattgtcctggtcttgggtgtgcaggctgtaattttctttctttataaattctgcaaatctaaagaacgaaattaccacactctgtaaacagacccattgaattaataaggactggtgattcatttgtgtaactcactgaagccaaaatactatcttttaagatgtcccacatggaagacgctattccaggatctttaaatttccatggatgcatataggatgtttgggagcatcatccgtgaagaaaaaatcaattaaatcattgtgttcaacaggaatatttaaaatattctgcatgaatcctgtggctgtcttattttaaatagctgctgctgtgggattatattttttttccttaacatgccaaatataactttctgaaagtgatggaaaatgttgtcttgtgcagacaacatcatggctcttggcagtttaaatttagtaattttaatttagtgaacagaattgagaagaacgtgccaaatgagaatcaattaggtggatttttggctgtcatttcaaaagtggaataaatttattaatttagtagtactaaatggtatccttagattaaaattttgtgcttgataacagctgttttttctacattagaaataagatgccacacaaggaactacattccagatttaaagaaatgaaaggataccattagtgtgtataacagattattgttcatacttgtaaagcatcttatgtcattgagaatataaagaacagtgccttagaagacagtgaaaggtaagctctagcttaatgtctatgatttgttctttgacattaaggaaggtaaggattggtcagaggatgtaacttgatgtgagcagtagtaaacctgttttagatatcatactgttaatattttattgaaaatttatttcagagcggagaaacttaagctaaagtctgttatacagaattgaaagccttcgtatcttgaacctcccaacatttttcttatggctgttgaaaagtatagagctaaattgatttaattacactttcctttgtactttaaaaaaaagtatgctagcactattgtaccttgaaaggatttccaccagactgtcttgagtagtgacttctttggtgaggcaagaaggatatacattattttagaatcatttactatttaaatgagacaatcatattattttagaatcatttattttaaatgagacaatcattttaagttttaagataacagaagtgaccaatgtaatttcacaacacctaaggattttttggttgatcaggttactgtagatttttactgattgtcctggatgaatagactgtgctttttctttttctctcccttccttcttggtttcccatagtataataagcatgcatactttaacttctatagttttctcctttagagggtcgtcttcagttttagaggtttacttctcccttgcctttgactcattggactagtgcagaggctttaagtagtttaaaatgggctttgcttttctaggtcattaacgttttttatttagtttctttagccaatagtggctgagtttcgcacttgattttcaatattttatagtaagaaatgacaaactgctttgtttcatttcataaacaaactctgcatttagataactattaaaggttgttaagatgaagatttactgtttctttgttactcgttggtacagctgtttgttttacttgcacatttgtacatatacttaatgttttcaagtgccttaattgtttaaaatctctggcttcaaagtttcttggggaaaggtcggtttacctcacattttttgtttccattagtaatattctaggtacctcacaaaatgtattatggtgccatggctgttagtttttagtgagtgctgtaggattaattcgaaaataggcagaattccattcctcccaaggtggcaaaaattagctatactgatgtaattgtcatttacctgggtatgaattccctgacacacattcatgtcaacatatgtagcaaattttgtgaaaacataacaatttgaagcttctgtaattttgagcactgctctaacaacaagcataatataaaattagttagattttgcaagtctacaaatgagctcttgcaacagaactcacagcctttttacttttttcccctaactttagcaatgtagtatcttgagccattaatttttgggtttttttaaaatccagaaggtatatagaaaccttttcagatttttcatctgatttgttcttgcagatgttcttctatcaaataccttattttaccttacagatatttgttgcacaggcagatactgctgtatttagacatttctatttcagttcattaaaaactgcaaaaccaatctgtatcatgtaccaaactgacttaaaataaatctacatgtttattgaattaaaaaaaaaaaaaacaaaaaaaaacaaaaaaaaaaaaaaaaaaaaaaaaaaaaaaaaaaaaaaaaaaaaaagacagagagagagagagagagagagcacacgacgagagagaggcgagcgcgcggcgcggggagacaagaaaaaaaagaaagacgaggaagaaacaaaagaaagacgagggcgacgagagagaagcaactacagacgccgaggggaccacacccgacgagcgcagaggagagcgaactacgcggaccgaggagagagaaaaaaaaaagacgacacccaggcaccaaaaaagaaaagaaacagaaaacaaacccgcgagcaaagaaaagaaaaagcgggacagcagagcgaggagaaggaaaaccgccaccagctacacccacataaactcccccccaacagtacaactacaacagaacaatataccattaaaccacaaaaacatactacatcaccccccaatatattctcacacaacatcataacacaaacaaaaaacacacacaacaatctagccccgaaacccacacaggaagcagcgcgagacgcgacagaccagcgccgagagcgacaccccagaaaaagaaaacaagcaagaggcgcacgcacagaaaacgccacaaacaggaaacacaaacaaagcagaagagagaaaacacgacccgacccaaaacccacc

SEQ ID NO: 443189 - DNA, 3177 bp, Homo sapiens
  misc_feature (3062)..(3062): n is a, c, g, or t
ctctcacgtgacccctgcgcgctcccgcgggggagcgtagtctcggaggcggcgccgcaggggattgaggggttgactgagcgttgcgagccttagctttctcccgaacgccagcgctgaggacacgatgtcgcggctctcccgctcactgctttgggccgccacctgcctgggcgtgctctgcgtgctgtccgcggacaagaacacgacccagcacccgaacgtgacgactttagcgcccatctccaacgtaacctcggcgccggtgacgtccctcccgctggtcaccactccggcaccagaaacctgtgaaggtcgaaacagctgcgtttcctgttttaatgttagcgttgttaatactacctgcttttggatagaatgtaaagatgagagctattgttcacataactcaacagttagtgattgtcaagtggggaacacgacagacttctgttccgtttccacggccactccagtgccaacagccaattctacagctaaacccacagttcagccctccccttctacaacttccaagacagttactacatcaggtacaacaaataacactgtgactccaacctcacaacctgtgcgaaagtctacctttgatgcagccagtttcattggaggaattgtcctggtcttgggtgtgcaggctgtaattttctttctttataaattctgcaaatctaaagaacgaaattaccacactctgtaaacagacccattgaattaataaggactggtgattcatttgtgtaactcactgaagccaaaatactatcttttaagatgtcccacatggaagacgctattccaggatctttaaatttccatggatgcatataggatgtttgggagcatcatccgtgaagaaaaaatcaattaaatcattgtgttcaacaggaatatttaaaatattctgcatgaatcctgtggctgtcttattttaaatagctgctgctgtgggattatattttttttccttaacatgccaaatataactttctgaaagtgatggaaaatgttgtcttgtgcagacaacatcatggctcttggcagtttaaatttagtaattttaatttagtgaacagaattgagaagaacgtgccaaatgagaatcaattaggtggatttttggctgtcatttcaaaagtggaataaatttattaatttagtagtactaaatggtatccttagattaaaattttgtgcttgataacagctgttttttctacattagaaataagatgccacacaaggaactacattccagatttaaagaaatgaaaggataccattagtgtgtataacagattattgttcatacttgtaaagcatcttatgtcattgagaatataaagaacagtgccttagaagacagtgaaaggtaagctctagcttaatgtctatgatttgttctttgacattaaggaaggtaaggattggtcagaggatgtaacttgatgtgagcagtagtaaacctgttttagatatcatactgttaatattttattgaaaatttatttcagagcggagaaacttaagctaaagtctgttatacagaattgaaagccttcgtatcttgaacctcccaacatttttcttatggctgttgaaaagtatagagctaaattgatttaattacactttcctttgtactttaaaaaaaagtatgctagcactattgtaccttgaaaggatttccaccagactgtcttgagtagtgacttctttggtgaggcaagaaggatatacattattttagaatcatttactatttaaatgagacaatcatattattttagaatcatttattttaaatgagacaatcattttaagttttaagataacagaagtgaccaatgtaatttcacaacacctaaggattttttggttgatcaggttactgtagatttttactgattgtcctggatgaatagactgtgctttttctttttctctcccttccttcttggtttcccatagtataataagcatgcatactttaacttctatagttttctcctttagagggtcgtcttcagttttagaggtttacttctcccttgcctttgactcattggactagtgcagaggctttaagtagtttaaaatgggctttgcttttctaggtcattaacgttttttatttagtttctttagccaatagtggctgagtttcgcacttgattttcaatattttatagtaagaaatgacaaactgctttgtttcatttcataaacaaactctgcatttagataactattaaaggttgttaagatgaagatttactgtttctttgttactcgttggtacagctgtttgttttacttgcacatttgtacatatacttaatgttttcaagtgccttaattgtttaaaatctctggcttcaaagtttcttggggaaaggtcggtttacctcacattttttgtttccattagtaatattctaggtacctcacaaaatgtattatggtgccatggctgttagtttttagtgagtgctgtaggattaattcgaaaataggcagaattccattcctcccaaggtggcaaaaattagctatactgatgtaattgtcatttacctgggtatgaattccctgacacacattcatgtcaacatatgtagcaaattttgtgaaaacataacaatttgaagcttctgtaattttgagcactgctctaacaacaagcataatataaaattagttagattttgcaagtctacaaatgagctcttgcaacagaactcacagcctttttacttttttcccctaactttagcaatgtagtatcttgagccattaatttttgggtttttttaaaatccagaaggtatatagaaaccttttcagatttttcatctgatttgttcttgcagatgttcttctatcaaataccttattttaccttacagatatttgttgcacaggcagatactgctgtatttagacatttctatttcagttcattaaaaactgcaaaaccaatctgtatcatgtaccaaactgacttaaaataaatctacatgtttattgaattaagaacncacaacacaacacaccacacctcacaccacaaacacacaaaccaacccccccacaccccactcaccacccaactatcacctcataccacaccccttcatccgaacacaactaata

SEQ ID NO: 443190 - DNA, 2714 bp, Homo sapiens
ctctcacgtgacccctgcgcgctcccgcgggggagcgtagtctcggaggcggcgccgcaggggattgaggggttgactgagcgttgcgagccttagctttctcccgaacgccagcgctgaggacacgatgtcgcggctctcccgctcactgctttgggccgccacctgcctgggcgtgctctgcgtgctgtccgcggacaagaacacgacccagcacccgaacgtgacgactttagcgcccatctccaacgtaacctcggcgccggtgacgtccctcccgctggtcaccactccggcaccagaaacctgtgaaggtcgaaacagctgcgtttcctgttttaatgttagcgttgttaatactacctgcttttggatagaatgtaaagatgagagctattgttcacataactcaacagttagtgattgtcaagtggggaacacgacagacttctgttccgtttccacggccactccagtgccaacagccaattctacagctaaacccacagttcagccctccccttctacaacttccaagacagttactacatcaggtacaacaaataacactgtgactccaacctcacaacctgtgcgaaagtctacctttgatgcagccagtttcattggaggaattgtcctggtcttgggtgtgcaggctgtaattttctttctttataaattctgcaaatctaaagaacgaaattaccacactctgtaaacagacccattgaattaataaggactggtgattcatttgtgtaactcactgaagccaaaatactatcttttaagatgtcccacatggaagacgctattccaggatctttaaatttccatggatgcatataggatgtttgggagcatcatccgtgaagaaaaaatcaattaaatcattgtgttcaacaggaatatttaaaatattctgcatgaatcctgtggctgtcttattttaaatagctgctgctgtgggattatattttttttccttaacatgccaaatataactttctgaaagtgatggaaaatgttgtcttgtgcagacaacatcatggctcttggcagtttaaatttagtaattttaatttagtgaacagaattgagaagaacgtgccaaatgagaatcaattaggtggatttttggctgtcatttcaaaagtggaataaatttattaatttagtagtactaaatggtatccttagattaaaattttgtgcttgataacagctgttttttctacattagaaataagatgccacacaaggaactacattccagatttaaagaaatgaaaggataccattagtgtgtataacagattattgttcatacttgtaaagcatcttatgtcattgagaatataaagaacagtgccttagaagacagtgaaaggtaagctctagcttaatgtctatgatttgttctttgacattaaggaaggtaaggattggtcagaggatgtaacttgatgtgagcagtagtaaacctgttttagatatcatactgttaatattttattgaaaatttatttcagagcggagaaacttaagctaaagtctgttatacagaattgaaagccttcgtatcttgaacctcccaacatttttcttatggctgttgaaaagtatagagctaaattgatttaattacactttcctttgtactttttaacttctatagttttctcctttagagggtcgtcttcagttttagaggtttacttctcccttgcctttgactcattggactagtgcagaggctttaagtagtttaaaatgggctttgcttttctaggtcattaacgttttttatttagtttctttagccaatagtggctgagtttcgcacttgattttcaatattttatagtaagaaatgacaaactgctttgtttcatttcataaacaaactctgcatttagataactattaaaggttgttaagatgaagatttactgtttctttgttactcgttggtacagctgtttgttttacttgcacatttgtacatatacttaatgttttcaagtgccttaattgtttaaaatctctggcttcaaagtttcttggggaaaggtcggtttacctcacattttttgtttccattagtaatattctaggtacctcacaaaatgtattatggtgccatggctgttagtttttagtgagtgctgtaggattaattcgaaaataggcagaattccattcctcccaaggtggcaaaaattagctatactgatgtaattgtcatttacctgggtatgaattccctgacacacattcatgtcaacatatgtagcaaattttgtgaaaacataacaatttgaagcttctgtaattttgagcactgctctaacaacaagcataatataaaattagttagattttgcaagtctacaaatgagctcttgcaacagaactcacagcctttttacttttttcccctaactttagcaatgtagtatcttgagccattaatttttgggtttttttaaaatccagaaggtatatagaaaccttttcagatttttcatctgatttgttcttgcagatgttcttctatcaaataccttattttaccttacagatatttgttgcacaggcagatactgctgtatttagacatttctatttcagttcattaaaaactgcaaaaccaatctgtatcatgtaccaaactgacttaaaataaatctacatgtttattgaattaa

SEQ ID NO: 443191 - DNA, 3003 bp, Homo sapiens
ctctcacgtgacccctgcgcgctcccgcgggggagcgtagtctcggaggcggcgccgcaggggattgaggggttgactgagcgttgcgagccttagctttctcccgaacgccagcgctgaggacacgatgtcgcggctctcccgctcactgctttgggccgccacctgcctgggcgtgctctgcgtgctgtccgcggacaagaacacgacccagcacccgaacgtgacgactttagcgcccatctccaacgtaacctcggcgccggtgacgtccctcccgctggtcaccactccggcaccagaaacctgtgaaggtcgaaacagctgcgtttcctgttttaatgttagcgttgttaatactacctgcttttggatagaatgtaaagatgagagctattgttcacataactcaacagttagtgattgtcaagtggggaacacgacagacttctgttccgtttccacggccactccagtgccaacagccaattctacagctaaacccacagttcagccctccccttctacaacttccaagacagttactacatcaggtacaacaaataacactgtgactccaacctcacaacctgtgcgaaagtctacctttgatgcagccagtttcattggaggaattgtcctggtcttgggtgtgcaggctgtaattttctttctttataaattctgcaaatctaaagaacgaaattaccacactctgtaaacagacccattgaattaataaggactggtgattcatttgtgtaactcactgaagccaaaatactatcttttaagatgtcccacatggaagacgctattccaggatctttaaatttccatggatgcatataggatgtttgggagcatcatccgtgaagaaaaaatcaattaaatcattgtgttcaacaggaatatttaaaatattctgcatgaatcctgtggctgtcttattttaaatagctgctgctgtgggattatattttttttccttaacatgccaaatataactttctgaaagtgatggaaaatgttgtcttgtgcagacaacatcatggctcttggcagtttaaatttagtaattttaatttagtgaacagaattgagaagaacgtgccaaatgagaatcaattaggtggatttttggctgtcatttcaaaagtggaataaatttattaatttagtagtactaaatggtatccttagattaaaattttgtgcttgataacagctgttttttctacattagaaataagatgccacacaaggaactacattccagatttaaagaaatgaaaggataccattagtgtgtataacagattattgttcatacttgtaaagcatcttatgtcattgagaatataaagaacagtgccttagaagacagtgaaaggtaagctctagcttaatgtctatgatttgttctttgacattaaggaaggtaaggattggtcagaggatgtaacttgatgtgagcagtagtaaacctgttttagatatcatactgttaatattttattgaaaatttatttcagagcggagaaacttaagctaaagtctgttatacagaattgaaagccttcgtatcttgaacctcccaacatttttcttatggctgttgaaaagtatagagctaaattgatttaattacactttcctttgtactttaaaaaaaagtatgctagcactattgtaccttgaaaggatttccaccagactgtcttgagtagtgacttctttggtgaggcaagaaggatatacattattttagaatcatttactatttaaatgagacaatcatattattttagaatcatttattttaaatgagacaatcattttaagttttaagataacagaagtgaccaatgtaatttcacaacacctaaggattttttggttgatcaggttactgtagatttttactgattgtcctggatgaatagactgtgctttttctttttctctcccttccttcttggtttcccatagtataataagcatgcatactttaacttctatagttttctcctttagagggtcgtcttcagttttagaggtttacttctcccttgcctttgactcattggactagtgcagaggctttaagtagtttaaaatgggctttgcttttctaggtcattaacgttttttatttagtttctttagccaatagtggctgagtttcgcacttgattttcaatattttatagtaagaaatgacaaactgctttgtttcatttcataaacaaactctgcatttagataactattaaaggttgttaagatgaagatttactgtttctttgttactcgttggtacagctgtttgttttacttgcacatttgtacatatacttaatgttttcaagtgccttaattgtttaaaatctctggcttcaaagtttcttggggaaaggtcggtttacctcacattttttgtttccattagtaatattctaggtacctcacaaaatgtattatggtgccatggctgttagtttttagtgagtgctgtaggattaattcgaaaataggcagaattccattcctcccaaggtggcacacattcatgtcaacatatgtagcaaattttgtgaaaacataacaatttgaagcttctgtaattttgagcactgctctaacaacaagcataatataaaattagttagattttgcaagtctacaaatgagctcttgcaacagaactcacagcctttttacttttttcccctaactttagcaatgtagtatcttgagccattaatttttgggtttttttaaaatccagaaggtatatagaaaccttttcagatttttcatctgatttgttcttgcagatgttcttctatcaaataccttattttaccttacagatatttgttgcacaggcagatactgctgtatttagacatttctatttcagttcattaaaaactgcaaaaccaatctgtatcatgtaccaaactgacttaaaataaatctacatgtttattgaattaa

SEQ ID NO: 443192 - DNA, 1645 bp, Homo sapiens
gctcatgtgccttccagacggttcaaggcagaggccactgtgctcagtgtagtctgtgatgaatagtttatgctgtacagcataaactattactgttaatattttattgaaaatttatttcagagcggagaaacttaagctaaagtctgttatacagaattgaaagccttcgtatcttgaacctcccaacatttttcttatggctgttgaaaagtatagagctaaattgatttaattacactttcctttgtactttaaaaaaaagtatgctagcactattgtaccttgaaaggatttccaccagactgtcttgagtagtgacttctttggtgaggcaagaaggatatacattattttagaatcatttactatttaaatgagacaatcatattattttagaatcatttattttaaatgagacaatcattttaagttttaagataacagaagtgaccaatgtaatttcacaacacctaaggattttttggttgatcaggttactgtagatttttactgattgtcctggatgaatagactgtgctttttctttttctctcccttccttcttggtttcccatagtataataagcatgcatactttaacttctatagttttctcctttagagggtcgtcttcagttttagaggtttacttctcccttgcctttgactcattggactagtgcagaggctttaagtagtttaaaatgggctttgcttttctaggtcattaacgttttttatttagtttctttagccaatagtggctgagtttcgcacttgattttcaatattttatagtaagaaatgacaaactgctttgtttcatttcataaacaaactctgcatttagataactattaaaggttgttaagatgaagatttactgtttctttgttactcgttggtacagctgtttgttttacttgcacatttgtacatatacttaatgttttcaagtgccttaattgtttaaaatctctggcttcaaagtttcttggggaaaggtcggtttacctcacattttttgtttccattagtaatattctaggtacctcacaaaatgtattatggtgccatggctgttagtttttagtgagtgctgtaggattaattcgaaaataggcagaattccattcctcccaaggtggcaaaaattagctatactgatgtaattgtcatttacctgggtatgaattccctgacacacattcatgtcaacatatgtagcaaattttgtgaaaacataacaatttgaagcttctgtaattttgagcactgctctaacaacaagcataatataaaattagttagattttgcaagtctacaaatgagctcttgcaacagaactcacagcctttttacttttttcccctaactttagcaatgtagtatcttgagccattaatttttgggtttttttaaaatccagaaggtatatagaaaccttttcagatttttcatctgatttgttcttgcagatgttcttctatcaaataccttattttaccttacagatatttgttgcacaggcagatactgctgtatttagacatttctatttcagttcattaaaaactgcaaaaccaatctgtatcatgtaccaaactgacttaaaataaatctacatgtttattgaattaa

SEQ ID NO: 443193 - DNA, 1529 bp, Homo sapiens
ggacgcgtgggtcgaccacgcgtcgcccacgcgtccgacagaattgaaagccttcgtatcttgaacctcccaacatttttcttatggctgttgaaaagtatagagctaaattgatttaattacactttcctttgtactttaaaaaaaagtatgctagcactattgtaccttgaaaggatttccaccagactgtcttgagtagtgacttctttggtgaggcaagaaggatatacattattttagaatcatttactatttaaatgagacaatcatattattttagaatcatttattttaaatgagacaatcattttaagttttaagataacagaagtgaccaatgtaatttcacaacacctaaggattttttggttgatcaggttactgtagatttttactgattgtcctggatgaatagactgtgctttttctttttctctcccttccttcttggtttcccatagtataataagcatgcatactttaacttctatagttttctcctttagagggtcgtcttcagttttagaggtttacttctcccttgcctttgactcattggactagtgcagaggctttaagtagtttaaaatgggctttgcttttctaggtcattaacgttttttatttagtttctttagccaatagtggctgagtttcgcacttgattttcaatattttatagtaagaaatgacaaactgctttgtttcatttcataaacaaactctgcatttagataactattaaaggttgttaagatgaagatttactgtttctttgttactcgttggtacagctgtttgttttacttgcacatttgtacatatacttaatgttttcaagtgccttaattgtttaaaatctctggcttcaaagtttcttggggaaaggtcggtttacctcacattttttgtttccattagtaatattctaggtacctcacaaaatgtattatggtgccatggctgttagtttttagtgagtgctgtaggattaattcgaaaataggcagaattccattcctcccaaggtggcaaaaattagctatactgatgtaattgtcatttacctgggtatgaattccctgacacacattcatgtcaacatatgtagcaaattttgtgaaaacataacaatttgaagcttctgtaattttgagcactgctctaacaacaagcataatataaaattagttagattttgcaagtctacaaatgagctcttgcaacagaactcacagcctttttacttttttcccctaactttagcaatgtagtatcttgagccattaatttttgggtttttttaaaatccagaaggtatatagaaaccttttcagatttttcatctgatttgttcttgcagatgttcttctatcaaataccttattttaccttacagatatttgttgcacaggcagatactgctgtatttagacatttctatttcagttcattaaaaactgcaaaaccaatctgtatcatgtaccaaactgacttaaaataaatctacatgtttattgaattaa

SEQ ID NO: 443194 - DNA, 2291 bp, Homo sapiens
ctctcacgtgacccctgcgcgctcccgcgggggagcgtagtctcggaggcggcgccgcaggggattgaggggttgactgagcgttgcgagccttagctttctcccgaacgccagcgctgaggacacgatgtcgcggctctcccgctcactgctttgggccgccacctgcctgggcgtgctctgcgtgctgtccgcggacaagaacacgacccagcacccgaacgtgacgactttagcgcccatctccaacgtaacctcggcgccggtgacgtccctcccgctggtcaccactccggcaccagaaacctgtgaaggtcgaaacagctgcgtttcctgttttaatgttagcgttgttaatactacctgcttttggatagaatgtaaagatgagagctattgttcacataactcaacagttagtgattgtcaagtggggaacacgacagacttctgttccgtttccacggccactccagtgccaacagccaattctacagctaaacccacagttcagccctccccttctacaacttccaagacagttactacatcaggtacaacaaataacactgtgactccaacctcacaacctgtgcgaaagtctacctttgatgcagccagtttcattggaggaattgtcctggtcttgggtgtgcaggctgtaattttctttctttataaattctgcaaatctaaagaacgaaattaccacactctgtaaacagacccattgaattaataaggactggtgattcatttgtgtaactcactgaagccaaaatactatcttttaagatgtcccacatggaagacgctattccaggatctttaaatttccatggatgcatataggatgtttgggagcatcatccgtgaagaaaaaatcaattaaatcattgtgttcaacaggaatatttaaaatattctgcatgaatcctgtggctgtcttattttaaatagctgctgctgtgggattatattttttttccttaacatgccaaatataactttctgaaagtgatggaaaatgttgtcttgtgcagacaacatcatggctcttggcagtttaaatttagtaattttaatttagtgaacagaattgagaagaacgtgccaaatgagaatcaattaggtggatttttggctgtcatttcaaaagtggaataaatttattaatttagtagtactaaatggtatccttagattaaaattttgtgcttgataacagctgttttttctacattagaaataagatgccacacaaggaactacattccagatttaaagaaatgaaaggataccattagtgtgtataacagattattgttcatacttgtaaagcatcttatgtcattgagaatataaagaacagtgccttagaagacagtgaaaggtaagctctagcttaatgtctatgatttgttctttgacattaaggaaggtaaggattggtcagaggatgtaacttgatgtgagcagtagtaaacctgttttagatatcatactgttaatattttattgaaaatttatttcagagcggagaaacttaagctaaagtctgttatacagaattgaaagccttcgtatcttgaacctcccaacatttttcttatggctgttgaaaagtatagagctaaattgatttaattacactttcctttgtactttaaaaaaaagtatgctagcactattgtaccttgaaaggatttccaccagactgtcttgagtagtgacttctttggtgaggcaagaaggatatacattattttagaatcatttactatttaaatgagacaatcatattattttagaatcatttattttaaatgagacaatcattttaagttttaagataacagaagtgaccaatgtaatttcacaacacctaaggattttttggttgatcaggttactgtagatttttactgattgtcctggatgaatagactgtgctttttctttttctctcccttccttcttggtttcccatagtataataagcatgcatactttaacttctatagttttctcctttagagggtcgtcttcagttttagaggtttacttctcccttgcctttgactcattggactagtgcagaggctttaagtagtttaaaatgggctttgcttttctaggtcattaacgttttttatttagtttctttagccaatagtggctgagtttcgcacttgattttcaatattttatagtaagaaatgacaaactgctttgtttcatttcataaacaaactctgcatttagataactattaaaggttgttaagatga

SEQ ID NO: 443195 - DNA, 1225 bp, Homo sapiens
tgatcactgtaatatcccaacgcctaacgatcccagggttgatcatggtcacttgtcaaatgctgactgcatagtcctgccatgaactatggactgtgcgcttgctttctctctacaccttacctatcgtccgcgttgcccatcgtatattatgcatgcatacttaagcttctatgaggtttccctccttgtaataactgagttcaatcattgcagtccatagcagagtttacttctcccttgcctttgactcattggactagtgcagaggctttaagtagtttaaaatgggctttgcttttctaggtcattaacgttttttatttagtttctttagccaatagtggctgagtttcgcacttgattttcaatattttatagtaagaaatgacaaactgctttgtttcatttcataaacaaactctgcatttagataactattaaaggttgttaagatgaagatttactgtttctttgttactcgttggtacagctgtttgttttacttgcacatttgtacatatacttaatgttttcaagtgccttaattgtttaaaatctctggcttcaaagtttcttggggaaaggtcggtttacctcacattttttgtttccattagtaatattctaggtacctcacaaaatgtattatggtgccatggctgttagtttttagtgagtgctgtaggattaattcgaaaataggcagaattccattcctcccaaggtggcaaaaattagctatactgatgtaattgtcatttacctgggtatgaattccctgacacacattcatgtcaacatatgtagcaaattttgtgaaaacataacaatttgaagcttctgtaattttgagcactgctctaacaacaagcataatataaaattagttagattttgcaagtctacaaatgagctcttgcaacagaactcacagcctttttacttttttcccctaactttagcaatgtagtatcttgagccattaatttttgggtttttttaaaatccagaaggtatatagaaaccttttcagatttttcatctgatttgttcttgcagatgttcttctatcaaataccttattttaccttacagatatttgttgcacaggcagatactgctgtatttagacatttctatttcagttcattaaaaactgcaaaaccaatctgtatcatgtaccaaactgacttaaaataaatctacatgtttattgaattaa

SEQ ID NO: 443196 - DNA, 1811 bp, Homo sapiens
  misc_feature (1716)..(1716): n is a, c, g, or t
ctctcacgtgacccctgcgcgctcccgcgggggagcgtagtctcggaggcggcgccgcaggggattgaggggttgactgagcgttgcgagccttagctttctcccgaacgccagcgctgaggacacgatgtcgcggctctcccgctcactgctttgggccgccacctgcctgggcgtgctctgcgtgctgtccgcggacaagaacacgacccagcacccgaacgtgacgactttagcgcccatctccaacgtaacctcggcgccggtgacgtccctcccgctggtcaccactccggcaccagaaacctgtgaaggtcgaaacagctgcgtttcctgttttaatgttagcgttgttaatactacctgcttttggatagaatgtaaagatgagagctattgttcacataactcaacagttagtgattgtcaagtggggaacacgacagacttctgttccgtttccacggccactccagtgccaacagccaattctacagctaaacccacagttcagccctccccttctacaacttccaagacagttactacatcaggtacaacaaataacactgtgactccaacctcacaacctgtgcgaaagtctacctttgatgcagccagtttcattggaggaattgtcctggtcttgggtgtgcaggctgtaattttctttctttataaattctgcaaatctaaagaacgaaattaccacactctgtaaacagacccattgaattaataaggactggtgattcatttgtgtaactcactgaagccaaaatactatcttttaagatgtcccacatggaagacgctattccaggatctttaaatttccatggatgcatataggatgtttgggagcatcatccgtgaagaaaaaatcaattaaatcattgtgttcaacaggaatatttaaaatattctgcatgaatcctgtggctgtcttattttaaatagctgctgctgtgggattatattttttttccttaacatgccaaatataactttctgaaagtgatggaaaatgttgtcttgtgcagacaacatcatggctcttggcagtttaaatttagtaattttaatttagtgaacagaattgagaagaacgtgccaaatgagaatcaattaggtggatttttggctgtcatttcaaaagtggaataaatttattaatttagtagtactaaatggtatccttagattaaaattttgtgcttgataacagctgttttttctacattagaaataagatgccacacaaggaactacattccagatttaaagaaatgaaaggataccattagtgtgtataacagattattgttcatacttgtaaagcatcttatgtcattgagaatataaagaacagtgccttagaagacagtgaaaggtaagctctagcttaatgtctatgatttgttctttgacattaaggaaggtaaggattggtcagaggatgtaacttgatgtgagcagtagtaaacctgttttagatatcatactgttaatattttattgaaaatttatttcagagcggagaaacttaagctaaagtctgttatacagaattgaaagccttcgtatcttgaacctcccaacatttttcttatggctgttgaaaagtatagagctaaattgatttaattacactttcctttgtacttcagacttcttggggaggcgaggatttactcattcgagccgtacatttantggacacccatttctgaacgttttcatcacaccattgcttgaatcaggccgttccacccgagtgggaggcgtattctggcggaggttttcttgga

SEQ ID NO: 443197 - DNA, 1773 bp, Homo sapiens
ctctcacgtgacccctgcgcgctcccgcgggggagcgtagtctcggaggcggcgccgcaggggattgaggggttgactgagcgttgcgagccttagctttctcccgaacgccagcgctgaggacacgatgtcgcggctctcccgctcactgctttgggccgccacctgcctgggcgtgctctgcgtgctgtccgcggacaagaacacgacccagcacccgaacgtgacgactttagcgcccatctccaacgtaacctcggcgccggtgacgtccctcccgctggtcaccactccggcaccagaaacctgtgaaggtcgaaacagctgcgtttcctgttttaatgttagcgttgttaatactacctgcttttggatagaatgtaaagatgagagctattgttcacataactcaacagttagtgattgtcaagtggggaacacgacagacttctgttccgtttccacggccactccagtgccaacagccaattctacagctaaacccacagttcagccctccccttctacaacttccaagacagttactacatcaggtacaacaaataacactgtgactccaacctcacaacctgtgcgaaagtctacctttgatgcagccagtttcattggaggaattgtcctggtcttgggtgtgcaggctgtaattttctttctttataaattctgcaaatctaaagaacgaaattaccacactctgtaaacagacccattgaattaataaggactggtgattcatttgtgtaactcactgaagccaaaatactatcttttaagatgtcccacatggaagacgctattccaggatctttaaatttccatggatgcatataggatgtttgggagcatcatccgtgaagaaaaaatcaattaaatcattgtgttcaacaggaatatttaaaatattctgcatgaatcctgtggctgtcttattttaaatagctgctgctgtgggattatattttttttccttaacatgccaaatataactttctgaaagtgatggaaaatgttgtcttgtgcagacaacatcatggctcttggcagtttaaatttagtaattttaatttagtgaacagaattgagaagaacgtgccaaatgagaatcaattaggtggatttttggctgtcatttcaaaagtggaataaatttattaatttagtagtactaaatggtatccttagattaaaattttgtgcttgataacagctgttttttctacattagaaataagatgccacacaaggaactacattccagatttaaagaaatgaaaggataccattagtgtgtataacagattattgttcatacttgtaaagcatcttatgtcattgagaatataaagaacagtgccttagaagacagtgaaaggtaagctctagcttaatgtctatgatttgttctttgacattaaggaaggtaaggattggtcagaggatgtaacttgatgtgagcagtagtaaacctgttttagatatcatactgttaatattttattgaaaatttatttcagagcggagaaacttaagctaaagtctgttatacagaattgaaagccttcgtatcttgaacctcccaacatttttcttatggctgtgggtatgctagcactattgtacctgtaaggatgtccacagaatgtctgagtagtgactctcggggggcgcggcttccttcttccaccttcctttacgggcaccatttttcgacctcttctcggcaccttagttcgacggccgttccccggttgg

SEQ ID NO: 443198 - DNA, 900 bp, Homo sapiens
ctctcacgtgacccctgcgcgctcccgcgggggagcgtagtctcggaggcggcgccgcaggggattgaggggttgactgagcgttgcgagccttagctttctcccgaacgccagcgctgaggacacgatgtcgcggctctcccgctcactgctttgggccgccacctgcctgggcgtgctctgcgtgctgtccgcggacaagaacacgacccagcacccgaacgtgacgactttagcgcccatctccaacgtaacctcggcgccggtgacgtccctcccgctggtcaccactccggcaccagaaacctgtgaaggtcgaaacagctgcgtttcctgttttaatgttagcgttgttaatactacctgcttttggatagaatgtaaagatgagagctattgttcacataactcaacagttagtgattgtcaagtggggaacacgacagacttctgttccgtttccacggccactccagtgccaacagccaattctacagctaaacccacagttcagccctccccttctacaacttccaagacagttactacatcaggtacaacaaataacactgtgactccaacctcacaacctgtgcgaaagtctacctttgatgcagccagtttcattggaggaattgtcctggtcttgggtgtgcaggctgtaattttctttctttataaattctgcaaatctaaagaacgaaattaccacactctgtaaacagacccattgaattaataaggactggtgattcatttgtgtaactcactgaagccaaaatactatcttttaagatgtcccacatggaagacgctattccaggatctttaaatttccggtgatcctaagagtcgaagtgcatgcatacaagagactaaaatcaggcaagctagaaccct

SEQ ID NO: 443199 - DNA, 559 bp, Homo sapiens
gcatctttaaattacaatagaggaccatgaaacttaggattgttgtttcttttgtcttatctaacagggtacaacaaataacactgtgactccaacctcacaacctgtgcgaaagtctacctttgatgcagccagtttcattggaggaattgtcctggtcttgggtgtgcaggctgtaattttctttctttataaattctgcaaatctaaagaacgaaattaccacactctgtaaacagacccattgaattaataaggactggtgattcatttgtgtaactcactgaagccaaaatactatcttttaagatgtcccacatggaagacgctattccaggatctttaaatttccatggatgcatataggatgtttgggagcatcatccgtgaagaaaaaatcaattaaatcattgtgttcaacaggaatatttaaaatattctgcatgaatcctgtggctgtcttattttaaatagctgctgctgtgggattatattttttttccttaacatgccaaatataactttctgaaagtgatggaaaatgttgtcttgtgcagac

SEQ ID NO: 443200 - DNA, 3057 bp, Homo sapiens
ctctcacgtgacccctgcgcgctcccgcgggggagcgtagtctcggaggcggcgccgcaggggattgaggggttgactgagcgttgcgagccttagctttctcccgaacgccagcgctgaggacacgatgtcgcggctctcccgctcactgctttgggccgccacctgcctgggcgtgctctgcgtgctgtccgcggacaagaacacgacccagcacccgaacgtgacgactttagcgcccatctccaacgtaacctcggcgccggtgacgtccctcccgctggtcaccactccggcaccagaaacctgtgaaggtcgaaacagctgcgtttcctgttttaatgttagcgttgttaatactacctgcttttggatagaatgtaaagatgagagctattgttcacataactcaacagttagtgattgtcaagtggggaacacgacagacttctgttccgtttccacggccactccagtgccaacagccaattctacagctaaacccacagttcagccctccccttctacaacttccaagacagttactacatcaggtacaacaaataacactgtgactccaacctcacaacctgtgcgaaagtctacctttgatgcagccagtttcattggaggaattgtcctggtcttgggtgtgcaggctgtaattttctttctttataaattctgcaaatctaaagaacgaaattaccacactctgtaaacagacccattgaattaataaggactggtgattcatttgtgtaactcactgaagccaaaatactatcttttaagatgtcccacatggaagacgctattccaggatctttaaatttccatggatgcatataggatgtttgggagcatcatccgtgaagaaaaaatcaattaaatcattgtgttcaacaggaatatttaaaatattctgcatgaatcctgtggctgtcttattttaaatagctgctgctgtgggattatattttttttccttaacatgccaaatataactttctgaaagtgatggaaaatgttgtcttgtgcagacaacatcatggctcttggcagtttaaatttagtaattttaatttagtgaacagaattgagaagaacgtgccaaatgagaatcaattaggtggatttttggctgtcatttcaaaagtggaataaatttattaatttagtagtactaaatggtatccttagattaaaattttgtgcttgataacagctgttttttctacattagaaataagatgccacacaaggaactacattccagatttaaagaaatgaaaggataccattagtgtgtataacagattattgttcatacttgtaaagcatcttatgtcattgagaatataaagaacagtgccttagaagacagtgaaaggtaagctctagcttaatgtctatgatttgttctttgacattaaggaaggtaaggattggtcagaggatgtaacttgatgtgagcagtagtaaacctgttttagatatcatactgttaatattttattgaaaatttatttcagagcggagaaacttaagctaaagtctgttatacagaattgaaagccttcgtatcttgaacctcccaacatttttcttatggctgttgaaaagtatagagctaaattgatttaattacactttcctttgtactttaaaaaaaagtatgctagcactattgtaccttgaaaggatttccaccagactgtcttgagtagtgacttctttggtgaggcaagaaggatatacattattttagaatcatttactatttaaatgagacaatcatattattttagaatcatttattttaaatgagacaatcattttaagttttaagataacagaagtgaccaatgtaatttcacaacacctaaggattttttggttgatcaggttactgtagatttttactgattgtcctggatgaatagactgtgctttttctttttctctcccttccttcttggtttcccatagtataataagcatgcatactttaacttctatagttttctcctttagagggtcgtcttcagttttagaggtttacttctcccttgcctttgactcattggactagtgcagaggctttaagtagtttaaaatgggctttgcttttctaggtcattaacgttttttatttagtttctttagccaatagtggctgagtttcgcacttgattttcaatattttatagtaagaaatgacaaactgctttgtttcatttcataaacaaactctgcatttagataactattaaaggttgttaagatgaagatttactgtttctttgttactcgttggtacagctgtttgttttacttgcacatttgtacatatacttaatgttttcaagtgccttaattgtttaaaatctctggcttcaaagtttcttggggaaaggtcggtttacctcacattttttgtttccattagtaatattctaggtacctcacaaaatgtattatggtgccatggctgttagtttttagtgagtgctgtaggattaattcgaaaataggcagaattccattcctcccaaggtggcaaaaattagctatactgatgtaattgtcatttacctgggtatgaattccctgacacacattcatgtcaacatatgtagcaaattttgtgaaaacataacaatttgaagcttctgtaattttgagcactgctctaacaacaagcataatataaaattagttagattttgcaagtctacaaatgagctcttgcaacagaactcacagcctttttacttttttcccctaactttagcaatgtagtatcttgagccattaatttttgggtttttttaaaatccagaaggtatatagaaaccttttcagatttttcatctgatttgttcttgcagatgttcttctatcaaataccttattttaccttacagatatttgttgcacaggcagatactgctgtatttagacatttctatttcagttcattaaaaactgcaaaaccaatctgtatcatgtaccaaactgacttaaaataaatctacatgtttattgaattaa

SEQ ID NO: 443201 - DNA, 3007 bp, Homo sapiens
ctctcacgtgacccctgcgcgctcccgcgggggagcgtagtctcggaggcggcgccgcaggggattgaggggttgactgagcgttgcgagccttagctttctcccgaacgccagcgctgaggacacgatgtcgcggctctcccgctcactgctttgggccgccacctgcctgggcgtgctctgcgtgctgtccgcggacaagaacacgacccagcacccgaacgtgacgactttagcgcccatctccaacgtaacctcggcgccggtgacgtccctcccgctggtcaccactccggcaccagaaacctgtgaaggtcgaaacagctgcgtttcctgttttaatgttagcgttgttaatactacctgcttttggatagaatgtaaagatgagagctattgttcacataactcaacagttagtgattgtcaagtggggaacacgacagacttctgttccgtttccacggccactccagtgccaacagccaattctacagctaaacccacagttcagccctccccttctacaacttccaagacagttactacatcaggtacaacaaataacactgtgactccaacctcacaacctgtgcgaaagtctacctttgatgcagccagtttcattggaggaattgtcctggtcttgggtgtgcaggctgtaattttctttctttataaattctgcaaatctaaagaacgaaattaccacactctgtaaacagacccattgaattaataaggactggtgattcatttgtgtaactcactgaagccaaaatactatcttttaagatgtcccacatggaagacgctattccaggatctttaaatttccatggatgcatataggatgtttgggagcatcatccgtgaagaaaaaatcaattaaatcattgtgttcaacaggaatatttaaaatattctgcatgaatcctgtggctgtcttattttaaatagctgctgctgtgggattatattttttttccttaacatgccaaatataactttctgaaagtgatggaaaatgttgtcttgtgcagacaacatcatggctcttggcagtttaaatttagtaattttaatttagtgaacagaattgagaagaacgtgccaaatgagaatcaattaggtggatttttggctgtcatttcaaaagtggaataaatttattaatttagtagtactaaatggtatcctaagatgccacacaaggaactacattccagatttaaagaaatgaaaggataccattagtgtgtataacagattattgttcatacttgtaaagcatcttatgtcattgagaatataaagaacagtgccttagaagacagtgaaaggtaagctctagcttaatgtctatgatttgttctttgacattaaggaaggtaaggattggtcagaggatgtaacttgatgtgagcagtagtaaacctgttttagatatcatactgttaatattttattgaaaatttatttcagagcggagaaacttaagctaaagtctgttatacagaattgaaagccttcgtatcttgaacctcccaacatttttcttatggctgttgaaaagtatagagctaaattgatttaattacactttcctttgtactttaaaaaaaagtatgctagcactattgtaccttgaaaggatttccaccagactgtcttgagtagtgacttctttggtgaggcaagaaggatatacattattttagaatcatttactatttaaatgagacaatcatattattttagaatcatttattttaaatgagacaatcattttaagttttaagataacagaagtgaccaatgtaatttcacaacacctaaggattttttggttgatcaggttactgtagatttttactgattgtcctggatgaatagactgtgctttttctttttctctcccttccttcttggtttcccatagtataataagcatgcatactttaacttctatagttttctcctttagagggtcgtcttcagttttagaggtttacttctcccttgcctttgactcattggactagtgcagaggctttaagtagtttaaaatgggctttgcttttctaggtcattaacgttttttatttagtttctttagccaatagtggctgagtttcgcacttgattttcaatattttatagtaagaaatgacaaactgctttgtttcatttcataaacaaactctgcatttagataactattaaaggttgttaagatgaagatttactgtttctttgttactcgttggtacagctgtttgttttacttgcacatttgtacatatacttaatgttttcaagtgccttaattgtttaaaatctctggcttcaaagtttcttggggaaaggtcggtttacctcacattttttgtttccattagtaatattctaggtacctcacaaaatgtattatggtgccatggctgttagtttttagtgagtgctgtaggattaattcgaaaataggcagaattccattcctcccaaggtggcaaaaattagctatactgatgtaattgtcatttacctgggtatgaattccctgacacacattcatgtcaacatatgtagcaaattttgtgaaaacataacaatttgaagcttctgtaattttgagcactgctctaacaacaagcataatataaaattagttagattttgcaagtctacaaatgagctcttgcaacagaactcacagcctttttacttttttcccctaactttagcaatgtagtatcttgagccattaatttttgggtttttttaaaatccagaaggtatatagaaaccttttcagatttttcatctgatttgttcttgcagatgttcttctatcaaataccttattttaccttacagatatttgttgcacaggcagatactgctgtatttagacatttctatttcagttcattaaaaactgcaaaaccaatctgtatcatgtaccaaactgacttaaaataaatctacatgtttattgaattaa

SEQ ID NO: 443202 - DNA, 2997 bp, Homo sapiens
ctctcacgtgacccctgcgcgctcccgcgggggagcgtagtctcggaggcggcgccgcaggggattgaggggttgactgagcgttgcgagccttagctttctcccgaacgccagcgctgaggacacgatgtcgcggctctcccgctcactgctttgggccgccacctgcctgggcgtgctctgcgtgctgtccgcggacaagaacacgacccagcacccgaacgtgacgactttagcgcccatctccaacgtaacctcggcgccggtgacgtccctcccgctggtcaccactccggcaccagaaacctgtgaaggtcgaaacagctgcgtttcctgttttaatgttagcgttgttaatactacctgcttttggatagaatgtaaagatgagagctattgttcacataactcaacagttagtgattgtcaagtggggaacacgacagacttctgttccgtttccacggccactccagtgccaacagccaattctacagctaaacccacagttcagccctccccttctacaacttccaagacagttactacatcaggtacaacaaataacactgtgactccaacctcacaacctgtgcgaaagtctacctttgatgcagccagtttcattggaggaattgtcctggtcttgggtgtgcaggctgtaattttctttctttataaattctgcaaatctaaagaacgaaattaccacactctgtaaacagacccattgaattaataaggactggtgattcatttgtgtaactcactgaagccaaaatactatcttttaagatgtcccacatggaagacgctattccaggatctttaaatttccatggatgcatataggatgtttgggagcatcatccgtgaagaaaaaatcaattaaatcattgtgttcaacaggaatatttaaaatattctgcatgaatcctgtggctgtcttattttaaatagctgctgctgtgggattatattttttttccttaacatgccaaatataactttctgaaagtgatggaaaatgttgtcttgtgcagacaacatcatggctcttggcagtttaaatttagtaattttaatttagtgaacagaattgagaagaacgtgccaaatgagaatcaattaggtggatttttggctgtcatttcaaaagtggaataaatttattaatttagtagtactaaatggtatccttagattaaaattttgtgcttgataacagctgttttttctacattagaaataagatgccacacaaggaactacattccagatttaaagaaatgaaaggataccattagtgtgtataacagattattgttcatacttgtaaagcatcttatgtcattgagaatataaagaacagtgccttagaagacagtgaaaggtaagctctagcttaatgtctatgatttgttctttgacattaaggaaggtaaggattggtcagaggatgtaacttgatgtgagcagtagtaaacctgttttagatatcatactgttaatattttattgaaaatttatttcagagcggagaaacttaagctaaagtctgttatacagaattgaaagccttcgtatcttgaacctcccaacatttttcttatggctgttgaaaagtatagagctaaattgatttaattacactttcctttgtactttagtgacttctttggtgaggcaagaaggatatacattattttagaatcatttactatttaaatgagacaatcatattattttagaatcatttattttaaatgagacaatcattttaagttttaagataacagaagtgaccaatgtaatttcacaacacctaaggattttttggttgatcaggttactgtagatttttactgattgtcctggatgaatagactgtgctttttctttttctctcccttccttcttggtttcccatagtataataagcatgcatactttaacttctatagttttctcctttagagggtcgtcttcagttttagaggtttacttctcccttgcctttgactcattggactagtgcagaggctttaagtagtttaaaatgggctttgcttttctaggtcattaacgttttttatttagtttctttagccaatagtggctgagtttcgcacttgattttcaatattttatagtaagaaatgacaaactgctttgtttcatttcataaacaaactctgcatttagataactattaaaggttgttaagatgaagatttactgtttctttgttactcgttggtacagctgtttgttttacttgcacatttgtacatatacttaatgttttcaagtgccttaattgtttaaaatctctggcttcaaagtttcttggggaaaggtcggtttacctcacattttttgtttccattagtaatattctaggtacctcacaaaatgtattatggtgccatggctgttagtttttagtgagtgctgtaggattaattcgaaaataggcagaattccattcctcccaaggtggcaaaaattagctatactgatgtaattgtcatttacctgggtatgaattccctgacacacattcatgtcaacatatgtagcaaattttgtgaaaacataacaatttgaagcttctgtaattttgagcactgctctaacaacaagcataatataaaattagttagattttgcaagtctacaaatgagctcttgcaacagaactcacagcctttttacttttttcccctaactttagcaatgtagtatcttgagccattaatttttgggtttttttaaaatccagaaggtatatagaaaccttttcagatttttcatctgatttgttcttgcagatgttcttctatcaaataccttattttaccttacagatatttgttgcacaggcagatactgctgtatttagacatttctatttcagttcattaaaaactgcaaaaccaatctgtatcatgtaccaaactgacttaaaataaatctacatgtttattgaattaa

SEQ ID NO: 443203 - DNA, 3425 bp, Homo sapiens
ctctcacgtgacccctgcgcgctcccgcgggggagcgtagtctcggaggcggcgccgcaggggattgaggggttgactgagcgttgcgagccttagctttctcccgaacgccagcgctgaggacacgatgtcgcggctctcccgctcactgctttgggccgccacctgcctgggcgtgctctgcgtgctgtccgcggacaagaacacgacccagcacccgaacgtgacgactttagcgcccatctccaacgtaacctcggcgccggtgacgtccctcccgctggtcaccactccggcaccagaaacctgtgaaggtcgaaacagctgcgtttcctgttttaatgttagcgttgttaatactacctgcttttggatagaatgtaaagatgagagctattgttcacataactcaacagttagtgattgtcaagtggggaacacgacagacttctgttccgtttccacggccactccagtgccaacagccaattctacagctaaacccacagttcagccctccccttctacaacttccaagacagttactacatcaggtacaacaaataacactgtgactccaacctcacaacctgtgcgaaagtctacctttgatgcagccagtttcattggaggaattgtcctggtcttgggtgtgcaggctgtaattttctttctttataaattctgcaaatctaaagaacgaaattaccacactctgtaaacagacccattgaattaataaggactggtgattcatttgtgtaactcactgaagccaaaatactatcttttaagatgtcccacatggaagacgctattccaggatctttaaatttccatggatgcatataggatgtttgggagcatcatccgtgaagaaaaaatcaattaaatcattgtgttcaacaggaatatttaaaatattctgcatgaatcctgtggctgtcttattttaaatagctgctgctgtgggattatattttttttccttaacatgccaaatataactttctgaaagtgatggaaaatgttgtcttgtgcagacaacatcatggctcttggcagtttaaatttagtaattttaatttagtgaacagaattgagaagaacgtgccaaatgagaatcaattaggtggatttttggctgtcatttcaaaagtggaataaatttattaatttagtagtactaaatggtatccttagattaaaattttgtgcttgataacagctgttttttctacattagaaataagatgccacacaaggaactacattccagatttaaagaaatgaaaggataccattagtgtgtataacagattattgttcatacttgtaaagcatcttatgtcattgagaatataaagaacagtgccttagaagacagtgaaaggtaagctctagcttaatgtctatgatttgttctttgacattaaggaaggtaaggattggtcagaggatgtaacttgatgtgagcagtagtaaacctgttttagatatcatactgttaatattttattgaaaatttatttcagagcggagaaacttaagctaaagtctgttatacagaattgaaagccttcgtatcttgaacctcccaacatttttcttatggctgttgaaaagtatagagctaaattgatttaattacactttcctttgtactttaaaaaaaagtatgctagcactattgtaccttgaaaggatttccaccagactgtcttgagtagtgacttctttggtgaggcaagaaggatatacattattttagaatcatttactatttaaatgagacaatcatattattttagaatcatttattttaaatgagacaatcattttaagttttaagataacagaagtgaccaatgtaatttcacaacacctaaggattttttggttgatcaggttactgtagatttttactgattgtcctggatgaatagactgtgctttttctttttctctcccttccttcttggtttcccatagtataataagcatgcatactttaacttctatagttttctcctttagagggtcgtcttcagttttagaggtttacttctcccttgcctttgactcattggactagtgcagaggctttaagtagtttaaaatgggctttgcttttctaggtcattaacgttttttatttagtttctttagccaatagtggctgagtttcgcacttgattttcaatattttatagtaagaaatgacaaactgctttgtttcatttcataaacaaactctgcatttagataactattaaaggttgttaagatgaagatttactgtttctttgttactcgttggtacagctgtttgttttacttgcacatttgtacatatacttaatgttttcaagtgccttaattgtttaaaatctctggcttcaaagtttcttggggaaaggtcggtttacctcacattttttgtttccattagtaatattctaggtacctcacaaaatgtattatggtgccatggctgttagtttttagtgagtgctgtaggattaattcgaaaataggcagaattccattcctcccaaggtggcaaaaattagctatactgatgtaattgtcatttacctgggtatgaattccctgacacacattcatgtcaacatatgtagcaaattttgtgaaaacataacaatttgaagcttctgtaattttgagcactgctctaacaacaagcataatataaaattagttagattttgcaagtctacaaatgagctcttgcaacagaactcacagcctttttacttttttcccctaactttagcaatgtagtatcttgagccattaatttttgggtttttttaaaatccagaaggtatatagaaaccttttcagatttttcatctgatttgttcttgcagatgttcttctatcaaataccttattttaccttacagatatttgttgcacaggcagatactgctgtatttagacatttctatttcagttcattaaaaactgcaaaaccaatctgtatcatgtaccaaactgacttaaaataaatctacatgtttattgaattaaaatagtgtgttactgcgttttgcttataaaatttaatgcttagtggatttatcttagtccgcttggggtgggctttctactcattttattgcacctctagaccagccgatagtaactaaggcacatgttcatatcaatagaaagcagagccttggaagtaataggtggagggaggacttggtacacttgtgggagtgatttgcaagttgatcttccacaaatcaatagaaattatgctgtagttttccaataatttttgagaggaatactatcttggttttataatctgaaagctagtttgtgactttctgcctttttagttcatattgcatataaagtaaaaaccaagaactatttggtataaatta

SEQ ID NO: 443204 - DNA, 3003 bp, Homo sapiens
ctctcacgtgacccctgcgcgctcccgcgggggagcgtagtctcggaggcggcgccgcaggggattgaggggttgactgagcgttgcgagccttagctttctcccgaacgccagcgctgaggacacgatgtcgcggctctcccgctcactgctttgggccgccacctgcctgggcgtgctctgcgtgctgtccgcggacaagaacacgacccagcacccgaacgtgacgactttagcgcccatctccaacgtaacctcggcgccggtgacgtccctcccgctggtcaccactccggcaccagaaacctgtgaaggtcgaaacagctgcgtttcctgttttaatgttagcgttgttaatactacctgcttttggatagaatgtaaagatgagagctattgttcacataactcaacagttagtgattgtcaagtggggaacacgacagacttctgttccgtttccacggccactccagtgccaacagccaattctacagctaaacccacagttcagccctccccttctacaacttccaagacagttactacatcaggtacaacaaataacactgtgactccaacctcacaacctgtgcgaaagtctacctttgatgcagccagtttcattggaggaattgtcctggtcttgggtgtgcaggctgtaattttctttctttataaattctgcaaatctaaagaacgaaattaccacactctgtaaacagacccattgaattaataaggactggtgattcatttgtgtaactcactgaagccaaaatactatcttttaagatgtcccacatggaagacgctattccaggatctttaaatttccatggatgcatataggatgtttgggagcatcatccgtgaagaaaaaatcaattaaatcattgtgttcaacaggaatatttaaaatattctgcatgaatcctgtggctgtcttattttaaatagctgctgctgtgggattatattttttttccttaacatgccaaatataactttctgaaagtgatggaaaatgttgtcttgtgcagacaacatcatggctcttggcagtttaaatttagtaattttaatttagtgaacagaattgagaagaacgtgccaaatgagaatcaattaggtggatttttggctgtcatttcaaaagtggaataaatttattaatttagtagtactaaatggtatccttagattaaaattttgtgcttgataacagctgttttttctacattagaaataagatgccacacaaggaactacattccagatttaaagaaatgaaaggataccattagtgtgtataacagattattgttcatacttgtaaagcatcttatgtcattgagaatataaagaacagtgccttagaagacagtgaaaggtaagctctagcttaatgtctatgatttgttctttgacattaaggaaggtaaggattggtcagaggatgtaacttgatgtgagcagtagtaaacctgttttagatatcatactgttaatattttattgaaaatttatttcagagcggagaaacttaagctaaagtctgttatacagaattgaaagccttcgtatcttgaacctcccaacatttttcttatggctgttgaaaagtatagagctaaattgatttaattacactttcctttgtactttaaaaaaaagtatgctagcactattgtaccttgaaaggatttccaccagactgtcttgagtagtgacttctttggtgaggcaagaaggatatacattattttagaatcatttactatttaaatgagacaatcatattattttagaatcatttattttaaatgagacaatcattttaagttttaagataacagaagtgaccaatgtaatttcacaacacctaaggattttttggttgatcaggttactgtagatttttactgattgtcctggatgaatagactgtgctttttctttttctctcccttccttcttggtttcccatagtataataagcatgcatactttaacttctatagttttctcctttagagggtcgtcttcagttttagaggtttacttctcccttgcctttgactcattggactagtgcagaggctttaagtagtttaaaatgggctttgcttttctaggtcattaacgttttttatttagtttctttagccaatagtggctgagtttcgcacttgattttcaatattttatagtaagaaatgacaaactgctttgtttcatttcataaacaaactctgcatttagataactattaaaggttgttaagatgaagatttactgtttctttgttactcgttggtacagctgtttgttttacttgcacatttgtacatatacttaatgttttcaagtgccttaattgtttaaaatctctggcttcaaagtttcttggggaaaggtcggtttacctcacattttttgtttccattagtaatattctaggtacctcacaaaatgtattatggtgccatggctgttagtttttagtgagtgctgtaggattaattcgaaaataggcagaattccattcctcccaaggtggcaaaaattagctatactgatgtaattgtcatttacctgggtatgaattccctgacacacattcatgtcaacatatgtagcaaattttgtgaaaacataacaatttgaagcttctgtaattttgagcactgctctaacaacaagcataatatgcctttttacttttttcccctaactttagcaatgtagtatcttgagccattaatttttgggtttttttaaaatccagaaggtatatagaaaccttttcagatttttcatctgatttgttcttgcagatgttcttctatcaaataccttattttaccttacagatatttgttgcacaggcagatactgctgtatttagacatttctatttcagttcattaaaaactgcaaaaccaatctgtatcatgtaccaaactgacttaaaataaatctacatgtttattgaattaa

SEQ ID NO: 443205 - DNA, 3144 bp, Homo sapiens
ctctcacgtgacccctgcgcgctcccgcgggggagcgtagtctcggaggcggcgccgcaggggattgaggggttgactgagcgttgcgagccttagctttctcccgaacgccagcgctgaggacacgatgtcgcggctctcccgctcactgctttgggccgccacctgcctgggcgtgctctgcgtgctgtccgcggacaagaacacgacccagcacccgaacgtgacgactttagcgcccatctccaacgtaacctcggcgccggtgacgtccctcccgctggtcaccactccggcaccagaaacctgtgaaggtcgaaacagctgcgtttcctgttttaatgttagcgttgttaatactacctgcttttggatagaatgtaaagatgagagctattgttcacataactcaacagttagtgattgtcaagtggggaacacgacagacttctgttccgtttccacggccactccagtgccaacagccaattctacagctaaacccacagttcagccctccccttctacaacttccaagacagttactacatcaggtacaacaaataacactgtgactccaacctcacaacctgtgcgaaagtctacctttgatgcagccagtttcattggaggaattgtcctggtcttggtaagatgccacacaaggaactacattccagatttaaagaaatgaaaggataccattagtgtgtataacagattattgttcatacttgtaaagcatcttatgtcattgagaatataaagaacagtgccttagaagacagtgaaaggtaagctctagcttaatgtctatgatttgttctttgacattaaggaaggtaaggattggtcagaggatgtaacttgatgtgagcagtagtaaacctgttttagatatcatactgttaatattttattgaaaatttatttcagagcggagaaacttaagctaaagtctgttatacagaattgaaagccttcgtatcttgaacctcccaacatttttcttatggctgttgaaaagtatagagctaaattgatttaattacactttcctttgtactttaaaaaaaagtatgctagcactattgtaccttgaaaggatttccaccagactgtcttgagtagtgacttctttggtgaggcaagaaggatatacattattttagaatcatttactatttaaatgagacaatcatattattttagaatcatttattttaaatgagacaatcattttaagttttaagataacagaagtgaccaatgtaatttcacaacacctaaggattttttggttgatcaggttactgtagatttttactgattgtcctggatgaatagactgtgctttttctttttctctcccttccttcttggtttcccatagtataataagcatgcatactttaacttctatagttttctcctttagagggtcgtcttcagttttagaggtttacttctcccttgcctttgactcattggactagtgcagaggctttaagtagtttaaaatgggctttgcttttctaggtcattaacgttttttatttagtttctttagccaatagtggctgagtttcgcacttgattttcaatattttatagtaagaaatgacaaactgctttgtttcatttcataaacaaactctgcatttagataactattaaaggttgttaagatgaagatttactgtttctttgttactcgttggtacagctgtttgttttacttgcacatttgtacatatacttaatgttttcaagtgccttaattgtttaaaatctctggcttcaaagtttcttggggaaaggtcggtttacctcacattttttgtttccattagtaatattctaggtacctcacaaaatgtattatggtgccatggctgttagtttttagtgagtgctgtaggattaattcgaaaataggcagaattccattcctcccaaggtggcaaaaattagctatactgatgtaattgtcatttacctgggtatgaattccctgacacacattcatgtcaacatatgtagcaaattttgtgaaaacataacaatttgaagcttctgtaattttgagcactgctctaacaacaagcataatataaaattagttagattttgcaagtctacaaatgagctcttgcaacagaactcacagcctttttacttttttcccctaactttagcaatgtagtatcttgagccattaatttttgggtttttttaaaatccagaaggtatatagaaaccttttcagatttttcatctgatttgttcttgcagatgttcttctatcaaataccttattttaccttacagatatttgttgcacaggcagatactgctgtatttagacatttctatttcagttcattaaaaactgcaaaaccaatctgtatcatgtaccaaactgacttaaaataaatctacatgtttattgaattaaaaaaaaaaaaaacaaaaaaaaacaaaaaaaaaaaaaaaaaaaaaaaaaaaaaaaaaaaaaaaaaaaaaagacagagagagagagagagagagagcacacgacgagagagaggcgagcgcgcggcgcggggagacaagaaaaaaaagaaagacgaggaagaaacaaaagaaagacgagggcgacgagagagaagcaactacagacgccgaggggaccacacccgacgagcgcagaggagagcgaactacgcggaccgaggagagagaaaaaaaaaagacgacacccaggcaccaaaaaagaaaagaaacagaaaacaaacccgcgagcaaagaaaagaaaaagcgggacagcagagcgaggagaaggaaaaccgccaccagctacacccacataaactcccccccaacagtacaactacaacagaacaatataccattaaaccacaaaaacatactacatcaccccccaatatattctcacacaacatcataacacaaacaaaaaacacacacaacaatctagccccgaaacccacacaggaagcagcgcgagacgcgacagaccagcgccgagagcgacaccccagaaaaagaaaacaagcaagaggcgcacgcacagaaaacgccacaaacaggaaacacaaacaaagcagaagagagaaaacacgacccgacccaaaacccacc

SEQ ID NO: 443206 - DNA, 1820 bp, Homo sapiens
  misc_feature (1635)..(1635): n is a, c, g, or t
  misc_feature (1820)..(1820): n is a, c, g, or t
ctctcacgtgacccctgcgcgctcccgcgggggagcgtagtctcggaggcggcgccgcaggggattgaggggttgactgagcgttgcgagccttagctttctcccgaacgccagcgctgaggacacgatgtcgcggctctcccgctcactgctttgggccgccacctgcctgggcgtgctctgcgtgctgtccgcggacaagaacacgacccagcacccgaacgtgacgactttagcgcccatctccaacgtaacctcggcgccggtgacgtccctcccgctggtcaccactccggcaccagaaacctgtgaaggtcgaaacagctgcgtttcctgttttaatgttagcgttgttaatactacctgcttttggatagaatgtaaagatgagagctattgttcacataactcaacagttagtgattgtcaagtggggaacacgacagacttctgttccgtttccacggccactccagtgccaacagccaattctacagctaaacccacagttcagccctccccttctacaacttccaagacagttactacatcaggtacaacaaataacactgtgactccaacctcacaacctgtgcgaaagtctacctttgatgcagccagtttcattggaggaattgtcctggtcttgggtgtgcaggctgtaattttctttctttataaattctgcaaatctaaagaacgaaattaccacactctgtaaacagacccattgaattaataaggactggtgattcatttgtgtaactcactgaagccaaaatactatcttttaagatgtcccacatggaagacgctattccaggatctttaaatttccatggatgcatataggatgtttgggagcatcatccgtgaagaaaaaatcaattaaatcattgtgttcaacaggaatatttaaaatattctgcatgaatcctgtggctgtcttattttaaatagctgctgctgtgggattatattttttttccttaacatgccaaatataactttctgaaagtgatggaaaatgttgtcttgtgcagacaacatcatggctcttggcagtttaaatttagtaattttaatttagtgaacagaattgagaagaacgtgccaaatgagaatcaattaggtggatttttggctgtcatttcaaaagtggaataaatttattaatttagtagtactaaatggtatccttagattaaaattttgtgcttgataacagctgttttttctacattagaaataagatgccacacaaggaactacattccagatttaaagaaatgaaaggataccattagtgtgtataacagattattgttcatacttgtaaagcatcttatgtcattgagaatataaagaacagtgccttagaagacagtgaaaggtaagctctagcttaatgtctatgatttgttctttgacattaaggaaggtaaggattggtcagaggatgtaacttgatgtgagcagtagtaaacctgttttagatatcatactgttaatattttattgaaaatttatttcagagcggagaaacttaagctaaagtctgttatacagaattgaaagccttcgtatcttgaacctcccaacatttttcttatggctgtgactatgtgcttgaangattccacaaatgtctgagtacgactcctggggagcagcaggattactatttgagcacttcatatcagggaacgcttttttcaacaccattttaggagaaattcgttgatacagccgtatcaccagttgcgcgaggcaataggcggggtttcctgtcgtatattttcgtcgttttggtttcgtgn

SEQ ID NO: 443207 - DNA, 1727 bp, Homo sapiens
ctctcacgtgacccctgcgcgctcccgcgggggagcgtagtctcggaggcggcgccgcaggggattgaggggttgactgagcgttgcgagccttagctttctcccgaacgccagcgctgaggacacgatgtcgcggctctcccgctcactgctttgggccgccacctgcctgggcgtgctctgcgtgctgtccgcggacaagaacacgacccagcacccgaacgtgacgactttagcgcccatctccaacgtaacctcggcgccggtgacgtccctcccgctggtcaccactccggcaccagaaacctgtgaaggtcgaaacagctgcgtttcctgttttaatgttagcgttgttaatactacctgcttttggatagaatgtaaagatgagagctattgttcacataactcaacagttagtgattgtcaagtggggaacacgacagacttctgttccgtttccacggccactccagtgccaacagccaattctacagctaaacccacagttcagccctccccttctacaacttccaagacagttactacatcaggtacaacaaataacactgtgactccaacctcacaacctgtgcgaaagtctacctttgatgcagccagtttcattggaggaattgtcctggtcttgggtgtgcaggctgtaattttctttctttataaattctgcaaatctaaagaacgaaattaccacactctgtaaacagacccattgaattaataaggactggtgattcatttgtgtaactcactgaagccaaaatactatcttttaagatgtcccacatggaagacgctattccaggatctttaaatttccatggatgcatataggatgtttgggagcatcatccgtgaagaaaaaatcaattaaatcattgtgttcaacaggaatatttaaaatattctgcatgaatcctgtggctgtcttattttaaatagctgctgctgtgggattatattttttttccttaacatgccaaatataactttctgaaagtgatggaaaatgttgtcttgtgcagacaacatcatggctcttggcagtttaaatttagtaattttaatttagtgaacagaattgagaagaacgtgccaaatgagaatcaattaggtggatttttggctgtcatttcaaaagtggaataaatttattaatttagtagtactaaatggtatcctaagatgccacacaaggaactacattccagatttaaagaaatgaaaggataccattagtgtgtataacagattattgttcatacttgtaaagcatcttatgtcattgagaatataaagaacagtgccttagaagacagtgaaaggtaagctctagcttaatgtctatgatttgttctttgacattaaggaaggtaaggattggtcagaggatgtaacttgatgtgagcagtagtaaacctgttttagatatcatactgttaatattttattgaaaatttatttcagagcggagaaacttaagctaaagtctgttatacagaattgaaagccttcgtatcttgaacctcccaacatttttcttatggctgttgtggatagagcttgattaattacacttcctttgtacttaacttctttgtgagcaagaagatatcattatttagatcattactatttaatagacaatctattatttagatatttattttaatagacatcattttagttttagatacaggtgacctgtg

SEQ ID NO: 443208 - DNA, 778 bp, Homo sapiens
ctctcacgtgacccctgcgcgctcccgcgggggagcgtagtctcggaggcggcgccgcaggggattgaggggttgactgagcgttgcgagccttagctttctcccgaacgccagcgctgaggacacgatgtcgcggctctcccgctcactgctttgggccgccacctgcctgggcgtgctctgcgtgctgtccgcggacaagaacacgacccagcacccgaacgtgacgactttagcgcccatctccaacgtaacctcggcgccggtgacgtccctcccgctggtcaccactccggcaccagaaacctgtgaaggtcgaaacagctgcgtttcctgttttaatgttagcgttgttaatactacctgcttttggatagaatgtaaagatgagagctattgttcacataactcaacagttagtgattgtcaagtggggaacacgacagacttctgttccgtttccacggccactccagtgccaacagccaattctacagctaaacccacagttcagccctccccttctacaacttccaagacagttactacatcagcgacaaacgccaggggttttccaattcagcaactctgtgcgacgactgcgaccgttgatgcagccatgtccagcggaggaattgtcgtggtttcgggcacggcagcacgataactgtctttactttaattcaatcgggtccattcacaagagatcgtgaataaccacatctctgtgaacagacgcatttgaattaataaggacatgagctcactgtgcatcatc

SEQ ID NO: 443209 - DNA, 485 bp, Homo sapiens
ctctcccatacacactcaccaccaaatagcctatagagcagaacttttgggggaattcctgtagatcatttataaatgctatttattccttataatcacaaactgccttataatttgcaaagcacttaaaaaaaatttcagttgatttgtccaagcaccctatgatggtacataggtccattatcacaattttacaaaagagaaaatgagcctgagaggttaaataccttgcctaaaacttgaaaatggtgctatcagaactgaagccaggatttcgtgaccaatcttgtcctgccactatatcttattatgacctgtataaaacacattattctaataaggagtggtgaattaattcaacttaattatctttgaggccgggcgcagtgcctcatgcctgtaaacccagcaatttgggaggccaaggagggcagattgcttgaagcccggagtttgagagcagcctggccaactagcaaaacccc

SEQ ID NO: 443210 - DNA, 660 bp, Homo sapiens
ctctcccatacacactcaccaccaaatagcctatagagcagaacttttgggggaattcctgtagatcatttataaatgctatttattccttataatcacaaactgccttataatttgcaaagcacttaaaaaaaatttcagttgatttgtccaagcaccctatgatggtacataggtccattatcacaattttacaaaagagaaaatgagcctgagaggttaaataccttgcctaaaacttgaaaatggtgctatcagaactgaagccaggatttcgtgaccaatcttgtcctgccactatatcttattatgacctgtataaaacacattattctaataaggagtggtgaattaattcaacttaattatctttgaggccgggcgcagtgcctcatgcctgtaatcccagcactttgggaggccaaggtaggtggatcatctgaggttaggagtttgagaccagcctggccaacacagtgaaaccccatctctactaaaaatataaaattagctgggcatggtggcacatgcctgtaatcccagctaattgggaggctgagacaggagaatcacctgaacccgggaggtggaggctgcagtgagccaagatagcaacgcagcactccagcctgggcaatggaatgggactccatctcaaaa

SEQ ID NO: 443211 - DNA, 734 bp, Homo sapiens
  misc_feature (578)..(578): n is a, c, g, or t
cttttaaattgtttttacccagtgcacaaaacgaaaatattttaaatacttttgtagttaaaatgctttaaattttagggaatattctttaacagttttcagtaattttaatcatctacttttctgttttatagtaaaatatttttacatgtgtctaggtcaaaaaatatatatttgtctgtattacgttccagaaactgttcaggttccattatcaaaacgagcaaaatttgttggacctggtggctataacttaaaaaaacttcaggctgaaacaggtgtaactattagtcaggtggatgaagaaacgttttctgtatttgcaccaacacccagtgctatgcatgaggcaagagacttcattactgaaatctgcaaggatgatcaggagcagcaattagaatttggagcagtatataccgccacaataactgaaatcagagatactggtgtaatggtaaaattatatccaaatatgactgcggtactgcttcataacacacaacttgatcaacgaaagattaaacatcctactgccctaggattagaagttggccaagaaattcagtgaatctttngacgtgaccaaacgatggagaatgagcttctcgaaagtgttcatcgcagctaaaccgtgtccaatttgatgacgaagtcctcggttggccaccttttcaggcacactattcagagatattctaagtctcattcattggaagggggctgcccttagt

SEQ ID NO: 443212 - DNA, 2541 bp, Homo sapiens
aagcagtgctatcaacgcagagttgccattacggccgggggaccgcgtgccgggtgtcatggcggcctgcaggtactgctgctcgtgcctccggctccggcccctgagcgatggtcctttccttctgccacggcgggatcgggcactcacccagttgcaagtgcgagcactatggagtagcgcagggtctcgagctgtggccgtggacttaggcaacaggaaattagaaatatcttctggaaagctggccagatttgcagatggctctgctgtagtacagtcaggtgacactgcagtaatggtcacagcggtcagtaaaacaaaaccttccccttcccagtttatgcctttggtggttgactacagacaaaaagctgctgcagcaggtagaattcccacaaactatctgagaagagagattggtacttctgataaagaaattctaacaagtcgaataatagatcgttcaattagaccgctctttccagctggctacttctatgatacacaggttctgtgtaatctgttagcagtagatggtgtaaatgagcctgatgtcctagcaattaatggcgcttccgtagccctctcattatcagatattccttggaatggacctgttggggcagtacgaataggaataattgatggagaatatgttgttaacccaacaagaaaagaaatgtcttctagtactttaaatttagtggttgctggagcacctaaaagtcagattgtcatgttggaagcctctgcagagaacattttacagcaggacttttgccatgctatcaaagtgggagtgaaatatacccaacaaataattcagggcattcagcagttggtaaaagaaactggtgttaccaagaggacacctcagaagttatttaccccttcgccagagattgtgaaatatactcataaacttgctatggagagactctatgcagtttttacagattacgagcatgacaaagtttccagagatgaagctgttaacaaaataagattagatacggaggaacaactaaaagaaaaatttccagaagccgatccatatgaaataatagaatccttcaatgttgttgcaaaggaagtttttagaagtattgttttgaatgaatacaaaaggtgcgatggtcgggatttgacttcacttaggaatgtaagttgtgaggtagatatgtttaaaacccttcatggatcagcattatttcaaagaggacaaacacaggtgctttgtaccgttacatttgattcattagaatctggtattaagtcagatcaagttataacagctataaatgggataaaagataaaaatttcatgctgcactacgagtttcctccttatgcaactaatgaaattggcaaagtcactggtttaaatagaagagaacttgggcatggtgctcttgctgagaaagctttgtatcctgttattccccgagattttcctttcaccataagagttacatctgaagtcctagagtcaaatgggtcatcttctatggcatctgcatgtggcggaagtttagcattaatggattcaggggttccaatttcatctgctgttgcaggcgtagcaataggattggtcaccaaaaccgatcctgagaagggtgaaatagaagattatcgtttgctgacagatattttgggaattgaagattacaatggtgacatggacttcaaaatagctggcactaataaaggaataactgcattacaggctgatattaaattacctggaataccaataaaaattgtgatggaggctattcaacaagcttcagtggcaaaaaaggagatattacagatcatgaacaaaactatttcaaaacctcgagcatctagaaaagaaaatggacctgttgtagaaactgttcaggttccattatcaaaacgagcaaaatttgttggacctggtggctataacttaaaaaaacttcaggctgaaacaggtgtaactattagtcaggtggatgaagaaacgttttctgtatttgcaccaacacccagtgctatgcatgaggcaagagacttcattactgaaatctgcaaggatgatcaggagcagcaattagaatttggagcagtatataccgccacaataactgaaatcagagatactggtgtaatggtaaaattatatccaaatatgactgcggtactgcttcataacacacaacttgatcaacgaaagattaaacatcctactgccctaggattagaagttggccaagaaattcaggtgaaatactttggacgtgacccagccgatggaagaatgaggctttctcgaaaagtgcttcagtcgccagctacaaccgtggtcagaactttgaatgacagaagtagtattgtaatgggagaacctatttcacagtcatcatctaattctcagtgattttttttttttaaagagaattctagaattctattttgtctagggtgatgtgctgtagagcaacattttagtagtatcttccattgtgtagatttctatataatataaatacattttaattatttgtacta

SEQ ID NO: 443213 - DNA, 3545 bp, Homo sapiens
aagcagtgctatcaacgcagagttgccattacggccgggggaccgcgtgccgggtgtcatggcggcctgcaggtactgctgctcgtgcctccggctccggcccctgagcgatggtcctttccttctgccacggcgggatcgggcactcacccagttgcaagtgcgagcactatggagtagcgcagggtctcgagctgtggccgtggacttaggcaacaggaaattagaaatatcttctggaaagctggccagatttgcagatggctctgctgtagtacagtcaggtgacactgcagtaatggtcacagcggtcagtaaaacaaaaccttccccttcccagtttatgcctttggtggttgactacagacaaaaagctgctgcagcaggtagaattcccacaaactatctgagaagagagattggtacttctgataaagaaattctaacaagtcgaataatagatcgttcaattagaccgctctttccagctggctacttctatgatacacaggttctgtgtaatctgttagcagtagatggtgtaaatgagcctgatgtcctagcaattaatggcgcttccgtagccctctcattatcagatattccttggaatggacctgttggggcagtacgaataggaataattgatggagaatatgttgttaacccaacaagaaaagaaatgtcttctagtactttaaatttagtggttgctggagcacctaaaagtcagattgtcatgttggaagcctctgcagagaacattttacagcaggacttttgccatgctatcaaagtgggagtgaaatatacccaacaaataattcagggcattcagcagttggtaaaagaaactggtgttaccaagaggacacctcagaagttatttaccccttcgccagagattgtgaaatatactcataaacttgctatggagagactctatgcagtttttacagattacgagcatgacaaagtttccagagatgaagctgttaacaaaataagattagatacggaggaacaactaaaagaaaaatttccagaagccgatccatatgaaataatagaatccttcaatgttgttgcaaaggaagtttttagaagtattgttttgaatgaatacaaaaggtgcgatggtcgggatttgacttcacttaggaatgtaagttgtgaggtagatatgtttaaaacccttcatggatcagcattatttcaaagaggacaaacacaggtgctttgtaccgttacatttgattcattagaatctggtattaagtcagatcaagttataacagctataaatgggataaaagataaaaatttcatgctgcactacgagtttcctccttatgcaactaatgaaattggcaaagtcactggtttaaatagaagagaacttgggcatggtgctcttgctgagaaagctttgtatcctgttattccccgagattttcctttcaccataagagttacatctgaagtcctagagtcaaatgggtcatcttctatggcatctgcatgtggcggaagtttagcattaatggattcaggggttccaatttcatctgctgttgcaggcgtagcaataggattggtcaccaaaaccgatcctgagaagggtgaaatagaagattatcgtttgctgacagatattttgggaattgaagattacaatggtgacatggacttcaaaatagctggcactaataaaggaataactgcattacaggctgatattaaattacctggaataccaataaaaattgtgatggaggctattcaacaagcttcagtggcaaaaaaggagatattacagatcatgaacaaaactatttcaaaacctcgagcatctagaaaagaaaatggacctgttgtagaaactgttcaggttccattatcaaaacgagcaaaatttgttggacctggtggctataacttaaaaaaacttcaggctgaaacaggtgtaactattagtcaggtggatgaagaaacgttttctgtatttgcaccaacacccagtgctatgcatgaggcaagagacttcattactgaaatctgcaaggatgatcaggagcagcaattagaatttggagcagtatataccgccacaataactgaaatcagagatactggtgtaatggtaaaattatatccaaatatgactgcggtactgcttcataacacacaacttgatcaacgaaagattaaacatcctactgccctaggattagaagttggccaagaaattcaggtgaaatactttggacgtgacccagccgatggaagaatgaggctttctcgaaaagtgcttcagtcgccagctacaaccgtggtcagaactttgaatgacagaagtagtattgtaatgggagaacctatttcacagtcatcatctaattctcagtgattttttttttttaaagagaattctagaattctattttgtctagggtgatgtgctgtagagcaacattttagtagtatcttccattgtgtagatttctatataatataaatacattttaattatttgtactaaaatgctcatttacatgtgccatttttttaattcgagtaacccatatttgtttaattgtatttacattataaatcaagaaatatttattattaaaagtaagtcatttatacatcttagaaaaaattacatagttttgtttttacaattctgaaatatatgaaaaacttagatagaatatgtcatatgttattataacagatctcttcctacatcttatttttcttctttgtatacagtagtgacagtttaccttcagtcatcctacaggtcacctctgtgcccaacaactttacttgcctacaacggttcacaaactggaacaggccatattcaaagccagtgcctatttcttcagaactgttaacagatatagtgagttgagggagctaatctgatacacttttgataatataatgcctttcaaattagttaccaaatcataaacagagtggaataaatataaattagattctaactaggatgaatgtggtagtaatgatgtatatttttcaaatttacctaaacagaaagattattggctaaggcaggcggatcatgagatcaggagatcgagaccatcctggctaacacggtgaaaccccgtctctactaaaagtgcaaaaattagccgggcgtggtggcgcatgcctgtaatcctagctactcaggaggctgaggcagaagaatcacttcaacccaggaggtggaggttgtagtgagccgagattgcgccattgcactccagctcaggcaacaagagcaaaactccgtctcaaaaaaaaaaaaaaaaaaattttagtgatcatggtaagataaacattaatatatgaatgaatattactgcttttaaattgtttttacccagtgcacaaaacgaaaatattttaaatacttttgtagttaaaatgctttaaattttagggaatattctttaacagttttcagtaattttaatcatctacttttctgttttatagtaaaatatttttacaagtgtctaggt

SEQ ID NO: 443214 - DNA, 2474 bp, Homo sapiens
aagcagtgctatcaacgcagagttgccattacggccgggggaccgcgtgccgggtgtcatggcggcctgcaggtactgctgctcgtgcctccggctccggcccctgagcgatggtcctttccttctgccacggcgggatcgggcactcacccagttgcaagtgcgagcactatggagtagcgcagggtctcgagctgtggccgtggacttaggcaacaggaaattagaaatatcttctggaaagctggccagatttgcagatggctctgctgtagtacagtcaggtgacactgcagtaatggtcacagcggtcagtaaaacaaaaccttccccttcccagtttatgcctttggtggttgactacagacaaaaagctgctgcagcaggtagaattcccacaaactatctgagaagagagattggtacttctgataaagaaattctaacaagtcgaataatagatcgttcaattagaccgctctttccagctggctacttctatgatacacaggttctgtgtaatctgttagcagtagatggtgtaaatgagcctgatgtcctagcaattaatggcgcttccgtagccctctcattatcagatattccttggaatggacctgttggggcagtacgaataggaataattgatggagaatatgttgttaacccaacaagaaaagaaatgtcttctagtactttaaatttagtggttgctggagcacctaaaagtcagattgtcatgttggaagcctctgcagagaacattttacagcaggacttttgccatgctatcaaagtgggagtgaaatatacccaacaaataattcagggcattcagcagttggtaaaagaaactggtgttaccaagaggacacctcagaagttatttaccccttcgccagagattgtgaaatatactcataaacttgctatggagagactctatgcagtttttacagattacgagcatgacaaagtttccagagatgaagctgttaacaaaataagattagatacggaggaacaactaaaagaaaaatttccagaagccgatccatatgaaataatagaatccttcaatgttgttgcaaaggaagtttttagaagtattgttttgaatgaatacaaaaggtgcgatggtcgggatttgacttcacttaggaatgtaagttgtgaggtagatatgtttaaaacccttcatggatcagcattatttcaaagaggacaaacacaggtgctttgtaccgttacatttgattcattagaatctggtattaagtcagatcaagttataacagctataaatgggataaaagataaaaatttcatgctgcactacgaggtgctcttgctgagaaagctttgtatcctgttattccccgagattttcctttcaccataagagttacatctgaagtcctagagtcaaatgggtcatcttctatggcatctgcatgtggcggaagtttagcattaatggattcaggggttccaatttcatctgctgttgcaggcgtagcaataggattggtcaccaaaaccgatcctgagaagggtgaaatagaagattatcgtttgctgacagatattttgggaattgaagattacaatggtgacatggacttcaaaatagctggcactaataaaggaataactgcattacaggctgatattaaattacctggaataccaataaaaattgtgatggaggctattcaacaagcttcagtggcaaaaaaggagatattacagatcatgaacaaaactatttcaaaacctcgagcatctagaaaagaaaatggacctgttgtagaaactgttcaggttccattatcaaaacgagcaaaatttgttggacctggtggctataacttaaaaaaacttcaggctgaaacaggtgtaactattagtcaggtggatgaagaaacgttttctgtatttgcaccaacacccagtgctatgcatgaggcaagagacttcattactgaaatctgcaaggatgatcaggagcagcaattagaatttggagcagtatataccgccacaataactgaaatcagagatactggtgtaatggtaaaattatatccaaatatgactgcggtactgcttcataacacacaacttgatcaacgaaagattaaacatcctactgccctaggattagaagttggccaagaaattcaggtgaaatactttggacgtgacccagccgatggaagaatgaggctttctcgaaaagtgcttcagtcgccagctacaaccgtggtcagaactttgaatgacagaagtagtattgtaatgggagaacctatttcacagtcatcatctaattctcagtgattttttttttttaaagagaattctagaattctattttgtctagggtgatgtgctgtagagcaacattttagtagtatcttccattgtgtagatttctatataatataaatacattttaattatttgtacta

SEQ ID NO: 443215 - DNA, 1473 bp, Homo sapiens
gaggatcgcaattcgacagtgtgcaaaggaagtttagaagtatggtttgaatgaatacaaaaggtgcgatggtcgggatttgacttcacttaggaatgtaagttgtgaggtagatatgtttaaaacccttcatggatcagcattatttcaaagaggacaaacacaggtgctttgtaccgttacatttgattcattagaatctggtattaagtcagatcaagttataacagctataaatgggataaaagataaaaatttcatgctgcactacgagtttcctccttatgcaactaatgaaattggcaaagtcactggtttaaatagaagagaacttgggcatggtgctcttgctgagaaagctttgtatcctgttattccccgagattttcctttcaccataagagttacatctgaagtcctagagtcaaatgggtcatcttctatggcatctgcatgtggcggaagtttagcattaatggattcaggggttccaatttcatctgctgttgcaggcgtagcaataggattggtcaccaaaaccgatcctgagaagggtgaaatagaagattatcgtttgctgacagatattttgggaattgaagattacaatggtgacatggacttcaaaatagctggcactaataaaggaataactgcattacaggctgatattaaattacctggaataccaataaaaattgtgatggaggctattcaacaagcttcagtggcaaaaaaggagatattacagatcatgaacaaaactatttcaaaacctcgagcatctagaaaagaaaatggacctgttgtagaaactgttcaggttccattatcaaaacgagcaaaatttgttggacctggtggctataacttaaaaaaacttcaggctgaaacaggtgtaactattagtcaggtggatgaagaaacgttttctgtatttgcaccaacacccagtgctatgcatgaggcaagagacttcattactgaaatctgcaaggatgatcaggagcagcaattagaatttggagcagtatataccgccacaataactgaaatcagagatactggtgtaatggtaaaattatatccaaatatgactgcggtactgcttcataacacacaacttgatcaacgaaagattaaacatcctactgccctaggattagaagttggccaagaaattcaggtgaaatactttggacgtgacccagccgatggaagaatgaggctttctcgaaaagtgcttcagtcgccagctacaaccgtggtcagaactttgaatgacagaagtagtattgtaatgggagaacctatttcacagtcatcatctaattctcagtgattttttttttttaaagagaattctagaattctattttgtctagggtgatgtgctgtagagcaacattttagtagtatcttccattgtgtagatttctatataatataaatacattttaattatttgtacta

SEQ ID NO: 443216 - DNA, 3491 bp, Homo sapiens
aagcagtgctatcaacgcagagttgccattacggccgggggaccgcgtgccgggtgtcatggcggcctgcaggtactgctgctcgtgcctccggctccggcccctgagcgatggtcctttccttctgccacggcgggatcgggcactcacccagttgcaagtgcgagcactatggagtagcgcagggtctcgagctgtggccgtggacttaggcaacaggaaattagaaatatcttctggaaagctggccagatttgcagatggctctgctgtagtacagtcaggtgacactgcagtaatggtcacagcggtcagtaaaacaaaaccttccccttcccagtttatgcctttggtggttgactacagacaaaaagctgctgcagcaggtagaattcccacaaactatctgagaagagagattggtacttctgataaagaaattctaacaagtcgaataatagatcgttcaattagaccgctctttccagctggctacttctatgatacacaggttctgtgtaatctgttagcagtagatggtgtaaatgagcctgatgtcctagcaattaatggcgcttccgtagccctctcattatcagatattccttggaatggacctgttggggcagtacgaataggaataattgatggagaatatgttgttaacccaacaagaaaagaaatgtcttctagtactttaaatttagtggttgctggagcacctaaaagtcagattgtcatgttggaagcctctgcagagaacattttacagcaggacttttgccatgctatcaaagtgggagtgaaatatacccaacaaataattcagggcattcagcagttggtaaaagaaactggtgttaccaagaggacacctcagaagttatttaccccttcgccagagattgtgaaatatactcataaacttgctatggagagactctatgcagtttttacagattacgagcatgacaaagtttccagagatgaagctgttaacaaaataagattagatacggaggaacaactaaaagaaaaatttccagaagccgatccatatgaaataatagaatccttcaatgttgttgcaaaggaagtttttagaagtattgttttgaatgaatacaaaaggtgcgatggtcgggatttgacttcacttaggaatgtaagttgtgaggtagatatgtttaaaacccttcatggatcagcattatttcaaagaggacaaacacaggtgctttgtaccgttacatttgattcattagaatctggtattaagtcagatcaagttataacagctataaatgggataaaagataaaaatttcatgctgcactacgagtttcctccttatgcaactaatgaaattggcaaagtcactggtttaaatagaagagaacttgggcatggtgctcttgctgagaaagctttgtatcctgttattccccgagattttcctttcaccataagagttacatctgaagtcctagagtcaaatgggtcatcttctatggcatctgcatgtggcggaagtttagcattaatggattcaggggttccaatttcatctgctgttgcaggcgtagcaataggattggtcaccaaaaccgatcctgagaagggtgaaatagaagattatcgtttgctgacagatattttgggaattgaagattacaatggtgacatggacttcaaaatagctggcactaataaaggaataactgcattacaggctgatattaaattacctggaataccaataaaaattgtgatggaggctattcaacaagcttcagtggcaaaaaaggagatattacagatcatgaacaaaactatttcaaaacctcgagcatctagaaaagaaaatggacctgttgtagaaactgttcaggttccattatcaaaacgagcaaaatttgttggacctggtggctataacttaaattctgtatttgcaccaacacccagtgctatgcatgaggcaagagacttcattactgaaatctgcaaggatgatcaggagcagcaattagaatttggagcagtatataccgccacaataactgaaatcagagatactggtgtaatggtaaaattatatccaaatatgactgcggtactgcttcataacacacaacttgatcaacgaaagattaaacatcctactgccctaggattagaagttggccaagaaattcaggtgaaatactttggacgtgacccagccgatggaagaatgaggctttctcgaaaagtgcttcagtcgccagctacaaccgtggtcagaactttgaatgacagaagtagtattgtaatgggagaacctatttcacagtcatcatctaattctcagtgattttttttttttaaagagaattctagaattctattttgtctagggtgatgtgctgtagagcaacattttagtagtatcttccattgtgtagatttctatataatataaatacattttaattatttgtactaaaatgctcatttacatgtgccatttttttaattcgagtaacccatatttgtttaattgtatttacattataaatcaagaaatatttattattaaaagtaagtcatttatacatcttagaaaaaattacatagttttgtttttacaattctgaaatatatgaaaaacttagatagaatatgtcatatgttattataacagatctcttcctacatcttatttttcttctttgtatacagtagtgacagtttaccttcagtcatcctacaggtcacctctgtgcccaacaactttacttgcctacaacggttcacaaactggaacaggccatattcaaagccagtgcctatttcttcagaactgttaacagatatagtgagttgagggagctaatctgatacacttttgataatataatgcctttcaaattagttaccaaatcataaacagagtggaataaatataaattagattctaactaggatgaatgtggtagtaatgatgtatatttttcaaatttacctaaacagaaagattattggctaaggcaggcggatcatgagatcaggagatcgagaccatcctggctaacacggtgaaaccccgtctctactaaaagtgcaaaaattagccgggcgtggtggcgcatgcctgtaatcctagctactcaggaggctgaggcagaagaatcacttcaacccaggaggtggaggttgtagtgagccgagattgcgccattgcactccagctcaggcaacaagagcaaaactccgtctcaaaaaaaaaaaaaaaaaaattttagtgatcatggtaagataaacattaatatatgaatgaatattactgcttttaaattgtttttacccagtgcacaaaacgaaaatattttaaatacttttgtagttaaaatgctttaaattttagggaatattctttaacagttttcagtaattttaatcatctacttttctgttttatagtaaaatatttttacaagtgtctaggt

SEQ ID NO: 443217 - DNA, 1924 bp, Homo sapiens
aagcagtgctatcaacgcagagttgccattacggccgggggaccgcgtgccgggtgtcatggcggcctgcaggtactgctgctcgtgcctccggctccggcccctgagcgatggtcctttccttctgccacggcgggatcgggcactcacccagttgcaagtgcgagcactatggagtagcgcagggtctcgagctgtggccgtggacttaggcaacaggaaattagaaatatcttctggaaagctggccagatttgcagatggctctgctgtagtacagtcaggtgacactgcagtaatggtcacagcggtcagtaaaacaaaaccttccccttcccagtttatgcctttggtggttgactacagacaaaaagctgctgcagcaggtagaattcccacaaactatctgagaagagagattggtacttctgataaagaaattctaacaagtcgaataatagatcgttcaattagaccgctctttccagctggctacttctatgatacacaggttctgtgtaatctgttagcagtagatggtgtaaatgagcctgatgtcctagcaattaatggcgcttccgtagccctctcattatcagatattccttggaatggacctgttggggcagtacgaataggaataattgatggagaatatgttgttaacccaacaagaaaagaaatgtcttctagtactttaaatttagtggttgctggagcacctaaaagtcagattgtcatgttggaagcctctgcagagaacattttacagcaggacttttgccatgctatcaaagtgggagtgaaatatacccaacaaataattcagggcattcagcagttggtaaaagaaactggtgttaccaagaggacacctcagaagttatttaccccttcgccagagattgtgaaatatactcataaacttgctatggagagactctatgcagtttttacagattacgagcatgacaaagtttccagagatgaagctgttaacaaaataagattagatacggaggaacaactaaaagaaaaatttccagaagccgatccatatgaaataatagaatccttcaatgttgttgcaaaggaagtttttagaagtattgttttgaatgaatacaaaaggtgcgatggtcgggatttgacttcacttaggaatgtaagttgtgaggtagatatgtttaaaacccttcatggatcagcattatttcaaagaggacaaacacaggtgctttgtaccgttacatttgattcattagaatctggtattaagtcagatcaagttataacagctataaatgggataaaagataaaaatttcatgctgcactacgagtttcctccttatgcaactaatgaaattggcaaagtcactggtttaaatagaagagaacttgggcatggtgctcttgctgagaaagctttgtatcctgttattccccgagattttccttctctttccgccatctttccgcgccgccacaatggtgcgcatgaatgtcctggcagatgctctcaagagtatcaacaatgccgaaaagagaggcaaacgccaggtgcttattaggccgtgctccaaagtcatcgtccggtttctcactgtgatgatgaagcatggttacattggcgaatttgaaatcattgatgaccacagagctgggaaaattgttgtgaacctcacaggcaggctaaacaagtgtggggtgatcagccccagatttgacgtgcaactcaaagacctggaaaaatggcagaataatctgcttccatcccgccagtttggtttcattgtactgacaacctcagctggcatcatggaccatgaagaagcaagacgaaaacacacaggagggaaaatcctgggattctttttctagggatgtaatacatatatttacaaataaaatgcctcatggac

SEQ ID NO: 443218 - DNA, 1917 bp, Homo sapiens
aagcagtgctatcaacgcagagttgccattacggccgggggaccgcgtgccgggtgtcatggcggcctgcaggtactgctgctcgtgcctccggctccggcccctgagcgatggtcctttccttctgccacggcgggatcgggcactcacccagttgcaagtgcgagcactatggagtagcgcagggtctcgagctgtggccgtggacttaggcaacaggaaattagaaatatcttctggaaagctggccagatttgcagatggctctgctgtagtacagtcaggtgacactgcagtaatggtcacagcggtcagtaaaacaaaaccttccccttcccagtttatgcctttggtggttgactacagacaaaaagctgctgcagcaggtagaattcccacaaactatctgagaagagagattggtacttctgataaagaaattctaacaagtcgaataatagatcgttcaattagaccgctctttccagctggctacttctatgatacacaggttctgtgtaatctgttagcagtagatggtgtaaatgagcctgatgtcctagcaattaatggcgcttccgtagccctctcattatcagatattccttggaatggacctgttggggcagtacgaataggaataattgatggagaatatgttgttaacccaacaagaaaagaaatgtcttctagtactttaaatttagtggttgctggagcacctaaaagtcagattgtcatgttggaagcctctgcagagaacattttacagcaggacttttgccatgctatcaaagtgggagtgaaatatacccaacaaataattcagggcattcagcagttggtaaaagaaactggtgttaccaagaggacacctcagaagttatttaccccttcgccagagattgtgaaatatactcataaacttgctatggagagactctatgcagtttttacagattacgagcatgacaaagtttccagagatgaagctgttaacaaaataagattagatacggaggaacaactaaaagaaaaatttccagaagccgatccatatgaaataatagaatccttcaatgttgttgcaaaggaagtttttagaagtattgttttgaatgaatacaaaaggtgcgatggtcgggatttgacttcacttaggaatgtaagttgtgaggtagatatgtttaaaacccttcatggatcagcattatttcaaagaggacaaacacaggtgctttgtaccgttacatttgattcattagaatctggtattaagtcagatcaagttataacagctataaatgggataaaagataaaaatttcatgctgcactacgaggtgctcttgctgagaaagctttgtatcctgttattccccgagattttcctttcaccataagagttacatctgaagtcctagagtcaaatgggtcatcttctatggcatctgcatgtggcggaagtttagcattaatggattcaggggttccaatttcatctgctgttgcaggcgtagcaataggattggtcaccaaaaccgatcctgagaagggtgaaatagaagattatcgtttgctgacagatattttgggaattgaagattacaatggtgacatggacttcaaaatagctggcactaataaaggaataactgcattacaggctgatattaaattacctggaataccaataaaaattgtgatggaggctattcaacaagcttcagtggcaaaaaaggagatattacagatcatgaacaaaactatttcaaaacctcgagcatctagaaaagaaaatggacctgttgtagaaactgttcaggttccattatcaaaacgagcaaaatttgttggacctggtggctataacttaaaaaaacttcaggctgaaacaggtaagagttgtatgaagttt

SEQ ID NO: 443219 - DNA, 1917 bp, Homo sapiens
cttttaaattgtttttacccagtgcacaaaacgaaaatattttaaatacttttgtagttaaaatgctttaaattttagggaatattctttaacagttttcagtaattttaatcatctacttttctgttttatagtaaaatatttttacatgtgtctaggtcaaaaaaaaaaaaaatctcaagtgaccatggcatgttttaggttcatgtatgtagttgaattgtttatatatttgtctgtattacgttccagaaactgttcaggttccattatcaaaacgagcaaaatttgttggacctggtggctataacttaaaaaaacttcaggctgaaacaggtgtaactattagtcaggtggatgaagaaacgttttctgtatttgcaccaacacccagtgctatgcatgaggcaagagacttcattactgaaatctgcaaggatgatcaggagcagcaattagaatttggagcagtatataccgccacaataactgaaatcagagatactggtgtaatggtaaaattatatccaaatatgactgcggtactgcttcataacacacaacttgatcaacgaaagattaaacatcctactgccctaggattagaagttggccaagaaattcaggtgaaatactttggacgtgacccagccgatggaagaatgaggctttctcgaaaagtgcttcagtcgccagctacaaccgtggtcagaactttgaatgacagaagtagtattgtaatgggagaacctatttcacagtcatcatctaattctcagtgattttttttttttaaagagaattctagaattctattttgtctagggtgatgtgctgtagagcaacattttagtagtatcttccattgtgtagatttctatataatataaatacattttaattatttgtactaaaatgctcatttacatgtgccatttttttaattcgagtaacccatatttgtttaattgtatttacattataaatcaagaaatatttattattaaaagtaagtcatttatacatcttagaaaaaattacatagttttgtttttacaattctgaaatatatgaaaaacttagatagaatatgtcatatgttattataacagatctcttcctacatcttatttttcttctttgtatacagtagtgacagtttaccttcagtcatcctacaggtcacctctgtgcccaacaactttacttgcctacaacggttcacaaactggaacaggccatattcaaagccagtgcctatttcttcagaactgttaacagatatagtgagttgagggagctaatctgatacacttttgataatataatgcctttcaaattagttaccaaatcataaacagagtggaataaatataaattagattctaactaggatgaatgtggtagtaatgatgtatatttttcaaatttacctaaacagaaagattattggctaaggcaggcggatcatgagatcaggagatcgagaccatcctggctaacacggtgaaaccccgtctctactaaaagtgcaaaaattagccgggcgtggtggcgcatgcctgtaatcctagctactcaggaggctgaggcagaagaatcacttcaacccaggaggtggaggttgtagtgagccgagattgcgccattgcactccagctcaggcaacaagagcaaaactccgtctcaaaaaaaaaaaaaaaaaaattttagtgatcatggtaagataaacattaatatatgaatgaatattactgcttttaaattgtttttacccagtgcacaaaacgaaaatattttaaatacttttgtagttaaaatgctttaaattttagggaatattctttaacagttttcagtaattttaatcatctacttttctgttttatagtaaaatatttttacaagtgtctaggt

SEQ ID NO: 443220 - DNA, 1635 bp, Homo sapiens
acccactatgcccagccaagttaactttaatatgttacattttgtttttaaaaggtgtaactattagtcaggtggatgaagaaacgttttctgtatttgcaccaacacccagtgctatgcatgaggcaagagacttcattactgaaatctgcaaggatgatcaggagcagcaattagaatttggagcagtatataccgccacaataactgaaatcagagatactggtgtaatggtaaaattatatccaaatatgactgcggtactgcttcataacacacaacttgatcaacgaaagattaaacatcctactgccctaggattagaagttggccaagaaattcaggtgaaatactttggacgtgacccagccgatggaagaatgaggctttctcgaaaagtgcttcagtcgccagctacaaccgtggtcagaactttgaatgacagaagtagtattgtaatgggagaacctatttcacagtcatcatctaattctcagtgattttttttttttaaagagaattctagaattctattttgtctagggtgatgtgctgtagagcaacattttagtagtatcttccattgtgtagatttctatataatataaatacattttaattatttgtactaaaatgctcatttacatgtgccatttttttaattcgagtaacccatatttgtttaattgtatttacattataaatcaagaaatatttattattaaaagtaagtcatttatacatcttagaaaaaattacatagttttgtttttacaattctgaaatatatgaaaaacttagatagaatatgtcatatgttattataacagatctcttcctacatcttatttttcttctttgtatacagtagtgacagtttaccttcagtcatcctacaggtcacctctgtgcccaacaactttacttgcctacaacggttcacaaactggaacaggccatattcaaagccagtgcctatttcttcagaactgttaacagatatagtgagttgagggagctaatctgatacacttttgataatataatgcctttcaaattagttaccaaatcataaacagagtggaataaatataaattagattctaactaggatgaatgtggtagtaatgatgtatatttttcaaatttacctaaacagaaagattattggctaaggcaggcggatcatgagatcaggagatcgagaccatcctggctaacacggtgaaaccccgtctctactaaaagtgcaaaaattagccgggcgtggtggcgcatgcctgtaatcctagctactcaggaggctgaggcagaagaatcacttcaacccaggaggtggaggttgtagtgagccgagattgcgccattgcactccagctcaggcaacaagagcaaaactccgtctcaaaaaaaaaaaaaaaaaaattttagtgatcatggtaagataaacattaatatatgaatgaatattactgcttttaaattgtttttacccagtgcacaaaacgaaaatattttaaatacttttgtagttaaaatgctttaaattttagggaatattctttaacagttttcagtaattttaatcatctacttttctgttttatagtaaaatatttttacaagtgtctaggt

SEQ ID NO: 443221 - DNA, 1089 bp, Homo sapiens
aagcagtgctatcaacgcagagttgccattacggccgggggaccgcgtgccgggtgtcatggcggcctgcaggtactgctgctcgtgcctccggctccggcccctgagcgatggtcctttccttctgccacggcgggatcgggcactcacccagttgcaagtgcgagcactatggagtagcgcagggtctcgagctgtggccgtggacttaggcaacaggaaattagaaatatcttctggaaagctggccagatttgcagatggctctgctgtagtacagtcaggtgacactgcagtaatggtcacagcggtcagtaaaacaaaaccttccccttcccagtttatgcctttggtggttgactacagacaaaaagctgctgcagcaggtagaattcccacaaactatctgagaagagagattggtacttctgataaagaaattctaacaagtcgaataatagatcgttcaattagaccgctctttccagctggctacttctatgatacacaggttctgtgtaatctgttagcagtagatggtgtaaatgagcctgatgtcctagcaattaatggcgcttccgtagccctctcattatcagatattccttggaatggacctgttggggcagtacgaataggaataattgatggagaatatgttgttaacccaacaagaaaagaaatgtcttctagtactttaaatttagtggttgctggagcacctaaaagtcagattgtcatgttggaagcctctgcagagaacattttacagcaggacttttgccatgctatcaaagtgggagtgaaatatacccaacaaataattcagggcattcagcagttggtaaaagaaactggtgttaccaagaggacacctcagaagttatttaccccttcgccagagattgtgaaatatactcataaacttgctatggagagactctatgcagtttttacagattacgagcatgacaaagtttccagagatgaagctgttaacaaaataaggctgatccatgaagggttttaaacatatctacctcacaacttacattcctaagtgaagtcaaatcccgaccatcgcacctt

SEQ ID NO: 443222 - DNA, 334 bp, Homo sapiens
ttgtacagatgacctaagtcttcttgtattgcatttttatttttaaacaggaaattagaaatatcttctggaaagctggccagatttgcagatggctctgctgtagtacaggtaaaaagtccagatttttaaaattcatcttaaaaatggttacggagactcatactaaatgtgtaactacaacatcgtgtaactacttagaattttggtactggaaattaattcagatactactaagataatttctactgcaagaatcattccagacaaccagagtccagagcactgcatgtattaagtgacctatttttttttttgaggtggactcttgctc

SEQ ID NO: 443223 - DNA, 2535 bp, Homo sapiens
gtgtaagaatagcaatagggacggcctgtggtattcggccgaggctggtgtatggctaagctgcaggtactgctgctcgtgcctccggctccggcccctgagcgatggtcctttccttctgccacggcgggatcgggcactcacccagttgcaagtgcgagcactatggagtagcgcagggtctcgagctgtggccgtggacttaggcaacaggaaattagaaatatcttctggaaagctggccagatttgcagatggctctgctgtagtacagtcaggtgacactgcagtaatggtcacagcggtcagtaaaacaaaaccttccccttcccagtttatgcctttggtggttgactacagacaaaaagctgctgcagcaggtagaattcccacaaactatctgagaagagagattggtacttctgataaagaaattctaacaagtcgaataatagatcgttcaattagaccgctctttccagctggctacttctatgatacacaggttctgtgtaatctgttagcagtagatggtgtaaatgagcctgatgtcctagcaattaatggcgcttccgtagccctctcattatcagatattccttggaatggacctgttggggcagtacgaataggaataattgatggagaatatgttgttaacccaacaagaaaagaaatgtcttctagtactttaaatttagtggttgctggagcacctaaaagtcagattgtcatgttggaagcctctgcagagaacattttacagcaggacttttgccatgctatcaaagtgggagtgaaatatacccaacaaataattcagggcattcagcagttggtaaaagaaactggtgttaccaagaggacacctcagaagttatttaccccttcgccagagattgtgaaatatactcataaacttgctatggagagactctatgcagtttttacagattacgagcatgacaaagtttccagagatgaagctgttaacaaaataagattagatacggaggaacaactaaaagaaaaatttccagaagccgatccatatgaaataatagaatccttcaatgttgttgcaaaggaagtttttagaagtattgttttgaatgaatacaaaaggtgcgatggtcgggatttgacttcacttaggaatgtaagttgtgaggtagatatgtttaaaacccttcatggatcagcattatttcaaagaggacaaacacaggtgctttgtaccgttacatttgattcattagaatctggtattaagtcagatcaagttataacagctataaatgggataaaagataaaaatttcatgctgcactacgagtttcctccttatgcaactaatgaaattggcaaagtcactggtttaaatagaagagaacttgggcatggtgctcttgctgagaaagctttgtatcctgttattccccgagattttcctttcaccataagagttacatctgaagtcctagagtcaaatgggtcatcttctatggcatctgcatgtggcggaagtttagcattaatggattcaggggttccaatttcatctgctgttgcaggcgtagcaataggattggtcaccaaaaccgatcctgagaagggtgaaatagaagattatcgtttgctgacagatattttgggaattgaagattacaatggtgacatggacttcaaaatagctggcactaataaaggaataactgcattacaggctgatattaaattacctggaataccaataaaaattgtgatggaggctattcaacaagcttcagtggcaaaaaaggagatattacagatcatgaacaaaactatttcaaaacctcgagcatctagaaaagaaaatggacctgttgtagaaactgttcaggttccattatcaaaacgagcaaaatttgttggacctggtggctataacttaaaaaaacttcaggctgaaacaggtgtaactattagtcaggtggatgaagaaacgttttctgtatttgcaccaacacccagtgctatgcatgaggcaagagacttcattactgaaatctgcaaggatgatcaggagcagcaattagaatttggagcagtatataccgccacaataactgaaatcagagatactggtgtaatggtaaaattatatccaaatatgactgcggtactgcttcataacacacaacttgatcaacgaaagattaaacatcctactgccctaggattagaagttggccaagaaattcaggtgaaatactttggacgtgacccagccgatggaagaatgaggctttctcgaaaagtgcttcagtcgccagctacaaccgtggtcagaactttgaatgacagaagtagtattgtaatgggagaacctatttcacagtcatcatctaattctcagtgattttttttttttaaagagaattctagaattctattttgtctagggtgatgtgctgtagagcaacattttagtagtatcttccattgtgtagatttctatataatataaatacattttaattatttgtacta

SEQ ID NO: 443224 - DNA, 2658 bp, Homo sapiens
aagcagtgctatcaacgcagagttgccattacggccgggggaccgcgtgccgggtgtcatggcggcctgcaggtactgctgctcgtgcctccggctccggcccctgagcgatggtcctttccttctgccacggcgggatcgggcactcacccagttgcaagtgcgagcactatggagtagcgcagggtctcgagctgtggccgtggacttaggcaacaggaaattagaaatatcttctggaaagctggccagatttgcagatggctctgctgtagtacagtcaggtgacactgcagtaatggtcacagcggtcagtaaaacaaaaccttccccttcccagtttatgcctttggtggttgactacagacaaaaagctgctgcagcaggtagaattcccacaaactatctgagaagagagattggtacttctgataaagaaattctaacaagtcgaataatagatcgttcaattagaccgctctttccagctggctacttctatgatacacaggttctgtgtaatctgttagcagtagatggtgtaaatgagcctgatgtcctagcaattaatggcgcttccgtagccctctcattatcagatattccttggaatggacctgttggggcagtacgaataggaataattgatggagaatatgttgttaacccaacaagaaaagaaatgtcttctagtactttaaatttagtggttgctggagcacctaaaagtcagattgtcatgttggaagcctctgcagagaacattttacagcaggacttttgccatgctatcaaagtgggagtgaaatatacccaacaaataattcagggcattcagcagttggtaaaagaaactggtgttaccaagaggacacctcagaagttatttaccccttcgccagagattgtgaaatatactcataaacttgctatggagagactctatgcagtttttacagattacgagcatgacaaagtttccagagatgaagctgttaacaaaataagattagatacggaggaacaactaaaagaaaaatttccagaagccgatccatatgaaataatagaatccttcaatgttgttgcaaaggaagtttttagaagtattgttttgaatgaatacaaaaggtgcgatggtcgggatttgacttcacttaggaatgtaagttgtgaggtagatatgtttaaaacccttcatggatcagcattatttcaaagaggacaaacacaggtgctttgtaccgttacatttgattcattagaatctggtattaagtcagatcaagttataacagctataaatgggataaaagataaaaatttcatgctgcactacgagtttcctccttatgcaactaatgaaattggcaaagtcactggtttaaatagaagagaacttgggcatggtgctcttgctgagaaagctttgtatcctgttattccccgagattttcctttcaccataagagttacatctgaagtcctagagtcaaatgggtcatcttctatggcatctgcatgtggcggaagtttagcattaatggattcaggggttccaatttcatctgctgttgcaggcgtagcaataggattggtcaccaaaaccgatcctgagaagggtgaaatagaagattatcgtttgctgacagatattttgggaattgaagattacaatggtgacatggacttcaaaatagctggcactaataaaggaataactgcattacaggctgatattaaattacctggaataccaataaaaattgtgatggaggctattcaacaagcttcagtggcaaaaaaggagatattacagatcatgaacaaaactatttcaaaacctcgagcatctagaaaagaaaatggacctgttgtagaaactgttcaggttccattatcaaaacgagcaaaatttgttggacctggtggctataacttaaaaaaacttcaggctgaaacaggtgtaactattagtcaggtggatgaagaaacgttttctgtatttgcaccaacacccagtgctatgcatgaggcaagagacttcattactgaaatctgcaaggatgatcaggagcagcaattagaatttggagcagtatataccgccacaataactgaaatcagagatactggtgtaatggtaaaattatatccaaatatgactgcggtactgcttcataacacacaacttgatcaacgaaagattaaacatcctactgccctaggattagaagttggccaagaaattcaggtgaaatactttggacgtgacccagccgatggaagaatgaggctttctcgaaaagtgcttcagtcgccagctacaaccgtggtcagaactttgaatgacagaagtagtattgtaatgggagaacctatttcacagtcatcatctaattctcagtgattttttttttttaaagagaattctagaattctattttgtctagggtgatgtgctgtagagcaacattttagtagtatcttccattgtgtagatttctatataatataaatacattttaattatttgtactaaaatgctcatttacatgtgccatttttttaattcgagtaacccatatttgtttaattgtatttacattataaatcaagaaatatttattattaaaagtaagtcatttatacatctta

SEQ ID NO: 443225 - DNA, 2636 bp, Homo sapiens
aagcagtgctatcaacgcagagttgccattacggccgggggaccgcgtgccgggtgtcatggcggcctgcaggtactgctgctcgtgcctccggctccggcccctgagcgatggtcctttccttctgccacggcgggatcgggcactcacccagttgcaagtgcgagcactatggagtagcgcagggtctcgagctgtggccgtggacttaggcaacaggaaattagaaatatcttctggaaagctggccagatttgcagatggctctgctgtagtacagtcaggtgacactgcagtaatggtcacagcggtcagtaaaacaaaaccttccccttcccagtttatgcctttggtggttgactacagacaaaaagctgctgcagcaggtagaattcccacaaactatctgagaagagagattggtacttctgataaagaaattctaacaagtcgaataatagatcgttcaattagaccgctctttccagctggctacttctatgatacacaggttctgtgtaatctgttagcagtagatggtgtaaatgagcctgatgtcctagcaattaatggcggtaagtataaaagtagagattaaaattatcagattaaaaatttttttaaagcaatgaaattttaatttcggccctgatttttctccttttttaagcttccgtagccctctcattatcagatattccttggaatggacctgttggggcagtacgaataggaataattgatggagaatatgttgttaacccaacaagaaaagaaatgtcttctagtactttaaatttagtggttgctggagcacctaaaagtcagattgtcatgttggaagcctctgcagagaacattttacagcaggacttttgccatgctatcaaagtgggagtgaaatatacccaacaaataattcagggcattcagcagttggtaaaagaaactggtgttaccaagaggacacctcagaagttatttaccccttcgccagagattgtgaaatatactcataaacttgctatggagagactctatgcagtttttacagattacgagcatgacaaagtttccagagatgaagctgttaacaaaataagattagatacggaggaacaactaaaagaaaaatttccagaagccgatccatatgaaataatagaatccttcaatgttgttgcaaaggaagtttttagaagtattgttttgaatgaatacaaaaggtgcgatggtcgggatttgacttcacttaggaatgtaagttgtgaggtagatatgtttaaaacccttcatggatcagcattatttcaaagaggacaaacacaggtgctttgtaccgttacatttgattcattagaatctggtattaagtcagatcaagttataacagctataaatgggataaaagataaaaatttcatgctgcactacgagtttcctccttatgcaactaatgaaattggcaaagtcactggtttaaatagaagagaacttgggcatggtgctcttgctgagaaagctttgtatcctgttattccccgagattttcctttcaccataagagttacatctgaagtcctagagtcaaatgggtcatcttctatggcatctgcatgtggcggaagtttagcattaatggattcaggggttccaatttcatctgctgttgcaggcgtagcaataggattggtcaccaaaaccgatcctgagaagggtgaaatagaagattatcgtttgctgacagatattttgggaattgaagattacaatggtgacatggacttcaaaatagctggcactaataaaggaataactgcattacaggctgatattaaattacctggaataccaataaaaattgtgatggaggctattcaacaagcttcagtggcaaaaaaggagatattacagatcatgaacaaaactatttcaaaacctcgagcatctagaaaagaaaatggacctgttgtagaaactgttcaggttccattatcaaaacgagcaaaatttgttggacctggtggctataacttaaaaaaacttcaggctgaaacaggtgtaactattagtcaggtggatgaagaaacgttttctgtatttgcaccaacacccagtgctatgcatgaggcaagagacttcattactgaaatctgcaaggatgatcaggagcagcaattagaatttggagcagtatataccgccacaataactgaaatcagagatactggtgtaatggtaaaattatatccaaatatgactgcggtactgcttcataacacacaacttgatcaacgaaagattaaacatcctactgccctaggattagaagttggccaagaaattcaggtgaaatactttggacgtgacccagccgatggaagaatgaggctttctcgaaaagtgcttcagtcgccagctacaaccgtggtcagaactttgaatgacagaagtagtattgtaatgggagaacctatttcacagtcatcatctaattctcagtgattttttttttttaaagagaattctagaattctattttgtctagggtgatgtgctgtagagcaacattttagtagtatcttccattgtgtagatttctatataatataaatacattttaattatttgtacta

SEQ ID NO: 443226 - DNA, 1758 bp, Homo sapiens
aagcagtgctatcaacgcagagttgccattacggccgggggaccgcgtgccgggtgtcatggcggcctgcaggtactgctgctcgtgcctccggctccggcccctgagcgatggtcctttccttctgccacggcgggatcgggcactcacccagttgcaagtgcgagcactatggagtagcgcagggtctcgagctgtggccgtggacttaggcaacaggaaattagaaatatcttctggaaagctggccagatttgcagatggctctgctgtagtacagtcaggtgacactgcagtaatggtcacagcggtcagtaaaacaaaaccttccccttcccagtttatgcctttggtggttgactacagacaaaaagctgctgcagcaggtagaattcccacaaactatctgagaagagagattggtacttctgataaagaaattctaacaagtcgaataatagatcgttcaattagaccgctctttccagctggctacttctatgatacacaggttctgtgtaatctgttagcagtagatggtgtaaatgagcctgatgtcctagcaattaatggcgcttccgtagccctctcattatcagatattccttggaatggacctgttggggcagtacgaataggaataattgatggagaatatgttgttaacccaacaagaaaagaaatgtcttctagtactttaaatttagtggttgctggagcacctaaaagtcagattgtcatgttggaagcctctgcagagaacattttacagcaggacttttgccatgctatcaaagtgggagtgaaatatacccaacaaataattcagggcattcagcagttggtaaaagaaactggtgttaccaagaggacacctcagaagttatttaccccttcgccagagattgtgaaatatactcataaacttgctatggagagactctatgcagtttttacagattacgagcatgacaaagtttccagagatgaagctgttaacaaaataagattagatacggaggaacaactaaaagaaaaatttccagaagccgatccatatgaaataatagaatccttcaatgttgttgcaaaggaagtttttagaagtattgttttgaatgaatacaaaaggtgcgatggtcgggatttgacttcacttaggaatgtaagttgtgaggtagatatgtttaaaacccttcatggatcagcattatttcaaagaggacaaacacaggtgctttgtaccgttacatttgattcattagaatctggtattaagtcagatcaagttataacagctataaatgggataaaagataaaaatttcatgctgcactacgagtttcctccttatgcaactaatgaaattggcaaagtcactggtttaaatagaagagaacttgggcatggtgctcttgctgagaaagctttgtatcctgttattccccgagattttcctttcaccataagagttacatctgaagtcctagagtcaaatgggtcatcttctatggcatctgcatgtggcggaagtttagcattaatggattcaggggttccaatttcatctgctgttgcaggcgtagcaataggattggtcaccaaaaccgatcctgagaagggtgaaatagaagattatcgtttgctgacagatattttgggaattgaagattacaatggtgacatggacttcaaaatagctggcactaataaaggaataactgcattacaggctgatattaaattacctggaatacc

SEQ ID NO: 443227 - DNA, 2190 bp, Homo sapiens
aagcagtgctatcaacgcagagttgccattacggccgggggaccgcgtgccgggtgtcatggcggcctgcaggtactgctgctcgtgcctccggctccggcccctgagcgatggtcctttccttctgccacggcgggatcgggcactcacccagttgcaagtgcgagcactatggagtagcgcagggtctcgagctgtggccgtggacttaggcaacaggaaattagaaatatcttctggaaagctggccagatttgcagatggctctgctgtagtacagtcaggtgacactgcagtaatggtcacagcggtcagtaaaacaaaaccttccccttcccagtttatgcctttggtggttgactacagacaaaaagctgctgcagcaggtagaattcccacaaactatctgagaagagagattggtacttctgataaagaaattctaacaagtcgaataatagatcgttcaattagaccgctctttccagctggctacttctatgatacacaggttctgtgtaatctgttagcagtagatggtgtaaatgagcctgatgtcctagcaattaatggcgcttccgtagccctctcattatcagatattccttggaatggacctgttggggcagtacgaataggaataattgatggagaatatgttgttaacccaacaagaaaagaaatgtcttctagtactttaaatttagtggttgctggagcacctaaaagtcagattgtcatgttggaagcctctgcagagaacattttacagcaggacttttgccatgctatcaaagtgggagtgaaatatacccaacaaataattcagggcattcagcagttggtaaaagaaactggtgttaccaagaggacacctcagaagttatttaccccttcgccagagattgtgaaatatactcataaacttgctatggagagactctatgcagtttttacagattacgagcatgacaaagtttccagagatgaagctgttaacaaaataagattagatacggaggaacaactaaaagaaaaatttccagaagccgatccatatgaaataatagaatccttcaatgttgttgcaaaggaagtttttagaagtattgttttgaatgaatacaaaaggtgcgatggtcgggatttgacttcacttaggaatgtaagttgtgaggtagatatgtttaaaacccttcatggatcagcattatttcaaagaggacaaacacaggtgctttgtaccgttacatttgattcattagaatctggtattaagtcagatcaagttataacagctataaatgggataaaagataaaaatttcatgctgcactacgagtttcctccttatgcaactaatgaaattggcaaagtcactggtttaaatagaagagaacttgggcatggtgctcttgctgagaaagctttgtatcctgttattccccgagattttcctttcaccataagagttacatctgaagtcctagagtcaaatgggtcatcttctatggcatctgcatgtggcggaagtttagcattaatggattcaggggttccaatttcatctgctgttgcaggcgtagcaataggattggtcaccaaaaccgatcctgagaagggtgaaatagaagattatcgtttgctgacagatattttgggaattgaagattacaatggtgacatggacttcaaaatagctggcactaataaaggaataactgcattacaggctgatattaaattacctggaataccaataaaaattgtgatggaggctattcaacaagcttcagtggcaaaaaaggagatattacagatcatgaacaaaactatttcaaaacctcgagcatctagaaaagaaaatggacctgttgtaggtaatacattaaaattttagtgatcggctgggcgcggtggctcacgcctgtaatcccagcactttgggaggccgaggcgagcggatcacaaggtcaggagatcgagaccatcctggctaacacggtgaaaccctgtctctactaaaaaatacaaaaaattagccgggcgtggtggcgggcgcctgtagtcccagctactcgggaggctgaggcaggagaatggcatgaacccgggaggcggagcttgcagtgagccgagatcgcgccactgcactccagcctgggcgacaaacgtgagactccgtctcaa

SEQ ID NO: 443228 - DNA, 1311 bp, Homo sapiens
aagcagtgctatcaacgcagagttgccattacggccgggggaccgcgtgccgggtgtcatggcggcctgcaggtactgctgctcgtgcctccggctccggcccctgagcgatggtcctttccttctgccacggcgggatcgggcactcacccagttgcaagtgcgagcactatggagtagcgcagggtctcgagctgtggccgtggacttaggcaacaggaaattagaaatatcttctggaaagctggccagatttgcagatggctctgctgtagtacagtcaggtgacactgcagtaatggtcacagcggtcagtaaaacaaaaccttccccttcccagtttatgcctttggtggttgactacagacaaaaagctgctgcagcaggtagaattcccacaaactatctgagaagagagattggtacttctgataaagaaattctaacaagtcgaataatagatcgttcaattagaccgctctttccagctggctacttctatgatacacaggttctgtgtaatctgttagcagtagatggtgtaaatgagcctgatgtcctagcaattaatggcgcttccgtagccctctcattatcagatattccttggaatggacctgttggggcagtacgaataggaataattgatggagaatatgttgttaacccaacaagaaaagaaatgtcttctagtactttaaatttagtggttgctggagcacctaaaagtcagattgtcatgttggaagcctctgcagagaacattttacagcaggacttttgccatgctatcaaagtgggagtgaaatatacccaacaaataattcagggcattcagcagttggtaaaagaaactggtgttaccaagaggacacctcagaagttatttaccccttcgccagagattgtgaaatatactcataagtaagaacatctgtgcaaatgaaaatatgaaattgtcatcagatttaatttcctcgtgggagagaaacttcccatggaagcactgcccatgcattacttcataaatagcacttttctgttttaagagtcattcccataaatatctgcttactcccttaaaaaggataagcccacatcactcttgtaagacctaactttgaatctcaaatgaaagagtgtgtttattggtcaagattcaggtaagcaccacatctctccacgtctaggaaaaagaataaaacgttaagatatttgaatatctaaggaaactgttggaattctcaaaaagaaatcagaggtaatcactgttacatgcccagtgcttagaacgttaggcagacactcagt

SEQ ID NO: 443229 - DNA, 915 bp, Homo sapiens
aagcagtgctatcaacgcagagttgccattacggccgggggaccgcgtgccgggtgtcatggcggcctgcaggtactgctgctcgtgcctccggctccggcccctgagcgatggtcctttccttctgccacggcgggatcgggcactcacccagttgcaagtgcgagcactatggagtagcgcagggtctcgagctgtggccgtggacttaggcaacaggaaattagaaatatcttctggaaagctggccagatttgcagatggctctgctgtagtacagtcaggtgacactgcagtaatggtcacagcggtcagtaaaacaaaaccttccccttcccagtttatgcctttggtggttgactacagacaaaaagctgctgcagcaggtagaattcccacaaactatctgagaagagagattggtacttctgataaagaaattctaacaagtcgaataatagatcgttcaattagaccgctctttccagctggctacttctatgatacacaggttctgtgtaatctgttagcagtagatggtgtaaatgagcctgatgtcctagcaattaatggcgcttccgtagccctctcattatcagatattccttggaatggacctgttggggcagtacgaataggaataattgatggagaatatgttgttaacccaacaagaaaagaaatgtttcagtcgccagctacaaccgtggtcagaactttgaatgacagaagtagtattgtaatgggagaacctatttcacagtcatcatctaattctcagtgattttttttttttaaagagaattctagaattctattttgtctagggtgatgtgctgtagagcaacattttagtagtatcttccattgtgtagatttctatataatataaatacattttaattatttgtacta

SEQ ID NO: 443230 - DNA, 1729 bp, Homo sapiens
ggccagtgatgctggtgcgcgcgctccttggaactagagaggaggtggccggggcggggccgggggaggggggtagggcagagcctggcgggagcccggctgctgattggccggcctggctggcgggcccccgccgctggttcgtagccggcgcagcggcctgggctgggatgtgaggagcggcgggttccgggctccgggctctgggtggcggcggctgtgagcggcggcactgcggcgcaggccagcgggcgccgtcggcggctggccctgtcggccgcgggatgaggaagcggaccgagcccgtcgccttggagcatgagcgctgcgccgccgcgggctcgtcctcctccggctcggccgccgcggcgctggacgccgactgccgcctgaagcagaacctacgcctgacgggcccggcggcggctgagccgcgctgcgcagccgacgcgggaatgaagcgggcgctgggcaggcgaaagggcgtgtggttgcgcctgaggaagatacttttctgtgttttggggttgtacattgccattccatttctcatcaaactatgtcctggaatacaggccaaactgattttcttgaatttcgtaagagttccctatttcattgatttgaaaaaaccacaggatcaaggtttgaatcacacgtgtaactactacctgcagccagaggaagacgtgaccattggagtctggcacaccgtccctgcagtctggtggaagaacgcccaaggcaaagaccagatgtggtatgaggatgccttggcttccagccaccctatcattctgtacctgcatgggaacgcaggtaccagaggaggcgaccaccgcgtggagctttacaaggtgctgagttcccttggttaccatgtggtcacctttgactacagaggttggggtgactcagtgggaacgccatctgagcggggcatgacctatgacgcactccacgtttttgactggatcaaagcaagaagtggtgacaaccccgtgtacatctggggccactctctgggcactggcgtggcgacaaatctggtgcggcgcctctgtgagcgagagacgcctccagatgcccttatattggaatctccattcactaatatccgcgaagaagctaagagccatccattttcagtgatatatcgatacttccctgggtttgactggttcttccttgatcctattacaagtagtggaattaaatttgcaaatgatgaaaacgtgaagcacatctcctgtcccctgctcatcctgcacgctgaggacgacccggtggtgcccttccagcttggcagaaagctctatagcatcgccgcaccagctcgaagcttccgagatttcaaagttcagtttgtgccctttcattcagaccttggctacaggcacaaatacatttacaagagccctgagctgccacggatactgagacctcagcagggcccaggttccagcccagatcccagcatgtggtcagagctggtgtgactgaagccaacaggtgacacggtcatcgaagagcagcagacaaaactaaaactaacccaaaggcagctgaaagtggagggcaggtgaattcccagccctcgccggattcaacttttgccaacggtgaagaactgccctgagctgcaaaccttacaaagtctgtaactctagataaaccataccatgtgctaactgcactgaaataaaacactaactacattataatgtca

SEQ ID NO: 443231 - DNA, 952 bp, Homo sapiens
gctggaatacaggccatagtttgatgagaaatggaatggcctgtattccaggacatagtttgatgagaaatggaatacaggccaaactgattttcttgaatttcgtaagagttccctatttcattgatttgaaaaaaccacaggatcaaggtttgaatcacacgtgtaactactacctgcagccagaggaagacgtgaccattggagtctggcacaccgtccctgcagtctggtggaagaacgcccaaggcaaagaccagatgtggtatgaggatgccttggcttccagccaccctatcattctgtacctgcatgggaacgcaggtaccagaggaggcgaccaccgcgtggagctttacaaggtgctgagttcccttggttaccatgtggtcacctttgactacagaggttggggtgactcagtgggaacgccatctgagcggggcatgacctatgacgcactccacgtttttgactggatcaaagcaagaagtggtgacaaccccgtgtacatctggggccactctctgggcactggcgtggcgacaaatctggtgcggcgcctctgtgagcgagagacgcctccagatgcccttatattggaatctccattcactaatatccgcgaagaagctaagagccatccattttcagtgatatatcgataacttacccatgggttgactgggtacttcccttgatcctatcacaacgtggtggaacttcacctttgccaactgatgaaaacgtgaagcagatctcctgttcccctggcatcctgcacggcgatgaggacgaaccagagggagacccttacacaacgtggcagaaagcgtctatagaaatcgccgaacagagagtcgaagcgctccgagatccaaagtcacgtaggggcctaaatcaaacctgggctacagccgaaaatgatggcaagagccgagtgccaggaacg

SEQ ID NO: 443232 - DNA, 624 bp, Homo sapiens
ggccagtgatgctggtgcgcgcgctccttggaactagagaggaggtggccggggcggggccgggggaggggggtagggcagagcctggcgggagcccggctgctgattggccggcctggctggcgggcccccgccgctggttcgtagccggcgcagcggcctgggctgggatgtgaggagcggcgggttccgggctccgggctctgggtggcggcggctgtgagcggcggcactgcggcgcaggccagcgggcgccgtcggcggctggccctgtcggccgcgggatgaggaagcggaccgagcccgtcgccttggagcatgagcgctgcgccgccgcgggctcgtcctcctccggctcggccgccgcggcgctggacgccgactgccgcctgaagcagaacctacgcctgacgggcccggcggcggctgagccgcgctgcgcagccgacgcgggaatgaagcgggcgctgggcaggtgaggcttcgcgcggagcggggggggggggggggccggtccctcactttgcgcaggtgcgtcccgcagggggccgcggtacctcccagcccctcccagagtggccgtccgcccgatccgcggccgcccccgtccgcgcctgtgtcccg

SEQ ID NO: 443233 - DNA, 1881 bp, Homo sapiens
  misc_feature (1828)..(1828): n is a, c, g, or t
ggccagtgatgctggtgcgcgcgctccttggaactagagaggaggtggccggggcggggccgggggaggggggtagggcagagcctggcgggagcccggctgctgattggccggcctggctggcgggcccccgccgctggttcgtagccggcgcagcggcctgggctgggatgtgaggagcggcgggttccgggctccgggctctgggtggcggcggctgtgagcggcggcactgcggcgcaggccagcgggcgccgtcggcggctggccctgtcggccgcgggatgaggaagcggaccgagcccgtcgccttggagcatgagcgctgcgccgccgcgggctcgtcctcctccggctcggccgccgcggcgctggacgccgactgccgcctgaagcagaacctacgcctgacgggcccggcggcggctgagccgcgctgcgcagccgacgcgggaatgaagcgggcgctgggcaggcgaaagggcgtgtggttgcgcctgaggaagatacttttctgtgttttggggttgtacattgccattccatttctcatcaaactatgtcctggaatacaggccaaactgattttcttgaatttcgtaagagttccctatttcattgatttgaaaaaaccacaggatcaaggtttgaatcacacgtgtaactactacctgcagccagaggaagacgtgaccattggagtctggcacaccgtccctgcagtctggtggaagaacgcccaaggcaaagaccagatgtggtatgaggatgccttggcttccagccaccctatcattctgtacctgcatgggaacgcaggtaccagaggaggcgaccaccgcgtggagctttacaaggtgctgagttcccttggttaccatgtggtcacctttgactacagaggttggggtgactcagtgggaacgccatctgagcggggcatgacctatgacgcactccacgtttttgactggatcaaagcaagaagtggtgacaaccccgtgtacatctggggccactctctgggcactggcgtggcgacaaatctggtgcggcgcctctgtgagcgagagacgcctccagatgcccttatattggaatctccattcactaatatccgcgaagaagctaagagccatccattttcagtgatatatcgatacttccctgggtttgactggttcttccttgatcctattacaagtagtggaattaaatttgcaaatgatgaaaacgtgaagcacatctcctgtcccctgctcatcctgcacgctgaggacgacccggtggtgcccttccagcttggcagaaagctctatagcatcgccgcaccagctcgaagcttccgagatttcaaagttcagtttgtgccctttcattcagaccttggctacaggcacaaatacatttacaagagccctgagctgccacggatactgagggaattcctggggaagtcggagcctgagcaccagcactgagcctggccgtgggaaggaagcatgaagacctctgccctcctcccgttttcctccagtcagcagcccggtatcctgaagccccggggggccggcacctgcaatgctcaggagcccagctcgcaccgtggtagcagcatcgcgtctagaagtcccgaggtcgggggtacggcgcccctgcgaaggcgctgtcgagtagccccgggtatggccctgaaggcatgggcgtggtagtgtgaagagcgggtggggtaggctagggcaagtgtaggcgtcgtgccctgtgaccagctcccttcgaacacgtgaagagatccttagtataggggtagaaacgttaaatggtcgangacagtgtccagcgcagtaactacctagccttggctttgaagtggcctagcga

SEQ ID NO: 443234 - DNA, 1862 bp, Homo sapiens
gagtccttggaagatccctggacgccaggcacagcagaggcgggaggcagaggggccggcgccagaccctgagagcgctggggcccactcggacctcctcctcctgctctgcatcaggccccacaccgagcgcccgggcgggcgcccctcgggctgggctgcgtgcgcggagccttactggcgccttgggccctcggcggctctccccggcgaaagggcgtgtggttgcgcctgaggaagatacttttctgtgttttggggttgtacattgccattccatttctcatcaaactatgtcctggaatacaggccaaactgattttcttgaatttcgtaagagttccctatttcattgatttgaaaaaaccacaggatcaaggtttgaatcacacgtgtaactactacctgcagccagaggaagacgtgaccattggagtctggcacaccgtccctgcagtctggtggaagaacgcccaaggcaaagaccagatgtggtatgaggatgccttggcttccagccaccctatcattctgtacctgcatgggaacgcaggtaccagaggaggcgaccaccgcgtggagctttacaaggtgctgagttcccttggttaccatgtggtcacctttgactacagaggttggggtgactcagtgggaacgccatctgagcggggcatgacctatgacgcactccacgtttttgactggatcaaagcaagaagtggtgacaaccccgtgtacatctggggccactctctgggcactggcgtggcgacaaatctggtgcggcgcctctgtgagcgagagacgcctccagatgcccttatattggaatctccattcactaatatccgcgaagaagctaagagccatccattttcagtgatatatcgatacttccctgggtttgactggttcttccttgatcctattacaagtagtggaattaaatttgcaaatgatgaaaacgtgaagcacatctcctgtcccctgctcatcctgcacgctgaggacgacccggtggtgcccttccagcttggcagaaagctctatagcatcgccgcaccagctcgaagcttccgagatttcaaagttcagtttgtgccctttcattcagaccttggctacaggcacaaatacatttacaagagccctgagctgccacggatactgagggaattcctggggaagtcggagcctgagcaccagcactgagcctggccgtgggaaggaagcatgaagacctctgccctcctcccgttttcctccagtcagcagcccggtatcctgaagccccggggggccggcacctgcaatgctcaggagcccagctcgcacctggagagcacctcagatcccaggcggggaggcccctgcaggcctgcagtgcccggaggcctgagcatggctgtgtggaaagcgtgggtggcaggcatgtggctctccttgccgcccctcaacctgagatcttgttgggagacttaatggcagcaggcagccatcactgcctgcttgatgctgcactgagctggacagggggagtccgggcaggggactcttggggctcgggaccatgctgagctttttggcaccacccacagagaacgtggggtccaggttctttctgcaccttcccagcacatgcagaatgactccagtggttccatcgtcccctcctgccctgtgtacctgcttgcctttctcagctgccccacctcccctgggctggcccactcacccacagtggaagtgcccgggatctgcacttcctcccctttcacctacctgtacacctaacctggccttagactgagctttatttaagaataaaatcgtggtggtggtccttttgtctctctgca

SEQ ID NO: 443235 - DNA, 1690 bp, Homo sapiens
cgggaggcctgaggaggccgctctttcctgatacgaggcgaaagggcgtgtggttgcgcctgaggaagatacttttctgtgttttggggttgtacattgccattccatttctcatcaaactatgtcctggaatacaggccaaactgattttcttgaatttcgtaagagttccctatttcattgatttgaaaaaaccacaggatcaaggtttgaatcacacgtgtaactactacctgcagccagaggaagacgtgaccattggagtctggcacaccgtccctgcagtctggtggaagaacgcccaaggcaaagaccagatgtggtatgaggatgccttggcttccagccaccctatcattctgtacctgcatgggaacgcaggtaccagaggaggcgaccaccgcgtggagctttacaaggtgctgagttcccttggttaccatgtggtcacctttgactacagaggttggggtgactcagtgggaacgccatctgagcggggcatgacctatgacgcactccacgtttttgactggatcaaagcaagaagtggtgacaaccccgtgtacatctggggccactctctgggcactggcgtggcgacaaatctggtgcggcgcctctgtgagcgagagacgcctccagatgcccttatattggaatctccattcactaatatccgcgaagaagctaagagccatccattttcagtgatatatcgatacttccctgggtttgactggttcttccttgatcctattacaagtagtggaattaaatttgcaaatgatgaaaacgtgaagcacatctcctgtcccctgctcatcctgcacgctgaggacgacccggtggtgcccttccagcttggcagaaagctctatagcatcgccgcaccagctcgaagcttccgagatttcaaagttcagtttgtgccctttcattcagaccttggctacaggcacaaatacatttacaagagccctgagctgccacggatactgagggaattcctggggaagtcggagcctgagcaccagcactgagcctggccgtgggaaggaagcatgaagacctctgccctcctcccgttttcctccagtcagcagcccggtatcctgaagccccggggggccggcacctgcaatgctcaggagcccagctcgcacctggagagcacctcagatcccaggcggggaggcccctgcaggcctgcagtgcccggaggcctgagcatggctgtgtggaaagcgtgggtggcaggcatgtggctctccttgccgcccctcaacctgagatcttgttgggagacttaatggcagcaggcagccatcactgcctgcttgatgctgcactgagctggacagggggagtccgggcaggggactcttggggctcgggaccatgctgagctttttggcaccacccacagagaacgtggggtccaggttctttctgcaccttcccagcacatgcagaatgactccagtggttccatcgtcccctcctgccctgtgtacctgcttgcctttctcagctgccccacctcccctgggctggcccactcacccacagtggaagtgcccgggatctgcacttcctcccctttcacctacctgtacacctaacctggccttagactgagctttatttaagaataaaatcgtggtggtggtccttttgtctctctgca

SEQ ID NO: 443236 - DNA, 2278 bp, Homo sapiens
tcccccgggctgcaggttttttttttttactttttaaaaagaatcacagccaaaataagacattaactgcaaaatccaaaatggctgcgcttaccctatgtatatgcgtccagtccggtcggggcacggcctatgctttcccggggatcttggcccgcttgcgtgcaatagcatcctccacggccttcagctgtttcagcagctcctcccgccgagacagcgtgctggccttccctgatttggtgctggcggcgccgggatccgaggctttgccgggcacgctcgtgaccttgctggagctcttggactggggtgacagctggcgcttcctgtcagccggggctgcaggggctttggagttctggcctctctgccgctctggcttcggggagcccagtctcccacctgacttccggtcccgagaacctgggtgataggtacagagtgagaccaccctcctgatgtacagggaatggctgtgtgggtggcctcaccgatgccagggactcacttctaaagcctgaggctgcttagttcaccaccttcatttttatctcgtgccgaattcggcacgagctgagccgcgctgcgcagccgacgcgggaatgaagcgggcgctgggcaggcgaaagggcgtgtggttgcgcctgaggaagatacttttctgtgttttggggttgtacattgccattccatttctcatcaaactatgtcctggaatacaggccaaactgattttcttgaatttcgtaagagttccctatttcattgatttgaaaaaaccacaggatcaaggtttgaatcacacgtgtaactactacctgcagccagaggaagacgtgaccattggagtctggcacaccgtccctgcagtctggtggaagaacgcccaaggcaaagaccagatgtggtatgaggatgccttggcttccagccaccctatcattctgtacctgcatgggaacgcaggtaccagaggaggcgaccaccgcgtggagctttacaaggtgctgagttcccttggttaccatgtggtcacctttgactacagaggttggggtgactcagtgggaacgccatctgagcggggcatgacctatgacgcactccacgtttttgactggatcaaagcaagaagtggtgacaaccccgtgtacatctggggccactctctgggcactggcgtggcgacaaatctggtgcggcgcctctgtgagcgagagacgcctccagatgcccttatattggaatctccattcactaatatccgcgaagaagctaagagccatccattttcagtgatatatcgatacttccctgggtttgactggttcttccttgatcctattacaagtagtggaattaaatttgcaaatgatgaaaacgtgaagcacatctcctgtcccctgctcatcctgcacgctgaggacgacccggtggtgcccttccagcttggcagaaagctctatagcatcgccgcaccagctcgaagcttccgagatttcaaagttcagtttgtgccctttcattcagaccttggctacaggcacaaatacatttacaagagccctgagctgccacggatactgagggaattcctggggaagtcggagcctgagcaccagcactgagcctggccgtgggaaggaagcatgaagacctctgccctcctcccgttttcctccagtcagcagcccggtatcctgaagccccggggggccggcacctgcaatgctcaggagcccagctcgcacctggagagcacctcagatcccaggcggggaggcccctgcaggcctgcagtgcccggaggcctgagcatggctgtgtggaaagcgtgggtggcaggcatgtggctctccttgccgcccctcaacctgagatcttgttgggagacttaatggcagcaggcagccatcactgcctgcttgatgctgcactgagctggacagggggagtccgggcaggggactcttggggctcgggaccatgctgagctttttggcaccacccacagagaacgtggggtccaggttctttctgcaccttcccagcacatgcagaatgactccagtggttccatcgtcccctcctgccctgtgtacctgcttgcctttctcagctgccccacctcccctgggctggcccactcacccacagtggaagtgcccgggatctgcacttcctcccctttcacctacctgtacacctaacctggccttagactgagctttatttaagaataaaatcgtggtggtggtccttttgtctctctgca

SEQ ID NO: 443237 - DNA, 2008 bp, Homo sapiens
ggccagtgatgctggtgcgcgcgctccttggaactagagaggaggtggccggggcggggccgggggaggggggtagggcagagcctggcgggagcccggctgctgattggccggcctggctggcgggcccccgccgctggttcgtagccggcgcagcggcctgggctgggatgtgaggagcggcgggttccgggctccgggctctgggtggcggcggctgtgagcggcggcactgcggcgcaggccagcgggcgccgtcggcggctggccctgtcggccgcgggatgaggaagcggaccgagcccgtcgccttggagcatgagcgctgcgccgccgcgggctcgtcctcctccggctcggccgccgcggcgctggacgccgactgccgcctgaagcagaacctacgcctgacgggcccggcggcggctgagccgcgctgcgcagccgacgcgggaatgaagcgggcgctgggcaggcgaaagggcgtgtggttgcgcctgaggaagatacttttctgtgttttggggttgtacattgccattccatttctcatcaaactatgtcctggaatacaggccaaactgattttcttgaatttcgtaagagttccctatttcattgatttgaaaaaaccacaggatcaaggtttgaatcacacgtgtaactactacctgcagccagaggaagacgtgaccattggagtctgaggaggcgaccaccgcgtggagctttacaaggtgctgagttcccttggttaccatgtggtcacctttgactacagaggttggggtgactcagtgggaacgccatctgagcggggcatgacctatgacgcactccacgtttttgactggatcaaagcaagaagtggtgacaaccccgtgtacatctggggccactctctgggcactggcgtggcgacaaatctggtgcggcgcctctgtgagcgagagacgcctccagatgcccttatattggaatctccattcactaatatccgcgaagaagctaagagccatccattttcagtgatatatcgatacttccctgggtttgactggttcttccttgatcctattacaagtagtggaattaaatttgcaaatgatgaaaacgtgaagcacatctcctgtcccctgctcatcctgcacgctgaggacgacccggtggtgcccttccagcttggcagaaagctctatagcatcgccgcaccagctcgaagcttccgagatttcaaagttcagtttgtgccctttcattcagaccttggctacaggcacaaatacatttacaagagccctgagctgccacggatactgagggaattcctggggaagtcggagcctgagcaccagcactgagcctggccgtgggaaggaagcatgaagacctctgccctcctcccgttttcctccagtcagcagcccggtatcctgaagccccggggggccggcacctgcaatgctcaggagcccagctcgcacctggagagcacctcagatcccaggcggggaggcccctgcaggcctgcagtgcccggaggcctgagcatggctgtgtggaaagcgtgggtggcaggcatgtggctctccttgccgcccctcaacctgagatcttgttgggagacttaatggcagcaggcagccatcactgcctgcttgatgctgcactgagctggacagggggagtccgggcaggggactcttggggctcgggaccatgctgagctttttggcaccacccacagagaacgtggggtccaggttctttctgcaccttcccagcacatgcagaatgactccagtggttccatcgtcccctcctgccctgtgtacctgcttgcctttctcagctgccccacctcccctgggctggcccactcacccacagtggaagtgcccgggatctgcacttcctcccctttcacctacctgtacacctaacctggccttagactgagctttatttaagaataaaatcgtggtggtggtccttttgtctctctgca

SEQ ID NO: 443238 - DNA, 1499 bp, Homo sapiens
tgatgactcactgctgggctgctggaaagataattgcactccacctttgctggagactgggggagggacccttgggaggttgtaattttggggggcagagatggtagtgttttctgttatggaaacaagatgctaattagaccctaaggggaaacagcccctttccccttcctgggtcatggttgccttgaacccagaaatgccctccctgttctgggagcctccggactccactccctgtcctgcccctgaccaagccttcggcgttgaggaggttggggtgactcagtgggaacgccatctgagcggggcatgacctatgacgcactccacgtttttgactggatcaaagcaagaagtggtgacaaccccgtgtacatctggggccactctctgggcactggcgtggcgacaaatctggtgcggcgcctctgtgagcgagagacgcctccagatgcccttatattggaatctccattcactaatatccgcgaagaagctaagagccatccattttcagtgatatatcgatacttccctgggtttgactggttcttccttgatcctattacaagtagtggaattaaatttgcaaatgatgaaaacgtgaagcacatctcctgtcccctgctcatcctgcacgctgaggacgacccggtggtgcccttccagcttggcagaaagctctatagcatcgccgcaccagctcgaagcttccgagatttcaaagttcagtttgtgccctttcattcagaccttggctacaggcacaaatacatttacaagagccctgagctgccacggatactgagggaattcctggggaagtcggagcctgagcaccagcactgagcctggccgtgggaaggaagcatgaagacctctgccctcctcccgttttcctccagtcagcagcccggtatcctgaagccccggggggccggcacctgcaatgctcaggagcccagctcgcacctggagagcacctcagatcccaggcggggaggcccctgcaggcctgcagtgcccggaggcctgagcatggctgtgtggaaagcgtgggtggcaggcatgtggctctccttgccgcccctcaacctgagatcttgttgggagacttaatggcagcaggcagccatcactgcctgcttgatgctgcactgagctggacagggggagtccgggcaggggactcttggggctcgggaccatgctgagctttttggcaccacccacagagaacgtggggtccaggttctttctgcaccttcccagcacatgcagaatgactccagtggttccatcgtcccctcctgccctgtgtacctgcttgcctttctcagctgccccacctcccctgggctggcccactcacccacagtggaagtgcccgggatctgcacttcctcccctttcacctacctgtacacctaacctggccttagactgagctttatttaagaataaaatcgtggtggtggtccttttgtctctctgca

SEQ ID NO: 443239 - DNA, 1560 bp, Homo sapiens
gtacccacctgggcctgagtgcagagcccaagcctgagggtgaggccttggcagtagtgacaagggcagtgtgtggaatggaccaacccccggcctcctctgtactgccctgggccctatgcaggttgctgcccagactcgcctacctgcctgtcagaggacacaggcccccaccccactgcctggctgtgtggccttgggcaagatgctaaccctccctgtgcatgggacaaggcttctgagccgaggagggcatgtggtacttcgaccctaagcactggacccacggaggggctgctgctaatggtgatagagttttttgttgtgttgtgccagtcagctccaaaaagtaggtcaaggtgccagtttctccctgcaggggactgaaattggtggcctgaattgcctcccagtgctgtatatcccgtgagtaattctactgcaaacttctgcttttctccagttgcctttggaagttccagaggcaaaactgtgtccctttagcacaggtacctgggttgctaagggggcagtgggctcagagtatgggtttgctttgcggttataattttccccattataaaaggaagatatgtgtagaaaatttagaccagagaatagctctgaagttgagggtcaagaatcagagaccttgtctccatgcctgtgtgttgggctttgacttggcaccacactgcttgttccctgcctaactcactgagtgctgctctgggctacagcgcatcctcatggggctcttggctgcctcctctctgcacagcctctgcttccttagatagcagtgtgaggactgtggagaaggatctttggtctgagctcaaatgattggctcctgattgtcctgtggtctagggaattcctggggaagtcggagcctgagcaccagcactgagcctggccgtgggaaggaagcatgaagacctctgccctcctcccgttttcctccagtcagcagcccggtatcctgaagccccggggggccggcacctgcaatgctcaggagcccagctcgcacctggagagcacctcagatcccaggcggggaggcccctgcaggcctgcagtgcccggaggcctgagcatggctgtgtggaaagcgtgggtggcaggcatgtggctctccttgccgcccctcaacctgagatcttgttgggagacttaatggcagcaggcagccatcactgcctgcttgatgctgcactgagctggacagggggagtccgggcaggggactcttggggctcgggaccatgctgagctttttggcaccacccacagagaacgtggggtccaggttctttctgcaccttcccagcacatgcagaatgactccagtggttccatcgtcccctcctgccctgtgtacctgcttgcctttctcagctgccccacctcccctgggctggcccactcacccacagtggaagtgcccgggatctgcacttcctcccctttcacctacctgtacacctaacctggccttagactgagctttatttaagaataaaatcgtggtggtggtccttttgtctctctgca

SEQ ID NO: 443240 - DNA, 2128 bp, Homo sapiens
ggccagtgatgctggtgcgcgcgctccttggaactagagaggaggtggccggggcggggccgggggaggggggtagggcagagcctggcgggagcccggctgctgattggccggcctggctggcgggcccccgccgctggttcgtagccggcgcagcggcctgggctgggatgtgaggagcggcgggttccgggctccgggctctgggtggcggcggctgtgagcggcggcactgcggcgcaggccagcgggcgccgtcggcggctggccctgtcggccgcgggatgaggaagcggaccgagcccgtcgccttggagcatgagcgctgcgccgccgcgggctcgtcctcctccggctcggccgccgcggcgctggacgccgactgccgcctgaagcagaacctacgcctgacgggcccggcggcggctgagccgcgctgcgcagccgacgcgggaatgaagcgggcgctgggcaggcgaaagggcgtgtggttgcgcctgaggaagatacttttctgtgttttggggttgtacattgccattccatttctcatcaaactatgtcctggaatacaggccaaactgattttcttgaatttcgtaagagttccctatttcattgatttgaaaaaaccacaggatcaaggtttgaatcacacgtgtaactactacctgcagccagaggaagacgtgaccattggagtctggcacaccgtccctgcagtctggtggaagaacgcccaaggcaaagaccagatgtggtatgaggatgccttggcttccagccaccctatcattctgtacctgcatgggaacgcaggtaccagaggaggcgaccaccgcgtggagctttacaaggtgctgagttcccttggttaccatgtggtcacctttgactacagaggttggggtgactcagtgggaacgccatctgagcggggcatgacctatgacgcactccacgtttttgactggatcaaagcaagaagtggtgacaaccccgtgtacatctggggccactctctgggcactggcgtggcgacaaatctggtgcggcgcctctgtgagcgagagacgcctccagatgcccttatattggaatctccattcactaatatccgcgaagaagctaagagccatccattttcagtgatatatcgatacttccctgggtttgactggttcttccttgatcctattacaagtagtggaattaaatttgcaaatgatgaaaacgtgaagcacatctcctgtcccctgctcatcctgcacgctgaggacgacccggtggtgcccttccagcttggcagaaagctctatagcatcgccgcaccagctcgaagcttccgagatttcaaagttcagtttgtgccctttcattcagaccttggctacaggcacaaatacatttacaagagccctgagctgccacggatactgagggaattcctggggaagtcggagcctgagcaccagcactgagcctggccgtgggaaggaagcatgaagacctctgccctcctcccgttttcctccagtcagcagcccggtatcctgaagccccggggggccggcacctgcaatgctcaggagcccagctcgcacctggagagcacctcagatcccaggcggggaggcccctgcaggcctgcagtgcccggaggcctgagcatggctgtgtggaaagcgtgggtggcaggcatgtggctctccttgccgcccctcaacctgagatcttgttgggagacttaatggcagcaggcagccatcactgcctgcttgatgctgcactgagctggacagggggagtccgggcaggggactcttggggctcgggaccatgctgagctttttggcaccacccacagagaacgtggggtccaggttctttctgcaccttcccagcacatgcagaatgactccagtggttccatcgtcccctcctgccctgtgtacctgcttgcctttctcagctgccccacctcccctgggctggcccactcacccacagtggaagtgcccgggatctgcacttcctcccctttcacctacctgtacacctaacctggccttagactgagctttatttaagaataaaatcgtggtggtggtccttttgtctctctgca

SEQ ID NO: 443241 - DNA, 2082 bp, Homo sapiens
ggccagtgatgctggtgcgcgcgctccttggaactagagaggaggtggccggggcggggccgggggaggggggtagggcagagcctggcgggagcccggctgctgattggccggcctggctggcgggcccccgccgctggttcgtagccggcgcagcggcctgggctgggatgtgaggagcggcgggttccgggctccgggctctgggtggcggcggctgtgagcggcggcactgcggcgcaggccagcgggcgccgtcggcggctggccctgtcggccgcgggatgaggaagcggaccgagcccgtcgccttggagcatgagcgctgcgccgccgcgggctcgtcctcctccggctcggccgccgcggcgctggacgccgactgccgcctgaagcagaacctacgcctgacgggcccggcggcggctgagccgcgctgcgcagccgacgcgggaatgaagcgggcgctgggcaggcgaaagggcgtgtggttgcgcctgaggaagatacttttctgtgttttggggttgtacattgccattccatttctcatcaaactatgtcctggaatacaggccaaactgattttcttgaatttcgtaagagttccctatttcattgatttgaaaaaaccacaggatcaaggtttgaatcacacgtgtaactactacctgcagccagaggaagacgtgaccattggagtctggcacaccgtccctgcagtctggtggaagaacgcccaaggcaaagaccagatgtggtatgaggatgccttggcttccagccaccctatcattctgtacctgcatgggaacgcaggtaccagaggaggcgaccaccgcgtggagctttacaaggttggggtgactcagtgggaacgccatctgagcggggcatgacctatgacgcactccacgtttttgactggatcaaagcaagaagtggtgacaaccccgtgtacatctggggccactctctgggcactggcgtggcgacaaatctggtgcggcgcctctgtgagcgagagacgcctccagatgcccttatattggaatctccattcactaatatccgcgaagaagctaagagccatccattttcagtgatatatcgatacttccctgggtttgactggttcttccttgatcctattacaagtagtggaattaaatttgcaaatgatgaaaacgtgaagcacatctcctgtcccctgctcatcctgcacgctgaggacgacccggtggtgcccttccagcttggcagaaagctctatagcatcgccgcaccagctcgaagcttccgagatttcaaagttcagtttgtgccctttcattcagaccttggctacaggcacaaatacatttacaagagccctgagctgccacggatactgagggaattcctggggaagtcggagcctgagcaccagcactgagcctggccgtgggaaggaagcatgaagacctctgccctcctcccgttttcctccagtcagcagcccggtatcctgaagccccggggggccggcacctgcaatgctcaggagcccagctcgcacctggagagcacctcagatcccaggcggggaggcccctgcaggcctgcagtgcccggaggcctgagcatggctgtgtggaaagcgtgggtggcaggcatgtggctctccttgccgcccctcaacctgagatcttgttgggagacttaatggcagcaggcagccatcactgcctgcttgatgctgcactgagctggacagggggagtccgggcaggggactcttggggctcgggaccatgctgagctttttggcaccacccacagagaacgtggggtccaggttctttctgcaccttcccagcacatgcagaatgactccagtggttccatcgtcccctcctgccctgtgtacctgcttgcctttctcagctgccccacctcccctgggctggcccactcacccacagtggaagtgcccgggatctgcacttcctcccctttcacctacctgtacacctaacctggccttagactgagctttatttaagaataaaatcgtggtggtggtccttttgtctctctgca

SEQ ID NO: 443242 - DNA, 2138 bp, Homo sapiens
ggccagtgatgctggtgcgcgcgctccttggaactagagaggaggtggccggggcggggccgggggaggggggtagggcagagcctggcgggagcccggctgctgattggccggcctggctggcgggcccccgccgctggttcgtagccggcgcagcggcctgggctgggatgtgaggagcggcgggttccgggctccgggctctgggtggcggcggctgtgagcggcggcactgcggcgcaggccagcgggcgccgtcggcggctggccctgtcggccgcgggatgaggaagcggaccgagcccgtcgccttggagcatgagcgctgcgccgccgcgggctcgtcctcctccggctcggccgccgcggcgctggacgccgactgccgcctgaagcagaacctacgcctgacgggcccggcggcggctgagccgcgctgcgcagccgacgcgggaatgaagcgggcgctgggcaggcgaaagggcgtgtggttgcgcctgaggaagatacttttctgtgttttggggttgtacattgccattccatttctcatcaaactatgtcctggaatacaggccaaactgattttcttgaatttcgtaagagttccctatttcattgatttgaaaaaaccacaggatcaaggtttgaatcacacgtgtaactactacctgcagccagaggaagacgtgaccattggagtctggcacaccgtccctgcagtctggtggaagaacgcccaaggcaaagaccagatgtggtatgaggatgccttggcttccagccaccctatcattctgtacctgcatgggaacgcaggtaccagaagggaggcggaccaccggggtgagcctttaccagggtgctggagttcccttgggtttaccattgtggtcaccttttgactccggaggttggggtgactcagtgggaacgccatctgagcggggcatgacctatgacgcactccacgtttttgactggatcaaagcaagaagtggtgacaaccccgtgtacatctggggccactctctgggcactggcgtggcgacaaatctggtgcggcgcctctgtgagcgagagacgcctccagatgcccttatattggaatctccattcactaatatccgcgaagaagctaagagccatccattttcagtgatatatcgatacttccctgggtttgactggttcttccttgatcctattacaagtagtggaattaaatttgcaaatgatgaaaacgtgaagcacatctcctgtcccctgctcatcctgcacgctgaggacgacccggtggtgcccttccagcttggcagaaagctctatagcatcgccgcaccagctcgaagcttccgagatttcaaagttcagtttgtgccctttcattcagaccttggctacaggcacaaatacatttacaagagccctgagctgccacggatactgagggaattcctggggaagtcggagcctgagcaccagcactgagcctggccgtgggaaggaagcatgaagacctctgccctcctcccgttttcctccagtcagcagcccggtatcctgaagccccggggggccggcacctgcaatgctcaggagcccagctcgcacctggagagcacctcagatcccaggcggggaggcccctgcaggcctgcagtgcccggaggcctgagcatggctgtgtggaaagcgtgggtggcaggcatgtggctctccttgccgcccctcaacctgagatcttgttgggagacttaatggcagcaggcagccatcactgcctgcttgatgctgcactgagctggacagggggagtccgggcaggggactcttggggctcgggaccatgctgagctttttggcaccacccacagagaacgtggggtccaggttctttctgcaccttcccagcacatgcagaatgactccagtggttccatcgtcccctcctgccctgtgtacctgcttgcctttctcagctgccccacctcccctgggctggcccactcacccacagtggaagtgcccgggatctgcacttcctcccctttcacctacctgtacacctaacctggccttagactgagctttatttaagaataaaatcgtggtggtggtccttttgtctctctgca

SEQ ID NO: 443243 - DNA, 2248 bp, Homo sapiens
ggccagtgatgctggtgcgcgcgctccttggaactagagaggaggtggccggggcggggccgggggaggggggtagggcagagcctggcgggagcccggctgctgattggccggcctggctggcgggcccccgccgctggttcgtagccggcgcagcggcctgggctgggatgtgaggagcggcgggttccgggctccgggctctgggtggcggcggctgtgagcggcggcactgcggcgcaggccagcgggcgccgtcggcggctggccctgtcggccgcgggatgaggaagcggaccgagcccgtcgccttggagcatgagcgctgcgccgccgcgggctcgtcctcctccggctcggccgccgcggcgctggacgccgactgccgcctgaagcagaacctacgcctgacgggcccggcggcggctgagccgcgctgcgcagccgacgcgggaatgaagcgggcgctgggcaggcgaaagggcgtgtggttgcgcctgaggaagatacttttctgtgttttggggttgtacattgccattccatttctcatcaaactatgtcctggaatacaggccaaactgattttcttgaatttcggtccctgtgccccttcccagctggaggactttctgtgctagtgttgctccccagcactggatttctgtccacagaagactacactgccctgggggaccagcgtatctgtcttcagctgagtaagagttccctatttcattgatttgaaaaaaccacaggatcaaggtttgaatcacacgtgtaactactacctgcagccagaggaagacgtgaccattggagtctggcacaccgtccctgcagtctggtggaagaacgcccaaggcaaagaccagatgtggtatgaggatgccttggcttccagccaccctatcattctgtacctgcatgggaacgcaggtaccagaggaggcgaccaccgcgtggagctttacaaggtgctgagttcccttggttaccatgtggtcacctttgactacagaggttggggtgactcagtgggaacgccatctgagcggggcatgacctatgacgcactccacgtttttgactggatcaaagcaagaagtggtgacaaccccgtgtacatctggggccactctctgggcactggcgtggcgacaaatctggtgcggcgcctctgtgagcgagagacgcctccagatgcccttatattggaatctccattcactaatatccgcgaagaagctaagagccatccattttcagtgatatatcgatacttccctgggtttgactggttcttccttgatcctattacaagtagtggaattaaatttgcaaatgatgaaaacgtgaagcacatctcctgtcccctgctcatcctgcacgctgaggacgacccggtggtgcccttccagcttggcagaaagctctatagcatcgccgcaccagctcgaagcttccgagatttcaaagttcagtttgtgccctttcattcagaccttggctacaggcacaaatacatttacaagagccctgagctgccacggatactgagggaattcctggggaagtcggagcctgagcaccagcactgagcctggccgtgggaaggaagcatgaagacctctgccctcctcccgttttcctccagtcagcagcccggtatcctgaagccccggggggccggcacctgcaatgctcaggagcccagctcgcacctggagagcacctcagatcccaggcggggaggcccctgcaggcctgcagtgcccggaggcctgagcatggctgtgtggaaagcgtgggtggcaggcatgtggctctccttgccgcccctcaacctgagatcttgttgggagacttaatggcagcaggcagccatcactgcctgcttgatgctgcactgagctggacagggggagtccgggcaggggactcttggggctcgggaccatgctgagctttttggcaccacccacagagaacgtggggtccaggttctttctgcaccttcccagcacatgcagaatgactccagtggttccatcgtcccctcctgccctgtgtacctgcttgcctttctcagctgccccacctcccctgggctggcccactcacccacagtggaagtgcccgggatctgcacttcctcccctttcacctacctgtacacctaacctggccttagactgagctttatttaagaataaaatcgtggtggtggtccttttgtctctctgca

SEQ ID NO: 443244 - DNA, 1962 bp, Homo sapiens
ggccagtgatgctggtgcgcgcgctccttggaactagagaggaggtggccggggcggggccgggggaggggggtagggcagagcctggcgggagcccggctgctgattggccggcctggctggcgggcccccgccgctggttcgtagccggcgcagcggcctgggctgggatgtgaggagcggcgggttccgggctccgggctctgggtggcggcggctgtgagcggcggcactgcggcgcaggccagcgggcgccgtcggcggctggccctgtcggccgcgggatgaggaagcggaccgagcccgtcgccttggagcatgagcgctgcgccgccgcgggctcgtcctcctccggctcggccgccgcggcgctggacgccgactgccgcctgaagcagaacctacgcctgacgggcccggcggcggctgagccgcgctgcgcagccgacgcgggaatgaagcgggcgctgggcaggcgaaagggcgtgtggttgcgcctgaggaagatacttttctgtgttttggggttgtacattgccattccatttctcatcaaactatgtcctggaatacaggccaaactgattttcttgaatttcgtaagagttccctatttcattgatttgaaaaaaccacaggatcaaggtttgaatcacacgtgtaactactacctgcagccagaggaagacgtgaccattggagtctgaggaggcgaccaccgcgtggagctttacaaggttggggtgactcagtgggaacgccatctgagcggggcatgacctatgacgcactccacgtttttgactggatcaaagcaagaagtggtgacaaccccgtgtacatctggggccactctctgggcactggcgtggcgacaaatctggtgcggcgcctctgtgagcgagagacgcctccagatgcccttatattggaatctccattcactaatatccgcgaagaagctaagagccatccattttcagtgatatatcgatacttccctgggtttgactggttcttccttgatcctattacaagtagtggaattaaatttgcaaatgatgaaaacgtgaagcacatctcctgtcccctgctcatcctgcacgctgaggacgacccggtggtgcccttccagcttggcagaaagctctatagcatcgccgcaccagctcgaagcttccgagatttcaaagttcagtttgtgccctttcattcagaccttggctacaggcacaaatacatttacaagagccctgagctgccacggatactgagggaattcctggggaagtcggagcctgagcaccagcactgagcctggccgtgggaaggaagcatgaagacctctgccctcctcccgttttcctccagtcagcagcccggtatcctgaagccccggggggccggcacctgcaatgctcaggagcccagctcgcacctggagagcacctcagatcccaggcggggaggcccctgcaggcctgcagtgcccggaggcctgagcatggctgtgtggaaagcgtgggtggcaggcatgtggctctccttgccgcccctcaacctgagatcttgttgggagacttaatggcagcaggcagccatcactgcctgcttgatgctgcactgagctggacagggggagtccgggcaggggactcttggggctcgggaccatgctgagctttttggcaccacccacagagaacgtggggtccaggttctttctgcaccttcccagcacatgcagaatgactccagtggttccatcgtcccctcctgccctgtgtacctgcttgcctttctcagctgccccacctcccctgggctggcccactcacccacagtggaagtgcccgggatctgcacttcctcccctttcacctacctgtacacctaacctggccttagactgagctttatttaagaataaaatcgtggtggtggtccttttgtctctctgca

SEQ ID NO: 443245 - DNA, 4244 bp, Homo sapiens
  misc_feature (446)..(446): n is a, c, g, or t
  misc_feature (578)..(578): n is a, c, g, or t
  misc_feature (593)..(593): n is a, c, g, or t
atggcggcgggctcggatctgctggacgaggtcttcttcaacagcgaggtggacgagaaagtgggcccgcgccgcccgccgcgaagctgaggccgccgcccgagggcagcgcgggggcctgcgccccggtgcccgccgccgccgccgtcgccgcggggcccgagcccgcccccgccggccccgccaagcccgccggccccgccgcgctggccgcccgcgccggccccggccccgggcccggccccggccccggccccggccctggcaagcccgccggccccggcgccgcgcaaactttgaatgggagcgccgcgctgctgaactcgcaccacgccgccgcacctgctgtcagcctggtcaacaacgggcccgccgcgctgctgccgctgcccaagcccgccgcccccgccgccgccccgcccccgccaccccccgcgcccgccacnctggcccggccgcccggccaccccgccggacccccgaccgccgcgcccgccgtgccgccccccgccgccgcccagaacgggggcagcgccggggcagcccccgcccccgccccggccgccgggggccccgcnggggtcagcggccancccgggcccggcgcggcggctgcggcgccggcgccgggggtcaaggccgagtcgcccaagagggtggtgcaggcggcgcccccggcggcgcagaccctggcggccagcggcccggccagcacggcggccagcatggtcatcgggccaactatgcaaggggcgctgcccagcccggccgccgtcccgccgcccgcccccgggacccccaccgggctgcccaaaggcgcggccggcgcagtgacccagagcctgtcccggacgcccacggccaccaccagcgggattcgggccaccctgacgcccaccgtgctggccccccgcttgccgcagccgcctcagaacccgaccaacatccagaacttccagctgcccccaggaatggtcctcgtccgaagtgagaatgggcagttgttaatgattcctcagcaggccttggcccagatgcaggcgcaggcccatgcccagcctcagaccaccatggcgcctcgccctgccacccccacaagtgcccctcccgtccagatctccaccgtacaggcacctggaacacctatcattgcacggcaggtgaccccaactaccataattaagcaagtgtctcaggcccagacaacggtgcagcccagtgcaaccctgcagcgctcgcccggcgtccagcctcagctcgttctgggtggcgctgcccagacggcttcacttgggacggcgacggctgttcagacggggactcctcagcgcacggtaccaggggcgaccaccacttcctcagctgccacggaaactatggaaaacgtgaagaaatgtaaaaatttcctatctacgttaataaaactggcttcatctggcaagcagtctacagagacagcagctaatgtgaaagagctcgtgcagaatttactggatggaaaaatagaagcagaagatttcacaagcaggttataccgagaacttaattcttcacctcaaccttaccttgtgcctttcctgaagaggagcttacccgccttgagacagctgacccccgactccgcggccttcatccagcagagccagcagcagccgccaccgcccacctcgcaggccaccactgcgctcacggccgtggtgctgagtagctcggtccagcgcacggccgggaagacggcggccaccgtgaccagtgccctccagccccctgtgctcagcctcacgcagcccacgcaggtcggcgtcggcaagcaggggcaacccacaccgctggtcatccagcagcctccgaagccaggagccctgatccggcccccgcaggtgacgttgacgcagacacccatggtcgccctgcggcagcctcacaaccggatcatgctcaccacgcctcagcagatccagctgaacccactgcagccagtccctgtggtgaaacccgccgtgttacctggaaccaaagccctttctgctgtctcggcacaagcagctgctgcacagaaaaataaactcaaggagcctgggggaggttcgtttcgggacgatgatgacattaatgatgttgcatcgatggctggagtaaacttgtcagaagaaagtgcaagaatattagccacgaactctgaattggtgggcacgctaacgcggtcctgtaaagatgaaaccttcctcctccaagcgcctttgcagagaagaatattagaaataggtaaaaaacatggtataacggaattacatccagatgtagtaagttatgtatcacatgccacgcaacaaaggctacagaatcttgtagagaaaatatcagaaacagctcagcagaagaacttttcttacaaggatgacgacagatatgagcaggcgagtgacgtccgggcacagctcaagttttttgaacagcttgatcaaatcgaaaagcagaggaaggatgagcaggagcgggagatcctgatgagggcagcaaagtctcggtcaagacaagaagatccagaacagttaaggctgaaacagaaggcaaaggagatgcagcaacaggaactggcacaaatgagacagcgggacgccaacctcacagcactagcagcgatcgggcccaggaaaaagaggaaagtggactgtccggggccgggctcaggagcagaggggtcgggccccggctcagtggtcccaggcagctcgggtgtcggaacccccagacagttcacgcgacaaagaatcacgcgggtcaacctcagggacctcatattttgtttagaaaatgaacgtgagacaagccattcactgctgctctacaaagcattccttaagtgacacaggaggacgcctggggactttttatatatttgcagattacgcctttttgtaacgagcaaatgggatattgtttaaaaaacagccacctctttacaatggaacagttttatattcctgtttctaaatcagctcttcagtgtgaaagaaaacacgtttctgtaacagagagaacacaaaggcctgtggatactcttaaaggacaattaaatcttaactcatcttgattgagtggccttcctgccaaacaagccatatataaagactgatggaatcgttagcaaataattagctgccctctgtcaactcatagcagtttctgcattatttgtgcattttggtttagttctacctaacttactatgtaggtgtatgtctacagccgatgacctcatttcgtttattttatttttgtaatagtcagttggcaaagcaaactgattttttagactatttatcttccttcccttcccctcccaccccgctctcctctctgccccctgccctcccctcccctcccttcccctccactccgctgagaatcctggaggaatacacaattcatcgttgcacccccacctcagagtgtaatcgcatttctgcttggtagaggccgagcccagcaaaggtggctccttctgaatgtgtggtcagcatctgtacaaatgcattttatttgctatagtttgtaaagctgtaaagttaaaagagatgaaaaccttttcagcataaatatattttacttgcactgtgttttttagctaaaagtgaaaacctagattaaataaaatcaaagttgagaagaatcatcaaaagactgtttctcggtgtgaatcaagtgttgaaaaatggttggtgtattttgtcagtaattgtacataacttttggcacatgacatagaaatggctatgtaaactataattattttgctaagagactgtatgcaagccttgggccgactttacagacgtccagagcaaagccccttctttgtacctatttttttattacaaatatactaattggttctttctattttcagaggttattgtatgaaattgtctattgatagtacttttatgactgtaaatactctggctttctccgtgtgaattctcacattagactttaattcgagcgcgtgtgaactgaacgctgatcagtattttttatcaacacctgagaactgttacaccttttattttgtcttttaggaaatccctgtctttccattttttcatgtaaattttgcacagttacttgttcatatgtaaatattttactttcagaaatgaagtttttaattgctattgttttatataggattgaaagaaaattaactcctttattaaaaacaaatttatctgtaaaaaatt

SEQ ID NO: 443246 - DNA, 4057 bp, Homo sapiens
  misc_feature (831)..(831): n is a, c, g, or t
  misc_feature (963)..(963): n is a, c, g, or t
  misc_feature (978)..(978): n is a, c, g, or t
atggcggcgggctcggatctgctggacgaggtcttcttcaacagcgaggtggacgagaaagtggtgagcgacctggtgggctcgctggagtcgcagctggcggccagcgcggcccaccaccaccacctcgcgccgcgcacgcccgaggtgcgggccgcggccgccggcgcgctcgggaaccatgttgtgagcggcagcccggccggagccgcgggcgcagggccggccgcccccgccgagggcgcgcccggagcggcgccggagccgccccccgcaggtagagcgcggccggggggcggggggccgcagcgcccgggccccccctcaccgcgccgcccccttgtccccgcagggcccgcgccgcccgccgcgaagctgaggccgccgcccgagggcagcgcgggggcctgcgccccggtgcccgccgccgccgccgtcgccgcggggcccgagcccgcccccgccggccccgccaagcccgccggccccgccgcgctggccgcccgcgccggccccggccccgggcccggccccggccccggccccggccctggcaagcccgccggccccggcgccgcgcaaactttgaatgggagcgccgcgctgctgaactcgcaccacgccgccgcacctgctgtcagcctggtcaacaacgggcccgccgcgctgctgccgctgcccaagcccgccgcccccggcactgtcatccagacgccccccttcgtgggcgccgccgcgccccccgcgcccgccgcgccctcgccccccgccgcccccgcgcccgccgcccccgccgccgccccgcccccgccaccccccgcgcccgccacnctggcccggccgcccggccaccccgccggacccccgaccgccgcgcccgccgtgccgccccccgccgccgcccagaacgggggcagcgccggggcagcccccgcccccgccccggccgccgggggccccgcnggggtcagcggccancccgggcccggcgcggcggctgcggcgccggcgccgggggtcaaggccgagtcgcccaagagggtggtgcaggcggcgcccccggcggcgcagaccctggcggccagcggcccggccagcacggcggccagcatggtcatcgggccaactatgcaaggggcgctgcccagcccggccgccgtcccgccgcccgcccccgggacccccaccgggctgcccaaaggcgcggccggcgcagtgacccagagcctgtcccggacgcccacggccaccaccagcgggattcgggccaccctgacgcccaccgtgctggccccccgcttgccgcagccgcctcagaacccgaccaacatccagaacttccagctgcccccaggaatggtcctcgtccgaagtgagaatgggcagttgttaatgattcctcagcaggccttggcccagatgcaggcgcaggcccatgcccagcctcagaccaccatggcgcctcgccctgccacccccacaagtgcccctcccgtccagatctccaccgtacaggcacctggaacacctatcattgcacggcaggtgaccccaactaccataattaagcaagtgtctcaggcccagacaacggtgcagcccagtgcaaccctgcagcgctcgcccggcgtccagcctcagctcgttctgggtggcgctgcccagacggcttcacttgggacggcgacggctgttcagacggggactcctcagcgcacggtaccaggggcgaccaccacttcctcagctgccacggaaactatggaaaacgtgaagaaatgtaaaaatttcctatctacgttaataaaactggcttcatctggcaagcagtctacagagacagcagctaatgtgaaagagctcgtgcagaatttactggatggaaaaatagaagcagaagatttcacaagcaggttataccgagaacttaattcttcacctcaaccttaccttgtgcctttcctgaagaggagcttacccgccttgagacagctgacccccgactccgcggccttcatccagcagagccagcagcagccgccaccgcccacctcgcaggccaccactgcgctcacggccgtggtgctgagtagctcggtccagcgcacggccgggaagacggcggccaccgtgaccagtgccctccagccccctgtgctcagcctcacgcagcccacgcaggtcggcgtcggcaagcaggggcaacccacaccgctggtcatccagcagcctccgaagccaggagccctgatccggcccccgcaggtgacgttgacgcagacacccatggtcgccctgcggcagcctcacaaccggatcatgctcaccacgcctcagcagatccagctgaacccactgcagccagtccctgtggtgaaacccgccgtgttacctggaaccaaagccctttctgctgtctcggcacaagcagctgctgcacagaaaaataaactcaaggagcctgggggaggttcgtttcgggacgatgatgacattaatgatgttgcatcgatggctggagtaaacttgtcagaagaaagtgcaagaatattagccacgaactctgaattggtgggcacgctaacgcggtcctgtaaagatgaaaccttcctcctccaagcgcctttgcagagaagaatattagaaataggtaaaaaacatggtataacggaattacatccagatgtagtaagttatgtatcacatgccacgcaacaaaggctacagaatcttgtagagaaaatatcagaaacagctcagcagaagaacttttcttacaaggatgacgacagatatgagcaggcgagtgacgtccgggcacagctcaagttttttgaacagcttgatcaaatcgaaaagcagaggaaggatgagcaggagcgggagatcctgatgagggcagcaaagtctcggtcaagacaagaagatccagaacagttaaggctgaaacagaaggcaaaggagatgcagcaacaggaactggcacaaatgagacagcgggacgccaacctcacagcactagcagcgatcgggcccaggaaaaagaggaaagtggactgtccggggccgggctcaggagcagaggggtcgggccccggctcagtggtcccaggcagctcgggtgtcggaacccccagacagttcacgcgacaaagaatcacgcgggtcaacctcagggacctcatattttgtttagaaaatgaacgtgagacaagccattcactgctgctctacaaagcattccttaagtgacacaggaggacgcctggggactttttatatatttgcagattacgcctttttgtaacgagcaaatgggatattgtttaaaaaacagccacctctttacaatggaacagttttatattcctgtttctaaatcagctcttcagtgtgaaagaaaacacgtttctgtaacagagagaacacaaaggcctgtggatactcttaaaggacaattaaatcttaactcatcttgattgagtggccttcctgccaaacaagccatatataaagactgatggaatcgttagcaaataattagctgccctctgtcaactcatagcagtttctgcattatttgtgcattttggtttagttctacctaacttactatgtaggtgtatgtctacagccgatgacctcatttcgtttattttatttttgtaatagtcagttggcaaagcaaactgattttttagactatttatcttccttcccttcccctcccaccccgctctcctctctgccccctgccctcccctcccctcccttcccctccactccgctgagaatcctggaggaatacacaattcatcgttgcacccccacctcagagtgtaatcgcatttctgcttggtagaggccgagcccagcaaaggtggctccttctgaatgtgtggtcagcatctgtacaaatgcattttatttgctatagtttgtaaagctgtaaagttaaaagagatgaaaaccttttcagcataaatatattttacttgcactgtgttttttagctaaaagtgaaaacctagattaaataaaatcaaagttgagaaga

SEQ ID NO: 443247 - DNA, 1799 bp, Homo sapiens
agggaagaagaaggaaaggagagggactattgcatagcagatgcaaatgaagggacttggggctagtcaggaagaaagggaaagggaaggaaggcaagagagaggggtgaaggctgaaacagaaggcaaaggagatgcagcaacaggaactggcacaaatgagacagcgggacgccaacctcacagcactagcagcgatcgggcccaggaaaaagaggaaagtggactgtccggggccgggctcaggagcagaggggtcgggccccggctcagtggtcccaggcagctcgggtgtcggaacccccagacagttcacgcgacaaagaatcacgcgggtcaacctcagggacctcatattttgtttagaaaatgaacgtgagacaagccattcactgctgctctacaaagcattccttaagtgacacaggaggacgcctggggactttttatatatttgcagattacgcctttttgtaacgagcaaatgggatattgtttaaaaaacagccacctctttacaatggaacagttttatattcctgtttctaaatcagctcttcagtgtgaaagaaaacacgtttctgtaacagagagaacacaaaggcctgtggatactcttaaaggacaattaaatcttaactcatcttgattgagtggccttcctgccaaacaagccatatataaagactgatggaatcgttagcaaataattagctgccctctgtcaactcatagcagtttctgcattatttgtgcattttggtttagttctacctaacttactatgtaggtgtatgtctacagccgatgacctcatttcgtttattttatttttgtaatagtcagttggcaaagcaaactgattttttagactatttatcttccttcccttcccctcccaccccgctctcctctctgccccctgccctcccctcccctcccttcccctccactccgctgagaatcctggaggaatacacaattcatcgttgcacccccacctcagagtgtaatcgcatttctgcttggtagaggccgagcccagcaaaggtggctccttctgaatgtgtggtcagcatctgtacaaatgcattttatttgctatagtttgtaaagctgtaaagttaaaagagatgaaaaccttttcagcataaatatattttacttgcactgtgttttttagctaaaagtgaaaacctagattaaataaaatcaaagttgagaagaatcatcaaaagactgtttctcggtgtgaatcaagtgttgaaaaatggttggtgtattttgtcagtaattgtacataacttttggcacatgacatagaaatggctatgtaaactataattattttgctaagagactgtatgcaagccttgggccgactttacagacgtccagagcaaagccccttctttgtacctatttttttattacaaatatactaattggttctttctattttcagaggttattgtatgaaattgtctattgatagtacttttatgactgtaaatactctggctttctccgtgtgaattctcacattagactttaattcgagcgcgtgtgaactgaacgctgatcagtattttttatcaacacctgagaactgttacaccttttattttgtcttttaggaaatccctgtctttccattttttcatgtaaattttgcacagttacttgttcatatgtaaatattttactttcagaaatgaagtttttaattgctattgttttatataggattgaaagaaaattaactcctttattaaaaacaaatttatctgtaaaaaatt

SEQ ID NO: 443248 - DNA, 1126 bp, Homo sapiens
  misc_feature (135)..(135): n is a, c, g, or t
  misc_feature (152)..(152): n is a, c, g, or t
  misc_feature (279)..(279): n is a, c, g, or t
  misc_feature (281)..(281): n is a, c, g, or t
  misc_feature (285)..(286): n is a, c, g, or t
ccagctctcagcagatcccagtgttcctgaacacaaagctctgaccctgccgatgcgctttagggcctgcttcccaaggtcctaaaaggccaggcctttctgagaggactaaggacattttggtgaaaacctgantttggtttgtatgacangaggggcctctttttgttgacctgacactttcctttttaaagacacagaagaggctgggcacagtggctcatgcctgtaattgagaccatcctggccaacatggtaaaaccccatctcccacttaananactnncgaattcggcacgagattgtgaattcatcgttgcacccccacctcagagtgtaatcgcatttctgcttggtagaggccgagcccagcaaaggtggctccttctgaatgtgtggtcagcatctgtacaaatgcattttatttgctatagtttgtaaagctgtaaagttaaaagagatgaaaaccttttcagcataaatatattttacttgcactgtgttttttagctaaaagtgaaaacctagattaaataaaatcaaagttgagaagaatcatcaaaagactgtttctcggtgtgaatcaagtgttgaaaaatggttggtgtattttgtcagtaattgtacataacttttggcacatgacatagaaatggctatgtaaactataattattttgctaagagactgtatgcaagccttgggccgactttacagacgtccagagcaaagccccttctttgtacctatttttttattacaaatatactaattggttctttctattttcagaggttattgtatgaaattgtctattgatagtacttttatgactgtaaatactctggctttctccgtgtgaattctcacattagactttaattcgagcgcgtgtgaactgaacgctgatcagtattttttatcaacacctgagaactgttacaccttttattttgtcttttaggaaatccctgtctttccattttttcatgtaaattttgcacagttacttgttcatatgtaaatattttactttcagaaatgaagtttttaattgctattgttttatataggattgaaagaaaattaactcctttattaaaaacaaatttatctgtaaaaaatt

SEQ ID NO: 443249 - DNA, 3444 bp, Homo sapiens
  misc_feature (831)..(831): n is a, c, g, or t
  misc_feature (963)..(963): n is a, c, g, or t
  misc_feature (978)..(978): n is a, c, g, or t
atggcggcgggctcggatctgctggacgaggtcttcttcaacagcgaggtggacgagaaagtggtgagcgacctggtgggctcgctggagtcgcagctggcggccagcgcggcccaccaccaccacctcgcgccgcgcacgcccgaggtgcgggccgcggccgccggcgcgctcgggaaccatgttgtgagcggcagcccggccggagccgcgggcgcagggccggccgcccccgccgagggcgcgcccggagcggcgccggagccgccccccgcaggtagagcgcggccggggggcggggggccgcagcgcccgggccccccctcaccgcgccgcccccttgtccccgcagggcccgcgccgcccgccgcgaagctgaggccgccgcccgagggcagcgcgggggcctgcgccccggtgcccgccgccgccgccgtcgccgcggggcccgagcccgcccccgccggccccgccaagcccgccggccccgccgcgctggccgcccgcgccggccccggccccgggcccggccccggccccggccccggccctggcaagcccgccggccccggcgccgcgcaaactttgaatgggagcgccgcgctgctgaactcgcaccacgccgccgcacctgctgtcagcctggtcaacaacgggcccgccgcgctgctgccgctgcccaagcccgccgcccccggcactgtcatccagacgccccccttcgtgggcgccgccgcgccccccgcgcccgccgcgccctcgccccccgccgcccccgcgcccgccgcccccgccgccgccccgcccccgccaccccccgcgcccgccacnctggcccggccgcccggccaccccgccggacccccgaccgccgcgcccgccgtgccgccccccgccgccgcccagaacgggggcagcgccggggcagcccccgcccccgccccggccgccgggggccccgcnggggtcagcggccancccgggcccggcgcggcggctgcggcgccggcgccgggggtcaaggccgagtcgcccaagagggtggtgcaggcggcgcccccggcggcgcagaccctggcggccagcggcccggccagcacggcggccagcatggtcatcgggccaactatgcaaggggcgctgcccagcccggccgccgtcccgccgcccgcccccgggacccccaccgggctgcccaaaggcgcggccggcgcagtgacccagagcctgtcccggacgcccacggccaccaccagcgggattcgggccaccctgacgcccaccgtgctggccccccgcttgccgcagccgcctcagaacccgaccaacatccagaacttccagctgcccccaggaatggtcctcgtccgaagtgagaatgggcagttgttaatgattcctcagcaggccttggcccagatgcaggcgcaggcccatgcccagcctcagaccaccatggcgcctcgccctgccacccccacaagtgcccctcccgtccagatctccaccgtacaggcacctggaacacctatcattgcacggcaggtgaccccaactaccataattaagcaagtgtctcaggcccagacaacggtgcagcccagtgcaaccctgcagcgctcgcccggcgtccagcctcagctcgttctgggtggcgctgcccagacggcttcacttgggacggcgacggctgttcagacggggactcctcagcgcacggtaccaggggcgaccaccacttcctcagctgccacggaaactatggaaaacgtgaagaaatgtaaaaatttcctatctacgttaataaaactggcttcatctggcaagcagtctacagagacagcagctaatgtgaaagagctcgtgcagaatttactggatggaaaaatagaagcagaagatttcacaagcaggttataccgagaacttaattcttcacctcaaccttaccttgtgcctttcctgaagaggagcttacccgccttgagacagctgacccccgactccgcggccttcatccagcagagccagcagcagccgccaccgcccacctcgcaggccaccactgcgctcacggccgtggtgctgagtagctcggtccagcgcacggccgggaagacggcggccaccgtgaccagtgccctccagccccctgtgctcagcctcacgcagcccacgcaggtcggcgtcggcaagcaggggcaacccacaccgctggtcatccagcagcctccgaagccaggagccctgatccggcccccgcaggtgacgttgacgcagacacccatggtcgccctgcggcagcctcacaaccggatcatgctcaccacgcctcagcagatccagctgaacccactgcagccagtccctgtggtgaaacccgccgtgttacctggaaccaaagccctttctgctgtctcggcacaagcagctgctgcacagaaaaataaactcaaggagcctgggggaggttcgtttcgggacgatgatgacattaatgatgttgcatcgatggctggagtaaacttgtcagaagaaagtgcaagaatattagccacgaactctgaattggtgggcacgctaacgcggtcctgtaaagatgaaaccttcctcctccaagcgcctttgcagagaagaatattagaaataggtaaaaaacatggtataacggaattacatccagatgtagtaagttatgtatcacatgccacgcaacaaaggctacagaatcttgtagagaaaatatcagaaacagctcagcagaagaacttttcttacaaggatgacgacagatatgagcaggcgagtgacgtccgggcacagctcaagttttttgaacagcttgatcaaatcgaaaagcagaggaaggatgagcaggagcgggagatcctgatgagggcagcaaagtctcggtcaagacaagaagatccagaacagttaaggctgaaacagaaggcaaaggagatgcagcaacaggaactggcacaaatgagacagcgggacgccaacctcacagcactagcagcgatcgggcccaggaaaaagaggaaagtggactgtccggggccgggctcaggagcagaggcctccgtggcactcagtaagcagcgggctcagggagagcgtcctggatggtcaccatgcaggtaagatgaggaggacacttggaaccaggcattggatgcgagccccaccccatgggagggggacggggggatgctgggcaccagggggacctgtgggccagctggccctgggcttgtgcttggggagtgaatgatgggttctgacccccatgcacccctgtgggcccctggcatcactggccccatccttcacccctgccaaccacgcttgccctgtgcctctgaagctcccccactaagggggtggagtctaattccctgccccttgactgtgggttcagccatgtgacttgctttg

SEQ ID NO: 443250 - DNA, 2079 bp, Homo sapiens
  misc_feature (831)..(831): n is a, c, g, or t
  misc_feature (963)..(963): n is a, c, g, or t
  misc_feature (978)..(978): n is a, c, g, or t
atggcggcgggctcggatctgctggacgaggtcttcttcaacagcgaggtggacgagaaagtggtgagcgacctggtgggctcgctggagtcgcagctggcggccagcgcggcccaccaccaccacctcgcgccgcgcacgcccgaggtgcgggccgcggccgccggcgcgctcgggaaccatgttgtgagcggcagcccggccggagccgcgggcgcagggccggccgcccccgccgagggcgcgcccggagcggcgccggagccgccccccgcaggtagagcgcggccggggggcggggggccgcagcgcccgggccccccctcaccgcgccgcccccttgtccccgcagggcccgcgccgcccgccgcgaagctgaggccgccgcccgagggcagcgcgggggcctgcgccccggtgcccgccgccgccgccgtcgccgcggggcccgagcccgcccccgccggccccgccaagcccgccggccccgccgcgctggccgcccgcgccggccccggccccgggcccggccccggccccggccccggccctggcaagcccgccggccccggcgccgcgcaaactttgaatgggagcgccgcgctgctgaactcgcaccacgccgccgcacctgctgtcagcctggtcaacaacgggcccgccgcgctgctgccgctgcccaagcccgccgcccccggcactgtcatccagacgccccccttcgtgggcgccgccgcgccccccgcgcccgccgcgccctcgccccccgccgcccccgcgcccgccgcccccgccgccgccccgcccccgccaccccccgcgcccgccacnctggcccggccgcccggccaccccgccggacccccgaccgccgcgcccgccgtgccgccccccgccgccgcccagaacgggggcagcgccggggcagcccccgcccccgccccggccgccgggggccccgcnggggtcagcggccancccgggcccggcgcggcggctgcggcgccggcgccgggggtcaaggccgagtcgcccaagagggtggtgcaggcggcgcccccggcggcgcagaccctggcggccagcggcccggccagcacggcggccagcatggtcatcgggccaactatgcaaggggcgctgcccagcccggccgccgtcccgccgcccgcccccgggacccccaccgggctgcccaaaggcgcggccggcgcagtgacccagagcctgtcccggacgcccacggccaccaccagcgggattcgggccaccctgacgcccaccgtgctggccccccgcttgccgcagccgcctcagaacccgaccaacatccagaacttccagctgcccccaggaatggtcctcgtccgaagtgagaatgggcagttgttaatgattcctcagcaggccttggcccagatgcaggcgcaggcccatgcccagcctcagaccaccatggcgcctcgccctgccacccccacaagtgcccctcccgtccagatctccaccgtacaggcacctggaacacctatcattgcacggcaggtgaccccaactaccataattaagcaagtgtctcaggcccagacaacggtgcagcccagtgcaaccctgcagcgctcgcccggcgtccagcctcagctcgttctgggtggcgctgcccagacggcttcacttgggacggcgacggctgttcagacggggactcctcagcgcacggtaccaggggcgaccaccacttcctcagctgccacggaaactatggaaaacgtgaagaaatgtaaaaatttcctatctacgttaataaaactggcttcatctggcaagcagtctacagagacagcagctaatgtgaaagagctcgtgcagaatttactggtgagaaaccttgactttacattccctttcccctaaagcctgttgcataggacagacacctgttgctgctgtgacctgtgcccgggaggcctgtgccagcagggagagctcctctggaaggctgcaggcgaaggggaggggtgcacacgtgtcgaaggcgtgtgtggcctagctaaggagactccttcctggggctgggtg

SEQ ID NO: 443251 - DNA, 156 bp, Homo sapiens
cagctggtggcgtgagatgcccttaccttgtgtttttggattcttgtagcctcagctcgttctgggtggcgctgcccagacggcttcacttgggacggcgacggctgttcagacggggactcctcagcgcacggtaccaggggcgaccaccacttc

SEQ ID NO: 443252 - DNA, 4629 bp, Homo sapiens
  misc_feature (831)..(831): n is a, c, g, or t
  misc_feature (963)..(963): n is a, c, g, or t
  misc_feature (978)..(978): n is a, c, g, or t
atggcggcgggctcggatctgctggacgaggtcttcttcaacagcgaggtggacgagaaagtggtgagcgacctggtgggctcgctggagtcgcagctggcggccagcgcggcccaccaccaccacctcgcgccgcgcacgcccgaggtgcgggccgcggccgccggcgcgctcgggaaccatgttgtgagcggcagcccggccggagccgcgggcgcagggccggccgcccccgccgagggcgcgcccggagcggcgccggagccgccccccgcaggtagagcgcggccggggggcggggggccgcagcgcccgggccccccctcaccgcgccgcccccttgtccccgcagggcccgcgccgcccgccgcgaagctgaggccgccgcccgagggcagcgcgggggcctgcgccccggtgcccgccgccgccgccgtcgccgcggggcccgagcccgcccccgccggccccgccaagcccgccggccccgccgcgctggccgcccgcgccggccccggccccgggcccggccccggccccggccccggccctggcaagcccgccggccccggcgccgcgcaaactttgaatgggagcgccgcgctgctgaactcgcaccacgccgccgcacctgctgtcagcctggtcaacaacgggcccgccgcgctgctgccgctgcccaagcccgccgcccccggcactgtcatccagacgccccccttcgtgggcgccgccgcgccccccgcgcccgccgcgccctcgccccccgccgcccccgcgcccgccgcccccgccgccgccccgcccccgccaccccccgcgcccgccacnctggcccggccgcccggccaccccgccggacccccgaccgccgcgcccgccgtgccgccccccgccgccgcccagaacgggggcagcgccggggcagcccccgcccccgccccggccgccgggggccccgcnggggtcagcggccancccgggcccggcgcggcggctgcggcgccggcgccgggggtcaaggccgagtcgcccaagagggtggtgcaggcggcgcccccggcggcgcagaccctggcggccagcggcccggccagcacggcggccagcatggtcatcgggccaactatgcaaggggcgctgcccagcccggccgccgtcccgccgcccgcccccgggacccccaccgggctgcccaaaggcgcggccggcgcagtgacccagagcctgtcccggacgcccacggccaccaccagcgggattcgggccaccctgacgcccaccgtgctggccccccgcttgccgcagccgcctcagaacccgaccaacatccagaacttccagctgcccccaggaatggtcctcgtccgaagtgagaatgggcagttgttaatgattcctcagcaggccttggcccagatgcaggcgcaggcccatgcccagcctcagaccaccatggcgcctcgccctgccacccccacaagtgcccctcccgtccagatctccaccgtacaggcacctggaacacctatcattgcacggcaggtgaccccaactaccataattaagcaagtgtctcaggcccagacaacggtgcagcccagtgcaaccctgcagcgctcgcccggcgtccagcctcagctcgttctgggtggcgctgcccagacggcttcacttgggacggcgacggctgttcagacggggactcctcagcgcacggtaccaggggcgaccaccacttcctcagctgccacggaaactatggaaaacgtgaagaaatgtaaaaatttcctatctacgttaataaaactggcttcatctggcaagcagtctacagagacagcagctaatgtgaaagagctcgtgcagaatttactggatggaaaaatagaagcagaagatttcacaagcaggttataccgagaacttaattcttcacctcaaccttaccttgtgcctttcctgaagaggagcttacccgccttgagacagctgacccccgactccgcggccttcatccagcagagccagcagcagccgccaccgcccacctcgcaggccaccactgcgctcacggccgtggtgctgagtagctcggtccagcgcacggccgggaagacggcggccaccgtgaccagtgccctccagccccctgtgctcagcctcacgcagcccacgcaggtcggcgtcggcaagcaggggcaacccacaccgctggtcatccagcagcctccgaagccaggagccctgatccggcccccgcaggtgacgttgacgcagacacccatggtcgccctgcggcagcctcacaaccggatcatgctcaccacgcctcagcagatccagctgaacccactgcagccagtccctgtggtgaaacccgccgtgttacctggaaccaaagccctttctgctgtctcggcacaagcagctgctgcacagaaaaataaactcaaggagcctgggggaggttcgtttcgggacgatgatgacattaatgatgttgcatcgatggctggagtaaacttgtcagaagaaagtgcaagaatattagccacgaactctgaattggtgggcacgctaacgcggtcctgtaaagatgaaaccttcctcctccaagcgcctttgcagagaagaatattagaaataggtaaaaaacatggtataacggaattacatccagatgtagtaagttatgtatcacatgccacgcaacaaaggctacagaatcttgtagagaaaatatcagaaacagctcagcagaagaacttttcttacaaggatgacgacagatatgagcaggcgagtgacgtccgggcacagctcaagttttttgaacagcttgatcaaatcgaaaagcagaggaaggatgagcaggagcgggagatcctgatgagggcagcaaagtctcggtcaagacaagaagatccagaacagttaaggctgaaacagaaggcaaaggagatgcagcaacaggaactggcacaaatgagacagcgggacgccaacctcacagcactagcagcgatcgggcccaggaaaaagaggaaagtggactgtccggggccgggctcaggagcagaggggtcgggccccggctcagtggtcccaggcagctcgggtgtcggaacccccagacagttcacgcgacaaagaatcacgcgggtcaacctcagggacctcatattttgtttagaaaatgaacgtgagacaagccattcactgctgctctacaaagcattccttaagtgacacaggaggacgcctggggactttttatatatttgcagattacgcctttttgtaacgagcaaatgggatattgtttaaaaaacagccacctctttacaatggaacagttttatattcctgtttctaaatcagctcttcagtgtgaaagaaaacacgtttctgtaacagagagaacacaaaggcctgtggatactcttaaaggacaattaaatcttaactcatcttgattgagtggccttcctgccaaacaagccatatataaagactgatggaatcgttagcaaataattagctgccctctgtcaactcatagcagtttctgcattatttgtgcattttggtttagttctacctaacttactatgtaggtgtatgtctacagccgatgacctcatttcgtttattttatttttgtaatagtcagttggcaaagcaaactgattttttagactatttatcttccttcccttcccctcccaccccgctctcctctctgccccctgccctcccctcccctcccttcccctccactccgctgagaatcctggaggaatacacaattcatcgttgcacccccacctcagagtgtaatcgcatttctgcttggtagaggccgagcccagcaaaggtggctccttctgaatgtgtggtcagcatctgtacaaatgcattttatttgctatagtttgtaaagctgtaaagttaaaagagatgaaaaccttttcagcataaatatattttacttgcactgtgttttttagctaaaagtgaaaacctagattaaataaaatcaaagttgagaagaatcatcaaaagactgtttctcggtgtgaatcaagtgttgaaaaatggttggtgtattttgtcagtaattgtacataacttttggcacatgacatagaaatggctatgtaaactataattattttgctaagagactgtatgcaagccttgggccgactttacagacgtccagagcaaagccccttctttgtacctatttttttattacaaatatactaattggttctttctattttcagaggttattgtatgaaattgtctattgatagtacttttatgactgtaaatactctggctttctccgtgtgaattctcacattagactttaattcgagcgcgtgtgaactgaacgctgatcagtattttttatcaacacctgagaactgttacaccttttattttgtcttttaggaaatccctgtctttccattttttcatgtaaattttgcacagttacttgttcatatgtaaatattttactttcagaaatgaagtttttaattgctattgttttatataggattgaaagaaaattaactcctttattaaaaacaaatttatctgtaaaaaatt

SEQ ID NO: 443253 - DNA, 1939 bp, Homo sapiens
tgtattggtggtgctggcaggaaggccactcaatcaatatgagttaagatttaattgtcctttaagagtatccgcaggcctttgtgttctctctgttacagaaacgtgttttctttcacactgaagagctgatttagaaacaggaatataaaactgttccattgtaaagcagaggaaggatgagcaggagcgggagatcctgatgagggcagcaaagtctcggtcaagacaagaagatccagaacagttaaggctgaaacagaaggcaaaggagatgcagcaacaggaactggcacaaatgagacagcgggacgccaacctcacagcactagcagcgatcgggcccaggaaaaagaggaaagtggactgtccggggccgggctcaggagcagaggggtcgggccccggctcagtggtcccaggcagctcgggtgtcggaacccccagacagttcacgcgacaaagaatcacgcgggtcaacctcagggacctcatattttgtttagaaaatgaacgtgagacaagccattcactgctgctctacaaagcattccttaagtgacacaggaggacgcctggggactttttatatatttgcagattacgcctttttgtaacgagcaaatgggatattgtttaaaaaacagccacctctttacaatggaacagttttatattcctgtttctaaatcagctcttcagtgtgaaagaaaacacgtttctgtaacagagagaacacaaaggcctgtggatactcttaaaggacaattaaatcttaactcatcttgattgagtggccttcctgccaaacaagccatatataaagactgatggaatcgttagcaaataattagctgccctctgtcaactcatagcagtttctgcattatttgtgcattttggtttagttctacctaacttactatgtaggtgtatgtctacagccgatgacctcatttcgtttattttatttttgtaatagtcagttggcaaagcaaactgattttttagactatttatcttccttcccttcccctcccaccccgctctcctctctgccccctgccctcccctcccctcccttcccctccactccgctgagaatcctggaggaatacacaattcatcgttgcacccccacctcagagtgtaatcgcatttctgcttggtagaggccgagcccagcaaaggtggctccttctgaatgtgtggtcagcatctgtacaaatgcattttatttgctatagtttgtaaagctgtaaagttaaaagagatgaaaaccttttcagcataaatatattttacttgcactgtgttttttagctaaaagtgaaaacctagattaaataaaatcaaagttgagaagaatcatcaaaagactgtttctcggtgtgaatcaagtgttgaaaaatggttggtgtattttgtcagtaattgtacataacttttggcacatgacatagaaatggctatgtaaactataattattttgctaagagactgtatgcaagccttgggccgactttacagacgtccagagcaaagccccttctttgtacctatttttttattacaaatatactaattggttctttctattttcagaggttattgtatgaaattgtctattgatagtacttttatgactgtaaatactctggctttctccgtgtgaattctcacattagactttaattcgagcgcgtgtgaactgaacgctgatcagtattttttatcaacacctgagaactgttacaccttttattttgtcttttaggaaatccctgtctttccattttttcatgtaaattttgcacagttacttgttcatatgtaaatattttactttcagaaatgaagtttttaattgctattgttttatataggattgaaagaaaattaactcctttattaaaaacaaatttatctgtaaaaaatt

SEQ ID NO: 443254 - DNA, 2557 bp, Homo sapiens
  misc_feature (831)..(831): n is a, c, g, or t
  misc_feature (963)..(963): n is a, c, g, or t
  misc_feature (978)..(978): n is a, c, g, or t
atggcggcgggctcggatctgctggacgaggtcttcttcaacagcgaggtggacgagaaagtggtgagcgacctggtgggctcgctggagtcgcagctggcggccagcgcggcccaccaccaccacctcgcgccgcgcacgcccgaggtgcgggccgcggccgccggcgcgctcgggaaccatgttgtgagcggcagcccggccggagccgcgggcgcagggccggccgcccccgccgagggcgcgcccggagcggcgccggagccgccccccgcaggtagagcgcggccggggggcggggggccgcagcgcccgggccccccctcaccgcgccgcccccttgtccccgcagggcccgcgccgcccgccgcgaagctgaggccgccgcccgagggcagcgcgggggcctgcgccccggtgcccgccgccgccgccgtcgccgcggggcccgagcccgcccccgccggccccgccaagcccgccggccccgccgcgctggccgcccgcgccggccccggccccgggcccggccccggccccggccccggccctggcaagcccgccggccccggcgccgcgcaaactttgaatgggagcgccgcgctgctgaactcgcaccacgccgccgcacctgctgtcagcctggtcaacaacgggcccgccgcgctgctgccgctgcccaagcccgccgcccccggcactgtcatccagacgccccccttcgtgggcgccgccgcgccccccgcgcccgccgcgccctcgccccccgccgcccccgcgcccgccgcccccgccgccgccccgcccccgccaccccccgcgcccgccacnctggcccggccgcccggccaccccgccggacccccgaccgccgcgcccgccgtgccgccccccgccgccgcccagaacgggggcagcgccggggcagcccccgcccccgccccggccgccgggggccccgcnggggtcagcggccancccgggcccggcgcggcggctgcggcgccggcgccgggggtcaaggccgagtcgcccaagagggtggtgcaggcggcgcccccggcggcgcagaccctggcggccagcggcccggccagcacggcggccagcatggtcatcgggccaactatgcaaggggcgctgcccagcccggccgccgtcccgccgcccgcccccgggacccccaccgggctgcccaaaggcgcggccggcgcagtgacccagagcctgtcccggacgcccacggccaccaccagcgggattcgggccaccctgacgcccaccgtgctggccccccgcttgccgcagccgcctcagaacccgaccaacatccagaacttccagctgcccccaggaatggtcctcgtccgaagtgagaatgggcagttgttaatgattcctcagcaggccttggcccagatgcaggcgcaggcccatgcccagcctcagaccaccatggcgcctcgccctgccacccccacaagtgcccctcccgtccagatctccaccgtacaggcacctggaacacctatcattgcacggcaggtgaccccaactaccataattaagcaagtgtctcaggcccagacaacggtgcagcccagtgcaaccctgcagcgctcgcccggcgtccagcctcagctcgttctgggtggcgctgcccagacggcttcacttgggacggcgacggctgttcagacggggactcctcagcgcacggtaccaggggcgaccaccacttcctcagctgccacggaaactatggaaaacgtgaagaaatgtaaaaatttcctatctacgttaataaaactggcttcatctggcaagcagtctacagagacagcagctaatgtgaaagagctcgtgcagaatttactggatggaaaaatagaagcagaagatttcacaagcaggttataccgagaacttaattcttcacctcaaccttaccttgtgcctttcctgaagaggagcttacccgccttgagacagctgacccccgactccgcggccttcatccagcagagccagcagcagccgccaccgcccacctcgcaggccaccactgcgctcacggccgtggtgctgagtagctcggtccagcgcacggccgggaagacggcggccaccgtgaccagtgccctccagccccctgtgctcagcctcacgcagcccacgcaggtcggcgtcggcaagcaggggcaacccacaccgctggtcatccagcagcctccgaagccaggagccctgatccggcccccgcagtccctgtggtgaaacccgccgtgttacctggaaccaaagccctttctgctgtctcggcacaagcagctgctgcacagaaaaataaactcaaggagcctgggggaggttcgtttcgaaccctcagaaatgctgtactgctccaggcgtagtggctcacgcttacagtgccagcactacaggaggctgaagtgggagaatcgcttgagcccgggagtttgagaccagcctgcacaacatagtaaaaccttactcaacaacaacaaaaaataaaaaattagccaggcttggtggt

SEQ ID NO: 443255 - DNA, 1778 bp, Homo sapiens
aaaaaaaaaaaaagaaaagaaaagacacatttgataaaggactgttattcaaaataaacaactctcaaacctcaacaataagaaaacaaagaacctgactttaagaacaggacaatgaccttaacggacacctcactaaagaagatataaagatggcgagtatgcatatgaaaaaaagtcacataatcaggaaaatgcaaattaaaacaataccactacacacctattagaatggccaaaacccattaacagtgacaatatcaaatgctggtgagaatgtgaacagaaactcccattcattactggtgggaatataaaatggtaccatcactttgaaagacagtttagaggtttcttgcaaaactaaaggtattcttaccatatgatccagcaactgtgttccttgctatttacccaaacgaactgaaaacttatgtccacacaaaagacacgcacacagatgtttgatgtttatagcagctttattcacgattgccaaaactagggagcaaccaagatgtccttcagtaagtaaatggacaaataaacccgggtatatccagataatagaatagtcaagtgcaaaagaaaaaaaaaagctgtcaaaccgtgaaaagccattgaggaaatcgtaaacgcatattagtacgtgaaaaaagaaaatctgaaaaggctatagactgtatgattccaactatgacatcttgaaaaggcaaaactatggagacagttaacaaaaaatagtggttgccagtggctggggaagagaagggatggcgagggggagcacagagtatttcagggcagataaacattgtaccgctacaacagtggatatgtgccatacaattggccaaacccatagaacatacaaacagcaagagtaaaccttggccgggcgcagtggctcacgcctgtaatcccaacactttgggaggccgaggtgggtggatcacctgaggtcaggagctcgagaccagcctggccaacatggtgaagccccatctctatcaaaaatacaaaaatttagctgggcgtggtggtgggcacctgtaatcccaggtatttgggaggctgaggcaggagaatcccttgaacccaggaggcaaaggttgcagttagctgagatcgcaccactgcactccagcctgggcaacaagagcgaaactccgtctcaaaaaaaaaaaaaccctaatgtaaaccatggactttgggtggtaaagatgtctgaatgtaggtccatcaattttaacaaatgtaccactttcgtgggggatataatatatcttgataataatataacttgagaaatccttcattttctgataatctaacaaatcacaactctgaacataatttttaatacaaaggcttaggttcatcaagattctcttttaaagaactatctaactgcccaaaatgattcacatacacagtgaacatacaaaatactaaaaggtcaagtccaaaattttgattctctagagaaacgtataaagcagtttaactgggaacatactaagacagaacacaaagtaacggaaatgccactttagctaccaaaagaacaggaagagcaaatactaagactttactttgaaagtctaaggctacttcttcctggtagggctctaacctcttgccaagaagcctgtaagtttatttttcttacttctttattttaagtgagaaaccatgaaattaaccatttcagagctgaagaaaacaaaggagaaacaactatgtctacggtgaactttcacattaactattctaaa

SEQ ID NO: 443256 - DNA, 1105 bp, Homo sapiens
tcgagatgggagtctttttctgtcgccaggctggagtgcagtggtgcagtctcggctcactgcaacctctgcctcgcaggagaattgctttgaacccgggaggcagaggttgtgagctgagatcgcgtcagtacactccagcctgggcaacaatgcgagattgcatctcaaaaaaataaataaatatttggagtcccataataaataaatatttggagtccaatgtgatagtatctggagatggggcctttggaggtaatatgggttagataggtcatgacggtagggccctcattatgggattagtggcgttataagaagaagagagaaatcttcctcctcaagagcagaggaaaagccatataagaatacagtgagacggccacttccaaaccagaaagggagcccccaccaggaaccaaattggctggcaccttgatcttggacttcccatgctccagaactgtgagaaataaatttctattatttaagcccatggtagttttatggcatcctaagctaagacagcgcgtctctagtttcccacagattcataaaggtccatacaaaaatgttataactgttaatagtgtcctgtccttgaatttaacagcaaccaacatattgtttgcatagttcttgcaccatttggaaacagtgacctttaggtgttgcaggtaactattgggaaatccttcaatttgtttaacatttccatattttgatttgcatcttgggagttgcttggaatttgggatcctcttctgtctcttgagttgaaatcagaggctgcttgccgggcaaggtggctcacgcctgtaatcccagcactttgggaggcccaggcagacagatcaccagatgtcgggagttagaaaccagcctggccaacatggcaaaaccccgtctctactaaaaatacaaaaattagtcgggcgtgctggtgcatgcctgtaatcctagctgcttgggtgctgagtcaggagaattgcttgaacccgggaggtggaggttgcagtgagccaagatcgtgtcactgcactccagccggggcaacagagcgagactctgcctcaaaaaaagaaaaaagaaatcagaggctggg

SEQ ID NO: 443257 - DNA, 3200 bp, Homo sapiens
  misc_feature (1483)..(1483): n is a, c, g, or t
aaactctggacttcaagtgatcacctgcctcagccttctaaggtgctaggattataggcttgagccactgcagccaccactctgtatatctcttttgaaagtcataagcaatatctttggaaaaaacacttaaggttatttatttagaggtaagtgtctctctgtacccccagctggagtacagtggcacagtatcacagcttgctgcagcatcaaattcctaggctcaagccatccttccaccggacatgttggcgtgcacctcctgagtagctgggactacagttgtgctctaccacaccgggctaatttttgtattttttagtagagacagggttttgccatgttggacaggctggtctggaacacctgacctccggtgatctgcccacctcagtctcccaaagggctgggattaaaggcatgagccaccgcactcagccacttaaggcttttaaaaaatcaattaatttctaaatggttttggacttttgactccttataagtgttaagatattttggtatcacttttttccttccaaaaaaaaaaaaaaaaccaactaggtgatatctattcctcagtcaaagttaattaaaactattttggatcccagcactttgggaagccaaaggcaggcagatcacctgaggtcaggagttcaagaccagccttgccaacatggtgaaaccctgtctctactaaaaatacaaaaattagcagagcatggtggcgggcgcctgtaatcccagctactcaggaggctgaggcaggagaattgcttgaacccgggaggtggagtttgcagtgagccaagatagtgccatcgcactccagcctggacaacagagcgagactccatctaaaaaaaaaaaaaaaaaaaaaaaaaactcagtttttggttttgaaaatgtcatgatacctgttgagataactgctgaatagatgggtaatacacagtctagggcatggtatcaaaagaacttgtcactgtacatatcggaaatggtaaaaatatgttttgccgttttcacgaattcattcatttttcatgtttcatgaattcattctttttaaaaaaaaaaaaaatcctgctaattctctgtttctcttgcttttctcctttatgactaagttttcctcattatgggttaccccacattactgcttacgaagacatctctttagtcagaaaacagtagcttggttcagttctagcttcattgttaagctcataggtaaatctggcaaatggctagaaacagtcacatgtttgcttgtccttaatgctctcaccttttcccagctatttggatgtatatacttttgcttactttgtagtgtaccaacttaatatatgttatagactaaatgtttatgtcctcccaaacttcatattttggaagccagacatggtaactcacacctgtaaacctaacactttgggaggcctagttgggaggattgcttgagtccgggagttcngaaccagcctggacaacatggtgagaccccgtctctacaaaaaaaaaaaaaaatttttaattagccaggtgtggtggcatacacctgtagtcccagctactcaggaggcttgcctgagcccagaagtttgagactgcagtgagccatgatattgccagcctgggtgacagagcaagaccttgtctcaagaaaaaaaaaaaaaaattgccaattgcgatggctcacgcctgtaatcccagcactaggaggccgaggtgggtgaatcacctgaggtcaggagttttgagaccagcctggccaacgtggcaaaaccccgtctctactaaaaatgcaaaaattaccgggacgtgttggtgagcacctgtaatccctgctactcgggaggctgaggcaagagaatctcttgaacccagggggtggaggttgcactgagccgagatcatgccattgtacttcacctgggcaacaagagggaaactgtctccaaaaaaaaaaaatttggagggctgggcacggtggctcacacctgtaatcccagcactttgggaggccaaggcggtggatcacaaagtcaggagttcaagaccagcctggccaacatagtgaaaccctgtctctactaaaaatacaaaaattagccaggcatggtggcacacgcctgtagtcccagctactggggaggctgaggcaggagaattgctttgaacccgggaggcagaggttgtgagctgagatcgcgtcagtacactccagcctgggcaacaatgcgagattgcatctcaaaaaaataaataaatatttggagtcccataataaataaatatttggagtccaatgtgatagtatctggagatggggcctttggaggtaatatgggttagataggtcatgacggtagggccctcattatgggattagtggcgttataagaagaagagagaaatcttcctcctcaagagcagaggaaaagccatataagaatacagtgagacggccacttccaaaccagaaagggagcccccaccaggaaccaaattggctggcaccttgatcttggacttcccatgctccagaactgtgagaaataaatttctattatttaagcccatggtagttttatggcatcctaagctaagacagcgcgtctctagtttcccacagattcataaaggtccatacaaaaatgttataactgttaatagtgtcctgtccttgaatttaacagcaaccaacatattgtttgcatagttcttgcaccatttggaaacagtgacctttaggtgttgcaggtaactattgggaaatccttcaatttgtttaacatttccatattttgatttgcatcttgggagttgcttggaatttgggatcctcttctgtctcttgagttgaaatcagaggctgcttgccgggcaaggtggctcacgcctgtaatcccagcactttgggaggcccaggcagacagatcaccagatgtcgggagttagaaaccagcctggccaacatggcaaaaccccgtctctactaaaaatacaaaaattagtcgggcgtgctggtgcatgcctgtaatcctagctgcttgggtgctgagtcaggagaattgcttgaacccgggaggtggaggttgcagtgagccaagatcgtgtcactgcactccagccggggcaacagagcgagactctgcctcaaaaaaagaaaaaagaaatcagaggctggg

SEQ ID NO: 443258 - DNA, 2928 bp, Homo sapiens
  misc_feature (1211)..(1211): n is a, c, g, or t
ttaggctgtagaatgtagacaagtaaataggcatcatcagtatgatgagagtgaagctacttaatactgtggaatcaaataaaggaggaaccccttactaaaccaagagggaggaataaaatggaatgggactagagaagcaattagctttaataagggtattatggaagactttctagatgagaagcagtaagtacagatgtttggaggcaaacattagagagattgttgggtaaagaagacaatgctggaggtctacttgtgaaggccttgaatgctatgtgcagaagtcagcttctgagaaccaggaagaagatattgaaagattttaagtagaagaatcataggattgaattcattttagacagatcacctgaggtcaggagttcaagaccagccttgccaacatggtgaaaccctgtctctactaaaaatacaaaaattagcagagcatggtggcgggcgcctgtaatcccagctactcaggaggctgaggcaggagaattgcttgaacccgggaggtggagtttgcagtgagccaagatagtgccatcgcactccagcctggacaacagagcgagactccatctaaaaaaaaaaaaaaaaaaaaaaaaaactcagtttttggttttgaaaatgtcatgatacctgttgagataactgctgaatagatgggtaatacacagtctagggcatggtatcaaaagaacttgtcactgtacatatcggaaatggtaaaaatatgttttgccgttttcacgaattcattcatttttcatgtttcatgaattcattctttttaaaaaaaaaaaaaatcctgctaattctctgtttctcttgcttttctcctttatgactaagttttcctcattatgggttaccccacattactgcttacgaagacatctctttagtcagaaaacagtagcttggttcagttctagcttcattgttaagctcataggtaaatctggcaaatggctagaaacagtcacatgtttgcttgtccttaatgctctcaccttttcccagctatttggatgtatatacttttgcttactttgtagtgtaccaacttaatatatgttatagactaaatgtttatgtcctcccaaacttcatattttggaagccagacatggtaactcacacctgtaaacctaacactttgggaggcctagttgggaggattgcttgagtccgggagttcngaaccagcctggacaacatggtgagaccccgtctctacaaaaaaaaaaaaaaatttttaattagccaggtgtggtggcatacacctgtagtcccagctactcaggaggcttgcctgagcccagaagtttgagactgcagtgagccatgatattgccagcctgggtgacagagcaagaccttgtctcaagaaaaaaaaaaaaaaattgccaattgcgatggctcacgcctgtaatcccagcactaggaggccgaggtgggtgaatcacctgaggtcaggagttttgagaccagcctggccaacgtggcaaaaccccgtctctactaaaaatgcaaaaattaccgggacgtgttggtgagcacctgtaatccctgctactcgggaggctgaggcaagagaatctcttgaacccagggggtggaggttgcactgagccgagatcatgccattgtacttcacctgggcaacaagagggaaactgtctccaaaaaaaaaaaatttggagggctgggcacggtggctcacacctgtaatcccagcactttgggaggccaaggcggtggatcacaaagtcaggagttcaagaccagcctggccaacatagtgaaaccctgtctctactaaaaatacaaaaattagccaggcatggtggcacacgcctgtagtcccagctactggggaggctgaggcaggagaattgctttgaacccgggaggcagaggttgtgagctgagatcgcgtcagtacactccagcctgggcaacaatgcgagattgcatctcaaaaaaataaataaatatttggagtcccataataaataaatatttggagtccaatgtgatagtatctggagatggggcctttggaggtaatatgggttagataggtcatgacggtagggccctcattatgggattagtggcgttataagaagaagagagaaatcttcctcctcaagagcagaggaaaagccatataagaatacagtgagacggccacttccaaaccagaaagggagcccccaccaggaaccaaattggctggcaccttgatcttggacttcccatgctccagaactgtgagaaataaatttctattatttaagcccatggtagttttatggcatcctaagctaagacagcgcgtctctagtttcccacagattcataaaggtccatacaaaaatgttataactgttaatagtgtcctgtccttgaatttaacagcaaccaacatattgtttgcatagttcttgcaccatttggaaacagtgacctttaggtgttgcaggtaactattgggaaatccttcaatttgtttaacatttccatattttgatttgcatcttgggagttgcttggaatttgggatcctcttctgtctcttgagttgaaatcagaggctgcttgccgggcaaggtggctcacgcctgtaatcccagcactttgggaggcccaggcagacagatcaccagatgtcgggagttagaaaccagcctggccaacatggcaaaaccccgtctctactaaaaatacaaaaattagtcgggcgtgctggtgcatgcctgtaatcctagctgcttgggtgctgagtcaggagaattgcttgaacccgggaggtggaggttgcagtgagccaagatcgtgtcactgcactccagccggggcaacagagcgagactctgcctcaaaaaaagaaaaaagaaatcagaggctggg

SEQ ID NO: 443259 - DNA, 3007 bp, Homo sapiens
  misc_feature (1290)..(1290): n is a, c, g, or t
agccgagattgcgccactgcactccagcctgggcgactgaacgagactccgcctcaaaaaaaaagagtttgtgaggaaaattaaaagctgattggataaagtgttactctggggaaaagagagcaaacttttggtggttggttgatcagagatggcctcactgagaaggtattagaaaggacaagaacagtgtgagaccaaagggaatagctgggcaaaggccctaaggtgaaaaatttgttgtgtttagggaatagcaaggtcagtgtatccgaaatctagtgaccaaaagaaggaatgataggaggtgaagtcttcagcctcaataagaaggtgaagtgcactggaagccattgaaggatttaagaaatggagtatctggccgggcgcggtggctcacgcctgtaatcccagcactttgggaggccgaggtgggaggatcaagaggtcaggagatggagaccatcctggctaacatggtgaaaccccgtctctattcaaaataaaaaatttttttaaaaattagccaggcgtggtggcgggcgcctgtagtcccagctactcgggaggctgaggcaggataatggcgtgaacccaggaggcagggcttgcagtgagccgagatcgtgccactgcactccagcctgggcgacagagcgagactccgtctaaaaaaaaaaaaaaaaaaaaaaaaactcagtttttggttttgaaaatgtcatgatacctgttgagataactgctgaatagatgggtaatacacagtctagggcatggtatcaaaagaacttgtcactgtacatatcggaaatggtaaaaatatgttttgccgttttcacgaattcattcatttttcatgtttcatgaattcattctttttaaaaaaaaaaaaaatcctgctaattctctgtttctcttgcttttctcctttatgactaagttttcctcattatgggttaccccacattactgcttacgaagacatctctttagtcagaaaacagtagcttggttcagttctagcttcattgttaagctcataggtaaatctggcaaatggctagaaacagtcacatgtttgcttgtccttaatgctctcaccttttcccagctatttggatgtatatacttttgcttactttgtagtgtaccaacttaatatatgttatagactaaatgtttatgtcctcccaaacttcatattttggaagccagacatggtaactcacacctgtaaacctaacactttgggaggcctagttgggaggattgcttgagtccgggagttcngaaccagcctggacaacatggtgagaccccgtctctacaaaaaaaaaaaaaaatttttaattagccaggtgtggtggcatacacctgtagtcccagctactcaggaggcttgcctgagcccagaagtttgagactgcagtgagccatgatattgccagcctgggtgacagagcaagaccttgtctcaagaaaaaaaaaaaaaaattgccaattgcgatggctcacgcctgtaatcccagcactaggaggccgaggtgggtgaatcacctgaggtcaggagttttgagaccagcctggccaacgtggcaaaaccccgtctctactaaaaatgcaaaaattaccgggacgtgttggtgagcacctgtaatccctgctactcgggaggctgaggcaagagaatctcttgaacccagggggtggaggttgcactgagccgagatcatgccattgtacttcacctgggcaacaagagggaaactgtctccaaaaaaaaaaaatttggagggctgggcacggtggctcacacctgtaatcccagcactttgggaggccaaggcggtggatcacaaagtcaggagttcaagaccagcctggccaacatagtgaaaccctgtctctactaaaaatacaaaaattagccaggcatggtggcacacgcctgtagtcccagctactggggaggctgaggcaggagaattgctttgaacccgggaggcagaggttgtgagctgagatcgcgtcagtacactccagcctgggcaacaatgcgagattgcatctcaaaaaaataaataaatatttggagtcccataataaataaatatttggagtccaatgtgatagtatctggagatggggcctttggaggtaatatgggttagataggtcatgacggtagggccctcattatgggattagtggcgttataagaagaagagagaaatcttcctcctcaagagcagaggaaaagccatataagaatacagtgagacggccacttccaaaccagaaagggagcccccaccaggaaccaaattggctggcaccttgatcttggacttcccatgctccagaactgtgagaaataaatttctattatttaagcccatggtagttttatggcatcctaagctaagacagcgcgtctctagtttcccacagattcataaaggtccatacaaaaatgttataactgttaatagtgtcctgtccttgaatttaacagcaaccaacatattgtttgcatagttcttgcaccatttggaaacagtgacctttaggtgttgcaggtaactattgggaaatccttcaatttgtttaacatttccatattttgatttgcatcttgggagttgcttggaatttgggatcctcttctgtctcttgagttgaaatcagaggctgcttgccgggcaaggtggctcacgcctgtaatcccagcactttgggaggcccaggcagacagatcaccagatgtcgggagttagaaaccagcctggccaacatggcaaaaccccgtctctactaaaaatacaaaaattagtcgggcgtgctggtgcatgcctgtaatcctagctgcttgggtgctgagtcaggagaattgcttgaacccgggaggtggaggttgcagtgagccaagatcgtgtcactgcactccagccggggcaacagagcgagactctgcctcaaaaaaagaaaaaagaaatcagaggctggg

SEQ ID NO: 443260 - DNA, 3008 bp, Homo sapiens
  misc_feature (1291)..(1291): n is a, c, g, or t
agccgagattgcgccactgcactccagcctgggcgactgaacgagactccgcctcaaaaaaaaagagtttgtgaggaaaattaaaagctgattggataaagtgttactctggggaaaagagagcaaacttttggtggttggttgatcagagatggcctcactgagaaggtattagaaaggacaagaacagtgtgagaccaaagggaatagctgggcaaaggccctaaggtgaaaaatttgttgtgtttagggaatagcaaggtcagtgtatccgaaatctagtgaccaaaagaaggaatgataggaggtgaagtcttcagcctcaataagaaggtgaagtgcactggaagccattgaaggatttaagaaatggagtatctggccgggcgcggtggctcacgcctgtaatcccagcactttgggaggccgaggtgggaggatcaagaggtcaggagatggagaccatcctggctaacatggtgaaaccccgtctctattcaaaataaaaaatttttttaaaaattagccaggcgtggtggcgggcgcctgtagtcccagctactcgggaggctgaggcaggataatggcgtgaacccaggaggcagggcttgcagtgagccgagatcgtgccactgcactccagcctggacaacagagcgagactccatctaaaaaaaaaaaaaaaaaaaaaaaaaactcagtttttggttttgaaaatgtcatgatacctgttgagataactgctgaatagatgggtaatacacagtctagggcatggtatcaaaagaacttgtcactgtacatatcggaaatggtaaaaatatgttttgccgttttcacgaattcattcatttttcatgtttcatgaattcattctttttaaaaaaaaaaaaaatcctgctaattctctgtttctcttgcttttctcctttatgactaagttttcctcattatgggttaccccacattactgcttacgaagacatctctttagtcagaaaacagtagcttggttcagttctagcttcattgttaagctcataggtaaatctggcaaatggctagaaacagtcacatgtttgcttgtccttaatgctctcaccttttcccagctatttggatgtatatacttttgcttactttgtagtgtaccaacttaatatatgttatagactaaatgtttatgtcctcccaaacttcatattttggaagccagacatggtaactcacacctgtaaacctaacactttgggaggcctagttgggaggattgcttgagtccgggagttcngaaccagcctggacaacatggtgagaccccgtctctacaaaaaaaaaaaaaaatttttaattagccaggtgtggtggcatacacctgtagtcccagctactcaggaggcttgcctgagcccagaagtttgagactgcagtgagccatgatattgccagcctgggtgacagagcaagaccttgtctcaagaaaaaaaaaaaaaaattgccaattgcgatggctcacgcctgtaatcccagcactaggaggccgaggtgggtgaatcacctgaggtcaggagttttgagaccagcctggccaacgtggcaaaaccccgtctctactaaaaatgcaaaaattaccgggacgtgttggtgagcacctgtaatccctgctactcgggaggctgaggcaagagaatctcttgaacccagggggtggaggttgcactgagccgagatcatgccattgtacttcacctgggcaacaagagggaaactgtctccaaaaaaaaaaaatttggagggctgggcacggtggctcacacctgtaatcccagcactttgggaggccaaggcggtggatcacaaagtcaggagttcaagaccagcctggccaacatagtgaaaccctgtctctactaaaaatacaaaaattagccaggcatggtggcacacgcctgtagtcccagctactggggaggctgaggcaggagaattgctttgaacccgggaggcagaggttgtgagctgagatcgcgtcagtacactccagcctgggcaacaatgcgagattgcatctcaaaaaaataaataaatatttggagtcccataataaataaatatttggagtccaatgtgatagtatctggagatggggcctttggaggtaatatgggttagataggtcatgacggtagggccctcattatgggattagtggcgttataagaagaagagagaaatcttcctcctcaagagcagaggaaaagccatataagaatacagtgagacggccacttccaaaccagaaagggagcccccaccaggaaccaaattggctggcaccttgatcttggacttcccatgctccagaactgtgagaaataaatttctattatttaagcccatggtagttttatggcatcctaagctaagacagcgcgtctctagtttcccacagattcataaaggtccatacaaaaatgttataactgttaatagtgtcctgtccttgaatttaacagcaaccaacatattgtttgcatagttcttgcaccatttggaaacagtgacctttaggtgttgcaggtaactattgggaaatccttcaatttgtttaacatttccatattttgatttgcatcttgggagttgcttggaatttgggatcctcttctgtctcttgagttgaaatcagaggctgcttgccgggcaaggtggctcacgcctgtaatcccagcactttgggaggcccaggcagacagatcaccagatgtcgggagttagaaaccagcctggccaacatggcaaaaccccgtctctactaaaaatacaaaaattagtcgggcgtgctggtgcatgcctgtaatcctagctgcttgggtgctgagtcaggagaattgcttgaacccgggaggtggaggttgcagtgagccaagatcgtgtcactgcactccagccggggcaacagagcgagactctgcctcaaaaaaagaaaaaagaaatcagaggctggg

SEQ ID NO: 443261 - DNA, 2209 bp, Homo sapiens
  misc_feature (492)..(492): n is a, c, g, or t
agccgagattgcgccactgcactccagcctgggcgactgaacgagactccgcctcaaaaaaaaagagtttgtgaggaaaattaaaagctgattggataaagtgttactctggggaaaagagagcaaacttttggtggttggttgatcagagatggcctcactgagaaggtattagaaaggacaagaacagtgtgagaccaaagggaatagctgggcaaaggccctaaggtgaaaaatttgttgtgtttagggaatagcaaggtcagtgtatccgaaatctagtgaccaaaagaaggaatgataggaggtgaagtcttcagcctcaataagaaggtgaagtgcactggaagccattgaaggatttaagaaatggatatcatggactaggatagtagcagtagagatgagggaagtggatggatccaaaaagctgacctatcttgcttaccaattaaatgaggaaagggaggattgcttgagtccgggagttcngaaccagcctggacaacatggtgagaccccgtctctacaaaaaaaaaaaaaaatttttaattagccaggtgtggtggcatacacctgtagtcccagctactcaggaggcttgcctgagcccagaagtttgagactgcagtgagccatgatattgccagcctgggtgacagagcaagaccttgtctcaagaaaaaaaaaaaaaaattgccaattgcgatggctcacgcctgtaatcccagcactaggaggccgaggtgggtgaatcacctgaggtcaggagttttgagaccagcctggccaacgtggcaaaaccccgtctctactaaaaatgcaaaaattaccgggacgtgttggtgagcacctgtaatccctgctactcgggaggctgaggcaagagaatctcttgaacccagggggtggaggttgcactgagccgagatcatgccattgtacttcacctgggcaacaagagggaaactgtctccaaaaaaaaaaaatttggagggctgggcacggtggctcacacctgtaatcccagcactttgggaggccaaggcggtggatcacaaagtcaggagttcaagaccagcctggccaacatagtgaaaccctgtctctactaaaaatacaaaaattagccaggcatggtggcacacgcctgtagtcccagctactggggaggctgaggcaggagaattgctttgaacccgggaggcagaggttgtgagctgagatcgcgtcagtacactccagcctgggcaacaatgcgagattgcatctcaaaaaaataaataaatatttggagtcccataataaataaatatttggagtccaatgtgatagtatctggagatggggcctttggaggtaatatgggttagataggtcatgacggtagggccctcattatgggattagtggcgttataagaagaagagagaaatcttcctcctcaagagcagaggaaaagccatataagaatacagtgagacggccacttccaaaccagaaagggagcccccaccaggaaccaaattggctggcaccttgatcttggacttcccatgctccagaactgtgagaaataaatttctattatttaagcccatggtagttttatggcatcctaagctaagacagcgcgtctctagtttcccacagattcataaaggtccatacaaaaatgttataactgttaatagtgtcctgtccttgaatttaacagcaaccaacatattgtttgcatagttcttgcaccatttggaaacagtgacctttaggtgttgcaggtaactattgggaaatccttcaatttgtttaacatttccatattttgatttgcatcttgggagttgcttggaatttgggatcctcttctgtctcttgagttgaaatcagaggctgcttgccgggcaaggtggctcacgcctgtaatcccagcactttgggaggcccaggcagacagatcaccagatgtcgggagttagaaaccagcctggccaacatggcaaaaccccgtctctactaaaaatacaaaaattagtcgggcgtgctggtgcatgcctgtaatcctagctgcttgggtgctgagtcaggagaattgcttgaacccgggaggtggaggttgcagtgagccaagatcgtgtcactgcactccagccggggcaacagagcgagactctgcctcaaaaaaagaaaaaagaaatcagaggctggg

SEQ ID NO: 443262 - DNA, 1807 bp, Homo sapiens
gtgacgtcatctccgggcgccgagggtgactggacttgtggtgcgctgccagggctccgcagcgttgccggttgtattcgctggataccagagggcggaagtgcagcagggttcagctccgacctccgcgccggtgctttttgcggctgcgcgggcttcctggagtcctgctaccgcgtccccgcaggacagtgtgtcaggcgggcagcttgccccgccgccccaccggagcgcggaatctgggcgtccccaccagtgcggggagccggaaggaggagccatagcttggagtaggtttggctttggttgaaataagaatttagcctgtatgtactgctttaactcctggaagaatgacagatgacaaagatgtgcttcgagatgtgtggtttggacgaattccaacttgtttcacgctatatcaggatgagataactgaaagggaagcagaaccatactatttgcttttgccaagagtaagttatttgacgttggtaactgacaaagtgaaaaagcactttcagaaggttatgagacaagaagacattagtgagatatggtttgaatatgaaggcacaccactgaaatggcattatccaattggtttgctatttgatcttcttgcatcaagttcagctcttccttggaacatcacagtacattttaagagttttccagaaaaagaccttctgcactgtccatctaaggatgcaattgaagctcattttatgtcatgtatgaaagaagctgatgctttaaaacataaaagtcaagtaatcaatgaaatgcagaaaaaagatcacaagcaactctggatgggattgcaaaatgacagatttgaccagttttgggccatcaatcggaaactcatggaatatcctgcagaagaaaatggatttcgttatatcccctttagaatatatcagacaacgactgaaagacctttcattcagaagctgtttcgtcctgtggctgcagatggacagttgcacacactaggagatctcctcaaagaagtttgtccttctgctattgatcctgaagatggggaaaaaaagaatcaagtgatgattcatggaattgagccaatgttggaaacacctctgcagtggctgagtgaacatctgagctacccggataattttcttcatattagtatcatcccacagccaacagattgaaggatcaactatttgcctgaacagaatcatccttaaatgggatttatcagagcatgtcacccttttgcttcaatcaggtttggtggaggcaacctgaccagaaacacttcgctgctgcaagccagacaggaaaaagattccatgtcagataaggcaactgggctggtcttactttgcatcacctctgctttcctccactgccatcattaaacctcagctgtgacatgaaagacttaccggaccactgaaggtcttctgtaaaatataatgaagctgaaacctttggcctaagaagaaaatggaagtatgtgccactcgatttgtatttctgattaacaaataaacaggggtatttcctaaggtgaccatggttgaactttagctcatgaaagtggaaacattggtttaattttcaagagaattaagaaagtaaaagagaaattctgttatcaataacttgcaagtaattttttgtaaaagattgaattacagtaaacccatctttccttaacgaaaatttcctatgtttacagtctgtctattggtatgcaatcttgtaactttgataatgaacagtgagagatttttaaataaagcctctaaatatgttttgtcatttaataaca

SEQ ID NO: 443263 - DNA, 1663 bp, Homo sapiens
tggcacgaggcccgcccggccgcgatggcgggtgaaggtggttcctccgggcaaggtggagttggcgagacgccggcccggagccctggggccggttggcgggtgtggcctgcggggtccctcttggggtacatgtctgttgcttactaagtttggctttggttgaaataagaatttagcctgtatgtactgctttaactcctggaagaatgacagatgacaaagatgtgcttcgagatgtgtggtttggacgaattccaacttgtttcacgctatatcaggatgagataactgaaagggaagcagaaccatactatttgcttttgccaagagtaagttatttgacgttggtaactgacaaagtgaaaaagcactttcagaaggttatgagacaagaagacattagtgagatatggtttgaatatgaaggcacaccactgaaatggcattatccaattggtttgctatttgatcttcttgcatcaagttcagctcttccttggaacatcacagtacattttaagagttttccagaaaaagaccttctgcactgtccatctaaggatgcaattgaagctcattttatgtcatgtatgaaagaagctgatgctttaaaacataaaagtcaagtaatcaatgaaatgcagaaaaaagatcacaagcaactctggatgggattgcaaaatgacagatttgaccagttttgggccatcaatcggaaactcatggaatatcctgcagaagaaaatggatttcgttatatcccctttagaatatatcagacaacgactgaaagacctttcattcagaagctgtttcgtcctgtggctgcagatggacagttgcacacactaggagatctcctcaaagaagtttgtccttctgctattgatcctgaagatggggaaaaaaagaatcaagtgatgattcatggaattgagccaatgttggaaacacctctgcagtggctgagtgaacatctgagctacccggataattttcttcatattagtatcatcccacagccaacagattgaaggatcaactatttgcctgaacagaatcatccttaaatgggatttatcagagcatgtcacccttttgcttcaatcaggtttggtggaggcaacctgaccagaaacacttcgctgctgcaagccagacaggaaaaagattccatgtcagataaggcaactgggctggtcttactttgcatcacctctgctttcctccactgccatcattaaacctcagctgtgacatgaaagacttaccggaccactgaaggtcttctgtaaaatataatgaagctgaaacctttggcctaagaagaaaatggaagtatgtgccactcgatttgtatttctgattaacaaataaacaggggtatttcctaaggtgaccatggttgaactttagctcatgaaagtggaaacattggtttaattttcaagagaattaagaaagtaaaagagaaattctgttatcaataacttgcaagtaattttttgtaaaagattgaattacagtaaacccatctttccttaacgaaaatttcctatgtttacagtctgtctattggtatgcaatcttgtaactttgataatgaacagtgagagatttttaaataaagcctctaaatatgttttgtcatttaataaca

SEQ ID NO: 443264 - DNA, 1679 bp, Homo sapiens
gtgacgtcatctccgggcgccgagggtgactggacttgtggtgcgctgccagggctccgcagcgttgccggttgtattcgctggataccagagggcggaagtgcagcagggttcagctccgacctccgcgccggtgctttttgcggctgcgcgggcttcctggagtcctgctaccgcgtccccgcaggacagtgtgtcaggcgggcagcttgccccgccgccccaccggagcgcggaatctgggcgtccccaccagtgcggggagccggaaggaggagccatagcttggagtaggtttggctttggttgaaataagaatttagcctgtatgtactgctttaactcctggaagaatgacagatgacaaagatgtgcttcgagatgtgtggtttggacgaattccaacttgtttcacgctatatcaggatgagataactgaaagggaagcagaaccatactatgcattatccaattggtttgctatttgatcttcttgcatcaagttcagctcttccttggaacatcacagtacattttaagagttttccagaaaaagaccttctgcactgtccatctaaggatgcaattgaagctcattttatgtcatgtatgaaagaagctgatgctttaaaacataaaagtcaagtaatcaatgaaatgcagaaaaaagatcacaagcaactctggatgggattgcaaaatgacagatttgaccagttttgggccatcaatcggaaactcatggaatatcctgcagaagaaaatggatttcgttatatcccctttagaatatatcagacaacgactgaaagacctttcattcagaagctgtttcgtcctgtggctgcagatggacagttgcacacactaggagatctcctcaaagaagtttgtccttctgctattgatcctgaagatggggaaaaaaagaatcaagtgatgattcatggaattgagccaatgttggaaacacctctgcagtggctgagtgaacatctgagctacccggataattttcttcatattagtatcatcccacagccaacagattgaaggatcaactatttgcctgaacagaatcatccttaaatgggatttatcagagcatgtcacccttttgcttcaatcaggtttggtggaggcaacctgaccagaaacacttcgctgctgcaagccagacaggaaaaagattccatgtcagataaggcaactgggctggtcttactttgcatcacctctgctttcctccactgccatcattaaacctcagctgtgacatgaaagacttaccggaccactgaaggtcttctgtaaaatataatgaagctgaaacctttggcctaagaagaaaatggaagtatgtgccactcgatttgtatttctgattaacaaataaacaggggtatttcctaaggtgaccatggttgaactttagctcatgaaagtggaaacattggtttaattttcaagagaattaagaaagtaaaagagaaattctgttatcaataacttgcaagtaattttttgtaaaagattgaattacagtaaacccatctttccttaacgaaaatttcctatgtttacagtctgtctattggtatgcaatcttgtaactttgataatgaacagtgagagatttttaaataaagcctctaaatatgttttgtcatttaataaca

SEQ ID NO: 443265 - DNA, 1194 bp, Homo sapiens
  misc_feature (54)..(55): n is a, c, g, or t
taccgcgtccccatcgttctacctttctacctattcgccgccacggggtgtcannagttttccagaaaaagaccttctgcactgtccatctaaggatgcaattgaagctcattttatgtcatgtatgaaagaagctgatgctttaaaacataaaagtcaagtaatcaatgaaatgcagaaaaaagatcacaagcaactctggatgggattgcaaaatgacagatttgaccagttttgggccatcaatcggaaactcatggaatatcctgcagaagaaaatggatttcgttatatcccctttagaatatatcagacaacgactgaaagacctttcattcagaagctgtttcgtcctgtggctgcagatggacagttgcacacactaggagatctcctcaaagaagtttgtccttctgctattgatcctgaagatggggaaaaaaagaatcaagtgatgattcatggaattgagccaatgttggaaacacctctgcagtggctgagtgaacatctgagctacccggataattttcttcatattagtatcatcccacagccaacagattgaaggatcaactatttgcctgaacagaatcatccttaaatgggatttatcagagcatgtcacccttttgcttcaatcaggtttggtggaggcaacctgaccagaaacacttcgctgctgcaagccagacaggaaaaagattccatgtcagataaggcaactgggctggtcttactttgcatcacctctgctttcctccactgccatcattaaacctcagctgtgacatgaaagacttaccggaccactgaaggtcttctgtaaaatataatgaagctgaaacctttggcctaagaagaaaatggaagtatgtgccactcgatttgtatttctgattaacaaataaacaggggtatttcctaaggtgaccatggttgaactttagctcatgaaagtggaaacattggtttaattttcaagagaattaagaaagtaaaagagaaattctgttatcaataacttgcaagtaattttttgtaaaagattgaattacagtaaacccatctttccttaacgaaaatttcctatgtttacagtctgtctattggtatgcaatcttgtaactttgataatgaacagtgagagatttttaaataaagcctctaaatatgttttgtcatttaataaca

SEQ ID NO: 443266 - DNA, 1227 bp, Homo sapiens
agcggcttgttagtctctttaagagatactgagaaaaaatgcttttgttgatatctttttgtgttgtttgctttttaatgtctttaagtttttgaagggtcccagccaattatctttagaatgtcccacccaactttggatttgtctgtttcctcagaattagatttacctgaatttatcatgttaaacatttttcacagtgataccacatctgtgatgttgtgtaattatgctaacaccgtatcaaaaggcacctaatgccaacataaagtttatgatatataaatttgtaattggcagcaacaaagacttaattgcttgaatcattttttcctttttcaaatagacaacgactgaaagacctttcattcagaagctgtttcgtcctgtggctgcagatggacagttgcacacactaggagatctcctcaaagaagtttgtccttctgctattgatcctgaagatggggaaaaaaagaatcaagtgatgattcatggaattgagccaatgttggaaacacctctgcagtggctgagtgaacatctgagctacccggataattttcttcatattagtatcatcccacagccaacagattgaaggatcaactatttgcctgaacagaatcatccttaaatgggatttatcagagcatgtcacccttttgcttcaatcaggtttggtggaggcaacctgaccagaaacacttcgctgctgcaagccagacaggaaaaagattccatgtcagataaggcaactgggctggtcttactttgcatcacctctgctttcctccactgccatcattaaacctcagctgtgacatgaaagacttaccggaccactgaaggtcttctgtaaaatataatgaagctgaaacctttggcctaagaagaaaatggaagtatgtgccactcgatttgtatttctgattaacaaataaacaggggtatttcctaaggtgaccatggttgaactttagctcatgaaagtggaaacattggtttaattttcaagagaattaagaaagtaaaagagaaattctgttatcaataacttgcaagtaattttttgtaaaagattgaattacagtaaacccatctttccttaacgaaaatttcctatgtttacagtctgtctattggtatgcaatcttgtaactttgataatgaacagtgagagatttttaaataaagcctctaaatatgttttgtcatttaataaca

SEQ ID NO: 443267 - DNA, 1023 bp, Homo sapiens
  misc_feature (40)..(40): n is a, c, g, or t
tggggtgacttaaggatgtaggcactgcttggatgggatngcaaatgacagatttgaccagttttgggccatcaatcggaaactcatggaatatcctgcagaagaaaatggatttcgttatatcccctttagaatatatcagacaacgactgaaagacctttcattcagaagctgtttcgtcctgtggctgcagatggacagttgcacacactaggagatctcctcaaagaagtttgtccttctgctattgatcctgaagatggggaaaaaaagaatcaagtgatgattcatggaattgagccaatgttggaaacacctctgcagtggctgagtgaacatctgagctacccggataattttcttcatattagtatcatcccacagccaacagattgaaggatcaactatttgcctgaacagaatcatccttaaatgggatttatcagagcatgtcacccttttgcttcaatcaggtttggtggaggcaacctgaccagaaacacttcgctgctgcaagccagacaggaaaaagattccatgtcagataaggcaactgggctggtcttactttgcatcacctctgctttcctccactgccatcattaaacctcagctgtgacatgaaagacttaccggaccactgaaggtcttctgtaaaatataatgaagctgaaacctttggcctaagaagaaaatggaagtatgtgccactcgatttgtatttctgattaacaaataaacaggggtatttcctaaggtgaccatggttgaactttagctcatgaaagtggaaacattggtttaattttcaagagaattaagaaagtaaaagagaaattctgttatcaataacttgcaagtaattttttgtaaaagattgaattacagtaaacccatctttccttaacgaaaatttcctatgtttacagtctgtctattggtatgcaatcttgtaactttgataatgaacagtgagagatttttaaataaagcctctaaatatgttttgtcatttaataaca

SEQ ID NO: 443268 - DNA, 1008 bp, Homo sapiens
gaaagaagtaatactttcacatacagcaacagaatttttatcagaatatattgtaaccctcaggtttctgttttgggtgatacatactgcaacatttgaactttctccatgtccacatttcctgttcaggggacaaaacatgtttaaaatccatttaatgcactaaggattctcaaaaggcaccagattattttttcttcaactgttttgacttttattgttgttgggtttctttcttggaatagatggggaaaaaaagaatcaagtgatgattcatggaattgagccaatgttggaaacacctctgcagtggctgagtgaacatctgagctacccggataattttcttcatattagtatcatcccacagccaacagattgaaggatcaactatttgcctgaacagaatcatccttaaatgggatttatcagagcatgtcacccttttgcttcaatcaggtttggtggaggcaacctgaccagaaacacttcgctgctgcaagccagacaggaaaaagattccatgtcagataaggcaactgggctggtcttactttgcatcacctctgctttcctccactgccatcattaaacctcagctgtgacatgaaagacttaccggaccactgaaggtcttctgtaaaatataatgaagctgaaacctttggcctaagaagaaaatggaagtatgtgccactcgatttgtatttctgattaacaaataaacaggggtatttcctaaggtgaccatggttgaactttagctcatgaaagtggaaacattggtttaattttcaagagaattaagaaagtaaaagagaaattctgttatcaataacttgcaagtaattttttgtaaaagattgaattacagtaaacccatctttccttaacgaaaatttcctatgtttacagtctgtctattggtatgcaatcttgtaactttgataatgaacagtgagagatttttaaataaagcctctaaatatgttttgtcatttaataaca

SEQ ID NO: 443269 - DNA, 1440 bp, Homo sapiens
  misc_feature (1282)..(1282): n is a, c, g, or t
  misc_feature (1285)..(1285): n is a, c, g, or t
  misc_feature (1288)..(1288): n is a, c, g, or t
  misc_feature (1346)..(1346): n is a, c, g, or t
  misc_feature (1411)..(1411): n is a, c, g, or t
  misc_feature (1431)..(1431): n is a, c, g, or t
gtgacgtcatctccgggcgccgagggtgactggacttgtggtgcgctgccagggctccgcagcgttgccggttgtattcgctggataccagagggcggaagtgcagcagggttcagctccgacctccgcgccggtgctttttgcggctgcgcgggcttcctggagtcctgctaccgcgtccccgcaggacagtgtgtcaggcgggcagcttgccccgccgccccaccggagcgcggaatctgggcgtccccaccagtgcggggagccggaaggaggagccatagcttggagtaggtttggctttggttgaaataagaatttagcctgtatgtactgctttaactcctggaagaatgacagatgacaaagatgtgcttcgagatgtgtggtttggacgaattccaacttgtttcacgctatatcaggatgagataactgaaagggaagcagaaccatactatttgcttttgccaagagtaagttatttgacgttggtaactgacaaagtgaaaaagcactttcagaaggttatgagacaagaagacattagtgagatatggtttgaatatgaaggcacaccactgaaatggcattatccaattggtttgctatttgatcttcttgcatcaagttcagctcttccttggaacatcacagtacattttaagagttttccagaaaaagaccttctgcactgtccatctaaggatgcaattgaagctcattttatgtcatgtatgaaagaagctgatgctttaaaacataaaagtcaagtaatcaatgaaatgcagaaaaaagatcacaagcaactctggatgggattgcaaaatgacagatttgaccagttttgggccatcaatcggaaactcatggaatatcctgcagaagaaaatggatttcgttatatcccctttagaatatatcagacaacgactgaaagacctttcattcagaagctgtttcgtcctgtggctgcagatggacagttgcacacactaggagatctcctcaaagaagtttgtccttctgctattgatcctgaagatggggaaaaaaagaatcaagtgatgattcatggaattgagccaatgttggaaacacctctgcagtggctgagtgaacatctgagctacccggataattttcttcatattagtatcatcccacagccaacagattgaaggatcaactatttgcctgaacagaatcatccttaaatgggatttatcagagcatgtcacccttttgcttcaatcaggtttggtggaggcaacctgaacgnttntgnttaatctgagaatcacatttggtttgttgagcctaatatttgttgagattttgcaggnccctgatcttttgtggtcctgtaaaagatactgaggaatgtctttcagccaagccaagaggatgntttcaataaacctaataatntgaagttca

SEQ ID NO: 443270 - DNA, 574 bp, Homo sapiens
ccttgataacacaagtagtcgtatgtttatatgtttacagtttttcttatgagaaaaaaatggctgtgcgaatatctagggagaggatgcaataatgtagaaaaaaattaattttatatttgctttatgtttatggaaagataagtttaataaaaataagaaaatatatgtgatgtcctttcagaaacttctagagggatatttaaaactttcatctcttcatgtgaggtattccattataatgttgttcatttttaataacaaataatttatatcattacagacagatttgaccagttttgggccatcaatcggaaactcatggaatatcctgcagaagaaaatggatttcgttatatcccctttagaatatatcaggtaggaaataacattttaaaaaacatccatttatgaaagcctcagacatcttaattgaagcactctagtgtagaactctttgtctgcatagtaactaaacggtatttattaggggttttccaaactgtgtctttcagtggcaatcaagtcagataccgcactgaaatatttgactcatatgcatttggtactcatt

SEQ ID NO: 443271 - DNA, 3311 bp, Homo sapiens
gtgacgtcatctccgggcgccgagggtgactggacttgtggtgcgctgccagggctccgcagcgttgccggttgtattcgctggataccagagggcggaagtgcagcagggttcagctccgacctccgcgccggtgctttttgcggctgcgcgggcttcctggagtcctgctaccgcgtccccgcaggacagtgtgtcaggcgggcagcttgccccgccgccccaccggagcgcggaatctgggcgtccccaccagtgcggggagccggaaggaggagccatagcttggagtaggtttggctttggttgaaataagaatttagcctgtatgtactgctttaactcctggaagaatgacagatgacaaagatgtgcttcgagatgtgtggtttggacgaattccaacttgtttcacgctatatcaggatgagataactgaaagggaagcagaaccatactatttgcttttgccaagagtaagttatttgacgttggtaactgacaaagtgaaaaagcactttcagaaggttatgagacaagaagacattagtgagatatggtttgaatatgaaggcacaccactgaaatggcattatccaattggtttgctatttgatcttcttgcatcaagttcagctcttccttggaacatcacagtacattttaagagttttccagaaaaagaccttctgcactgtccatctaaggatgcaattgaagctcattttatgtcatgtatgaaagaagctgatgctttaaaacataaaagtcaagtaatcaatgaaatgcagaaaaaagatcacaagcaactctggatgggattgcaaaatgacagatttgaccagttttgggccatcaatcggaaactcatggaatatcctgcagaagaaaatggatttcgttatatcccctttagaatatatcagacaacgactgaaagacctttcattcagaagctgtttcgtcctgtggctgcagatggacagttgcacacactaggagatctcctcaaagaagtttgtccttctgctattgatcctgaagatggggaaaaaaagaatcaagtgatgattcatggaattgagccaatgttggaaacacctctgcagtggctgagtgaacatctgagctacccggataattttcttcatattagtatcatcccacagccaacagattgaaggatcaactatttgcctgaacagaatcatccttaaatgggatttatcagagcatgtcacccttttgcttcaatcaggtttggtggaggcaacctgaccagaaacacttcgctgctgcaagccagacaggaaaaagattccatgtcagataaggcaactgggctggtcttactttgcatcacctctgctttcctccactgccatcattaaacctcagctgtgacatgaaagacttaccggaccactgaaggtcttctgtaaaatataatgaagctgaaacctttggcctaagaagaaaatggaagtatgtgccactcgatttgtatttctgattaacaaataaacaggggtatttcctaaggtgaccatggttgaactttagctcatgaaagtggaaacattggtttaattttcaagagaattaagaaagtaaaagagaaattctgttatcaataacttgcaagtaattttttgtaaaagattgaattacagtaaacccatctttccttaacgaaaatttcctatgtttacagtctgtctattggtatgcaatcttgtaactttgataatgaacagtgagagatttttaaataaagcctctaaatatgttttgtcatttaataacatacagttttgtcacttttcaagtactttctgactcacatacagtagatcactttttactctgtgttaccattttgactggtcgtcattggcatggggtggatatagggcataggattacttgtctcagaagctgtcatagaatttcttgctgccaattaaaaaacctgtgttctttacacactacacgtataaatattgtaactgttcatctttgttgttttatcactgtaagcctgtcaaatcatagtatcctaagcatctgtaaatgctaattttgcatttttggaaaaacccattccttccaagctagtgtttttcattggctccaggtctaatttttcactgtggtccctggcagccagtcttttgaagtttaaagattacctgtctcttgactgcagtaccttttctttaatttttaccaaaaatatccagaggttactggagttcttattcaatataaggaaagtttgctgcactttattaccaagcctctgggattttaccagtcaaacatatttgtgcattacatttcatttcttgtgagctagctggctgtccatattgaatgttgacccatttgagtacgctaaaaggcttacagtatcagacacgatcatggttttagatcccataataaaaatgaatgtttttcttataaaaaattatacaaatgctgaagtgagattctactattgttcattgcttccttttctttttccttttgcgattttcactgattaatagcacatttcttcacaaaattagataaagttggtcaaagaccagatattctggaatggaaattgtaaagcttaatcaaaaagaatagccagtacagcatacaatctcagaaacttagaagcaagtagaaaataattggttgatgtaaacgaaagtgccattttagtaaaggcaggaaaaaaatagcaatatttgagttatgtaaggataaaaaatccactgacttgtatttttgcacaagaggctggtctgaatatgattgttcacattaagagtgtttattcgtcggttcattttggggattttcccccttgatgttttgacagattgaagtgagctttagtgagcaaaaggatcagaatgcagggaacactaagctgtgatgaagaaagtgtggtaaaaagccagagtagttttatacagacaaaaccagtgtcaggcctttgcagtaggcttgagtgaacttctgatctagatttgaaagtaaattttatgaagacattgcccatttttacttcctcattcattattgtaccagcatcatagctttattactctaatcccaggtaagtcaagcctacaatgccctagaggaagagtaaaaccagaaattcatgctggcttaaataatctatttttgtttcttttcatttgaatatttaaattttatggtttattaaaaaattaaataaatgttgtgtccgtctttatttaaaacaagttacctgttgataaaatcattaaaatttccttagtcac

SEQ ID NO: 443272 - DNA, 486 bp, Homo sapiens
  misc_feature (40)..(40): n is a, c, g, or t
tggggtgacttaaggatgtaggcactgcttggatgggatngcaaatgacagatttgaccagttttgggccatcaatcggaaactcatggaatatcctgcagaagaaaatggatttcgttatatcccctttagaatatatcagacaacgactgaaagacctttcattcagaagctgtttcgtcctgtggctgcagatggacagttgcacacactaggagatctcctcaaagaagtttgtccttctgctattgatcctgaaggtaatacaatcagcaacattaaaacatttctttcattttctgttactgaagtaaaataagcattccacatttataaacaacaggttatttcaggaagatattttcatatcttacagcgaaaagtcttttcaaacagaagcacctaatatttaatatattattttgtaaattattgactaacaaaatgatgactcgactggcgaaataaaatacagtttttaaatca

SEQ ID NO: 443273 - DNA, 872 bp, Homo sapiens
tcaggaccgcgacaagccagcccagatccgcttcagcaacatttccgccgccaaagcggttgctgatgctattagaacaagccttggaccaaaaggaatggataaaatgatggggaaaaaaagaatcaagtgatgattcatggaattgagccaatgttggaaacacctctgcagtggctgagtgaacatctgagctacccggataattttcttcatattagtatcatcccacagccaacagattgaaggatcaactatttgcctgaacagaatcatccttaaatgggatttatcagagcatgtcacccttttgcttcaatcaggtttggtggaggcaacctgaccagaaacacttcgctgctgcaagccagacaggaaaaagattccatgtcagataaggcaactgggctggtcttactttgcatcacctctgctttcctccactgccatcattaaacctcagctgtgacatgaaagacttaccggaccactgaaggtcttctgtaaaatataatgaagctgaaacctttggcctaagaagaaaatggaagtatgtgccactcgatttgtatttctgattaacaaataaacaggggtatttcctaaggtgaccatggttgaactttagctcatgaaagtggaaacattggtttaattttcaagagaattaagaaagtaaaagagaaattctgttatcaataacttgcaagtaattttttgtaaaagattgaattacagtaaacccatctttccttaacgaaaatttcctatgtttacagtctgtctattggtatgcaatcttgtaactttgataatgaacagtgagagatttttaaataaagcctctaaatatgttttgtcatttaataaca

SEQ ID NO: 443274 - DNA, 1270 bp, Homo sapiens
gtgacgtcatctccgggcgccgagggtgactggacttgtggtgcgctgccagggctccgcagcgttgccggttgtattcgctggataccagagggcggaagtgcagcagggttcagctccgacctccgcgccggtgctttttgcggctgcgcgggcttcctggagtcctgctaccgcgtccccgcaggacagtgtgtcaggcgggcagcttgccccgccgccccaccggagcgcggaatctgggcgtccccaccagtgcggggagccggaaggaggagccatagcttggagtaggtttggctttggttgaaataagaatttagcctgtatgtactgctttaactcctggaagaatgacagatgacaaagatgtgcttcgagatgtgtggtttggacgaattccaacttgtttcacgctatatcaggatgagataactgaaagggaagcagaaccatactatttgcttttgccaagagtaagttatttgacgttggtaactgacaaagtgaaaaagcactttcagaaggttatgagacaagaagacattagtgagatatggtttgaatatgaaggcacaccactgaaatggcattatccaattggtttgctatttgatcttcttgcatcaagttcagctcttccttggaacatcacagtacattttaagagttttccagaaaaagaccttctgcactgtccatctaaggatgcaattgaagctcattttatgtcatgtatgaaagaagctgatgctttaaaacataaaagtcaagtaatcaatgaaatgcagaaaaaagatcacaagcaactctggatgggattgcaaaatgacagatttgaccagttttgggccatcaatcggaaactcatggaatatcctgcagaagaaaatggatttcgttatatcccctttagaatatatcagacaacgactgaaagacctttcattcagaagctgtttcgtcctgtggctgcagatggacagttgcacacactaggagatctcctcaaagaagtttgtccttctgctattgatcctgaaggtaatacaatcagcaacattaaaacatttctttcattttctgttactgaagtaaaataagcattccacatttataaacaacaggttatttcaggaagatattttcatatcttacagcgaaaagtcttttcaaacagaagcacctaatatttaatatattattttgtaaattattgactaacaaaatgatgactcgactggcgaaataaaatacagtttttaaatca

SEQ ID NO: 443275 - DNA, 1153 bp, Homo sapiens
ccgggagctgcagactacgcagccttcggtgcagtcgtcactcgtgtctcgctaccagctccccgctgccctgcgctcggcgggctggcatccggcccgggggaaagcggaccagcccttctgcaggtctgcggggccaagtgtcccggcggcgcacctcgtggcgagaatcgggagaaggaggagactacaaggataggcccaggagtaatggagtccaaagagaaacgagcagtaaacagtctcagcatggaaaatgccaaccaagaaaatgaagaaaaggagcaagttgctaataaaggggagcccttggccctccctttggatgctggtgaatactgtgtgcctagaggaaatcgtaggcggttccgcgttaggcagcccatcctgcagtatagatgggatatgatgcataggcttggagaaccacaggcaaggatgagagaagagaatatggaaaggattggggaggaggtgagacagctgatggaaaagctgagggaaaagcagttgagtcatagtctgcgggcagtcagcactgacccccctcaccatgaccatcatgatgagttttgccttatgccctgaatcctgatggtttccctaaagttattacggaaacagacccctgctttcgaatttacatgttcatgatgtgcccttgttgtaaacctttacctgtcacttgtttacgtgggtctcctattaccagcttctaattgaatattgtgtttttgaaccagtctgtaagatttttgttagcagaagaattttacctattgcatggaaagatgctcattatagtgaagttaataaagcacctttaaaaagcaaaaaaaaaaaaaaaaaaaaaaaaaaaaaaaaaaaaaaaaaaaaacaaaaaaaaaaaaaaaaaaaaaaaaaaaaagaacaaaaaggagggggggggcgcccaaaaagaaaatactcgcccagggagaggccaccacaataatgaccgcaccacaccttgttggcagacaaggaggcgcccccacaagagtgaggtgaataacaacaaccgcgccggcgggcccgttataaaaaacgcagaggggggaaggaaacacagcgcgcggaaccatgggggaaacacccaaatccgcgggcgggcaccacacggcggacaacccaa

SEQ ID NO: 443276 - DNA, 770 bp, Homo sapiens
ccgggagctgcagactacgcagccttcggtgcagtcgtcactcgtgtctcgctaccagctccccgctgccctgcgctcggcgggctggcatccggcccgggggaaagcggaccagcccttctgcaggtctgcggggccaagtgtcccggcggcgcacctcgtggcgagaatcgggagaaggaggagactacaaggataggcccaggagtaatggagtccaaagagaaacgagcagtaaacagtctcagcatggaaaatgccaaccaagaaaaaaaaaaaaaaacttcgagagaatagtttctctctctcctcggggtcgccgctgtgcgaaggggggccgccggccaatgttctgtggcggcattcttggcaagtgggatgggtcggtggcgggaacgtggcgtccaagtttccgtggatcaaggagggaataaggcaagaccttacaggcattggagcccaaataacttggaagggcccggcaaattccttccggcgtaacaaccgggacgtggattctcaccggcaaagagactggtgggcgcgtggagacgccgggcaagccgagacgggccaaagggtggtcgggcggtgggctcattaagcgcgggagtatccgggccacggggaaggccttggcgcaccttccttttggtggcgggaccaaccgttctaactaaggattggttctgcggccacggcttcagcaagctttcggaccacttggatcgggatagaccaagtgtccggccccggactggggcttggga

SEQ ID NO: 443277 - DNA, 716 bp, Homo sapiens
cgctaccagctccccgctgccctgcgctcggcgggctggcatccggcccgggggaaagcggaccaggtaagggccccggggcccgcgcgccctggctaggccagcagaggctcaccgacccccccgacgagcgcagaacagcgcaggggatccccgccagctttctccacaccccaacattcttgggaacatagtggtcccctggggtggggaagcagtggcggctggggctccaggggcagcagagcaaccaagagcgatggaaaaccattcccgagtccttgcaggaaaacggtgaacaccacggggggcgaggcggccgagggtgggagcggggggcgggagacgcggggcgctggcagtgaggagggccctaggcggagaaggagctagcgttccgctgcagcagccccccctccccacaccccagcccttctgcaggtctgcggggccaagtgtcccggcggcgcacctcgtggcgagaatcgggagaaggaggagactacaaggataggcccaggtcagtgcgagggacggtggtgggggcgggtgcagagtccagtctgaggtcccctcccaactcccccatctcccgtcctccattttggtgcctgccgagatctagggatggatctgtagggaaaatggtgggtttgggggcaggtaggggaagacacgagaggtgggggggggggcgggctcgaatgggggccccc

SEQ ID NO: 443278 - DNA, 834 bp, Homo sapiens
ccgggagctgcagactacgcagccttcggtgcagtcgtcactcgtgtctcgctaccagctccccgctgccctgcgctcggcgggctggcatccggcccgggggaaagcggaccagcccttctgcaggtctgcggggccaagtgtcccggcggcgcacctcgtggcgagaatcgggagaaggaggagactacaaggataggcccaggagtaatggagtccaaagagaaacgagcagtaaacagtctcagcatggaaaatgccaaccaagaaaatgaagaaaaggagcaagttgctaataaaggggagcccttggccctccctttggatgctggtgaatactgtgtgcctagaggaaatcgtaggcggttccgcgttaggcagcccatcctgcagtatagatgggatatgatgcataggcttggagaaccacaggcaaggatgagagaagagaatatggaaaggattggggaggaggtgagacagctgatggaaaagctgagggaaaagcagttgagtcatagtctgcgggcagtcagcactgacccccctcaccatgaccatcatgatgagttttgccttatgccctgaatcctgatggtttccctaaagttattacggaaacagacccctgctttcgaatttacatgttcatgatgtgcccttgttgtaaacctttacctgtcacttgtttacgtgggtctcctattaccagcttctaattgaatattgtgtttttgaaccagtctgtaagatttttgttagcagaagaattttacctattgcatggaaagatgctcattatagtgaagttaataaagcacctttaaaaagcaa

SEQ ID NO: 443279 - DNA, 377 bp, Homo sapiens
gttgaggtgatatttgtgagttttctatgctagctgtgatttaggacagtgcttctgaaatattattctgtacaaaaatcacctggggatattgttagaatgcagaatctgattccagaagtctagggaaggcccagagattctagattttgaagaaactttccatgtcaatgaccacacattgagtagcatgagaagagaatcctttgtttcagcactcaattctccttctgcctcagacttgaaaaggaagaatatcaataggtggttcttgtcttttgtattccatgaagttgctatttaaaattgcatctttgtgcattgccaccccatatgtaatatttagagggaagaaaccttgttactaataagaaaag

SEQ ID NO: 443280 - DNA, 470 bp, Homo sapiens
aaacattgcaccaagagttatatgtgcattctcgtatttaatgcttgactgtcccctcttggaagcctgtggttccatccaatcacttttgccagggaattgaggatctagggatatgttgagcacttgagtagaggtgatactcaggattggcactccacttctatcactgatctgattctctgactcgtctgtcaaaagagaaggggttatcctagctcagaggtcttcagccagagaactgcatccaaaatctgtggtctagataatacctaagataacgaccaggtcaaatattacatgactgattgaggcctatggaagggaacatagtacagtgatttagagcccatggtcagagggccctgtgtgcatgcctccaccagatcttagctgtgcaatcttgggtaaattactgtacctctctaagcctcacttttctcattattaaaatggggatacaaattcta

SEQ ID NO: 443281 - DNA, 585 bp, Homo sapiens
aaacattgcaccaagagttatatgtgcattctcgtatttaatgcttgactgtcccctcttggaagcctgtggttccatccaatcacttttgccagggaattgaggatctagggatatgttgagcacttgagtagaggtgatactcaggattggcactccacttctatcactgatctgattctctgactcgtctgtcaaaagagaaggggttatcctagctcagaggtcttcagccagagaactgcatccaaaatctgtggtctagataatacctaagataacgaccaggtcaaatattacatgactgattgaggcctatggaagggaacatagtacagtgatttagagcccatggtcagagggccctgtgtgcatgcctccaccagatcttagctgtgcaatcttgggtaaattactgtacctctctaagcctcacttttctcattattaaaatggggatacaaattctacccactgcctggactaaatgagttaatattatacttccaaagtgtttggcaatgcttggtatattttaaaagttccttaaatattatcgaatagtactgctaatattcttatgtg

SEQ ID NO: 443282 - DNA, 229 bp, Homo sapiens
ccatgggcatggggcggggccgtcagcgggggcgtggtcggggtgtcgcgcgggaacccgcgcgggaggagagcggggattccggaactagagtgtgggagccagaggccgtagcgggcagggctcgagcactggagtagagcagtccgacaggtagagaagtgagactggctgcggcacagggcgggttagggctccaggcagggcttgagcgggacgagggggcggg

SEQ ID NO: 443283 - DNA, 798 bp, Homo sapiens
ccatgggcatggggcggggccgtcagcgggggcgtggtcggggtgtcgcgcgggaacccgcgcgggaggagagcggggattccggaactagagtgtgggagccagaggccgtagcgggcagggctcgagcactggagtagagcagtccgacagctgccgtgctgctcgccgtgtactacggtctcatctgggtacccacgcggtctcccgcggcacccgccggcccacagcccagcgcgccgtcccctccgtgtgctgcccgcccgggcgtgccgcctgtcccggcgcccgccgctgcctccctctcctgcctcctgggagtccccggcgggccgcgaccccagctccagctgccgctgagccgccgccgccgctacagcgaccctgaccgccgtccgagccgccagacacccagagagacgccagaggccgcggaggggcgaagacccgggtaactctcccttccaccccaacccggatcgccagccctcgagagctctgtgctccacgccgaggatgcaccgtctctggattggtccggccttcttcctaatgacatcgctcagcgtctctggagccgtcatcccgcggaatgggggcccagggggtgtcagctcggggccttgcctcttgcagctactctgtggtcaggccgggtcctccaccatcaggaagatcccatcctgagctctgtctcctgcccctcctgctgtgggatgctgagcacagagcccacagcccatctgcctcttcacctccctgaatccgtgtccatctgcaataaacgacagcctcggc

SEQ ID NO: 443284 - DNA, 990 bp, Homo sapiens
gcggggtagcacctccgcctgtcggtggtggggcggaggctggagggggtgggcctaggatgcggaggcggcagctcgcgtgggggcgtgaccatgctggcgggggcggggccggaggcgggcggtttagagagcggggcggtctgcggggtgggggcggggcctggtgggggcggggcctgtgcggtctgcggcgcggagccgagtgggctgcggggatgcgggggaccagctgcgtgggcggcggcgccgagagccccggaggcgcggggctgagcgagggcccgcgggggcgctggctgcgcttggctccggtatgcgcctacttcctctgcgtctcgctagctgccgtgctgctcgccgtgtactacggtctcatctgggtacccacgcggtctcccgcggcacccgccggcccacagcccagcgcgccgtcccctccgtgtgctgcccgcccgggcgtgccgcctgtcccggcgcccgccgctgcctccctctcctgcctcctgggagtccccggcgggccgcgaccccagctccagctgccgctgagccgccgccgccgctacagcgaccctgaccgccgtccgagccgccagacacccagagagacgccagaggccgcggaggggcgaagacccgggtaactctcccttccaccccaacccggatcgccagccctcgagagctctgtgctccacgccgaggatgcaccgtctctggattggtccggccttcttcctaatgacatcgctcagcgtctctggagccgtcatcccgcggaatgggggcccagggggtgtcagctcggggccttgcctcttgcagctactctgtggtcaggccgggtcctccaccatcaggaagatcccatcctgagctctgtctcctgcccctcctgctgtgggatgctgagcacagagcccacagcccatctgcctcttcacctccctgaatccgtgtccatctgcaataaacgacagcctcggc

SEQ ID NO: 443285 - DNA, 721 bp, Homo sapiens
ccatgggcatggggcggggccgtcagcgggggcgtggtcggggtgtcgcgcgggaacccgcgcgggaggagagcggggattccggaactagagtgtgggagccagaggccgtagcgggcagggctcgagcactggagtagagcagtccgacagcccagcgcgccgtcccctccgtgtgctgcccgcccgggcgtgccgcctgtcccggcgcccgccgctgcctccctctcctgcctcctgggagtccccggcgggccgcgaccccagctccagctgccgctgagccgccgccgccgctacagcgaccctgaccgccgtccgagccgccagacacccagagagacgccagaggccgcggaggggcgaagacccgggtaactctcccttccaccccaacccggatcgccagccctcgagagctctgtgctccacgccgaggatgcaccgtctctggattggtccggccttcttcctaatgacatcgctcagcgtctctggagccgtcatcccgcggaatgggggcccagggggtgtcagctcggggccttgcctcttgcagctactctgtggtcaggccgggtcctccaccatcaggaagatcccatcctgagctctgtctcctgcccctcctgctgtgggatgctgagcacagagcccacagcccatctgcctcttcacctccctgaatccgtgtccatctgcaataaacgacagcctcggc

SEQ ID NO: 443286 - DNA, 824 bp, Homo sapiens
ccatgggcatggggcggggccgtcagcgggggcgtggtcggggtgtcgcgcgggaacccgcgcgggaggagagcggggattccggaactagagtgtgggagccagaggccgtagcgggcagggctcgagcactggagtagagcagtccgacagctgccgtgctgctcgccgtgtactacggtctcatctgggtacccacgcggtctcccgcggcacccgccggcccacagcccagcgcgccgtcccctccgtgtgctgcccgcccgggcgtgccgcctgtcccggcgcccgccgctgcctccctctcctgcctcctgggagtccccggcgggccgcgaccccagctccagctgccgctgagccgccgccgccgctacagcgaccctgaccgccgtccgagccgccagacacccagagagacgccagaggccgcggaggggcgaagacccgggtaactctcccttccaccccaacccggatcgccagccctcgagagctctgtgctccacgccgaggatgcaccgtctctggattggtccggccttcttcctaatgacatcgctcagcgtctctggagccgtcatcccgcggaatgggggcccagggggtgtcagctcggggccttgcctcttgcagctactctgtggtcaggccgggtcctccaccatcaggaagatcccatcctgagctctgtctcctgcccctcctgctgtgggatgctgagcacagagcccacagcccatctgcctcttcacctccctgaatccgtgtccatctgcaataaacgacagcctcggctgcctcgtgctgtgtcaaaatgtcct

SEQ ID NO: 443287 - DNA, 940 bp, Homo sapiens
gcggggtagcacctccgcctgtcggtggtggggcggaggctggagggggtgggcctaggatgcggaggcggcagctcgcgtgggggcgtgaccatgctggcgggggcggggccggaggcgggcggtttagagagcggggcggtctgcggggtgggggcggggcctggtgggggcggggcctgtgcggtctgcggcgcggagccgagtgggctgcggggatgcgggggaccagctgcgtgggcggcggcgccgagagccccggaggcgcggggctgagcgagggcccgcgggggcgctggctgcgcttggctccggtatgcgcctacttcctctgcgtctcgctagctgccgtgctgctcgccgtgtactacggtctcatctgggtacccacgcggtctcccgcggcacccgccggcccacagcccagcgcgccgtcccctccgtgtgctgcccgcccgggcgtgccgcctgtcccggcgcccgccgctgcctccctctcctgcctcctgggagtccccggcgggccgcgaccccagctccagctgccgctgagccgccgccgccgctacagcgaccctgaccgccgtccgagccgccagacacccagagagacgccagaggccgcggaggggcgaagacccgggtaactctcccttccaccccaacccggatcgccagccctcgagagctctgtgctccacgccgaggatgcaccgtctctggattggtccggccttcttcctaatgacatcgctcagcgtctctggagccgtcatcccgcggaatgggggcccagggggtgtcagctcggggccttgcctcttgcagctactctgtcggggctagctcgggctgtcggggctagtcgggggcctgtctgggctagtcaggggctgtcggggctagtcggggcctgtcgggccttagtcggggccttgtc

SEQ ID NO: 443288 - DNA, 884 bp, Homo sapiens
ccatgggcatggggcggggccgtcagcgggggcgtggtcggggtgtcgcgcgggaacccgcgcgggaggagagcggggattccggaactagagtgtgggagccagaggccgtagcgggcagggctcgagcactggagtagagcagtccgacagctgccgtgctgctcgccgtgtactacggtctcatctgggtacccacgcggtctcccgcggcacccgccggcccacagcccagcgcgccgtcccctccgtgtgctgcccgcccgggcgtgccgcctgtcccggcgcccgccgctgcctccctctcctgcctcctgggagtccccggcgggccgcgaccccagctccagctgccgctgagccgccgccgccgctacagcgaccctgaccgccgtccgagccgccagacacccagagagacgccagaggccgcggaggggcgaagacccgggtaactctcccttccaccccaacccggatcgccagccctcgagagctctgtgctccacgccgaggatgcaccgtctctggattggtccggccttcttcctaatgacatcgctcagcgtctctggagccgtcatcccgcggaatgggggcccagggggtgtcagctcggggccttgcctcttgcagctactctgtggtcaggccgggtcctccaccatcaggaagatcccatcctgagctctgtctcctgcccctcctgctgtgggatgctgagcacagagcccacagcccatctgcctcttcacctccctgaatccgtgtccatctgcaataaacgacagcctcggcaaagaagaaacagacacacaagaagaaaacacaaacacgggggggccacaaaatacccgcggggccacactaagaccacgttttgg

SEQ ID NO: 443289 - DNA, 809 bp, Homo sapiens
gcggggtagcacctccgcctgtcggtggtggggcggaggctggagggggtgggcctaggatgcggaggcggcagctcgcgtgggggcgtgaccatgctggcgggggcggggccggaggcgggcggtttagagagcggggcggtctgcggggtgggggcggggcctggtgggggcggggcctgtgcggtctgcggcgcggagccgagtgggctgcggggatgcgggggaccagctgcgtgggcggcggcgccgagagccccggaggcgcggggctgagcgagggcccgcgggggcgctggctgcgcttggctccggtatgcgcctacttcctctgcgtctcgctagctgccgtgctgctcgccgtgtactacggtctcatctgggtacccacgcggtctcccgcggcacccgccggcccacagcccagcgcgccgtcccctccgtgtgctgcccgcccgggcgtgccgcctgtcccggcgcccgccgctgcctccctctcctgcctcctgggagtccccggcgggccgcgaccccagctccagctgccgctgagccgccgccgccgctacagcgaccctgaccgccgtccgagccgccagacacccagagagacgccagaggccgcggaggggccttgcctcttgcagctactctgtggtcaggccgggtcctccaccatcaggaagatcccatcctgagctctgtctcctgcccctcctgctgtgggatgctgagcacagagcccacagcccatctgcctcttcacctccctgaatccgtgtccatctgcaataaacgacagcctcggc

SEQ ID NO: 443290 - DNA, 1639 bp, Homo sapiens
ggcacgaggcccatggaggatatgtaccgtattttctctgatccgtatatgctttcctttaatccggcagtgaccgtgtgtcagaacaatcttgaatcatgaagctactaaccagagccggctctttctcgagattttattccctcaaagttgcccccaaagttaaagccacagctgcgcctgcaggagcaccgccacaacctcaggaccttgagtttaccaagttaccaaatggcttggtgattgcttctttggaaaactattctcctgtatcaagaattggtttgttcattaaagcaggcagtagatatgaggacttcagcaatttaggaaccacccatttgctgcgtcttacatccagtctgacgacaaaaggagcttcatctttcaagataacccgtggaattgaagcagttggtggcaaattaagtgtgaccgcaacaagggaaaacatggcttatactgtggaatgcctgcggggtgatgttgatattctaatggagttcctgctcaatgtcaccacagcaccagaatttcgtcgttgggaagtagctgaccttcagcctcagctaaagattgacaaagctgtggcctttcagaatccgcagactcatgtcattgaaaatttgcatgcagcagcttaccggaatgccttggctaatcccttgtattgtcctgactataggattggaaaagtgacatcagaggagttacattacttcgttcagaaccatttcacaagtgcaagaatggctttgattggacttggtgtgagtcatcctgttctaaagcaagttgctgaacagtttctcaacatgaggggtgggcttggtttatctggtgcaaaggccaactaccgtggaggtgaaatccgagaacagaatggagacagtcttgtccatgctgcttttgtagcagaaagtgctgtcgcgggaagtgcagaggcaaatgcatttagtgttcttcagcatgtcctcggtgctgggccacatgtcaagaggggcagcaacaccaccagccatctgcaccaggctgttgccaaggcaactcagcagccatttgatgtttctgcatttaatgccagttactcagattctggactctttgggatttatactatctcccaggccacagctgctggagatgttatcaaggctgcctataatcaagtaaaaacaatagctcaaggaaacctttccaacacagatgtccaagctgccaagaacaagctgaaagctggatacctaatgtcagtggagtcttctgagtgtttcctggaagaagtcgggtcccaggctctagttgctggttcttacatgccaccatccacagtccttcagcagattgattcagtggctaatgctgatatcataaatgcggcaaagaagtttgtttctggccagaagtcaatggcagcaagtggaaatttgggacatacaccttttgttgatgagttgtaatactgatgcacacattacaggagagagctgaacgttctctcagcccagagcagcaaacacatgaaagtcagaagtctctaatatatcatttgtcttttttccagtgaggtaaaataaggcataaatgcaggtaattattcccagctgacctaaagtcaataaaacattctgtttaagtg

SEQ ID NO: 443291 - DNA, 565 bp, Homo sapiens
  misc_feature (4)..(4): n is a, c, g, or t
  misc_feature (71)..(71): n is a, c, g, or t
gacncggactgggacccctggggattttattacttatcctccccaggccccaccagctggctgggaggtgngttatcaaggctgcctataatcaagtaaaaacaatagctcaaggaaacctttccaacacagatgtccaagctgccaagaacaagctgaaagctggatacctaatgtcagtggagtcttctgagtgtttcctggaagaagtcgggtcccaggctctagttgctggttcttacatgccaccatccacagtccttcagcagattgattcagtggctaatgctgatatcataaatgcggcaaagaagtttgtttctggccagaagtcaatggcagcaagtggaaatttgggacatacaccttttgttgatgagttgtaatactgatgcacacattacaggagagagctgaacgttctctcagcccagagcagcaaacacatgaaagtcagaagtctctaatatatcatttgtcttttttccagtgaggtaaaataaggcataaatgcaggtaattattcccagctgacctaaagtcaataaaacattctgtttaagtg

SEQ ID NO: 443292 - DNA, 639 bp, Homo sapiens
  misc_feature (7)..(7): n is a, c, g, or t
  misc_feature (570)..(570): n is a, c, g, or t
  misc_feature (573)..(573): n is a, c, g, or t
  misc_feature (575)..(576): n is a, c, g, or t
  misc_feature (582)..(582): n is a, c, g, or t
  misc_feature (596)..(596): n is a, c, g, or t
  misc_feature (601)..(601): n is a, c, g, or t
  misc_feature (603)..(603): n is a, c, g, or t
  misc_feature (606)..(606): n is a, c, g, or t
  misc_feature (612)..(612): n is a, c, g, or t
  misc_feature (625)..(625): n is a, c, g, or t
  misc_feature (627)..(628): n is a, c, g, or t
  misc_feature (634)..(634): n is a, c, g, or t
tgttatncctttcaacagtctgcattctcacatgggtgctgttatctgtccagccactccgtgagtgaaccgagacagatgagcatcttgtccatgctgcttttgtagcagaaagtgctgtcgcgggaagtgcagaggcaaatgcatttagtgttcttcagcatgtcctcggtgctgggccacatgtcaagaggggcagcaacaccaccagccatctgcaccaggctgttgccaaggcaactcagcagccatttgatgtttctgcatttaatgccagttactcagattctggactctttgggatttatactatctcccaggccacagctgctggagatgttatcaaggctgcctataatcaagtaaaaacaatagctcaaggaaacctttccaacacagatgtccaagctgccaagaacaagctgaaagctggatacctaatgtcagtggagtcttctgagtgtttcctggaagaagtcgggtcccaggctctagttgctggttcttacatgccaccatccacagtccttcagcagattgattcagtggctaatgctgatatcataaatncgncnnagaagnctgtttctgcccantagtnantgnggccgngtggacatgttcngnngccatnaaaaa

SEQ ID NO: 443293 - DNA, 901 bp, Homo sapiens
  misc_feature (568)..(568): n is a, c, g, or t
  misc_feature (845)..(845): n is a, c, g, or t
ggaagtgcagaggcaaatgcatttagtgttcttcagcatgtcctcggtgctgggccacatgtcaatgtcaccacagcaccagaatttcgtcgttgggaagtagctgaccttcagcctcagctaaagattgacaaagctgtggcctttcagaatccgcagactcatgtcattgaaaatttgcatgcagcagcttaccggaatgccttggctaatcccttgtattgtcctgactataggattggaaaagtgacatcagaggagttacattacttcgttcagaaccatttcacaagtgcaagaatggctttgattggacttggtgtgagtcatcctgttctaaagcaagttgctgaacagtttctcaacatgaggggtgggcttggtttatctggtgcaaaggccaactaccgtggaggtgaaatccgagaacagaatggagacagtcttgtccatgctgcttttgtagcagaaagtgctgtcgcgggaagtgcagaggcaaatgcatttagtgttcttcagcatgtcccatttgatgtttctgcatttaatgcagttaatcagattctgnatctttgggattaataattatttcgcaggccaaagtgtggaagatgttatcaggtgctatattcaagttaaacaatagtcaagggaactttccagacagattgtcaaggtggcaagaacaagtgaagggtggtactaaggagggagctcagagtgtctgggagagtcgggcccaggcatatttgtggtttaatgaacaaacaagcttagagatggtacggaagggattataaggggagaatgttttgcaattagggagggatggacaccctgggagngatagggcctagaggggtctcacggagagacttattttgaagaagccgaattgaaa

SEQ ID NO: 443294 - DNA, 1966 bp, Homo sapiens
agtacctcacgaaggggacgtgggaaagtgttagcggggaacgctgggaaactcccggcctccgccaccatcttgcttgctttcctttaatccggcagtgaccgtgtgtcagaacaatcttgaatcatgaagctactaaccagagccggctctttctcgagattttattccctcaaagttgcccccaaagttaaagccacagctgcgcctgcaggagcaccgccacaacctcaggaccttgagtttaccaagttaccaaatggcttggtgattgcttctttggaaaactattctcctgtatcaagaattggtttgttcattaaagcaggcagtagatatgaggacttcagcaatttaggaaccacccatttgctgcgtcttacatccagtctgacgacaaaaggagcttcatctttcaagataacccgtggaattgaagcagttggtggcaaattaagtgtgaccgcaacaagggaaaacatggcttatactgtggaatgcctgcggggtgatgttgatattctaatggagttcctgctcaatgtcaccacagcaccagaatttcgtcgttgggaagtagctgaccttcagcctcagctaaagattgacaaagctgtggcctttcagaatccgcagactcatgtcattgaaaatttgcatgcagcagcttaccggaatgccttggctaatcccttgtattgtcctgactataggattggaaaagtgacatcagaggagttacattacttcgttcagaaccatttcacaagtgcaagaatggctttgattggacttggtgtgagtcatcctgttctaaagcaagttgctgaacagtttctcaacatgaggggtgggcttggtttatctggtgcaaaggccaactaccgtggaggtgaaatccgagaacagaatggagacagtcttgtccatgctgcttttgtagcagaaagtgctgtcgcgggaagtgcagaggcaaatgcatttagtgttcttcagcatgtcctcggtgctgggccacatgtcaagaggggcagcaacaccaccagccatctgcaccaggctgttgccaaggcaactcagcagccatttgatgtttctgcatttaatgccagttactcagattctggactctttgggatttatactatctcccaggccacagctgctggagatgttatcaaggctgcctataatcaagtaaaaacaatagctcaaggaaacctttccaacacagatgtccaagctgccaagaacaagctgaaagctggatacctaatgtcagtggagtcttctgagtgtttcctggaagaagtcgggtcccaggctctagttgctggttcttacatgccaccatccacagtccttcagcagattgattcagtggctaatgctgatatcataaatgcggcaaagaagtttgtttctggccagaagtcaatggcagcaagtggaaatttgggacatacaccttttgttgatgagttgtaatactgatgcacacattacaggagagagctgaacgttctctcagcccagagcagcaaacacatgaaagtcagaagtctctaatatatcatttgtcttttttccagtgaggtaaaataaggcataaatgcaggtaattattcccagctgacctaaagtcaataaaacattctgtttaagtgtttttcttacgtttttctcaatgagttaatcaacaagtatttattatgtgctgatatctttgttttagatgctttaaaggagacaggaatataattattgagtatagaagcatcagaaactattaaaattaaggctaagtggctatcggggtaaatagtgccagattactattggtggcgtttaagatgaaagcaagttcaaaatttgtcattttgggtgtcaacagctaaatggtctggtttttacccctgttttgccttttttgcaataaaattatttccaaaaaacaaaaaaaaac

SEQ ID NO: 443295 - DNA, 1938 bp, Homo sapiens
ggcacgaggcccatggaggatatgtaccgtattttctctgatccgtatatgctttcctttaatccggcagtgaccgtgtgtcagaacaatcttgaatcatgaagctactaaccagagccggctctttctcgagattttattccctcaaagttgcccccaaagttaaagccacagctgcgcctgcaggagcaccgccacaacctcaggaccttgagtttaccaagttaccaaatggcttggtgattgcttctttggaaaactattctcctgtatcaagaattggtttgttcattaaagcaggcagtagatatgaggacttcagcaatttaggaaccacccatttgctgcgtcttacatccagtctgacgacaaaaggagcttcatctttcaagataacccgtggaattgaagcagttggtggcaaattaagtgtgaccgcaacaagggaaaacatggcttatactgtggaatgcctgcggggtgatgttgatattctaatggagttcctgctcaatgtcaccacagcaccagaatttcgtcgttgggaagtagctgaccttcagcctcagctaaagattgacaaagctgtggcctttcagaatccgcagactcatgtcattgaaaatttgcatgcagcagcttaccggaatgccttggctaatcccttgtattgtcctgactataggattggaaaagtgacatcagaggagttacattacttcgttcagaaccatttcacaagtgcaagaatggctttgattggacttggtgtgagtcatcctgttctaaagcaagttgctgaacagtttctcaacatgaggggtgggcttggtttatctggtgcaaaggccaactaccgtggaggtgaaatccgagaacagaatggagacagtcttgtccatgctgcttttgtagcagaaagtgctgtcgcgggaagtgcagaggcaaatgcatttagtgttcttcagcatgtcctcggtgctgggccacatgtcaagaggggcagcaacaccaccagccatctgcaccaggctgttgccaaggcaactcagcagccatttgatgtttctgcatttaatgccagttactcagattctggactctttgggatttatactatctcccaggccacagctgctggagatgttatcaaggctgcctataatcaagtaaaaacaatagctcaaggaaacctttccaacacagatgtccaagctgccaagaacaagctgaaagctggatacctaatgtcagtggagtcttctgagtgtttcctggaagaagtcgggtcccaggctctagttgctggttcttacatgccaccatccacagtccttcagcagattgattcagtggctaatgctgatatcataaatgcggcaaagaagtttgtttctggccagaagtcaatggcagcaagtggaaatttgggacatacaccttttgttgatgagttgtaatactgatgcacacattacaggagagagctgaacgttctctcagcccagagcagcaaacacatgaaagtcagaagtctctaatatatcatttgtcttttttccagtgaggtaaaataaggcataaatgcaggtaattattcccagctgacctaaagtcaataaaacattctgtttaagtgtttttcttacgtttttctcaatgagttaatcaacaagtatttattatgtgctgatatctttgttttagatgctttaaaggagacaggaatataattattgagtatagaagcatcagaaactattaaaattaaggctaagtggctatcggggtaaatagtgccagattactattggtggcgtttaagatgaaagcaagttcaaaatttgtcattttgggtgtcaacagctaaatggtctggtttttacccctgttttgccttttttgcaataaaattatttccaaaaaacaaaaaaaaac

SEQ ID NO: 443296 - DNA, 1665 bp, Homo sapiens
agtacctcacgaaggggacgtgggaaagtgttagcggggaacgctgggaaactcccggcctccgccaccatcttgcttgctttcctttaatccggcagtgaccgtgtgtcagaacaatcttgaatcatgaagctactaaccagagccggctctttctcgagattttattccctcaaagttgcccccaaagttaaagccacagctgcgcctgcaggagcaccgccacaacctcaggaccttgagtttaccaagttaccaaatggcttggtgattgcttctttggaaaactattctcctgtatcaagaattggtttgttcattaaagcaggcagtagatatgaggacttcagcaatttaggaaccacccatttgctgcgtcttacatccagtctgacgacaaaaggagcttcatctttcaagataacccgtggaattgaagcagttggtggcaaattaagtgtgaccgcaacaagggaaaacatggcttatactgtggaatgcctgcggggtgatgttgatattctaatggagttcctgctcaatgtcaccacagcaccagaatttcgtcgttgggaagtagctgaccttcagcctcagctaaagattgacaaagctgtggcctttcagaatccgcagactcatgtcattgaaaatttgcatgcagcagcttaccggaatgccttggctaatcccttgtattgtcctgactataggattggaaaagtgacatcagaggagttacattacttcgttcagaaccatttcacaagtgcaagaatggctttgattggacttggtgtgagtcatcctgttctaaagcaagttgctgaacagtttctcaacatgaggggtgggcttggtttatctggtgcaaaggccaactaccgtggaggtgaaatccgagaacagaatggagacagtcttgtccatgctgcttttgtagcagaaagtgctgtcgcgggaagtgcagaggcaaatgcatttagtgttcttcagcatgtcctcggtgctgggccacatgtcaagaggggcagcaacaccaccagccatctgcaccaggctgttgccaaggcaactcagcagccatttgatgtttctgcatttaatgccagttactcagattctggactctttgggatttatactatctcccaggccacagctgctggagatgttatcaaggctgcctataatcaagtaaaaacaatagctcaaggaaacctttccaacacagatgtccaagctgccaagaacaagctgaaagctggatacctaatgtcagtggagtcttctgagtgtttcctggaagaagtcgggtcccaggctctagttgctggttcttacatgccaccatccacagtccttcagcagattgattcagtggctaatgctgatatcataaatgcggcaaagaagtttgtttctggccagaagtcaatggcagcaagtggaaatttgggacatacaccttttgttgatgagttgtaatactgatgcacacattacaggagagagctgaacgttctctcagcccagagcagcaaacacatgaaagtcagaagtctctaatatatcatttgtcttttttccagtgacgtcatgctgcttaatagtctttcttacctcttctcaataactaattcacatatctttatatgtgctgct

SEQ ID NO: 443297 - DNA, 1578 bp, Homo sapiens
agtacctcacgaaggggacgtgggaaagtgttagcggggaacgctgggaaactcccggcctccgccaccatcttgcttgctttcctttaatccggcagtgaccgtgtgtcagaacaatcttgaatcatgaagctactaaccagagccggctctttctcgagattttattccctcaaagttgcccccaaagttaaagccacagctgcgcctgcaggagcaccgccacaacctcaggaccttgagtttaccaagttaccaaatggcttggtgattgcttctttggaaaactattctcctgtatcaagaattggtttgttcattaaagcaggcagtagatatgaggacttcagcaatttaggaaccacccatttgctgcgtcttacatccagtctgacgacaaaaggagcttcatctttcaagataacccgtggaattgaagcagttggtggcaaattaagtgtgaccgcaacaagggaaaacatggcttatactgtggaatgcctgcggggtgatgttgatattctaatggagttcctgctcaatgtcaccacagcaccagaatttcgtcgttgggaagtagctgaccttcagcctcagctaaagattgacaaagctgtggcctttcagaatccgcagactcatgtcattgaaaatttgcatgcagcagcttaccggaatgccttggctaatcccttgtattgtcctgactataggattggaaaagtgacatcagaggagttacattacttcgttcagaaccatttcacaagtgcaagaatggctttgattggacttggtgtgagtcatcctgttctaaagcaagttgctgaacagtttctcaacatgaggggtgggcttggtttatctggtgcaaaggccaactaccgtggaggtgaaatccgagaacagaatggagacagtcttgtccatgctgcttttgtagcagaaagtgctgtcgcgggaagtgcagaggcaaatgcatttagtgttcttcagcatgtcctcggtgctgggccacatgtcaagaggggcagcaacaccaccagccatctgcaccaggctgttgccaaggcaactcagcagccatttgatgtttctgcatttaatgccagttactcagattctggactctttgggatttatactatctcccaggccacagctgctggagatgttatcaaggctgcctataatcaagtaaaaacaatagctcaaggaaacctttccaacacagatgtccaagctgccaagaacaagctgaaagctggatacctaatgtcagtggagtcttctgagtgtttcctggaagaagtcgggtcccaggctctagttgctggttcttacatgccaccatccacagtccttcagcagattgattcagtggctaatgctgatatcataaatgcggcaaagaagtttgtttctggccagaagtcaatggcagcaagtggaaatttgggacatacaccttttgttgatgagttgtaatactgatgcacacattacaggagagagctgaacgttctctcagcccagagcagcaaacacatgaaagtcaccttgcatattcaagggccg

SEQ ID NO: 443298 - DNA, 1908 bp, Homo sapiens
agtacctcacgaaggggacgtgggaaagtgttagcggggaacgctgggaaactcccggcctccgccaccatcttgcttgctttcctttaatccggcagtgaccgtgtgtcagaacaatcttgaatcatgaagctactaaccagagccggctctttctcgagattttattccctcaaagttgcccccaaagttaaagccacagctgcgcctgcaggagcaccgccacaacctcaggaccttgagtttaccaagttaccaaatggcttggtgattgcttctttggaaaactattctcctgtatcaagaattggtttgttcattaaagcaggcagtagatatgaggacttcagcaatttaggaaccacccatttgctgcgtcttacatccagtctgacgacaaaaggagcttcatctttcaagataacccgtggaattgaagcagttggtggcaaattaagtgtgaccgcaacaagggaaaacatggcttatactgtggaatgcctgcggggtgatgttgatattctaatggagttcctgctcaatgtcaccacagcaccagaatttcgtcgttgggaagtagctgaccttcagcctcagctaaagattgacaaagctgtggcctttcagaatccgcagactcatgtcattgaaaatttgcatgcagcagcttaccggaatgccttggctaatcccttgtattgtcctgactataggattggaaaagtgacatcagaggagttacattacttcgttcagaaccatttcacaagtgcaagaatggctttgattggacttggtgtgagtcatcctgttctaaagcaagttgctgaacagtttctcaacatgaggggtgggcttggtttatctggtgcaaaggccaactaccgtggaggtgaaatccgagaacagaatggagacagtcttgtccatgctgcttttgtagcagaaagtgctgtcgcgggaagtgcagaggcaaatgcatttagtgttcttcagcatgtcctcggtgctgggccacatgtcaagaggggcagcaacaccaccagccatctgcaccaggctgttgccaaggcaactcagcagccatttgatgtttctgcatttaatgccagttactcagattctggactctttgggatttatactatctcccaggccacagctgctggagatgttatcaaggctgcctataatcaagtaaaaacaatagctcaaggaaacctttccaacacagatgtccaagctgccaagaacaagctgaaagctggatacctaatgtcagtggagtcttctgagtgtttcctggaagaagtcgggtcccaggctctagttgctggttcttacatgccaccatccacagtccttcagcagattgattcagtggctaatgctgatatcataaatatacaccttttgttgatgagttgtaatactgatgcacacattacaggagagagctgaacgttctctcagcccagagcagcaaacacatgaaagtcagaagtctctaatatatcatttgtcttttttccagtgaggtaaaataaggcataaatgcaggtaattattcccagctgacctaaagtcaataaaacattctgtttaagtgtttttcttacgtttttctcaatgagttaatcaacaagtatttattatgtgctgatatctttgttttagatgctttaaaggagacaggaatataattattgagtatagaagcatcagaaactattaaaattaaggctaagtggctatcggggtaaatagtgccagattactattggtggcgtttaagatgaaagcaagttcaaaatttgtcattttgggtgtcaacagctaaatggtctggtttttacccctgttttgccttttttgcaataaaattatttccaaaaaacaaaaaaaaac

SEQ ID NO: 443299 - DNA, 1276 bp, Homo sapiens
agtacctcacgaaggggacgtgggaaagtgttagcggggaacgctgggaaactcccggcctccgccaccatcttgcttgctttcctttaatccggcagtgaccgtgtgtcagaacaatcttgaatcatgaagctactaaccagagccggctctttctcgagattttattccctcaaagttgcccccaaagttaaagccacagctgcgcctgcaggagcaccgccacaacctcaggaccttgagtttaccaagttaccaaatggcttggtgattgcttctttggaaaactattctcctgtatcaagaattggtttgttcattaaagcaggcagtagatatgaggacttcagcaatttaggaaccacccatttgctgcgtcttacatccagtctgacgacaaaaggagcttcatctttcaagataacccgtggaattgaagcagttggtggcaaattaagtgtgaccgcaacaagggaaaacatggcttatactgtggaatgcctgcggggtgatgttgatattctaatggagttcctgctcaatgtcaccacagcaccagaatttcgtcgttgggaagtagctgaccttcagcctcagctaaagattgacaaagctgtggcctttcagaatccgcagactcatgtcattgaaaatttgcatgcagcagcttaccggaatgccttggctaatcccttgtattgtcctgactataggattggaaaagtgacatcagaggagttacattacttcgttcagaaccatttcacaagtgcaagaatggctttgattggacttggtgtgagtcatcctgttctaaagcaagttgctgaacagtttctcaacatgaggggtgggcttggtttatctggtgcaaaggccaactaccgtggaggtgaaatccgagaacagaatggagacagtcttgtccatgctgcttttgtagcagaaagtgctgtcgcgggaagtgcagaggcaaatgcatttagtgttcttcagcatgtcctcggtgctgggccacatgtcaagaggggcagcaacaccaccagccatctgcaccaggctgttgccaaggcaactcagcagccatttgatgtttctgcatttaatgccagttactcagattctggactctttgggatttatactatctcccaggccacagctgctggagatgttatcaaggctgcctataatcaagtaaaaacaatagctcaaggaaacctttccaacacagatgtccaagctgccaaaggtgggcagatgagataggggtacc

SEQ ID NO: 443300 - DNA, 1909 bp, Homo sapiens
agtacctcacgaaggggacgtgggaaagtgttagcggggaacgctgggaaactcccggcctccgccaccatcttgcttgctttcctttaatccggcagtgaccgtgtgtcagaacaatcttgaatcatgaagctactaaccagagccggctctttctcgagattttattccctcaaagttgcccccaaagttaaagccacagctgcgcctgcaggagcaccgccacaacctcaggaccttgagtttaccaagttaccaaatggcttggtgattgcttctttggaaaactattctcctgtatcaagaattggtttgttcattaaagcaggcagtagatatgaggacttcagcaatttaggaaccacccatttgctgcgtcttacatccagtctgacgacaaaaggagcttcatctttcaagataacccgtggaattgaagcagttggtggcaaattaagtgatattctaatggagttcctgctcaatgtcaccacagcaccagaatttcgtcgttgggaagtagctgaccttcagcctcagctaaagattgacaaagctgtggcctttcagaatccgcagactcatgtcattgaaaatttgcatgcagcagcttaccggaatgccttggctaatcccttgtattgtcctgactataggattggaaaagtgacatcagaggagttacattacttcgttcagaaccatttcacaagtgcaagaatggctttgattggacttggtgtgagtcatcctgttctaaagcaagttgctgaacagtttctcaacatgaggggtgggcttggtttatctggtgcaaaggccaactaccgtggaggtgaaatccgagaacagaatggagacagtcttgtccatgctgcttttgtagcagaaagtgctgtcgcgggaagtgcagaggcaaatgcatttagtgttcttcagcatgtcctcggtgctgggccacatgtcaagaggggcagcaacaccaccagccatctgcaccaggctgttgccaaggcaactcagcagccatttgatgtttctgcatttaatgccagttactcagattctggactctttgggatttatactatctcccaggccacagctgctggagatgttatcaaggctgcctataatcaagtaaaaacaatagctcaaggaaacctttccaacacagatgtccaagctgccaagaacaagctgaaagctggatacctaatgtcagtggagtcttctgagtgtttcctggaagaagtcgggtcccaggctctagttgctggttcttacatgccaccatccacagtccttcagcagattgattcagtggctaatgctgatatcataaatgcggcaaagaagtttgtttctggccagaagtcaatggcagcaagtggaaatttgggacatacaccttttgttgatgagttgtaatactgatgcacacattacaggagagagctgaacgttctctcagcccagagcagcaaacacatgaaagtcagaagtctctaatatatcatttgtcttttttccagtgaggtaaaataaggcataaatgcaggtaattattcccagctgacctaaagtcaataaaacattctgtttaagtgtttttcttacgtttttctcaatgagttaatcaacaagtatttattatgtgctgatatctttgttttagatgctttaaaggagacaggaatataattattgagtatagaagcatcagaaactattaaaattaaggctaagtggctatcggggtaaatagtgccagattactattggtggcgtttaagatgaaagcaagttcaaaatttgtcattttgggtgtcaacagctaaatggtctggtttttacccctgttttgccttttttgcaataaaattatttccaaaaaacaaaaaaaaac

SEQ ID NO: 443301 - DNA, 1124 bp, Homo sapiens
agtacctcacgaaggggacgtgggaaagtgttagcggggaacgctgggaaactcccggcctccgccaccatcttgcttgctttcctttaatccggcagtgaccgtgtgtcagaacaatcttgaatcatgaagctactaaccagagccggctctttctcgagattttattccctcaaagttgcccccaaagttaaagccacagctgcgcctgcaggagcaccgccacaacctcaggaccttgagtttaccaagttaccaaatggcttggtgattgcttctttggaaaactattctcctgtatcaagaattggtttgttcattaaagcaggcagtagatatgaggacttcagcaatttaggaaccacccatttgctgcgtcttacatccagtctgacgacaaaaggagcttcatctttcaagataacccgtggaattgaagcagttggtggcaaattaagtgtgaccgcaacaagggaaaacatggcttatactgtggaatgcctgcggggtgatgttgatattctaatggagttcctgctcaatgtcaccacagcaccagaatttcgtcgttgggaagtagctgaccttcagcctcagctaaagattgacaaagctgtggcctttcagaatccgcagactcatgtcattgaaaatttgcatgcagcagcttaccggaatgccttggctaatcccttgtattgtcctgactataggattggaaaagtgacatcagaggagttacattacttcgttcagaaccatttcacaagtgcaagaatggctttgattggacttggtgtgagtcatcctgttctaaagcaagttgctgaacagtttctcaacatgaggggtgggcttggtttatctggtgcaaaggccaactaccgtggaggtgaaatccgagaacagaatggagacagtcttgtccatgctgcttttgtagcagaaagtgctgtcgcgggaagtgcagaggcaaatgcatttagtgttcttcagcatgtcctcggtgctgggccacatgtcaagaggggcagcaacaccaccagccatctgcactccggccagccattgcactccggccagccattgcactccggccagccattgcactccggccagccata

SEQ ID NO: 443302 - DNA, 1282 bp, Homo sapiens
cagtctgtctagaggaccctgctgtgactatttgttgaagtgacatcagaggagttacattacttcgttcagaaccatttcacaagtgcaagaatggctttgattggacttggtgtgagtcatcctgttctaaagcaagttgctgaacagtttctcaacatgaggggtgggcttggtttatctggtgcaaaggccaactaccgtggaggtgaaatccgagaacagaatggagacagtcttgtccatgctgcttttgtagcagaaagtgctgtcgcgggaagtgcagaggcaaatgcatttagtgttcttcagcatgtcctcggtgctgggccacatgtcaagaggggcagcaacaccaccagccatctgcaccaggctgttgccaaggcaactcagcagccatttgatgtttctgcatttaatgccagttactcagattctggactctttgggatttatactatctcccaggccacagctgctggagatgttatcaaggctgcctataatcaagtaaaaacaatagctcaaggaaacctttccaacacagatgtccaagctgccaagaacaagctgaaagctggatacctaatgtcagtggagtcttctgagtgtttcctggaagaagtcgggtcccaggctctagttgctggttcttacatgccaccatccacagtccttcagcagattgattcagtggctaatgctgatatcataaatgcggcaaagaagtttgtttctggccagaagtcaatggcagcaagtggaaatttgggacatacaccttttgttgatgagttgtaatactgatgcacacattacaggagagagctgaacgttctctcagcccagagcagcaaacacatgaaagtcagaagtctctaatatatcatttgtcttttttccagtgaggtaaaataaggcataaatgcaggtaattattcccagctgacctaaagtcaataaaacattctgtttaagtgtttttcttacgtttttctcaatgagttaatcaacaagtatttattatgtgctgatatctttgttttagatgctttaaaggagacaggaatataattattgagtatagaagcatcagaaactattaaaattaaggctaagtggctatcggggtaaatagtgccagattactattggtggcgtttaagatgaaagcaagttcaaaatttgtcattttgggtgtcaacagctaaatggtctggtttttacccctgttttgccttttttgcaataaaattatttccaaaaaacaaaaaaaaac

SEQ ID NO: 443303 - DNA, 766 bp, Homo sapiens
agtacctcacgaaggggacgtgggaaagtgttagcggggaacgctgggaaactcccggcctccgccaccatcttgcttgctttcctttaatccggcagtgaccgtgtgtcagaacaatcttgaatcatgaagctactaaccagagccggctctttctcgagattttattccctcaaagttgcccccaaagttaaagccacagctgcgcctgcaggagcaccgccacaacctcaggaccttgagtttaccaagttaccaaatggcttggtgattgcttctttggaaaactattctcctgtatcaagaattggtttgttcattaaagcaggcagtagatatgaggacttcagcaatttaggaaccacccatttgctgcgtcttacatccagtctgacgacaaaaggagcttcatctttcaagataacccgtggaattgaagcagttggtggcaaattaagtgtgaccgcaacaagggaaaacatggcttatactgtggaatgcctgcggggtgatgttgatattctaatggagttcctgctcaatgtcaccacagcaccagaatttcgtcgttgggaagtagctgaccttcagcctcagctaaagattgacaaagctgtggcctttcagaatccgcagactcatgtcattgaaaatttgcatgcagcagcttaccggaatgccttggctaatcccttgtattgtcctgactataggattggaaaagtgacatcagaggaggtaccaataaaacatattttgaaatgtg

SEQ ID NO: 443304 - DNA, 2202 bp, Homo sapiens
ccaagaagagaacccacttcatacaaggaaaaggcaaaaggaaaaggtcaagactgtgacctttataacactgtgaccccagctgtgggccaggtggagttgtctgtggtgacaccaagtacaggcctgacaccctggtttgacagaaggctcttcaagatccctggtcttcacactgtagcagccaaaaggtaggtttacaatatacactgtccccaacttgccatggatcaattataatttttcaacttgactatggaggaaaaccatcgcaatttcagcttccagtcatgggtcacataacgatggggatacattctgagaaatgtggtgttaggtggtttcatcactgtgtgaacctcagtgttcagacaaatccagatggtatagcctactacacacatgggctctatggtatagtctattgctcttaggctacaaacctgtatagcatgtactatagtactgaatactgtaggcagttataacacaaaggtaagtatttgtgcatctaaacataggaaaggtacagtaaaaatacagcacaaaagataaaaaaatggtatgccatttttatggcatagctcctgctttcgagtgagtcagtgagtgagtggtgagtaaatgggaagggctgggacattactgtgcactgctgtagatactaaacactgtaaacataggctacgctaaatttatttttttaaaattgcactacaacattatgttgtcagtaagtaataggaatctttcagctccctaataatcttaacgggaccaccatcatatatgtggtccatcattgaccaaaaacatcattatgtagtacatgactataccttgaatttcgatcttttcctaggctagtgatatgcagtacatgagataatcaatgcttccttacaaaatgggcttatgttagaagacttttgcccagctgcaggctattgtaagtgttctgagcacatatgagataacctgggccaagctatgatgttcgatacgttaggtgtattaaatgcacttttgactgccatctcagtggatgacagccttctcactgacagcagagagatcttcctcactgtgccagtgggcaggagaaagagcatgctgcgactggccagtgacatgcagaggatccagattgcacaaccggatccagaggccttgggaagcattagggagctctccagctgtctcactcaaatctgtagcagcatatggacccacaaatggaggccaaagtgggccctcaattggacactttggcaaccctgaagagacttcttcccttcagacttactgttttagtatgttccagagaagggagtggcattcttcttggggaattcaggaagagggagacacgctgttactctatccattaaataaagctttgatgttcacagccccccgccaccactcagaaaaaaaaaataattgccttgctctctaaaactgacttctgccttttattggacaggaacaagctgaaagctggatacctaatgtcagtggagtcttctgagtgtttcctggaagaagtcgggtcccaggctctagttgctggttcttacatgccaccatccacagtccttcagcagattgattcagtggctaatgctgatatcataaatgcggcaaagaagtttgtttctggccagaagtcaatggcagcaagtggaaatttgggacatacaccttttgttgatgagttgtaatactgatgcacacattacaggagagagctgaacgttctctcagcccagagcagcaaacacatgaaagtcagaagtctctaatatatcatttgtcttttttccagtgaggtaaaataaggcataaatgcaggtaattattcccagctgacctaaagtcaataaaacattctgtttaagtgtttttcttacgtttttctcaatgagttaatcaacaagtatttattatgtgctgatatctttgttttagatgctttaaaggagacaggaatataattattgagtatagaagcatcagaaactattaaaattaaggctaagtggctatcggggtaaatagtgccagattactattggtggcgtttaagatgaaagcaagttcaaaatttgtcattttgggtgtcaacagctaaatggtctggtttttacccctgttttgccttttttgcaataaaattatttccaaaaaacaaaaaaaaac

SEQ ID NO: 443305 - DNA, 613 bp, Homo sapiens
ccgaaagcagaaatttgtgtgcattataaacaggctgcacaaagcccgtaggcggcaaagaagtttgtttctggccagaagtcaatggcagcaagtggaaatttgggacatacaccttttgttgatgagttgtaatactgatgcacacattacaggagagagctgaacgttctctcagcccagagcagcaaacacatgaaagtcagaagtctctaatatatcatttgtcttttttccagtgaggtaaaataaggcataaatgcaggtaattattcccagctgacctaaagtcaataaaacattctgtttaagtgtttttcttacgtttttctcaatgagttaatcaacaagtatttattatgtgctgatatctttgttttagatgctttaaaggagacaggaatataattattgagtatagaagcatcagaaactattaaaattaaggctaagtggctatcggggtaaatagtgccagattactattggtggcgtttaagatgaaagcaagttcaaaatttgtcattttgggtgtcaacagctaaatggtctggtttttacccctgttttgccttttttgcaataaaattatttccaaaaaacaaaaaaaaac

SEQ ID NO: 443306 - DNA, 1565 bp, Homo sapiens
ggcacgaggcccatggaggatatgtaccgtattttctctgatccgtatatgctttcctttaatccggcagtgaccgtgtgtcagaacaatcttgaatcatgaagctactaaccagagccggctctttctcggtgagctcaggtggcgggtttgggaaagggctggggagcagtgtgtcgacaaggtgatacgaggcggaggtgtctggtctggggtctgggccttgggattcggtctgcccttcagctgaaccctgcgggccaagtgggctgcagactgggtcaggctttggaggcccagctcatgctgtgagcacaagagacctaacaccgggaaacctgaagagaggggcaggacgtgagagcggagttgaagcgagtccttggagagacttctgaaggtcactccggtactcaagtgctggagaaagagaccgtgaaacccagggggagcgggaggacggcgcacttagccccccaccttcactttatccgctgcagcctctgctccttggtttatcacggagcgtcagtttccccagcgaataaaagtataagaaaggagctaatgcagatagaacacttattacagtacctggaacttcattgttaaatactatggtgtcttagtagtctaacgttgcttttcttgatcgtatgttagacggttcctccaagacgtctctgtttgtcctcaaaagctccttaattaagtttccccttcaagcctaaattaaacatagctgtcacttggggaaaactcacacatcagggttatatcactgtgggacagtggttattaagaggggtaagggggaacacttaaaaaatcatagcgagggacagaatgcccccagggaaccggtggcgatgtttggagacatatttagttgcaacaacttgtaaggagggtgctattggcatggagaggccagggatgctgctaaacttcgccttacagcaaagaattatctagccccaagtgccagtagtagtacctgtgttgagaaacccccctagatggagatgcagaagaccagacctgggcatggaatgttcttatgctttatgtttacataaatgtgctgtgggctatatcgatttaggctgtaattgcattaaccttccaggtatacctagacacaccagtgattacccttggagggaagcacggttagattggcaaaagaccccaacatttccttctccattctattttgcaacagaaaaagctcagagaaaacagttggagaggcccaaagtaaacaaattgcagtaaacttgaaagcaattatttatgtgtctaattttagcactttatataggagaataaacttagatatatcttgttattagaacaaaataatttagaagattgcatgacagttactaggataatttgctgatttgaatgggacgattaagaagcacattaccgagcggagcgcgatggctcacacctgtaatcctagcactttgggagtcagaggcaggcggatcacttgagatgaggagttcgaaaccagtctggccatcatggtgaaaccccgtctctactaaaaatac

SEQ ID NO: 443307 - DNA, 456 bp, Homo sapiens
gcctggtagcatgcacctgtagtcccagcttcttgggaggctggggcaggaggattgtgtataaacagctgctttatgaacataggaagaataaggaacccatagtgatgacagcattccgcatggacactgtgctgtttgtctggaactaaccttccatctgtgtttttgcctcagtaaagaagtgtgtcagtgctgcaggagactctggtactgaccacagatgaccaacttttcttatctgtcctaggttatcaaggctgcctataatcaagtaaaaacaatagctcaaggaaacctttccaacacagatgtccaagctgccaaaagtaagtctcagtattaactgtgttttatgtttttgttatttgaaagttgtattcttttcagattataacaatattacaatctatgctcataaggactgagaagtacagaaaagcgtaaaaagggaaa

SEQ ID NO: 443308 - DNA, 629 bp, Homo sapiens
agtacctcacgaaggggacgtgggaaagtgttagcggggaacgctgggaaactcccggcctccgccaccatcttgcttgctttcctttaatccggcagtgaccgtgtgtcagaacaatcttgaatcatgaagctactaaccagagccggctctttctcgagattttattccctcaaagttgcccccaaagttaaagccacagctgcgcctgcaggagcaccgccacaacctcaggaccttgagtttaccaagttaccaaatggcttggtgattgcttctttggaaaactattctcctgtatcaagaattggtttgttcattaaagcaggcagtagatatgaggacttcagcaatttaggaaccacccatttgctgcgtcttacatccagtctgacgacaaaaggagcttcatctttcaagataacccgtggaattgaagcagttggtggcaaattaagagtgttcacagcatcttcaaccaggagcagattctatctcaagaaaccactttgtttgctcatccataagaagcatctcctcatctgttcaagctttatcataagattgcagccattcagtcacatcttcaggccccacttctagttctcttgctactcccaccatagttg

SEQ ID NO: 443309 - DNA, 435 bp, Homo sapiens
cagtctgtctagaggaccctgctgtgactatttgttgaagtgacatcagaggagttacattacttcgttcagaaccatttcacaagtgcaagaatggctttgattggacttggtgtgagtcatcctgttctaaagcaagttgctgaacagtttctcaacatgaggggtgggcttggtttatctggtgcaaaggccaactaccgtggaggtgaaatccgagaacagaatggagacagtcttgtccatgctgcttttgtagcagaaagtgctgtcgcgggaagtgcagaggcaaatgcatttagtgttcttcagcatgtcctcggtgctgggccacatgtcaagaggggcagcaacaccaccagccatctgcaccaggctgttgccaaggcaactcagcagccatttgataaaatagtcagcagcagggtaccgagc

SEQ ID NO: 443310 - DNA, 1667 bp, Homo sapiens
agtacctcacgaaggggacgtgggaaagtgttagcggggaacgctgggaaactcccggcctccgccaccatcttgcttgctttcctttaatccggcagtgaccgtgtgtcagaacaatcttgaatcatgaagctactaaccagagccggctctttctcgagattttattccctcaaagttgcccccaaagttaaagccacagctgcgcctgcaggagcaccgccacaacctcaggaccttgagtttaccaagttaccaaatggcttggtgattgcttctttggaaaactattctcctgtatcaagaattggtttgttcattaaagcaggcagtagatatgaggacttcagcaatttaggaaccacccatttgctgcgtcttacatccagtctgacgacaaaaggagcttcatctttcaagataacccgtggaattgaagcagttggtggcaaattaagtgtgaccgcaacaagggaaaacatggcttatactgtggaatgcctgcggggtgatgttgatattctaatggagttcctgctcaatgtcaccacagcaccagaatttcgtcgttgggaagtagctgaccttcagcctcagctaaagattgacaaagctgtggcctttcagaatccgcagactcatgtcattgaaaatttgcatgcagcagcttaccggaatgccttggctaatcccttgtattgtcctgactataggattggaaaagtgacatcagaggagttacattacttcgttcagaaccatttcacaagtgcaagaatggctttgattggacttggtgtgagtcatcctgttctaaagcaagttgctgaacagtttctcaacatgaggggtgggcttggtttatctggtgcaaaggccaactaccgtggaggtgaaatccgagaacagaatggagacagtcttgtccatgctgcttttgtagcagaaagtgctgtcgcgggaagtgcagaggcaaatgcatttagtgttcttcagcatgtcctcggtgctgggccacatgtcaagaggggcagcaacaccaccagccatctgcaccaggctgttgccaaggcaactcagcagccatttgatgtttctgcatttaatgccagttactcagattctggactctttgggatttatactatctcccaggccacagctgctggagatgttatcaaggctgcctataatcaagtaaaaacaatagctcaaggaaacctttccaacacagatgtccaagctgccaagaacaagctgaaagctggatacctaatgtcagtggagtcttctgagtgtttcctggaagaagtcgggtcccaggctctagttgctggttcttacatgccaccatccacagtccttcagcagattgattcagtggctaatgctgatatcataaatgcggcaaagaagtttgtttctggccagaagtcaatggcagcaagtggaaatttgggacatacaccttttgttgatgagttgtaatactgatgcacacattacaggagagagctgaacgttctctcagcccagagcagcaaacacatgaaagtcagaagtctctaatatatcatttgtcttttttccagtgaggtaaaataaggcataaatgcaggtaattattcccagctgacctaaagtcaataaaacattctgtttaagtg

SEQ ID NO: 443311 - DNA, 2105 bp, Homo sapiens
  misc_feature (1764)..(1764): n is a, c, g, or t
agtacctcacgaaggggacgtgggaaagtgttagcggggaacgctgggaaactcccggcctccgccaccatcttgcttgctttcctttaatccggcagtgaccgtgtgtcagaacaatcttgaatcatgaagctactaaccagagccggctctttctcgagattttattccctcaaagttgcccccaaagttaaagccacagctgcgcctgcaggagcaccgccacaacctcaggaccttgagtttaccaagttaccaaatggcttggtgattgcttctttggaaaactattctcctgtatcaagaattggtttgttcattaaagcaggcagtagatatgaggacttcagcaatttaggaaccacccatttgctgcgtcttacatccagtctgacgacaaaaggagcttcatctttcaagataacccgtggaattgaagcagttggtggcaaattaagtgtgaccgcaacaagggaaaacatggcttatactgtggaatgcctgcggggtgatgttgatattctaatggagttcctgctcaatgtcaccacagcaccagaatttcgtcgttgggaagtagctgaccttcagcctcagctaaagattgacaaagctgtggcctttcagaatccgcagactcatgtcattgaaaatttgcatgcagcagcttaccggaatgccttggctaatcccttgtattgtcctgactataggattggaaaagtgacatcagaggagttacattacttcgttcagaaccatttcacaagtgcaagaatggctttgattggacttggtgtgagtcatcctgttctaaagcaagttgctgaacagtttctcaacatgaggggtgggcttggtttatctggtgcaaaggccaactaccgtggaggtgaaatccgagaacagaatggagacagtcttgtccatgctgcttttgtagcagaaagtgctgtcgcgggaagtgcagaggcaaatgcatttagtgttcttcagcatgtcctcggtgctgggccacatgtcaagaggggcagcaacaccaccagccatctgcaccaggctgttgccaaggcaactcagcagccatttgatgtttctgcatttaatgccagttactcagattctggactctttgggatttatactatctcccaggccacagctgctggagatgttatcaaggctgcctataatcaagtaaaaacaatagctcaaggaaacctttccaacacagatgtccaagctgccaagaacaagctgaaagctggatacctaatgtcagtggagtcttctgagtgtttcctggaagaagtcgggtcccaggctctagttgctggttcttacatgccaccatccacagtccttcagcagattgattcagtggctaatgctgatatcataaatgcggcaaagaagtttgtttctggccagaagtcaatggcagcaagtggaaatttgggacatacaccttttgttgatgagttgtaatactgatgcacacattacaggagagagctgaacgttctctcagcccagagcagcaaacacatgaaagtcagaagtctctaatatatcatttgtcttttttccagtgaggtaaaataaggcataaatgcaggtaattattcccagctgacctaaagtcaataaaacattctgtttaagtgaaaaaaaaaaaaaaaaaaaaaaaaaaaaaaaaaaaaaaaacaaaggggggggggggcaaaaatttcccccgggggggcccattagcgcgtcacccantttttttgtgtcagaagggggccccaatgaggaggggccgtataaaaaagagcaggcgcgggcgccgcggtttaaacacacgtgtgcggcatggggaacacaccggctcacgcggggaaccttggcgggaaaggaccccttatccactctggcgcgcggggagaccaatagtcgggaccaaatctcccctcgaaaggagatttataagaggtccaaggcggtaattatttaaacctttacgacgagttatcacgcgtgttaacacacacggcaaatatgacctgcgcggcatcgaaaaaattggggctacacgggcaataggctttgggaacatttttcga

SEQ ID NO: 443312 - DNA, 1916 bp, Homo sapiens
agtacctcacgaaggggacgtgggaaagtgttagcggggaacgctgggaaactcccggcctccgccaccatcttgcttgctttcctttaatccggcagtgaccgtgtgtcagaacaatcttgaatcatgaagctactaaccagagccggctctttctcgagattttattccctcaaagttgcccccaaagttaaagccacagctgcgcctgcaggagcaccgccacaacctcaggaccttgagtttaccaagttaccaaatggcttggtgattgcttctttggaaaactattctcctgtatcaagaattggtttgttcattaaagcaggcagtagatatgaggacttcagcaatttaggaaccacccatttgctgcgtcttacatccagtctgacgacaaaaggagcttcatctttcaagataacccgtggaattgaagcagttggtggcaaattaagtgtgaccgcaacaagggaaaacatggcttatactgtggaatgcctgcggggtgatgttgatattctaatggagttcctgctcaatgtcaccacagcaccagaatttcgtcgttgggaagtagctgaccttcagcctcagctaaagattgacaaagctgtggcctttcagaatccgcagactcatgtcattgaaaatttgcatgcagcagcttaccggaatgccttggctaatcccttgtattgtcctgactataggattggaaaagtgacatcagaggagttacattacttcgttcagaaccatttcacaagtgcaagaatggctttgattggacttggtgtgagtcatcctgttctaaagcaagttgctgaacagtttctcaacatgaggggtgggcttggtttatctggtgcaaaggccaactaccgtggaggtgaaatccgagaacagaatggagacagtcttgtccatgctgcttttgtagcagaaagtgctgtcgcgggaagtgcagaggcaaatgcatttagtgttcttcagcatgtcctcggtgctgggccacatgtcaagaggggcagcaacaccaccagccatctgcaccaggctgttgccaaggcaactcagcagccatttgatgtttctgcatttaatgccagttactcagattctggactctttgggatttatactatctcccaggccacagctgctggagatgttatcaaggctgcctataatcaagtagaacaagctgaaagctggatacctaatgtcagtggagtcttctgagtgtttcctggaagaagtcgggtcccaggctctagttgctggttcttacatgccaccatccacagtccttcagcagattgattcagtggctaatgctgatatcataaatgcggcaaagaagtttgtttctggccagaagtcaatggcagcaagtggaaatttgggacatacaccttttgttgatgagttgtaatactgatgcacacattacaggagagagctgaacgttctctcagcccagagcagcaaacacatgaaagtcagaagtctctaatatatcatttgtcttttttccagtgaggtaaaataaggcataaatgcaggtaattattcccagctgacctaaagtcaataaaacattctgtttaagtgtttttcttacgtttttctcaatgagttaatcaacaagtatttattatgtgctgatatctttgttttagatgctttaaaggagacaggaatataattattgagtatagaagcatcagaaactattaaaattaaggctaagtggctatcggggtaaatagtgccagattactattggtggcgtttaagatgaaagcaagttcaaaatttgtcattttgggtgtcaacagctaaatggtctggtttttacccctgttttgccttttttgcaataaaattatttccaaaaaacaaaaaaaaac

SEQ ID NO: 443313 - DNA, 1617 bp, Homo sapiens
agtacctcacgaaggggacgtgggaaagtgttagcggggaacgctgggaaactcccggcctccgccaccatcttgcttgctttcctttaatccggcagtgaccgtgtgtcagaacaatcttgaatcatgaagctactaaccagagccggctctttctcgagattttattccctcaaagttgcccccaaagttaaagccacagctgcgcctgcaggagcaccgccacaacctcaggaccttgagtttaccaagttaccaaatggcttggtgattgcttctttggaaaactattctcctgtatcaagaattggtttgttcattaaagcaggcagtagatatgaggacttcagcaatttaggaaccacccatttgctgcgtcttacatccagtctgacgacaaaaggagcttcatctttcaagataacccgtggaattgaagcagttggtggcaaattaagtgtgaccgcaacaagggaaaacatggcttatactgtggaatgcctgcggggtgatgttgatattctaatggagttcctgctcaatgtcaccacagcaccagaatttcgtcgttgggaagtagctgaccttcagcctcagctaaagattgacaaagctgtggcctttcagaatccgcagactcatgtcattgaaaatttgcatgcagcagcttaccggaatgccttggctaatcccttgtattgtcctgactataggattggaaaagtgacatcagaggagttacattacttcgttcagaaccatttcacaagtgcaagaatggctttgattggacttggtgtgagtcatcctgttctaaagcaagttgctgaacagtttctcaacatgaggggtgggcttggtttatctggtgcaaaggccaactaccgtggaggtgaaatccgagaacagaatggagacagtcttgtccatgctgcttttgtagcagaaagtgctgtcgcgggaagtgcagaggcaaatgcatttagtgttcttcagcatgtcctcggtgctgggccacatgtcaagaggggcagcaacaccaccagccatctgcaccaggctgttgccaaggcaactcagcagccatttgatgtttctgcatttaatgccagttactcagattctggactctttgggatttatactatctcccaggccacagctgctggagatgttatcaaggctgcctataatcaagtagaacaagctgaaagctggatacctaatgtcagtggagtcttctgagtgtttcctggaagaagtcgggtcccaggctctagttgctggttcttacatgccaccatccacagtccttcagcagattgattcagtggctaatgctgatatcataaatgcggcaaagaagtttgtttctggccagaagtcaatggcagcaagtggaaatttgggacatacaccttttgttgatgagttgtaatactgatgcacacattacaggagagagctgaacgttctctcagcccagagcagcaaacacatgaaagtcagaagtctctaatatatcatttgtcttttttccagtgaggtaaaataaggcataaatgcaggtaattattcccagctgacctaaagtcaataaaacattctgtttaagtg

SEQ ID NO: 443314 - DNA, 1719 bp, Homo sapiens
agtacctcacgaaggggacgtgggaaagtgttagcggggaacgctgggaaactcccggcctccgccaccatcttgcttgctttcctttaatccggcagtgaccgtgtgtcagaacaatcttgaatcatgaagctactaaccagagccggctctttctcgagattttattccctcaaagttgcccccaaagttaaagccacagctgcgcctgcaggagcaccgccacaacctcaggaccttgagtttaccaagttaccaaatggcttggtgattgcttctttggaaaactattctcctgtatcaagaattggtttgttcattaaagcaggcagtagatatgaggacttcagcaatttaggaaccacccatttgctgcgtcttacatccagtctgacgacaaaaggagcttcatctttcaagataacccgtggaattgaagcagttggtggcaaattaagtgtgaccgcaacaagggaaaacatggcttatactgtggaatgcctgcggggtgatgttgatattctaatggagttcctgctcaatgtcaccacagcaccagaatttcgtcgttgggaagtagctgaccttcagcctcagctaaagattgacaaagctgtggcctttcagaatccgcagactcatgtcattgaaaatttgcatgcagcagcttaccggaatgccttggctaatcccttgtattgtcctgactataggattggaaaagtgacatcagaggagttacattacttcgttcagaaccatttcacaagtgcaagaatggctttgattggacttggtgtgagtcatcctgttctaaagcaagttgctgaacagtttctcaacatgaggggtgggcttggtttatctggtgcaaaggccaactaccgtggaggtgaaatccgagaacagaatggagacagtcttgtccatgctgcttttgtagcagaaagtgctgtcgcgggaagtgcagaggcaaatgcatttagtgttcttcagcatgtccgaacaagctgaaagctggatacctaatgtcagtggagtcttctgagtgtttcctggaagaagtcgggtcccaggctctagttgctggttcttacatgccaccatccacagtccttcagcagattgattcagtggctaatgctgatatcataaatgcggcaaagaagtttgtttctggccagaagtcaatggcagcaagtggaaatttgggacatacaccttttgttgatgagttgtaatactgatgcacacattacaggagagagctgaacgttctctcagcccagagcagcaaacacatgaaagtcagaagtctctaatatatcatttgtcttttttccagtgaggtaaaataaggcataaatgcaggtaattattcccagctgacctaaagtcaataaaacattctgtttaagtgtttttcttacgtttttctcaatgagttaatcaacaagtatttattatgtgctgatatctttgttttagatgctttaaaggagacaggaatataattattgagtatagaagcatcagaaactattaaaattaaggctaagtggctatcggggtaaatagtgccagattactattggtggcgtttaagatgaaagcaagttcaaaatttgtcattttgggtgtcaacagctaaatggtctggtttttacccctgttttgccttttttgcaataaaattatttccaaaaaacaaaaaaaaac

SEQ ID NO: 443315 - DNA, 1198 bp, Homo sapiens
agtacctcacgaaggggacgtgggaaagtgttagcggggaacgctgggaaactcccggcctccgccaccatcttgcttgctttcctttaatccggcagtgaccgtgtgtcagaacaatcttgaatcatgaagctactaaccagagccggctctttctcgagattttattccctcaaagttgcccccaaagttaaagccacagctgcgcctgcaggagcaccgccacaacctcaggaccttgagtttaccaagttaccaaatggcttggtgattgcttctttggaaaactattctcctgtatcaagaattggtttgttcattaaagcaggcagtagatatgaggacttcagcaatttaggaaccacccatttgctgcgtcttacatccagtctgacgacaaaaggagcttcatctttcaagataacccgtggaattgaagcagttggtggcaaattaagtgtgaccgcaacaagggaaaacatggcttatactgtggaatgcctgcggggtgatgttgatattctaatggagttcctgctcaatgtcaccacagcaccagaatttcgtcgttgggaagtagctgaccttcagcctcagctaaagattgacaaagctgtggcctttcagaatccgcagactcatgtcattgaaaatttgcatgcagcagcttaccggaatgccttggctaatcccttgtattgtcctgactataggattggaaaagtgacatcagaggagttacattacttcgttcagaaccatttcacaagtgcaagaatggctttgattggacttggtgtgagtcatcctgttctaaagcaagttgctgaacagtttctcaacatgaggggtgggcttggtttatctggtgcaaaggccaactaccgtggaggtgaaatccgagaacagaatggagacagtcttgtccatgctgcttttgtagcagaaagtgctgtcgcgggaagtgcagaggcaaatgcatttagtgttcttcagcatgtccacccactcggagtgggtccctgccaatcagagttacacacgagtctggtgtccgggctcctccgtccaggcaggctcagcttgactcctccagcctagagtcacaggttagacaggaggggcttatggtcactgctctaaccaatcccacttaacaacaccagtattataactacaggcatccttatagggggac

SEQ ID NO: 443316 - DNA, 1375 bp, Homo sapiens
gagaaaggctgcagcttcctgccagacccttacgcagaagcagctgtgattcagttcgtggtatagtatgaggcccgtgtctgatcgaaatcctggtgtaggtgatggactccttccttcgatgtgcttgaaaaattggatgcctgtcgctcgtgccgtaaagtccttgtgggcaactgacgaatgtgttatatgagggtccctacagactatctaggtggccggactcagcatagatcctgatgcaaagccacgcatgacagtgaaagtgtgctaattcccgatggaccttacgctggattatcaatggtcttgggcacctagacatgtcttctgtgactccttgaacagttgactagatttctgttagtcgacgaagaggcaaatgcatttagtgttcttcagcatgtcctcggtgctgggccacatgtcaagaggggcagcaacaccaccagccatctgcaccaggctgttgccaaggcaactcagcagccatttgatgtttctgcatttaatgccagttactcagattctggactctttgggatttatactatctcccaggccacagctgctggagatgttatcaaggctgcctataatcaagtaaaaacaatagctcaaggaaacctttccaacacagatgtccaagctgccaagaacaagctgaaagctggatacctaatgtcagtggagtcttctgagtgtttcctggaagaagtcgggtcccaggctctagttgctggttcttacatgccaccatccacagtccttcagcagattgattcagtggctaatgctgatatcataaatgcggcaaagaagtttgtttctggccagaagtcaatggcagcaagtggaaatttgggacatacaccttttgttgatgagttgtaatactgatgcacacattacaggagagagctgaacgttctctcagcccagagcagcaaacacatgaaagtcagaagtctctaatatatcatttgtcttttttccagtgaggtaaaataaggcataaatgcaggtaattattcccagctgacctaaagtcaataaaacattctgtttaagtgtttttcttacgtttttctcaatgagttaatcaacaagtatttattatgtgctgatatctttgttttagatgctttaaaggagacaggaatataattattgagtatagaagcatcagaaactattaaaattaaggctaagtggctatcggggtaaatagtgccagattactattggtggcgtttaagatgaaagcaagttcaaaatttgtcattttgggtgtcaacagctaaatggtctggtttttacccctgttttgccttttttgcaataaaattatttccaaaaaacaaaaaaaaac

SEQ ID NO: 443317 - DNA, 712 bp, Homo sapiens
agtacctcacgaaggggacgtgggaaagtgttagcggggaacgctgggaaactcccggcctccgccaccatcttgcttgctttcctttaatccggcagtgaccgtgtgtcagaacaatcttgaatcatgaagctactaaccagagccggctctttctcgagattttattccctcaaagttgcccccaaagttaaagccacagctgcgcctgcaggagcaccgccacaacctcaggaccttgagtttaccaagttaccaaatggcttggtgattgcttctttggaaaactattctcctgtatcaagaattggtttgttcattaaagcaggcagtagatatgaggacttcagcaatttaggaaccacccatttgctgcgtcttacatccagtctgacgacaaaaggagcttcatctttcaagataacccgtggaattgaagcagttggtggcaaattaagtgtgaccgcaacaagggaaaacatggcttatactgtggaatgcctgcggggtgatgttgatattctaatggagttcctgctcaatgtcaccacagcaccagaatttcgtcgttgggaagtagctgaccttcagcctcagctaaagattgacaaagctgtggcctttcagaatccgcagactcatgtcattgaaatttgcatgcgcactgctggagatgtatcaggctgcctatatcagtaaccatagtccagga

SEQ ID NO: 443318 - DNA, 1521 bp, Homo sapiens
cgaggagtgggggtgaccttggggttcctaatcctacgtgaccctcctcttctcttctctgcaggtttgcaatagcaaccataactgccactgtgctccaggctgggctccacccttctgtgacaagccaggctttggtggcagcatggacagtggccctgtgcaggctgaaaaccatgacaccttcctgctggccatgctcctcagcgtcctgctgcctctgctcccaggggccggcctggcctggtgttgctaccgactcccaggagcccatctgcagcgatgcagctggggctgcagaagggaccctgcgtgcagtggccccaaagatggcccacacagggaccaccccctgggcggcgttcaccccatggagttgggccccacagccactggacagccctggcccctggaccctgagaactctcatgagcccagcagccaccctgagaagcctctgccagcagtctcgcctgacccccaagcagatcaagtccagatgccaagatcctgcctctggtgagaggtagctcctaaaatgaacagatttaaagacaggtggccactgacagccactccaggaacttgaactgcaggggcagagccagtgaatcaccggacctccagcacctgcaggcagcttggaagtttcttccccgagtggagcttcgacccacccactccaggaacccagagccacattagaagttcctgagggctggagaacactgctgggcacactctccagctcaataaaccatcagtcccagaagcaaaggtcacacagcccctgacctccctcaccagtggaggctgggtagtgctggccatcccaaaagggctctgtcctgggagtctggtgtgtctcctacatgcaatttccacggacccagctctgtggagggcatgactgctggccagaagctagtggtcctggggccctatggttcgactgagtccacactcccctggagcctggctggcctctgcaaacaaacataattttggggaccttccttcctgtttcttcccaccctgtcttctcccctaggtggttcctgagcccccacccccaatcccagtgctacacctgaggttctggagctcagaatctgacagcctctcccccattctgtgtgtgtcggggggacagagggaaccatttaagaaaagataccaaagtagaagtcaaaagaaagacatgttggctataggcgtggtggctcatgcctataatcccagcactttgggaagccggggtaggaggatcaccagaggccagcaggtccacaccagcctgggcaacacagcaagacaccgcatctacagaaaaattttaaaattagctgggcgtggtggtgtgtacctgtaggcctagctgctcaggaggctgaagcaggaggatcacttgagcctgagttcaacactgcagtgagctatggtggcaccactgcactccagcctgggtgacagagcaagaccctgtctctaaaataaattttaaaaagacatattacactt

SEQ ID NO: 443319 - DNA, 3001 bp, Homo sapiens
cacgtgggtgcctctgacccggacgcgggtcccgggtggggcggcctcacctcccggccccgcctggtcacgccgcgctccgcccccaggggccgcgccttccagggcgccacagtgggcctggcgcccgtcgagggcatgtgccgcgccgagagctcgggaggcgtgagcacggaccactcggagctccccatcggcgccgcagccaccatggcccatgagatcggccacagcctcggcctcagccacgaccccgacggctgctgcgtggaggctgcggccgagtccggaggctgcgtcatggctgcggccaccgggtacgcgggtggggggtcggggctgcggcggggcggctagtcctggggacttcctccgctgcgtttctttggtcgtccctcagtttcctcttctgtaaaatggggataatgatcatagtgtccgcttcagggtggtttatgaggcttaaagggaagaagctcaggcaaagtggattctcaacggtatgaagattattttccgagtaacctggcgaggttactcctacaccgggaggagcaccgtcgggtcgcgattccaccttgggtcccgggctgctcactattggggccgcatcgtcccctgtcccgcttgttgtgtgactttgcgcgggttacttcccctctctgggctctgcgcgtctggcggctgtagccaagcccaggggtggggatcagagaagcgcgggggttgggggactgtccctccatgcccaatgccctccccgtgccggtaggcacccgtttccgcgcgtgttcagcgcctgcagccgccgccagctgcgcgccttcttccgcaaggggggcggcgcttgcctctccaatgccccggaccccggactcccggtgccgccggcgctctgcgggaacggcttcgtggaagcgggcgaggagtgtgactgcggccctggccaggagtgccgcgacctctgctgctttgctcacaactgctcgctgcgcccgggggcccagtgcgcccacggggactgctgcgtgcgctgcctgctgaagccggctggagcgctgtgccgccaggccatgggtgactgtgacctccctgagttttgcacgggcacctcctcccactgtcccccagacgtttacctactggacggctcaccctgtgccaggggcagtggctactgctgggatggcgcatgtcccacgctggagcagcagtgccagcagctctgggggcctggctcccacccagctcccgaggcctgtttccaggtggtgaactctgcgggagatgctcatggaaactgcggccaggacagcgagggccacttcctgccctgtgcagggagggatgccctgtgtgggaagctgcagtgccagggtggaaagcccagcctgctcgcaccgcacatggtgccagtggactctaccgttcacctagatggccaggaagtgacttgtcggggagccttggcactccccagtgcccagctggacctgcttggcctgggcctggtagagccaggcacccagtgtggacctagaatggtttgcaatagcaaccataactgccactgtgctccaggctgggctccacccttctgtgacaagccaggctttggtggcagcatggacagtggccctgtgcaggctgaaaaccatgacaccttcctgctggccatgctcctcagcgtcctgctgcctctgctcccaggggccggcctggcctggtgttgctaccgactcccaggagcccatctgcagcgatgcagctggggctgcagaagggaccctgcgtgcagtggccccaaagatggcccacacagggaccaccccctgggcggcgttcaccccatggagttgggccccacagccactggacagccctggcccctggaccctgagaactctcatgagcccagcagccaccctgagaagcctctgccagcagtctcgcctgacccccaagcagatcaagtccagatgccaagatcctgcctctggtgagaggtagctcctaaaatgaacagatttaaagacaggtggccactgacagccactccaggaacttgaactgcaggggcagagccagtgaatcaccggacctccagcacctgcaggcagcttggaagtttcttccccgagtggagcttcgacccacccactccaggaacccagagccacattagaagttcctgagggctggagaacactgctgggcacactctccagctcaataaaccatcagtcccagaagcaaaggtcacacagcccctgacctccctcaccagtggaggctgggtagtgctggccatcccaaaagggctctgtcctgggagtctggtgtgtctcctacatgcaatttccacggacccagctctgtggagggcatgactgctggccagaagctagtggtcctggggccctatggttcgactgagtccacactcccctggagcctggctggcctctgcaaacaaacataattttggggaccttccttcctgtttcttcccaccctgtcttctcccctaggtggttcctgagcccccacccccaatcccagtgctacacctgaggttctggagctcagaatctgacagcctctcccccattctgtgtgtgtcggggggacagagggaaccatttaagaaaagataccaaagtagaagtcaaaagaaagacatgttggctataggcgtggtggctcatgcctataatcccagcactttgggaagccggggtaggaggatcaccagaggccagcaggtccacaccagcctgggcaacacagcaagacaccgcatctacagaaaaattttaaaattagctgggcgtggtggtgtgtacctgtaggcctagctgctcaggaggctgaagcaggaggatcacttgagcctgagttcaacactgcagtgagctatggtggcaccactgcactccagcctgggtgacagagcaagaccctgtctctaaaataaattttaaaaagacatattacactt

SEQ ID NO: 443320 - DNA, 2736 bp, Homo sapiens
ccctcccgctggatcccgcagccgcggctcttcccgacgcgttccgccttccccagctgtgcactctccatccagctgtgcgctctcgtcgggagtcccagccatgtccgacgagagagaggtagccgaggcagcgaccggggaagacgcctcttcgccgcctccgaaaaccgaggcagcgagcgacccccagcatcccgcggcctccgaaggggccgccgccgccgccgcctcgccgccactgctgcgctgcctagtgctcaccggctttggaggctacgacaaggtgaagctgcagagccggccggcagcgcccccggcccctgggcccggccagctgacgctgcgtctgcgggcctgcgggctcaacttcgcagacctcatggctaggcaggggctgtacgaccgtctcccgcctctgcctgtcactccgggcatggagggcgcgggtgttgtgatcgcagtgggcgagggagtcagcgaccgcaaggcaggagaccgggtgatggtgttgaaccggtcagggatgtggcaggaagaggtgactgtgccctcggtccagaccttcctgattcctgaggccatgacctttgaggaagctgctgccttgctcgtcaattacattacagcctacatggtcctctttgacttcggcaacctacagcctggccacagcgtcttggtacacatggctgcagggggtgtgggtatggctgccgtgcagctgtgccgtacagtggagaatgtgacagtgttcggaacggcctcggccagcaagcacgaggcactgaaggagaatggggtcacacatcccatcgactatcacacgactgactacgtggatgagatcaagaagatttcccctaaaggagtggacattgtcatggaccctctgggtgggtcagatactgccaagggctacaacctcctgaaacccatgggcaaagtcgtcacctatggaatggccaacctgctgacgggccccaaacggaacctgatggccctggcccggacatggtggaatcagttcagcgtgacagctctgcagctgctgcaggccaaccgggctgtgtgtggcttccacctgggctacctggatggtgaggtggagctggtcagtggtgtggtggcccgcctcctggctctgtacaaccagggccacatcaagccccacattgactcagtctggcccttcgagaaggtggctgatgccatgaaacagatgcaggagaagaagaatgtgggcaaggtcctcctggttccagggccagagaaggagaactagggcaagtggctgtgagaccctagagaccagcgaagggagaagttgggaagctacgttctgttggccaccagacttgcatttcagcctctgtcataatgctctgccctccctcccccgaagttctctgtggtgatgaccgctctcccctgcccctccccgcttcctgacctctgaagaggttgggaagtgaccatttggatgtctgggccctgccaaggcgacagggagggtcagagggaggccggctgcttcctgcccccaccctttccccgggcctgctgtgctgcttttgtgccaaggttagccagtcccccctgttgtgttccatgtgctttcacctctgcctcatctttcctcccgtccctgccccgccacctccccaaagaattgaaacgtcagctcaggatatggggccaatctctgtgagtccagcatgtacctgtctctccctagtgtcccttcagcctgggctgaccagtgcccgcctctgggcttgaccagttcccaatctcgtcctctgtccccaacttcttaagcacaattgggcttcttccatctccaggttttctgccattcttaaccaaggctgcctcttccaacagggcgggaatcagacctactcccctaggtcacaactctgggaaggatacagagcccccacccttcactgagttctctggatttgttctcagtgccttagcaacgaaaacctgtgcttgtgtgtgtgtggcggcggggagggaggatcctgtttcccacctccttctcctcccctgtactccccagtgccttccttgttctggtggagctggggtttctctcctccccagtcccacaacactgccaaaaatctgtgtatgtgccattgggtggggcagccccaagcctcctggggaggcagggcaaaaacaggtgccctcatcgtggtctgtgccatgtcccgtctctatggtggttgaggagaaaggcggggaagcttcctcagccttgcagatatgtgtggcatttactagccagagctctgaaaggcagtgctgtctgtttcttgtactgggaccaaagtaaaaatccaagcacattccccttgcagttaggggaggccctactgccttctcaaagcagagaggcagcttatcaaactcagcccaaaactctgtttacatgggtggggagatggagcagggaagtacagagtgggatggtcaggacctgggccattgcaaccaaaatggggacttcctgggtagggaggtcactccctctactcactgagctaggattagggagggttattgccccaaccattgcaatgggaggtggagggacaggctcagcctcctcattgtctaaatgaggcctaaatgtgtgaagtgcgatttctgcttttgtgtaccccaccaccccattaccacagctgcctttgtgtgtttgtgtcaataaaaagccaaacc

SEQ ID NO: 443321 - DNA, 2594 bp, Homo sapiens
  misc_feature (21)..(21): n is a, c, g, or t
taaagcaggctggtacggccngggattatggatcagccatccagctgtgcgctctcgtcgggagtcccagccatgtccgacgagagagaggtagccgaggcagcgaccggggaagacgcctcttcgccgcctccgaaaaccgaggcagcgagcgacccccagcatcccgcggcctccgaaggggccgccgccgccgccgcctcgccgccactgctgcgctgcctagtgctcaccggctttggaggctacgacaaggtgaagctgcagagccggccggcagcgcccccggcccctgggcccggccagctgacgctgcgtctgcgggcctgcgggctcaacttcgcagacctcatggctaggcaggggctgtacgaccgtctcccgcctctgcctgtcactccgggcatggagggcgcgggtgttgtgatcgcagtgggcgagggagtcagcgaccgcaaggcaggagaccgggtgatggtgttgaaccggtcagggatgtggcaggaagaggtgactgtgccctcggtccagaccttcctgattcctgaggccatgacctttgaggaagctgctgccttgctcgtcaattacattacagcctacatggtcctctttgacttcggcaacctacagcctggccacagcgtcttggtacacatggctgcagggggtgtgggtatggctgccgtgcagctgtgccgtacagtggagaatgtgacagtgttcggaacggcctcggccagcaagcacgaggcactgaaggagaatggggtcacacatcccatcgactatcacacgactgactacgtggatgagatcaagaagatttcccctaaaggagtggacattgtcatggaccctctgggtgggtcagatactgccaagggctacaacctcctgaaacccatgggcaaagtcgtcacctatggaatggccaacctgctgacgggccccaaacggaacctgatggccctggcccggacatggtggaatcagttcagcgtgacagctctgcagctgctgcaggccaaccgggctgtgtgtggcttccacctgggctacctggatggtgaggtggagctggtcagtggtgtggtggcccgcctcctggctctgtacaaccagggccacatcaagccccacattgactcagtctggcccttcgagaaggtggctgatgccatgaaacagatgcaggagaagaagaatgtgggcaaggtcctcctggttccagggccagagaaggagaactagggcaagtggctgtgagaccctagagaccagcgaagggagaagttgggaagctacgttctgttggccaccagacttgcatttcagcctctgtcataatgctctgccctccctcccccgaagttctctgtggtgatgaccgctctcccctgcccctccccgcttcctgacctctgaagaggttgggaagtgaccatttggatgtctgggccctgccaaggcgacagggagggtcagagggaggccggctgcttcctgcccccaccctttccccgggcctgctgtgctgcttttgtgccaaggttagccagtcccccctgttgtgttccatgtgctttcacctctgcctcatctttcctcccgtccctgccccgccacctccccaaagaattgaaacgtcagctcaggatatggggccaatctctgtgagtccagcatgtacctgtctctccctagtgtcccttcagcctgggctgaccagtgcccgcctctgggcttgaccagttcccaatctcgtcctctgtccccaacttcttaagcacaattgggcttcttccatctccaggttttctgccattcttaaccaaggctgcctcttccaacagggcgggaatcagacctactcccctaggtcacaactctgggaaggatacagagcccccaccctgtactccccagtgccttccttgttctggtggagctggggtttctctcctccccagtcccacaacactgccaaaaatctgtgtatgtgccattgggtggggcagccccaagcctcctggggaggcagggcaaaaacaggtgccctcatcgtggtctgtgccatgtcccgtctctatggtggttgaggagaaaggcggggaagcttcctcagccttgcagatatgtgtggcatttactagccagagctctgaaaggcagtgctgtctgtttcttgtactgggaccaaagtaaaaatccaagcacattccccttgcagttaggggaggccctactgccttctcaaagcagagaggcagcttatcaaactcagcccaaaactctgtttacatgggtggggagatggagcagggaagtacagagtgggatggtcaggacctgggccattgcaaccaaaatggggacttcctgggtagggaggtcactccctctactcactgagctaggattagggagggttattgccccaaccattgcaatgggaggtggagggacaggctcagcctcctcattgtctaaatgaggcctaaatgtgtgaagtgcgatttctgcttttgtgtaccccaccaccccattaccacagctgcctttgtgtgtttgtgtcaataaaaagccaaacc

SEQ ID NO: 443322 - DNA, 627 bp, Homo sapiens
aatcatactacgagcagtggcaagaaaggggctctgcattgtaaccttgacgaccatgactccgtggataagattgtcactcaggaataccatactgtgaatggccacaactgtgaagttagaaaagccctgtcacagcaagagatggctagtgcttcatccagccaaagaggtcgaagtggttctggaaactttggtggtggtcgtggaggtggtttcggtgggaatgacaacttcggtcgtggaggaaacttcagtggtcgtggtggctttggtggcaaccgtggtggtggtggatatggtggcagtggggatggctataatggatttggtaatgatgggtggggagatggagcagggaagtacagagtgggatggtcaggacctgggccattgcaaccaaaatggggacttcctgggtagggaggtcactccctctactcactgagctaggattagggagggttattgccccaaccattgcaatgggaggtggagggacaggctcagcctcctcattgtctaaatgaggcctaaatgtgtgaagtgcgatttctgcttttgtgtaccccaccaccccattaccacagctgcctttgtgtgtttgtgtcaataaaaagccaaacc

SEQ ID NO: 443323 - DNA, 583 bp, Homo sapiens
  misc_feature (130)..(130): n is a, c, g, or t
gaattcggcacgaggtttcttgtactgggaccaaagtaaaaatccaagcacattccccttgcagttaggggaggccctactgccttctcaaagcagagaggcagcttatcaaactcagcccaaaactctntttacatgggtggggagatggagcagggaagtacagagtgggatggggatatggggccaatctctgtgagtccagcatgtacctgtctctccctagtgtcccttcagcctgggctgaccagtgcccgcctctgggcttgaccagttcccaatctcgtcctctgtccccaacttcttaagcacaattgggcttcttccatctccaggttttctgccattcttaaccaaggctgcctcttccaacagggcgggaatcagacctactcccctaggtcacaactctgggaaggatacagagcccccacccttcactgagttctctggatttgttctcagtgccttagcaacgaaaacctgtgcttgtgtgtgtgtggcggcggggagggaggatcctgtttcccacctccttctcctccctttccagacttgggataactctaagagtcgaccagca

SEQ ID NO: 443324 - DNA, 2705 bp, Homo sapiens
  misc_feature (21)..(21): n is a, c, g, or t
taaagcaggctggtacggccngggattatggatcagccatccagctgtgcgctctcgtcgggagtcccagccatgtccgacgagagagaggtagccgaggcagcgaccggggaagacgcctcttcgccgcctccgaaaaccgaggcagcgagcgacccccagcatcccgcggcctccgaaggggccgccgccgccgccgcctcgccgccactgctgcgctgcctagtgctcaccggctttggaggctacgacaaggtgaagctgcagagccggccggcagcgcccccggcccctgggcccggccagctgacgctgcgtctgcgggcctgcgggctcaacttcgcagacctcatggctaggcaggggctgtacgaccgtctcccgcctctgcctgtcactccgggcatggagggcgcgggtgttgtgatcgcagtgggcgagggagtcagcgaccgcaaggcaggagaccgggtgatggtgttgaaccggtcagggatgtggcaggaagaggtgactgtgccctcggtccagaccttcctgattcctgaggccatgacctttgaggaagctgctgccttgctcgtcaattacattacagcctacatggtcctctttgacttcggcaacctacagcctggccacagcgtcttggtacacatggctgcagggggtgtgggtatggctgccgtgcagctgtgccgtacagtggagaatgtgacagtgttcggaacggcctcggccagcaagcacgaggcactgaaggagaatggggtcacacatcccatcgactatcacacgactgactacgtggatgagatcaagaagatttcccctaaaggagtggacattgtcatggaccctctgggtgggtcagatactgccaagggctacaacctcctgaaacccatgggcaaagtcgtcacctatggaatggccaacctgctgacgggccccaaacggaacctgatggccctggcccggacatggtggaatcagttcagcgtgacagctctgcagctgctgcaggccaaccgggctgtgtgtggcttccacctgggctacctggatggtgaggtggagctggtcagtggtgtggtggcccgcctcctggctctgtacaaccagggccacatcaagccccacattgactcagtctggcccttcgagaaggtggctgatgccatgaaacagatgcaggagaagaagaatgtgggcaaggtcctcctggttccagggccagagaaggagaactagggcaagtggctgtgagaccctagagaccagcgaagggagaagttgggaagctacgttctgttggccaccagacttgcatttcagcctctgtcataatgctctgccctccctcccccgaagttctctgtggtgatgaccgctctcccctgcccctccccgcttcctgacctctgaagaggttgggaagtgaccatttggatgtctgggccctgccaaggcgacagggagggtcagagggaggccggctgcttcctgcccccaccctttccccgggcctgctgtgctgcttttgtgccaaggttagccagtcccccctgttgtgttccatgtgctttcacctctgcctcatctttcctcccgtccctgccccgccacctccccaaagaattgaaacgtcagctcaggatatggggccaatctctgtgagtccagcatgtacctgtctctccctagtgtcccttcagcctgggctgaccagtgcccgcctctgggcttgaccagttcccaatctcgtcctctgtccccaacttcttaagcacaattgggcttcttccatctccaggttttctgccattcttaaccaaggctgcctcttccaacagggcgggaatcagacctactcccctaggtcacaactctgggaaggatacagagcccccacccttcactgagttctctggatttgttctcagtgccttagcaacgaaaacctgtgcttgtgtgtgtgtggcggcggggagggaggatcctgtttcccacctccttctcctcccctgtactccccagtgccttccttgttctggtggagctggggtttctctcctccccagtcccacaacactgccaaaaatctgtgtatgtgccattgggtggggcagccccaagcctcctggggaggcagggcaaaaacaggtgccctcatcgtggtctgtgccatgtcccgtctctatggtggttgaggagaaaggcggggaagcttcctcagccttgcagatatgtgtggcatttactagccagagctctgaaaggcagtgctgtctgtttcttgtactgggaccaaagtaaaaatccaagcacattccccttgcagttaggggaggccctactgccttctcaaagcagagaggcagcttatcaaactcagcccaaaactctgtttacatgggtggggagatggagcagggaagtacagagtgggatggtcaggacctgggccattgcaaccaaaatggggacttcctgggtagggaggtcactccctctactcactgagctaggattagggagggttattgccccaaccattgcaatgggaggtggagggacaggctcagcctcctcattgtctaaatgaggcctaaatgtgtgaagtgcgatttctgcttttgtgtaccccaccaccccattaccacagctgcctttgtgtgtttgtgtcaataaaaagccaaacc

SEQ ID NO: 443325 - DNA, 3084 bp, Homo sapiens
ccctcccgctggatcccgcagccgcggctcttcccgacgcgttccgccttccccagctgtgcactctccatccagctgtgcgctctcgtcgggagtcccagccatgtccgacgagagagaggtagccgaggcagcgaccggggaagacgcctcttcgccgcctccgaaaaccgaggcagcgagcgacccccagcatcccgcggcctccgaaggggccgccgccgccgccgcctcgccgccactgctgcgctgcctagtgctcaccggctttggaggctacgacaaggtgaagctgcagagccggccggcagcgcccccggcccctgggcccggccagctgacgctgcgtctgcgggcctgcgggctcaacttcgcagacctcatggctaggcaggggctgtacgaccgtctcccgcctctgcctgtcactccgggcatggagggcgcgggtgttgtgatcgcagtgggcgagggagtcagcgaccgcaaggcaggagaccgggtgatggtgttgaaccggtcagggatgtggcaggaagaggtgactgtgccctcggtccagaccttcctgattcctgaggccatgacctttgaggaagctgctgccttgctcgtcaattacattacagcctacatggtcctctttgacttcggcaacctacagcctggccacagcgtcttggtacacatggctgcagggggtgtgggtatggctgccgtgcagctgtgccgtacagtggagaatgtgacagtgttcggaacggcctcggccagcaagcacgaggcactgaaggagaatggggtcacacatcccatcgactatcacacgactgactacgtggatgagatcaagaagatttcccctaaaggagtggacattgtcatggaccctctgggtgggtcagatactgccaagggctacaacctcctgaaacccatgggcaaagtcgtcacctatggaatggccaacctgctgacgggccccaaacggaacctgatggccctggcccggacatggtggaatcagttcagcgtgacagctctgcagctgctgcaggccaaccgggctgtgtgtggcttccacctgggctacctggatggtgaggtggagctggtcagtggtgtggtggcccgcctcctggctctgtacaaccagggccacatcaagccccacattgactcagtctggcccttcgagaaggtggctgatgccatgaaacagatgcaggagaagaagaatgtgggcaaggtcctcctggttccagggccagagaaggagaactagggcaagtggctgtgagaccctagagaccagcgaagggagaagttgggaagctacgttctgttggccaccagacttgcatttcagcctctgtcataatgctctgccctccctcccccgaagttctctgtggtgatgaccgctctcccctgcccctccccgcttcctgacctctgaagaggttgggaagtgaccatttggatgtctgggccctgccaaggcgacagggagggtcagagggaggccggctgcttcctgcccccaccctttccccgggcctgctgtgctgcttttgtgccaaggttagccagtcccccctgttgtgttccatgtgctttcacctctgcctcatctttcctcccgtccctgccccgccacctccccaaagaattgaaacgtcagctcaggatatggggccaatctctgtgagtccagcatgtacctgtctctccctagtgtcccttcagcctgggctgaccagtgcccgcctctgggcttgaccagttcccaatctcgtcctctgtccccaacttcttaagcacaattgggcttcttccatctccaggttttctgccattcttaaccaaggctgcctcttccaacagggcgggaatcagacctactcccctaggtcacaactctgggaaggatacagagcccccacccttcactgagttctctggatttgttctcagtgccttagcaacgaaaacctgtgcttgtgtgtgtgtggcggcggggagggaggatcctgtttcccacctccttctcctcccctgtactccccagtgccttccttgttctggtggagctggggtttctctcctccccagtcccacaacactgccaaaaatctgtgtatgtgccattgggtggggcagccccaagcctcctggggaggcagggcaaaaacaggtgccctcatcgtggtctgtgccatgtcccgtctctatggtggttgaggagaaaggcggggaagcttcctcagccttgcagatatgtgtggcatttactagccagagctctgaaaggcagtgctgtctgtttcttgtactgggaccaaagtaaaaatccaagcacattccccttgcagttaggggaggccctactgccttctcaaagcagagaggcagcttatcaaactcagcccaaaactctgtttacatgggtggggagatggagcagggaagtacagagtgggatggtcaggacctgggccattgcaaccaaaatggggacttcctgggtagggaggtcactccctctactcactgagctaggattagggagggttattgccccaaccattgcaatgggaggtggagggacaggctcagcctcctcattgtctaaatgaggcctaaatgtgtgaagtgcgatttctgcttttgtgtaccccaccaccccattaccacagctgcctttgtgtgtttgtgtcaataaaaagccaaaccaaaaaaaaaaaagaaaaaaaacaaaaaagggggggggcgctaaaaatatatcccctagggggggcaaaagatgttagagtattcgccaggtttttggacaaaagggggcccataatagggagggattaaaaaaggagggcgaggagcgggtataaacacggtggggagtgggaaaaatggtaaggggaaccttgtgagaggacataaatggggggggggcaatagtggcagaataactgagagatgaaaggctcaaggcagattacagtgtaaacgattaggggtaaacagcggattggtgcgattgagattggatccgattgataggcaattaacagggtgtgtata

SEQ ID NO: 443326 - DNA, 2569 bp, Homo sapiens
ccctcccgctggatcccgcagccgcggctcttcccgacgcgttccgccttccccagctgtgcactctccatccagctgtgcgctctcgtcgggagtcccagccatgtccgacgagagagaggtagccgaggcagcgaccggggaagacgcctcttcgccgcctccgaaaaccgaggcagcgagcgacccccagcatcccgcggcctccgaaggggccgccgccgccgccgcctcgccgccactgctgcgctgcctagtgctcaccggctttggaggctacgacaaggtgaagctgcagagccggccggcagcgcccccggcccctgggcccggccagctgacgctgcgtctgcgggcctgcgggctcaacttcgcagacctcatggctaggcaggggctgtacgaccgtctcccgcctctgcctgtcactccgggcatggagggcgcgggtgttgtgatcgcagtgggcgagggagtcagcgaccgcaaggcaggagaccgggtgatggtgttgaaccggtcagggatgtggcaggaagaggtgactgtgccctcggtccagaccttcctgattcctgaggccatgacctttgaggaagctgctgccttgctcgtcaattacattacagcctacatggtcctctttgacttcggcaacctacagcctggccacagcgtcttggtacacatggctgcagggggtgtgggtatggctgccgtgcagctgtgccgtacagtggagaatgtgacagtgttcggaacggcctcggccagcaagcacgaggcactgaaggagaatggggtcacacatcccatcgactatcacacgactgactacgtggatgagatcaagaagatttcccctaaaggagtggacattgtcatggaccctctgggtgggtcagatactgccaagggctacaacctcctgaaacccatgggcaaagtcgtcacctatggaatggccaacctgctgacgggccccaaacggaacctgatggccctggcccggacatggtggaatcagttcagcgtgacagctctgcagctgctgcaggccaaccgggctgtgtgtggcttccacctgggctacctggatggtgaggtggagctggtcagtggtgtggtggcccgcctcctggctctgtacaaccagggccacatcaagccccacattgactcagtctggcccttcgagaaggtggctgatgccatgaaacagatgcaggagaagaagaatgtgggcaaggtcctcctggttccagggccagagaaggagaactagggcaagtggctgtgagaccctagagaccagcgaagggagaagttgggaagctacgttctgttggccaccagacttgcatttcagcctctgtcataatgctctgccctccctcccccgaagttctctgtggtgatgaccgctctcccctgcccctccccgcttcctgacctctgaagaggttgggaagtgaccatttggatgtctgggccctgccaaggcgacagggagggtcagagggaggccggctgcttcctgcccccaccctttccccgggcctgctgtgctgcttttgtgccaaggttagccagtcccccctgttgtgttccatgtgctttcacctctgcctcatctttcctcccgtccctgccccgccacctccccaaagaattgaaacgtcagctcaggatatggggccaatctctgtgagtccagcatgtacctgtctctccctagtgtcccttcagcctgggctgaccagtgcccgcctctgggcttgaccagttcccaatctcgtcctctgtccccaacttcttaagcacaattgggcttcttccatctccaggttttctgccattcttaaccaaggctgcctcttccaacagggcgggaatcagacctactcccctaggtcacaactctgggaaggatacagagcccccacccttcactgagttctctggatttgttctcagtgccttagcaacgaaaacctgtgcttgtgtgtgtgtggcggcggggagggaggatcctgtttcccacctccttctcctcccctgtactccccagtgccttccttgttctggtggagctggggtttctctcctccccagtcccacaacactgccaaaaatctgtgtatgtgccattgggtggggcagccccaagcctcctggggaggcagggcaaaaacaggtgccctcatcgtggtctgtgccatgtcccgtctctatggtggttgaggagaaaggcggggaagcttcctcagccttgcagatatgtgtggcatttactagccagagctctgaaaggcagtgctgtctgtttcttgtactgggaccaaagtaaaaatccaagcacattccccttgcagttaggggaggccctactgccttctcaaagcagagaggcagcttatcaaactcagcccaaaactctgtttacgctcagcctcctcattgtctaaatgaggcctaaatgtgtgaagtgcgatttctgcttttgtgtaccccaccaccccattaccacagctgcctttgtgtgtttgtgtcaataaaaagccaaacc

SEQ ID NO: 443327 - DNA, 2095 bp, Homo sapiens
ccctcccgctggatcccgcagccgcggctcttcccgacgcgttccgccttccccagctgtgcactctccatccagctgtgcgctctcgtcgggagtcccagccatgtccgacgagagagaggtagccgaggcagcgaccggggaagacgcctcttcgccgcctccgaaaaccgaggcagcgagcgacccccagcatcccgcggcctccgaaggggccgccgccgccgccgcctcgccgccactgctgcgctgcctagtgctcaccggctttggaggctacgacaaggtgaagctgcagagccggccggcagcgcccccggcccctgggcccggccagctgacgctgcgtctgcgggcctgcgggctcaacttcgcagacctcatggctaggcaggggctgtacgaccgtctcccgcctctgcctgtcactccgggcatggagggcgcgggtgttgtgatcgcagtgggcgagggagtcagcgaccgcaaggcaggagaccgggtgatggtgttgaaccggtcagggatgtggcaggaagaggtgactgtgccctcggtccagaccttcctgattcctgaggccatgacctttgaggaagctgctgccttgctcgtcaattacattacagcctacatggtcctctttgacttcggcaacctacagcctggccacagcgtcttggtacacatggctgcagggggtgtgggtatggctgccgtgcagctgtgccgtacagtggagaatgtgacagtgttcggaacggcctcggccagcaagcacgaggcactgaaggagaatggggtcacacatcccatcgactatcacacgactgactacgtggatgagatcaagaagatttcccctaaaggagtggacattgtcatggaccctctgggtgggtcagatactgccaagggctacaacctcctgaaacccatgggcaaagtcgtcacctatggaatggccaacctgctgacgggccccaaacggaacctgatggccctggcccggacatggtggaatcagttcagcgtgacagctctgcagctgctgcaggccaaccgggctgtgtgtggcttccacctgggctacctggatggtgaggtggagctggtcagtggtgtggtggcccgcctcctggctctgtacaaccagggccacatcaagccccacattgactcagtctggcccttcgagaaggtggctgatgccatgaaacagatgcaggagaagaagaatgtgggcaaggtcctcctggttccagggccagagaaggagaactagggcaagtggctgtgagaccctagagaccagcgaagggagaagttgggaagctacgttctgttggccaccagacttgcatttcagcctctgtcataatgctctgccctccctcccccgaagttctctgtggtgatgaccgctctcccctgcccctccccgcttcctgacctctgaagaggttgggaagtgaccatttggatgtctgggccctgccaaggcgacagggagggtcagagggaggccggctgcttcctgcccccaccctttccccgggcctgctgtgctgcttttgtgccaaggttagccagtcccccctgttgtgttccatgtgctttcacctctgcctcatctttcctcccgtccctgccccgccacctccccaaagaattgaaacgtcagctcaggatatggggccaatctctgtgagtccagcatgtacctgtctctccctagtgtcccttcagcctgggctgaccagtgcccgcctctgggcttgaccagttcccaatctcgtcctctgtccccaacttcttaagcacaattgggcttcttccatctccaggttttctgccattcttaaccaaggctgcctcttccaacagggcgggaatcagacctactcccctaggtcacaactctgggaaggatacagagcccccacccttcactgagttctctggatttgttctcagtgccttagcaacgaaaacctgtgcttgtgtgtgtgtggcggcggggagggaggatcctgtttcccacctccttctcctccctttccagacttgggataactctaagagtcgaccagca

SEQ ID NO: 443328 - DNA, 1767 bp, Homo sapiens
ccctcccgctggatcccgcagccgcggctcttcccgacgcgttccgccttccccagctgtgcactctccatccagctgtgcgctctcgtcgggagtcccagccatgtccgacgagagagaggtagccgaggcagcgaccggggaagacgcctcttcgccgcctccgaaaaccgaggcagcgagcgacccccagcatcccgcggcctccgaaggggccgccgccgccgccgcctcgccgccactgctgcgctgcctagtgctcaccggctttggaggctacgacaaggtgaagctgcagagccggccggcagcgcccccggcccctgggcccggccagctgacgctgcgtctgcgggcctgcgggctcaacttcgcagacctcatggctaggcaggggctgtacgaccgtctcccgcctctgcctgtcactccgggcatggagggcgcgggtgttgtgatcgcagtgggcgagggagtcagcgaccgcaaggcaggagaccgggtgatggtgttgaaccggtcagggatgtggcaggaagaggtgactgtgccctcggtccagaccttcctgattcctgaggccatgacctttgaggaagctgctgccttgctcgtcaattacattacagcctacatggtcctctttgacttcggcaacctacagcctggccacagcgtcttggtacacatggctgcagggggtgtgggtatggctgccgtgcagctgtgccgtacagtggagaatgtgacagtgttcggaacggcctcggccagcaagcacgaggcactgaaggagaatggggtcacacatcccatcgactatcacacgactgactacgtggatgagatcaagaagatttcccctaaaggagtggacattgtcatggaccctctgggtgggtcagatactgccaagggctacaacctcctgaaacccatgggcaaagtcgtcacctatggaatggccaacctgctgacgggccccaaacggaacctgatggccctggcccggacatggtggaatcagttcagcgtgacagctctgcagctgctgcaggccaaccgggctgtgtgtggcttccacctgggctacctggatggtgaggtggagctggtcagtggtgtggtggcccgcctcctggctctgtacaaccagggccacatcaagccccacattgactcagtctggcccttcgagaaggtggctgatgccatgaaacagatgcaggagaagaagaatgtgggcaaggtcctcctggttccagggccagagaaggagaactagggcaagtggctgtgagaccctagagaccagcgaagggagaagttgggaagctacgttctgttggccaccagacttgcatttcagcctctgtcataatgctctgccctccctcccccgaagttctctgtggtgatgaccgctctcccctgcccctccccgcttcctgacctctgaagaggttgggaagtgaccatttggatgtctgggccctgccaaggcgacagggagggtcagagggaggccggctgcttcctgcccccaccctttccccgggcctgctgtgctgcttttgtgccaaggttagccagtcccccctgttgtgttccatgtgctttcacctctgcctcatctttcctcccgtccctgccccgccacctccccaaagaattgaaacgtcagctcacacttcagcaaatgtaaaaataaaatctaactctcattgacaagcagagtaagaaaagttacatactaataagctgtga

SEQ ID NO: 443329 - DNA, 2277 bp, Homo sapiens
agcggaatgtggtctgtgactatgagtgacggcaggagaccgggtgatggtgttgaaccggtcagggatgtggcaggaagaggtgactgtgccctcggtccagaccttcctgattcctgaggccatgacctttgaggaagctgctgccttgctcgtcaattacattacagcctacatggtcctctttgacttcggcaacctacagcctggccacagcgtcttggtacacatggctgcagggggtgtgggtatggctgccgtgcagctgtgccgtacagtggagaatgtgacagtgttcggaacggcctcggccagcaagcacgaggcactgaaggagaatggggtcacacatcccatcgactatcacacgactgactacgtggatgagatcaagaagatttcccctaaaggagtggacattgtcatggaccctctgggtgggtcagatactgccaagggctacaacctcctgaaacccatgggcaaagtcgtcacctatggaatggccaacctgctgacgggccccaaacggaacctgatggccctggcccggacatggtggaatcagttcagcgtgacagctctgcagctgctgcaggccaaccgggctgtgtgtggcttccacctgggctacctggatggtgaggtggagctggtcagtggtgtggtggcccgcctcctggctctgtacaaccagggccacatcaagccccacattgactcagtctggcccttcgagaaggtggctgatgccatgaaacagatgcaggagaagaagaatgtgggcaaggtcctcctggttccagggccagagaaggagaactagggcaagtggctgtgagaccctagagaccagcgaagggagaagttgggaagctacgttctgttggccaccagacttgcatttcagcctctgtcataatgctctgccctccctcccccgaagttctctgtggtgatgaccgctctcccctgcccctccccgcttcctgacctctgaagaggttgggaagtgaccatttggatgtctgggccctgccaaggcgacagggagggtcagagggaggccggctgcttcctgcccccaccctttccccgggcctgctgtgctgcttttgtgccaaggttagccagtcccccctgttgtgttccatgtgctttcacctctgcctcatctttcctcccgtccctgccccgccacctccccaaagaattgaaacgtcagctcaggatatggggccaatctctgtgagtccagcatgtacctgtctctccctagtgtcccttcagcctgggctgaccagtgcccgcctctgggcttgaccagttcccaatctcgtcctctgtccccaacttcttaagcacaattgggcttcttccatctccaggttttctgccattcttaaccaaggctgcctcttccaacagggcgggaatcagacctactcccctaggtcacaactctgggaaggatacagagcccccacccttcactgagttctctggatttgttctcagtgccttagcaacgaaaacctgtgcttgtgtgtgtgtggcggcggggagggaggatcctgtttcccacctccttctcctcccctgtactccccagtgccttccttgttctggtggagctggggtttctctcctccccagtcccacaacactgccaaaaatctgtgtatgtgccattgggtggggcagccccaagcctcctggggaggcagggcaaaaacaggtgccctcatcgtggtctgtgccatgtcccgtctctatggtggttgaggagaaaggcggggaagcttcctcagccttgcagatatgtgtggcatttactagccagagctctgaaaggcagtgctgtctgtttcttgtactgggaccaaagtaaaaatccaagcacattccccttgcagttaggggaggccctactgccttctcaaagcagagaggcagcttatcaaactcagcccaaaactctgtttacatgggtggggagatggagcagggaagtacagagtgggatggtcaggacctgggccattgcaaccaaaatggggacttcctgggtagggaggtcactccctctactcactgagctaggattagggagggttattgccccaaccattgcaatgggaggtggagggacaggctcagcctcctcattgtctaaatgaggcctaaatgtgtgaagtgcgatttctgcttttgtgtaccccaccaccccattaccacagctgcctttgtgtgtttgtgtcaataaaaagccaaacc

SEQ ID NO: 443330 - DNA, 1740 bp, Homo sapiens
ccctcccgctggatcccgcagccgcggctcttcccgacgcgttccgccttccccagctgtgcactctccatccagctgtgcgctctcgtcgggagtcccagccatgtccgacgagagagaggtagccgaggcagcgaccggggaagacgcctcttcgccgcctccgaaaaccgaggcagcgagcgacccccagcatcccgcggcctccgaaggggccgccgccgccgccgcctcgccgccactgctgcgctgcctagtgctcaccggctttggaggctacgacaaggtgaagctgcagagccggccggcagcgcccccggcccctgggcccggccagctgacgctgcgtctgcgggcctgcgggctcaacttcgcagacctcatggctaggcaggggctgtacgaccgtctcccgcctctgcctgtcactccgggcatggagggcgcgggtgttgtgatcgcagtgggcgagggagtcagcgaccgcaaggcaggagaccgggtgatggtgttgaaccggtcagggatgtggcaggaagaggtgactgtgccctcggtccagaccttcctgattcctgaggccatgacctttgaggaagctgctgccttgctcgtcaattacattacagcctacatggtcctctttgacttcggcaacctacagcctggccacagcgtcttggtacacatggctgcagggggtgtgggtatggctgccgtgcagctgtgccgtacagtggagaatgtgacagtgttcggaacggcctcggccagcaagcacgaggcactgaaggagaatggggtcacacatcccatcgactatcacacgactgactacgtggatgagatcaagaagatttcccctaaaggagtggacattgtcatggaccctctgggtgggtcagatactgccaagggctacaacctcctgaaacccatgggcaaagtcgtcacctatggaatggccaacctgctgacgggccccaaacggaacctgatggccctggcccggacatggtggaatcagttcagcgtgacagctctgcagctgctgcaggccaaccgggctgtgtgtggcttccacctgggctacctggatggtgaggtggagctggtcagtggtgtggtggcccgcctcctggctctgtacaaccagggccacatcaagccccacattgactcagtctggcccttcgagaaggtggctgatgccatgaaacagatgcaggagaagaagaatgtgggcaaggtcctcctggttccagggccagagaaggagaactagggcaagtggctgtgagaccctagagaccagcgaagggagaagttgggaagctacgttctgttggccaccagacttgcatttcagcctctgtcataatgctctgccctccctcccccgaagttctctgtggtgatgaccgctctcccctgcccctccccgcttcctgacctctgaagaggttgggaagtgaccatttggatgtctgggccctgccaaggcgacagggagggtcagagggaggccggctgcttcctgcccccaccctttccccgggcctgctgtgctgcttttgtgccaaggttagccagtcccccctgttgtgttccatgtgcgctcagcctcctcattgtctaaatgaggcctaaatgtgtgaagtgcgatttctgcttttgtgtaccccaccaccccattaccacagctgcctttgtgtgtttgtgtcaataaaaagccaaacc

SEQ ID NO: 443331 - DNA, 1694 bp, Homo sapiens
ccctcccgctggatcccgcagccgcggctcttcccgacgcgttccgccttccccagctgtgcactctccatccagctgtgcgctctcgtcgggagtcccagccatgtccgacgagagagaggtagccgaggcagcgaccggggaagacgcctcttcgccgcctccgaaaaccgaggcagcgagcgacccccagcatcccgcggcctccgaaggggccgccgccgccgccgcctcgccgccactgctgcgctgcctagtgctcaccggctttggaggctacgacaaggtgaagctgcagagccggccggcagcgcccccggcccctgggcccggccagctgacgctgcgtctgcgggcctgcgggctcaacttcgcagacctcatggctaggcaggggctgtacgaccgtctcccgcctctgcctgtcactccgggcatggagggcgcgggtgttgtgatcgcagtgggcgagggagtcagcgaccgcaaggcaggagaccgggtgatggtgttgaaccggtcagggatgtggcaggaagaggtgactgtgccctcggtccagaccttcctgattcctgaggccatgacctttgaggaagctgctgccttgctcgtcaattacattacagcctacatggtcctctttgacttcggcaacctacagcctggccacagcgtcttggtacacatggctgcagggggtgtgggtatggctgccgtgcagctgtgccgtacagtggagaatgtgacagtgttcggaacggcctcggccagcaagcacgaggcactgaaggagaatggggtcacacatcccatcgactatcacacgactgactacgtggatgagatcaagaagatttcccctaaaggagtggacattgtcatggaccctctgggtgggtcagatactgccaagggctacaacctcctgaaacccatgggcaaagtcgtcacctatggaatggccaacctgctgacgggccccaaacggaacctgatggccctggcccggacatggtggaatcagttcagcgtgacagctctgcagctgctgcaggccaaccgggctgtgtgtggcttccacctgggctacctggatggtgaggtggagctggtcagtggtgtggtggcccgcctcctggctctgtacaaccagggccacatcaagccccacattgactcagtctggcccttcgagaaggtggctgatgccatgaaacagatgcaggagaagaagaatgtgggcaaggtcctcctggttccagggccagagaaggagaactagggcaagtggctgtgagaccctagagaccagcgaagggagaagttgggaagctacgttctgttggccaccagacttgcatttcagcctctgtcataatgctctgccctccctcccccgaaatgggtggggagatggagcagggaagtacagagtgggatggtcaggacctgggccattgcaaccaaaatggggacttcctgggtagggaggtcactccctctactcactgagctaggattagggagggttattgccccaaccattgcaatgggaggtggagggacaggctcagcctcctcattgtctaaatgaggcctaaatgtgtgaagtgcgatttctgcttttgtgtaccccaccaccccattaccacagctgcctttgtgtgtttgtgtcaataaaaagccaaacc

SEQ ID NO: 443332 - DNA, 1828 bp, Homo sapiens
tctagaggttccaaccaacagtgaagcacattggcaaagttgtcacctatggaatggccaacctgctgacgggccccaaacggaacctgatggccctggcccggacatggtggaatcagttcagcgtgacagctctgcagctgctgcaggccaaccgggctgtgtgtggcttccacctgggctacctggatggtgaggtggagctggtcagtggtgtggtggcccgcctcctggctctgtacaaccagggccacatcaagccccacattgactcagtctggcccttcgagaaggtggctgatgccatgaaacagatgcaggagaagaagaatgtgggcaaggtcctcctggttccagggccagagaaggagaactagggcaagtggctgtgagaccctagagaccagcgaagggagaagttgggaagctacgttctgttggccaccagacttgcatttcagcctctgtcataatgctctgccctccctcccccgaagttctctgtggtgatgaccgctctcccctgcccctccccgcttcctgacctctgaagaggttgggaagtgaccatttggatgtctgggccctgccaaggcgacagggagggtcagagggaggccggctgcttcctgcccccaccctttccccgggcctgctgtgctgcttttgtgccaaggttagccagtcccccctgttgtgttccatgtgctttcacctctgcctcatctttcctcccgtccctgccccgccacctccccaaagaattgaaacgtcagctcaggatatggggccaatctctgtgagtccagcatgtacctgtctctccctagtgtcccttcagcctgggctgaccagtgcccgcctctgggcttgaccagttcccaatctcgtcctctgtccccaacttcttaagcacaattgggcttcttccatctccaggttttctgccattcttaaccaaggctgcctcttccaacagggcgggaatcagacctactcccctaggtcacaactctgggaaggatacagagcccccacccttcactgagttctctggatttgttctcagtgccttagcaacgaaaacctgtgcttgtgtgtgtgtggcggcggggagggaggatcctgtttcccacctccttctcctcccctgtactccccagtgccttccttgttctggtggagctggggtttctctcctccccagtcccacaacactgccaaaaatctgtgtatgtgccattgggtggggcagccccaagcctcctggggaggcagggcaaaaacaggtgccctcatcgtggtctgtgccatgtcccgtctctatggtggttgaggagaaaggcggggaagcttcctcagccttgcagatatgtgtggcatttactagccagagctctgaaaggcagtgctgtctgtttcttgtactgggaccaaagtaaaaatccaagcacattccccttgcagttaggggaggccctactgccttctcaaagcagagaggcagcttatcaaactcagcccaaaactctgtttacatgggtggggagatggagcagggaagtacagagtgggatggtcaggacctgggccattgcaaccaaaatggggacttcctgggtagggaggtcactccctctactcactgagctaggattagggagggttattgccccaaccattgcaatgggaggtggagggacaggctcagcctcctcattgtctaaatgaggcctaaatgtgtgaagtgcgatttctgcttttgtgtaccccaccaccccattaccacagctgcctttgtgtgtttgtgtcaataaaaagccaaacc

SEQ ID NO: 443333 - DNA, 1809 bp, Homo sapiens
cgattagggtccaacaacataaccatggaaagtgcacatggatggcaactgcggccccaaacggaacctgatggccctggcccggacatggtggaatcagttcagcgtgacagctctgcagctgctgcaggccaaccgggctgtgtgtggcttccacctgggctacctggatggtgaggtggagctggtcagtggtgtggtggcccgcctcctggctctgtacaaccagggccacatcaagccccacattgactcagtctggcccttcgagaaggtggctgatgccatgaaacagatgcaggagaagaagaatgtgggcaaggtcctcctggttccagggccagagaaggagaactagggcaagtggctgtgagaccctagagaccagcgaagggagaagttgggaagctacgttctgttggccaccagacttgcatttcagcctctgtcataatgctctgccctccctcccccgaagttctctgtggtgatgaccgctctcccctgcccctccccgcttcctgacctctgaagaggttgggaagtgaccatttggatgtctgggccctgccaaggcgacagggagggtcagagggaggccggctgcttcctgcccccaccctttccccgggcctgctgtgctgcttttgtgccaaggttagccagtcccccctgttgtgttccatgtgctttcacctctgcctcatctttcctcccgtccctgccccgccacctccccaaagaattgaaacgtcagctcaggatatggggccaatctctgtgagtccagcatgtacctgtctctccctagtgtcccttcagcctgggctgaccagtgcccgcctctgggcttgaccagttcccaatctcgtcctctgtccccaacttcttaagcacaattgggcttcttccatctccaggttttctgccattcttaaccaaggctgcctcttccaacagggcgggaatcagacctactcccctaggtcacaactctgggaaggatacagagcccccacccttcactgagttctctggatttgttctcagtgccttagcaacgaaaacctgtgcttgtgtgtgtgtggcggcggggagggaggatcctgtttcccacctccttctcctcccctgtactccccagtgccttccttgttctggtggagctggggtttctctcctccccagtcccacaacactgccaaaaatctgtgtatgtgccattgggtggggcagccccaagcctcctggggaggcagggcaaaaacaggtgccctcatcgtggtctgtgccatgtcccgtctctatggtggttgaggagaaaggcggggaagcttcctcagccttgcagatatgtgtggcatttactagccagagctctgaaaggcagtgctgtctgtttcttgtactgggaccaaagtaaaaatccaagcacattccccttgcagttaggggaggccctactgccttctcaaagcagagaggcagcttatcaaactcagcccaaaactctgtttacatgggtggggagatggagcagggaagtacagagtgggatggtcaggacctgggccattgcaaccaaaatggggacttcctgggtagggaggtcactccctctactcactgagctaggattagggagggttattgccccaaccattgcaatgggaggtggagggacaggctcagcctcctcattgtctaaatgaggcctaaatgtgtgaagtgcgatttctgcttttgtgtaccccaccaccccattaccacagctgcctttgtgtgtttgtgtcaataaaaagccaaacc

SEQ ID NO: 443334 - DNA, 1622 bp, Homo sapiens
tgtatgtggcgcgaacaccttggtcgtgtctaccagtgccacatcaatgctcccacattgactcaggacttgacccttcgagaatgtgtggctgatgccatgaaacagatgcaggagaagaagaatgtgggcaaggtcctcctggttccagggccagagaaggagaactagggcaagtggctgtgagaccctagagaccagcgaagggagaagttgggaagctacgttctgttggccaccagacttgcatttcagcctctgtcataatgctctgccctccctcccccgaagttctctgtggtgatgaccgctctcccctgcccctccccgcttcctgacctctgaagaggttgggaagtgaccatttggatgtctgggccctgccaaggcgacagggagggtcagagggaggccggctgcttcctgcccccaccctttccccgggcctgctgtgctgcttttgtgccaaggttagccagtcccccctgttgtgttccatgtgctttcacctctgcctcatctttcctcccgtccctgccccgccacctccccaaagaattgaaacgtcagctcaggatatggggccaatctctgtgagtccagcatgtacctgtctctccctagtgtcccttcagcctgggctgaccagtgcccgcctctgggcttgaccagttcccaatctcgtcctctgtccccaacttcttaagcacaattgggcttcttccatctccaggttttctgccattcttaaccaaggctgcctcttccaacagggcgggaatcagacctactcccctaggtcacaactctgggaaggatacagagcccccacccttcactgagttctctggatttgttctcagtgccttagcaacgaaaacctgtgcttgtgtgtgtgtggcggcggggagggaggatcctgtttcccacctccttctcctcccctgtactccccagtgccttccttgttctggtggagctggggtttctctcctccccagtcccacaacactgccaaaaatctgtgtatgtgccattgggtggggcagccccaagcctcctggggaggcagggcaaaaacaggtgccctcatcgtggtctgtgccatgtcccgtctctatggtggttgaggagaaaggcggggaagcttcctcagccttgcagatatgtgtggcatttactagccagagctctgaaaggcagtgctgtctgtttcttgtactgggaccaaagtaaaaatccaagcacattccccttgcagttaggggaggccctactgccttctcaaagcagagaggcagcttatcaaactcagcccaaaactctgtttacatgggtggggagatggagcagggaagtacagagtgggatggtcaggacctgggccattgcaaccaaaatggggacttcctgggtagggaggtcactccctctactcactgagctaggattagggagggttattgccccaaccattgcaatgggaggtggagggacaggctcagcctcctcattgtctaaatgaggcctaaatgtgtgaagtgcgatttctgcttttgtgtaccccaccaccccattaccacagctgcctttgtgtgtttgtgtcaataaaaagccaaacc

SEQ ID NO: 443335 - DNA, 1863 bp, Homo sapiens
ccctcccgctggatcccgcagccgcggctcttcccgacgcgttccgccttccccagctgtgcactctccatccagctgtgcgctctcgtcgggagtcccagccatgtccgacgagagagaggtagccgaggcagcgaccggggaagacgcctcttcgccgcctccgaaaaccgaggcagcgagcgacccccagcatcccgcggcctccgaaggggccgccgccgccgccgcctcgccgccactgctgcgctgcctagtgctcaccggctttggaggctacgacaaggtgaagctgcagagccggccggcagcgcccccggcccctgggcccggccagctgacgctgcgtctgcgggcctgcgggctcaacttcgcagacctcatggctaggcaggggctgtacgaccgtctcccgcctctgcctgtcactccgggcatggagggcgcgggtgttgtgatcgcagtgggcgagggagtcagcgaccgcaaggcaggagaccgggtgatggtgttgaaccggtcagggatgtggcaggaagaggtgactgtgccctcggtccagaccttcctgattcctgacctctgaagaggttgggaagtgaccatttggatgtctgggccctgccaaggcgacagggagggtcagagggaggccggctgcttcctgcccccaccctttccccgggcctgctgtgctgcttttgtgccaaggttagccagtcccccctgttgtgttccatgtgctttcacctctgcctcatctttcctcccgtccctgccccgccacctccccaaagaattgaaacgtcagctcaggatatggggccaatctctgtgagtccagcatgtacctgtctctccctagtgtcccttcagcctgggctgaccagtgcccgcctctgggcttgaccagttcccaatctcgtcctctgtccccaacttcttaagcacaattgggcttcttccatctccaggttttctgccattcttaaccaaggctgcctcttccaacagggcgggaatcagacctactcccctaggtcacaactctgggaaggatacagagcccccacccttcactgagttctctggatttgttctcagtgccttagcaacgaaaacctgtgcttgtgtgtgtgtggcggcggggagggaggatcctgtttcccacctccttctcctcccctgtactccccagtgccttccttgttctggtggagctggggtttctctcctccccagtcccacaacactgccaaaaatctgtgtatgtgccattgggtggggcagccccaagcctcctggggaggcagggcaaaaacaggtgccctcatcgtggtctgtgccatgtcccgtctctatggtggttgaggagaaaggcggggaagcttcctcagccttgcagatatgtgtggcatttactagccagagctctgaaaggcagtgctgtctgtttcttgtactgggaccaaagtaaaaatccaagcacattccccttgcagttaggggaggccctactgccttctcaaagcagagaggcagcttatcaaactcagcccaaaactctgtttacatgggtggggagatggagcagggaagtacagagtgggatggtcaggacctgggccattgcaaccaaaatggggacttcctgggtagggaggtcactccctctactcactgagctaggattagggagggttattgccccaaccattgcaatgggaggtggagggacaggctcagcctcctcattgtctaaatgaggcctaaatgtgtgaagtgcgatttctgcttttgtgtaccccaccaccccattaccacagctgcctttgtgtgtttgtgtcaataaaaagccaaacc

SEQ ID NO: 443336 - DNA, 1224 bp, Homo sapiens
  misc_feature (130)..(130): n is a, c, g, or t
gaattcggcacgaggtttcttgtactgggaccaaagtaaaaatccaagcacattccccttgcagttaggggaggccctactgccttctcaaagcagagaggcagcttatcaaactcagcccaaaactctntttacatgggtggggagatggagcagggaagtacagagtgggatggggatatggggccaatctctgtgagtccagcatgtacctgtctctccctagtgtcccttcagcctgggctgaccagtgcccgcctctgggcttgaccagttcccaatctcgtcctctgtccccaacttcttaagcacaattgggcttcttccatctccaggttttctgccattcttaaccaaggctgcctcttccaacagggcgggaatcagacctactcccctaggtcacaactctgggaaggatacagagcccccacccttcactgagttctctggatttgttctcagtgccttagcaacgaaaacctgtgcttgtgtgtgtgtggcggcggggagggaggatcctgtttcccacctccttctcctcccctgtactccccagtgccttccttgttctggtggagctggggtttctctcctccccagtcccacaacactgccaaaaatctgtgtatgtgccattgggtggggcagccccaagcctcctggggaggcagggcaaaaacaggtgccctcatcgtggtctgtgccatgtcccgtctctatggtggttgaggagaaaggcggggaagcttcctcagccttgcagatatgtgtggcatttactagccagagctctgaaaggcagtgctgtctgtttcttgtactgggaccaaagtaaaaatccaagcacattccccttgcagttaggggaggccctactgccttctcaaagcagagaggcagcttatcaaactcagcccaaaactctgtttacatgggtggggagatggagcagggaagtacagagtgggatggtcaggacctgggccattgcaaccaaaatggggacttcctgggtagggaggtcactccctctactcactgagctaggattagggagggttattgccccaaccattgcaatgggaggtggagggacaggctcagcctcctcattgtctaaatgaggcctaaatgtgtgaagtgcgatttctgcttttgtgtaccccaccaccccattaccacagctgcctttgtgtgtttgtgtcaataaaaagccaaacc

SEQ ID NO: 443337 - DNA, 899 bp, Homo sapiens
gatcaaccaagatctggaaagtagaaaggagatgacctacaggccattaagaaggagactgacccagataaaacaaaaagtggattctctcctgaaaaacctggaaaacattgcaacggaacagagcaaacaagcagtagagatgaagaatgataagtcagaagaggagacagagcagcagctccgtgaagacagatgagactaatgtgaagaaggtcctcctgtactccccagtgccttccttgttctggtggagctggggtttctctcctccccagtcccacaacactgccaaaaatctgtgtatgtgccattgggtggggcagccccaagcctcctggggaggcagggcaaaaacaggtgccctcatcgtggtctgtgccatgtcccgtctctatggtggttgaggagaaaggcggggaagcttcctcagccttgcagatatgtgtggcatttactagccagagctctgaaaggcagtgctgtctgtttcttgtactgggaccaaagtaaaaatccaagcacattccccttgcagttaggggaggccctactgccttctcaaagcagagaggcagcttatcaaactcagcccaaaactctgtttacatgggtggggagatggagcagggaagtacagagtgggatggtcaggacctgggccattgcaaccaaaatggggacttcctgggtagggaggtcactccctctactcactgagctaggattagggagggttattgccccaaccattgcaatgggaggtggagggacaggctcagcctcctcattgtctaaatgaggcctaaatgtgtgaagtgcgatttctgcttttgtgtaccccaccaccccattaccacagctgcctttgtgtgtttgtgtcaataaaaagccaaacc

SEQ ID NO: 443338 - DNA, 888 bp, Homo sapiens
  misc_feature (21)..(21): n is a, c, g, or t
  misc_feature (864)..(864): n is a, c, g, or t
  misc_feature (874)..(874): n is a, c, g, or t
taaagcaggctggtacggccngggattatggatcagccatccagctgtgcgctctcgtcgggagtcccagccatgtccgacgagagagaggtagccgaggcagcgaccggggaagacgcctcttcgccgcctccgaaaaccgaggcagcgagcgacccccagcatcccgcggcctccgaaggggccgccgccgccgccgcctcgccgccactgctgcgctgcctagtgctcaccggctttggaggctacgacaaggtgaagctgcagagccggccggcagcgcccccggcccctgggcccggccagctgacgctgcgtctgcgggcctgcgggctcaacttcgcagacctcatggctaggcaggggctgtacgaccgtctcccgcctctgcctgtcactccgggcatggagggcgcgggtgttgtgatcgcagtgggcgagggagtcagcgaccgcaaggcaggagaccgggtgatggtgttgaaccggtcagggatgtggcaggaagaggtgactgtgccctcggtccagaccttcctgattcctgaggccatgacctttgaggaagctgctgccttgctcgtcaattacattacagcctacatggtcctctttgacttcggcaacctacagcctggccacagcgtcttggtacacatggctgcagggggtgtgggtatggctgccgtgcagctgtgccgtacagtggagaatgtgacagtgttcggaacggcctcggccagcaagcacgaggcactgaaggagaatggggtcacacatcccatcgactatcacacgactgactacgtggatgagatcaagaagatttcccctaaagatggcattgcatgaccttggtggtantctgcaggcncactctgaacatgg

SEQ ID NO: 443339 - DNA, 356 bp, Homo sapiens
gaaatcagtaaatagcctgtgggtgaatgaatgagtgactgaatgatactcttctgttcttcaaggcaggagaccgggtgatggtgttgaaccggtcagggatgtggcaggaagaggtgactgtgccctcggtccagaccttcctgattcctgaggccatgacctttgaggaagctgctgccttgctcgtcaattacattacagcctacatggtcctctttgacttcggcaacctacagcctggccacagcgtcttggtacacatggctgcagaggtgacaggtcccctcactttatcaccccttaccccacccagattctctagccctttccagagcgtggatcctctagtaccc

SEQ ID NO: 443340 - DNA, 2756 bp, Homo sapiens
ccctcccgctggatcccgcagccgcggctcttcccgacgcgttccgccttccccagctgtgcactctccatccagctgtgcgctctcgtcgggagtcccagccatgtccgacgagagagaggtagccgaggcagcgaccggggaagacgcctcttcgccgcctccgaaaaccgaggcagcgagcgacccccagcatcccgcggcctccgaaggggccgccgccgccgccgcctcgccgccactgctgcgctgcctagtgctcaccggctttggaggctacgacaaggtgaagctgcagagccggccggcagcgcccccggcccctgggcccggccagctgacgctgcgtctgcgggcctgcgggctcaacttcgcagacctcatggctaggcaggggctgtacgaccgtctcccgcctctgcctgtcactccgggcatggagggcgcgggtgttgtgatcgcagtgggcgagggagtcagcgaccgcaaggcaggagaccgggtgatggtgttgaaccggtcagggatgtggcaggaagaggtgactgtgccctcggtccagaccttcctgattcctgaggccatgacctttgaggaagctgctgccttgctcgtcaattacattacagcctacatggtcctctttgacttcggcaacctacagcctggccacagcgtcttggtacacatggctgcagggggtgtgggtatggctgccgtgcagctgtgccgtacagtggagaatgtgacagtgttcggaacggcctcggccagcaagcacgaggcactgaaggagaatggggtcacacatcccatcgactatcacacgactgactacgtggatgagatcaagaagatttcccctaaaggagtggacattgtcatggaccctctgggtgggtcagatactgccaagggctacaacctcctgaaacccatgggcaaagtcgtcacctatggaatggccaacctgctgacgggccccaaacggaacctgatggccctggcccggacatggtggaatcagttcagcgtgacagctctgcagctgctgcaggccaaccgggctgtgtgtggcttccacctgggctacctggatggtgaggtggagctggtcagtggtgtggtggcccgcctcctggctctgtacaaccagggccacatcaagccccacattgactcagtctggcccttcgagaaggtggctgatgccatgaaacagatgcaggagaagaagaatgtgggcaaggtcctcctggttccagggccagagaaggagaactagggcaagtggctgtgagaccctagagaccagcgaagggagaagttgggaagctacgttctgttggccaccagacttgcatttcagcctctgtcataatgctctgccctccctcccccgaagttctctgtggtgatgaccgctctcccctgcccctccccgcttcctgacctctgaagaggttgggaagtgaccatttggatgtctgggccctgccaaggcgacagggagggtcagagggaggccggctgcttcctgcccccaccctttccccgggcctgctgtgctgcttttgtgccaaggttagccagtcccccctgttgtgttccatgtgctttcacctctgcctcatctttcctcccgtccctgccccgccacctccccaaagaattgaaacgtcagctcaggatatggggccaatctctgtgagtccagcatgtacctgtctctccctagtgtcccttcagcctgggctgaccagtgcccgcctctgggcttgaccagttcccaatctcgtcctctgtccccaacttcttaagcacaattgggcttcttccatctccaggttttctgccattcttaaccaaggctgcctcttccaacagggcgggaatcagacctactcccctaggtcacaactctgggaaggatacagagcccccacccttcactgagttctctggatttgttctcagtgccttagcaacgaaaacctgtgcttgtgtgtgtgtggcggcggggagggaggatcctgtttcccacctccttctcctcccctgtactccccagtgccttccttgttctggtggagctggggtttctctcctccccagtcccacaacactgccaaaaatctgtgtatgtgccattgggtggggcagccccaagcctcctggggaggcagggcaaaaacaggtgccctcatcgtggtctgtgccatgtcccgtctctatggtggttgaggagaaaggcggggaagcttcctcagccttgcagatatgtgtggcatttactagccagagctctgaaaggcagtgctgtctgtttcttgtactgggaccaaagtaaaaatccaagcacattccccttgcagttaggggaggccctactgccttctcaaagcagagaggcagcttatcaaactcagcccaaaactctgtttacatgggtggggagatggagcagggaagtacagagtgggatggtcaggacctgggccattgcaaccaaaatggggacttcctgggtagggaggtcactccctctactcactgagctaggattagggagggttattgccccaaccattgcaatgggaggtggagggacaggctcagcctcctcattgtctaaatgaggcctaaatgtgtgaagtgcgatttctgcttttgtgtaccccaccaccccattaccacagctgcctttgtgtgtttgtgtcaataaaaagccaaacctgaaaaaaacacacacacag

SEQ ID NO: 443341 - DNA, 2716 bp, Homo sapiens
ccctcccgctggatcccgcagccgcggctcttcccgacgcgttccgccttccccagctgtgcactctccatccagctgtgcgctctcgtcgggagtcccagccatgtccgacgagagagaggtagccgaggcagcgaccggggaagacgcctcttcgccgcctccgaaaaccgaggcagcgagcgacccccagcatcccgcggcctccgaaggggccgccgccgccgccgcctcgccgccactgctgcgctgcctagtgctcaccggctttggaggctacgacaaggtgaagctgcagagccggccggcagcgcccccggcccctgggcccggccagctgacgctgcgtctgcgggcctgcgggctcaacttcgcagacctcatggctaggcaggggctgtacgaccgtctcccgcctctgcctgtcactccgggcatggagggcgcgggtgttgtgatcgcagtgggcgagggagtcagcgaccgcaaggcaggagaccgggtgatggtgttgaaccggtcagggatgtggcaggaagaggtgactgtgccctcggtccagaccttcctgattcctgaggccatgacctttgaggaagctgctgccttgctcgtcaattacattacagcctacatggtcctctttgacttcggcaacctacagcctggccacagcgtcttggtacacatggctgcagggggtgtgggtatggctgccgtgcagctgtgccgtacagtggagaatgtgacagtgttcggaacggcctcggccagcaagcacgaggcactgaaggagaatggggtcacacatcccatcgactatcacacgactgactacgtggatgagatcaagaagatttcccctaaaggagtggacattgtcatggaccctctgggtgggtcagatactgccaagggctacaacctcctgaaacccatgggcaaagtcgtcacctatgggccccaaacggaacctgatggccctggcccggacatggtggaatcagttcagcgtgacagctctgcagctgctgcaggccaaccgggctgtgtgtggcttccacctgggctacctggatggtgaggtggagctggtcagtggtgtggtggcccgcctcctggctctgtacaaccagggccacatcaagccccacattgactcagtctggcccttcgagaaggtggctgatgccatgaaacagatgcaggagaagaagaatgtgggcaaggtcctcctggttccagggccagagaaggagaactagggcaagtggctgtgagaccctagagaccagcgaagggagaagttgggaagctacgttctgttggccaccagacttgcatttcagcctctgtcataatgctctgccctccctcccccgaagttctctgtggtgatgaccgctctcccctgcccctccccgcttcctgacctctgaagaggttgggaagtgaccatttggatgtctgggccctgccaaggcgacagggagggtcagagggaggccggctgcttcctgcccccaccctttccccgggcctgctgtgctgcttttgtgccaaggttagccagtcccccctgttgtgttccatgtgctttcacctctgcctcatctttcctcccgtccctgccccgccacctccccaaagaattgaaacgtcagctcaggatatggggccaatctctgtgagtccagcatgtacctgtctctccctagtgtcccttcagcctgggctgaccagtgcccgcctctgggcttgaccagttcccaatctcgtcctctgtccccaacttcttaagcacaattgggcttcttccatctccaggttttctgccattcttaaccaaggctgcctcttccaacagggcgggaatcagacctactcccctaggtcacaactctgggaaggatacagagcccccacccttcactgagttctctggatttgttctcagtgccttagcaacgaaaacctgtgcttgtgtgtgtgtggcggcggggagggaggatcctgtttcccacctccttctcctcccctgtactccccagtgccttccttgttctggtggagctggggtttctctcctccccagtcccacaacactgccaaaaatctgtgtatgtgccattgggtggggcagccccaagcctcctggggaggcagggcaaaaacaggtgccctcatcgtggtctgtgccatgtcccgtctctatggtggttgaggagaaaggcggggaagcttcctcagccttgcagatatgtgtggcatttactagccagagctctgaaaggcagtgctgtctgtttcttgtactgggaccaaagtaaaaatccaagcacattccccttgcagttaggggaggccctactgccttctcaaagcagagaggcagcttatcaaactcagcccaaaactctgtttacatgggtggggagatggagcagggaagtacagagtgggatggtcaggacctgggccattgcaaccaaaatggggacttcctgggtagggaggtcactccctctactcactgagctaggattagggagggttattgccccaaccattgcaatgggaggtggagggacaggctcagcctcctcattgtctaaatgaggcctaaatgtgtgaagtgcgatttctgcttttgtgtaccccaccaccccattaccacagctgcctttgtgtgtttgtgtcaataaaaagccaaacc

SEQ ID NO: 443342 - DNA, 2097 bp, Homo sapiens
ccctcccgctggatcccgcagccgcggctcttcccgacgcgttccgccttccccagctgtgcactctccatccagctgtgcgctctcgtcgggagtcccagccatgtccgacgagagagaggtagccgaggcagcgaccggggaagacgcctcttcgccgcctccgaaaaccgaggcagcgagcgacccccagcatcccgcggcctccgaaggggccgccgccgccgccgcctcgccgccactgctgcgctgcctagtgctcaccggctttggaggctacgacaaggtgaagctgcagagccggccggcagcgcccccggcccctgggcccggccagctgacgctgcgtctgcgggcctgcgggctcaacttcgcagacctcatggctaggcaggggctgtacgaccgtctcccgcctctgcctgtcactccgggcatggagggcgcgggtgttgtgatcgcagtgggcgagggagtcagcgaccgcaaggcaggagaccgggtgatggtgttgaaccggtcagggatgtggcaggaagaggtgactgtgccctcggtccagaccttcctgattcctgaggccatgacctttgaggaagctgctgccttgctcgtcaattacattacagcctacatggtcctctttgacttcggcaacctacagcctggccacagcgtcttggtacacatggctgcagggggtgtgggtatggctgccgtgcagctgtgccgtacagtggagaatgtgacagtgttcggaacggcctcggccagcaagcacgaggcactgaaggagaatggggtcacacatcccatcgactatcacacgactgactacgtggatgagatcaagaagatttcccctaaaggagtggacattgtcatggaccctctgggtgggtcagatactgccaagggctacaacctcctgaaacccatgggcaaagtcgtcacctatggaatggccaacctgctgacgggccccaaacggaacctgatggccctggcccggacatggtggaatcagttcagcgtgacagctctgcagctgctgcaggccaaccgggctgtgtgtggcttccacctgggctacctggatggtgaggtggagctggtcagtggtgtggtggcccgcctcctggctctgtacaaccagggccacatcaagccccacattgactcagtctggcccttcgagaaggtggctgatgccatgaaacagatgcaggagaagaagaatgtgggcaaggtcctcctggttccagggccagagaaggagaactagggcaagtggctgtgagaccctagagaccagcgaagggagaagttgggaagctacgttctgttggccaccagacttgcatttcagcctctgtcataatgctctgccctccctcccccgaagttctctgtggtgatgaccgctctcccctgcccctccccgcttcctgacctctgaagaggttgggaagtgaccatttggatgtctgggccctgccaaggcgacagggagggtcagagggaggccggctgcttcctgcccccaccctttccccgggcctgctgtgctgcttttgtgccaaggttagccagtcccccctgttgtgttccatgtgctttcacctctgcctcatctttcctcccgtccctgccccgccacctccccaaagaattgaaacgtcagctcaggatatggggccaatctctgtgagtccagcatgtacctgtctctccctagtgtcccttcagcctgggctgaccagtgcccgcctctgggcttgaccagttcccaatctcgtcctctgtcatgggtggggagatggagcagggaagtacagagtgggatggtcaggacctgggccattgcaaccaaaatggggacttcctgggtagggaggtcactccctctactcactgagctaggattagggagggttattgccccaaccattgcaatgggaggtggagggacaggctcagcctcctcattgtctaaatgaggcctaaatgtgtgaagtgcgatttctgcttttgtgtaccccaccaccccattaccacagctgcctttgtgtgtttgtgtcaataaaaagccaaacc

SEQ ID NO: 443343 - DNA, 2200 bp, Homo sapiens
ccctcccgctggatcccgcagccgcggctcttcccgacgcgttccgccttccccagctgtgcactctccatccagctgtgcgctctcgtcgggagtcccagccatgtccgacgagagagaggtagccgaggcagcgaccggggaagacgcctcttcgccgcctccgaaaaccgaggcagcgagcgacccccagcatcccgcggcctccgaaggggccgccgccgccgccgcctcgccgccactgctgcgctgcctagtgctcaccggctttggaggctacgacaaggtgaagctgcagagccggccggcagcgcccccggcccctgggcccggccagctgacgctgcgtctgcgggcctgcgggctcaacttcgcagacctcatggctaggcaggggctgtacgaccgtctcccgcctctgcctgtcactccgggcatggagggcgcgggtgttgtgatcgcagtgggcgagggagtcagcgaccgcaaggcaggagaccgggtgatggtgttgaaccggtcagggatgtggcaggaagaggtgactgtgccctcggtccagaccttcctgattcctgaggccatgacctttgaggaagctgctgccttgctcgtcaattacattacagcctacatggtcctctttgacttcggcaacctacagcctggccacagcgtcttggtacacatggctgcagggggtgtgggtatggctgccgtgcagctgtgccgtacagtggagaatgtgacagtgttcggaacggcctcggccagcaagcacgaggcactgaaggagaatggggtcacacatcccatcgactatcacacgactgactacgtggatgagatcaagaagatttcccctaaaggagtggacattgtcatggaccctctgggtgggtcagatactgccaagggctacaacctcctgaaacccatgggcaaagtcgtcacctatggaatggccaacctgctgacgggccccaaacggaacctgatggccctggcccggacatggtggaatcagttcagcgtgacagctctgcagctgctgcaggccaaccgggctgtgtgtggcttccacctgggctacctggatggtgaggtggagctggtcagtggtgtggtggcccgcctcctggctctgtacaaccagggccacatcaagccccacattgactcagtctggcccttcgagaaggtggctgatgccatgaaacagatgcaggagaagaagaatgtgggcaaggtcctcctggttccagggccagagaaggagaactagggcaagtggctgtgagaccctagagaccagcgaagggagaagttgggaagctacgttctgttggccaccagacttgcatttcagcctctgtcataatgctctgccctccctcccccgaagttctctgtggtgatgaccgctctcccctgcccctccccgcttcctgacctctgaagaggttgggaagtgaccatttggatgtctgggccctgccaaggcgacagggagggtcagagggaggccggctgcttcctgcccccaccctttccccgggcctgctgtgctgcttttgtgccaaggttagccagtcccccctgttgtgttccatgtgctttcacctctgcctcatctttcctcccgtccctgccccgccacctccccatatcctgagctgacgtttcaattactttggggaggtggcggggcagggacgggaggaacacgaatagaacacgtcagcatcaggcatctggggcccaatactctgatgcgtccagcaatgtaacctgtatctgccctagtgtacccttcaggcatgaggctgtaccccgttgaccccgacctcctggggcgtttgaaaccagattacccaaactcctgcgttcgcgtcgtgatcacccccgaagctatcttacaaggcaccacagtgtagggcgttcattaccagtgctccaggctgctacctgtacactgacccttatgacccagaggggcattgccctttgtttcccaaggccagggggcgggaaacttcgaggacgcatagcttcccctgccttagggtgcaacacactgcttcctggtggaacggggattaccaggaaggcccccacagctcgtctgcagcgctggcagtttcctccgagagcatttttggatcgcatcaaagttgtgacatttccacccatggaccgc

SEQ ID NO: 443344 - DNA, 2297 bp, Homo sapiens
cactttccgcctggtaaatacaggatatcctgtccagggcaagaatctgatgcaggagaccgggtgatggtgttgaaccggtcagggatgtggcaggaagaggtgactgtgccctcggtccagaccttcctgattcctgaggccatgacctttgaggaagctgctgccttgctcgtcaattacattacagcctacatggtcctctttgacttcggcaacctacagcctggccacagcgtcttggtacacatggctgcagggggtgtgggtatggctgccgtgcagctgtgccgtacagtggagaatgtgacagtgttcggaacggcctcggccagcaagcacgaggcactgaaggagaatggggtcacacatcccatcgactatcacacgactgactacgtggatgagatcaagaagatttcccctaaaggagtggacattgtcatggaccctctgggtgggtcagatactgccaagggctacaacctcctgaaacccatgggcaaagtcgtcacctatggaatggccaacctgctgacgggccccaaacggaacctgatggccctggcccggacatggtggaatcagttcagcgtgacagctctgcagctgctgcaggccaaccgggctgtgtgtggcttccacctgggctacctggatggtgaggtggagctggtcagtggtgtggtggcccgcctcctggctctgtacaaccagggccacatcaagccccacattgactcagtctggcccttcgagaaggtggctgatgccatgaaacagatgcaggagaagaagaatgtgggcaaggtcctcctggttccagggccagagaaggagaactagggcaagtggctgtgagaccctagagaccagcgaagggagaagttgggaagctacgttctgttggccaccagacttgcatttcagcctctgtcataatgctctgccctccctcccccgaagttctctgtggtgatgaccgctctcccctgcccctccccgcttcctgacctctgaagaggttgggaagtgaccatttggatgtctgggccctgccaaggcgacagggagggtcagagggaggccggctgcttcctgcccccaccctttccccgggcctgctgtgctgcttttgtgccaaggttagccagtcccccctgttgtgttccatgtgctttcacctctgcctcatctttcctcccgtccctgccccgccacctccccaaagaattgaaacgtcagctcaggatatggggccaatctctgtgagtccagcatgtacctgtctctccctagtgtcccttcagcctgggctgaccagtgcccgcctctgggcttgaccagttcccaatctcgtcctctgtccccaacttcttaagcacaattgggcttcttccatctccaggttttctgccattcttaaccaaggctgcctcttccaacagggcgggaatcagacctactcccctaggtcacaactctgggaaggatacagagcccccacccttcactgagttctctggatttgttctcagtgccttagcaacgaaaacctgtgcttgtgtgtgtgtggcggcggggagggaggatcctgtttcccacctccttctcctcccctgtactccccagtgccttccttgttctggtggagctggggtttctctcctccccagtcccacaacactgccaaaaatctgtgtatgtgccattgggtggggcagccccaagcctcctggggaggcagggcaaaaacaggtgccctcatcgtggtctgtgccatgtcccgtctctatggtggttgaggagaaaggcggggaagcttcctcagccttgcagatatgtgtggcatttactagccagagctctgaaaggcagtgctgtctgtttcttgtactgggaccaaagtaaaaatccaagcacattccccttgcagttaggggaggccctactgccttctcaaagcagagaggcagcttatcaaactcagcccaaaactctgtttacatgggtggggagatggagcagggaagtacagagtgggatggtcaggacctgggccattgcaaccaaaatggggacttcctgggtagggaggtcactccctctactcactgagctaggattagggagggttattgccccaaccattgcaatgggaggtggagggacaggctcagcctcctcattgtctaaatgaggcctaaatgtgtgaagtgcgatttctgcttttgtgtaccccaccaccccattaccacagctgcctttgtgtgtttgtgtcaataaaaagccaaacc

SEQ ID NO: 443345 - DNA, 2528 bp, Homo sapiens
ccctcccgctggatcccgcagccgcggctcttcccgacgcgttccgccttccccagctgtgcactctccatccagctgtgcgctctcgtcgggagtcccagccatgtccgacgagagagaggtagccgaggcagcgaccggggaagacgcctcttcgccgcctccgaaaaccgaggcagcgagcgacccccagcatcccgcggcctccgaaggggccgccgccgccgccgcctcgccgccactgctgcgctgcctagtgctcaccggctttggaggctacgacaaggtgaagctgcagagccggccggcagcgcccccggcccctgggcccggccagctgacgctgcgtctgcgggcctgcgggctcaacttcgcagacctcatggctaggcaggggctgtacgaccgtctcccgcctctgcctgtcactccgggcatggagggcgcgggtgttgtgatcgcagtgggcgagggagtcagcgaccgcaagggggtgtgggtatggctgccgtgcagctgtgccgtacagtggagaatgtgacagtgttcggaacggcctcggccagcaagcacgaggcactgaaggagaatggggtcacacatcccatcgactatcacacgactgactacgtggatgagatcaagaagatttcccctaaaggagtggacattgtcatggaccctctgggtgggtcagatactgccaagggctacaacctcctgaaacccatgggcaaagtcgtcacctatggaatggccaacctgctgacgggccccaaacggaacctgatggccctggcccggacatggtggaatcagttcagcgtgacagctctgcagctgctgcaggccaaccgggctgtgtgtggcttccacctgggctacctggatggtgaggtggagctggtcagtggtgtggtggcccgcctcctggctctgtacaaccagggccacatcaagccccacattgactcagtctggcccttcgagaaggtggctgatgccatgaaacagatgcaggagaagaagaatgtgggcaaggtcctcctggttccagggccagagaaggagaactagggcaagtggctgtgagaccctagagaccagcgaagggagaagttgggaagctacgttctgttggccaccagacttgcatttcagcctctgtcataatgctctgccctccctcccccgaagttctctgtggtgatgaccgctctcccctgcccctccccgcttcctgacctctgaagaggttgggaagtgaccatttggatgtctgggccctgccaaggcgacagggagggtcagagggaggccggctgcttcctgcccccaccctttccccgggcctgctgtgctgcttttgtgccaaggttagccagtcccccctgttgtgttccatgtgctttcacctctgcctcatctttcctcccgtccctgccccgccacctccccaaagaattgaaacgtcagctcaggatatggggccaatctctgtgagtccagcatgtacctgtctctccctagtgtcccttcagcctgggctgaccagtgcccgcctctgggcttgaccagttcccaatctcgtcctctgtccccaacttcttaagcacaattgggcttcttccatctccaggttttctgccattcttaaccaaggctgcctcttccaacagggcgggaatcagacctactcccctaggtcacaactctgggaaggatacagagcccccacccttcactgagttctctggatttgttctcagtgccttagcaacgaaaacctgtgcttgtgtgtgtgtggcggcggggagggaggatcctgtttcccacctccttctcctcccctgtactccccagtgccttccttgttctggtggagctggggtttctctcctccccagtcccacaacactgccaaaaatctgtgtatgtgccattgggtggggcagccccaagcctcctggggaggcagggcaaaaacaggtgccctcatcgtggtctgtgccatgtcccgtctctatggtggttgaggagaaaggcggggaagcttcctcagccttgcagatatgtgtggcatttactagccagagctctgaaaggcagtgctgtctgtttcttgtactgggaccaaagtaaaaatccaagcacattccccttgcagttaggggaggccctactgccttctcaaagcagagaggcagcttatcaaactcagcccaaaactctgtttacatgggtggggagatggagcagggaagtacagagtgggatggtcaggacctgggccattgcaaccaaaatggggacttcctgggtagggaggtcactccctctactcactgagctaggattagggagggttattgccccaaccattgcaatgggaggtggagggacaggctcagcctcctcattgtctaaatgaggcctaaatgtgtgaagtgcgatttctgcttttgtgtaccccaccaccccattaccacagctgcctttgtgtgtttgtgtcaataaaaagccaaacc

SEQ ID NO: 443346 - DNA, 1811 bp, Homo sapiens
gcatctagagatccacacaataagaatggaagcgtactatgatggcaacgctgcggccccaaacggaacctgatggccctggcccggacatggtggaatcagttcagcgtgacagctctgcagctgctgcaggccaaccgggctgtgtgtggcttccacctgggctacctggatggtgaggtggagctggtcagtggtgtggtggcccgcctcctggctctgtacaaccagggccacatcaagccccacattgactcagtctggcccttcgagaaggtggctgatgccatgaaacagatgcaggagaagaagaatgtgggcaaggtcctcctggttccagggccagagaaggagaactagggcaagtggctgtgagaccctagagaccagcgaagggagaagttgggaagctacgttctgttggccaccagacttgcatttcagcctctgtcataatgctctgccctccctcccccgaagttctctgtggtgatgaccgctctcccctgcccctccccgcttcctgacctctgaagaggttgggaagtgaccatttggatgtctgggccctgccaaggcgacagggagggtcagagggaggccggctgcttcctgcccccaccctttccccgggcctgctgtgctgcttttgtgccaaggttagccagtcccccctgttgtgttccatgtgctttcacctctgcctcatctttcctcccgtccctgccccgccacctccccaaagaattgaaacgtcagctcaggatatggggccaatctctgtgagtccagcatgtacctgtctctccctagtgtcccttcagcctgggctgaccagtgcccgcctctgggcttgaccagttcccaatctcgtcctctgtccccaacttcttaagcacaattgggcttcttccatctccaggttttctgccattcttaaccaaggctgcctcttccaacagggcgggaatcagacctactcccctaggtcacaactctgggaaggatacagagcccccacccttcactgagttctctggatttgttctcagtgccttagcaacgaaaacctgtgcttgtgtgtgtgtggcggcggggagggaggatcctgtttcccacctccttctcctcccctgtactccccagtgccttccttgttctggtggagctggggtttctctcctccccagtcccacaacactgccaaaaatctgtgtatgtgccattgggtggggcagccccaagcctcctggggaggcagggcaaaaacaggtgccctcatcgtggtctgtgccatgtcccgtctctatggtggttgaggagaaaggcggggaagcttcctcagccttgcagatatgtgtggcatttactagccagagctctgaaaggcagtgctgtctgtttcttgtactgggaccaaagtaaaaatccaagcacattccccttgcagttaggggaggccctactgccttctcaaagcagagaggcagcttatcaaactcagcccaaaactctgtttacatgggtggggagatggagcagggaagtacagagtgggatggtcaggacctgggccattgcaaccaaaatggggacttcctgggtagggaggtcactccctctactcactgagctaggattagggagggttattgccccaaccattgcaatgggaggtggagggacaggctcagcctcctcattgtctaaatgaggcctaaatgtgtgaagtgcgatttctgcttttgtgtaccccaccaccccattaccacagctgcctttgtgtgtttgtgtcaataaaaagccaaacc

SEQ ID NO: 443347 - DNA, 1416 bp, Homo sapiens
  misc_feature (130)..(130): n is a, c, g, or t
  misc_feature (189)..(190): n is a, c, g, or t
gaattcggcacgaggtttcttgtactgggaccaaagtaaaaatccaagcacattccccttgcagttaggggaggccctactgccttctcaaagcagagaggcagcttatcaaactcagcccaaaactctntttacatgggtggggagatggagcagggaagtacagagtgggatggtcaggacctgggnnattgcaaccaaaatggggacttcctgggtagggaggtcactccctctactcactgagctaggattagggagggttatagccagtcccccctgttgtgttccatgtgctttcacctctgcctcatctttcctcccgtccctgccccgccacctccccaaagaattgaaacgtcagctcaggatatggggccaatctctgtgagtccagcatgtacctgtctctccctagtgtcccttcagcctgggctgaccagtgcccgcctctgggcttgaccagttcccaatctcgtcctctgtccccaacttcttaagcacaattgggcttcttccatctccaggttttctgccattcttaaccaaggctgcctcttccaacagggcgggaatcagacctactcccctaggtcacaactctgggaaggatacagagcccccacccttcactgagttctctggatttgttctcagtgccttagcaacgaaaacctgtgcttgtgtgtgtgtggcggcggggagggaggatcctgtttcccacctccttctcctcccctgtactccccagtgccttccttgttctggtggagctggggtttctctcctccccagtcccacaacactgccaaaaatctgtgtatgtgccattgggtggggcagccccaagcctcctggggaggcagggcaaaaacaggtgccctcatcgtggtctgtgccatgtcccgtctctatggtggttgaggagaaaggcggggaagcttcctcagccttgcagatatgtgtggcatttactagccagagctctgaaaggcagtgctgtctgtttcttgtactgggaccaaagtaaaaatccaagcacattccccttgcagttaggggaggccctactgccttctcaaagcagagaggcagcttatcaaactcagcccaaaactctgtttacatgggtggggagatggagcagggaagtacagagtgggatggtcaggacctgggccattgcaaccaaaatggggacttcctgggtagggaggtcactccctctactcactgagctaggattagggagggttattgccccaaccattgcaatgggaggtggagggacaggctcagcctcctcattgtctaaatgaggcctaaatgtgtgaagtgcgatttctgcttttgtgtaccccaccaccccattaccacagctgcctttgtgtgtttgtgtcaataaaaagccaaacc

SEQ ID NO: 443348 - DNA, 1486 bp, Homo sapiens
ccctcccgctggatcccgcagccgcggctcttcccgacgcgttccgccttccccagctgtgcactctccatccagctgtgcgctctcgtcgggagtcccagccatgtccgacgagagagaggtagccgaggcagcgaccggggaagacgcctcttcgccgcctccgaaaaccgaggcagcgagcgacccccagcatcccgcggcctccgaaggggccgccgccgccgccgcctcgccgccactgctgcgctgcctagtgctcaccggctttggaggctacgacaaggtgaagctgcagagccggccggcagcgcccccggcccctgggcccggccagctgacgctgcgtctgcgggcctgcgggctcaacttcgcagacctcatggctaggcaggggctgtacgaccgtctcccgcctctgcctgtcactccgggcatggagggcgcgggtgttgtgatcgcagtgggcgagggagtcagcgaccgcaagggggtgtgggtatggctgccgtgcagctgtgccgtacagtggagaatgtgacagtgttcggaacggcctcggccagcaagcacgaggcactgaaggagaatggggtcacacatcccatcgactatcacacgactgactacgtggatgagatcaagaagatttcccctaaaggagtggacattgtcatggaccctctgggtgggtcagatactgccaagggctacaacctcctgaaacccatgggcaaagtcgtcacctatggaatggccaacctgctgacgggccccaaacggaacctgatggccctggcccggacatggtggaatcagttcagcgtgacagctctgcagctgctgcaggccaaccgggctgtgtgtggcttccacctgggctacctggatggtgaggtggagctggtcagtggtgtggtggcccgcctcctggctctgtacaaccagggccacatcaagccccacattgactcagtctggcccttcgagaaggtggctgatgccatgaaacagatgcaggagaagaagaatgtgggcaaggtcctcctggttccagggccagagaaggagaactagggcaagtggctgtgagaccctagagaccagcgaagggagaagttgggaagctacgttctgttggccaccagacttgcatttcagcctctgtcataatgctctgccctccctcccccgaaatgggtggggagatggagcagggaagtacagagtgggatggtcaggacctgggccattgcaaccaaaatggggacttcctgggtagggaggtcactccctctactcactgagctaggattagggagggttattgccccaaccattgcaatgggaggtggagggacaggctcagcctcctcattgtctaaatgaggcctaaatgtgtgaagtgcgatttctgcttttgtgtaccccaccaccccattaccacagctgcctttgtgtgtttgtgtcaataaaaagccaaacc

SEQ ID NO: 443349 - DNA, 2667 bp, Homo sapiens
gcggccgcaggtctagaattcaaccaaaaggagtggaagagcctgtcttggagattttcctggggaaatcctgaggtcattcattatgaagtgtaccgcgcgggagtggctcagagtaaccacagtgctgttcatggctagagcaattccagccatggtggttcccaatgccactttattggagaaacttttggaaaaatacatggatgaggatggtgagtggtggatagccaaacaacgagggaaaagggccatcacagacaatgacatgcagagtattttggaccttcataataaattacgaagtcaggtgtatccaacagcctctaatatggagtatatgacatgggatgtagagctggaaagatctgcagaatcctgggctgaaagttgcttgtgggaacatggacctgcaagcttgcttccatcaattggacagaatttgggagcacactggggaagatataggcccccgacgtttcatgtacaatcgtggtatgatgaagtgaaagactttagctacccatatgaacatgaatgcaacccatattgtccattcaggtgttctggccctgtatgtacacattatacacaggtcgtgtgggcaactagtaacagaatcggttgtgccattaatttgtgtcataacatgaacatctgggggcagatatggcccaaagctgtctacctggtgtgcaattactccccaaagggaaactggtggggccatgccccttacaaacatgggcggccctgttctgcttgcccacctagttttggagggggctgtagagaaaatctgtgctacaaagaagggtcagacaggtattatccccctcgagaagaggaaacaaatgaaatagaacgacagcagtcacaagtccatgacacccatgtccggacaagatcagatgatagtagcagaaatgaagtcataagcgcacagcaaatgtcccaaattgtttcttgtgaagtaagattaagagatcagtgcaaaggaacaacctgcaataggtacgaatgtcctgctggctgtttggatagtaaagctaaagttattggcagtgtacattatgaaatgcaatccagcatctgtagagctgcaattcattatggtataatagacaatgatggtggctgggtagatatcactagacaaggaagaaagcattatttcatcaagtccaatagaaatggtattcaaacaattggcaaatatcagtctgctaattccttcacagtctctaaagtaacagttcaggctgtgacttgtgaaacaactgtggaacagctctgtccatttcataagcctgcttcacattgcccaagagtatactgtcctcgtaactgtatgcaagcaaatccacattatgctcgtgtaattggaactcgagtttattctgatctgtccagtatctgcagagcagcagtacatgctggagtggttcgaaatcacggtggttatgttgatgtaatgcctgtggacaaaagaaagacctacattgcttcttttcagaatggaatcttctcagaaagtttacagaatcctccaggaggaaaggcattcagagtgtttgctgttgtgtgaaactgaatacttggaagaggaccataaagactattccaaatgcaatatttctgaattttgtataaaactgtaacattactgtacagagtacatcaactattttcagcccaaaaaggtgccaaatgcatataaatcttgataaacaaagtctataaaataaaacatgggacattagctttgggaaaagtaatgaaaatataatggttttagaaatcctgtgttaaatattgctatattttcttagcagttatttctacagttaattacatagtcatgattgttctacgtttcatatattatatggtgctttgtatatgccactaataaaatgaatctaaacattgaatgtgaatggccctcagaaaatcatctagtgcatttaaaaataatcgactctaaaactgaaagaaaccttatcacattttccccagttcaatgctatgccattaccaactccaaataatctcaaataattttccacttaataactgtaaagtttttttctgttaatttaggcatatagaatattaaattctgatattgcacttcttattttatataaaataatcctttaatatccaaatgaatctgttaaaatgtttgattccttgggaatggccttaaaaataaatgtaataaagtcagagtggtggtatgaaaacattcctagtgatcatgtagtaaatgtagggttaagcatggacagccagagctttctatgtactgttaaaattgaggtcacatattttcttttgtatcctggcaaatactcctgcaggccaggaagtataatagcaaaaagttgaacaaagatgaactaatgtattacattaccattgccactgatttttttttaaatggtaaatgaccttgtatataaatattgccatatcatggtacctataatggtgatatatttgtttctatgaaaaatgtattgtgctttgatactaaaaatctgtaaaatgttagttttggtaattttttttctgctggtggatttacatattaaattttttctgctggtggataaacattaaaattaatcatgtttcaaataggccatgaaggccgaattc

SEQ ID NO: 443350 - DNA, 2336 bp, Homo sapiens
ttatctgcgacacgctctaatcctcacggctaaacatgggatgtagagctggaaagatctgcagaatcctgggctgaaagttgcttgtgggaacatggacctgcaagcttgcttccatcaattggacagaatttgggagcacactggggaagatataggcccccgacgtttcatgtacaatcgtggtatgatgaagtgaaagactttagctacccatatgaacatgaatgcaacccatattgtccattcaggtgttctggccctgtatgtacacattatacacaggtcgtgtgggcaactagtaacagaatcggttgtgccattaatttgtgtcataacatgaacatctgggggcagatatggcccaaagctgtctacctggtgtgcaattactccccaaagggaaactggtggggccatgccccttacaaacatgggcggccctgttctgcttgcccacctagttttggagggggctgtagagaaaatctgtgctacaaagaagggtcagacaggtattatccccctcgagaagaggaaacaaatgaaatagaacgacagcagtcacaagtccatgacacccatgtccggacaagatcagatgatagtagcagaaatgaagtcataagcgcacagcaaatgtcccaaattgtttcttgtgaagtaagattaagagatcagtgcaaaggaacaacctgcaataggtacgaatgtcctgctggctgtttggatagtaaagctaaagttattggcagtgtacattatgaaatgcaatccagcatctgtagagctgcaattcattatggtataatagacaatgatggtggctgggtagatatcactagacaaggaagaaagcattatttcatcaagtccaatagaaatggtattcaaacaattggcaaatatcagtctgctaattccttcacagtctctaaagtaacagttcaggctgtgacttgtgaaacaactgtggaacagctctgtccatttcataagcctgcttcacattgcccaagagtatactgtcctcgtaactgtatgcaagcaaatccacattatgctcgtgtaattggaactcgagtttattctgatctgtccagtatctgcagagcagcagtacatgctggagtggttcgaaatcacggtggttatgttgatgtaatgcctgtggacaaaagaaagacctacattgcttcttttcagaatggaatcttctcagaaagtttacagaatcctccaggaggaaaggcattcagagtgtttgctgttgtgtgaaactgaatacttggaagaggaccataaagactattccaaatgcaatatttctgaattttgtataaaactgtaacattactgtacagagtacatcaactattttcagcccaaaaaggtgccaaatgcatataaatcttgataaacaaagtctataaaataaaacatgggacattagctttgggaaaagtaatgaaaatataatggttttagaaatcctgtgttaaatattgctatattttcttagcagttatttctacagttaattacatagtcatgattgttctacgtttcatatattatatggtgctttgtatatgccactaataaaatgaatctaaacattgaatgtgaatggccctcagaaaatcatctagtgcatttaaaaataatcgactctaaaactgaaagaaaccttatcacattttccccagttcaatgctatgccattaccaactccaaataatctcaaataattttccacttaataactgtaaagtttttttctgttaatttaggcatatagaatattaaattctgatattgcacttcttattttatataaaataatcctttaatatccaaatgaatctgttaaaatgtttgattccttgggaatggccttaaaaataaatgtaataaagtcagagtggtggtatgaaaacattcctagtgatcatgtagtaaatgtagggttaagcatggacagccagagctttctatgtactgttaaaattgaggtcacatattttcttttgtatcctggcaaatactcctgcaggccaggaagtataatagcaaaaagttgaacaaagatgaactaatgtattacattaccattgccactgatttttttttaaatggtaaatgaccttgtatataaatattgccatatcatggtacctataatggtgatatatttgtttctatgaaaaatgtattgtgctttgatactaaaaatctgtaaaatgttagttttggtaattttttttctgctggtggatttacatattaaattttttctgctggtggataaacattaaaattaatcatgtttcaaa

SEQ ID NO: 443351 - DNA, 3028 bp, Homo sapiens
  misc_feature (2438)..(2438): n is a, c, g, or t
  misc_feature (2442)..(2443): n is a, c, g, or t
  misc_feature (2454)..(2454): n is a, c, g, or t
  misc_feature (2457)..(2457): n is a, c, g, or t
  misc_feature (2479)..(2479): n is a, c, g, or t
  misc_feature (2481)..(2481): n is a, c, g, or t
  misc_feature (2489)..(2489): n is a, c, g, or t
  misc_feature (2492)..(2492): n is a, c, g, or t
  misc_feature (2500)..(2500): n is a, c, g, or t
  misc_feature (2509)..(2509): n is a, c, g, or t
  misc_feature (2515)..(2515): n is a, c, g, or t
  misc_feature (2517)..(2517): n is a, c, g, or t
  misc_feature (2522)..(2522): n is a, c, g, or t
  misc_feature (2533)..(2533): n is a, c, g, or t
  misc_feature (2544)..(2544): n is a, c, g, or t
gcgcctggttctgcgcgtactggctgtacggagcaggagcaagaggtcgccgccagcctccgccgccgagcctcgttcgtgtccccgcccctcgctcctgcagctactgctcagaaacgctggggcgcccaccctggcagactaacgaagcagctcccttcccaccccaactgcaggtctaattttggacgctttgcctgccatttcttccaggttgagggagccgcagaggcggaggctcgcgtattcctgcagtcagcacccacgtcgcccccggacgctcggtgctcaggcccttcgcgagcggggctctccgtctgcggtcccttgtgaaggctctgggcggctgcagaggccggccgtccggtttggctcacctctcccaggaaacttcacactggagagccaaaaggagtggaagagcctgtcttggagattttcctggggaaatcctgaggtcattcattatgaagtgtaccgcgcgggagtggctcagagtaaccacagtgctgttcatggctagagcaattccagccatggtggttcccaatgccactttattggagaaacttttggaaaaatacatggatgaggatggtgagtggtggatagccaaacaacgagggaaaagggccatcacagacaatgacatgcagagtattttggaccttcataataaattacgaagtcaggtgtatccaacagcctctaatatggagtatatgacatgggatgtagagctggaaagatctgcagaatcctgggctgaaagttgcttgtgggaacatggacctgcaagcttgcttccatcaattggacagaatttgggagcacactggggaagatataggcccccgacgtttcatgtacaatcgtggtatgatgaagtgaaagactttagctacccatatgaacatgaatgcaacccatattgtccattcaggtgttctggccctgtatgtacacattatacacaggtcgtgtgggcaactagtaacagaatcggttgtgccattaatttgtgtcataacatgaacatctgggggcagatatggcccaaagctgtctacctggtgtgcaattactccccaaagggaaactggtggggccatgccccttacaaacatgggcggccctgttctgcttgcccacctagttttggagggggctgtagagaaaatctgtgctacaaagaagggtcagacaggtattatccccctcgagaagaggaaacaaatgaaatagaacgacagcagtcacaagtccatgacacccatgtccggacaagatcagatgatagtagcagaaatgaagtcataagcgcacagcaaatgtcccaaattgtttcttgtgaagtaagattaagagatcagtgcaaaggaacaacctgcaataggtacgaatgtcctgctggctgtttggatagtaaagctaaagttattggcagtgtacattatgaaatgcaatccagcatctgtagagctgcaattcattatggtataatagacaatgatggtggctgggtagatatcactagacaaggaagaaagcattatttcatcaagtccaatagaaatggtattcaaacaattggcaaatatcagtctgctaattccttcacagtctctaaagtaacagttcaggctgtgacttgtgaaacaactgtggaacagctctgtccatttcataagcctgcttcacattgcccaagagtatactgtcctcgtaactgtatgcaagcaaatccacattatgctcgtgtaattggaactcgagtttattctgatctgtccagtatctgcagagcagcagtacatgctggagtggttcgaaatcacggtggttatgttgatgtaatgcctgtggacaaaagaaagacctacattgcttcttttcagaatggaatcttctcagaaagtttacagaatcctccaggaggaaaggcattcagagtgtttgctgttgtgtgaaactgaatacttggaagaggaccataaagactattccaaatgcaatatttctgaattttgtataaaactgtaacattactgtacagagtacatcaactattttcagcccaaaaaggtgccaaatgcatataaatcttgataaacaaagtctataaaataaaacatgggacattagctttgggaaaagtaatgaaaatataatggttttagaaatcctgtgttaaatattgctatattttcttagcagttatttctacagttaattacatagtcatgattgttctacgtttcatatattatatggtgctttgtatatgccactaataaaatgaatctaaacattgaatgtgaatggccctcagaaaatcatctagtgcatttaaaaataatcgactctaaaactgaaagaaaccttatcacattttccccagttcaatgctatgccattaccccccccccacacccccncacnnccccccacccnacnaccgcaaagcccctccccgccnanccaggcanacngaataccnaaccccganatggcncnccccnccccacacaanacaaccccccnatatccaaatgaatctgttaaaatgtttgattccttgggaatggccttaaaaataaatgtaataaagtcagagtggtggtatgaaaacattcctagtgatcatgtagtaaatgtagggttaagcatggacagccagagctttctatgtactgttaaaattgaggtcacatattttcttttgtatcctggcaaatactcctgcaggccaggaagtataatagcaaaaagttgaacaaagatgaactaatgtattacattaccattgccactgatttttttttaaatggtaaatgaccttgtatataaatattgccatatcatggtacctataatggtgatatatttgtttctatgaaaaatgtattgtgctttgatactaaaaatctgtaaaatgttagttttggtaattttttttctgctggtggatttacatattaaattttttctgctggtggataaacattaaaattaatcatgtttcaaa

SEQ ID NO: 443352 - DNA, 1749 bp, Homo sapiens
tacaaagtaacggagttaagagtcaatgagctgtacatcagactagcagatagctttgtctctaagctgctgaaaatcggaacgaaaaggggcttcaaccaagttagtctgagagagagaggaatccagctcacatcagtgtgtagacaaagtctgaaagtgcatgctgatgagtttacgttttatgaggcaaacacttagaaaccattacagatttctaagccagagagttacaaatgcaaatttaggaaatgtcttatgcacatattcaatagaatattaagggaatttgatcatgtaaagaggcctgaatatgtacattaccacctatttctcttggtgagcttacttaccaagatttttttcagttcagctttacctttgcagttattttccaattctgagtctctctcaagctccagatttgcactggtcttatgtgccactgaaaagtcctgctggtatcttgaatgtactagtcttcacatttgtgcttatattcttgcctctgtccagtatctgcagagcagcagtacatgctggagtggttcgaaatcacggtggttatgttgatgtaatgcctgtggacaaaagaaagacctacattgcttcttttcagaatggaatcttctcagaaagtttacagaatcctccaggaggaaaggcattcagagtgtttgctgttgtgtgaaactgaatacttggaagaggaccataaagactattccaaatgcaatatttctgaattttgtataaaactgtaacattactgtacagagtacatcaactattttcagcccaaaaaggtgccaaatgcatataaatcttgataaacaaagtctataaaataaaacatgggacattagctttgggaaaagtaatgaaaatataatggttttagaaatcctgtgttaaatattgctatattttcttagcagttatttctacagttaattacatagtcatgattgttctacgtttcatatattatatggtgctttgtatatgccactaataaaatgaatctaaacattgaatgtgaatggccctcagaaaatcatctagtgcatttaaaaataatcgactctaaaactgaaagaaaccttatcacattttccccagttcaatgctatgccattaccaactccaaataatctcaaataattttccacttaataactgtaaagtttttttctgttaatttaggcatatagaatattaaattctgatattgcacttcttattttatataaaataatcctttaatatccaaatgaatctgttaaaatgtttgattccttgggaatggccttaaaaataaatgtaataaagtcagagtggtggtatgaaaacattcctagtgatcatgtagtaaatgtagggttaagcatggacagccagagctttctatgtactgttaaaattgaggtcacatattttcttttgtatcctggcaaatactcctgcaggccaggaagtataatagcaaaaagttgaacaaagatgaactaatgtattacattaccattgccactgatttttttttaaatggtaaatgaccttgtatataaatattgccatatcatggtacctataatggtgatatatttgtttctatgaaaaatgtattgtgctttgatactaaaaatctgtaaaatgttagttttggtaattttttttctgctggtggatttacatattaaattttttctgctggtggataaacattaaaattaatcatgtttcaaa

SEQ ID NO: 443353 - DNA, 873 bp, Homo sapiens
tttttaattttaatgtttatccaccagcagaaaaaatttaatatgtaaatccaccagcagaaaaaaaattaccaaaactaacattttacagatttttagtatcaaagcacaatacatttttcatagaaacaaatatatcaccattataggtaccatgatatggcaatatttatatacaaaatcatctagtgcatttaaaaataatcgactctaaaactgaaagaaaccttatcacattttccccagttcaatgctatgccattaccaactccaaataatctcaaataattttccacttaataactgtaaagtttttttctgttaatttaggcatatagaatattaaattctgatattgcacttcttattttatataaaataatcctttaatatccaaatgaatctgttaaaatgtttgattccttgggaatggccttaaaaataaatgtaataaagtcagagtggtggtatgaaaacattcctagtgatcatgtagtaaatgtagggttaagcatggacagccagagctttctatgtactgttaaaattgaggtcacatattttcttttgtatcctggcaaatactcctgcaggccaggaagtataatagcaaaaagttgaacaaagatgaactaatgtattacattaccattgccactgatttttttttaaatggtaaatgaccttgtatataaatattgccatatcatggtacctataatggtgatatatttgtttctatgaaaaatgtattgtgctttgatactaaaaatctgtaaaatgttagttttggtaattttttttctgctggtggatttacatattaaattttttctgctggtggataaacattaaaattaatcatgtttcaaa

SEQ ID NO: 443354 - DNA, 3028 bp, Homo sapiens
gcgcctggttctgcgcgtactggctgtacggagcaggagcaagaggtcgccgccagcctccgccgccgagcctcgttcgtgtccccgcccctcgctcctgcagctactgctcagaaacgctggggcgcccaccctggcagactaacgaagcagctcccttcccaccccaactgcaggtctaattttggacgctttgcctgccatttcttccaggttgagggagccgcagaggcggaggctcgcgtattcctgcagtcagcacccacgtcgcccccggacgctcggtgctcaggcccttcgcgagcggggctctccgtctgcggtcccttgtgaaggctctgggcggctgcagaggccggccgtccggtttggctcacctctcccaggaaacttcacactggagagccaaaaggagtggaagagcctgtcttggagattttcctggggaaatcctgaggtcattcattatgaagtgtaccgcgcgggagtggctcagagtaaccacagtgctgttcatggctagagcaattccagccatggtggttcccaatgccactttattggagaaacttttggaaaaatacatggatgaggatggtgagtggtggatagccaaacaacgagggaaaagggccatcacagacaatgacatgcagagtattttggaccttcataataaattacgaagtcaggtgtatccaacagcctctaatatggagtatatgacatgggatgtagagctggaaagatctgcagaatcctgggctgaaagttgcttgtgggaacatggacctgcaagcttgcttccatcaattggacagaatttgggagcacactggggaagatataggcccccgacgtttcatgtacaatcgtggtatgatgaagtgaaagactttagctacccatatgaacatgaatgcaacccatattgtccattcaggtgttctggccctgtatgtacacattatacacaggtcgtgtgggcaactagtaacagaatcggttgtgccattaatttgtgtcataacatgaacatctgggggcagatatggcccaaagctgtctacctggtgtgcaattactccccaaagggaaactggtggggccatgccccttacaaacatgggcggccctgttctgcttgcccacctagttttggagggggctgtagagaaaatctgtgctacaaagaagggtcagacaggtattatccccctcgagaagaggaaacaaatgaaatagaacgacagcagtcacaagtccatgacacccatgtccggacaagatcagatgatagtagcagaaatgaagtcataagcgcacagcaaatgtcccaaattgtttcttgtgaagtaagattaagagatcagtgcaaaggaacaacctgcaataggtacgaatgtcctgctggctgtttggatagtaaagctaaagttattggcagtgtacattatgaaatgcaatccagcatctgtagagctgcaattcattatggtataatagacaatgatggtggctgggtagatatcactagacaaggaagaaagcattatttcatcaagtccaatagaaatggtattcaaacaattggcaaatatcagtctgctaattccttcacagtctctaaagtaacagttcaggctgtgacttgtgaaacaactgtggaacagctctgtccatttcataagcctgcttcacattgcccaagagtatactgtcctcgtaactgtatgcaagcaaatccacattatgctcgtgtaattggaactcgagtttattctgatctgtccagtatctgcagagcagcagtacatgctggagtggttcgaaatcacggtggttatgttgatgtaatgcctgtggacaaaagaaagacctacattgcttcttttcagaatggaatcttctcagaaagtttacagaatcctccaggaggaaaggcattcagagtgtttgctgttgtgtgaaactgaatacttggaagaggaccataaagactattccaaatgcaatatttctgaattttgtataaaactgtaacattactgtacagagtacatcaactattttcagcccaaaaaggtgccaaatgcatataaatcttgataaacaaagtctataaaataaaacatgggacattagctttgggaaaagtaatgaaaatataatggttttagaaatcctgtgttaaatattgctatattttcttagcagttatttctacagttaattacatagtcatgattgttctacgtttcatatattatatggtgctttgtatatgccactaataaaatgaatctaaacattgaatgtgaatggccctcagaaaatcatctagtgcatttaaaaataatcgactctaaaactgaaagaaaccttatcacattttccccagttcaatgctatgccattaccaactccaaataatctcaaataattttccacttaataactgtaaagtttttttctgttaatttaggcatatagaatattaaattctgatattgcacttcttattttatataaaataatcctttaatatccaaatgaatctgttaaaatgtttgattccttgggaatggccttaaaaataaatgtaataaagtcagagtggtggtatgaaaacattcctagtgatcatgtagtaaatgtagggttaagcatggacagccagagctttctatgtactgttaaaattgaggtcacatattttcttttgtatcctggcaaatactcctgcaggccaggaagtataatagcaaaaagttgaacaaagatgaactaatgtattacattaccattgccactgatttttttttaaatggtaaatgaccttgtatataaatattgccatatcatggtacctataatggtgatatatttgtttctatgaaaaatgtattgtgctttgatactaaaaatctgtaaaatgttagttttggtaattttttttctgctggtggatttacatattaaattttttctgctggtggataaacattaaaattaatcatgtttcaaa

SEQ ID NO: 443355 - DNA, 1977 bp, Homo sapiens
  misc_feature (152)..(152): n is a, c, g, or t
cctaaatctgctttctctaacagaagggtcagacaggtattatccccctcgagaagaggaaacaaatgaaatagaacgacagcagtcacaagtccatgacacccatgtccggacaagatcagatgatagtagcagaagtaaaggccaagagnagacacggttgtgtcgcgagtggagtggtgaagtggtgacagttttgggggggggggggggtggggggggggggggtggggggggggtgggggggggtggggggtgggtgtggtggggggggcagcaaatgtcccaaattgtttcttgtgaagtaagattaagagatcagtgcaaaggaacaacctgcaataggtacgaatgtcctgctggctgtttggatagtaaagctaaagttattggcagtgtacattatgaaatgcaatccagcatctgtagagctgcaattcattatggtataatagacaatgatggtggctgggtagatatcactagacaaggaagaaagcattatttcatcaagtccaatagaaatggtattcaaacaattggcaaatatcagtctgctaattccttcacagtctctaaagtaacagttcaggctgtgacttgtgaaacaactgtggaacagctctgtccatttcataagcctgcttcacattgcccaagagtatactgtcctcgtaactgtatgcaagcaaatccacattatgctcgtgtaattggaactcgagtttattctgatctgtccagtatctgcagagcagcagtacatgctggagtggttcgaaatcacggtggttatgttgatgtaatgcctgtggacaaaagaaagacctacattgcttcttttcagaatggaatcttctcagaaagtttacagaatcctccaggaggaaaggcattcagagtgtttgctgttgtgtgaaactgaatacttggaagaggaccataaagactattccaaatgcaatatttctgaattttgtataaaactgtaacattactgtacagagtacatcaactattttcagcccaaaaaggtgccaaatgcatataaatcttgataaacaaagtctataaaataaaacatgggacattagctttgggaaaagtaatgaaaatataatggttttagaaatcctgtgttaaatattgctatattttcttagcagttatttctacagttaattacatagtcatgattgttctacgtttcatatattatatggtgctttgtatatgccactaataaaatgaatctaaacattgaatgtgaatggccctcagaaaatcatctagtgcatttaaaaataatcgactctaaaactgaaagaaaccttatcacattttccccagttcaatgctatgccattaccaactccaaataatctcaaataattttccacttaataactgtaaagtttttttctgttaatttaggcatatagaatattaaattctgatattgcacttcttattttatataaaataatcctttaatatccaaatgaatctgttaaaatgtttgattccttgggaatggccttaaaaataaatgtaataaagtcagagtggtggtatgaaaacattcctagtgatcatgtagtaaatgtagggttaagcatggacagccagagctttctatgtactgttaaaattgaggtcacatattttcttttgtatcctggcaaatactcctgcaggccaggaagtataatagcaaaaagttgaacaaagatgaactaatgtattacattaccattgccactgatttttttttaaatggtaaatgaccttgtatataaatattgccatatcatggtacctataatggtgatatatttgtttctatgaaaaatgtattgtgctttgatactaaaaatctgtaaaatgttagttttggtaattttttttctgctggtggatttacatattaaattttttctgctggtggataaacattaaaattaatcatgtttcaaa

SEQ ID NO: 443356 - DNA, 2196 bp, Homo sapiens
gcgcctggttctgcgcgtactggctgtacggagcaggagcaagaggtcgccgccagcctccgccgccgagcctcgttcgtgtccccgcccctcgctcctgcagctactgctcagaaacgctggggcgcccaccctggcagactaacgaagcagctcccttcccaccccaactgcaggtctaattttggacgctttgcctgccatttcttccaggttgagggagccgcagaggcggaggctcgcgtattcctgcagtcagcacccacgtcgcccccggacgctcggtgctcaggcccttcgcgagcggggctctccgtctgcggtcccttgtgaaggctctgggcggctgcagaggccggccgtccggtttggctcacctctcccaggaaacttcacactggagagccaaaaggagtggaagagcctgtcttggagattttcctggggaaatcctgaggtcattcattatgaagtgtaccgcgcgggagtggctcagagtaaccacagtgctgttcatggctagagcaattccagccatggtggttcccaatgccactttattggagaaacttttggaaaaatacatggatgaggatggtgagtggtggatagccaaacaacgagggaaaagggccatcacagacaatgacatgcagagtattttggaccttcataataaattacgaagtcaggtgtatccaacagcctctaatatggagtatatgacatgggatgtagagctggaaagatctgcagaatcctgggctgaaagttgcttgtgggaacatggacctgcaagcttgcttccatcaattggacagaatttgggagcacactggggaagatataggcccccgacgtttcatgtacaatcgtggtatgatgaagtgaaagactttagctacccatatgaacatgaatgcaacccatattgtccattcaggtgttctggccctgtatgtacacattatacacaggtcgtgtgggcaactagtaacagaatcggttgtgccattaatttgtgtcataacatgaacatctgggggcagatatggcccaaagctgtctacctggtgtgcaattactccccaaagggaaactggtggggccatgccccttacaaacatgggcggccctgttctgcttgcccacctagttttggagggggctgtagagaaaatctgtgctacaaagaagggtcagacaggtattatccccctcgagaagaggaaacaaatgaaatagaacgacagcagtcacaagtccatgacacccatgtccggacaagatcagatgatagtagcagaaattagctttgggaaaagtaatgaaaatataatggttttagaaatcctgtgttaaatattgctatattttcttagcagttatttctacagttaattacatagtcatgattgttctacgtttcatatattatatggtgctttgtatatgccactaataaaatgaatctaaacattgaatgtgaatggccctcagaaaatcatctagtgcatttaaaaataatcgactctaaaactgaaagaaaccttatcacattttccccagttcaatgctatgccattaccaactccaaataatctcaaataattttccacttaataactgtaaagtttttttctgttaatttaggcatatagaatattaaattctgatattgcacttcttattttatataaaataatcctttaatatccaaatgaatctgttaaaatgtttgattccttgggaatggccttaaaaataaatgtaataaagtcagagtggtggtatgaaaacattcctagtgatcatgtagtaaatgtagggttaagcatggacagccagagctttctatgtactgttaaaattgaggtcacatattttcttttgtatcctggcaaatactcctgcaggccaggaagtataatagcaaaaagttgaacaaagatgaactaatgtattacattaccattgccactgatttttttttaaatggtaaatgaccttgtatataaatattgccatatcatggtacctataatggtgatatatttgtttctatgaaaaatgtattgtgctttgatactaaaaatctgtaaaatgttagttttggtaattttttttctgctggtggatttacatattaaattttttctgctggtggataaacattaaaattaatcatgtttcaaa

SEQ ID NO: 443357 - DNA, 740 bp, Homo sapiens
tgagtttgggtgggctgtggctgttttgctcatcattttatcccagcttctggcacattgtcagcacacttcaaatatttattggatgaagtaatatttgcaactgtatttcctgttttgcagttttatttctccttgttttcatttaagaattttttaaaaaaaatttatgtcttaaagatttccacagataagattacacagggaaattttttttcttcaaatctgtggaacaaaacaaacaggtattgtggaaggtggaaaaatcgaagagacactcagaaatcaaggtttctgtctggagcaattttgcagttatatgaaagcgcttatttaaaaatgttaacttaccatagtatttataagtatcttattttttcagattacatttttccttctttcaaaccaaaacataaggaaccacagttccaaagagcctttaccaccagtctcagcgtgttctctcctcctgtttgatttaggatctgggattggcacaagactctgctaccagcacaaagagcccaatccttcttggcagtctggcccatcagatctacaggatgatgtgtgcaaagggctactcaaagaaagacttctcatccgtgttccagttcctacgagaggaaactctaatgttgccctgtgccggacctgtggaacaaattgtttggaactccttgtcatccagatgaccctcttagacacagatggttattcacgagaccagtatttccccc

SEQ ID NO: 443358 - DNA, 503 bp, Homo sapiens
  misc_feature (503)..(503): n is a, c, g, or t
aggccctgccgcgtcaggccgctcctctcggctccgcgctccttccctcgcgcgtgggcacccgcccccgagcggtgagagcgcgtgcgcgcgcgcccttctccgtgggcgagccagccagtcccgctgcacacgctcgcagtctgtgggccctccgggaggcggcggaggtcaccgcggggagaggggcgggcgcagcatggcagcctccttacggctcctcggagctgcctccggtctccggtactggagccggcggctgcggccggcagccggcagctttgcagcggtgtgttctaggtcagtggcttcaaagactccagttggattcattggactgggcaacatggggaatccaatggcaaaaaatctcatgaaacatggctatccacttattatttatgatgtgttccctgatgcctgcaaagagtttcaagatgcaggtgaacagcaggtagtatcttccccagcagatgttgctgattattccggagctgggttcn

SEQ ID NO: 443359 - DNA, 1818 bp, Homo sapiens
aggccctgccgcgtcaggccgctcctctcggctccgcgctccttccctcgcgcgtgggcacccgcccccgagcggtgagagcgcgtgcgcgcgcgcccttctccgtgggcgagccagccagtcccgctgcacacgctcgcagtctgtgggccctccgggaggcggcggaggtcaccgcggggagaggggcgggcgcagcatggcagcctccttacggctcctcggagctgcctccggtctccggtactggagccggcggctgcggccggcagccggcagctttgcagcgggtagtatcttccccagcagatgttgctgaaaaagctgacagaattattacaatgctgcccaccagtatcaatgcaatagaagcttattccggagcaaatgggattctaaaaaaagtgaagaagggctcattattaatagattccagcactattgatcctgcagtttcaaaagaattggccaaagaagttgagaaaatgggagcagttttcatggatgcccctgtttctggtggtgtaggagctgcacgatctgggaacctcacgtttatggtgggaggagttgaagatgaatttgctgctgcccaagagttgctggggtgcatgggctccaacgtggtgtactgtggagctgttgggactgggcaggcggcaaagatctgcaacaacatgctgttagctattagtatgattggaactgctgaagctatgaatcttggaatcaggttagggcttgacccaaaactactggctaaaatcctaaatatgagctcaggacggtgttggtcaagtgacacttataatcctgtacctggagtgatggatggcgttccctcggctaataactatcagggtggatttggaacaacactcatggctaaggatctgggattggcacaagactctgctaccagcacaaagagcccaatccttcttggcagtctggcccatcagatctacaggatgatgtgtgcaaagggctactcaaagaaagacttctcatccgtgttccagttcctacgagaggaggagaccttctgagtgtgccctttggccacggacactgttgggaaccaaactctgtcttggagcctccttttagctcactccacaagtaaatggatttaatcaaaggtcacctatctgcttttgattgtctaggtcacagtaatccctaggatttttcaccgcttattctttttgtctttttaacaaacatattatccgaattttttttctgcaagccactgatagtctctgctaactagcttaattgacctttttacaaagtttgatccccaagcatcctcaactaaatcattgaatacttcaatcaggatattatctgctttactttacaaataaaaccaaatcttttgtcaacaggatgaaacccatcttaaaggaaagaaaaggaattggtgtgaagagagaagttagagaagggaaatgcagtgaattactatctgtgtccatcaggaagtttgtcctgttaaccaaatggttactgcactaccagggttactggtttattttccagggagctgataaagcaggagaactgttgctgcatgttttctatttggactccgtcacaatatggtaggatatccctcaccaactcccgacactcagcagacttgtttttatatttttttctttcttgtacattcttactacgtattttttgacttaagaatgacatctttagacgcatttcagagccaatgatgatatttgctttagataattattatattattataaatatagccatattattttgaattcaaataaatttctatactgg

SEQ ID NO: 443360 - DNA, 1617 bp, Homo sapiens
tgcggctgaattacctcatactctgaagttaccaggcttacctctgtttcccaacaagtttcttatttctttagtgttgctaattttaggtagtatcttccccagcagatgttgctgaaaaagctgacagaattattacaatgctgcccaccagtatcaatgcaatagaagcttattccggagcaaatgggattctaaaaaaagtgaagaagggctcattattaatagattccagcactattgatcctgcagtttcaaaagaattggccaaagaagttgagaaaatgggagcagttttcatggatgcccctgtttctggtggtgtaggagctgcacgatctgggaacctcacgtttatggtgggaggagttgaagatgaatttgctgctgcccaagagttgctggggtgcatgggctccaacgtggtgtactgtggagctgttgggactgggcaggcggcaaagatctgcaacaacatgctgttagctattagtatgattggaactgctgaagctatgaatcttggaatcaggttagggcttgacccaaaactactggctaaaatcctaaatatgagctcaggacggtgttggtcaagtgacacttataatcctgtacctggagtgatggatggcgttccctcggctaataactatcagggtggatttggaacaacactcatggctaaggatctgggattggcacaagactctgctaccagcacaaagagcccaatccttcttggcagtctggcccatcagatctacaggatgatgtgtgcaaagggctactcaaagaaagacttctcatccgtgttccagttcctacgagaggaggagaccttctgagtgtgccctttggccacggacactgttgggaaccaaactctgtcttggagcctccttttagctcactccacaagtaaatggatttaatcaaaggtcacctatctgcttttgattgtctaggtcacagtaatccctaggatttttcaccgcttattctttttgtctttttaacaaacatattatccgaattttttttctgcaagccactgatagtctctgctaactagcttaattgacctttttacaaagtttgatccccaagcatcctcaactaaatcattgaatacttcaatcaggatattatctgctttactttacaaataaaaccaaatcttttgtcaacaggatgaaacccatcttaaaggaaagaaaaggaattggtgtgaagagagaagttagagaagggaaatgcagtgaattactatctgtgtccatcaggaagtttgtcctgttaaccaaatggttactgcactaccagggttactggtttattttccagggagctgataaagcaggagaactgttgctgcatgttttctatttggactccgtcacaatatggtaggatatccctcaccaactcccgacactcagcagacttgtttttatatttttttctttcttgtacattcttactacgtattttttgacttaagaatgacatctttagacgcatttcagagccaatgatgatatttgctttagataattattatattattataaatatagccatattattttgaattcaaataaatttctatactgg

SEQ ID NO: 443361 - DNA, 1747 bp, Homo sapiens
aggccctgccgcgtcaggccgctcctctcggctccgcgctccttccctcgcgcgtgggcacccgcccccgagcggtgagagcgcgtgcgcgcgcgcccttctccgtgggcgagccagccagtcccgctgcacacgctcgcagtctgtgggccctccgggaggcggcggaggtcaccgcggggagaggggcgggcgcagcatggcagcctccttacggctcctcggagctgcctccggtctccggtactggagccggcggctgcggccggcagccggcagctttgcagcggtgtgttctaggtcagtggcttcaaagactccagttggattcattggactgggcaacatggggaatccaatggcaaaaaatctcatgaaacatggctatccacttattatttatgatgtgttccctgatgcctgcaaagagtttcaagatgcaggtgaacaggtgtaggagctgcacgatctgggaacctcacgtttatggtgggaggagttgaagatgaatttgctgctgcccaagagttgctggggtgcatgggctccaacgtggtgtactgtggagctgttgggactgggcaggcggcaaagatctgcaacaacatgctgttagctattagtatgattggaactgctgaagctatgaatcttggaatcaggttagggcttgacccaaaactactggctaaaatcctaaatatgagctcaggacggtgttggtcaagtgacacttataatcctgtacctggagtgatggatggcgttccctcggctaataactatcagggtggatttggaacaacactcatggctaaggatctgggattggcacaagactctgctaccagcacaaagagcccaatccttcttggcagtctggcccatcagatctacaggatgatgtgtgcaaagggctactcaaagaaagacttctcatccgtgttccagttcctacgagaggaggagaccttctgagtgtgccctttggccacggacactgttgggaaccaaactctgtcttggagcctccttttagctcactccacaagtaaatggatttaatcaaaggtcacctatctgcttttgattgtctaggtcacagtaatccctaggatttttcaccgcttattctttttgtctttttaacaaacatattatccgaattttttttctgcaagccactgatagtctctgctaactagcttaattgacctttttacaaagtttgatccccaagcatcctcaactaaatcattgaatacttcaatcaggatattatctgctttactttacaaataaaaccaaatcttttgtcaacaggatgaaacccatcttaaaggaaagaaaaggaattggtgtgaagagagaagttagagaagggaaatgcagtgaattactatctgtgtccatcaggaagtttgtcctgttaaccaaatggttactgcactaccagggttactggtttattttccagggagctgataaagcaggagaactgttgctgcatgttttctatttggactccgtcacaatatggtaggatatccctcaccaactcccgacactcagcagacttgtttttatatttttttctttcttgtacattcttactacgtattttttgacttaagaatgacatctttagacgcatttcagagccaatgatgatatttgctttagataattattatattattataaatatagccatattattttgaattcaaataaatttctatactgg

SEQ ID NO: 443362 - DNA, 1925 bp, Homo sapiens
aggccctgccgcgtcaggccgctcctctcggctccgcgctccttccctcgcgcgtgggcacccgcccccgagcggtgagagcgcgtgcgcgcgcgcccttctccgtgggcgagccagccagtcccgctgcacacgctcgcagtctgtgggccctccgggaggcggcggaggtcaccgcggggagaggggcgggcgcagcatggcagcctccttacggctcctcggagctgcctccggtctccggtactggagccggcggctgcggccggcagccggcagctttgcagcggtgtgttctaggtcagtggcttcaaagactccagttggattcattggactgggcaacatggggaatccaatggcaaaaaatctcatgaaacatggctatccacttattatttatgatgtgttccctgatgcctgcaaagagtttcaagatgcaggtgaacaggtagtatcttccccagcagatgttgctgaaaaagctgacagaattattacaatgctgcccaccagtatcaatgcaatagaagcttattccggagcaaatgggattctaaaaaaagtgaagaagggctcattattaatagattccagcactattgatcctgcagtttcaaaagaattggccaaagaagttgagaaaatgggagcagttttcatggatgcccctgtttctggtggtgtaggagctgcacgatctgggaacctcacgtttatggtgggaggagttgaagatgaatttgctgctgcccaagagttgctggggtgcatgggctccaacgtggtgtactgtggagctgttgggactgggcaggcggcaaagatctgcaacaacatgctgttagctattagtatgattggaactgctgaagctatgaatcttggaatcaggttagggcttgacccaaaactactggctgtacctggagtgatggatggcgttccctcggctaataactatcagggtggatttggaacaacactcatggctaaggatctgggattggcacaagactctgctaccagcacaaagagcccaatccttcttggcagtctggcccatcagatctacaggatgatgtgtgcaaagggctactcaaagaaagacttctcatccgtgttccagttcctacgagaggaggagaccttctgagtgtgccctttggccacggacactgttgggaaccaaactctgtcttggagcctccttttagctcactccacaagtaaatggatttaatcaaaggtcacctatctgcttttgattgtctaggtcacagtaatccctaggatttttcaccgcttattctttttgtctttttaacaaacatattatccgaattttttttctgcaagccactgatagtctctgctaactagcttaattgacctttttacaaagtttgatccccaagcatcctcaactaaatcattgaatacttcaatcaggatattatctgctttactttacaaataaaaccaaatcttttgtcaacaggatgaaacccatcttaaaggaaagaaaaggaattggtgtgaagagagaagttagagaagggaaatgcagtgaattactatctgtgtccatcaggaagtttgtcctgttaaccaaatggttactgcactaccagggttactggtttattttccagggagctgataaagcaggagaactgttgctgcatgttttctatttggactccgtcacaatatggtaggatatccctcaccaactcccgacactcagcagacttgtttttatatttttttctttcttgtacattcttactacgtattttttgacttaagaatgacatctttagacgcatttcagagccaatgatgatatttgctttagataattattatattattataaatatagccatattattttgaattcaaataaatttctatactgg

SEQ ID NO: 443363 - DNA, 1727 bp, Homo sapiens
aggccctgccgcgtcaggccgctcctctcggctccgcgctccttccctcgcgcgtgggcacccgcccccgagcggtgagagcgcgtgcgcgcgcgcccttctccgtgggcgagccagccagtcccgctgcacacgctcgcagtctgtgggccctccgggaggcggcggaggtcaccgcggggagaggggcgggcgcagcatggcagcctccttacggctcctcggagctgcctccggtctccggtactggagccggcggctgcggccggcagccggcagctttgcagcggtgtgttctaggtcagtggcttcaaagactccagttggattcattggactgggcaacatggggaatccaatggcaaaaaatctcatgaaacatggctatccacttattatttatgatgtgttccctgatgcctgcaaagagtttcaagatgcaggtgaacaggtagtatcttccccagcagatgttgctgaaaaagctgacagaattattacaatgctgcccaccagtatcaatgcaatagaagcttattccggagcaaatgggattctaaaaaaagtgaagaagggctcattattaatagattccagcactattgatcctgcagtttcaaaagaattggccaaagaagttgagaaaatgggagcagttttcatggatgcccctgtttctggtggtgtaggagctgcacgatctgggaacctcacgtttatggtgggaggagttgaagatgaatttgctgctgcccaagagttgctggggtgcatgggctccaacgtggtgtactgtggagctgttgggactgggcaggcggcaaagatctgcaacaacatgctgttagctattagtatgattggaactgctgaagctatgaatcttggaatcaggttagggcttgacccaaaactactggctaaaatcctaaatatgagctcaggacggtgttggtcaagtgacacttataatcctgtacctggagtgatggatggcgttccctcggctaataactatcagggtggatttggaacaacactcatggctaaggatctgggattggcacaagactctgctaccagcacaaagagcccaatccttcttggcagtctggcccatcagatctacaggatgatgtgtgcaaagggctactcaaagaaagacttctcatccgtgttccagttcctacgagaggaggagaccttctgagtgtgccctttggccacggacactgttgggaaccaaactctgtcttggagcctccttttagctcactccacaagtaaatggatttaatcaaaggatgaaacccatcttaaaggaaagaaaaggaattggtgtgaagagagaagttagagaagggaaatgcagtgaattactatctgtgtccatcaggaagtttgtcctgttaaccaaatggttactgcactaccagggttactggtttattttccagggagctgataaagcaggagaactgttgctgcatgttttctatttggactccgtcacaatatggtaggatatccctcaccaactcccgacactcagcagacttgtttttatatttttttctttcttgtacattcttactacgtattttttgacttaagaatgacatctttagacgcatttcagagccaatgatgatatttgctttagataattattatattattataaatatagccatattattttgaattcaaataaatttctatactgg

SEQ ID NO: 443364 - DNA, 2027 bp, Homo sapiens
aggccctgccgcgtcaggccgctcctctcggctccgcgctccttccctcgcgcgtgggcacccgcccccgagcggtgagagcgcgtgcgcgcgcgcccttctccgtgggcgagccagccagtcccgctgcacacgctcgcagtctgtgggccctccgggaggcggcggaggtcaccgcggggagaggggcgggcgcagcatggcagcctccttacggctcctcggagctgcctccggtctccggtactggagccggcggctgcggccggcagccggcagctttgcagcggtgtgttctaggtcagtggcttcaaagactccagttggattcattggactgggcaacatggggaatccaatggcaaaaaatctcatgaaacatggctatccacttattatttatgatgtgttccctgatgcctgcaaagagtttcaagatgcaggtgaacaggtagtatcttccccagcagatgttgctgaaaaagctgacagaattattacaatgctgcccaccagtatcaatgcaatagaagcttattccggagcaaatgggattctaaaaaaagtgaagaagggctcattattaatagattccagcactattgatcctgcagtttcaaaagaattggccaaagaagttgagaaaatgggagcagttttcatggatgcccctgtttctggtggtgtaggagctgcacgatctgggaacctcacgtttatggtgggaggagttgaagatgaatttgctgctgcccaagagttgctggggtgcatgggctccaacgtggtgtactgtggagctgttgggactgggcaggcggcaaagatctgcaacaacatgctgttagctattagtatgattggaactgctgaagctatgaatcttggaatcaggttagggcttgacccaaaactactggctaaaatcctaaatatgagctcaggacggtgttggtcaagtgacacttataatcctgtacctggagtgatggatggcgttccctcggctaataactatcagggtggatttggaacaacactcatggctaaggtatggtaaatgtagacacccaagagagaaggaaaaacgtttcacggtccaataacaccttccttctctttctcttaataaagcatatgtctcaggtaagaggcaaaattactagaatattcactctcactgaaaatgagtaaaaacctaacttagatgaaaatccttatcttgttcatttttattcctggccttttggttgagaagaatgggccagaccatgtgtgtgtgtgtatgtgtgtgcgtgtgtgtgtgtgtgcgcacttgggtttatttatatgagccggtaaaatttcgttcaccattaatttatgttaatttaccaacttcttaaatgagaacagtgagaattttctcattgttaataatacactggcagtgcatatatgcatcacgaagagaggattttcccattgataatagatttccaaatacatcttcctgctttaagattttaatatatggatttatatataaaaactagttaagtcattggaaaagcaaactgtcatccttctcttatttgagatctcaactttagaaagtctatgttctcaactacagaaaataatttttagaccagctaactttcagatttctgcagtgcttattttctcccagttgagggttggtttttttttgtttgtttgtttgtttgtttttcctgattaaaaagtaagaatacggccaggcgcgatagctcatgcctttaatcccagcattttgggaggccgaggagggcagatcacctgaggtcaggagttcgagaccagcctggctaacatggtgaaacccagtttctactaaaaataaaaaaaattagtcgggcgtggtggtgcgtgtctgtaagcccagctactcaggaggctgaggcaggagaatcgcttgaaccccggaggtggagatggcagtcagctgagatagcaccattgcactccagcctgggcaacagagtgagacttcgtctcaaatagaa

SEQ ID NO: 443365 - DNA, 1001 bp, Homo sapiens
aggccctgccgcgtcaggccgctcctctcggctccgcgctccttccctcgcgcgtgggcacccgcccccgagcggtgagagcgcgtgcgcgcgcgcccttctccgtgggcgagccagccagtcccgctgcacacgctcgcagtctgtgggccctccgggaggcggcggaggtcaccgcggggagaggggcgggcgcagcatggcagcctccttacggctcctcggagctgcctccggtctccggtactggagccggcggctgcggccggcagccggcagctttgcagcggtgtgttctaggtcagtggcttcaaagactccagttggattcattggactgggcaacatggggaatccaatggcaaaaaatctcatgaaacatggctatccacttattatttatgatgtgttccctgatgcctgcaaagagtttcaagatgcaggtgaacaggtagtatcttccccagcagatgttgctgaaaaagctgacagaattattacaatgctgcccaccagtatcaatgcaatagaagcttattccggagcaaatgggattctaaaaaaagtgaagaagggctcattattaatagattccagcactattgatcctgcagtttcaaaagaattggccaaagaagttgagaaaatgggagcagttttcatggatgcccctgtttctggtggtgtaggagctgcacgatctgggaacctcacgtttatggtgggaggagttgaagatgaatttgctgctgcccaagagttgctggggtgcatgggctccaacgtggtgtactgtggagctgttgggactgggcagcgccgcaaacgatcttgaacatcatgcccggtggtatttagaatactggaacttgtgtagctttgaaaccttggaataggttagggcttgcccataaacctgtccttcagggattatgccggctctcgcgtaataacttccaggtggcttggcccactttcatggctagatctggtaggtacac

SEQ ID NO: 443366 - DNA, 724 bp, Homo sapiens
gttgatattcagtctgagatgaaccaattagtagttattttgaggagacagttattactttttgggataacacatctatttggtattgccattttacagtggtttatctgttagtaagagtaacaagggtacttgatctctaaacagaggaaatatcttcaattaaaaacagaatttaaccaaagagtggggtaggaattgaatggggactattaccctagactggcaaagcagaagcttgtgaccttttacgttgttacagacacaggtactcttccctctatgcctgtagtacttccagcttgtatgtggaacgactgtaatgatcatcactgctttgtgactctctcctgctttttcccagaattctagagctttctgatgctctgcggctgaattacctcatactctgaagttaccaggcttacctctgtttcccaacaagtttcttatttctttagtgttgctaattttaggtaggtatgaaggaaggctgccttaagaataaggcttatccctgcatgaaggagatatttatgttttgaaagggagagaaaagaatctaatacagtatttagtgagcacctactatgtgtcaggtcttttgctaaatattttgtatgtattatctcattttatctttgcaacagaagtgctatcaagaagccaatgcttggagaagctaaataatatccctaatgttatatagtggttcttattatct

SEQ ID NO: 443367 - DNA, 380 bp, Homo sapiens
atttgcccctattgaaaataatgtattgaaatcagtgtgttctaggtcagtggcttcaaagactccagttggattcattggactgggcaacatggggaatccaatggcaaaaaatctcatgaaacatggctatccacttattatttatgatgtgttccctgatgcctgcaaagagtttcaagatgcaggtgaacagggtaagaccttttctttagatttgttttagattttgagaatgaaaaatgaatatacattcaaataagtgacagcttcttagaagtatacccaatggagttgtaaacctaattcagtgttaattttatatatatgtaatcattcatccaacatccagatttgcagtaaaggagagttctcgttag

SEQ ID NO: 443368 - DNA, 1979 bp, Homo sapiens
aggccctgccgcgtcaggccgctcctctcggctccgcgctccttccctcgcgcgtgggcacccgcccccgagcggtgagagcgcgtgcgcgcgcgcccttctccgtgggcgagccagccagtcccgctgcacacgctcgcagtctgtgggccctccgggaggcggcggaggtcaccgcggggagaggggcgggcgcagcatggcagcctccttacggctcctcggagctgcctccggtctccggtactggagccggcggctgcggccggcagccggcagctttgcagcggtgtgttctaggtcagtggcttcaaagactccagttggattcattggactgggcaacatggggaatccaatggcaaaaaatctcatgaaacatggctatccacttattatttatgatgtgttccctgatgcctgcaaagagtttcaagatgcaggtgaacaggtagtatcttccccagcagatgttgctgaaaaagctgacagaattattacaatgctgcccaccagtatcaatgcaatagaagcttattccggagcaaatgggattctaaaaaaagtgaagaagggctcattattaatagattccagcactattgatcctgcagtttcaaaagaattggccaaagaagttgagaaaatgggagcagttttcatggatgcccctgtttctggtggtgtaggagctgcacgatctgggaacctcacgtttatggtgggaggagttgaagatgaatttgctgctgcccaagagttgctggggtgcatgggctccaacgtggtgtactgtggagctgttgggactgggcaggcggcaaagatctgcaacaacatgctgttagctattagtatgattggaactgctgaagctatgaatcttggaatcaggttagggcttgacccaaaactactggctaaaatcctaaatatgagctcaggacggtgttggtcaagtgacacttataatcctgtacctggagtgatggatggcgttccctcggctaataactatcagggtggatttggaacaacactcatggctaaggatctgggattggcacaagactctgctaccagcacaaagagcccaatccttcttggcagtctggcccatcagatctacaggatgatgtgtgcaaagggctactcaaagaaagacttctcatccgtgttccagttcctacgagaggaggagaccttctgagtgtgccctttggccacggacactgttgggaaccaaactctgtcttggagcctccttttagctcactccacaagtaaatggatttaatcaaaggtcacctatctgcttttgattgtctaggtcacagtaatccctaggatttttcaccgcttattctttttgtctttttaacaaacatattatccgaattttttttctgcaagccactgatagtctctgctaactagcttaattgacctttttacaaagtttgatccccaagcatcctcaactaaatcattgaatacttcaatcaggatattatctgctttactttacaaataaaaccaaatcttttgtcaacaggatgaaacccatcttaaaggaaagaaaaggaattggtgtgaagagagaagttagagaagggaaatgcagtgaattactatctgtgtccatcaggaagtttgtcctgttaaccaaatggttactgcactaccagggttactggtttattttccagggagctgataaagcaggagaactgttgctgcatgttttctatttggactccgtcacaatatggtaggatatccctcaccaactcccgacactcagcagacttgtttttatatttttttctttcttgtacattcttactacgtattttttgacttaagaatgacatctttagacgcatttcagagccaatgatgatatttgctttagataattattatattattataaatatagccatattattttgaattcaaataaatttctatactgg

SEQ ID NO: 443369 - DNA, 1939 bp, Homo sapiens
aggccctgccgcgtcaggccgctcctctcggctccgcgctccttccctcgcgcgtgggcacccgcccccgagcggtgagagcgcgtgcgcgcgcgcccttctccgtgggcgagccagccagtcccgctgcacacgctcgcagtctgtgggccctccgggaggcggcggaggtcaccgcggggagaggggcgggcgcagcatggcagcctccttacggctcctcggagctgcctccggtctccggtactggagccggcggctgcggccggcagccggcagctttgcagcggtgtgttctaggtcagtggcttcaaagactccagttggattcattggactgggcaacatggggaatccaatggcaaaaaatctcatgaaacatggctatccacttattatttatgatgtgttccctgatgcctgcaaagagtttcaagatgcaggtgaacaggtagtatcttccccagcagatgttgctgaaaaagctgacagaattattacaatgctgcccaccagtatcaatgcaatagaagcttattccggagcaaatgggattctaaaaaaagtgaagaagggctcattattaatagattccagcactattgatcctgcagtttcaaaagaattggccaaagaagttgaggtgtaggagctgcacgatctgggaacctcacgtttatggtgggaggagttgaagatgaatttgctgctgcccaagagttgctggggtgcatgggctccaacgtggtgtactgtggagctgttgggactgggcaggcggcaaagatctgcaacaacatgctgttagctattagtatgattggaactgctgaagctatgaatcttggaatcaggttagggcttgacccaaaactactggctaaaatcctaaatatgagctcaggacggtgttggtcaagtgacacttataatcctgtacctggagtgatggatggcgttccctcggctaataactatcagggtggatttggaacaacactcatggctaaggatctgggattggcacaagactctgctaccagcacaaagagcccaatccttcttggcagtctggcccatcagatctacaggatgatgtgtgcaaagggctactcaaagaaagacttctcatccgtgttccagttcctacgagaggaggagaccttctgagtgtgccctttggccacggacactgttgggaaccaaactctgtcttggagcctccttttagctcactccacaagtaaatggatttaatcaaaggtcacctatctgcttttgattgtctaggtcacagtaatccctaggatttttcaccgcttattctttttgtctttttaacaaacatattatccgaattttttttctgcaagccactgatagtctctgctaactagcttaattgacctttttacaaagtttgatccccaagcatcctcaactaaatcattgaatacttcaatcaggatattatctgctttactttacaaataaaaccaaatcttttgtcaacaggatgaaacccatcttaaaggaaagaaaaggaattggtgtgaagagagaagttagagaagggaaatgcagtgaattactatctgtgtccatcaggaagtttgtcctgttaaccaaatggttactgcactaccagggttactggtttattttccagggagctgataaagcaggagaactgttgctgcatgttttctatttggactccgtcacaatatggtaggatatccctcaccaactcccgacactcagcagacttgtttttatatttttttctttcttgtacattcttactacgtattttttgacttaagaatgacatctttagacgcatttcagagccaatgatgatatttgctttagataattattatattattataaatatagccatattattttgaattcaaataaatttctatactgg

SEQ ID NO: 443370 - DNA, 1355 bp, Homo sapiens
gacaagacgtctgtcttcgtgcaagttcatataaacattacaatctcatttaagaatatttttttaggagggaggtgagacaagacggcagaacagaaaactccacagatcatcctcctacccctaccacaaggatactaagttaacaaacaactacacaggaaaaagcatcttcctaagagctaaaaatcaggcggcaaagatctgcaacaacatgctgttagctattagtatgattggaactgctgaagctatgaatcttggaatcaggttagggcttgacccaaaactactggctaaaatcctaaatatgagctcaggacggtgttggtcaagtgacacttataatcctgtacctggagtgatggatggcgttccctcggctaataactatcagggtggatttggaacaacactcatggctaaggatctgggattggcacaagactctgctaccagcacaaagagcccaatccttcttggcagtctggcccatcagatctacaggatgatgtgtgcaaagggctactcaaagaaagacttctcatccgtgttccagttcctacgagaggaggagaccttctgagtgtgccctttggccacggacactgttgggaaccaaactctgtcttggagcctccttttagctcactccacaagtaaatggatttaatcaaaggtcacctatctgcttttgattgtctaggtcacagtaatccctaggatttttcaccgcttattctttttgtctttttaacaaacatattatccgaattttttttctgcaagccactgatagtctctgctaactagcttaattgacctttttacaaagtttgatccccaagcatcctcaactaaatcattgaatacttcaatcaggatattatctgctttactttacaaataaaaccaaatcttttgtcaacaggatgaaacccatcttaaaggaaagaaaaggaattggtgtgaagagagaagttagagaagggaaatgcagtgaattactatctgtgtccatcaggaagtttgtcctgttaaccaaatggttactgcactaccagggttactggtttattttccagggagctgataaagcaggagaactgttgctgcatgttttctatttggactccgtcacaatatggtaggatatccctcaccaactcccgacactcagcagacttgtttttatatttttttctttcttgtacattcttactacgtattttttgacttaagaatgacatctttagacgcatttcagagccaatgatgatatttgctttagataattattatattattataaatatagccatattattttgaattcaaataaatttctatactgg

SEQ ID NO: 443371 - DNA, 1747 bp, Homo sapiens
  misc_feature (452)..(452): n is a, c, g, or t
  misc_feature (454)..(455): n is a, c, g, or t
  misc_feature (468)..(468): n is a, c, g, or t
  misc_feature (470)..(470): n is a, c, g, or t
  misc_feature (478)..(478): n is a, c, g, or t
  misc_feature (484)..(485): n is a, c, g, or t
  misc_feature (487)..(487): n is a, c, g, or t
  misc_feature (499)..(499): n is a, c, g, or t
  misc_feature (506)..(506): n is a, c, g, or t
  misc_feature (510)..(512): n is a, c, g, or t
  misc_feature (515)..(515): n is a, c, g, or t
  misc_feature (518)..(518): n is a, c, g, or t
  misc_feature (528)..(528): n is a, c, g, or t
  misc_feature (532)..(532): n is a, c, g, or t
  misc_feature (537)..(537): n is a, c, g, or t
  misc_feature (541)..(541): n is a, c, g, or t
  misc_feature (546)..(546): n is a, c, g, or t
  misc_feature (553)..(553): n is a, c, g, or t
  misc_feature (556)..(556): n is a, c, g, or t
  misc_feature (561)..(561): n is a, c, g, or t
  misc_feature (563)..(563): n is a, c, g, or t
  misc_feature (571)..(571): n is a, c, g, or t
  misc_feature (578)..(578): n is a, c, g, or t
  misc_feature (595)..(595): n is a, c, g, or t
  misc_feature (597)..(597): n is a, c, g, or t
  misc_feature (607)..(607): n is a, c, g, or t
  misc_feature (619)..(619): n is a, c, g, or t
  misc_feature (625)..(625): n is a, c, g, or t
  misc_feature (629)..(629): n is a, c, g, or t
  misc_feature (632)..(632): n is a, c, g, or t
  misc_feature (635)..(635): n is a, c, g, or t
  misc_feature (638)..(638): n is a, c, g, or t
  misc_feature (644)..(644): n is a, c, g, or t
  misc_feature (646)..(646): n is a, c, g, or t
  misc_feature (650)..(650): n is a, c, g, or t
  misc_feature (652)..(652): n is a, c, g, or t
  misc_feature (658)..(658): n is a, c, g, or t
  misc_feature (663)..(663): n is a, c, g, or t
  misc_feature (670)..(670): n is a, c, g, or t
  misc_feature (682)..(682): n is a, c, g, or t
  misc_feature (690)..(690): n is a, c, g, or t
  misc_feature (695)..(695): n is a, c, g, or t
  misc_feature (698)..(698): n is a, c, g, or t
  misc_feature (702)..(702): n is a, c, g, or t
  misc_feature (704)..(704): n is a, c, g, or t
  misc_feature (712)..(713): n is a, c, g, or t
  misc_feature (720)..(720): n is a, c, g, or t
  misc_feature (729)..(729): n is a, c, g, or t
  misc_feature (735)..(735): n is a, c, g, or t
  misc_feature (738)..(739): n is a, c, g, or t
  misc_feature (741)..(741): n is a, c, g, or t
  misc_feature (744)..(744): n is a, c, g, or t
  misc_feature (746)..(746): n is a, c, g, or t
  misc_feature (750)..(750): n is a, c, g, or t
  misc_feature (755)..(755): n is a, c, g, or t
  misc_feature (758)..(758): n is a, c, g, or t
  misc_feature (762)..(762): n is a, c, g, or t
  misc_feature (767)..(768): n is a, c, g, or t
  misc_feature (772)..(772): n is a, c, g, or t
  misc_feature (809)..(809): n is a, c, g, or t
  misc_feature (817)..(817): n is a, c, g, or t
aggccctgccgcgtcaggccgctcctctcggctccgcgctccttccctcgcgcgtgggcacccgcccccgagcggtgagagcgcgtgcgcgcgcgcccttctccgtgggcgagccagccagtcccgctgcacacgctcgcagtctgtgggccctccgggaggcggcggaggtcaccgcggggagaggggcgggcgcagcatggcagcctccttacggctcctcggagctgcctccggtctccggtactggagccggcggctgcggccggcagccggcagctttgcagcggtgtgttctaggtcagtggcttcaaagactccagttggattcattggactgggcaacatggggaatccaatggcaaaaaatctcatgaaacatggctatccacttattatttatgatgtgttccctgatgcctgcaaagagtttcaagatgcaggtgaacagngnnggagcggcacgancngggaaccncacggnnanggggggaggagnggaagangaannngcngcngcccaagagnggcnggggngcangggcnccaacgnggnggacngnggagcggnggggacngggcaggcggcaaagancngcaacaacangcgggtagcgangaggangagnggnacntcngaagcnangaancntggaangaggngagggcnggacccaaaacnactgggcnaaaanccnaaanangagctcannccggggnggggcaagngacatngannanccngnaccnggagngangganggcgnncccncggcgaagaacgaggaggggggagggggaacaacacngagggcgnaggatctgggattggcacaagactctgctaccagcacaaagagcccaatccttcttggcagtctggcccatcagatctacaggatgatgtgtgcaaagggctactcaaagaaagacttctcatccgtgttccagttcctacgagaggaggagaccttctgagtgtgccctttggccacggacactgttgggaaccaaactctgtcttggagcctccttttagctcactccacaagtaaatggatttaatcaaaggtcacctatctgcttttgattgtctaggtcacagtaatccctaggatttttcaccgcttattctttttgtctttttaacaaacatattatccgaattttttttctgcaagccactgatagtctctgctaactagcttaattgacctttttacaaagtttgatccccaagcatcctcaactaaatcattgaatacttcaatcaggatattatctgctttactttacaaataaaaccaaatcttttgtcaacaggatgaaacccatcttaaaggaaagaaaaggaattggtgtgaagagagaagttagagaagggaaatgcagtgaattactatctgtgtccatcaggaagtttgtcctgttaaccaaatggttactgcactaccagggttactggtttattttccagggagctgataaagcaggagaactgttgctgcatgttttctatttggactccgtcacaatatggtaggatatccctcaccaactcccgacactcagcagacttgtttttatatttttttctttcttgtacattcttactacgtattttttgacttaagaatgacatctttagacgcatttcagagccaatgatgatatttgctttagataattattatattattataaatatagccatattattttgaattcaaataaatttctatactgg

SEQ ID NO: 443372 - DNA, 2689 bp, Homo sapiens
  misc_feature (1428)..(1428): n is a, c, g, or t
  misc_feature (1546)..(1546): n is a, c, g, or t
  misc_feature (2292)..(2292): n is a, c, g, or t
  misc_feature (2478)..(2478): n is a, c, g, or t
aggccctgccgcgtcaggccgctcctctcggctccgcgctccttccctcgcgcgtgggcacccgcccccgagcggtgagagcgcgtgcgcgcgcgcccttctccgtgggcgagccagccagtcccgctgcacacgctcgcagtctgtgggccctccgggaggcggcggaggtcaccgcggggagaggggcgggcgcagcatggcagcctccttacggctcctcggagctgcctccggtctccggtactggagccggcggctgcggccggcagccggcagctttgcagcggtgtgttctaggtcagtggcttcaaagactccagttggattcattggactgggcaacatggggaatccaatggcaaaaaatctcatgaaacatggctatccacttattatttatgatgtgttccctgatgcctgcaaagagtttcaagatgcaggtgaacaggtagtatcttccccagcagatgttgctgaaaaagctgacagaattattacaatgctgcccaccagtatcaatgcaatagaagcttattccggagcaaatgggattctaaaaaaagtgaagaagggctcattattaatagattccagcactattgatcctgcagtttcaaaagaattggccaaagaagttgagaaaatgggagcagttttcatggatgcccctgtttctggtggtgtaggagctgcacgatctgggaacctcacgtttatggtgggaggagttgaagatgaatttgctgctgcccaagagttgctggggtgcatgggctccaacgtggtgtactgtggagctgttgggactgggcagtgcaataccataaaccttgaatgacaccatgggacccatacaaagtgccactagtgatgctggaagtgctcctaagaagctgagaaaagtcatgacattacaagaaaaagttgaattgcctgatacataccatggattgaggtctgcggctgcgtttgccctccatttcaagataaacaaatccaatgtaaggaccattgtaaacaaagaaaagaatagtcatgaacccatcactgcagctactccagcaggcttgcactttttgcagaacatctttttatctcacattgaaaatgcagcttttatgtagatgcaggattgctgtagaaaggcatacttacatctaatatgattcaagaaaaatatgacaacttaaagcaaaaagaaagtgaaggatctaaagctggagaatttaatgccagcaaaggatggtttgataattttaggaagaggtttgcttaaaaaatgtcaagaaataggcgaagtagcttctgccaaccaagagacagcagacagttcccaggcgccattaagaaaaaatcattgaagagaaagtatatctgcctgaatgagtttttaatgcagacagaagtgccctattacggagaaanaaaaaaaaaaaggatgctcgaaggacatttattaggaagagaagcaagcagcaccaggatttaaggcaggaaaggataggctaactctactgttttgtacaaatgcagttgggttganaatcaggactgcccttatctataaagttgctaacttctgaggctttaagtgaaaagataaataccagctgcctgtcttttggttgtacagcaagaaggcctggacgatgagaaccctgtttctggattgtttccatcaatggctttgtctctggagtcaggcaatatcttgccagtaagggactgacttttaaagttattttgatattggacagtacccctggccacccagaataacatgagttcaacactgaaggtgtccaaggggccaacttgcccctaaacataacgcccctaattcagcctctagagtaggggatcataaggacctttaaggctcattacacatggtactctatgggaaggattgtcactgtggaagaaaaccctgatagaacatgaaaatctggaaagattacaccattgaagatgccattgttattgtggaaaacgccttgaaggccatcaagcccctaacagtaaattcctgctggaaaaaactgtccagatgttgtgcaagacttcacaggatttatggcagggccaatcaaggaaatcactaaagagattgtgcatatggcaaaaaaggtggggagtgtatgaaggctttcaagatatggatcttggattaattcaagagctaatagacaccacagcagagtaattaacagaagaggcttgatggagatgagtgcttctgaacagtaccagatgatgaggaagaagatgtaccaaaagcagtgccangaaacaaattgacattagacagtatggcagaacggttctgattattcaagactcctttcaacttcttttacaacatggacccttctctgatacagacactgaaaataaagcaaacagtggaagacggattggtaccatacaaaaacgtttttagagaaatgaaagagcaaaaacatcagatagaanttacaatttccataaagttatccggagtgtgcctgccccttctgcctccccttctaccacctccacctcttctgcctctgtcaccccgagacagcgaagagcaacccctcctcttcctcctcagcctactcattattaagatgatgggattgaagacctttatgatgatccacttccacttaatgaataataaatatattttatcttcctt

SEQ ID NO: 443373 - DNA, 1005 bp, Homo sapiens
ccatatacggtctatgagccgtgttatcggagagggcgggcgcggcgaggttcagctccgggaagtaacgtcccagggatggaagtgcttggatgcggtgctgctggctgcggatgtgcgcaaggagatgggatggagagcctgagttggcattcgtataaatgacctgcctggctcccaccatgagtgctgagcttaacgtgcctatcgacccctctgctcctgcctgccctgagcccggccataagggcatggattaccgggactgggtccgccgcagctacctggaactggtcacctctaaccaccactcggtacaggccctgtcgtggcggaagctctacctgagcagggccaagctgaaggcctccagcaggacctccgccctcctctccggctttgccatggtggccatggtggaggtgcagctggagacgcagtaccagtacccgcggccgctgctgattgccttcagcgcctgcaccacggtgctggtggccgtgcacctgttcgccctcctcatcagcacctgcatcctgcccaatgtggaggccgtgagcaacatccacaacctgaactccatcagcgagtccccgcatgagcgcatgcacccctacatcgagctggcctggggcttctccaccgtgcttggcatcctactcttcctggccgaggtggtgctgctctgctggatcaagttcctcccccggtggggatttgcccctggggcgccactgccttggtggcccccccctaatccttggggcccctttgcggcacgtccagcactcggggcttgggtcaatgggccatcgccccttgggtgttgttcgcgcccagatccattccatttggttgcgcgcgtgtggaggtcttccatctctttcgcgggggggctcttcacacgcgtacgtcacagttgtgtaagcacgggttccccatagtgtgcctgccacgaaagatactgggtgtagcgctacacacccgtccgagattttgtcgggg

SEQ ID NO: 443374 - DNA, 509 bp, Homo sapiens
ttgtctcccctggtttgtgaagtgcggaaaaccagaggcgcagtcatgtcgggattcgacgatcctggcattttctacagcgacagcttcgggggcgacgcccaggccgacgaggggcaggcccgcaaatcgcagctgcagaggcgcttcaaggagttcctgcggcagtaccgagtgggcaccgaccgcacgggcttcaccttcaaatacagggatgaactcaagcggcattacaacctgggggagtactggattgaggtggagatggaggatctggccagctttgatgaggacctggccgactacttgtacaagcagccagccgcagctacctggaactggtcacctctaaccaccactcggtacaggccctgtcgtggcggaagctctacctgagcagggccaagctgaaggcctccagcaggacctccgccctcctctccggctttgccatggtgccatggtggaggtgcagctggagacgcagacgcgctaatggtacgagctga

SEQ ID NO: 443375 - DNA, 5359 bp, Homo sapiens
ggcgccccggccgggccactgggccacaggccacgcggccacgcagtccgagcgggagccgagccgggcggggcgagggcagctccgcctggctcccaccatgagtgctgagcttaacgtgcctatcgacccctctgctcctgcctgccctgagcccggccataagggcatggattaccgggactgggtccgccgcagctacctggaactggtcacctctaaccaccactcggtacaggccctgtcgtggcggaagctctacctgagcagggccaagctgaaggcctccagcaggacctccgccctcctctccggctttgccatggtggccatggtggaggtgcagctggagacgcagtaccagtacccgcggccgctgctgattgccttcagcgcctgcaccacggtgctggtggccgtgcacctgttcgccctcctcatcagcacctgcatcctgcccaatgtggaggccgtgagcaacatccacaacctgaactccatcagcgagtccccgcatgagcgcatgcacccctacatcgagctggcctggggcttctccaccgtgcttggcatcctactcttcctggccgaggtggtgctgctctgctggatcaagttcctccccgtggatgcccggcgccagcctggccccccacctggccctgggagtcacacgggctggcaggccgccctggtgtccaccatcatcatggtgcccgtgggcctcatcttcgtggtcttcaccatccacttctaccgctccctggtgcgccacaaaacggagcgccacaaccgcgagatcgaggagctccacaagctcaaggtccagctggacgggcatgagcgcagcctgcaggtcttgtgaggggccgagggccggggctgggagcggccctgtgcccgggagtccgcagaggcggggatttgtcagatgcagacattttgcaaggctgccgggtagttcaagaccaaagttttcctcttgtcttaataccataaggactggatgacttctcctgagatagaaccgtttggttcaatgagggactgtgttgctaagagcgttgggggcaaagccaggctggttccttggcctcggggtttcctgggtcggggacacggtgaagaggctccagcgggacctgcccatcagtcctgggccaggaggggctccaagcagcacccagcggtccgggggagtctcagacccggcatgcgtggctggcagacctgggagagccagggcagggttttgcgttcagagaaggattgccccagagacccgtggtggacttcatgggtgctgagtggcccgtgtgacagtgatgacacgaaggcttcggcgtttgagtgggtgcaggtgcacgccagggcttggtgcttccctgcctggccctggagggagctgggtggcctggcttcaggggaagacaggagccaggacacacgtcagcccagcaggtgtggggggtgctgcagccctcggcagtggggtcaggccctgggggatgtttccaatggtgggcagcctggccaggccggagaagacatgttcacgggcatctatcagatgcccccttgaggaggctgagttatttgagggctgctgcaaagtacgctaggctcaaattctcttttcccagccagagccctggccacacggactcagaggggccaccggggtggggaaaggacccctccccgaccccccgcagccactggcctccagctctcggccacagaatggcctctaaggctgactcagccgctcccttgggctgtggcagcaggaggcgggggctctggctcaggccccggagcctgtgcagcttgcccatggccctaggcagcgaggggacagcctgggggacttcctgcctaggcaaggtcattggccgggcctggcctgtggatagtggggccaggggccggcccaggccaaatgagtgccctccttgttatgacaccaagtgactacaagggaggcaagacccctccaggcctctcagccgacactgggtcccaccacacacagtgactgtgccgtgcagtgcaggttctggccttttccttgaaggcatctggtagacccgaagccacgctctcgggccgcacatgcacgccgcagcaccagctgccctgagctgcttgtacaaccaaacacctttcccctcttctccagctgtaacctggagagtcagccatgccttgtcttttgttctcataaatagtcactggggccgggcgcagtgactcacgcctgtaatcccagcactttgggaggcctaggtgggcggatcacttgaggtcaggagttcgagaccagcctggccaacatggtgaaaccctgtctctactaaaaaaatacagaaaattagctgggcgtggtggcgggcgcctgtagccccagctacttgggaggctgaggcgggagaatggcaatggcgtgaacccgggaggcagagcttgcagtgagctgagatggcgccactgcactccagcctgggcgacagagccagactcaatctcaaaaaagcaagagaatcacttgaacccaggaggcagaggttgcagtgagctgagatcacgccattgcactacagcctgggcaacaagagcgaaactttgtctaaaaaaaaaaaaaatcactgggcttcttcatgctctgatcacatctctcgtaaaagcttaagctctctccggggtccgggttggccgtgccgtggaattctgggtggcctggctggggtctctggaaatgtggctgcagcagagaacagagaccctgacatgcagttttccgtgctgaggggccctaggggagtcacaccaagggtccccacgagaaagttgtggcatccccgggggccggagaagagccccgtgtcttctgaggagttcgtcctttgtgtcccctgcagacatttgtctgcgacctttgccctccagcatgtatgtactttcctgcagcctgtagaaacgcctcttacggtttaatatgtgttcgctttgctaaagaatatcaacatcggccaggcgaggtggggcacgcctgtcatcccagcactttgggaggctgaggtgggaggatcacttgggcccaggggtgcaagaccagcctgggcaacatagcgagaccccatgtctaaaaaaattattttaaattagccaggccgggtgcaatggctcgcgcccgtaatcttagcactctgggaggccgaggcaggcagatcacttgagatcaggactttaagaccagcctcggcaacaacatggtgaaaccatctctagcaaaaatacaaaaaattagccgggtatggtggcgggtacctgtaatcccagctactcaggaggctgaggcaagagaatcgcttgaacgcaggaggcagaggttgcagtgagctgagatcgtgccactgcactccagcctggacaacagagcaaaactctgtctcaaaaaataataaataaaaataaattagctgggcgtggtggtgcatgcctgtagttccagctacttgggaggctgaggtgggaggattgcttgagcctgggaagtagaggctgcagtgaactataactgtgctagtggccgggcgcagtggctcacgcctgtaatcccagcactttgggaggccaaagcaggtggatcacttgaggtcaggagttcgagaccagcctggccaacatggtgaaactctgtgtctactaaaaatacaaaaaattagctgggtgtggtggcgctcgcctgtagtcccagctacttgggaggctgaggcaggagaatcacttgaacccagaaggcagaggtagcagtgagccaagatggtgccactgcactccagcctgggcgacagagggtgactcctcaaaaaaaagaaaaatagctaaaatatgattgtaccactgcactccagcctgggtgacagagtgagaccctgtctctaaaaaaaaaaaaaagaaaataaagaaaaaagaatgtcagcatgtcagcgttcctccaaggagtggctttgggtcagaagacaggctggctctcctaaacaaacggctccccacggctgggagaggcagcaggcccttactctggcctgagtcttttgggaggggccctgctgggccttctcctgccacctaccttcctggaccatctgtgcccctgcccacgcagtaccacactccccagactgtggaacgcatctccagtgccatctgggggccagttactgtacctggtccccaggcagagctcttggcctggcagcatccaggcaggtattaagtgcccagtgatggtggcacatgggtggggacggagccacatccaagtctagccctctgattaggaggatgacagtcttggaatttcttgttctctttctcctagggttctcgttctcccagctccagcctttctagtttcgaggcatgaggcaaaccattgctgtgggaatagcagtgaccattggtagggccatggtggccgggagaggaaacctcagggtcaccccagagcctgtggggagacggagggtgagctgttgttggagctgcagaaacgccttgaagggcagcatgggcgatgaggaatgccattgcagcctagaaattcggtttctggaggtttagcctgattttgaagagtatttaagaacagagggctccagaccaggtgtggtggctcacatctgtaatcccagcactttgggaggcagaggtgggcggatcgcctgagatcaggagttcgagaccagcctggcccacatggtgaaaccctgtctctactaaaaatacaaaaattagccgggcgtagtgacacacgcctgtaatcccagctgctcgggaggcagaggcaggagaatggcgtgaacccgggaggcggaggttgcagtgagccgagatcacgccactgcactccagcctgggtaacagagcaagactctgtctcaaaaaaaaaaaaaaaagaacaggggcctctgcctcagtttgcccgggagccagccagggcccatcctaatttggagcacagtcttcccggtgcctagacatgccaaggcccctcccacgtggtacaccctctccgtttagtacctgaccacctgtttcaaaacgcaggtgtttctggtttagaaacttggaaggcggaatgtgttttcgtgtcttctaggaagggtctgctgaggaccagaccacgtaagcctgagtggatcctgactcagctgcagcccttacctgcctcgtgctgatgatctatgcatggcgttatgtagatcacgtgcggcagagacagccactgtcctgtgtgcgggtttttaaaacagctgccctggatgaaacggaataaaccagtgatgctaaa

SEQ ID NO: 443376 - DNA, 4972 bp, Homo sapiens
ggcgccccggccgggccactgggccacaggccacgcggccacgcagtccgagcgggagccgagccgggcggggcgagggcagctccgcctggctcccaccatgagtgctgagcttaacgtgcctatcgacccctctgctcctgcctgccctgagcccggccataagggcatggattaccgggactgggtccgccgcagctacctggaactggtcacctctaaccaccactcggtacaggccctgtcgtggcggaagctctacctgagcagggccaagctgaaggcctccagcaggacctccgccctcctctccggctttgccatggtggccatggtggaggtgcagctggagacgcagtaccagtacccgcggccgctgctgattgccttcagcgcctgcaccacggtgctggtggccgtgcacctgttcgccctcctcatcagcacctgcatcctgcccaatgtggaggccgtgagcaacatccacaacctgaactccatcagcgagtccccgcatgagcgcatgcacccctacatcgagctggcctggggcttctccaccgtgcttggcatcctactcttcctggccgaggtggtgctgctctgctggatcaagttcctccccgtggatgcccggcgccagcctggccccccacctggccctgggagtcacacgggctggcaggccgccctggtgtccaccatcatcatggtgcccgtgggcctcatcttcgtggtcttcaccatccacttctaccgctccctggtgcgccacaaaacggagcgccacaaccgcgagatcgaggagctccacaagctcaaggtccagctggacgggcatgagcgcagcctgcaggtcttgtgaggggccgagggccggggctgggagcggccctgtgcccgggagtccgcagaggcggggatttgtcagatgcagacattttgcaaggctgccgggtagttcaagaccaaagttttcctcttgtcttaataccataaggactggatgacttctcctgagatagaaccgtttggttcaatgagggactgtgttgctaagagcgttgggggcaaagccaggctggttccttggcctcggggtttcctgggtcggggacacggtgaagaggctccagcgggacctgcccatcagtcctgggccaggaggggctccaagcagcacccagcggtccgggggagtctcagacccggcatgcgtggctggcagacctgggagagccagggcagggttttgcgttcagagaaggattgccccagagacccgtggtggacttcatgggtgctgagtggcccgtgtgacagtgatgacacgaaggcttcggcgtttgagtgggtgcaggtgcacgccagggcttggtgcttccctgcctggccctggagggagctgggtggcctggcttcaggggaagacaggagccaggacacacgtcagcccagcaggtgtggggggtgctgcagccctcggcagtggggtcaggccctgggggatgtttccaatggtgggcagcctggccaggccggagaagacatgttcacgggcatctatcagatgcccccttgaggaggctgagttatttgagggctgctgcaaagtacgctaggctcaaattctcttttcccagccagagccctggccacacggactcagaggggccaccggggtggggaaaggacccctccccgaccccccgcagccactggcctccagctctcggccacagaatggcctctaaggctgactcagccgctcccttgggctgtggcagcaggaggcgggggctctggctcaggccccggagcctgtgcagcttgcccatggccctaggcagcgaggggacagcctgggggacttcctgcctaggcaaggtcattggccgggcctggcctgtggatagtggggccaggggccggcccaggccaaatgagtgccctccttgttatgacaccaagtgactacaagggaggcaagacccctccaggcctctcagccgacactgggtcccaccacacacagtgactgtgccgtgcagtgcaggttctggccttttccttgaaggcatctggtagacccgaagccacgctctcgggccgcacatgcacgccgcagcaccagctgccctgagctgcttgtacaaccaaacacctttcccctcttctccagctgtaacctggagagtcagccatgccttgtcttttgttctcataaatagtcactggggccgggcgcagtgactcacgcctgtaatcccagcactttgggaggcctaggtgggcggatcacttgaggtcaggagttcgagaccagcctggccaacatggtgaaaccctgtctctactaaaaaaatacagaaaattagctgggcgtggtggcgggcgcctgtagccccagctacttgggaggctgaggcgggagaatggcaatggcgtgaacccgggaggcagagcttgcagtgagctgagatggcgccactgcactccagcctgggcgacagagccagactcaatctcaaaaaaaaaaaaaaaattagccgggcgtgatggcgggcacctgtagtcccagctactcaggaggctgaggcaagagaatcacttgaacccaggaggcagaggttgcagtgagctgagatcacgccattgcactacagcctgggcaacaagagcgaaactttgtctaaaaaaaaaaaaaatcactgggcttcttcatgctctgatcacatctctcgtaaaagcttaagctctctccggggtccgggttggccgtgccgtggaattctgggtggcctggctggggtctctggaaatgtggctgcagcagagaacagagaccctgacatgcagttttccgtgctgaggggccctaggggagtcacaccaagggtccccacgagaaagttgtggcatccccgggggccggagaagagccccgtgtcttctgaggagttcgtcctttgtgtcccctgcagacatttgtctgcgacctttgccctccagcatgtatgtactttcctgcagcctgtagaaacgcctcttacggtttaatatgtgttcgctttgctaaagaatatcaacatcggccaggcgaggtggggcacgcctgtcatcccagcactttgggaggctgaggtgggaggattgcttgagcctgggaagtagaggctgcagtgaactataactgtgctagtggccgggcgcagtggctcacgcctgtaatcccagcactttgggaggccaaagcaggtggatcacttgaggtcaggagttcgagaccagcctggccaacatggtgaaactctgtgtctactaaaaatacaaaaaattagctgggtgtggtggcgctcgcctgtagtcccagctacttgggaggctgaggcaggagaatcacttgaacccagaaggcagaggtagcagtgagccaagatggtgccactgcactccagcctgggcgacagagggtgactcctcaaaaaaaagaaaaatagctaaaatatgattgtaccactgcactccagcctgggtgacagagtgagaccctgtctctaaaaaaaaaaaaaagaaaataaagaaaaaagaatgtcagcatgtcagcgttcctccaaggagtggctttgggtcagaagacaggctggctctcctaaacaaacggctccccacggctgggagaggcagcaggcccttactctggcctgagtcttttgggaggggccctgctgggccttctcctgccacctaccttcctggaccatctgtgcccctgcccacgcagtaccacactccccagactgtggaacgcatctccagtgccatctgggggccagttactgtacctggtccccaggcagagctcttggcctggcagcatccaggcaggtattaagtgcccagtgatggtggcacatgggtggggacggagccacatccaagtctagccctctgattaggaggatgacagtcttggaatttcttgttctctttctcctagggttctcgttctcccagctccagcctttctagtttcgaggcatgaggcaaaccattgctgtgggaatagcagtgaccattggtagggccatggtggccgggagaggaaacctcagggtcaccccagagcctgtggggagacggagggtgagctgttgttggagctgcagaaacgccttgaagggcagcatgggcgatgaggaatgccattgcagcctagaaattcggtttctggaggtttagcctgattttgaagagtatttaagaacagagggctccagaccaggtgtggtggctcacatctgtaatcccagcactttgggaggcagaggtgggcggatcgcctgagatcaggagttcgagaccagcctggcccacatggtgaaaccctgtctctactaaaaatacaaaaattagccgggcgtagtgacacacgcctgtaatcccagctgctcgggaggcagaggcaggagaatggcgtgaacccgggaggcggaggttgcagtgagccgagatcacgccactgcactccagcctgggtaacagagcaagactctgtctcaaaaaaaaaaaaaaaagaacaggggcctctgcctcagtttgcccgggagccagccagggcccatcctaatttggagcacagtcttcccggtgcctagacatgccaaggcccctcccacgtggtacaccctctccgtttagtacctgaccacctgtttcaaaacgcaggtgtttctggtttagaaacttggaaggcggaatgtgttttcgtgtcttctaggaagggtctgctgaggaccagaccacgtaagcctgagtggatcctgactcagctgcagcccttacctgcctcgtgctgatgatctatgcatggcgttatgtagatcacgtgcggcagagacagccactgtcctgtgtgcgggtttttaaaacagctgccctggatgaaacggaataaaccagtgatgctaaa

SEQ ID NO: 443377 - DNA, 5531 bp, Homo sapiens
ggcgccccggccgggccactgggccacaggccacgcggccacgcagtccgagcgggagccgagccgggcggggcgagggcagctccgggaagtaacgtcccagggatggaagtgcttggatgcggtgctgctggctgcggatgtgcgcaaggagatgggatggagagcctgagttggcattcgtataaatgacctgcctggctcccaccatgagtgctgagcttaacgtgcctatcgacccctctgctcctgcctgccctgagcccggccataagggcatggattaccgggactgggtccgccgcagctacctggaactggtcacctctaaccaccactcggtacaggccctgtcgtggcggaagctctacctgagcagggccaagctgaaggcctccagcaggacctccgccctcctctccggctttgccatggtggccatggtggaggtgcagctggagacgcagtaccagtacccgcggccgctgctgattgccttcagcgcctgcaccacggtgctggtggccgtgcacctgttcgccctcctcatcagcacctgcatcctgcccaatgtggaggccgtgagcaacatccacaacctgaactccatcagcgagtccccgcatgagcgcatgcacccctacatcgagctggcctggggcttctccaccgtgcttggcatcctactcttcctggccgaggtggtgctgctctgctggatcaagttcctccccgtggatgcccggcgccagcctggccccccacctggccctgggagtcacacgggctggcaggccgccctggtgtccaccatcatcatggtgcccgtgggcctcatcttcgtggtcttcaccatccacttctaccgctccctggtgcgccacaaaacggagcgccacaaccgcgagatcgaggagctccacaagctcaaggtccagctggacgggcatgagcgcagcctgcaggtcttgtgaggggccgagggccggggctgggagcggccctgtgcccgggagtccgcagaggcggggatttgtcagatgcagacattttgcaaggctgccgggtagttcaagaccaaagttttcctcttgtcttaataccataaggactggatgacttctcctgagatagaaccgtttggttcaatgagggactgtgttgctaagagcgttgggggcaaagccaggctggttccttggcctcggggtttcctgggtcggggacacggtgaagaggctccagcgggacctgcccatcagtcctgggccaggaggggctccaagcagcacccagcggtccgggggagtctcagacccggcatgcgtggctggcagacctgggagagccagggcagggttttgcgttcagagaaggattgccccagagacccgtggtggacttcatgggtgctgagtggcccgtgtgacagtgatgacacgaaggcttcggcgtttgagtgggtgcaggtgcacgccagggcttggtgcttccctgcctggccctggagggagctgggtggcctggcttcaggggaagacaggagccaggacacacgtcagcccagcaggtgtggggggtgctgcagccctcggcagtggggtcaggccctgggggatgtttccaatggtgggcagcctggccaggccggagaagacatgttcacgggcatctatcagatgcccccttgaggaggctgagttatttgagggctgctgcaaagtacgctaggctcaaattctcttttcccagccagagccctggccacacggactcagaggggccaccggggtggggaaaggacccctccccgaccccccgcagccactggcctccagctctcggccacagaatggcctctaaggctgactcagccgctcccttgggctgtggcagcaggaggcgggggctctggctcaggccccggagcctgtgcagcttgcccatggccctaggcagcgaggggacagcctgggggacttcctgcctaggcaaggtcattggccgggcctggcctgtggatagtggggccaggggccggcccaggccaaatgagtgccctccttgttatgacaccaagtgactacaagggaggcaagacccctccaggcctctcagccgacactgggtcccaccacacacagtgactgtgccgtgcagtgcaggttctggccttttccttgaaggcatctggtagacccgaagccacgctctcgggccgcacatgcacgccgcagcaccagctgccctgagctgcttgtacaaccaaacacctttcccctcttctccagctgtaacctggagagtcagccatgccttgtcttttgttctcataaatagtcactggggccgggcgcagtgactcacgcctgtaatcccagcactttgggaggcctaggtgggcggatcacttgaggtcaggagttcgagaccagcctggccaacatggtgaaaccctgtctctactaaaaaaatacagaaaattagctgggcgtggtggcgggcgcctgtagccccagctacttgggaggctgaggcgggagaatggcaatggcgtgaacccgggaggcagagcttgcagtgagctgagatggcgccactgcactccagcctgggcgacagagccagactcaatctcaaaaaaaaaaaaaaaattagccgggcgtgatggcgggcacctgtagtcccagctactcaggaggctgaggcaagagaatcacttgaacccaggaggcagaggttgcagtgagctgagatcacgccattgcactacagcctgggcaacaagagcgaaactttgtctaaaaaaaaaaaaaatcactgggcttcttcatgctctgatcacatctctcgtaaaagcttaagctctctccggggtccgggttggccgtgccgtggaattctgggtggcctggctggggtctctggaaatgtggctgcagcagagaacagagaccctgacatgcagttttccgtgctgaggggccctaggggagtcacaccaagggtccccacgagaaagttgtggcatccccgggggccggagaagagccccgtgtcttctgaggagttcgtcctttgtgtcccctgcagacatttgtctgcgacctttgccctccagcatgtatgtactttcctgcagcctgtagaaacgcctcttacggtttaatatgtgttcgctttgctaaagaatatcaacatcggccaggcgaggtggggcacgcctgtcatcccagcactttgggaggctgaggtgggaggatcacttgggcccaggggtgcaagaccagcctgggcaacatagcgagaccccatgtctaaaaaaattattttaaattagccaggccgggtgcaatggctcgcgcccgtaatcttagcactctgggaggccgaggcaggcagatcacttgagatcaggactttaagaccagcctcggcaacaacatggtgaaaccatctctagcaaaaatacaaaaaattagccgggtatggtggcgggtacctgtaatcccagctactcaggaggctgaggcaagagaatcgcttgaacgcaggaggcagaggttgcagtgagctgagatcgtgccactgcactccagcctggacaacagagcaaaactctgtctcaaaaaataataaataaaaataaattagctgggcgtggtggtgcatgcctgtagttccagctacttgggaggctgaggtgggaggattgcttgagcctgggaagtagaggctgcagtgaactataactgtgctagtggccgggcgcagtggctcacgcctgtaatcccagcactttgggaggccaaagcaggtggatcacttgaggtcaggagttcgagaccagcctggccaacatggtgaaactctgtgtctactaaaaatacaaaaaattagctgggtgtggtggcgctcgcctgtagtcccagctacttgggaggctgaggcaggagaatcacttgaacccagaaggcagaggtagcagtgagccaagatggtgccactgcactccagcctgggcgacagagggtgactcctcaaaaaaaagaaaaatagctaaaatatgattgtaccactgcactccagcctgggtgacagagtgagaccctgtctctaaaaaaaaaaaaaagaaaataaagaaaaaagaatgtcagcatgtcagcgttcctccaaggagtggctttgggtcagaagacaggctggctctcctaaacaaacggctccccacggctgggagaggcagcaggcccttactctggcctgagtcttttgggaggggccctgctgggccttctcctgccacctaccttcctggaccatctgtgcccctgcccacgcagtaccacactccccagactgtggaacgcatctccagtgccatctgggggccagttactgtacctggtccccaggcagagctcttggcctggcagcatccaggcaggtattaagtgcccagtgatggtggcacatgggtggggacggagccacatccaagtctagccctctgattaggaggatgacagtcttggaatttcttgttctctttctcctagggttctcgttctcccagctccagcctttctagtttcgaggcatgaggcaaaccattgctgtgggaatagcagtgaccattggtagggccatggtggccgggagaggaaacctcagggtcaccccagagcctgtggggagacggagggtgagctgttgttggagctgcagaaacgccttgaagggcagcatgggcgatgaggaatgccattgcagcctagaaattcggtttctggaggtttagcctgattttgaagagtatttaagaacagagggctccagaccaggtgtggtggctcacatctgtaatcccagcactttgggaggcagaggtgggcggatcgcctgagatcaggagttcgagaccagcctggcccacatggtgaaaccctgtctctactaaaaatacaaaaattagccgggcgtagtgacacacgcctgtaatcccagctgctcgggaggcagaggcaggagaatggcgtgaacccgggaggcggaggttgcagtgagccgagatcacgccactgcactccagcctgggtaacagagcaagactctgtctcaaaaaaaaaaaaaaaagaacaggggcctctgcctcagtttgcccgggagccagccagggcccatcctaatttggagcacagtcttcccggtgcctagacatgccaaggcccctcccacgtggtacaccctctccgtttagtacctgaccacctgtttcaaaacgcaggtgtttctggtttagaaacttggaaggcggaatgtgttttcgtgtcttctaggaagggtctgctgaggaccagaccacgtaagcctgagtggatcctgactcagctgcagcccttacctgcctcgtgctgatgatctatgcatggcgttatgtagatcacgtgcggcagagacagccactgtcctgtgtgcgggtttttaaaacagctgccctggatgaaacggaataaaccagtgatgctaaa

SEQ ID NO: 443378 - DNA, 5004 bp, Homo sapiens
ggcgccccggccgggccactgggccacaggccacgcggccacgcagtccgagcgggagccgagccgggcggggcgagggcagctccgcctggctcccaccatgagtgctgagcttaacgtgcctatcgacccctctgctcctgcctgccctgagcccggccataagggcatggattaccgggactgggtccgccgcagctacctggaactggtcacctctaaccaccactcggtacaggccctgtcgtggcggaagctctacctgagcagggccaagctgaaggcctccagcaggacctccgccctcctctccggctttgccatggtggccatggtggaggtgcagctggagacgcagtaccagtacccgcggccgctgctgattgccttcagcgcctgcaccacggtgctggtggccgtgcacctgttcgccctcctcatcagcacctgcatcctgcccaatgtggaggccgtgagcaacatccacaacctgaactccatcagcgagtccccgcatgagcgcatgcacccctacatcgagctggcctggggcttctccaccgtgcttggcatcctactcttcctggccgaggtggtgctgctctgctggatcaagttcctccccgtggatgcccggcgccagcctggccccccacctggccctgggagtcacacgggctggcaggccgccctggtgtccaccatcatcatggtgcccgtgggcctcatcttcgtggtcttcaccatccacttctaccgctccctggtgcgccacaaaacggagcgccacaaccgcgagatcgaggagctccacaagctcaaggtccagctggacgggcatgagcgcagcctgcaggtcttgtgaggggccgagggccggggctgggagcggccctgtgcccgggagtccgcagaggcggggatttgtcagatgcagacattttgcaaggctgccgggtagttcaagaccaaagttttcctcttgtcttaataccataaggactggatgacttctcctgagatagaaccgtttggttcaatgagggactgtgttgctaagagcgttgggggcaaagccaggctggttccttggcctcggggtttcctgggtcggggacacggtgaagaggctccagcgggacctgcccatcagtcctgggccaggaggggctccaagcagcacccagcggtccgggggagtctcagacccggcatgcgtggctggcagacctgggagagccagggcagggttttgcgttcagagaaggattgccccagagacccgtggtggacttcatgggtgctgagtggcccgtgtgacagtgatgacacgaaggcttcggcgtttgagtgggtgcaggtgcacgccagggcttggtgcttccctgcctggccctggagggagctgggtggcctggcttcaggggaagacaggagccaggacacacgtcagcccagcaggtgtggggggtgctgcagccctcggcagtggggtcaggccctgggggatgtttccaatggtgggcagcctggccaggccggagaagacatgttcacgggcatctatcagatgcccccttgaggaggctgagttatttgagggctgctgcaaagtacgctaggctcaaattctcttttcccagccagagccctggccacacggactcagaggggccaccggggtggggaaaggacccctccccgaccccccgcagccactggcctccagctctcggccacagaatggcctctaaggctgactcagccgctcccttgggctgtggcagcaggaggcgggggctctggctcaggccccggagcctgtgcagcttgcccatggccctaggcagcgaggggacagcctgggggacttcctgcctaggcaaggtcattggccgggcctggcctgtggatagtggggccaggggccggcccaggccaaatgagtgccctccttgttatgacaccaagtgactacaagggaggcaagacccctccaggcctctcagccgacactgggtcccaccacacacagtgactgtgccgtgcagtgcaggttctggccttttccttgaaggcatctggtagacccgaagccacgctctcgggccgcacatgcacgccgcagcaccagctgccctgagctgcttgtacaaccaaacacctttcccctcttctccagctgtaacctggagagtcagccatgccttgtcttttgttctcataaatagtcactggggccgggcgcagtgactcacgcctgtaatcccagcactttgggaggcctaggtgggcggatcacttgaggtcaggagttcgagaccagcctggccaacatggtgaaaccctgtctctactaaaaaaatacagaaaattagctgggcgtggtggcgggcgcctgtagccccagctacttgggaggctgaggcgggagaatggcaatggcgtgaacccgggaggcagagcttgcagtgagctgagatggcgccactgcactccagcctgggcgacagagccagactcaatctcaaaaaaaaaaaaaaaattagccgggcgtgatggcgggcacctgtagtcccagctactcaggaggctgaggcaagagaatcacttgaacccaggaggcagaggttgcagtgagctgagatcacgccattgcactacagcctgggcaacaagagcgaaactttgtctaaaaaaaaaaaaaatcactgggcttcttcatgctctgatcacatctctcgtaaaagcttaagctctctccggggtccgggttggccgtgccgtggaattctgggtggcctggctggggtctctggaaatgtggctgcagcagagaacagagaccctgacatgcagttttccgtgctgaggggccctaggggagtcacaccaagggtccccacgagaaagttgtggcatccccgggggccggagaagagccccgtgtcttctgaggagttcgtcctttgtgtcccctgcagacatttgtctgcgacctttgccctccagcatgtatgtactttcctgcagcctgtagaaacgcctcttacggtttaatatgtgttcgctttgctaaagaatatcaacatcggccaggcgaggtggggcacgcctgtcatcccagcactttgggaggctgaggtgggaggatcacttgggcccaggggtgcaagaccagcctgggcaacatagcgagaccccatgtctaaaaaaattattttaaattagccaggccgggtgcaatggctcgcgcccgtaatcttagcactctgggaggccgaggcaggcagatcacttgagatcaggactttaagaccagcctcggcaacaacatggtgaaaccatctctagcaaaaatacaaaaaattagccgggtatggtggcgggtacctgtaatcccagctactcaggaggctgaggcaagagaatcgcttgaacgcaggaggcagaggttgcagtgagctgagatcgtgccactgcactccagcctggacaacagagcaaaactctgtctcaaaaaataataaataaaaataaattagctgggcgtggtggtgcatgcctgtagttccagctacttgggaggctgaggtgggaggattgcttgagcctgggaagtagaggctgcagtgaactataactgtgctagtggccgggcgcagtggctcacgcctgtaatcccagcactttgggaggccaaagcaggtggatcacttgaggtcaggagttcgagaccagcctggccaacatggtgaaactctgtgtctactaaaaatacaaaaaattagctgggtgtggtggcgctcgcctgtagtcccagctacttgggaggctgaggcaggagaatcacttgaacccagaaggcagaggtagcagtgagccaagatggtgccactgcactccagcctgggcgacagagggtgactcctcaaaaaaaagaaaaatagctaaaatatgattgtaccactgcactccagcctgggtgacagagtgagaccctgtctctaaaaaaaaaaaaaagaaaataaagaaaaaagaatgtcagcatgtcagcgttcctccaaggagtggctttgggtcagaagacaggctggctctcctaaacaaacggctccccacggctgggagaggcagcaggcccttactctggcctgagtcttttgggaggggccctgctgggccttctcctgccacctaccttcctggaccatctgtgcccctgcccacgcagtaccacactccccagactgtggaacgcatctccagtgccatctgggggccagttactgtacctggtccccaggcagagctcttggcctggcagcatccaggcaggtattaagtgcccagtgatggtggcacatgggtggggacggagccacatccaagtctagccctctgattaggaggatgacagtcttggaatttcttgttctctttctcctagggttctcgttctcccagctccagcctttctagtttcgaggcatgaggcaaaccattgctgtgggaatagcagtgaccattggtagggccatggtggccgggagaggaaacctcagggtcaccccagagcctgtggggagacggagggtgagctgttgttggagctgcagaaacgccttgaagggcagcatgggcgatgaggaatgccattgcagcctagaaattcggtttctggaggtttagcctgattttgaagagtatttaagaacagagggctccagaccaggtgtggtggctcacatctgtaatcccagcactttgggaggcagaggtgggcggatcgcctgagatcaggagttcgagaccagcctggcccacatggtgaaaccctgtctctactaaaaatacaaggcaggagaatggcgtgaacccgggaggcggaggttgcagtgagccgagatcacgccactgcactccagcctgggtaacagagcaagactctgtctcaaaaaaaacaaatcctaccactccacaaaaaacatgtgcggtccgctt

SEQ ID NO: 443379 - DNA, 4268 bp, Homo sapiens
ggcgccccggccgggccactgggccacaggccacgcggccacgcagtccgagcgggagccgagccgggcggggcgagggcagctccgggaagtaacgtcccagggatggaagtgcttggatgcggtgctgctggctgcggatgtgcgcaaggagatgggatggagagcctgagttggcattcgtataaatgacctgcctggctcccaccatgagtgctgagcttaacgtgcctatcgacccctctgctcctgcctgccctgagcccggccataagggcatggattaccgggactgggtccgccgcagctacctggaactggtcacctctaaccaccactcggtacaggccctgtcgtggcggaagctctacctgagcagggccaagctgaaggcctccagcaggacctccgccctcctctccggctttgccatggtggccatggtggaggtgcagctggagacgcagtaccagtacccgcggccgctgctgattgccttcagcgcctgcaccacggtgctggtggccgtgcacctgttcgccctcctcatcagcacctgcatcctgcccaatgtggaggccgtgagcaacatccacaacctgaactccatcagcgagtccccgcatgagcgcatgcacccctacatcgagctggcctggggcttctccaccgtgcttggcatcctactcttcctggccgaggtggtgctgctctgctggatcaagttcctccccgtggatgcccggcgccagcctggccccccacctggccctgggagtcacacgggctggcaggccgccctggtgtccaccatcatcatggtgcccgtgggcctcatcttcgtggtcttcaccatccacttctaccgctccctggtgcgccacaaaacggagcgccacaaccgcgagatcgaggagctccacaagctcaaggtccagctggacgggcatgagcgcagcctgcaggtcttgtgaggggccgagggccggggctgggagcggccctgtgcccgggagtccgcagaggcggggatttgtcagatgcagacattttgcaaggctgccgggtagttcaagaccaaagttttcctcttgtcttaataccataaggactggatgacttctcctgagatagaaccgtttggttcaatgagggactgtgttgctaagagccctggccaacatggtgaaaccctgtctctactaaaaaaatacagaaaattagctgggcgtggtggcgggcgcctgtagccccagctacttgggaggctgaggcgggagaatggcaatggcgtgaacccgggaggcagagcttgcagtgagctgagatggcgccactgcactccagcctgggcgacagagccagactcaatctcaaaaaaaaaaaaaaaattagccgggcgtgatggcgggcacctgtagtcccagctactcaggaggctgaggcaagagaatcacttgaacccaggaggcagaggttgcagtgagctgagatcacgccattgcactacagcctgggcaacaagagcgaaactttgtctaaaaaaaaaaaaaatcactgggcttcttcatgctctgatcacatctctcgtaaaagcttaagctctctccggggtccgggttggccgtgccgtggaattctgggtggcctggctggggtctctggaaatgtggctgcagcagagaacagagaccctgacatgcagttttccgtgctgaggggccctaggggagtcacaccaagggtccccacgagaaagttgtggcatccccgggggccggagaagagccccgtgtcttctgaggagttcgtcctttgtgtcccctgcagacatttgtctgcgacctttgccctccagcatgtatgtactttcctgcagcctgtagaaacgcctcttacggtttaatatgtgttcgctttgctaaagaatatcaacatcggccaggcgaggtggggcacgcctgtcatcccagcactttgggaggctgaggtgggaggatcacttgggcccaggggtgcaagaccagcctgggcaacatagcgagaccccatgtctaaaaaaattattttaaattagccaggccgggtgcaatggctcgcgcccgtaatcttagcactctgggaggccgaggcaggcagatcacttgagatcaggactttaagaccagcctcggcaacaacatggtgaaaccatctctagcaaaaatacaaaaaattagccgggtatggtggcgggtacctgtaatcccagctactcaggaggctgaggcaagagaatcgcttgaacgcaggaggcagaggttgcagtgagctgagatcgtgccactgcactccagcctggacaacagagcaaaactctgtctcaaaaaataataaataaaaataaattagctgggcgtggtggtgcatgcctgtagttccagctacttgggaggctgaggtgggaggattgcttgagcctgggaagtagaggctgcagtgaactataactgtgctagtggccgggcgcagtggctcacgcctgtaatcccagcactttgggaggccaaagcaggtggatcacttgaggtcaggagttcgagaccagcctggccaacatggtgaaactctgtgtctactaaaaatacaaaaaattagctgggtgtggtggcgctcgcctgtagtcccagctacttgggaggctgaggcaggagaatcacttgaacccagaaggcagaggtagcagtgagccaagatggtgccactgcactccagcctgggcgacagagggtgactcctcaaaaaaaagaaaaatagctaaaatatgattgtaccactgcactccagcctgggtgacagagtgagaccctgtctctaaaaaaaaaaaaaagaaaataaagaaaaaagaatgtcagcatgtcagcgttcctccaaggagtggctttgggtcagaagacaggctggctctcctaaacaaacggctccccacggctgggagaggcagcaggcccttactctggcctgagtcttttgggaggggccctgctgggccttctcctgccacctaccttcctggaccatctgtgcccctgcccacgcagtaccacactccccagactgtggaacgcatctccagtgccatctgggggccagttactgtacctggtccccaggcagagctcttggcctggcagcatccaggcaggtattaagtgcccagtgatggtggcacatgggtggggacggagccacatccaagtctagccctctgattaggaggatgacagtcttggaatttcttgttctctttctcctagggttctcgttctcccagctccagcctttctagtttcgaggcatgaggcaaaccattgctgtgggaatagcagtgaccattggtagggccatggtggccgggagaggaaacctcagggtcaccccagagcctgtggggagacggagggtgagctgttgttggagctgcagaaacgccttgaagggcagcatgggcgatgaggaatgccattgcagcctagaaattcggtttctggaggtttagcctgattttgaagagtatttaagaacagagggctccagaccaggtgtggtggctcacatctgtaatcccagcactttgggaggcagaggtgggcggatcgcctgagatcaggagttcgagaccagcctggcccacatggtgaaaccctgtctctactaaaaatacaaaaattagccgggcgtagtgacacacgcctgtaatcccagctgctcgggaggcagaggcaggagaatggcgtgaacccgggaggcggaggttgcagtgagccgagatcacgccactgcactccagcctgggtaacagagcaagactctgtctcaaaaaaaaaaaaaaaagaacaggggcctctgcctcagtttgcccgggagccagccagggcccatcctaatttggagcacagtcttcccggtgcctagacatgccaaggcccctcccacgtggtacaccctctccgtttagtacctgaccacctgtttcaaaacgcaggtgtttctggtttagaaacttggaaggcggaatgtgttttcgtgtcttctaggaagggtctgctgaggaccagaccacgtaagcctgagtggatcctgactcagctgcagcccttacctgcctcgtgctgatgatctatgcatggcgttatgtagatcacgtgcggcagagacagccactgtcctgtgtgcgggtttttaaaacagctgccctggatgaaacggaataaaccagtgatgctaaa

SEQ ID NO: 443380 - DNA, 5422 bp, Homo sapiens
ggcgccccggccgggccactgggccacaggccacgcggccacgcagtccgagcgggagccgagccgggcggggcgagggcagctccgcctggctcccaccatgagtgctgagcttaacgtgcctatcgacccctctgctcctgcctgccctgagcccggccataagggcatggattaccgggactgggtccgccgcagctacctggaactggtcacctctaaccaccactcggtacaggccctgtcgtggcggaagctctacctgagcagggccaagctgaaggcctccagcaggacctccgccctcctctccggctttgccatggtggccatggtggaggtgcagctggagacgcagtaccagtacccgcggccgctgctgattgccttcagcgcctgcaccacggtgctggtggccgtgcacctgttcgccctcctcatcagcacctgcatcctgcccaatgtggaggccgtgagcaacatccacaacctgaactccatcagcgagtccccgcatgagcgcatgcacccctacatcgagctggcctggggcttctccaccgtgcttggcatcctactcttcctggccgaggtggtgctgctctgctggatcaagttcctccccgtggatgcccggcgccagcctggccccccacctggccctgggagtcacacgggctggcaggccgccctggtgtccaccatcatcatggtgcccgtgggcctcatcttcgtggtcttcaccatccacttctaccgctccctggtgcgccacaaaacggagcgccacaaccgcgagatcgaggagctccacaagctcaaggtccagctggacgggcatgagcgcagcctgcaggtcttgtgaggggccgagggccggggctgggagcggccctgtgcccgggagtccgcagaggcggggatttgtcagatgcagacattttgcaaggctgccgggtagttcaagaccaaagttttcctcttgtcttaataccataaggactggatgacttctcctgagatagaaccgtttggttcaatgagggactgtgttgctaagagcgttgggggcaaagccaggctggttccttggcctcggggtttcctgggtcggggacacggtgaagaggctccagcgggacctgcccatcagtcctgggccaggaggggctccaagcagcacccagcggtccgggggagtctcagacccggcatgcgtggctggcagacctgggagagccagggcagggttttgcgttcagagaaggattgccccagagacccgtggtggacttcatgggtgctgagtggcccgtgtgacagtgatgacacgaaggcttcggcgtttgagtgggtgcaggtgcacgccagggcttggtgcttccctgcctggccctggagggagctgggtggcctggcttcaggggaagacaggagccaggacacacgtcagcccagcaggtgtggggggtgctgcagccctcggcagtggggtcaggccctgggggatgtttccaatggtgggcagcctggccaggccggagaagacatgttcacgggcatctatcagatgcccccttgaggaggctgagttatttgagggctgctgcaaagtacgctaggctcaaattctcttttcccagccagagccctggccacacggactcagaggggccaccggggtggggaaaggacccctccccgaccccccgcagccactggcctccagctctcggccacagaatggcctctaaggctgactcagccgctcccttgggctgtggcagcaggaggcgggggctctggctcaggccccggagcctgtgcagcttgcccatggccctaggcagcgaggggacagcctgggggacttcctgcctaggcaaggtcattggccgggcctggcctgtggatagtggggccaggggccggcccaggccaaatgagtgccctccttgttatgacaccaagtgactacaagggaggcaagacccctccaggcctctcagccgacactgggtcccaccacacacagtgactgtgccgtgcagtgcaggttctggccttttccttgaaggcatctggtagacccgaagccacgctctcgggccgcacatgcacgccgcagcaccagctgccctgagctgcttgtacaaccaaacacctttcccctcttctccagctgtaacctggagagtcagccatgccttgtcttttgttctcataaatagtcactggggccgggcgcagtgactcacgcctgtaatcccagcactttgggaggcctaggtgggcggatcacttgaggtcaggagttcgagaccagcctggccaacatggtgaaaccctgtctctactaaaaaaatacagaaaattagctgggcgtggtggcgggcgcctgtagccccagctacttgggaggctgaggcgggagaatggcaatggcgtgaacccgggaggcagagcttgcagtgagctgagatggcgccactgcactccagcctgggcgacagagccagactcaatctcaaaaaaaaaaaaaaaattagccgggcgtgatggcgggcacctgtagtcccagctactcaggaggctgaggcaagagaatcacttgaacccaggaggcagaggttgcagtgagctgagatcacgccattgcactacagcctgggcaacaagagcgaaactttgtctaaaaaaaaaaaaaatcactgggcttcttcatgctctgatcacatctctcgtaaaagcttaagctctctccggggtccgggttggccgtgccgtggaattctgggtggcctggctggggtctctggaaatgtggctgcagcagagaacagagaccctgacatgcagttttccgtgctgaggggccctaggggagtcacaccaagggtccccacgagaaagttgtggcatccccgggggccggagaagagccccgtgtcttctgaggagttcgtcctttgtgtcccctgcagacatttgtctgcgacctttgccctccagcatgtatgtactttcctgcagcctgtagaaacgcctcttacggtttaatatgtgttcgctttgctaaagaatatcaacatcggccaggcgaggtggggcacgcctgtcatcccagcactttgggaggctgaggtgggaggatcacttgggcccaggggtgcaagaccagcctgggcaacatagcgagaccccatgtctaaaaaaattattttaaattagccaggccgggtgcaatggctcgcgcccgtaatcttagcactctgggaggccgaggcaggcagatcacttgagatcaggactttaagaccagcctcggcaacaacatggtgaaaccatctctagcaaaaatacaaaaaattagccgggtatggtggcgggtacctgtaatcccagctactcaggaggctgaggcaagagaatcgcttgaacgcaggaggcagaggttgcagtgagctgagatcgtgccactgcactccagcctggacaacagagcaaaactctgtctcaaaaaataataaataaaaataaattagctgggcgtggtggtgcatgcctgtagttccagctacttgggaggctgaggtgggaggattgcttgagcctgggaagtagaggctgcagtgaactataactgtgctagtggccgggcgcagtggctcacgcctgtaatcccagcactttgggaggccaaagcaggtggatcacttgaggtcaggagttcgagaccagcctggccaacatggtgaaactctgtgtctactaaaaatacaaaaaattagctgggtgtggtggcgctcgcctgtagtcccagctacttgggaggctgaggcaggagaatcacttgaacccagaaggcagaggtagcagtgagccaagatggtgccactgcactccagcctgggcgacagagggtgactcctcaaaaaaaagaaaaatagctaaaatatgattgtaccactgcactccagcctgggtgacagagtgagaccctgtctctaaaaaaaaaaaaaagaaaataaagaaaaaagaatgtcagcatgtcagcgttcctccaaggagtggctttgggtcagaagacaggctggctctcctaaacaaacggctccccacggctgggagaggcagcaggcccttactctggcctgagtcttttgggaggggccctgctgggccttctcctgccacctaccttcctggaccatctgtgcccctgcccacgcagtaccacactccccagactgtggaacgcatctccagtgccatctgggggccagttactgtacctggtccccaggcagagctcttggcctggcagcatccaggcaggtattaagtgcccagtgatggtggcacatgggtggggacggagccacatccaagtctagccctctgattaggaggatgacagtcttggaatttcttgttctctttctcctagggttctcgttctcccagctccagcctttctagtttcgaggcatgaggcaaaccattgctgtgggaatagcagtgaccattggtagggccatggtggccgggagaggaaacctcagggtcaccccagagcctgtggggagacggagggtgagctgttgttggagctgcagaaacgccttgaagggcagcatgggcgatgaggaatgccattgcagcctagaaattcggtttctggaggtttagcctgattttgaagagtatttaagaacagagggctccagaccaggtgtggtggctcacatctgtaatcccagcactttgggaggcagaggtgggcggatcgcctgagatcaggagttcgagaccagcctggcccacatggtgaaaccctgtctctactaaaaatacaaaaattagccgggcgtagtgacacacgcctgtaatcccagctgctcgggaggcagaggcaggagaatggcgtgaacccgggaggcggaggttgcagtgagccgagatcacgccactgcactccagcctgggtaacagagcaagactctgtctcaaaaaaaaaaaaaaaagaacaggggcctctgcctcagtttgcccgggagccagccagggcccatcctaatttggagcacagtcttcccggtgcctagacatgccaaggcccctcccacgtggtacaccctctccgtttagtacctgaccacctgtttcaaaacgcaggtgtttctggtttagaaacttggaaggcggaatgtgttttcgtgtcttctaggaagggtctgctgaggaccagaccacgtaagcctgagtggatcctgactcagctgcagcccttacctgcctcgtgctgatgatctatgcatggcgttatgtagatcacgtgcggcagagacagccactgtcctgtgtgcgggtttttaaaacagctgccctggatgaaacggaataaaccagtgatgctaaa

SEQ ID NO: 443381 - DNA, 5364 bp, Homo sapiens
ggcgccccggccgggccactgggccacaggccacgcggccacgcagtccgagcgggagccgagccgggcggggcgagggcagctccgcctggctcccaccatgagtgctgagcttaacgtgcctatcgacccctctgctcctgcctgccctgagcccggccataagggcatggattaccgggactgggtccgccgcagctacctggaactggtcacctctaaccaccactcggtacaggccctgtcgtggcggaagctctacctgagcagggccaagctgaaggcctccagcaggacctccgccctcctctccggctttgccatggtggccatggtggaggtgcagctggagacgcagtaccagtacccgcggccgctgctgattgccttcagcgcctgcaccacggtgctggtggccgtgcacctgttcgccctcctcatcagcacctgcatcctgcccaatgtggaggccgtgagcaacatccacaacctgaactccatcagcgagtccccgcatgagcgcatgcacccctacatcgagctggcctggggcttctccaccgtgcttggcatcctactcttcctggccgaggtggtgctgctctgctggatcaagttcctccccgtggatgcccggcgccagcctggccccccacctggccctgggagtcacacgggctggcaggccgccctggtgtccaccatcatcatggtgcccgtgggcctcatcttcgtggtcttcaccatccacttctaccgctccctggtgcgccacaaaacggagcgccacaaccgcgagatcgaggagctccacaagctcaaggtccagctggacgggcatgagcgcagcctgcaggtcttgtgaggggccgagggccggggctgggagcggccctgtgcccgggagtccgcagaggcggggatttgtcagatgcagacattttgcaaggctgccgggtagttcaagaccaaagttttcctcttgtcttaataccataaggactggatgacttctcctgagatagaaccgtttggttcaatgagggactgtgttgctaagagcgttgggggcaaagccaggctggttccttggcctcggggtttcctgggtcggggacacggtgaagaggctccagcgggacctgcccatcagtcctgggccaggaggggctccaagcagcacccagcggtccgggggagtctcagacccggcatgcgtggctggcagacctgggagagccagggcagggttttgcgttcagagaaggattgccccagagacccgtggtggacttcatgggtgctgagtggcccgtgtgacagtgatgacacgaaggcttcggcgtttgagtgggtgcaggtgcacgccagggcttggtgcttccctgcctggccctggagggagctgggtggcctggcttcaggggaagacaggagccaggacacacgtcagcccagcaggtgtggggggtgctgcagccctcggcagtggggtcaggccctgggggatgtttccaatggtgggcagcctggccaggccggagaagacatgttcacgggcatctatcagatgcccccttgaggaggctgagttatttgagggctgctgcaaagtacgctaggctcaaattctcttttcccagccagagccctggccacacggactcagaggggccaccggggtggggaaaggacccctccccgaccccccgcagccactggcctccagctctcggccacagaatggcctctaaggctgactcagccgctcccttgggctgtggcagcaggaggcgggggctctggctcaggccccggagcctgtgcagcttgcccatggccctaggcagcgaggggacagcctgggggacttcctgcctaggcaaggtcattggccgggcctggcctgtggatagtggggccaggggccggcccaggccaaatgagtgccctccttgttatgacaccaagtgactacaagggaggcaagacccctccaggcctctcagccgacactgggtcccaccacacacagtgactgtgccgtgcagtgcaggttctggccttttccttgaaggcatctggtagacccgaagccacgctctcgggccgcacatgcacgccgcagcaccagctgccctgagctgcttgtacaaccaaacacctttcccctcttctccagctgtaacctggagagtcagccatgccttgtcttttgttctcataaatagtcactggggccgggcgcagtgactcacgcctgtaatcccagcactttgggaggcctaggtgggcggatcacttgaggtcaggagttcgagaccagcctggccaacatggtgaaaccctgtctctactaaaaaaatacagaaaattagctgggcgtggtggcgggcgcctgtagccccagctacttgggaggctgaggcgggagaatggcaatggcgtgaacccgggaggcagagcttgcagtgagctgagatggcgccactgcactccagcctgggcgacagagccagactcaatctcaaaaaaaaaaaaaaaattagccgggcgtgatggcgggcacctgtagtcccagctactcaggaggctgaggcaagagaatcacttgaacccaggaggcagaggttgcagtgagctgagatcacgccattgcactacagcctgggcaacaagagcgaaactttgtctaaaaaaaaaaaaaatcactgggcttcttcatgctctgatcacatctctcgtaaaagcttaagctctctccggggtccgggttggccgtgccgtggaattctgggtggcctggctggggtctctggaaatgtggctgcagcagagaacagagaccctgacatgcagttttccgtgctgaggggccctaggggagtcacaccaagggtccccacgagaaagttgtggcatccccgggggccggagaagagccccgtgtcttctgaggagttcgtcctttgtgtcccctgcagacatttgtctgcgacctttgccctccagcatgtatgtactttcctgcagcctgtagaaacgcctcttacggtttaatatgtgttcgctttgctaaagaatatcaacatcggccaggcgaggtggggcacgcctgtcatcccagcactttgggaggctgaggtgggaggatcacttgggcccaggggtgcaagaccagcctgggcaacatagcgagaccccatgtctaaaaaaattattttaaattagccaggccgggtgcaatggctcgcgcccgtaatcttagcactctgggaggccgaggcaggcagatcacttgagatcaggactttaagaccagcctcggcaacaacatggtgaaaccatctctagcaaaaatacaaaaaattagccgggtatggtggcgggtacctgtaatcccagctactcaggaggctgaggcaagagaatcgcttgaacgcaggaggcagaggttgcagtgagctgagatcgtgccactgcactccagcctggacaacagagcaaaactctgtctcaaaaaataataaataaaaataaattagctgggcgtggtggtgcatgcctgtagttccagctacttgggaggctgaggtgggaggattgcttgagcctgggaagtagaggctgcagtgaactataactgtgctagtggccgggcgcagtggctcacgcctgtaatcccagcactttgggaggccaaagcaggtggatcacttgaggtcaggagttcgagaccagcctggccaacatggtgaaactctgtgtctactaaaaatacaaaaaattagctgggtgtggtggcgctcgcctgtagtcccagctacttgggaggctgaggcaggagaatcacttgaacccagaaggcagaggtagcagtgagccaagatggtgccactgcactccagcctgggcgacagagggtgactcctcaaaaaaaagaaaaatagctaaaatatgattgtaccactgcactccagcctgggtgacagagtgagaccctgtctctaaaaaaaaaaaaaagaaaataaagaaaaaagaatgtcagcatgtcagcgttcctccaaggagtggctttgggtcagaagacaggctggctctcctaaacaaacggctccccacggctgggagaggcagcaggcccttactctggcctgagtcttttgggaggggccctgctgggccttctcctgccacctaccttcctggaccatctgtgcccctgcccacgcagtaccacactccccagactgtggaacgcatctccagtgccatctgggggccagttactgtacctggtccccaggcagagctcttggcctggcagcatccaggcaggtattaagtgcccagtgatggtggcacatgggtggggacggagccacatccaagtctagccctctgattaggaggatgacagtcttggaatttcttgttctctttctcctagggttctcgttctcccagctccagcctttctagtttcgaggcatgaggcaaaccattgctgtgggaatagcagtgaccattggtagggccatggtggccgggagaggaaacctcagggtcaccccagagcctgtggggagacggagggtgagctgttgttggagctgcagaaacgccttgaagggcagcatgggcgatgaggaatgccattgcagcctagaaattcggtttctggaggtttagcctgattttgaagagtatttaagaacagagggctccagaccaggtgtggtggctcacatctgtaatcccagcactttgggaggcagaggtgggcggatcgcctgagatcaggagttcgagaccagcctggcccacatggtgaaaccctgtctctactaaaaatacaaaaattagccgggcgtagtgacacacgcctgtaatcccagctgctcgggaggcagaggcaggagaatggcgtgaacccgggaggcggaggttgcagtgagccgagatcacgccactgcactccagcctgggtaacagagcaagactctgtctcaaaaaaaataatttggagcacagtcttcccggtgcctagacatgccaaggcccctcccacgtggtacaccctctccgtttagtacctgaccacctgtttcaaaacgcaggtgtttctggtttagaaacttggaaggcggaatgtgttttcgtgtcttctaggaagggtctgctgaggaccagaccacgtaagcctgagtggatcctgactcagctgcagcccttacctgcctcgtgctgatgatctatgcatggcgttatgtagatcacgtgcggcagagacagccactgtcctgtgtgcgggtttttaaaacagctgccctggatgaaacggaataaaccagtgatgctaaa

SEQ ID NO: 443382 - DNA, 4918 bp, Homo sapiens
ggcgccccggccgggccactgggccacaggccacgcggccacgcagtccgagcgggagccgagccgggcggggcgagggcagctccgcctggctcccaccatgagtgctgagcttaacgtgcctatcgacccctctgctcctgcctgccctgagcccggccataagggcatggattaccgggactgggtccgccgcagctacctggaactggtcacctctaaccaccactcggtacaggccctgtcgtggcggaagctctacctgagcagggccaagctgaaggcctccagcaggacctccgccctcctctccggctttgccatggtggccatggtggaggtgcagctggagacgcagtaccagtacccgcggccgctgctgattgccttcagcgcctgcaccacggtgctggtggccgtgcacctgttcgccctcctcatcagcacctgcatcctgcccaatgtggaggccgtgagcaacatccacaacctgaactccatcagcgagtccccgcatgagcgcatgcacccctacatcgagctggcctggggcttctccaccgtgcttggcatcctactcttcctggccgaggtggtgctgctctgctggatcaagttcctccccgtggatgcccggcgccagcctggccccccacctggccctgggagtcacacgggctggcaggccgccctggtgtccaccatcatcatggtgcccgtgggcctcatcttcgtggtcttcaccatccacttctaccgctccctggtgcgccacaaaacggagcgccacaaccgcgagatcgaggagctccacaagctcaaggtccagctggacgggcatgagcgcagcctgcaggtcttgtgaggggccgagggccggggctgggagcggccctgtgcccgggagtccgcagaggcggggatttgtcagatgcagacattttgcaaggctgccgggtagttcaagaccaaagttttcctcttgtcttaataccataaggactggatgacttctcctgagatagaaccgtttggttcaatgagggactgtgttgctaagagcgttgggggcaaagccaggctggttccttggcctcggggtttcctgggtcggggacacggtgaagaggctccagcgggacctgcccatcagtcctgggccaggaggggctccaagcagcacccagcggtccgggggagtctcagacccggcatgcgtggctggcagacctgggagagccagggcagggttttgcgttcagagaaggattgccccagagacccgtggtggacttcatgggtgctgagtggcccgtgtgacagtgatgacacgaaggcttcggcgtttgagtgggtgcaggtgcacgccagggcttggtgcttccctgcctggccctggagggagctgggtggcctggcttcaggggaagacaggagccaggacacacgtcagcccagcaggtgtggggggtgctgcagccctcggcagtggggtcaggccctgggggatgtttccaatggtgggcagcctggccaggccggagaagacatgttcacgggcatctatcagatgcccccttgaggaggctgagttatttgagggctgctgcaaagtacgctaggctcaaattctcttttcccagccagagccctggccacacggactcagaggggccaccggggtggggaaaggacccctccccgaccccccgcagccactggcctccagctctcggccacagaatggcctctaaggctgactcagccgctcccttgggctgtggcagcaggaggcgggggctctggctcaggccccggagcctgtgcagcttgcccatggccctaggcagcgaggggacagcctgggggacttcctgcctaggcaaggtcattggccgggcctggcctgtggatagtggggccaggggccggcccaggccaaatgagtgccctccttgttatgacaccaagtgactacaagggaggcaagacccctccaggcctctcagccgacactgggtcccaccacacacagtgactgtgccgtgcagtgcaggttctggccttttccttgaaggcatctggtagacccgaagccacgctctcgggccgcacatgcacgccgcagcaccagctgccctgagctgcttgtacaaccaaacacctttcccctcttctccagctgtaacctggagagtcagccatgccttgtcttttgttctcataaatagtcactggggccgggcgcagtgactcacgcctgtaatcccagcactttgggaggcctaggtgggcggatcacttgaggtcaggagttcgagaccagcctggccaacatggtgaaaccctgtctctactaaaaaaatacagaaaattagctgggcgtggtggcgggcgcctgtagccccagctacttgggaggctgaggcgggagaatggcaatggcgtgaacccgggaggcagagcttgcagtgagctgagatggcgccactgcactccagcctgggcgacagagccagactcaatctcaaaaaaaaaaaaaaaattagccgggcgtgatggcgggcacctgtagtcccagctactcaggaggctgaggcaagagaatcacttgaacccaggaggcagaggttgcagtgagctgagatcacgccattgcactacagcctgggcaacaagagcgaaactttgtctaaaaaaaaaaaaaatcactgggcttcttcatgctctgatcacatctctcgtaaaagcttaagctctctccggggtccgggttggccgtgccgtggaattctgggtggcctggctggggtctctggaaatgtggctgcagcagagaacagagaccctgacatgcagttttccgtgctgaggggccctaggggagtcacaccaagggtccccacgagaaagttgtggcatccccgggggccggagaagagccccgtgtcttctgaggagttcgtcctttgtgtcccctgcagacatttgtctgcgacctttgccctccagcatgtatgtactttcctgcagcctgtagaaacgcctcttacggtttaatatgtgttcgctttgctaaagaatatcaacatcggccaggcgaggtggggcacgcctgtcatcccagcactttgggaggctgaggtgggaggattgcttgagcctgggaagtagaggctgcagtgaactataactgtgctagtggccgggcgcagtggctcacgcctgtaatcccagcactttgggaggccaaagcaggtggatcacttgaggtcaggagttcgagaccagcctggccaacatggtgaaactctgtgtctactaaaaatacaagaggcaggagaatcacttgaacccagaaggcagaggtagcagtgagccaagatggtgccactgcactccagcctgggcgacagagggtgactcctcaaaaaaaagaaaaatagctaaaatatgattgtaccactgcactccagcctgggtgacagagtgagaccctgtctctaaaaaaaaaaaaaagaaaataaagaaaaaagaatgtcagcatgtcagcgttcctccaaggagtggctttgggtcagaagacaggctggctctcctaaacaaacggctccccacggctgggagaggcagcaggcccttactctggcctgagtcttttgggaggggccctgctgggccttctcctgccacctaccttcctggaccatctgtgcccctgcccacgcagtaccacactccccagactgtggaacgcatctccagtgccatctgggggccagttactgtacctggtccccaggcagagctcttggcctggcagcatccaggcaggtattaagtgcccagtgatggtggcacatgggtggggacggagccacatccaagtctagccctctgattaggaggatgacagtcttggaatttcttgttctctttctcctagggttctcgttctcccagctccagcctttctagtttcgaggcatgaggcaaaccattgctgtgggaatagcagtgaccattggtagggccatggtggccgggagaggaaacctcagggtcaccccagagcctgtggggagacggagggtgagctgttgttggagctgcagaaacgccttgaagggcagcatgggcgatgaggaatgccattgcagcctagaaattcggtttctggaggtttagcctgattttgaagagtatttaagaacagagggctccagaccaggtgtggtggctcacatctgtaatcccagcactttgggaggcagaggtgggcggatcgcctgagatcaggagttcgagaccagcctggcccacatggtgaaaccctgtctctactaaaaatacaaaaattagccgggcgtagtgacacacgcctgtaatcccagctgctcgggaggcagaggcaggagaatggcgtgaacccgggaggcggaggttgcagtgagccgagatcacgccactgcactccagcctgggtaacagagcaagactctgtctcaaaaaaaaaaaaaaaagaacaggggcctctgcctcagtttgcccgggagccagccagggcccatcctaatttggagcacagtcttcccggtgcctagacatgccaaggcccctcccacgtggtacaccctctccgtttagtacctgaccacctgtttcaaaacgcaggtgtttctggtttagaaacttggaaggcggaatgtgttttcgtgtcttctaggaagggtctgctgaggaccagaccacgtaagcctgagtggatcctgactcagctgcagcccttacctgcctcgtgctgatgatctatgcatggcgttatgtagatcacgtgcggcagagacagccactgtcctgtgtgcgggtttttaaaacagctgccctggatgaaacggaataaaccagtgatgctaaa

SEQ ID NO: 443383 - DNA, 2825 bp, Homo sapiens
ggcgccccggccgggccactgggccacaggccacgcggccacgcagtccgagcgggagccgagccgggcggggcgagggcagctccgcctggctcccaccatgagtgctgagcttaacgtgcctatcgacccctctgctcctgcctgccctgagcccggccataagggcatggattaccgggactgggtccgccgcagctacctggaactggtcacctctaaccaccactcggtacaggccctgtcgtggcggaagctctacctgagcagggccaagctgaaggcctccagcaggacctccgccctcctctccggctttgccatggtggccatggtggaggtgcagctggagacgcagtaccagtacccgcggccgctgctgattgccttcagcgcctgcaccacggtgctggtggccgtgcacctgttcgccctcctcatcagcacctgcatcctgcccaatgtggaggccgtgagcaacatccacaacctgaactccatcagcgagtccccgcatgagcgcatgcacccctacatcgagctggcctggggcttctccaccgtgcttggcatcctactcttcctggccgaggtggtgctgctctgctggatcaagttcctccccgtggatgcccggcgccagcctggccccccacctggccctgggagtcacacgggctggcaggccgccctggtgtccaccatcatcatggtgcccgtgggcctcatcttcgtggtcttcaccatccacttctaccgctccctggtgcgccacaaaacggagcgccacaaccgcgagatcgaggagctccacaagctcaaggtccagctggacgggcatgagcgcagcctgcaggtcttgtgaggggccgagggccggggctgggagcggccctgtgcccgggagtccgcagaggcggggatttgtcagatgcagacattttgcaaggctgccgggtagttcaagaccaaagttttcctcttgtcttaataccataaggactggatgacttctcctgagatagaaccgtttggttcaatgagggactgtgttgctaagagcgttgggggcaaagccaggctggttccttggcctcggggtttcctgggtcggggacacggtgaagaggctccagcgggacctgcccatcagtcctgggccaggaggggctccaagcagcacccagcggtccgggggagtctcagacccggcatgcgtggctggcagacctgggagagccagggcagggttttgcgttcagagaaggattgccccagagacccgtggtggacttcatgggtgctgagtggcccgtgtgacagtgatgacacgaaggcttcggcgtttgagtgggtgcaggtgcacgccagggcttggtgcttccctgcctggccctggagggagctgggtggcctggcttcaggggaagacaggagccaggacacacgtcagcccagcaggtgtggggggtgctgcagccctcggcagtggggtcaggccctgggggatgtttccaatggtgggcagcctggccaggccggagaagacatgttcacgggcatctatcagatgcccccttgaggaggctgagttatttgagggctgctgcaaagtacgctaggctcaaattctcttttcccagccagagccctggccacacggactcagaggggccaccggggtggggaaaggacccctccccgaccccccgcagccactggcctccagctctcggccacagaatggcctctaaggctgactcagccgctcccttgggctgtggcagcaggaggcgggggctctggctcaggccccggagcctgtgcagcttgcccatggccctaggcagcgaggggacagcctgggggacttcctgcctaggcaaggtcattggccgggcctggcctgtggatagtggggccaggggccggcccaggccaaatgagtgccctccttgttatgacaccaagtgactacaagggaggcaagacccctccaggcctctcagccgacactgggtcccaccacacacagtgactgtgccgtgcagtgcaggttctggccttttccttgaaggcatctggtagacccgaagccacgctctcgggccgcacatgcacgccgcagcaccagctgccctgagctgcttgtacaaccaaacacctttcccctcttctccagctgtaacctggagagtcagccatgccttgtcttttgttctcataaatagtcactggggccgggcgcagtgactcacgcctgtaatcccagcactttgggaggcctaggtgggcggatcacttgaggtcaggagttcgagaccagcctggccaacatggtgaaaccctgtctctactaaaaaaatacagaaaattagctgggcgtggtggcgggcgcctgtagccccagctacttgggaggctgaggcgggagaatggcaatggcgtgaacccgggaggcagagcttgcagtgagctgagatggcgccactgcactccagcctgggcgacagagccagactcaatctcaaaaaaaaaaaaaaaattagccgggcgtgatggcgggcacctgtagtcccagctactcaggaggctgaggcagaagaaatcctgaaaccccgggaatgccaaggttgtcatgtgaacgttgagactaacaggccatgtggacatacagagcgcggggaaccagcgggcgcaaccttggctccaaacaagaacacacgagagtccgggggagtcaccagcgcgccggaacaccaatttctcgcccaacacgcaagacactaccggcagaaccagctgaagccgaacagcgaaaatcg

SEQ ID NO: 443384 - DNA, 535 bp, Homo sapiens
atggttccacatggaggtgggaaaaggctccctctatctcaggcttccccttccctccagaaacactggctcctatggacacatgtgcctctgttccccttaacctgtgtaattcacacaccaccttcttttaggagaaaatcagggattctagtgttctcatctctacattttgttctttgctgttcatcatttccagtatggccctttggtattgctttcttttacatcgataatttgctggaagctactatgaatgttaagtgccctctacctttggattagctagacccttcgggagtgtgaaagggctccttcctgctcttagctcatgctggcgctctctgctttgcaggatgatgacatagagaccaccaaggtggaaatgctgagactttctctggcacgaaatcttgctcgggcaattataagagaaggctcactggaaggttcctgagaactgcttcaatgtggtatctttgtatggcaatgtatatagattttttaaaagaataaatgttgttttgcaaatgta

SEQ ID NO: 443385 - DNA, 627 bp, Homo sapiens
gggtcttgtgggcacttgttttctcatgggatgtatcagtcagacccatgcacagttctgggcggcagggaagtgtgtctctttctggacttgagccagtgagctgttggcatgcctttttaaaggcattagaaaaaaggtttctttcttttttttcctttcctgttcacaccaccttcatatgaacatggagaagggaggtttctaagtgggcccctgatttactcctatgtcaataatcgtgccagaccctaaggggcagaaaaggcagccaggggatcctgactcagaggctgtagttcgtcagccctgctaaagggccaggggtttgtctctcagtgcctgggtgggcatgcttgactgctaaccccttagctgaaaggagatggcaggagtcctccacagggtcccttcttccctcctggcttacagcttcctctgaagacgggccagttccttgctgtctggcaagaggaaacagctggggtgcacttcactgggagttgggcaagatgtcggcagtttcctggtgcccttcaagtcctccaaaagtatcgagctaaaaggtgacaagtcttccttcaataaccaagaagagttccagcttaatgtctgctgaatctagaa

SEQ ID NO: 443386 - DNA, 633 bp, Homo sapiens
gatctgcctgtcttggcctcccacagtgctaggattacaggcgtaagccaccatgcccggcctgaaagtcaagttttgtgtcaatattttcacaggcctgtaaacattgtgagaagtccctgcatggaagaattagtgagaataacttaaaaacacacaaacacaccatcgtttggctttgttggtgtctctgcccatagttgagtattctaaatttcctgtgttataacagtgagtgagtttcaccagggcttcctaatttataagccctgtatctggatttttaggaataaaacagatttgagcagaagaagtctgttggatgcagggagtataaaaggggaaagcatcctgctgtttccagtggcagaagagaaagagaagtaccatgaagaggggtgaacaacatcactctcgtgccggacacagacaaggaatgattaggcttgcagtcccccagtctcagcctctctccactctcacaagcaggaagggatctgagctctgttagtgggaaatcttggagtttgcatttctctgatcacgaggctacctcctatcctgttttgaaagaggaacagaaaagcagagcttgtcccaggaattgtgaaatgggctgcaatgtcttcagag

SEQ ID NO: 443387 - DNA, 2294 bp, Homo sapiens
agtcagtcctcggcgctgttttccctgatttgctgtcgacgccaggaaggaaggacgcgtgcagaggaccgcagaggggtggccgtggctgagaggagacagcgccgcagcactgagggtttgggcttgcaggcgctgcaggagacgcccaggcggagtcttgtctcgcagccagctctgagcgggaggcctgagcgggaagcattggcgtccgagcgacttctaggagcctggggttcggcgctatggaggagctcgatggcgagccaacagtcactttgattccaggcgtgaattccaagaagaaccaaatgtattttgactggggtccaggggagatgctggtatgtgaaacctccttcaacaaaaaagaaaaatcagagatggtgccaagttgcccctttatctatatcatccgtaaggatgtagatgtttactctcaaatcttgagaaaactcttcaatgaatcccatggaatctttctgggcctccagagaattgacgaagagttgactggaaaatccagaaaatctcaattggttcgagtgagtaaaaactaccgatcagtcatcagagcatgtatggaggaaatgcaccaggttgcaattgctgctaaagatccagccaatggccgccagttcagcagccaggtctccattttgtcagcaatggagctcatctggaacctgtgtgagattctttttattgaagtggccccagctggccctctcctcctccatctccttgactgggtccggctccatgtgtgcgaggtggacagtttgtcggcagatgttctgggcagtgagaatccaagcaaacatgacagcttctggaacttggtgaccatcttggtgctgcagggccggctggatgaggcccgacagatgctctccaaggaagccgatgccagccccgcctctgcaggcatatgccgaatcatgggggacctgatgaggacaatgcccattcttagtcctgggaacacccagacactgacagagctggagctgaagtggcagcactggcacgaggaatgtgagcggtacctccaggacagcacattcgccaccagccctcacctggagtctctcttgaagattatgctgggagacgaagctgccttgttagagcagaaggaacttctgagtaattggtatcatttcctagtgactcggctcttgtactccaatcccacagtaaaacccattgatctgcactactatgcccagtccagcctggacctgtttctgggaggtgagagcagcccagaacccctggacaacatcttgttggcagcctttgagtttgacatccatcaagtaatcaaagagtgcagcatcgccctgagcaactggtggtttgtggcccacctgacagacctgctggaccactgcaagctcctccagtcacacaacctctatttcggttccaacatgagagagttcctcctgctggagtacgcctcgggactgtttgctcatcccagcctgtggcagctgggggtcgattactttgattactgccccgagctgggccgagtctccctggagctgcacattgagcggatacctctgaacaccgagcagaaagccctgaaggtgctgcggatctgtgagcagcggcagatgactgaacaagttcgcagcatttgtaagatcttagccatgaaagccgtccgcaacaatcgcctgggttctgccctctcttggagcatccgtgctaaggatgccgcctttgccacgctcgtgtcagacaggttcctcagggattactgtgagcgaggctgcttttctgatttggatctcattgacaacctggggccagccatgatgctcagtgaccgactgacattcctgggaaagtatcgcgagttccaccgtatgtacggggagaagcgttttgccgacgcagcttctctccttctgtccttgatgacgtctcggattgcccctcggtctttctggatgactctgctgacagatgccttgccccttttggaacagaaacaggtgattttctcagcagaacagacttatgagttgatgcggtgtctggaggacttgacgtcaagaagacctgtgcatggagaatctgataccgagcagctccaggatgatgacatagagaccaccaaggtggaaatgctgagactttctctggcacgaaatcttgctcgggcaattataagagaaggctcactggaaggttcctgagaactgcttcaatgtggtatctttgtatggcaatgtatatagattttttaaaagaataaatgttgttttgcaaatgta

SEQ ID NO: 443388 - DNA, 2527 bp, Homo sapiens
agtcagtcctcggcgctgttttccctgatttgctgtcgacgccaggaaggaaggacgcgtgcagaggaccgcagaggggtggccgtggctgagaggagacagcgccgcagcactgagggtttgggcttgcaggcgctgcaggagacgcccaggcggagtcttgtctcgcagccagctctgagcgggaggcctgagcgggaagcattggcgtccgagcgacttctaggagcctggggttcggcgctatggaggagctcgatggcgagccaacagtcactttgattccaggcgtgaattccaagaagaaccaaatgtattttgactggggtccaggggagatgctggtatgtgaaacctccttcaacaaaaaagaaaaatcagagatggtgccaagttgcccctttatctatatcatccgtaaggatgtagatgtttactctcaaatcttgagaaaactcttcaatgaatcccatggaatctttctgggcctccagagaattgacgaagagttgactggaaaatccagaaaatctcaattggttcgagtgagtaaaaactaccgatcagtcatcagagcatgtatggaggaaatgcaccaggttgcaattgctgctaaagatccagccaatggccgccagttcagcagccaggtctccattttgtcagcaatggagctcatctggaacctgtgtgagattctttttattgaagtggccccagctggccctctcctcctccatctccttgactgggtccggctccatgtgtgcgaggtggacagtttgtcggcagatgttctgggcagtgagaatccaagcaaacatgacagcttctggaacttggtgaccatcttggtgctgcagggccggctggatgaggcccgacagatgctctccaaggaagccgatgccagccccgcctctgcaggcatatgccgaatcatgggggacctgatgaggacaatgcccattcttagtcctgggaacacccagacactgacagagctggagctgaagtggcagcactggcacgaggaatgtgagcggtacctccaggacagcacattcgccaccagccctcacctggagtctctcttgaaggtctgggaagcagttcagattgcatccatgttggcttcctatgggggctgtggcatccagtgcagcagtggcaggagcttggtcctccttggatagggctgtctgtcgctctgccgtgatggcgagagctttcagactagttgaaatccggtgcccttagctgagagcaggagcattatggagaaggtacccctgagaggaggacagagttcagcacaaatgtctctcctcagattatgctgggagacgaagctgccttgttagagcagaaggaacttctgagtaattggtatcatttcctagtgactcggctcttgtactccaatcccacagtaaaacccattgatctgcactactatgcccagtccagcctggacctgtttctgggaggtgagagcagcccagaacccctggacaacatcttgttggcagcctttgagtttgacatccatcaagtaatcaaagagtgcagcatcgccctgagcaactggtggtttgtggcccacctgacagacctgctggaccactgcaagctcctccagtcacacaacctctatttcggttccaacatgagagagttcctcctgctggagtacgcctcgggactgtttgctcatcccagcctgtggcagctgggggtcgattactttgattactgccccgagctgggccgagtctccctggagctgcacattgagcggatacctctgaacaccgagcagaaagccctgaaggtgctgcggatctgtgagcagcggcagatgactgaacaagttcgcagcatttgtaagatcttagccatgaaagccgtccgcaacaatcgcctgggttctgccctctcttggagcatccgtgctaaggatgccgcctttgccacgctcgtgtcagacaggttcctcagggattactgtgagcgaggctgcttttctgatttggatctcattgacaacctggggccagccatgatgctcagtgaccgactgacattcctgggaaagtatcgcgagttccaccgtatgtacggggagaagcgttttgccgacgcagcttctctccttctgtccttgatgacgtctcggattgcccctcggtctttctggatgactctgctgacagatgccttgccccttttggaacagaaacaggtgattttctcagcagaacagacttatgagttgatgcggtgtctggaggacttgacgtcaagaagacctgtgcatggagaatctgataccgagcagctccaggatgatgacatagagaccaccaaggtggaaatgctgagactttctctggcacgaaatcttgctcgggcaattataagagaaggctcactggaaggttcctgagaactgcttcaatgtggtatctttgtatggcaatgtatatagattttttaaaagaataaatgttgttttgcaaatgta

SEQ ID NO: 443389 - DNA, 3182 bp, Homo sapiens
agtcagtcctcggcgctgttttccctgatttgctgtcgacgccaggaaggaaggacgcgtgcagaggaccgcagaggggtggccgtggctgagaggagacagcgccgcagcactgagggtttgggcttgcaggcgctgcaggagacgcccaggcggagtcttgtctcgcagccagctctgagcgggaggcctgagcgggaagcattggcgtccgagcgacttctaggagcctggggttcggcgctatggaggagctcgatggcgagccaacagtcactttgattccaggcgtgaattccaagaagaaccaaatgtattttgactggggtccaggggagatgctggtatgtgaaacctccttcaacaaaaaagaaaaatcagagatggtgccaagttgcccctttatctatatcatccgtaaggatgtagatgtttactctcaaatcttgagaaaactcttcaatgaatcccatggaatctttctgggcctccagagaattgacgaagagttgactggaaaatccagaaaatctcaattggttcgagtgagtaaaaactaccgatcagtcatcagagcatgtatggaggaaatgcaccaggttgcaattgctgctaaagatccagccaatggccgccagttcagcagccaggtctccattttgtcagcaatggagctcatctggaacctgtgtgagattctttttattgaagtggccccagctggccctctcctcctccatctccttgactgggtccggctccatgtgtgcgaggtggacagtttgtcggcagatgttctgggcagtgagaatccaagcaaacatgacagcttctggaacttggtgaccatcttggtgctgcagggccggctggatgaggcccgacagatgctctccaaggaagccgatgccagccccgcctctgcaggcatatgccgaatcatgggggacctgatgaggacaatgcccattcttagtcctgggaacacccagacactgacagagctggagctgaagtggcagcactggcacgaggaatgtgagcggtacctccaggacagcacattcgccaccagccctcacctggagtctctcttgaagattatgctgggagacgaagctgccttgttagagcagaaggaacttctgagtaattggtatcatttcctagtgactcggctcttgtactccaatcccacagtaaaacccattgatctgcactactatgcccagtccagcctggacctgtttctgggaggtgagagcagcccagaacccctggacaacatcttgttggcagcctttgagtttgacatccatcaagtaatcaaagagtgcagcttcctctgaagacgggccagttccttgctgtctggcaagaggaaacagctggggtgcacttcactgggagttgggcaagatgtcggcagtttcctggtgcccttcaagtcctccaaaagtatcgagctaactcatgatcctcccacctcggcctcccaaagtgctgggattacaggtgtgagctaccgcgcccggccaacaacatgtttgatagatgtatacattgtgaaattaagctagtgacatctgtcacctcacacagtgaccctttggtgtgcgtgtggtgagaacattcaaaagctactttctagctgggtgtggtagcgcatgcctgtaatctcagctactgaagaggctgaggcatgagaattgcttgaacctgggaggcagaggttgcagtgagtcgagatctcaccagtgcactcccgtctgggtgacagagcaagactccacctcaactactttctgagcgatttttttttgtttttttggagaatatggtgtgtgctctctcacccaagttgggagtgcaggtggcgtgatctcggccgatgtgcagcctcgtgcttcccaggctcaagcaatactcccaccccagcttctcgagtagctgggattacaggtgtgtgccaccatgcctggctaatttttgtatttgtagagatggggttttgccatgttgcccaggctggtcttaaattcctggactcaggtgatctgcctgccttggcctcccaaagtactgggatcacgggcatgagctatcatcacgcccggccccatctctttgagggacaggacatgtggggtttcttgctcacccccactcttgtgggacgcggcctgtgccctgattttccttcttgccttggtgtctgaatctgcagcatcgccctgagcaactggtggtttgtggcccacctgacagacctgctggaccactgcaagctcctccagtcacacaacctctatttcggttccaacatgagagagttcctcctgctggagtacgcctcgggactgtttgctcatcccagcctgtggcagctgggggtcgattactttgattactgccccgagctgggccgagtctccctggagctgcacattgagcggatacctctgaacaccgagcagaaagccctgaaggtgctgcggatctgtgagcagcggcagatgactgaacaagttcgcagcatttgtaagatcttagccatgaaagccgtccgcaacaatcgcctgggttctgccctctcttggagcatccgtgctaaggatgccgcctttgccacgctcgtgtcagacaggttcctcagggattactgtgagcgaggctgcttttctgatttggatctcattgacaacctggggccagccatgatgctcagtgaccgactgacattcctgggaaagtatcgcgagttccaccgtatgtacggggagaagcgttttgccgacgcagcttctctccttctgtccttgatgacgtctcggattgcccctcggtctttctggatgactctgctgacagatgccttgccccttttggaacagaaacaggtgattttctcagcagaacagacttatgagttgatgcggtgtctggaggacttgacgtcaagaagacctgtgcatggagaatctgataccgagcagctccaggatgatgacatagagaccaccaaggtggaaatgctgagactttctctggcacgaaatcttgctcgggcaattataagagaaggctcactggaaggttcctgagaactgcttcaatgtggtatctttgtatggcaatgtatatagattttttaaaagaataaatgttgttttgcaaatgta

SEQ ID NO: 443390 - DNA, 2607 bp, Homo sapiens
agtcagtcctcggcgctgttttccctgatttgctgtcgacgccaggaaggaaggacgcgtgcagaggaccgcagaggggtggccgtggctgagaggagacagcgccgcagcactgagggtttgggcttgcaggcgctgcaggagacgcccaggcggagtcttgtctcgcagccagctctgagcgggaggcctgagcgggaagcattggcgtccgagcgacttctaggagcctggggttcggcgctatggaggagctcgatggcgagccaacagtcactttgattccaggcgtgaattccaagaagaaccaaatgtattttgactggggtccaggggagatgctggtatgtgaaacctccttcaacaaaaaagaaaaatcagagatggtgccaagttgcccctttatctatatcatccgtaaggatgtagatgtttactctcaaatcttgagaaaactcttcaatgaatcccatggaatctttctgggcctccagagaattgacgaagagttgactggaaaatccagaaaatctcaattggttcgagtgagtaaaaactaccgatcagtcatcagagcatgtatggaggaaatgcaccaggttgcaattgctgctaaagatccagccaatggccgccagttcagcagccaggtctccattttgtcagcaatggagctcatctggaacctgtgtgagattctttttattgaagtggccccagctggccctctcctcctccatctccttgactgggtccggctccatgtgtgcgaggtggacagtttgtcggcagatgttctgggcagtgagaatccaagcaaacatgacagcttctggaacttggtgaccatcttggtgctgcagggccggctggatgaggcccgacagatgctctccaaggaagccgatgccagccccgcctctgcaggcatatgccgaatcatgggggacctgatgaggacaatgcccattcttagtcctgggaacacccagacactgacagagctggagctgaagtggcagcactggcacgaggaatgtgagcggtacctccaggacagcacattcgccaccagccctcacctggagtctctcttgaagattatgctgggagacgaagctgccttgttagagcagaaggaacttctgagtaattggtatcatttcctagtgactcggctcttgtactccaatcccacagtaaaacccattgatctgcactactatgcccagtccagcctggacctgtttctgggaggtgagagcagcccagaacccctggacaacatcttgttggcagcctttgagtttgacatccatcaagtaatcaaagagtgcagcatcgccctgagcaactggtggtttgtggcccacctgacagacctgctggaccactgcaagctcctccagtcacacaacctctatttcggttccaacatgagagagttcctcctgctggagtacgcctcgggactgtttgctcatcccagcctgtggcagctgggggtcgattactttgattactgccccgagctgggccgagtctccctggagctgcacattgagcggatacctctgaacaccgagcagaaagccctgaaggtgctgcggatctgtgagcagcggcagatgactgaacaagttcgcagcatttgtaagatcttagccatgaaagccgtccgcaacaatcgcctgggttctgccctctcttggagcatccgtgctaaggatgccgcctttgccacgctcgtgtcagacaggttcctcagggattactgtgagcgaggctgcttttctgatttggatctcattgacaacctggggccagccatgatgctcagtgaccgactgacattcctgggaaagtatcgcgagttccaccgtatgtacggggagaagcgttttgccgacgcagcttctctccttctgtccttgatgacgtctcggattgcccctcggtctttctggatgactctgctgacagatgccttgccccttttggaacagaaacaggtgaaggttgcagcagcagtggttttctttgcttgtcagtccctgctagagcttagttgtatagctgttgccgatgtgcgtgtttcctcctttgtcgttctgcctgtgcgcgtgtattccccttagcgccctctctgggattccagactcacacaggaaacaaacactgcttgatttgaaatgaggtattcgtatacaaagcacactattgcgaagggtatgaaaggaagaacgtccgaacatgggcccctgccccaaccaatgcaggccagggctgggggcagccaagcaaggcaggctctcttccctaggtgtgattttctcagcagaacagacttatgagttgatgcggtgtctggaggacttgacgtcaagaagacctgtgcatggagaatctgataccgagcagctccaggatgatgacatagagaccaccaaggtggaaatgctgagactttctctggcacgaaatcttgctcgggcaattataagagaaggctcactggaaggttcctgagaactgcttcaatgtggtatctttgtatggcaatgtatatagattttttaaaagaataaatgttgttttgcaaatgta

SEQ ID NO: 443391 - DNA, 2457 bp, Homo sapiens
gaaaaaaaaaaagaaaaaaaacaaaaaacaaaaaatacatcacaataagaggccgaatgtaaataaagacgagggacgcagaggggtggccgtggctgagaggagacagcgccgcagcactgagggtttgggcttgcaggcgctgcaggagacgcccaggcggagtcttgtctcgcagccagctctgagcgggaggcctgagcgggaagcattggcgtccgagcgacttctaggagcctggggttcggcgctatggaggagctcgatggcgagccaacagtcactgtaagggtaccccgaacaggcttgctcgtccttgcgggttgagaactgcgtctgcttagttacttcaggcttgtctgcttccctagtggtcgcgaggcgctcgtccccttccctcgactcagttgccacttttccggaggtcgcagtgttaacgagttgattccaggcgtgaattccaagaagaaccaaatgtattttgactggggtccaggggagatgctggtatgtgaaacctccttcaacaaaaaagaaaaatcagagatggtgccaagttgcccctttatctatatcatccgtaaggatgtagatgtttactctcaaatcttgagaaaactcttcaatgaatcccatggaatctttctgggcctccagagaattgacgaagagttgactggaaaatccagaaaatctcaattggttcgagtgagtaaaaactaccgatcagtcatcagagcatgtatggaggaaatgcaccaggttgcaattgctgctaaagatccagccaatggccgccagttcagcagccaggtctccattttgtcagcaatggagctcatctggaacctgtgtgagattctttttattgaagtggccccagctggccctctcctcctccatctccttgactgggtccggctccatgtgtgcgaggtggacagtttgtcggcagatgttctgggcagtgagaatccaagcaaacatgacagcttctggaacttggtgaccatcttggtgctgcagggccggctggatgaggcccgacagatgctctccaaggaagccgatgccagccccgcctctgcaggcatatgccgaatcatgggggacctgatgaggacaatgcccattcttagtcctgggaacacccagacactgacagagctggagctgaagtggcagcactggcacgaggaatgtgagcggtacctccaggacagcacattcgccaccagccctcacctggagtctctcttgaagattatgctgggagacgaagctgccttgttagagcagaaggaacttctgagtaattggtatcatttcctagtgactcggctcttgtactccaatcccacagtaaaacccattgatctgcactactatgcccagtccagcctggacctgtttctgggaggtgagagcagcccagaacccctggacaacatcttgttggcagcctttgagtttgacatccatcaagtaatcaaagagtgcagcatcgccctgagcaactggtggtttgtggcccacctgacagacctgctggaccactgcaagctcctccagtcacacaacctctatttcggttccaacatgagagagttcctcctgctggagtacgcctcgggactgtttgctcatcccagcctgtggcagctgggggtcgattactttgattactgccccgagctgggccgagtctccctggagctgcacattgagcggatacctctgaacaccgagcagaaagccctgaaggtgctgcggatctgtgagcagcggcagatgactgaacaagttcgcagcatttgtaagatcttagccatgaaagccgtccgcaacaatcgcctgggttctgccctctcttggagcatccgtgctaaggatgccgcctttgccacgctcgtgtcagacaggttcctcagggattactgtgagcgaggctgcttttctgatttggatctcattgacaacctggggccagccatgatgctcagtgaccgactgacattcctgggaaagtatcgcgagttccaccgtatgtacggggagaagcgttttgccgacgcagcttctctccttctgtccttgatgacgtctcggattgcccctcggtctttctggatgactctgctgacagatgccttgccccttttggaacagaaacaggtgattttctcagcagaacagacttatgagttgatgcggtgtctggaggacttgacgtcaagaagacctgtgcatggagaatctgataccgagcagctccaggatgatgacatagagaccaccaaggtggaaatgctgagactttctctggcacgaaatcttgctcgggcaattataagagaaggctcactggaaggttcctgagaactgcttcaatgtggtatctttgtatggcaatgtatatagattttttaaaagaataaatgttgttttgcaaatgta

SEQ ID NO: 443392 - DNA, 2087 bp, Homo sapiens
ggtctcgaattcctgacctcgtgatctgcctgccttggcctcccaaagtgctgggattataggcaagagccaccatgcccggccacagaaaatttttttagagtagattcacttttggagatgatcataatagatgttaaattttttttttctgtttggtttcagaaaaatcagagatggtgccaagttgcccctttatctatatcatccgtaaggatgtagatgtttactctcaaatcttgagaaaactcttcaatgaatcccatggaatctttctgggcctccagagaattgacgaagagttgactggaaaatccagaaaatctcaattggttcgagtgagtaaaaactaccgatcagtcatcagagcatgtatggaggaaatgcaccaggttgcaattgctgctaaagatccagccaatggccgccagttcagcagccaggtctccattttgtcagcaatggagctcatctggaacctgtgtgagattctttttattgaagtggccccagctggccctctcctcctccatctccttgactgggtccggctccatgtgtgcgaggtggacagtttgtcggcagatgttctgggcagtgagaatccaagcaaacatgacagcttctggaacttggtgaccatcttggtgctgcagggccggctggatgaggcccgacagatgctctccaaggaagccgatgccagccccgcctctgcaggcatatgccgaatcatgggggacctgatgaggacaatgcccattcttagtcctgggaacacccagacactgacagagctggagctgaagtggcagcactggcacgaggaatgtgagcggtacctccaggacagcacattcgccaccagccctcacctggagtctctcttgaagattatgctgggagacgaagctgccttgttagagcagaaggaacttctgagtaattggtatcatttcctagtgactcggctcttgtactccaatcccacagtaaaacccattgatctgcactactatgcccagtccagcctggacctgtttctgggaggtgagagcagcccagaacccctggacaacatcttgttggcagcctttgagtttgacatccatcaagtaatcaaagagtgcagcatcgccctgagcaactggtggtttgtggcccacctgacagacctgctggaccactgcaagctcctccagtcacacaacctctatttcggttccaacatgagagagttcctcctgctggagtacgcctcgggactgtttgctcatcccagcctgtggcagctgggggtcgattactttgattactgccccgagctgggccgagtctccctggagctgcacattgagcggatacctctgaacaccgagcagaaagccctgaaggtgctgcggatctgtgagcagcggcagatgactgaacaagttcgcagcatttgtaagatcttagccatgaaagccgtccgcaacaatcgcctgggttctgccctctcttggagcatccgtgctaaggatgccgcctttgccacgctcgtgtcagacaggttcctcagggattactgtgagcgaggctgcttttctgatttggatctcattgacaacctggggccagccatgatgctcagtgaccgactgacattcctgggaaagtatcgcgagttccaccgtatgtacggggagaagcgttttgccgacgcagcttctctccttctgtccttgatgacgtctcggattgcccctcggtctttctggatgactctgctgacagatgccttgccccttttggaacagaaacaggtgattttctcagcagaacagacttatgagttgatgcggtgtctggaggacttgacgtcaagaagacctgtgcatggagaatctgataccgagcagctccaggatgatgacatagagaccaccaaggtggaaatgctgagactttctctggcacgaaatcttgctcgggcaattataagagaaggctcactggaaggttcctgagaactgcttcaatgtggtatctttgtatggcaatgtatatagattttttaaaagaataaatgttgttttgcaaatgta

SEQ ID NO: 443393 - DNA, 2273 bp, Homo sapiens
agtcagtcctcggcgctgttttccctgatttgctgtcgacgccaggaaggaaggacgcgtgcagaggaccgcagaggggtggccgtggctgagaggagacagcgccgcagcactgagggtttgggcttgcaggcgctgcaggagacgcccaggcggagtcttgtctcgcagccagctctgagcgggaggcctgagcgggaagcattggcgtccgagcgacttctaggagcctggggttcggcgctatggaggagctcgatggcgagccaacagtcactttgattccaggcgtgaattccaagaagaaccaaatgtattttgactggggtccaggggagatgctggtatgtgaaacctccttcaacaaaaaagaaaaatcagagatggtgccaagttgcccctttatctatatcatccgtaaggatgtagatgtttactctcaaatcttgagaaaactcttcaatgaatcccatggaatctttctgggcctccagagaattgacgaagagttgactggaaaatccagaaaatctcaattggttcgagtgagtaaaaactaccgatcagtcatcagagcatgtatggaggaaatgcaccaggttgcaattgctgctaaagatccagccaatggccgccagttcagcagccaggtctccattttgtcagcaatggagctcatctggaacctgtgtgagattctttttattgaagtggccccagctggccctctcctcctccatctccttgactgggtccggctccatgtgtgcgaggtggacagtttgtcggcagatgttctgggcagtgagaatccaagcaaacatgacagcttctggaacttgggccggctggatgaggcccgacagatgctctccaaggaagccgatgccagccccgcctctgcaggcatatgccgaatcatgggggacctgatgaggacaatgcccattcttagtcctgggaacacccagacactgacagagctggagctgaagtggcagcactggcacgaggaatgtgagcggtacctccaggacagcacattcgccaccagccctcacctggagtctctcttgaagattatgctgggagacgaagctgccttgttagagcagaaggaacttctgagtaattggtatcatttcctagtgactcggctcttgtactccaatcccacagtaaaacccattgatctgcactactatgcccagtccagcctggacctgtttctgggaggtgagagcagcccagaacccctggacaacatcttgttggcagcctttgagtttgacatccatcaagtaatcaaagagtgcagcatcgccctgagcaactggtggtttgtggcccacctgacagacctgctggaccactgcaagctcctccagtcacacaacctctatttcggttccaacatgagagagttcctcctgctggagtacgcctcgggactgtttgctcatcccagcctgtggcagctgggggtcgattactttgattactgccccgagctgggccgagtctccctggagctgcacattgagcggatacctctgaacaccgagcagaaagccctgaaggtgctgcggatctgtgagcagcggcagatgactgaacaagttcgcagcatttgtaagatcttagccatgaaagccgtccgcaacaatcgcctgggttctgccctctcttggagcatccgtgctaaggatgccgcctttgccacgctcgtgtcagacaggttcctcagggattactgtgagcgaggctgcttttctgatttggatctcattgacaacctggggccagccatgatgctcagtgaccgactgacattcctgggaaagtatcgcgagttccaccgtatgtacggggagaagcgttttgccgacgcagcttctctccttctgtccttgatgacgtctcggattgcccctcggtctttctggatgactctgctgacagatgccttgccccttttggaacagaaacaggtgattttctcagcagaacagacttatgagttgatgcggtgtctggaggacttgacgtcaagaagacctgtgcatggagaatctgataccgagcagctccaggatgatgacatagagaccaccaaggtggaaatgctgagactttctctggcacgaaatcttgctcgggcaattataagagaaggctcactggaaggttcctgagaactgcttcaatgtggtatctttgtatggcaatgtatatagattttttaaaagaataaatgttgttttgcaaatgta

SEQ ID NO: 443394 - DNA, 2172 bp, Homo sapiens
agtcagtcctcggcgctgttttccctgatttgctgtcgacgccaggaaggaaggacgcgtgcagaggaccgcagaggggtggccgtggctgagaggagacagcgccgcagcactgagggtttgggcttgcaggcgctgcaggagacgcccaggcggagtcttgtctcgcagccagctctgagcgggaggcctgagcgggaagcattggcgtccgagcgacttctaggagcctggggttcggcgctatggaggagctcgatggcgagccaacagtcactttgattccaggcgtgaattccaagaagaaccaaatgtattttgactggggtccaggggagatgctggtatgtgaaacctccttcaacaaaaaagaaaaatcagagatggtgccaagttgcccctttatctatatcatccgtaaggatgtagatgtttactctcaaatcttgagaaaactcttcaatgaatcccatggaatctttctgggcctccagagaattgacgaagagttgactggaaaatccagaaaatctcaattggttcgagtgagtaaaaactaccgatcagtcatcagagcatgtatggaggaaatgcaccaggttgcaattgctgctaaagatccagccaatggccgccagttcagcagccaggtctccattttgtcagcaatggagctcatctggaacctgtgtgagattctttttattgaagtggccccaggtgaccatcttggtgctgcagggccggctggatgaggcccgacagatgctctccaaggaagccgatgccagccccgcctctgcaggcatatgccgaatcatgggggacctgatgaggacaatgcccattcttagtcctgggaacacccagacactgacagagctggagctgaagtggcagcactggcacgaggaatgtgagcggtacctccaggacagcacattcgccaccagccctcacctggagtctctcttgaagattatgctgggagacgaagctgccttgttagagcagaaggaacttctgagtaattggtatcatttcctagtgactcggctcttgtactccaatcccacagtaaaacccattgatctgcactactatgcccagtccagcctggacctgtttctgggaggtgagagcagcccagaacccctggacaacatcttgttggcagcctttgagtttgacatccatcaagtaatcaaagagtgcagcatcgccctgagcaactggtggtttgtggcccacctgacagacctgctggaccactgcaagctcctccagtcacacaacctctatttcggttccaacatgagagagttcctcctgctggagtacgcctcgggactgtttgctcatcccagcctgtggcagctgggggtcgattactttgattactgccccgagctgggccgagtctccctggagctgcacattgagcggatacctctgaacaccgagcagaaagccctgaaggtgctgcggatctgtgagcagcggcagatgactgaacaagttcgcagcatttgtaagatcttagccatgaaagccgtccgcaacaatcgcctgggttctgccctctcttggagcatccgtgctaaggatgccgcctttgccacgctcgtgtcagacaggttcctcagggattactgtgagcgaggctgcttttctgatttggatctcattgacaacctggggccagccatgatgctcagtgaccgactgacattcctgggaaagtatcgcgagttccaccgtatgtacggggagaagcgttttgccgacgcagcttctctccttctgtccttgatgacgtctcggattgcccctcggtctttctggatgactctgctgacagatgccttgccccttttggaacagaaacaggtgattttctcagcagaacagacttatgagttgatgcggtgtctggaggacttgacgtcaagaagacctgtgcatggagaatctgataccgagcagctccaggatgatgacatagagaccaccaaggtggaaatgctgagactttctctggcacgaaatcttgctcgggcaattataagagaaggctcactggaaggttcctgagaactgcttcaatgtggtatctttgtatggcaatgtatatagattttttaaaagaataaatgttgttttgcaaatgta

SEQ ID NO: 443395 - DNA, 2341 bp, Homo sapiens
agtcagtcctcggcgctgttttccctgatttgctgtcgacgccaggaaggaaggacgcgtgcagaggaccgcagaggggtggccgtggctgagaggagacagcgccgcagcactgagggtttgggcttgcaggcgctgcaggagacgcccaggcggagtcttgtctcgcagccagctctgagcgggaggcctgagcgggaagcattggcgtccgagcgacttctaggagcctggggttcggcgctatggaggagctcgatggcgagccaacagtcactttgattccaggcgtgaattccaagaagaaccaaatgtattttgactggggtccaggggagatgctggtatgtgaaacctccttcaacaaaaaagaaaaatcagagatggtgccaagttgcccctttatctatatcatccgtaaggatgtagatgtttactctcaaatcttgagaaaactcttcaatgaatcccatggaatctttctgggcctccagagaattgacgaagagttgactggaaaatccagaaaatctcaattggttcgagtgagtaaaaactaccgatcagtcatcagagcatgtatggaggaaatgcaccaggttgcaattgctgctaaagatccagccaatggccgccagttcagcagccaggtctccattttgtcagcaatggagctcatctggaacctgtgtgagattctttttattgaagtggccccagctggccctctcctcctccatctccttgactgggtccggctccatgtgtgcgaggtggacagtttgtcggcagatgttctgggcagtgagaatccaagcaaacatgacagcttctggaacttggtgaccatcttggtgctgcagggccggctggatgaggcccgacagatgctctccaaggaagccgatgccagccccgcctctgcaggcatatgccgaatcatgggggacctgatgaggacaatgcccattcttagtcctgggaacacccagacactgacagagctggagctgaagtggcagcactggcacgaggaatgtgagcggtacctccaggacagcacattcgccaccagccctcacctggagtctctcttgaagattatgctgggagacgaagctgccttgttagagcagaaggaacttctgagtaattggtatcatttcctagtgactcggctcttgtactccaatcccacagtaaaacccattgatctgcactactatgcccagtccagcctggacctgtttctgggaggtgagagcagcccagaacccctggacaacatcttgttggcagcctttgagtttgacatccatcaagtaatcaaagagtgcagcttcctctgaagacgggccagttccttgctgtctggcaagaggaaacagctggggtgcacttcactgggagttgggcaagatgtcggcagtttcctggtgcccttcaagtcctccaaaagtatcgagctaactcatgatcctcccacctcggcctcccaaagtgctgggattacaggtgtgagctaccgcgcccggccaacaacatgtttgatagatgtatacattgtgaaattaagctagtgacatctgtcacctcacacagtgaccctttggtgtgcgtgtggtgagaacattcaaaagctactttctagctgggtgtggtagcgcatgcctgtaatctcagctactgaagaggctgaggcatgagaattgcttgaacctgggaggcagaggttgcagtgagtcgagatctcaccagtgcactcccgtctgggtgacagagcaagactccacctcaactactttctgagcgatttttttttgtttttttggagaatatggtgtgtgctctctcacccaagttgggagtgcaggtggcgtgatctcggccgatgtgcagcctcgtgcttcccaggctcaagcaatactcccaccccagcttctcgagtagctgggattacaggtgtgtgccaccatgcctggctaatttttgtatttgtagagatggggttttgccatgttgcccaggctggtcttaaattcctggactcaggtgatctgcctgccttggcctcccaaagtactgggatcacgggcatgagctatcatcacgcccggccccatctctttgagggacaggacatgtggggtttcttgctcacccccactcttgtgggacgcggcctgtgccctgattttccttcttgccttggtgtctgaatctgcagggcccggcccagagatcagagcagcagtctcaggcccacctcaaccacccagtccctgggaagccaacactagcggcacccacctgtctgacacgagcgtggcaaagggggcat

SEQ ID NO: 443396 - DNA, 2173 bp, Homo sapiens
agtcagtcctcggcgctgttttccctgatttgctgtcgacgccaggaaggaaggacgcgtgcagaggaccgcagaggggtggccgtggctgagaggagacagcgccgcagcactgagggtttgggcttgcaggcgctgcaggagacgcccaggcggagtcttgtctcgcagccagctctgagcgggaggcctgagcgggaagcattggcgtccgagcgacttctaggagcctggggttcggcgctatggaggagctcgatggcgagccaacagtcactttgattccaggcgtgaattccaagaagaaccaaatgtattttgactggggtccaggggagatgctggtatgtgaaacctccttcaacaaaaaagaaaaatcagagatggtgccaagttgcccctttatctatatcatccgtaaggatgtagatgtttactctcaaatcttgagaaaactcttcaatgaatcccatggaatctttctgggcctccagagaattgacgaagagttgactggaaaatccagaaaatctcaattggttcgagtgagtaaaaactaccgatcagtcatcagagcatgtatggaggaaatgcaccaggttgcaattgctgctaaagatccagccaatggccgccagttcagcagccaggtctccattttgtcagcaatggagctcatctggaacctgtgtgagattctttttattgaagtggccccagctggccctctcctcctccatctccttgactgggtccggctccatgtgtgcgaggtggacagtttgtcggcagatgttctgggcagtgagaatccaagcaaacatgacagcttctggaacttgattatgctgggagacgaagctgccttgttagagcagaaggaacttctgagtaattggtatcatttcctagtgactcggctcttgtactccaatcccacagtaaaacccattgatctgcactactatgcccagtccagcctggacctgtttctgggaggtgagagcagcccagaacccctggacaacatcttgttggcagcctttgagtttgacatccatcaagtaatcaaagagtgcagcatcgccctgagcaactggtggtttgtggcccacctgacagacctgctggaccactgcaagctcctccagtcacacaacctctatttcggttccaacatgagagagttcctcctgctggagtacgcctcgggactgtttgctcatcccagcctgtggcagctgggggtcgattactttgattactgccccgagctgggccgagtctccctggagctgcacattgagcggatacctctgaacaccgagcagaaagccctgaaggtgctgcggatctgtgagcagcggcagatgactgaacaaggtgagctggccctgctcccagcctactgtctgtgggacgcaggagtcaggggatcctgaggtcacactttatgcctaccccagccatcctcctcctcacgagccacactggagacgtggggctgtggacgccaagagttcgcagcatttgtaagatcttagccatgaaagccgtccgcaacaatcgcctgggttctgccctctcttggagcatccgtgctaaggatgccgcctttgccacgctcgtgtcagacaggttcctcagggattactgtgagcgaggctgcttttctgatttggatctcattgacaacctggggccagccatgatgctcagtgaccgactgacattcctgggaaagtatcgcgagttccaccgtatgtacggggagaagcgttttgccgacgcagcttctctccttctgtccttgatgacgtctcggattgcccctcggtctttctggatgactctgctgacagatgccttgccccttttggaacagaaacaggtgattttctcagcagaacagacttatgagttgatgcggtgtctggaggacttgacgtcaagaagacctgtgcatggagaatctgataccgagcagctccaggatgatgacatagagaccaccaaggtggaaatgctgagactttctctggcacgaaatcttgctcgggcaattataagagaaggctcactggaaggttcctgagaactgcttcaatgtggtatctttgtatggcaatgtatatagattttttaaaagaataaatgttgttttgcaaatgta

SEQ ID NO: 443397 - DNA, 1766 bp, Homo sapiens
ttttgtagagatggggtttcaccgtgttagcgaagatggtcttgatttcctgacctcatgatcctcccacctcggcctcccaaagtgctgggattacaggtgtgagctaccgcgcccggccaacaacatgtttgatagatgtatacattgtgaaattaagctagtgacatctgtcacctcacacagtgaccctttggtgtgcgtgtggtgagaacattcaaaagctactttctagctgggtgtggtagcgcatgcctgtaatctcagctactgaagaggctgaggcatgagaattgcttgaacctgggaggcagaggttgcagtgagtcgagatctcaccagtgcactcccgtctgggtgacagagcaagactccacctcaactactttctgagcgatttttttttgtttttttggagaatatggtgtgtgctctctcacccaagttgggagtgcaggtggcgtgatctcggccgatgtgcagcctcgtgcttcccaggctcaagcaatactcccaccccagcttctcgagtagctgggattacaggtgtgtgccaccatgcctggctaatttttgtatttgtagagatggggttttgccatgttgcccaggctggtcttaaattcctggactcaggtgatctgcctgccttggcctcccaaagtactgggatcacgggcatgagctatcatcacgcccggccccatctctttgagggacaggacatgtggggtttcttgctcacccccactcttgtgggacgcggcctgtgccctgattttccttcttgccttggtgtctgaatctgcagcatcgccctgagcaactggtggtttgtggcccacctgacagacctgctggaccactgcaagctcctccagtcacacaacctctatttcggttccaacatgagagagttcctcctgctggagtacgcctcgggactgtttgctcatcccagcctgtggcagctgggggtcgattactttgattactgccccgagctgggccgagtctccctggagctgcacattgagcggatacctctgaacaccgagcagaaagccctgaaggtgctgcggatctgtgagcagcggcagatgactgaacaagttcgcagcatttgtaagatcttagccatgaaagccgtccgcaacaatcgcctgggttctgccctctcttggagcatccgtgctaaggatgccgcctttgccacgctcgtgtcagacaggttcctcagggattactgtgagcgaggctgcttttctgatttggatctcattgacaacctggggccagccatgatgctcagtgaccgactgacattcctgggaaagtatcgcgagttccaccgtatgtacggggagaagcgttttgccgacgcagcttctctccttctgtccttgatgacgtctcggattgcccctcggtctttctggatgactctgctgacagatgccttgccccttttggaacagaaacaggtgattttctcagcagaacagacttatgagttgatgcggtgtctggaggacttgacgtcaagaagacctgtgcatggagaatctgataccgagcagctccaggatgatgacatagagaccaccaaggtggaaatgctgagactttctctggcacgaaatcttgctcgggcaattataagagaaggctcactggaaggttcctgagaactgcttcaatgtggtatctttgtatggcaatgtatatagattttttaaaagaataaatgttgttttgcaaatgta

SEQ ID NO: 443398 - DNA, 2275 bp, Homo sapiens
gggtcttgtgggcacttgttttctcatgggatgtatcagtcagacccatgcacagttctgggcggcagggaagtgtgtctctttctggacttgagccagtgagctgttggcatgcctttttaaaggcattagaaaaaaggtttctttcttttttttcctttcctgttcacaccaccttcatatgaacatggagaagggaggtttctaagtgggcccctgatttactcctatgtcaataatcgtgccagaccctaaggggcagaaaaggcagccaggggatcctgactcagaggctgtagttcgtcagccctgctaaagggccaggggtttgtctctcagtgcctgggtgggcatgcttgactgctaaccccttagctgaaaggagatggcaggagtcctccacagggtcccttcttccctcctggcttacagcttcctctgaagacgggccagttccttgctgtctggcaagaggaaacagctggggtgcacttcactgggagttgggcaagatgtcggcagtttcctggtgcccttcaagtcctccaaaagtatcgagctaactcatgatcctcccacctcggcctcccaaagtgctgggattacaggtgtgagctaccgcgcccggccaacaacatgtttgatagatgtatacattgtgaaattaagctagtgacatctgtcacctcacacagtgaccctttggtgtgcgtgtggtgagaacattcaaaagctactttctagctgggtgtggtagcgcatgcctgtaatctcagctactgaagaggctgaggcatgagaattgcttgaacctgggaggcagaggttgcagtgagtcgagatctcaccagtgcactcccgtctgggtgacagagcaagactccacctcaactactttctgagcgatttttttttgtttttttggagaatatggtgtgtgctctctcacccaagttgggagtgcaggtggcgtgatctcggccgatgtgcagcctcgtgcttcccaggctcaagcaatactcccaccccagcttctcgagtagctgggattacaggtgtgtgccaccatgcctggctaatttttgtatttgtagagatggggttttgccatgttgcccaggctggtcttaaattcctggactcaggtgatctgcctgccttggcctcccaaagtactgggatcacgggcatgagctatcatcacgcccggccccatctctttgagggacaggacatgtggggtttcttgctcacccccactcttgtgggacgcggcctgtgccctgattttccttcttgccttggtgtctgaatctgcagcatcgccctgagcaactggtggtttgtggcccacctgacagacctgctggaccactgcaagctcctccagtcacacaacctctatttcggttccaacatgagagagttcctcctgctggagtacgcctcgggactgtttgctcatcccagcctgtggcagctgggggtcgattactttgattactgccccgagctgggccgagtctccctggagctgcacattgagcggatacctctgaacaccgagcagaaagccctgaaggtgctgcggatctgtgagcagcggcagatgactgaacaagttcgcagcatttgtaagatcttagccatgaaagccgtccgcaacaatcgcctgggttctgccctctcttggagcatccgtgctaaggatgccgcctttgccacgctcgtgtcagacaggttcctcagggattactgtgagcgaggctgcttttctgatttggatctcattgacaacctggggccagccatgatgctcagtgaccgactgacattcctgggaaagtatcgcgagttccaccgtatgtacggggagaagcgttttgccgacgcagcttctctccttctgtccttgatgacgtctcggattgcccctcggtctttctggatgactctgctgacagatgccttgccccttttggaacagaaacaggtgattttctcagcagaacagacttatgagttgatgcggtgtctggaggacttgacgtcaagaagacctgtgcatggagaatctgataccgagcagctccaggatgatgacatagagaccaccaaggtggaaatgctgagactttctctggcacgaaatcttgctcgggcaattataagagaaggctcactggaaggttcctgagaactgcttcaatgtggtatctttgtatggcaatgtatatagattttttaaaagaataaatgttgttttgcaaatgta

SEQ ID NO: 443399 - DNA, 929 bp, Homo sapiens
  misc_feature (10)..(11): n is a, c, g, or t
ctagtggatnncccgggctgcaggaattcgattaccattctggaagcaacacactcatagagccagtcttgccgtgatgggcacttacactcttagcagatcccagacactgttaatcagccgagtttccagctctgccgatccagctgcatttagagcccaaagagtggctctgcggtggagtgaggctgtgaggccactccggtccccacagggctcaggaatggagtgatttgtggagtgaaagccgtttaccttttcttttcccctgcaaagttcgcagcatttgtaagatcttagccatgaaagccgtccgcaacaatcgcctgggttctgccctctcttggagcatccgtgctaaggatgccgcctttgccacgctcgtgtcagacaggttcctcagggattactgtgagcgaggctgcttttctgatttggatctcattgacaacctggggccagccatgatgctcagtgaccgactgacattcctgggaaagtatcgcgagttccaccgtatgtacggggagaagcgttttgccgacgcagcttctctccttctgtccttgatgacgtctcggattgcccctcggtctttctggatgactctgctgacagatgccttgccccttttggaacagaaacaggtgattttctcagcagaacagacttatgagttgatgcggtgtctggaggacttgacgtcaagaagacctgtgcatggagaatctgataccgagcagctccaggatgatgacatagagaccaccaaggtggaaatgctgagactttctctggcacgaaatcttgctcgggcaattataagagaaggctcactggaaggttcctgagaactgcttcaatgtggtatctttgtatggcaatgtatatagattttttaaaagaataaatgttgttttgcaaatgta

SEQ ID NO: 443400 - DNA, 428 bp, Homo sapiens
gtcagggctggggttggcgctgtttccctgtccaggtgggttgctattgctagctcagcctggctcaatggggaagcagtgctggaggtggctccagaaaagcagagagagtggaatgaggatgaccaagtctgccccttcatttctcccctcactgttgagtaatgtaaacatgagttattaccctgcagagaggcagttgcatgttcacgaccatttctgaaagcatatggtattcacgatccacaggaagatgtgatttgaggcatctggagaggtaatagaagagctgacacgtagggagaaacacgtagggagaaaaaaaatagaagagctgacatgtagggagcaacgttttgctccccttgaagccacacacactcatagagccagtcttgccgtgatgggcacttacactcttagcagat

SEQ ID NO: 443401 - DNA, 592 bp, Homo sapiens
gcctggcacagaagtaatatttggtgaaagtgcatttgctttttcctagcacagtctgtcattcaggaccatgtgtgtgactgcttaaaagggataaacctatgtagtcagcttgtctgccttaaagttctctgttccttggataaaggaacttgctgcagatgaagctgaggcttttgtgtgtgatgagagtctctcctcccagctggccctctcctcctccatctccttgactgggtccggctccatgtgtgcgaggtggacagtttgtcggcagatgttctgggcagtgagaatccaagcaaacatgacagcttctggaacttgggtaagacaggccgggcccccacctcccaccatgtgtcctactgtccctggtgctgccgggtgggtctgaggacacccactgagcctccagcagtaggctggcttttggagtctgttactatggagactcttttggatcttttcttccctgctctatgggagagtctaaaaccgaggtaccatgtaagaaaaataatgctttgaagacttttccagggtaaaaggaaatttgatttctttgtggatctaaggaagagaagacaca

SEQ ID NO: 443402 - DNA, 428 bp, Homo sapiens
  misc_feature (10)..(11): n is a, c, g, or t
ctagtggatnncccgggctgcaggaattcgattaccattctggaagcaacacactcatagagccagtcttgccgtgatgggcacttacactcttagcagatcccagacactgttaatcagccgagtttccagctctgccgatccagctgcatttagagcccaaagagtggctctgcggtggagtgaggctgtgaggccactccggtccccacagggctcaggaatggagtgatttgtggagtgaaagccgtttaccttttcttttcccctgcaaagttcgcagcatttgtaagatcttagccatgaaagccgtccgcaacaatcgcctgggttctgccctctcttggagcatccgtgctaaggatgccgcctttgccacgctcgtgtcagacaggtgggtgccgctagtgttgcttcccagggactgg

SEQ ID NO: 443403 - DNA, 2301 bp, Homo sapiens
gaaaaaaaaaaagaaaaaaaacaaaaaacaaaaaatacatcacaataagaggccgaatgtaaataaagacgagggacgcagaggggtggccgtggctgagaggagacagcgccgcagcactgagggtttgggcttgcaggcgctgcaggagacgcccaggcggagtcttgtctcgcagccagctctgagcgggaggcctgagcgggaagcattggcgtccgagcgacttctaggagcctggggttcggcgctatggaggagctcgatggcgagccaacagtcactttgattccaggcgtgaattccaagaagaaccaaatgtattttgactggggtccaggggagatgctggtatgtgaaacctccttcaacaaaaaagaaaaatcagagatggtgccaagttgcccctttatctatatcatccgtaaggatgtagatgtttactctcaaatcttgagaaaactcttcaatgaatcccatggaatctttctgggcctccagagaattgacgaagagttgactggaaaatccagaaaatctcaattggttcgagtgagtaaaaactaccgatcagtcatcagagcatgtatggaggaaatgcaccaggttgcaattgctgctaaagatccagccaatggccgccagttcagcagccaggtctccattttgtcagcaatggagctcatctggaacctgtgtgagattctttttattgaagtggccccagctggccctctcctcctccatctccttgactgggtccggctccatgtgtgcgaggtggacagtttgtcggcagatgttctgggcagtgagaatccaagcaaacatgacagcttctggaacttggtgaccatcttggtgctgcagggccggctggatgaggcccgacagatgctctccaaggaagccgatgccagccccgcctctgcaggcatatgccgaatcatgggggacctgatgaggacaatgcccattcttagtcctgggaacacccagacactgacagagctggagctgaagtggcagcactggcacgaggaatgtgagcggtacctccaggacagcacattcgccaccagccctcacctggagtctctcttgaagattatgctgggagacgaagctgccttgttagagcagaaggaacttctgagtaattggtatcatttcctagtgactcggctcttgtactccaatcccacagtaaaacccattgatctgcactactatgcccagtccagcctggacctgtttctgggaggtgagagcagcccagaacccctggacaacatcttgttggcagcctttgagtttgacatccatcaagtaatcaaagagtgcagcatcgccctgagcaactggtggtttgtggcccacctgacagacctgctggaccactgcaagctcctccagtcacacaacctctatttcggttccaacatgagagagttcctcctgctggagtacgcctcgggactgtttgctcatcccagcctgtggcagctgggggtcgattactttgattactgccccgagctgggccgagtctccctggagctgcacattgagcggatacctctgaacaccgagcagaaagccctgaaggtgctgcggatctgtgagcagcggcagatgactgaacaagttcgcagcatttgtaagatcttagccatgaaagccgtccgcaacaatcgcctgggttctgccctctcttggagcatccgtgctaaggatgccgcctttgccacgctcgtgtcagacaggttcctcagggattactgtgagcgaggctgcttttctgatttggatctcattgacaacctggggccagccatgatgctcagtgaccgactgacattcctgggaaagtatcgcgagttccaccgtatgtacggggagaagcgttttgccgacgcagcttctctccttctgtccttgatgacgtctcggattgcccctcggtctttctggatgactctgctgacagatgccttgccccttttggaacagaaacaggtgattttctcagcagaacagacttatgagttgatgcggtgtctggaggacttgacgtcaagaagacctgtgcatggagaatctgataccgagcagctccaggatgatgacatagagaccaccaaggtggaaatgctgagactttctctggcacgaaatcttgctcgggcaattataagagaaggctcactggaaggttcctgagaactgcttcaatgtggtatctttgtatggcaatgtatatagattttttaaaagaataaatgttgttttgcaaatgta

SEQ ID NO: 443404 - DNA, 2425 bp, Homo sapiens
agtcagtcctcggcgctgttttccctgatttgctgtcgacgccaggaaggaaggacgcgtgcagaggaccgcagaggggtggccgtggctgagaggagacagcgccgcagcactgagggtttgggcttgcaggcgctgcaggagacgcccaggcggagtcttgtctcgcagccagctctgagcgggaggcctgagcgggaagcattggcgtccgagcgacttctaggagcctggggttcggcgctatggaggagctcgatggcgagccaacagtcactttgattccaggcgtgaattccaagaagaaccaaatgtattttgactggggtccaggggagatgctggtatgtgaaacctccttcaacaaaaaagaaaaatcagagatggtgccaagttgcccctttatctatatcatccgtaaggatgtagatgtttactctcaaatcttgagaaaactcttcaatgaatcccatggaatctttctgggcctccagagaattgacgaagagttgactggaaaatccagaaaatctcaattggttcgagtgagtaaaaactaccgatcagtcatcagagcatgtatggaggaaatgcaccaggttgcaattgctgctaaagatccagccaatggccgccagttcagcagccaggtctccattttgtcagcaatggagctcatctggaacctgtgtgagattctttttattgaagtggccccagctggccctctcctcctccatctccttgactgggtccggctccatgtgtgcgaggtggacagtttgtcggcagatgttctgggcagtgagaatccaagcaaacatgacagcttctggaacttggtgaccatcttggtgctgcagggccggctggatgaggcccgacagatgctctccaaggaagccgatgccagccccgcctctgcaggcatatgccgaatcatgggggacctgatgaggacaatgcccattcttagtcctgggaacacccagacactgacagagctggagctgaagtggcagcactggcacgaggaatgtgagcggtacctccaggacagcacattcgccaccagccctcacctggagtctctcttgaagattatgctgggagacgaagctgccttgttagagcagaaggaacttctgagtaattggtatcatttcctagtgactcggctcttgtactccaatcccacagtaaaacccattgatctgcactactatgcccagtccagcctggacctgtttctgggaggtgagagcagcccagaacccctggacaacatcttgttggcagcctttgagtttgacatccatcaagtaatcaaagagtgcagcttcctctgaagacgggccagttccttgctgtctggcaagaggaaacagctggggtgcacttcactgggagttgggcaagatgtcggcagtttcctggtgcccttcaagtcctccaaaagtatcgagctaacatcgccctgagcaactggtggtttgtggcccacctgacagacctgctggaccactgcaagctcctccagtcacacaacctctatttcggttccaacatgagagagttcctcctgctggagtacgcctcgggactgtttgctcatcccagcctgtggcagctgggggtcgattactttgattactgccccgagctgggccgagtctccctggagctgcacattgagcggatacctctgaacaccgagcagaaagccctgaaggtgctgcggatctgtgagcagcggcagatgactgaacaagttcgcagcatttgtaagatcttagccatgaaagccgtccgcaacaatcgcctgggttctgccctctcttggagcatccgtgctaaggatgccgcctttgccacgctcgtgtcagacaggttcctcagggattactgtgagcgaggctgcttttctgatttggatctcattgacaacctggggccagccatgatgctcagtgaccgactgacattcctgggaaagtatcgcgagttccaccgtatgtacggggagaagcgttttgccgacgcagcttctctccttctgtccttgatgacgtctcggattgcccctcggtctttctggatgactctgctgacagatgccttgccccttttggaacagaaacaggtgattttctcagcagaacagacttatgagttgatgcggtgtctggaggacttgacgtcaagaagacctgtgcatggagaatctgataccgagcagctccaggatgatgacatagagaccaccaaggtggaaatgctgagactttctctggcacgaaatcttgctcgggcaattataagagaaggctcactggaaggttcctgagaactgcttcaatgtggtatctttgtatggcaatgtatatagattttttaaaagaataaatgttgttttgcaaatgta

SEQ ID NO: 443405 - DNA, 2192 bp, Homo sapiens
agtcagtcctcggcgctgttttccctgatttgctgtcgacgccaggaaggaaggacgcgtgcagaggaccgcagaggggtggccgtggctgagaggagacagcgccgcagcactgagggtttgggcttgcaggcgctgcaggagacgcccaggcggagtcttgtctcgcagccagctctgagcgggaggcctgagcgggaagcattggcgtccgagcgacttctaggagcctggggttcggcgctatggaggagctcgatggcgagccaacagtcactttgattccaggcgtgaattccaagaagaaccaaatgtattttgactggggtccaggggagatgctggtatgtgaaacctccttcaacaaaaaagaaaaatcagagatggtgccaagttgcccctttatctatatcatccgtaaggatgtagatgtttactctcaaatcttgagaaaactcttcaatgaatcccatggaatctttctgggcctccagagaattgacgaagagttgactggaaaatccagaaaatctcaattggttcgagtgagtaaaaactaccgatcagtcatcagagcatgtatggaggaaatgcaccaggttgcaattgctgctaaagatccagccaatggccgccagttcagcagccaggtctccattttgtcagcaatggagctcatctggaacctgtgtgagattctttttattgaagtggccccagctggccctctcctcctccatctccttgactgggtccggctccatgtgtgcgaggtggacagtttgtcggcagatgttctgggcagtgagaatccaagcaaacatgacagcttctggaacttggtgaccatcttggtgctgcagggccggctggatgaggcccgacagatgctctccaaggaagccgatgccagccccgcctctgcaggcatatgccgaatcatgggggacctgatgaggacaatgcccattcttagtcctgggaacacccagacactgacagagctggagctgaagtggcagcactggcacgaggaatgtgagcggtacctccaggacagcacattcgccaccagccctcacctggagtctctcttgaagattatgctgggagacgaagctgccttgttagagcagaaggaacttctgagtaattggtatcatttcctagtgactcggctcttgtactccaatcccacagtaaaacccattgatctgcactactatgcccagtccagcctggacctgtttctgggaggtgagagcagcccagaacccctggacaacatcttgttggcagcctttgagtttgacatccatcaagtaatcaaagagtgcagcatcgccctgagcaactggtggtttgtggcccacctgacagacctgctggaccactgcaagctcctccagtcacacaacctctatttcggttccaacatgagagagttcctcctgctggagtacgcctcgggactgtttgctcatcccagcctgtggcagctgggggtcgattactttgattactgccccgagctgggccgagtctccctggagctgcacattgagcggatacctctgaacaccgagcagaaagccctgaaggtgctgcggatctgtgagcagcggcagatgactgaacaagttcgcagcatttgtaagatcttagccatgaaagccgtccgcaacaatcgcctgggttctgccctctcttggagcatccgtgctaaggatgccgcctttgccacgctcgtgtcagacaggttcctcagggattactgtgagcgaggctgcttttctgatttggatctcattgacaacctggggccagccatgatgctcagtgaccgactgacattcctgggaaagtatcgcgagttccaccgtatgtacggggagaagcgttttgccgacgcagcttctctccttctgtccttgatgacgtctcggattgcccctcggtctttctggatgactctgctgacagatgccttgccccttttggaacagaaacaggatgatgacatagagaccaccaaggtggaaatgctgagactttctctggcacgaaatcttgctcgggcaattataagagaaggctcactggaaggttcctgagaactgcttcaatgtggtatctttgtatggcaatgtatatagattttttaaaagaataaatgttgttttgcaaatgta

SEQ ID NO: 443406 - DNA, 2207 bp, Homo sapiens
gaaaaaaaaaaagaaaaaaaacaaaaaacaaaaaatacatcacaataagaggccgaatgtaaataaagacgagggacgcagaggggtggccgtggctgagaggagacagcgccgcagcactgagggtttgggcttgcaggcgctgcaggagacgcccaggcggagtcttgtctcgcagccagctctgagcgggaggcctgagcgggaagcattggcgtccgagcgacttctaggagcctggggttcggcgctatggaggagctcgatggcgagccaacagtcactaaaaatcagagatggtgccaagttgcccctttatctatatcatccgtaaggatgtagatgtttactctcaaatcttgagaaaactcttcaatgaatcccatggaatctttctgggcctccagagaattgacgaagagttgactggaaaatccagaaaatctcaattggttcgagtgagtaaaaactaccgatcagtcatcagagcatgtatggaggaaatgcaccaggttgcaattgctgctaaagatccagccaatggccgccagttcagcagccaggtctccattttgtcagcaatggagctcatctggaacctgtgtgagattctttttattgaagtggccccagctggccctctcctcctccatctccttgactgggtccggctccatgtgtgcgaggtggacagtttgtcggcagatgttctgggcagtgagaatccaagcaaacatgacagcttctggaacttggtgaccatcttggtgctgcagggccggctggatgaggcccgacagatgctctccaaggaagccgatgccagccccgcctctgcaggcatatgccgaatcatgggggacctgatgaggacaatgcccattcttagtcctgggaacacccagacactgacagagctggagctgaagtggcagcactggcacgaggaatgtgagcggtacctccaggacagcacattcgccaccagccctcacctggagtctctcttgaagattatgctgggagacgaagctgccttgttagagcagaaggaacttctgagtaattggtatcatttcctagtgactcggctcttgtactccaatcccacagtaaaacccattgatctgcactactatgcccagtccagcctggacctgtttctgggaggtgagagcagcccagaacccctggacaacatcttgttggcagcctttgagtttgacatccatcaagtaatcaaagagtgcagcatcgccctgagcaactggtggtttgtggcccacctgacagacctgctggaccactgcaagctcctccagtcacacaacctctatttcggttccaacatgagagagttcctcctgctggagtacgcctcgggactgtttgctcatcccagcctgtggcagctgggggtcgattactttgattactgccccgagctgggccgagtctccctggagctgcacattgagcggatacctctgaacaccgagcagaaagccctgaaggtgctgcggatctgtgagcagcggcagatgactgaacaagttcgcagcatttgtaagatcttagccatgaaagccgtccgcaacaatcgcctgggttctgccctctcttggagcatccgtgctaaggatgccgcctttgccacgctcgtgtcagacaggttcctcagggattactgtgagcgaggctgcttttctgatttggatctcattgacaacctggggccagccatgatgctcagtgaccgactgacattcctgggaaagtatcgcgagttccaccgtatgtacggggagaagcgttttgccgacgcagcttctctccttctgtccttgatgacgtctcggattgcccctcggtctttctggatgactctgctgacagatgccttgccccttttggaacagaaacaggtgattttctcagcagaacagacttatgagttgatgcggtgtctggaggacttgacgtcaagaagacctgtgcatggagaatctgataccgagcagctccaggatgatgacatagagaccaccaaggtggaaatgctgagactttctctggcacgaaatcttgctcgggcaattataagagaaggctcactggaaggttcctgagaactgcttcaatgtggtatctttgtatggcaatgtatatagattttttaaaagaataaatgttgttttgcaaatgta

SEQ ID NO: 443407 - DNA, 2159 bp, Homo sapiens
agtcagtcctcggcgctgttttccctgatttgctgtcgacgccaggaaggaaggacgcgtgcagaggaccgcagaggggtggccgtggctgagaggagacagcgccgcagcactgagggtttgggcttgcaggcgctgcaggagacgcccaggcggagtcttgtctcgcagccagctctgagcgggaggcctgagcgggaagcattggcgtccgagcgacttctaggagcctggggttcggcgctatggaggagctcgatggcgagccaacagtcactttgattccaggcgtgaattccaagaagaaccaaatgtattttgactggggtccaggggagatgctggtatgtgaaacctccttcaacaaaaaagaaaaatcagagatggtgccaagttgcccctttatctatatcatccgtaaggatgtagatgtttactctcaaatcttgagaaaactcttcaatgaatcccatggaatctttctgggcctccagagaattgacgaagagttgactggaaaatccagaaaatctcaattggttcgagtgagtaaaaactaccgatcagtcatcagagcatgtatggaggaaatgcaccaggttgcaattgctgctaaagatccagccaatggccgccagttcagcagccaggtctccattttgtcagcaatggagctcatctggaacctgtgtgagattctttttattgaagtggccccagctggccctctcctcctccatctccttgactgggtccggctccatgtgtgcgaggtggacagtttgtcggcagatgttctgggcagtgagaatccaagcaaacatgacagcttctggaacttgcctgggaacacccagacactgacagagctggagctgaagtggcagcactggcacgaggaatgtgagcggtacctccaggacagcacattcgccaccagccctcacctggagtctctcttgaagattatgctgggagacgaagctgccttgttagagcagaaggaacttctgagtaattggtatcatttcctagtgactcggctcttgtactccaatcccacagtaaaacccattgatctgcactactatgcccagtccagcctggacctgtttctgggaggtgagagcagcccagaacccctggacaacatcttgttggcagcctttgagtttgacatccatcaagtaatcaaagagtgcagcatcgccctgagcaactggtggtttgtggcccacctgacagacctgctggaccactgcaagctcctccagtcacacaacctctatttcggttccaacatgagagagttcctcctgctggagtacgcctcgggactgtttgctcatcccagcctgtggcagctgggggtcgattactttgattactgccccgagctgggccgagtctccctggagctgcacattgagcggatacctctgaacaccgagcagaaagccctgaaggtgctgcggatctgtgagcagcggcagatgactgaacaagttcgcagcatttgtaagatcttagccatgaaagccgtccgcaacaatcgcctgggttctgccctctcttggagcatccgtgctaaggatgccgcctttgccacgctcgtgtcagacaggttcctcagggattactgtgagcgaggctgcttttctgatttggatctcattgacaacctggggccagccatgatgctcagtgaccgactgacattcctgggaaagtatcgcgagttccaccgtatgtacggggagaagcgttttgccgacgcagcttctctccttctgtccttgatgacgtctcggattgcccctcggtctttctggatgactctgctgacagatgccttgccccttttggaacagaaacaggtgattttctcagcagaacagacttatgagttgatgcggtgtctggaggacttgacgtcaagaagacctgtgcatggagaatctgataccgagcagctccaggatgatgacatagagaccaccaaggtggaaatgctgagactttctctggcacgaaatcttgctcgggcaattataagagaaggctcactggaaggttcctgagaactgcttcaatgtggtatctttgtatggcaatgtatatagattttttaaaagaataaatgttgttttgcaaatgta

SEQ ID NO: 443408 - DNA, 1565 bp, Homo sapiens
agtcagtcctcggcgctgttttccctgatttgctgtcgacgccaggaaggaaggacgcgtgcagaggaccgcagaggggtggccgtggctgagaggagacagcgccgcagcactgagggtttgggcttgcaggcgctgcaggagacgcccaggcggagtcttgtctcgcagccagctctgagcgggaggcctgagcgggaagcattggcgtccgagcgacttctaggagcctggggttcggcgctatggaggagctcgatggcgagccaacagtcactttgattccaggcgtgaattccaagaagaaccaaatgtattttgactggggtccaggggagatgctggtatgtgaaacctccttcaacaaaaaagaaaaatcagagatggtgccaagttgcccctttatctatatcatccgtaaggatgtagatgtttactctcaaatcttgagaaaactcttcaatgaatcccatggaatctttctgggcctccagagaattgacgaagagttgactggaaaatccagaaaatctcaattggttcgagtgagtaaaaactaccgatcagtcatcagagcatgtatggaggaaatgcaccaggttgcaattgctgctaaagatccagccaatggccgccagttcagcagccaggtctccattttgtcagcaatggagctcatctggaacctgtgtgagattctttttattgaagtggccccagctggccctctcctcctccatctccttgactgggtccggctccatgtgtgcgaggtggacagtttgtcggcagatgttctgggcagtgagaatccaagcaaacatgacagcttctggaacttggtgaccatcttggtgctgcagggccggctggatgaggcccgacagatgctctccaaggaagccgatgccagccccgcctctgcaggcatatgccgaatcatgggggacctgatgaggacaatgcccattcttagtcctgggaacacccagacactgacagagctggagctgaagtggcagcactggcacgaggaatgtgagcggtacctccaggacagcacattcgccaccagccctcacctggagtctctcttgaagattatgctgggagacgaagctgccttgttagagcagaaggaacttctgagtaattggtatcatttcctagtgactcggctcttgtactccaatcccacagtaaaacccattgatctgcactactatgcccagtccagcctggacctgtttctgggaggtgagagcagcccagaacccctggacaacatcttgttggcagcctttgagtttgacatccatcaagtaatcaaagagtgcagcatcgccctgagcaactggtggtttgtggcccacctgacagacctgctggaccactgcaagctcctccagtcacacaacctctatttcggttccaacatgagagagttcctcctgctggagtacgcctcgggactgtttgctcatcccagcctgtggctgcctgggggtccggctgtctggtactagctttttcataccggcgcctcgcgggggcccttttacgcg

SEQ ID NO: 443409 - DNA, 1952 bp, Homo sapiens
ggtctcgaattcctgacctcgtgatctgcctgccttggcctcccaaagtgctgggattataggcaagagccaccatgcccggccacagaaaatttttttagagtagattcacttttggagatgatcataatagatgttaaattttttttttctgtttggtttcagaaaaatcagagatggtgccaagttgcccctttatctatatcatccgtaaggatgtagatgtttactctcaaatcttgagaaaactcttcaatgaatcccatggaatctttctgggcctccagagaattgacgaagagttgactggaaaatccagaaaatctcaattggttcgagtgagtaaaaactaccgatcagtcatcagagcatgtatggaggaaatgcaccaggttgcaattgctgctaaagatccagccaatggccgccagttcagcagccaggtctccattttgtcagcaatggagctcatctggaacctgtgtgagattctttttattgaagtggccccagctggccctctcctcctccatctccttgactgggtccggctccatgtgtgcgaggtggacagtttgtcggcagatgttctgggcagtgagaatccaagcaaacatgacagcttctggaacttgcctgggaacacccagacactgacagagctggagctgaagtggcagcactggcacgaggaatgtgagcggtacctccaggacagcacattcgccaccagccctcacctggagtctctcttgaagattatgctgggagacgaagctgccttgttagagcagaaggaacttctgagtaattggtatcatttcctagtgactcggctcttgtactccaatcccacagtaaaacccattgatctgcactactatgcccagtccagcctggacctgtttctgggaggtgagagcagcccagaacccctggacaacatcttgttggcagcctttgagtttgacatccatcaagtaatcaaagagtgcagcatcgccctgagcaactggtggtttgtggcccacctgacagacctgctggaccactgcaagctcctccagtcacacaacctctatttcggttccaacatgagagagttcctcctgctggagtacgcctcgggactgtttgctcatcccagcctgtggcagctgggggtcgattactttgattactgccccgagctgggccgagtctccctggagctgcacattgagcggatacctctgaacaccgagcagaaagccctgaaggtgctgcggatctgtgagcagcggcagatgactgaacaagttcgcagcatttgtaagatcttagccatgaaagccgtccgcaacaatcgcctgggttctgccctctcttggagcatccgtgctaaggatgccgcctttgccacgctcgtgtcagacaggttcctcagggattactgtgagcgaggctgcttttctgatttggatctcattgacaacctggggccagccatgatgctcagtgaccgactgacattcctgggaaagtatcgcgagttccaccgtatgtacggggagaagcgttttgccgacgcagcttctctccttctgtccttgatgacgtctcggattgcccctcggtctttctggatgactctgctgacagatgccttgccccttttggaacagaaacaggtgattttctcagcagaacagacttatgagttgatgcggtgtctggaggacttgacgtcaagaagacctgtgcatggagaatctgataccgagcagctccaggatgatgacatagagaccaccaaggtggaaatgctgagactttctctggcacgaaatcttgctcgggcaattataagagaaggctcactggaaggttcctgagaactgcttcaatgtggtatctttgtatggcaatgtatatagattttttaaaagaataaatgttgttttgcaaatgta

SEQ ID NO: 443410 - DNA, 2349 bp, Homo sapiens
gatctgcctgtcttggcctcccacagtgctaggattacaggcgtaagccaccatgcccggcctgaaagtcaagttttgtgtcaatattttcacaggcctgtaaacattgtgagaagtccctgcatggaagaattagtgagaataacttaaaaacacacaaacacaccatcgtttggctttgttggtgtctctgcccatagttgagtattctaaatttcctgtgttataacagtgagtgagtttcaccagggcttcctaatttataagccctgtatctggatttttaggaataaaacagatttgagcagaagaagtctgttggatgcagggagtataaaaggggaaagcatcctgctgtttccagtggcagaagagaaagagaagtaccatgaagaggggtgaacaacatcactctcgtgccggacacagacaaggaatgattaggcttgcagtcccccagtctcagcctctctccactctcacaagcaggaagggatctgagctctcttcctctgaagacgggccagttccttgctgtctggcaagaggaaacagctggggtgcacttcactgggagttgggcaagatgtcggcagtttcctggtgcccttcaagtcctccaaaagtatcgagctaactcatgatcctcccacctcggcctcccaaagtgctgggattacaggtgtgagctaccgcgcccggccaacaacatgtttgatagatgtatacattgtgaaattaagctagtgacatctgtcacctcacacagtgaccctttggtgtgcgtgtggtgagaacattcaaaagctactttctagctgggtgtggtagcgcatgcctgtaatctcagctactgaagaggctgaggcatgagaattgcttgaacctgggaggcagaggttgcagtgagtcgagatctcaccagtgcactcccgtctgggtgacagagcaagactccacctcaactactttctgagcgatttttttttgtttttttggagaatatggtgtgtgctctctcacccaagttgggagtgcaggtggcgtgatctcggccgatgtgcagcctcgtgcttcccaggctcaagcaatactcccaccccagcttctcgagtagctgggattacaggtgtgtgccaccatgcctggctaatttttgtatttgtagagatggggttttgccatgttgcccaggctggtcttaaattcctggactcaggtgatctgcctgccttggcctcccaaagtactgggatcacgggcatgagctatcatcacgcccggccccatctctttgagggacaggacatgtggggtttcttgctcacccccactcttgtgggacgcggcctgtgccctgattttccttcttgccttggtgtctgaatctgcagcatcgccctgagcaactggtggtttgtggcccacctgacagacctgctggaccactgcaagctcctccagtcacacaacctctatttcggttccaacatgagagagttcctcctgctggagtacgcctcgggactgtttgctcatcccagcctgtggcagctgggggtcgattactttgattactgccccgagctgggccgagtctccctggagctgcacattgagcggatacctctgaacaccgagcagaaagccctgaaggtgctgcggatctgtgagcagcggcagatgactgaacaagttcgcagcatttgtaagatcttagccatgaaagccgtccgcaacaatcgcctgggttctgccctctcttggagcatccgtgctaaggatgccgcctttgccacgctcgtgtcagacaggttcctcagggattactgtgagcgaggctgcttttctgatttggatctcattgacaacctggggccagccatgatgctcagtgaccgactgacattcctgggaaagtatcgcgagttccaccgtatgtacggggagaagcgttttgccgacgcagcttctctccttctgtccttgatgacgtctcggattgcccctcggtctttctggatgactctgctgacagatgccttgccccttttggaacagaaacaggtgattttctcagcagaacagacttatgagttgatgcggtgtctggaggacttgacgtcaagaagacctgtgcatggagaatctgataccgagcagctccaggatgatgacatagagaccaccaaggtggaaatgctgagactttctctggcacgaaatcttgctcgggcaattataagagaaggctcactggaaggttcctgagaactgcttcaatgtggtatctttgtatggcaatgtatatagattttttaaaagaataaatgttgttttgcaaatgta

SEQ ID NO: 443411 - DNA, 1518 bp, Homo sapiens
gggtcttgtgggcacttgttttctcatgggatgtatcagtcagacccatgcacagttctgggcggcagggaagtgtgtctctttctggacttgagccagtgagctgttggcatgcctttttaaaggcattagaaaaaaggtttctttcttttttttcctttcctgttcacaccaccttcatatgaacatggagaagggaggtttctaagtgggcccctgatttactcctatgtcaataatcgtgccagaccctaaggggcagaaaaggcagccaggggatcctgactcagaggctgtagttcgtcagccctgctaaagggccaggggtttgtctctcagtgcctgggtgggcatgcttgactgctaaccccttagctgaaaggagatggcaggagtcctccacagggtcccttcttccctcctggcttacagcttcctctgaagacgggccagttccttgctgtctggcaagaggaaacagctggggtgcacttcactgggagttgggcaagatgtcggcagtttcctggtgcccttcaagtcctccaaaagtatcgagctaacatcgccctgagcaactggtggtttgtggcccacctgacagacctgctggaccactgcaagctcctccagtcacacaacctctatttcggttccaacatgagagagttcctcctgctggagtacgcctcgggactgtttgctcatcccagcctgtggcagctgggggtcgattactttgattactgccccgagctgggccgagtctccctggagctgcacattgagcggatacctctgaacaccgagcagaaagccctgaaggtgctgcggatctgtgagcagcggcagatgactgaacaagttcgcagcatttgtaagatcttagccatgaaagccgtccgcaacaatcgcctgggttctgccctctcttggagcatccgtgctaaggatgccgcctttgccacgctcgtgtcagacaggttcctcagggattactgtgagcgaggctgcttttctgatttggatctcattgacaacctggggccagccatgatgctcagtgaccgactgacattcctgggaaagtatcgcgagttccaccgtatgtacggggagaagcgttttgccgacgcagcttctctccttctgtccttgatgacgtctcggattgcccctcggtctttctggatgactctgctgacagatgccttgccccttttggaacagaaacaggtgattttctcagcagaacagacttatgagttgatgcggtgtctggaggacttgacgtcaagaagacctgtgcatggagaatctgataccgagcagctccaggatgatgacatagagaccaccaaggtggaaatgctgagactttctctggcacgaaatcttgctcgggcaattataagagaaggctcactggaaggttcctgagaactgcttcaatgtggtatctttgtatggcaatgtatatagattttttaaaagaataaatgttgttttgcaaatgta

SEQ ID NO: 443412 - DNA, 880 bp, Homo sapiens
aaatctcctgctttgtggagtggctggtctgaggtttttcttctcctgtttagggccagggtgacttttgtaggtgtcacttgggcaatttgggggaatatgcaggttactcagtgctcttgtttcgccataggaaagtatcgcgagttccaccgtatgtacggggagaagcgttttgccgacgcagcttctctccttctgtccttgatgacgtctcggattgcccctcggtctttctggatgactctgctgacagatgccttgccccttttggaacagaaacaggtgaaggttgcagcagcagtggttttctttgcttgtcagtccctgctagagcttagttgtatagctgttgccgatgtgcgtgtttcctcctttgtcgttctgcctgtgcgcgtgtattccccttagcgccctctctgggattccagactcacacaggaaacaaacactgcttgatttgaaatgaggtattcgtatacaaagcacactattgcgaagggtatgaaaggaagaacgtccgaacatgggcccctgccccaaccaatgcaggccagggctgggggcagccaagcaaggcaggctctcttccctaggtgtgattttctcagcagaacagacttatgagttgatgcggtgtctggaggacttgacgtcaagaagacctgtgcatggagaatctgataccgagcagctccaggatgatgacatagagaccaccaaggtggaaatgctgagactttctctggcacgaaatcttgctcgggcaattataagagaaggctcactggaaggttcctgagaactgcttcaatgtggtatctttgtatggcaatgtatatagattttttaaaagaataaatgttgttttgcaaatgta

SEQ ID NO: 443413 - DNA, 979 bp, Homo sapiens
cgaccagaagaaagtaggagagaacctagtaaacttgagattggaggttatgtgaaatcaccaaactagatgattccagcaaaaagagtttctgtgatgtgtgtgtaggttcacaccccttaagataaccatacttgactgtatgatagtcgcaggagtcacttacttactacagatgcatcagagaccatgtgatgaagaagatggcttcccagtggagttgcaaggtgcctctggggggtgtgtttttaaattgtcaacagcttccacatggtgtttatatccttaacttttggcattgggggcattcagatgaggtcatccgcttgggtccatttcctgagtgttgatcattttgcgacacagagaacagcgtcttctattcttagagccttcaagcctaaatgctccctgcctggctccaggcccatgcccccttcctccccacccactttccccagaaaatttttgttgtggaaaattacacattcacaaattgtgtttctttcctcacaccaagcatattcccacacagagacagattctggaatgatctcatggatgactcatgccattatctggctgtttataggagctgcctttagacaaagatttggtcataagctacgttaagaccccttcattgtctgccagttgcccttgcaggggatggcttatggcttatcgatggagtcctgagtgggagtgggaagggacttctagactaaaagctgcttttgacttcacttttgtccatcaactgtggaccctgttccattgtctctgaactctggaggcaccttctgcttgatgtcagcaagcaggcctggtccaagatggcagctgcactgtatcggaagggcaacaaacgggactcttaagctaaggggaagacttgtgtcgtcgacttccggcccatgtgtaatctcttaattaaaatttagctcacaagtggtatttcctttcgtaatccagcttt

SEQ ID NO: 443414 - DNA, 451 bp, Homo sapiens
cccactgattctacattatggtggtttgtataattatttcattatatattacaatgtaataataataatagaaataaagtgcacaataaatgtaatgtagttgaattattccgaaaccatacccccaccttggttcatggaaaaaccgaggtgcttttggcaccagtgactggtttcttccacaaaaccagtccctgatgtcaaaaaggttggggagtgctgctttagggcactgcccagacaccacttcagagctgctgaactcattccctcagctgttggctctcagctgcatcctgcttcaagaactgctgcagggagccacctcgcctaacattgcttcctcttcccagggctgcccatcaacccacctccaatgactggtcggtccagtccccttgctttaagggaaatcaatgctaaagagctacgacacttccagaactcctcg

SEQ ID NO: 443415 - DNA, 1964 bp, Homo sapiens
  misc_feature (440)..(440): n is a, c, g, or t
  misc_feature (443)..(445): n is a, c, g, or t
  misc_feature (453)..(453): n is a, c, g, or t
  misc_feature (585)..(585): n is a, c, g, or t
agacatacagaaaagtgcacataagtggacagctccatggatttcacaaagggagcacagtcacataatcagcatccaggtcgggaaacagcataaccagcaaagccccctgagcctcctaccagttaccacccagtcccctcccaaggtagccaacatcctcgcatccagatggctttcactctccctggttacaaactgcttttcttaacaagcttttttttttttttttttttgagacagagtcttgctctgtcatccaggctagagtgcagtggcccaatcggctcactgcaacctccgcctccggggttcaagtgattctcctgtcttaggcttccagtacctcccgcctgtaatcccagcactttgggaggccgaggcgggtggatcacttgaggtcagagaccagtctggccaacatggtgaaaccctctctnctnnnagtacaanaattagccgggcatggtggcacgtgcctgtaatcccagctactcggggctgaggcaggagagtcgcttgaacccaggaggtggaggttgcagtgagctgagatcgcgccactgcactgcagcctgggcgacngagggagaccctgtctcaaaaaaaaaaaaagaatgaggtttttttctttgtgatctaccatatggaaaggtttgtatatattttatggcattgtttgggaaaaatgcaaactgtgtgcttcctatgctctcacatcaccacaatcatgaccacagaagagttctgtgaccaaatgtgttgggtttcttccccacacaccaagcagcagacacccgctgggtgtcctctgatttaattccaacactatttacccagagatagcatcagattccatgagttgagggctgagtccccaagcctgcctcccttcaggcactagttcagtcccaaatctgcctccccactttcaggcactagctgcaggtcagggcctcaggcctccagaatttctgaccaactggctccaggtaggggtttccataactccctctttgggctcagtttgctggagtggctcacagagctcaggataacacatttaccagtttattacaaaggatgttacaaagggtacagatgagcaggtgcatagggcgaggtgtaggagaaggagcatggagtttccatgccctccccgggcgtgccaccctccaggagcctccagagctgagatcgcgccactgcactccagcctgggtgacagagtgagactctttctcaaacaaaacaaaaccaaaatatctcctgttacagatacacatttctgtcttatcctcttcgcctttctttatgaacattgttggtatgttcaatggaattagggaaattagttgggaaatgttggcagttgttggacaagagatgatagtggcttacaaagaaaatgttgcaggtagaccttccatgacttggtaatggattgattactaggtatattaatccaggttcatactgctgtaaagaactgcccgagactaggtaacttataaaggaaagaggtttaattgactcacagttcacagcatggctggggaggcctcaggaaacttacaatcatggcagaaggtgaaagagaagcaaggcatcttcttcacaaggcagcaggaaggagaagtgttaagcgaagcagggagagccccttataaaaccatcagacctcgtcgggtgcggtggctcatgcctgtaatcccagcactttgggaggccaaggtgggcggatcatgaggtcaggagatcaagaccatcctggctaacatggtgaaactccatctctactaaaaatacaaaaaattagctgggtgtggtggcaggcacctgtagtcccagctacttgggaggctgaggcaggagaatggtgtgaacctgggaattggagtttgcagtgagcagaggtcgtgccactgcactccagtctgggcgacagagcgagactcagtctc

SEQ ID NO: 443416 - DNA, 639 bp, Homo sapiens
agacatacagaaaagtgcacataagtggacagctccatggatttcacaaagggagcacagtcacataatcagcatccaggtcgggaaacagcataaccagcaaagccccctgagcctcctaccagttaccacccagtcccctcccaaggtagccaacatcctcgcatccagatggctttcactctccctggttacaaactgcttttcttaacaagcttttttttttttttttttttgagacagagtcttgctctgtcatccaggctagagtgcagtggcccaatcggctcactgcaacctccgcctccggggttcaagtgattctcctgtcttaggcttccagtacctgggattataagtgtgcatcaccatgcctgtagacagagcaagaccctatctcaagcaaagaaactcaaaataattatgatttccccaacaaaatgcaggcaatggtccctatggccccaaaagtaatatagatgtttcacatcatgtgattttattccttagtaaccttcctttctatgaaatcatctctaagagggctaaatgatcctttcttgtggactgtgttgttaaaatgaaaagtccattttgctgatacgtaatctacctttccatgtaattttttaaaaaatc

SEQ ID NO: 443417 - DNA, 1131 bp, Homo sapiens
  misc_feature (249)..(249): n is a, c, g, or t
  misc_feature (252)..(254): n is a, c, g, or t
  misc_feature (262)..(262): n is a, c, g, or t
agcttaattgaagtgagtagagaagcatagtgattgatagcaagtacttttacatctgacccaaggtttagacccatgctgcaatttcagttttgatttccttttctgacctcataattggttaacaatgaggttttttcgactgggcacggtggctcccgcctgtaatcccagcactttgggaggccgaggcgggtggatcacttgaggtcagagaccagtctggccaacatggtgaaaccctctctnctnnnagtacaanaattagccgggcatggtggcacgtgcctgtaatcccagctactcggggctgaggcaggagagtcgcttgaacccaggaggtggaggttgcagtgagctgagatcgcgccactgcactccagcctgggtgacagagtgagactctttctcaaacaaaacaaaaccaaaatatctcctgttacagatacacatttctgtcttatcctcttcgcctttctttatgaacattgttggtatgttcaatggaattagggaaattagttgggaaatgttggcagttgttggacaagagatgatagtggcttacaaagaaaatgttgcaggtagaccttccatgacttggtaatggattgattactaggtatattaatccaggttcatactgctgtaaagaactgcccgagactaggtaacttataaaggaaagaggtttaattgactcacagttcacagcatggctggggaggcctcaggaaacttacaatcatggcagaaggtgaaagagaagcaaggcatcttcttcacaaggcagcaggaaggagaagtgttaagcgaagcagggagagccccttataaaaccatcagacctcgtcgggtgcggtggctcatgcctgtaatcccagcactttgggaggccaaggtgggcggatcatgaggtcaggagatcaagaccatcctggctaacatggtgaaactccatctctactaaaaatacaaaaaattagctgggtgtggtggcaggcacctgtagtcccagctacttgggaggctgaggcaggagaatggtgtgaacctgggaattggagtttgcagtgagcagaggtcgtgccactgcactccagtctgggcgacagagcgagactcagtctc

SEQ ID NO: 443418 - DNA, 817 bp, Homo sapiens
agacatacagaaaagtgcacataagtggacagctccatggatttcacaaagggagcacagtcacataatcagcatccaggtcgggaaacagcataaccagcaaagccccctgagcctcctaccagttaccacccagtcccctcccaaggtagccaacatcctcgcatccagatggctttcactctccctggttacaaactgcttttcttaacaagcttttttttttttttttttttgagacagagtcttgctctgtcatccaggctagagtgcagtggcccaatcggctcactgcaacctccgcctccggggttcaagtgattctcctgtcttaggcttccagtacgtgtgatggcgcttgtgtgtagtcccagctacttcagaagctaaggtaggaggatcacttgagccccagagttcaaggctgcagtaagctgtgtttgcaccactgcatgccatcttggctcactgtaacctccgcctccccagttaaggtgattctcctgccttagcctcctgagtagctgggattataagtgtgcatcaccatgcctgtagacagagcaagaccctatctcaagcaaagaaactcaaaataattatgatttccccaacaaaatgcaggcaatggtccctatggccccaaaagtaatatagatgtttcacatcatgtgattttattccttagtaaccttcctttctatgaaatcatctctaagagggctaaatgatcctttcttgtggactgtgttgttaaaatgaaaagtccattttgctgatacgtaatctacctttccatgtaattttttaaaaaatc

SEQ ID NO: 443419 - DNA, 2524 bp, Homo sapiens
  misc_feature (1000)..(1000): n is a, c, g, or t
  misc_feature (1003)..(1005): n is a, c, g, or t
  misc_feature (1013)..(1013): n is a, c, g, or t
  misc_feature (1145)..(1145): n is a, c, g, or t
gcctgcctcggcctcccaaagtgctgggattacaggcatgagctaccgtggctggcctatttatttgattatatcatctgcaaatagtgatacttctccctcctttccaatttgtgtatctccataatacatctcgtgactctagctgagttggctaatgccccagaacaatgtagataacattggcaatcaaggttgtccttgccatgttttgactttaattggagtgcttctagcactgcctcggtaaacatgatactgagttttggaggtcagggaaatatttagctgctcatatgttattgagagttttttaaaaatcaagaatagatgttgaaatatctattaacatggcaaattattatgagatcctctaattttgagtcatcctggcattcatgaaacagcttatttgtgcatctccatttgtttatttaattcatccttgcatctccattcataagagatatgaatgtgtatatgtgaggtatttctgttatgttttcataacagtgttatgtttgttccatcaagtttgtgtgagagctgttctcgtttctctgctggggcagtgtttacacagagaattggaaggcgctgtccttcaagccgccgcaacacccctggacatctgggccagatgcctttgtgtggaggggaaaggggagtaggacctttctttcacaacattctctagtttttctgtttctgttttcttgttttttgcaatccattttggtaaatcctatttttgtagcaaatatccatttcatccatagaattcaccaagcccttaccaatttagtgttttcttggtattttacccatgctgcaatttcagttttgatttccttttctgacctcataattggttaacaatgaggttttttcgactgggcacggtggctcccgcctgtaatcccagcactttgggaggccgaggcgggtggatcacttgaggtcagagaccagtctggccaacatggtgaaaccctctctnctnnnagtacaanaattagccgggcatggtggcacgtgcctgtaatcccagctactcggggctgaggcaggagagtcgcttgaacccaggaggtggaggttgcagtgagctgagatcgcgccactgcactgcagcctgggcgacngagggagaccctgtctcaaaaaaaaaaaaagaatgaggtttttttctttgtgatctaccatatggaaaggtttgtatatattttatggcattgtttgggaaaaatgcaaactgtgtgcttcctatgctctcacatcaccacaatcatgaccacagaagagttctgtgaccaaatgtgttgggtttcttccccacacaccaagcagcagacacccgctgggtgtcctctgatttaattccaacactatttacccagagatagcatcagattccatgagttgagggctgagtccccaagcctgcctcccttcaggcactagttcagtcccaaatctgcctccccactttcaggcactagctgcaggtcagggcctcaggcctccagaatttctgaccaactggctccaggtaggggtttccataactccctctttgggctcagtttgctggagtggctcacagagctcaggataacacatttaccagtttattacaaaggatgttacaaagggtacagatgagcaggtgcatagggcgaggtgtaggagaaggagcatggagtttccatgccctccccgggcgtgccaccctccaggagcctccagagctgagatcgcgccactgcactccagcctgggtgacagagtgagactctttctcaaacaaaacaaaaccaaaatatctcctgttacagatacacatttctgtcttatcctcttcgcctttctttatgaacattgttggtatgttcaatggaattagggaaattagttgggaaatgttggcagttgttggacaagagatgatagtggcttacaaagaaaatgttgcaggtagaccttccatgacttggtaatggattgattactaggtatattaatccaggttcatactgctgtaaagaactgcccgagactaggtaacttataaaggaaagaggtttaattgactcacagttcacagcatggctggggaggcctcaggaaacttacaatcatggcagaaggtgaaagagaagcaaggcatcttcttcacaaggcagcaggaaggagaagtgttaagcgaagcagggagagccccttataaaaccatcagacctcgtcgggtgcggtggctcatgcctgtaatcccagcactttgggaggccaaggtgggcggatcatgaggtcaggagatcaagaccatcctggctaacatggtgaaactccatctctactaaaaatacaaaaaattagctgggtgtggtggcaggcacctgtagtcccagctacttgggaggctgaggcaggagaatggtgtgaacctgggaattggagtttgcagtgagcagaggtcgtgccactgcactccagtctgggcgacagagcgagactcagtctc

SEQ ID NO: 443420 - DNA, 1882 bp, Homo sapiens
  misc_feature (1000)..(1000): n is a, c, g, or t
  misc_feature (1003)..(1005): n is a, c, g, or t
  misc_feature (1013)..(1013): n is a, c, g, or t
gcctgcctcggcctcccaaagtgctgggattacaggcatgagctaccgtggctggcctatttatttgattatatcatctgcaaatagtgatacttctccctcctttccaatttgtgtatctccataatacatctcgtgactctagctgagttggctaatgccccagaacaatgtagataacattggcaatcaaggttgtccttgccatgttttgactttaattggagtgcttctagcactgcctcggtaaacatgatactgagttttggaggtcagggaaatatttagctgctcatatgttattgagagttttttaaaaatcaagaatagatgttgaaatatctattaacatggcaaattattatgagatcctctaattttgagtcatcctggcattcatgaaacagcttatttgtgcatctccatttgtttatttaattcatccttgcatctccattcataagagatatgaatgtgtatatgtgaggtatttctgttatgttttcataacagtgttatgtttgttccatcaagtttgtgtgagagctgttctcgtttctctgctggggcagtgtttacacagagaattggaaggcgctgtccttcaagccgccgcaacacccctggacatctgggccagatgcctttgtgtggaggggaaaggggagtaggacctttctttcacaacattctctagtttttctgtttctgttttcttgttttttgcaatccattttggtaaatcctatttttgtagcaaatatccatttcatccatagaattcaccaagcccttaccaatttagtgttttcttggtattttacccatgctgcaatttcagttttgatttccttttctgacctcataattggttaacaatgaggttttttcgactgggcacggtggctcccgcctgtaatcccagcactttgggaggccgaggcgggtggatcacttgaggtcagagaccagtctggccaacatggtgaaaccctctctnctnnnagtacaanaattagccgggcatggtggcacgtgcctgtaatcccagctactcggggctgaggcaggagagtcgcttgaacccaggaggtggaggttgcagtgagctgagatcgcgccactgcactccagcctgggtgacagagtgagactctttctcaaacaaaacaaaaccaaaatatctcctgttacagatacacatttctgtcttatcctcttcgcctttctttatgaacattgttggtatgttcaatggaattagggaaattagttgggaaatgttggcagttgttggacaagagatgatagtggcttacaaagaaaatgttgcaggtagaccttccatgacttggtaatggattgattactaggtatattaatccaggttcatactgctgtaaagaactgcccgagactaggtaacttataaaggaaagaggtttaattgactcacagttcacagcatggctggggaggcctcaggaaacttacaatcatggcagaaggtgaaagagaagcaaggcatcttcttcacaaggcagcaggaaggagaagtgttaagcgaagcagggagagccccttataaaaccatcagacctcgtcgggtgcggtggctcatgcctgtaatcccagcactttgggaggccaaggtgggcggatcatgaggtcaggagatcaagaccatcctggctaacatggtgaaactccatctctactaaaaatacaaaaaattagctgggtgtggtggcaggcacctgtagtcccagctacttgggaggctgaggcaggagaatggtgtgaacctgggaattggagtttgcagtgagcagaggtcgtgccactgcactccagtctgggcgacagagcgagactcagtctc

SEQ ID NO: 443421 - DNA, 2523 bp, Homo sapiens
  misc_feature (999)..(999): n is a, c, g, or t
  misc_feature (1002)..(1004): n is a, c, g, or t
  misc_feature (1012)..(1012): n is a, c, g, or t
  misc_feature (1144)..(1144): n is a, c, g, or t
gcctgcctcggcctcccaaagtgctgggattacaggcatgagctaccgtggctggcctatttatttgattatatcatctgcaaatagtgatacttctccctcctttccaatttgtgtatctccataatacatctcgtgactctagctgagttggctaatgccccagaacaatgtagataacattggcaatcaaggttgtccttgccatgttttgactttaattggagtgcttctagcactgcctcggtaaacatgatactgagttttggaggtcagggaaatatttagctgctcatatgttattgagagttttttaaaaatcaagaatagatgttgaaatatctattaacatggcaaattattatgagatcctctaattttgagtcatcctggcattcatgaaacaaaaacccttttgtgtttatcaattattattttaatatgctgctggattttgtttgcttatttgtgcatctccatttgtttatttaattcatccttgcatctccattcataagagatatgaatgtgtatatgtgaggtatttctgttatgttttcataacagtgttatgtttgttccatcaagtttgtgtgagagctgttctcgtttctctgctggggcagtgtttacacagagaattggaaggcgctgtccttcaagccgccgcaacacccctggacatctgggccagatgcctttgtgtggaggggtcttgttttttgcaatccattttggtaaatcctatttttgtagcaaatatccatttcatccatagaattcaccaagcccttaccaatttagtgttttcttggtattttacccatgctgcaatttcagttttgatttccttttctgacctcataattggttaacaatgaggttttttcgactgggcacggtggctcccgcctgtaatcccagcactttgggaggccgaggcgggtggatcacttgaggtcagagaccagtctggccaacatggtgaaaccctctctnctnnnagtacaanaattagccgggcatggtggcacgtgcctgtaatcccagctactcggggctgaggcaggagagtcgcttgaacccaggaggtggaggttgcagtgagctgagatcgcgccactgcactgcagcctgggcgacngagggagaccctgtctcaaaaaaaaaaaaagaatgaggtttttttctttgtgatctaccatatggaaaggtttgtatatattttatggcattgtttgggaaaaatgcaaactgtgtgcttcctatgctctcacatcaccacaatcatgaccacagaagagttctgtgaccaaatgtgttgggtttcttccccacacaccaagcagcagacacccgctgggtgtcctctgatttaattccaacactatttacccagagatagcatcagattccatgagttgagggctgagtccccaagcctgcctcccttcaggcactagttcagtcccaaatctgcctccccactttcaggcactagctgcaggtcagggcctcaggcctccagaatttctgaccaactggctccaggtaggggtttccataactccctctttgggctcagtttgctggagtggctcacagagctcaggataacacatttaccagtttattacaaaggatgttacaaagggtacagatgagcaggtgcatagggcgaggtgtaggagaaggagcatggagtttccatgccctccccgggcgtgccaccctccaggagcctccagagctgagatcgcgccactgcactccagcctgggtgacagagtgagactctttctcaaacaaaacaaaaccaaaatatctcctgttacagatacacatttctgtcttatcctcttcgcctttctttatgaacattgttggtatgttcaatggaattagggaaattagttgggaaatgttggcagttgttggacaagagatgatagtggcttacaaagaaaatgttgcaggtagaccttccatgacttggtaatggattgattactaggtatattaatccaggttcatactgctgtaaagaactgcccgagactaggtaacttataaaggaaagaggtttaattgactcacagttcacagcatggctggggaggcctcaggaaacttacaatcatggcagaaggtgaaagagaagcaaggcatcttcttcacaaggcagcaggaaggagaagtgttaagcgaagcagggagagccccttataaaaccatcagacctcgtcgggtgcggtggctcatgcctgtaatcccagcactttgggaggccaaggtgggcggatcatgaggtcaggagatcaagaccatcctggctaacatggtgaaactccatctctactaaaaatacaaaaaattagctgggtgtggtggcaggcacctgtagtcccagctacttgggaggctgaggcaggagaatggtgtgaacctgggaattggagtttgcagtgagcagaggtcgtgccactgcactccagtctgggcgacagagcgagactcagtctc

SEQ ID NO: 443422 - DNA, 506 bp, Homo sapiens
  misc_feature (4)..(4): n is a, c, g, or t
  misc_feature (9)..(9): n is a, c, g, or t
catncgctngcccattttttaggccaaaagtcttctgggatgcatccagccaccctgcaccccactgccatgccccgcccgtgccactacctccctctccaccccacaactgctgcctccgcctcttacacggcatcccatccttgccttctgccacctccctgtgcggtcaggtgccctttgaaaggagtttgagcaaatgttcatcctcattgcctcctgttctgcccacgatcccctcccccaagatactctttgtggggaagaggggctggggcatggcaggctgggtgaccgactaccccagtcccagggaaggtggggccctgcccctaggatgctgcagcagagtgagcaagggggcccgaatcgaccataaagggtgtaggggccacctcctccccctgttctgttggggaggggtagccatgatttgtcccagcctggggctccctctctggtttcctatttgcagttacttgaataaaaaaaatatccttttctgg

SEQ ID NO: 443423 - DNA, 1958 bp, Homo sapiens
tggcgcgggcgggcccgtcccccctgcccctgggtcgctctttttaagctcccctgagccggtgctgcgctcctctaattgggactccgagccggggctatttctggcgctggcgcggctccaagaaggcatccgcatttgctaccagcggcggccgcggcggagccaggccggtcctcagcgcccagcaccgccgctcccggcaacccggagcgcgcaccgcaggccggcggccgagctcgcgcatcccagccatcactcttccacctgctccttagagaagggaagatgagtgagtcgagctcgaagtccagccagcccttggcctccaagcaggaaaaggacggcactgagaagcggggccggggcaggccgcgcaagcagcctccggtgagtcccgggacagcgctggtagggagtcagaaggagcccagcgaagtgccaacacctaagagacctcggggccgaccaaagggaagcaaaaacaagggtgctgccaagacccggaaaaccaccacaactccaggaaggaaaccaaggggcagacccaaaaaactggagaaggaggaagaggagggcatctcgcaggagtcctcggaggaggagcagtgacccatgcgtgccgcctgctcctcactggaggagcagcttccttctgggactggacagctttgctccgctcccaccgcccccgccccttccccaggcccaccatcaccaccgcctctggccgccacccccatcttccacctgtgccctcaccaccacactacacagcacaccagccgctgcagggctcccatgggctgagtggggagcagttttcccctggcctcagttcccagctccccccgcccacccacgcatacacacatgccctcctggacaaggctaacatcccacttagccgcaccctgcacctgctgcgtccccactcccttggtggtggggacattgctctctgggcttttggtttgggggcgccctctctgctccttcactgttccctctggcttcccatagtggggcctgggagggttcccctggccttaaaaggggcccaagccccatctcatcctggcacgccctactccactgccctggcagcagcaggtgtggccaatggaggggggtgctggcccccaggattcccccagccaaactgtctttgtcaccacgtggggctcacttttcatccttccccaacttccctagtccccgtactaggttggacagcccccttcggctacaggaaggcaggaggggtgagtcccctactccctcttcactgtggccacagcccccttgccctccgcctgggatctgagtacatattgtggtgatggagatgcagtcacttattgtccaggtgaggcccaagagccctgtggccgccacctgaggtgggctggggctgctcccctaaccctactttgcttccgccactcagccatttccccctcctcagatggggcaccaataacaaggagctcaccctgcccgctcccaacccccctcctgctcctccctgccccccaaggttctggttccatttttcctctgttcacaaactacctctggacagttgtgttgttttttgttcaatgttccattcttcgacatccgtcattgctgctgctaccagcgccaaatgttcatcctcattgcctcctgttctgcccacgatcccctcccccaagatactctttgtggggaagaggggctggggcatggcaggctgggtgaccgactaccccagtcccagggaaggtggggccctgcccctaggatgctgcagcagagtgagcaagggggcccgaatcgaccataaagggtgtaggggccacctcctccccctgttctgttggggaggggtagccatgatttgtcccagcctggggctccctctctggtttcctatttgcagttacttgaataaaaaaaatatccttttctgg

SEQ ID NO: 443424 - DNA, 1985 bp, Homo sapiens
gcgagcgcgagttgtgcacccggcggagcccggaggagcccggcgcacctcgcgcggcggccgctcccgctggagccggagcccgagcccgagcccgagcccgggtgaggggcggggagagacacgggctgcggcgcggcaggagagtggggggtcgggcgccccccgcagctcaggacatgggagtcccaccgtattgtccaggctggtctcgaactcctgacctcaagcagtcctcctgctttggcatcccaaagtgctgggattacagcatcccagccatcactcttccacctgctccttagagaagggaagatgagtgagtcgagctcgaagtccagccagcccttggcctccaagcaggaaaaggacggcactgagaagcggggccggggcaggccgcgcaagcagcctccggtgagtcccgggacagcgctggtagggagtcagaaggagcccagcgaagtgccaacacctaagagacctcggggccgaccaaagggaagcaaaaacaagggtgctgccaagacccggaaaaccaccacaactccaggaaggaaaccaaggggcagacccaaaaaactggagaaggaggaagaggagggcatctcgcaggagtcctcggaggaggagcagtgacccatgcgtgccgcctgctcctcactggaggagcagcttccttctgggactggacagctttgctccgctcccaccgcccccgccccttccccaggcccaccatcaccaccgcctctggccgccacccccatcttccacctgtgccctcaccaccacactacacagcacaccagccgctgcagggctcccatgggctgagtggggagcagttttcccctggcctcagttcccagctccccccgcccacccacgcatacacacatgccctcctggacaaggctaacatcccacttagccgcaccctgcacctgctgcgtccccactcccttggtggtggggacattgctctctgggcttttggtttgggggcgccctctctgctccttcactgttccctctggcttcccatagtggggcctgggagggttcccctggccttaaaaggggcccaagccccatctcatcctggcacgccctactccactgccctggcagcagcaggtgtggccaatggaggggggtgctggcccccaggattcccccagccaaactgtctttgtcaccacgtggggctcacttttcatccttccccaacttccctagtccccgtactaggttggacagcccccttcggctacaggaaggcaggaggggtgagtcccctactccctcttcactgtggccacagcccccttgccctccgcctgggatctgagtacatattgtggtgatggagatgcagtcacttattgtccaggtgaggcccaagagccctgtggccgccacctgaggtgggctggggctgctcccctaaccctactttgcttccgccactcagccatttccccctcctcagatggggcaccaataacaaggagctcaccctgcccgctcccaacccccctcctgctcctccctgccccccaaggttctggttccatttttcctctgttcacaaactacctctggacagttgtgttgttttttgttcaatgttccattcttcgacatccgtcattgctgctgctaccagcgccaaatgttcatcctcattgcctcctgttctgcccacgatcccctcccccaagatactctttgtggggaagaggggctggggcatggcaggctgggtgaccgactaccccagtcccagggaaggtggggccctgcccctaggatgctgcagcagagtgagcaagggggcccgaatcgaccataaagggtgtaggggccacctcctccccctgttctgttggggaggggtagccatgatttgtcccagcctggggctccctctctggtttcctatttgcagttacttgaataaaaaaaatatccttttctgg

SEQ ID NO: 443425 - DNA, 1925 bp, Homo sapiens
tggcgcgggcgggcccgtcccccctgcccctgggtcgctctttttaagctcccctgagccggtgctgcgctcctctaattgggactccgagccggggctatttctggcgctggcgcggctccaagaaggcatccgcatttgctaccagcggcggccgcggcggagccaggccggtcctcagcgcccagcaccgccgctcccggcaacccggagcgcgcaccgcaggccggcggccgagctcgcgcatcccagccatcactcttccacctgctccttagagaagggaagatgagtgagtcgagctcgaagtccagccagcccttggcctccaagcaggaaaaggacggcactgagaagcggggccggggcaggccgcgcaagcagcctccgaaggagcccagcgaagtgccaacacctaagagacctcggggccgaccaaagggaagcaaaaacaagggtgctgccaagacccggaaaaccaccacaactccaggaaggaaaccaaggggcagacccaaaaaactggagaaggaggaagaggagggcatctcgcaggagtcctcggaggaggagcagtgacccatgcgtgccgcctgctcctcactggaggagcagcttccttctgggactggacagctttgctccgctcccaccgcccccgccccttccccaggcccaccatcaccaccgcctctggccgccacccccatcttccacctgtgccctcaccaccacactacacagcacaccagccgctgcagggctcccatgggctgagtggggagcagttttcccctggcctcagttcccagctccccccgcccacccacgcatacacacatgccctcctggacaaggctaacatcccacttagccgcaccctgcacctgctgcgtccccactcccttggtggtggggacattgctctctgggcttttggtttgggggcgccctctctgctccttcactgttccctctggcttcccatagtggggcctgggagggttcccctggccttaaaaggggcccaagccccatctcatcctggcacgccctactccactgccctggcagcagcaggtgtggccaatggaggggggtgctggcccccaggattcccccagccaaactgtctttgtcaccacgtggggctcacttttcatccttccccaacttccctagtccccgtactaggttggacagcccccttcggctacaggaaggcaggaggggtgagtcccctactccctcttcactgtggccacagcccccttgccctccgcctgggatctgagtacatattgtggtgatggagatgcagtcacttattgtccaggtgaggcccaagagccctgtggccgccacctgaggtgggctggggctgctcccctaaccctactttgcttccgccactcagccatttccccctcctcagatggggcaccaataacaaggagctcaccctgcccgctcccaacccccctcctgctcctccctgccccccaaggttctggttccatttttcctctgttcacaaactacctctggacagttgtgttgttttttgttcaatgttccattcttcgacatccgtcattgctgctgctaccagcgccaaatgttcatcctcattgcctcctgttctgcccacgatcccctcccccaagatactctttgtggggaagaggggctggggcatggcaggctgggtgaccgactaccccagtcccagggaaggtggggccctgcccctaggatgctgcagcagagtgagcaagggggcccgaatcgaccataaagggtgtaggggccacctcctccccctgttctgttggggaggggtagccatgatttgtcccagcctggggctccctctctggtttcctatttgcagttacttgaataaaaaaaatatccttttctgg

SEQ ID NO: 443426 - DNA, 829 bp, Homo sapiens
  misc_feature (38)..(38): n is a, c, g, or t
  misc_feature (53)..(53): n is a, c, g, or t
acggagagagagacaaaacttaggctaggtacgaggcngggtgtgaatcggcngagcccccttgccctccgcctgggatctgagtacatattgtggtgatggagatgcagtcacttattgtccaggtgaggcccaagagccctgtggccgccacctgaggtgggctggggctgctcccctaaccctactttgcttccgccactcagccatttccccctcctcagatggggcaccaataacaaggagctcaccctgcccgctcccaacccccctcctgctcctccctgccccccaaggttctggttccatttttcctctgttcacaaactacctctggacagttgtgttgttttttgttcaatgttccattcttcgacatccgtcattgctgctgctaccagcgccaaatgttcatcctcattgcctcctgttctgcccacgatcccctcccccaagatactctttgtggggaagaggggctggggcatggcaggctgggtgaccgactaccccagtcccagggaaggtggggccctgcccctaggatgctgcagcagagtgagcaagggggcccgaatcgaccataaagggtgtaggggccacctcctccccctgttctgttggggaggggtagccatgatttgtcccagcctggggctccctctctggtttcctatttgcagttacttgaataaaaaaaatatccttttctggacaaaacaaaaagacgagaaaaacacaacaaaaacacacaaaacaacacaaaacaaaacacgcagcgcttctactgtgtcggaaaaaagtaaaaaggagggcacatgttccccca

SEQ ID NO: 443427 - DNA, 883 bp, Homo sapiens
gggctggtagcaaatgcggatgccttcttggagccgcgccagcgccagaaatagccccggctcggagtcccaattagaggagcgcagcacgcggcggagccaggccggtcctcagcgcccagcaccgccgctcccggcaacccggagcgcgcaccgcaggccggcggccgagctcgcgcatcccagccatcactcttccacctgctccttagagaagggaagatgagtgagtcgagctcgaagtccagccagcccttggcctccaagcaggaaaaggacggcactgagaagcggggccggggcaggccgcgcaagcagcctccgaaggagcccagcgaagtgccaacacctaagagacctcggggccgaccaaagggaagcaaaaacaagggtgctgccaagacccggaaaaccaccacaactccaggaaggaaaccaaggggcagacccaaaaaactggagaaggaggaagaggagggcatctcgcaggagtcctcggaggaggagcagtgacccatgcgtgccgcctgctcctcactggaggagcagcttccttctgggactggacagctttgctccgctcccaccgcccccagcgccggcacccaggcaaagaccgcacacacatcaggatccggacgaacacgcccgaaccaagagacgcaaacagttacaaccgctgcaaagatcacatggaacacgcagcaacccagcgcgtagacgacaccaacgaactggccgagcaaaccaccgaggattccaaaaacacactgaccgctaacaggccgaaacgaacaaaagaccgacacgcacaaaaccatcggcactgaaccacacagtaaaacagcaaccgcaagccaacgcaaggctctaacggaccccc

SEQ ID NO: 443428 - DNA, 752 bp, Homo sapiens
  misc_feature (697)..(697): n is a, c, g, or t
  misc_feature (737)..(737): n is a, c, g, or t
tggcgcgggcgggcccgtcccccctgcccctgggtcgctctttttaagctcccctgagccggtgctgcgctcctctaattgggactccgagccggggctatttctggcgctggcgcggctccaagaaggcatccgcatttgctaccagcggcggccgcggcggagccaggccggtcctcagcgcccagcaccgccgctcccggcaacccggagcgcgcaccgcaggccggcggccgagctcgcgcatcccagccatcactcttccacctgctccttagagaagggaagatgagtgagtcgagctcgaagtccagccagcccttggcctccaagcaggaaaaggacggcactgagaagcggggccggggcaggccgcgcaagcagcctccggtgagtcccgggacagcgctggtagggagtcagaaggagcccagcgaagtgccaacacctaagagacctcggggccgaccaaagggaagcaaaaacaagggtgctgccaagacccggaaaaccaccacaactccaggaaggaaaccaaggggcagacccaaaaaactggagaaggaggaagaggagggcatctcgcaggagtcctcggaggaggagcagtgacccatgcgtgccgcctgctcctcactggaggagcagcttccttctgggactggacagctttgctccgctcccaccgccccccggncccttttccccaagggccccacccatttaaccaacccggncctttttgggcccgg

SEQ ID NO: 443429 - DNA, 1288 bp, Homo sapiens
ctggaaaaatgtgtagcctaggcctccggcgtctcatccatctgtagcctggggataaggactaggatgaagatgtggaggactgtcctttttaagcctgtaatacagggtattcccaaatacaggttgcaggccctccttccaatgagaagttttaggaaaactcaaaattgatggggttaattaaaccccaacaggcctctaagaagaaggaagatgctagaaaatgaccaagaaggttttaggatgagccctaaacctcatcctaaaggatgagggccagccagggtctgttaggcggtgcatttcagttggagaattccctacccatctgacaaagtcccatctgactccagttgggcagaggaggggtaaggggaaagaggagggtggcctttggctttgggctcactttcctcccccacctcacccactagcttcaaccatctcctccctccctcaattataccaatctgaattctccagggatttaccctgggtgagaacagagaagagagctggtggtgggcaccacccctggctgtgtgattggctctttttggtcctgagtcttgcaccttgccagataggcaatattgtcagtgagcatcccagccatcactcttccacctgctccttagagaagggaagatgagtgagtcgagctcgaagtccagccagcccttggcctccaagcaggaaaaggacggcactgagaagcggggccggggcaggccgcgcaagcagcctccggtgagtcccgggacagcgctggtagggagtcagaaggagcccagcgaagtgccaacacctaagagacctcggggccgaccaaagggaagcaaaaacaagggtgctgccaagacccggaaaaccaccacaactccaggaaggaaaccaaggggcagacccaaaaaactggagaaggaggaagaggagggcatctcgcaggagtcctcggaggaggagcagtgacccatgcgtgccgcctgctcctcactggaggagcagcttccttctgggactggacagctttgctccgctcccaccgcccccccaaccgggcccatgagacacatatcacaccaagggcccaaaaaaatagaaagcaaccggacatcttggagagccaaaacccggcaattttaagaaccaatgaatgaagaagtacaaaggaagcaaagaataaaaaagaaaagacaaagcgaatagaagggataaccacaatggagtaaaaaagaaaaaagacaatagaaacaaacatggaaaatagataaaaaaaaaccac

SEQ ID NO: 443430 - DNA, 2430 bp, Homo sapiens
  misc_feature (4)..(4): n is a, c, g, or t
  misc_feature (38)..(38): n is a, c, g, or t
taanataggctaggtacgaggctgggttaaattcggcngagggactccgagccggggctatttctggcgctggcgcggctccaagaaggcatccgcatttgctaccagcggcggccgcggcggagccaggccggtcctcagcgcccagcaccgccgctcccggcaacccggagcgcgcaccgcaggccggcggccgagctcgcgcatcccagccatcactcttccacctgctccttagagaagggaagatgagtgagtcgagctcgaagtccagccagcccttggcctccaagcaggaaaaggacggcactgagaagcggggccggggcaggccgcgcaagcagcctccggtgagtcccgggacagcgctggtagggagtcagaaggagcccagcgaagtgccaacacctaagagacctcggggccgaccaaagggaagcaaaaacaagggtgctgccaagacccggaaaaccaccacaactccaggaaggaaaccaaggggcagacccaaaaaactggagaaggaggaagaggagggcatctcgcaggagtcctcggaggaggagcagtgacccatgcgtgccgcctgctcctcactggaggagcagcttccttctgggactggacagctttgctccgctcccaccgcccccgccccttccccaggcccaccatcaccaccgcctctggccgccacccccatcttccacctgtgccctcaccaccacactacacagcacaccagccgctgcagggctcccatgggctgagtggggagcagttttcccctggcctcagttcccagctccccccgcccacccacgcatacacacatgccctcctggacaaggctaacatcccacttagccgcaccctgcacctgctgcgtccccactcccttggtggtggggacattgctctctgggcttttggtttgggggcgccctctctgctccttcactgttccctctggcttcccatagtggggcctgggagggttcccctggccttaaaaggggcccaagccccatctcatcctggcacgccctactccactgccctggcagcagcaggtgtggccaatggaggggggtgctggcccccaggattcccccagccaaactgtctttgtcaccacgtggggctcacttttcatccttccccaacttccctagtccccgtactaggttggacagcccccttcggctacaggaaggcaggaggggtgagtcccctactccctcttcactgtggccacagcccccttgccctccgcctgggatctgagtacatattgtggtgatggagatgcagtcacttattgtccaggtgaggcccaagagccctgtggccgccacctgaggtgggctggggctgctcccctaaccctactttgcttccgccactcagccatttccccctcctcagatggggcaccaataacaaggagctcaccctgcccgctcccaacccccctcctgctcctccctgccccccaaggttctggttccatttttcctctgttcacaaactacctctggacagttgtgttgttttttgttcaatgttccattcttcgacatccgtcattgctgctgctaccagcgccaaatgttcatcctcattgcctcctgttctgcccacgatcccctcccccaagatactctttgtggggaagaggggctggggcatggcaggctgggtgaccgactaccccagtcccagggaaggtggggccctgcccctaggatgctgcagcagagtgagcaagggggcccgaatcgaccataaagggtgtaggggccacctcctccccctgttctgttggggaggggtagccatgatttgtcccagcctggggctccctctctggtttcctatttgcagttacttgaataaaaaaaatatccttttctgggaaaaaaaaaaaaaaaaacaaaaaaaaaagggggacacagcaaaaaaagtaccccacagagggggccaaaaagataacgcagataccgagatctaggacaccaaggcggcccacaataaagaacccacaaatcaaaccgcaacggacgaaggcacgacattatacaaaagcgctgagaaactgggcgacaacaccagcgccccaccagggcagatctctgggcgaacagccgcccgacctaaccccacgtgcagtgatgcgccccacaatgcgcacccacacacccccatcaacgagaagatgctaaaaacagaccgcaccaaaagcgagcaaacgacagaccgaccctgaccagccgtgcgaccaacacgggcgacacgaacacaactgcgacaaacactagactagcacgccgagcaagcacaccagagatgggcaaccaccggaagagagaatgacgcatcaccgcagaacggaaccttaacccgacagacgaggcaacgacgggagaa

SEQ ID NO: 443431 - DNA, 2166 bp, Homo sapiens
  misc_feature (4)..(4): n is a, c, g, or t
  misc_feature (38)..(38): n is a, c, g, or t
taanataggctaggtacgaggctgggttaaattcggcngagggactccgagccggggctatttctggcgctggcgcggctccaagaaggcatccgcatttgctaccagcggcggccgcggcggagccaggccggtcctcagcgcccagcaccgccgctcccggcaacccggagcgcgcaccgcaggccggcggccgagctcgcgcatcccagccatcactcttccacctgctccttagagaagggaagatgagtgagtcgagctcgaagtccagccagcccttggcctccaagcaggaaaaggacggcactgagaagcggggccggggcaggccgcgcaagcagcctccggtgagtcccgggacagcgctggtagggagtcagaaggagcccagcgaagtgccaacacctaagagacctcggggccgaccaaagggaagcaaaaacaagggtgctgccaagacccggaaaaccaccacaactccaggaaggaaaccaaggggcagacccaaaaaactggagaaggaggaagaggagggcatctcgcaggagtcctcggaggaggagcagtgacccatgcgtgccgcctgctcctcactggaggagcagcttccttctgggactggacagctttgctccgctcccaccgcccccgccccttccccaggcccaccatcaccaccgcctctggccgccacccccatcttccacctgtgccctcaccaccacactacacagcacaccagccgctgcagggctcccatgggctgagtggggagcagttttcccctggcctcagttcccagctccccccgcccacccacgcatacacacatgccctcctggacaaggctaacatcccacttagccgcaccctgcacctgctgcgtccccactcccttggtggtggggacattgctctctgggcttttggtttgggggcgccctctctgctccttcactgttccctctggcttcccatagtggggcctgggagggttcccctggccttaaaaggggcccaagccccatctcatcctggcacgccctactccactgccctggcagcagcaggtgtggccaatggaggggggtgctggcccccaggattcccccagccaaactgtctttgtcaccacgtggggctcacttttcatccttccccaacttccctagtccccgtactaggttggacagcccccttcggctacaggaaggcaggaggggtgagtcccctactccctcttcactgtggccacagcccccttgccctccgcctgggatctgagtacatattgtggtgatggagatgcagtcacttattgtccaggtgaggcccaagagccctgtggccgccacctgaggtgggctggggctgctcccctaaccctactttgcttccgccactcagccatttccccctcctcagatggggcaccaataacaaggagctcaccctgcccgctcccaacccccctcctgctcctccctgccccccaaggttctggttccatttttcctctgttcacaaactacctctggacagttgtgttgttttttgttcaatgttccattcttcgacatccgtcattgctgctgctaccagcgccaaatgttcatcctcattgcctcctgttctgcccacgatcccctcccccaagatactctttgtggggaagaggggctggggcatggcaggctgggtgaccgactaccccagtcccagggaaggtggggccctgcccctaggatgctgcagcagagtgagcaagggggcccgaatcgaccataaagggtgtaggggccacctcctccccctgttctgttggggaggggtagccatgatttgtcccagcctggggctccctctctggtttcctatttgcagttacttgaataaaaaaaatatccttttctgggaaaaaaaaaaaaaaaaacaaaaaaaaaaaaaaaaacccgggggccttcatattgtcgggcgggggggaacaagaaggctaatctggaaacgggcacccggggccccaacacgccggtggttccgtggaaccccattttttttggtcaccagggggggacaaactcggcgggcccccccaaaaagagagggcggcaaaaattgcaaaaccccgggttaacccggttttagagctgcgcgaaaaacaca

SEQ ID NO: 443432 - DNA, 2043 bp, Homo sapiens
  misc_feature (4)..(4): n is a, c, g, or t
  misc_feature (38)..(38): n is a, c, g, or t
  misc_feature (1937)..(1937): n is a, c, g, or t
taanataggctaggtacgaggctgggttaaattcggcngagggactccgagccggggctatttctggcgctggcgcggctccaagaaggcatccgcatttgctaccagcggcggccgcggcggagccaggccggtcctcagcgcccagcaccgccgctcccggcaacccggagcgcgcaccgcaggccggcggccgagctcgcgcatcccagccatcactcttccacctgctccttagagaagggaagatgagtgagtcgagctcgaagtccagccagcccttggcctccaagcaggaaaaggacggcactgagaagcggggccggggcaggccgcgcaagcagcctccggtgagtcccgggacagcgctggtagggagtcagaaggagcccagcgaagtgccaacacctaagagacctcggggccgaccaaagggaagcaaaaacaagggtgctgccaagacccggaaaaccaccacaactccaggaaggaaaccaaggggcagacccaaaaaactggagaaggaggaagaggagggcatctcgcaggagtcctcggaggaggagcagtgacccatgcgtgccgcctgctcctcactggaggagcagcttccttctgggactggacagctttgctccgctcccaccgcccccgccccttccccaggcccaccatcaccaccgcctctggccgccacccccatcttccacctgtgccctcaccaccacactacacagcacaccagccgctgcagggctcccatgggctgagtggggagcagttttcccctggcctcagttcccagctccccccgcccacccacgcatacacacatgccctcctggacaaggctaacatcccacttagccgcaccctgcacctgctgcgtccccactcccttggtggtggggacattgctctctgggcttttggtttgggggcgccctctctgctccttcactgttccctctggcttcccatagtggggcctgggagggttcccctggccttaaaaggggcccaagccccatctcatcctggcacgccctactccactgccctggcagcagcaggtgtggccaatggaggggggtgctggcccccaggattcccccagccaaactgtctttgtcaccacgtggggctcacttttcatccttccccaacttccctagtccccgtactaggttggacagcccccttcggctacaggaaggcaggaggggtgagtcccctactccctcttcactgtggccacagcccccttgccctccgcctgggatctgagtacatattgtggtgatggagatgcagtcacttattgtccaggtgaggcccaagagccctgtggccgccacctgaggtgggctggggctgctcccctaaccctactttgcttccgccactcagccatttccccctcctcagatggggcaccaataacaaggagctcaccctgcccgctcccaacccccctcctgctcctccctgccccccaaggttctggttccatttttcctctgttcacaaactacctctggacagttgtgttgttttttgttcaatgttccattcttcgacatccgtcattgctgctgctaccagcgccaaatgttcatcctcattgcctcctgttctgcccacgatcccctcccccaagatactctttgtggggaagaggggctggggcatggcaggctgggtgaccgactaccccagtcccagggaaggtggggccctgcccctaggatgctgcagcagagtgagcaagggggcccgaatcgaccataaagggtgtaggggccacctcctccccctgttctgttggggaggggtagccatgatttgtcccagcctggggctccctctctggtttcctatttgcagttacttgaataaaaaaaatatccttttctggcaaacacaacaataacacnaaaaaccccgggacatttgcgcgcgggacatgctttaggtgcacgtcaactagttcagaccattcgacaagggactgcggcccaagggcgttttcgacacgcacga

SEQ ID NO: 443433 - DNA, 2201 bp, Homo sapiens
  misc_feature (4)..(4): n is a, c, g, or t
  misc_feature (38)..(38): n is a, c, g, or t
  misc_feature (1934)..(1934): n is a, c, g, or t
  misc_feature (1940)..(1940): n is a, c, g, or t
taanataggctaggtacgaggctgggttaaattcggcngagggactccgagccggggctatttctggcgctggcgcggctccaagaaggcatccgcatttgctaccagcggcggccgcggcggagccaggccggtcctcagcgcccagcaccgccgctcccggcaacccggagcgcgcaccgcaggccggcggccgagctcgcgcatcccagccatcactcttccacctgctccttagagaagggaagatgagtgagtcgagctcgaagtccagccagcccttggcctccaagcaggaaaaggacggcactgagaagcggggccggggcaggccgcgcaagcagcctccggtgagtcccgggacagcgctggtagggagtcagaaggagcccagcgaagtgccaacacctaagagacctcggggccgaccaaagggaagcaaaaacaagggtgctgccaagacccggaaaaccaccacaactccaggaaggaaaccaaggggcagacccaaaaaactggagaaggaggaagaggagggcatctcgcaggagtcctcggaggaggagcagtgacccatgcgtgccgcctgctcctcactggaggagcagcttccttctgggactggacagctttgctccgctcccaccgcccccgccccttccccaggcccaccatcaccaccgcctctggccgccacccccatcttccacctgtgccctcaccaccacactacacagcacaccagccgctgcagggctcccatgggctgagtggggagcagttttcccctggcctcagttcccagctccccccgcccacccacgcatacacacatgccctcctggacaaggctaacatcccacttagccgcaccctgcacctgctgcgtccccactcccttggtggtggggacattgctctctgggcttttggtttgggggcgccctctctgctccttcactgttccctctggcttcccatagtggggcctgggagggttcccctggccttaaaaggggcccaagccccatctcatcctggcacgccctactccactgccctggcagcagcaggtgtggccaatggaggggggtgctggcccccaggattcccccagccaaactgtctttgtcaccacgtggggctcacttttcatccttccccaacttccctagtccccgtactaggttggacagcccccttcggctacaggaaggcaggaggggtgagtcccctactccctcttcactgtggccacagcccccttgccctccgcctgggatctgagtacatattgtggtgatggagatgcagtcacttattgtccaggtgaggcccaagagccctgtggccgccacctgaggtgggctggggctgctcccctaaccctactttgcttccgccactcagccatttccccctcctcagatggggcaccaataacaaggagctcaccctgcccgctcccaacccccctcctgctcctccctgccccccaaggttctggttccatttttcctctgttcacaaactacctctggacagttgtgttgttttttgttcaatgttccattcttcgacatccgtcattgctgctgctaccagcgccaaatgttcatcctcattgcctcctgttctgcccacgatcccctcccccaagatactctttgtggggaagaggggctggggcatggcaggctgggtgaccgactaccccagtcccagggaaggtggggccctgcccctaggatgctgcagcagagtgagcaagggggcccgaatcgaccataaagggtgtaggggccacctcctccccctgttctgttggggaggggtagccatgatttgtcccagcctggggctccctctctggtttcctatttgcagttacttgaataaaaaaaatatccttttctggaaaaaaaaaaaaaaanaaaaanaaaaaaaaaaaaagaaaaaaaaaaaaaaaaacaaaaaaaaaaaaaaaaacccgggggccttcatattgtcgggcgggggggaacaagaaggctaatctggaaacgggcacccggggccccaacacgccggtggttccgtggaaccccattttttttggtcaccagggggggacaaactcggcgggcccccccaaaaagagagggcggcaaaaattgcaaaaccccgggttaacccggttttagagctgcgcgaaaaacaca

SEQ ID NO: 443434 - DNA, 2160 bp, Homo sapiens
  misc_feature (4)..(4): n is a, c, g, or t
  misc_feature (38)..(38): n is a, c, g, or t
taanataggctaggtacgaggctgggttaaattcggcngagggactccgagccggggctatttctggcgctggcgcggctccaagaaggcgtgagttcgcggccgctccggtggcttcttttttttatatctataatttaattaaattatttatttattgaggccgcgcacgggccgtgcccagcttcctgcccctcgccatccttcgggggagggggaatatttttgtccccccgcctggctgtgacacataaataccccgcgggggcctgggcggcgagcacgcggcggcggcggtctctgagcgcctctgctctctctcccggtttcagatccgcatttgctaccagcggcggccgcggcggagccaggccggtcctcagcgcccagcaccgccgctcccggcaacccggagcgcgcaccgcaggccggcggccgagctcgcgcatcccagccatcactcttccacctgctccttagagaagggaagatgagtgagtcgagctcgaagtccagccagcccttggcctccaagcaggaaaaggacggcactgagaagcggggccggggcaggccgcgcaagcagcctccggtgagtcccgggacagcgctggtagggagtcagaaggagcccagcgaagtgccaacacctaagagacctcggggccgaccaaagggaagcaaaaacaagggtgctgccaagacccggaaaaccaccacaactccaggaaggaaaccaaggggcagacccaaaaaactggagaaggaggaagaggagggcatctcgcaggagtcctcggaggaggagcagtgacccatgcgtgccgcctgctcctcactggaggagcagcttccttctgggactggacagctttgctccgctcccaccgcccccgccccttccccaggcccaccatcaccaccgcctctggccgccacccccatcttccacctgtgccctcaccaccacactacacagcacaccagccgctgcagggctcccatgggctgagtggggagcagttttcccctggcctcagttcccagctccccccgcccacccacgcatacacacatgccctcctggacaaggctaacatcccacttagccgcaccctgcacctgctgcgtccccactcccttggtggtggggacattgctctctgggcttttggtttgggggcgccctctctgctccttcactgttccctctggcttcccatagtggggcctgggagggttcccctggccttaaaaggggcccaagccccatctcatcctggcacgccctactccactgccctggcagcagcaggtgtggccaatggaggggggtgctggcccccaggattcccccagccaaactgtctttgtcaccacgtggggctcacttttcatccttccccaacttccctagtccccgtactaggttggacagcccccttcggctacaggaaggcaggaggggtgagtcccctactccctcttcactgtggccacagcccccttgccctccgcctgggatctgagtacatattgtggtgatggagatgcagtcacttattgtccaggtgaggcccaagagccctgtggccgccacctgaggtgggctggggctgctcccctaaccctactttgcttccgccactcagccatttccccctcctcagatggggcaccaataacaaggagctcaccctgcccgctcccaacccccctcctgctcctccctgccccccaaggttctggttccatttttcctctgttcacaaactacctctggacagttgtgttgttttttgttcaatgttccattcttcgacatccgtcattgctgctgctaccagcgccaaatgttcatcctcattgcctcctgttctgcccacgatcccctcccccaagatactctttgtggggaagaggggctggggcatggcaggctgggtgaccgactaccccagtcccagggaaggtggggccctgcccctaggatgctgcagcagagtgagcaagggggcccgaatcgaccataaagggtgtaggggccacctcctccccctgttctgttggggaggggtagccatgatttgtcccagcctggggctccctctctggtttcctatttgcagttacttgaataaaaaaaatatccttttctgg

SEQ ID NO: 443435 - DNA, 1843 bp, Homo sapiens
  misc_feature (4)..(4): n is a, c, g, or t
  misc_feature (38)..(38): n is a, c, g, or t
taanataggctaggtacgaggctgggttaaattcggcngagggactccgagccggggctatttctggcgctggcgcggctccaagaaggcatccgcatttgctaccagcggcggccgcggcggagccaggccggtcctcagcgcccagcaccgccgctcccggcaacccggagcgcgcaccgcaggccggcggccgagctcgcgcatcccagccatcactcttccacctgctccttagagaagggaagatgagtgagtcgagctcgaagtccagccagcccttggcctccaagcaggaaaaggacggcactgagaagcggggccggggcaggccgcgcaagcagcctccggtgagtcccgggacagcgctggtagggagtcagaaggagcccagcgaagtgccaacacctaagagacctcggggccgaccaaagggaagcaaaaacaagggtgctgccaagacccggaaaaccaccacaactccaggaaggaaaccaaggggcagacccaaaaaactggagaaggaggaagaggagggcatctcgcaggagtcctcggaggaggagcagtgacccatgcgtgccgcctgctcctcactggaggagcagcttccttctgggactggacagctttgctccgctcccaccgcccccactacacagcacaccagccgctgcagggctcccatgggctgagtggggagcagttttcccctggcctcagttcccagctccccccgcccacccacgcatacacacatgccctcctggacaaggctaacatcccacttagccgcaccctgcacctgctgcgtccccactcccttggtggtggggacattgctctctgggcttttggtttgggggcgccctctctgctccttcactgttccctctggcttcccatagtggggcctgggagggttcccctggccttaaaaggggcccaagccccatctcatcctggcacgccctactccactgccctggcagcagcaggtgtggccaatggaggggggtgctggcccccaggattcccccagccaaactgtctttgtcaccacgtggggctcacttttcatccttccccaacttccctagtccccgtactaggttggacagcccccttcggctacaggaaggcaggaggggtgagtcccctactccctcttcactgtggccacagcccccttgccctccgcctgggatctgagtacatattgtggtgatggagatgcagtcacttattgtccaggtgaggcccaagagccctgtggccgccacctgaggtgggctggggctgctcccctaaccctactttgcttccgccactcagccatttccccctcctcagatggggcaccaataacaaggagctcaccctgcccgctcccaacccccctcctgctcctccctgccccccaaggttctggttccatttttcctctgttcacaaactacctctggacagttgtgttgttttttgttcaatgttccattcttcgacatccgtcattgctgctgctaccagcgccaaatgttcatcctcattgcctcctgttctgcccacgatcccctcccccaagatactctttgtggggaagaggggctggggcatggcaggctgggtgaccgactaccccagtcccagggaaggtggggccctgcccctaggatgctgcagcagagtgagcaagggggcccgaatcgaccataaagggtgtaggggccacctcctccccctgttctgttggggaggggtagccatgatttgtcccagcctggggctccctctctggtttcctatttgcagttacttgaataaaaaaaatatccttttctgg

SEQ ID NO: 443436 - DNA, 1949 bp, Homo sapiens
  misc_feature (4)..(4): n is a, c, g, or t
  misc_feature (38)..(38): n is a, c, g, or t
taanataggctaggtacgaggctgggttaaattcggcngagggactccgagccggggctatttctggcgctggcgcggctccaagaaggcatccgcatttgctaccagcggcggccgcggcggagccaggccggtcctcagcgcccagcaccgccgctcccggcaacccggagcgcgcaccgcaggccggcggccgagctcgcgcatcccagccatcactcttccacctgctccttagagaagggaagatgagtgagtcgagctcgaagtccagccagcccttggcctccaagcaggaaaaggacggcactgagaagcggggccggggcaggccgcgcaagcagcctccggtgagtcccgggacagcgctggtagggagtcagaaggagcccagcgaagtgccaacacctaagagacctcggggccgaccaaagggaagcaaaaacaagggtgctgccaagacccggaaaaccaccacaactccaggaaggaaaccaaggggcagacccaaaaaactggagaaggaggaagaggagggcatctcgcaggagtcctcggaggaggagcagtgacccatgcgtgccgcctgctcctcactggaggagcagcttccttctgggactggacagctttgctccgctcccaccgcccccgccccttccccaggcccaccatcaccaccgcctctggccgccacccccatcttccacctgtgccctcaccaccacactacacagcacaccagccgctgcagggctcccatgggctgagtggggagcagttttcccctggcctcagttcccagctccccccgcccacccacgcatacacacatgccctcctggacaaggctaacatcccacttagccgcaccctgcacctgctgcgtccccactcccttggtggtggggacattgctctctgggcttttggtttgggggcgccctctctgctccttcactgttccctctggcttcccatagtggggcctgggagggttcccctggccttaaaaggggcccaagccccatctcatcctggcacgccctactccactgccctggcagcagcaggtgtggccaatggaggggggtgctggcccccaggattcccccagccaaactgtctttgtcaccacgtggggctcacttttcatccttccccaacttccctagtccccgtactaggttggacagcccccttcggctacaggaaggcaggaggggtgagtcccctactccctcttcactgtggccacagcccccttgccctccgcctgggatctgagtacatattgtggtgatggagatgcagtcacttattgtccaggtgaggcccaagagccctgtggccgccacctgaggtgggctggggctgctcccctaaccctactttgcttccgccactcagccatttccccctcctcagatggggcaccaataacaaggagctcaccctgcccgctcccaacccccctcctgctcctccctgccccccaaggttctggttccatttttcctctgttcacaaactacctctggacagttgtgttgttttttgttcaatgttccattcttcgacatccgtcattgctgctgctaccagcgccaaatgttcatcctcattgcctcctgttctgcccacgatcccctcccccaagatactctttgtggggaagaggggctggggcatggcaggctgggtgaccgactaccccagtcccagggaaggtggggccctgcccctaggatgctgcagcagagtgagcaagggggcccgaatcgaccataaagggtgtagggccacctcctccccctgttctgttggggaggggccacctcctccccctgttctgttggggaggggtagccatgatttgtcccagcctggggctccctctctggtttcctatttgcagttacttgaataaaaaaaatatccttttctgg

SEQ ID NO: 443437 - DNA, 1801 bp, Homo sapiens
  misc_feature (4)..(4): n is a, c, g, or t
  misc_feature (38)..(38): n is a, c, g, or t
taanataggctaggtacgaggctgggttaaattcggcngagggactccgagccggggctatttctggcgctggcgcggctccaagaaggcatccgcatttgctaccagcggcggccgcggcggagccaggccggtcctcagcgcccagcaccgccgctcccggcaacccggagcgcgcaccgcaggccggcggccgagctcgcgcatcccagccatcactcttccacctgctccttagagaagggaagatgagtgagtcgagctcgaagtccagccagcccttggcctccaagcaggaaaaggacggcactgagaagcggggccggggcaggccgcgcaagcagcctccggtgagtcccgggacagcgctggtagggagtcagaaggagcccagcgaagtgccaacacctaagagacctcggggccgaccaaagggaagcaaaaacaagggtgctgccaagacccggaaaaccaccacaactccaggaaggaaaccaaggggcagacccaaaaaactggagaaggaggaagaggagggcatctcgcaggagtcctcggaggaggagcagtgacccatgcgtgccgcctgctcctcactggaggagcagcttccttctgggactggacagctttgctccgctcccaccgcccccgccccttccccaggcccaccatcaccaccgcctctggccgccacccccatcttccacctgtgccctcaccaccacactacacagcacaccagccgctgcagggctcccatgggctgagtggggagcagttttcccctggcctcagttcccagctccccccgcccacccacgcatacacacatgccctcctggacaaggctaacatcccacttagccgcaccctgcacctgctgcgtccccactcccttggtggtggggacattgctctctgggcttttggtttgggggcgccctctctgctccttcactgttccctctggcttcccatagtggggcctgggagggttcccctggccttaaaaggggcccaagccccatctcatcctggcacgccctactccactgccctggcagcagcaggtgtggccaatggaggggggtgctggcccccaggattcccccagccaaactgtctttgtcaccacgtggggctcacttttcatccttccccaacttccctagtccccgtactaggttggacagcccccttcggctacaggaaggcaggaggggtgagtcccctactccctcttcactgtggccacagcccccttgccctccgcctgggatctgagtacatattgtggtgatggagatgcagtcacttattgtccaggtgaggcccaagagccctgtggccgccacctgaggtgggctggggctgctcccctaaccctactttgcttccgccactcagccatttccccctcctcagatggggcaccaataacaaggagctcaccctgcccgctcccaacccccctcctgctcctccctgccccccaaggttctggttccatttttcctctgttcacaaactacctctggacagttgtgttgttttttgttcaatgttccattcttcgacatccgtcattgctgctgctaccagcgccaaatgttcatcctcattgcctcctgttctgcccacgatcccctcccccaagatactctttgtggggaagaggggctggggcatggcaggctgggtgaccgactaccccagtcccagggaaggtggggccctgcccctaggatgctggtttcctatttgcagttacttgaataaaaaaaatatccttttctgg

SEQ ID NO: 443438 - DNA, 1616 bp, Homo sapiens
  misc_feature (4)..(4): n is a, c, g, or t
  misc_feature (38)..(38): n is a, c, g, or t
taanataggctaggtacgaggctgggttaaattcggcngagggactccgagccggggctatttctggcgctggcgcggctccaagaaggcatccgcatttgctaccagcggcggccgcggcggagccaggccggtcctcagcgcccagcaccgccgctcccggcaacccggagcgcgcaccgcaggccggcggccgagctcgcgcatcccagccatcactcttccacctgctccttagagaagggaagatgagtgagtcgagctcgaagtccagccagcccttggcctccaagcaggaaaaggacggcactgagaagcggggccggggcaggccgcgcaagcagcctccggtgagtcccgggacagcgctggtagggagtcagaaggagcccagcgaagtgccaacacctaagagacctcggggccgaccaaagggaagcaaaaacaagggtgctgccaagacccggaaaaccaccacaactccaggaaggaaaccaaggggcagacccaaaaaactggagaaggaggaagaggagggcatctcgcaggagtcctcggaggaggagcagtgacccatgcgtgccgcctgctcctcactggaggagcagcttccttctgggactggacagctttgctccgctcccaccgccccccttcactgttccctctggcttcccatagtggggcctgggagggttcccctggccttaaaaggggcccaagccccatctcatcctggcacgccctactccactgccctggcagcagcaggtgtggccaatggaggggggtgctggcccccaggattcccccagccaaactgtctttgtcaccacgtggggctcacttttcatccttccccaacttccctagtccccgtactaggttggacagcccccttcggctacaggaaggcaggaggggtgagtcccctactccctcttcactgtggccacagcccccttgccctccgcctgggatctgagtacatattgtggtgatggagatgcagtcacttattgtccaggtgaggcccaagagccctgtggccgccacctgaggtgggctggggctgctcccctaaccctactttgcttccgccactcagccatttccccctcctcagatggggcaccaataacaaggagctcaccctgcccgctcccaacccccctcctgctcctccctgccccccaaggttctggttccatttttcctctgttcacaaactacctctggacagttgtgttgttttttgttcaatgttccattcttcgacatccgtcattgctgctgctaccagcgccaaatgttcatcctcattgcctcctgttctgcccacgatcccctcccccaagatactctttgtggggaagaggggctggggcatggcaggctgggtgaccgactaccccagtcccagggaaggtggggccctgcccctaggatgctgcagcagagtgagcaagggggcccgaatcgaccataaagggtgtaggggccacctcctccccctgttctgttggggaggggtagccatgatttgtcccagcctggggctccctctctggtttcctatttgcagttacttgaataaaaaaaatatccttttctgg

SEQ ID NO: 443439 - DNA, 1696 bp, Homo sapiens
  misc_feature (4)..(4): n is a, c, g, or t
  misc_feature (38)..(38): n is a, c, g, or t
taanataggctaggtacgaggctgggttaaattcggcngagggactccgagccggggctatttctggcgctggcgcggctccaagaaggcatccgcatttgctaccagcggcggccgcggcggagccaggccggtcctcagcgcccagcaccgccgctcccggcaacccggagcgcgcaccgcaggccggcggccgagctcgcgcatcccagccatcactcttccacctgctccttagagaagggaagatgagtgagtcgagctcgaagtccagccagcccttggcctccaagcaggaaaaggacggcactgagaagcggggccggggcaggccgcgcaagcagcctccggtgagtcccgggacagcgctggtagggagtcagaaggagcccagcgaagtgccaacacctaagagacctcggggccgaccaaagggaagcaaaaacaagggtgctgccaagacccggaaaaccaccacaactccaggaaggaaaccaaggggcagacccaaaaaactggagaaggaggaagaggagggcatctcgcaggagtcctcggaggaggagcagtgacccatgcgtgccgcctgctcctcactggaggagcagcttccttctgggactggacagctttgctccgctcccaccgcccccgccccttccccaggcccaccatcaccaccgcctctggccgccacccccatcttccacctgtgccctcaccaccacactacacagcacaccagccgctgcagggctcccatgggctgagtggggagcagttttcccctggcctcagttcccagctccccccgcccacccacgcatacacacatgccctcctggacaaggctaacatcccacttagccgcaccctgcacctgctgcgtccccactcccttggtggtggggacattgctctctgggcttttggtttgggggcgccctctctgctccttcactgttccctctggcttcccatagtggggcctgggagggttcccctggccttaaaaggggcccaagccccatctcatcctggcacgccctactccactgccctggcagcagcaggtgtggccaatggaggggggtgctggcccccaggattcccccagccaaactgtctttgtcaccacgtggggctcacttttcatccttccccaacttccctagtccccgtactaggttggacagcccccttcggctacaggaaggcaggaggggtgagtcccctactccctcttcactgtggccacagcccccttgccctccgcctgggatctgagtacatattgtggtgatggagatgcagtcacttattgtccaggtgaggcccaagagccctgtggccgccacctgaggtgggctggggctgctcccctaaccctactttgcttccgccactcagccatttccccctcctcagatggggcaccaataacaaggagctcaccctgcccgctcccaacccccctcctgctcctccctgccccccaaggttggaaggtggggccctgcccctaggatgctgcagcagagtgagcaagggggcccgaatcgaccataaagggtgtaggggccacctcctccccctgttctgttggggaggggtagccatgatttgtcccagcctggggctccctctctggtttcctatttgcagttacttgaataaaaaaaatatccttttctgg

SEQ ID NO: 443440 - DNA, 1912 bp, Homo sapiens
  misc_feature (4)..(4): n is a, c, g, or t
  misc_feature (38)..(38): n is a, c, g, or t
taanataggctaggtacgaggctgggttaaattcggcngagggactccgagccggggctatttctggcgctggcgcggctccaagaaggcatccgcatttgctaccagcggcggccgcggcggagccaggccggtcctcagcgcccagcaccgccgctcccggcaacccggagcgcgcaccgcaggccggcggccgagctcgcgcatcccagccatcactcttccacctgctccttagagaagggaagatgagtgagtcgagctcgaagtccagccagcccttggcctccaagcaggaaaaggacggcactgagaagcggggccggggcaggccgcgcaagcagcctccggtgagtcccgggacagcgctggtagggagtcagaaggagcccagcgaagtgccaacacctaagagacctcggggccgaccaaagggaagcaaaaacaagggtgctgccaagacccggaaaaccaccacaactccaggaaggaaaccaaggggcagacccaaaaaactggagaaggaggaagaggagggcatctcgcaggagtcctcggaggaggagcagtgacccatgcgtgccgcctgctcctcactggaggagcagcttccttctgggactggacagctttgctccgctcccaccgcccccgccccttccccaggcccaccatcaccaccgcctctggccgccacccccatcttccacctgtgccctcaccaccacactacacagcacaccagccgctgcagggctcccatgggctgagtggggagcagttttcccctggcctcagttcccagctccccccgcccacccacgcatacacacatgccctcctggacaaggctaacatcccacttagccgcaccctgcacctgctgcgtccccactcccttggtggtggggacattgctctctgggcttttggtttgggggcgccctctctgctccttcactgttccctctggcttcccatagtggggcctgggagggttcccctggccttaaaaggggcccaagccccatctcatcctggcacgccctactccactgccctggcagcagcaggtgtggccaatggaggggggtgctggcccccaggattcccccagccaaactgtctttgtcaccacgtggggctcacttttcatccttccccaacttccctagtccccgtactaggttggacagcccccttcggctacaggaaggcaggaggggtgagtcccctactccctcttcactgtggccacagcccccttgccctccgcctgggatctgagtacatattgtggtgatggagatgcagtcacttattgtccaggtgaggcccaagagccctgtggccgccacctgaggtgggctggggctgctcccctaaccctactttgcttccgccactcagccatttccccctcctcagatggggcaccaataacaaggagctcaccctgagacgctaccacaacacccacatactgatactacaatgaacaaccccaaggaatctgattaccaaaaaacatactgatacaacaaaaaaccacagaaaaaaaagagaaggaagaaacgtacaaaagtccataatacgaatcacgacactcagaagcagatacaagcaaccaatagacaacacaacaacagccaccagtaaagaccacagaacaacaacccccaagaatagtatcagaagggaaagagggcgatagcgaaggcaagaaaaactaacaaacacacaggacacaggaaagagagcaagacccaaaaagagaagcaacaacaaagaggccaacagacaaagagaacgagcaacacaaccgagacaccacgaggaacaacacaacacgagagaaaccaaagacaacaacgaacaaacaaaaacaataaaaacaacacacagaagacac

SEQ ID NO: 443441 - DNA, 1816 bp, Homo sapiens
  misc_feature (4)..(4): n is a, c, g, or t
  misc_feature (38)..(38): n is a, c, g, or t
taanataggctaggtacgaggctgggttaaattcggcngagggactccgagccggggctatttctggcgctggcgcggctccaagaaggcatccgcatttgctaccagcggcggccgcggcggagccaggccggtcctcagcgcccagcaccgccgctcccggcaacccggagcgcgcaccgcaggccggcggccgagctcgcgcatcccagccatcactcttccacctgctccttagagaagggaagatgagtgagtcgagctcgaagtccagccagcccttggcctccaagcaggaaaaggacggcactgagaagcggggccggggcaggccgcgcaagcagcctccggtgagtcccgggacagcgctggtagggagtcagaaggagcccagcgaagtgccaacacctaagagacctcggggccgaccaaagggaagcaaaaacaagggtgctgccaagacccggaaaaccaccacaactccaggaaggaaaccaaggggcagacccaaaaaactggagaaggaggaagaggagggcatctcgcaggagtcctcggaggaggagcagtgacccatgcgtgccgcctgctcctcactggaggagcagcttccttctgggactggacagctttgctccgctcccaccgcccccgccccttccccaggcccaccatcaccaccgcctctggccgccacccccatcttccacctgtgccctcaccaccacactacacagcacaccagccgctgcagggctcccatgggctgagtggggagcagttttcccctggcctcagttcccagctccccccgcccacccacgcatacacacatgccctcctggacaaggctaacatcccacttagccgcaccctgcacctgctgcgtccccactcccttggtggtggggacattgctctctgggcttttggtttgggggcgccctctctgctccttcactgttccctctggcttcccatagtggggcctgggagggttcccctggccttaaaaggggcccaagccccatctcatcctggcacgccctactccactgccctggcagcagcaggtgtggccaatggaggggggtgctggcccccaggattcccccagccaaactgtctttgtcaccacgtggggctcacttttcatccttccccaacttccctagtccccgtactaggttggacagcccccttcggctacaggaaggcaggaggggtgagtcccctactccctcttcactgtggccacagcccccttgccctccgcctgggatctgagtacatattgtggtgatggagatgcagtcacttattgtccaggtgaggcccaagagccctgtggccgccacctgaggtgggctggggctgctcccctaaccctactttgcttccctggttccatttttcctctgttcacaaactacctctggacagttgtgttgttttttgttcaatgttccattcttcgacatccgtcattgctgctgctaccagcgccaaatgttcatcctcattgcctcctgttctgcccacgatcccctcccccaagatactctttgtggggaagaggggctggggcatggcaggctgggtgaccgactaccccagtcccagggaaggtggggccctgcccctaggatgctgcagcagagtgagcaagggggcccgaatcgaccataaagggtgtaggggccacctcctccccctgttctgttggggaggggtagccatgatttgtcccagcctggggctccctctctggtttcctatttgcagttacttgaataaaaaaaatatccttttctgg

SEQ ID NO: 443442 - DNA, 1488 bp, Homo sapiens
  misc_feature (4)..(4): n is a, c, g, or t
  misc_feature (38)..(38): n is a, c, g, or t
taanataggctaggtacgaggctgggttaaattcggcngagggactccgagccggggctatttctggcgctggcgcggctccaagaaggcatccgcatttgctaccagcggcggccgcggcggagccaggccggtcctcagcgcccagcaccgccgctcccggcaacccggagcgcgcaccgcaggccggcggccgagctcgcgcatcccagccatcactcttccacctgctccttagagaagggaagatgagtgagtcgagctcgaagtccagccagcccttggcctccaagcaggaaaaggacggcactgagaagcggggccggggcaggccgcgcaagcagcctccggtgagtcccgggacagcgctggtagggagtcagaaggagcccagcgaagtgccaacacctaagagacctcggggccgaccaaagggaagcaaaaacaagggtgctgccaagacccggaaaaccaccacaactccaggaaggaaaccaaggggcagacccaaaaaactggagaaggaggaagaggagggcatctcgcaggagtcctcggaggaggagcagtgacccatgcgtgccgcctgctcctcactggaggagcagcttccttctgggactggacagctttgctccgctcccaccgcccccgccccttccccaggcccaccatcaccaccgcctctggccgccacccccatcttccacctgtgccctcaccaccacactacacagcacaccagccgctgcagggctcccatgggctgagtggggagcagttttcccctggcctcagttcccagctccccccgcccacccacgcatacacacatgccctcctggacaaggctaacatcccacttagccgcaccctgcacctgctgcgtccccactcccttggtggtggggacattgctctctgggcttttggtttgggggcgccctctctgctccttcactgttccctctggcttcccatagtggggcctgggagggttcccctggccttaaaaggggcccaagccccatctcatcctggcacgccctactccactgccctggcagcagcaggtgtggccaatggaggggggtgctggcccccaggattcccccagccaaactgtctttgtcaccacgtggggctcacttttcatccttccccaacttccctagtccccgtactaggttggacagcccccttcggctacaggaaggcaggaggggtgagtcccctactccctcttcactgtggccacagcccccttgccctccgcctgggatctgagtacatattgtggtgatggagatgcagtcacttattgtccaggtgaggcccaagagccctgtggccgccacctgaggtgggctggggctgctcccctaaccctactttgcttccgccactcagccatttccccctcctcagatgggggaggagcaggaggggggttgggagcgggcagggtgagctccttgttattggtgc

SEQ ID NO: 443443 - DNA, 1867 bp, Homo sapiens
  misc_feature (4)..(4): n is a, c, g, or t
  misc_feature (38)..(38): n is a, c, g, or t
taanataggctaggtacgaggctgggttaaattcggcngagggactccgagccggggctatttctggcgctggcgcggctccaagaaggcatccgcatttgctaccagcggcggccgcggcggagccaggccggtcctcagcgcccagcaccgccgctcccggcaacccggagcgcgcaccgcaggccggcggccgagctcgcgcatcccagccatcactcttccacctgctccttagagaagggaagatgagtgagtcgagctcgaagtccagccagcccttggcctccaagcaggaaaaggacggcactgagaagcggggccggggcaggccgcgcaagcagcctccggtgagtcccgggacagcgctggtagggagtcagaaggagcccagcgaagtgccaacacctaagagacctcggggccgaccaaagggaagcaaaaacaagggtgctgccaagacccgggagaaggaggaagaggagggcatctcgcaggagtcctcggaggaggagcagtgacccatgcgtgccgcctgctcctcactggaggagcagcttccttctgggactggacagctttgctccgctcccaccgcccccgccccttccccaggcccaccatcaccaccgcctctggccgccacccccatcttccacctgtgccctcaccaccacactacacagcacaccagccgctgcagggctcccatgggctgagtggggagcagttttcccctggcctcagttcccagctccccccgcccacccacgcatacacacatgccctcctggacaaggctaacatcccacttagccgcaccctgcacctgctgcgtccccactcccttggtggtggggacattgctctctgggcttttggtttgggggcgccctctctgctccttcactgttccctctggcttcccatagtggggcctgggagggttcccctggccttaaaaggggcccaagccccatctcatcctggcacgccctactccactgccctggcagcagcaggtgtggccaatggaggggggtgctggcccccaggattcccccagccaaactgtctttgtcaccacgtggggctcacttttcatccttccccaacttccctagtccccgtactaggttggacagcccccttcggctacaggaaggcaggaggggtgagtcccctactccctcttcactgtggccacagcccccttgccctccgcctgggatctgagtacatattgtggtgatggagatgcagtcacttattgtccaggtgaggcccaagagccctgtggccgccacctgaggtgggctggggctgctcccctaaccctactttgcttccgccactcagccatttccccctcctcagatggggcaccaataacaaggagctcaccctgcccgctcccaacccccctcctgctcctccctgccccccaaggttctggttccatttttcctctgttcacaaactacctctggacagttgtgttgttttttgttcaatgttccattcttcgacatccgtcattgctgctgctaccagcgccaaatgttcatcctcattgcctcctgttctgcccacgatcccctcccccaagatactctttgtggggaagaggggctggggcatggcaggctgggtgaccgactaccccagtcccagggaaggtggggccctgcccctaggatgctgcagcagagtgagcaagggggcccgaatcgaccataaagggtgtaggggccacctcctccccctgttctgttggggaggggtagccatgatttgtcccagcctggggctccctctctggtttcctatttgcagttacttgaataaaaaaaatatccttttctgg

SEQ ID NO: 443444 - DNA, 793 bp, Homo sapiens
  misc_feature (4)..(4): n is a, c, g, or t
  misc_feature (38)..(38): n is a, c, g, or t
taanataggctaggtacgaggctgggttaaattcggcngagggactccgagccggggctatttctggcgctggcgcggctccaagaaggcatccgcatttgctaccagcggcggccgcggcggagccaggccggtcctcagcgcccagcaccgccgctcccggcaacccggagcgcgcaccgcaggccggcggccgagctcgcgcatcccagccatcactcttccacctgctccttagagaagggaagatgagtgagtcgagctcgaagtccagccagcccttggcctccaagcaggaaaaggacggcactgagaagcggggccggggcaggccgcgcaagcagcctccggtgagtcccgggacagcgctggtagggagtcagaaggagcccagcgaagtgccaacacctaagagacctcggggccgaccaaagggaagcaaaaacaagggtgctgccaagacccggaaaaccaccacaactccaggaaggaaaccaaggggcagacccaaaaaactggagaaggaggaagaggagggcatctcgcaggagtcctcggaggaggagcagtgacccatgcgtgccgcctgctcctcactggaggagcagcttccttctgggactggacagctttgctccgctcccaccgccccccacgggggccacgcacataccaaagtccacaaaaccaaccattggcgacacccattaacactgtggcaacaacaaaaagaaccaacgtcaggtccagccagcaatttcctaaaaaaagtgcacaaacaagaacgtgaccc

SEQ ID NO: 443445 - DNA, 1124 bp, Homo sapiens
  misc_feature (4)..(4): n is a, c, g, or t
  misc_feature (38)..(38): n is a, c, g, or t
taanataggctaggtacgaggctgggttaaattcggcngagggactccgagccggggctatttctggcgctggcgcggctccaagaaggcatccgcatttgctaccagcggcggccgcggcggagccaggccggtcctcagcgcccagcaccgccgctcccggcaacccggagcgcgcaccgcaggccggcggccgagctcgcgcatcccagccatcactcttccacctgctccttagagaagggaagatgagtgagtcgagctcgaagtccagccagcccttggcctccaagcaggaaaaggacggcactgagaagcggggccggggcaggccgcgcaagcagcctccggtgagtcccgggacagcgctggtagggagtcagaaggagcccagcgaagtgccaacacctaagagacctcggggccgaccaaagggaagcaaaaacaagggtgctgccaagacccggaaaaccaccacaactccaggaaggaaaccaaggggcagacccaaaaaactggagaaggaggaagaggagggcatctcgcaggagtcctcggaggaggagcagtgacccatgcgtgccgcctgctcctcactggaggagcagcttccttctgggactggacagctttgctccgctcccaccgcccccgaagatgtgcttggttcagtgcggagagccctgagtcgcattgagcagagcttgagtcgtagaactgtcctttcctggctggggagacagaatctctagccgacatggtttcgtggggagccctatagccattactgcaagatcccagctactccctgaggagctgagtgccctgcacagctggttccagacactgagtacccaggaaccatgtcagcgagctgcagagactgtactgaaacacgaacggtgtcctggctctccgagcttacctccaaaagcagccacagccagccccgctgagggaagggctgtcaccaaatgagcctgaggaggagggacctggcataccctatcctgaggacggacatctgctatggctggcactagcatagggagaccggcccaaaacgcttggccccgcaaggaggccacaagaaaactcaacgaagctgtggcctgcacacagct

SEQ ID NO: 443446 - DNA, 761 bp, Homo sapiens
  misc_feature (4)..(4): n is a, c, g, or t
  misc_feature (38)..(38): n is a, c, g, or t
taanataggctaggtacgaggctgggttaaattcggcngagggactccgagccggggctatttctggcgctggcgcggctccaagaaggcatccgcatttgctaccagcggcggccgcggcggagccaggccggtcctcagcgcccagcaccgccgctcccggcaacccggagcgcgcaccgcaggccggcggccgagctcgcgcatcccagccatcactcttccacctgctccttagagaagggaagatgagtgagtcgagctcgaagtccagccagcccttggcctccaagcaggaaaaggacggcactgagaagcggggccggggcaggccgcgcaagcagcctccggtgagtcccgggacagcgctggtagggagtcagaaggagcccagcgaagtgccaacacctaagagacctcggggccgaccaaagggaagcaaaaacaagggtgctgccaagacccggaaaaccaccacaactccaggaaggaaaccaaggggcagacccaaaaaactggagaaggaggaagaggagggcatctcgcaggagtcctcggaggaggagcagtgacccatgcgtgccgcctgctcctcactggaggagcagcttccttctgggactggacagctttgctccgctcccaccgccccccacaaaaccacctgtccaaaagggccttcgatacgggataatcctattattacctccaaagtttttctcgcagattttctgaacctttacatcagctagccctacccc

SEQ ID NO: 443447 - DNA, 749 bp, Homo sapiens
  misc_feature (4)..(4): n is a, c, g, or t
  misc_feature (38)..(38): n is a, c, g, or t
taanataggctaggtacgaggctgggttaaattcggcngagggactccgagccggggctatttctggcgctggcgcggctccaagaaggcatccgcatttgctaccagcggcggccgcggcggagccaggccggtcctcagcgcccagcaccgccgctcccggcaacccggagcgcgcaccgcaggccggcggccgagctcgcgcatcccagccatcactcttccacctgctccttagagaagggaagatgagtgagtcgagctcgaagtccagccagcccttggcctccaagcaggaaaaggacggcactgagaagcggggccggggcaggccgcgcaagcagcctccggtgagtcccgggacagcgctggtagggagtcagaaggagcccagcgaagtgccaacacctaagagacctcggggccgaccaaagggaagcaaaaacaagggtgctgccaagacccggaaaaccaccacaactccaggaaggaaaccaaggggcagacccaaaaaactggagaaggaggaagaggagggcatctcgcaggagtcctcggaggaggagcagtgacccatgcgtgccgcctgctcctcactggaggagcagcttccttctgggactggacagctttgctccgctcccaccgcccccgtgttcatgatcggtgtgtatgcggctgaccacaggctttgtgccccatgtcatgtgggtgaagtgtacccaagccttgtggggccctggggacct

SEQ ID NO: 443448 - DNA, 708 bp, Homo sapiens
  misc_feature (4)..(4): n is a, c, g, or t
  misc_feature (38)..(38): n is a, c, g, or t
taanataggctaggtacgaggctgggttaaattcggcngagggactccgagccggggctatttctggcgctggcgcggctccaagaaggcatccgcatttgctaccagcggcggccgcggcggagccaggccggtcctcagcgcccagcaccgccgctcccggcaacccggagcgcgcaccgcaggccggcggccgagctcgcgcatcccagccatcactcttccacctgctccttagagaagggaagatgagtgagtcgagctcgaagtccagccagcccttggcctccaagcaggaaaaggacggcactgagaagcggggccggggcaggccgcgcaagcagcctccggtgagtcccgggacagcgctggtagggagtcagaaggagcccagcgaagtgccaacacctaagagacctcggggccgaccaaagggaagcaaaaacaagggtgctgccaagacccggaaaaccaccacaactccaggaaggaaaccaaggggcagacccaaaaaactggagaaggaggaagaggagggcatctcgcaggagtcctcggaggaggagcagtgacccatgcgtgccgcctgctcctcactggaggagcagcttccttctgggactggacagctttgctccgctcccaccgcccccgaggagcacccggaccccatgtgcacccaaacaacaaaccaccgggaaagcacta

SEQ ID NO: 443449 - DNA, 1016 bp, Homo sapiens
  misc_feature (4)..(4): n is a, c, g, or t
  misc_feature (38)..(38): n is a, c, g, or t
taanataggctaggtacgaggctgggttaaattcggcngagggactccgagccggggctatttctggcgctggcgcggctccaagaaggcatccgcatttgctaccagcggcggccgcggcggagccaggccggtcctcagcgcccagcaccgccgctcccggcaacccggagcgcgcaccgcaggccggcggccgagctcgcgcatcccagccatcactcttccacctgctccttagagaagggaagatgagtgagtcgagctcgaagtccagccagcccttggcctccaagcaggaaaaggacggcactgagaagcggggccggggcaggccgcgcaagcagcctccggtgagtcccgggacagcgctggtagggagtcagaaggagcccagcgaagtgccaacacctaagagacctcggggccgaccaaagggaagcaaaaacaagggtgctgccaagacccggaaaaccaccacaactccaggaaggaaaccaaggggcagacccaaaaaactggagaaggaggaagaggagggcatctcgcaggagtcctcggaggaggagcagtgacccatgcgtgccgcctgctcctcactggaggagcagcttccttctgggactggacagctttgctccgctcccaccgcccccgcgcctattctccaggcctacgattagaacctgactatgtacgtcttctgcgcatctttaccactctgatgcacgctcaggcactgaaagggaaaaacgtgacagctaggcgagggagagggggtcggactgggctgtatcgcggcgttgcatggagcccatgtacacagatagggaacttacaccatgcagataactgatttcctgatgtacttgcactgagggatagtccatgacttatagtatacaagacacacgaggaaccagtgggcagtccacactgatcaccatagtatagagtactagagagctgtgtgttacagtagggacaggcggtcacctccatctggatagggagccccg

SEQ ID NO: 443450 - DNA, 885 bp, Homo sapiens
  misc_feature (4)..(4): n is a, c, g, or t
  misc_feature (38)..(38): n is a, c, g, or t
taanataggctaggtacgaggctgggttaaattcggcngagggactccgagccggggctatttctggcgctggcgcggctccaagaaggcatccgcatttgctaccagcggcggccgcggcggagccaggccggtcctcagcgcccagcaccgccgctcccggcaacccggagcgcgcaccgcaggccggcggccgagctcgcgcatcccagccatcactcttccacctgctccttagagaagggaagatgagtgagtcgagctcgaagtccagccagcccttggcctccaagcaggaaaaggacggcactgagaagcggggccggggcaggccgcgcaagcagcctccggtgagtcccgggacagcgctggtagggagtcagaaggagcccagcgaagtgccaacacctaagagacctcggggccgaccaaagggaagcaaaaacaagggtgctgccaagacccggaaaaccaccacaactccaggaaggaaaccaaggggcagacccaaaaaactggagaaggaggaagaggagggcatctcgcaggagtcctcggaggaggagcagtgacccatgcgtgccgcctgctcctcactggaggagcagcttccttctgggactggacagctttgctccgctcccaccgcccccccaaccgggcccatgagacacatatcacaccaagggcccaaaaaaatagaaagcaaccggacatcttggagagccaaaacccggcaattttaagaaccaatgaatgaagaagtacaaaggaagcaaagaataaaaaagaaaagacaaagcgaatagaagggataaccacaatggagtaaaaaagaaaaaagacaatagaaacaaacatggaaaatagataaaaaaaaaccac

SEQ ID NO: 443451 - DNA, 1151 bp, Homo sapiens
  misc_feature (4)..(4): n is a, c, g, or t
  misc_feature (38)..(38): n is a, c, g, or t
taanataggctaggtacgaggctgggttaaattcggcngagggactccgagccggggctatttctggcgctggcgcggctccaagaaggcgtgagttcgcggccgctccggtggcttcttttttttatatctataatttaattaaattatttatttattgaggccgcgcacgggccgtgcccagcttcctgcccctcgccatccttcgggggagggggaatatttttgtccccccgcctggctgtgacacataaataccccgcgggggcctgggcggcgagcacgcggcggcggcggtctctgagcgcctctgctctctctcccggtttcagatccgcatttgctaccagcggcggccgcggcggagccaggccggtcctcagcgcccagcaccgccgctcccggcaacccggagcgcgcaccgcaggccggcggccgagctcgcgcatcccagccatcactcttccacctgctccttagagaagggaagatgagtgagtcgagctcgaagtccagccagcccttggcctccaagcaggaaaaggacggcactgagaagcggggccggggcaggccgcgcaagcagcctccgaaggagcccagcgaagtgccaacacctaagagacctcggggccgaccaaagggaagcaaaaacaagggtgctgccaagacccggaaaaccaccacaactccaggaaggaaaccaaggggcagacccaaaaaactggagaaggaggaagaggagggcatctcgcaggagtcctcggaggaggagcagtgacccatgcgtgccgcctgctcctcactggaggagcagcttccttctgggactggacagctttgctccgctcccaccgcccccagcgccggcacccaggcaaagaccgcacacacatcaggatccggacgaacacgcccgaaccaagagacgcaaacagttacaaccgctgcaaagatcacatggaacacgcagcaacccagcgcgtagacgacaccaacgaactggccgagcaaaccaccgaggattccaaaaacacactgaccgctaacaggccgaaacgaacaaaagaccgacacgcacaaaaccatcggcactgaaccacacagtaaaacagcaaccgcaagccaacgcaaggctctaacggaccccc

SEQ ID NO: 443452 - DNA, 920 bp, Homo sapiens
  misc_feature (4)..(4): n is a, c, g, or t
  misc_feature (38)..(38): n is a, c, g, or t
taanataggctaggtacgaggctgggttaaattcggcngagggactccgagccggggctatttctggcgctggcgcggctccaagaaggcgtgagttcgcggccgctccggtggcttcttttttttatatctataatttaattaaattatttatttattgaggccgcgcacgggccgtgcccagcttcctgcccctcgccatccttcgggggagggggaatatttttgtccccccgcctggctgtgacacataaataccccgcgggggcctgggcggcgagcacgcggcggcggcggtctctgagcgcctctgctctctctcccggtttcagatccgcatttgctaccagcggcggccgcggcggagccaggccggtcctcagcgcccagcaccgccgctcccggcaacccggagcgcgcaccgcaggccggcggccgagctcgcgcatcccagccatcactcttccacctgctccttagagaagggaagatgagtgagtcgagctcgaagtccagccagcccttggcctccaagcaggaaaaggacggcactgagaagcggggccggggcaggccgcgcaagcagcctccggtgagtcccgggacagcgctggtagggagtcagaaggagcccagcgaagtgccaacacctaagagacctcggggccgaccaaagggaagcaaaaacaagggtgctgccaagacccggcgactaccccagtcccagggaaggtggggccctgcccctaggatgctgcagcagagtgagcaagggggcccgaatcgaccataaagggtgtaggggccacctcctccccctgttctgttggggaggggtagccatgatttgtcccagcctggggctccctctctggtttcctatttgcagttacttgaataaaaaaaatatccttttctgg

SEQ ID NO: 443453 - DNA, 863 bp, Homo sapiens
  misc_feature (4)..(4): n is a, c, g, or t
  misc_feature (38)..(38): n is a, c, g, or t
taanataggctaggtacgaggctgggttaaattcggcngagggactccgagccggggctatttctggcgctggcgcggctccaagaaggcatccgcatttgctaccagcggcggccgcggcggagccaggccggtcctcagcgcccagcaccgccgctcccggcaacccggagcgcgcaccgcaggccggcggccgagctcgcgcatcccagccatcactcttccacctgctccttagagaagggaagatgagtgagtcgagctcgaagtccagccagcccttggcctccaagcaggaaaaggacggcactgagaagcggggccggggcaggccgcgcaagcagcctccggtgagtcccgggacagcgctggtagggagtcagaaggagcccagcgaagtgccaacacctaagagacctcggggccgaccaaagggaagcaaaaacaagggtgctgccaagacccggaaaaccaccacaactccaggaaggaaaccaaggggcagacccaaaaaactggtaggtgaagaagcagactgctgcttgcctcctgggctcttttgagtgagggtgttgagtacacagtacctgatgctatgcaccccctatggaaaggctctccttgacctgctgggacatcagattttacagaagtccagagaggggaaggtacctggcctgggctgtgcccatgagaagtgaggggtcccaggtataaatcagaccacatccccctgccctgccctgccctagttgtgtgtgggggtccctccctctcctgctcctagaatactcagaacttctaggggagatcttggaagtcatctagcctgtgtccccctcaattagagatgaggaaaggaa

SEQ ID NO: 443454 - DNA, 828 bp, Homo sapiens
  misc_feature (4)..(4): n is a, c, g, or t
  misc_feature (38)..(38): n is a, c, g, or t
taanataggctaggtacgaggctgggttaaattcggcngagggactccgagccggggctatttctggcgctggcgcggctccaagaaggcgtgagttcgcggccgctccggtggcttcttttttttatatctataatttaattaaattatttatttattgaggccgcgcacgggccgtgcccagcttcctgcccctcgccatccttcgggggagggggaatatttttgtccccccgcctggctgtgacacataaataccccgcgggggcctgggcggcgagcacgcggcggcggcggtctctgagcgcctctgctctctctcccggtttcagatccgcatttgctaccagcggcggccgcggcggagccaggccggtcctcagcgcccagcaccgccgctcccggcaacccggagcgcgcaccgcaggccggcggccgagctcgcgcatcccagccatcactcttccacctgctccttagagaagggaagatgagtgagtcgagctcgaagtccagccagcccttggcctccaagcaggaaaaggacggcactgagaagcggggccggggcaggccgcgcaagcagcctccggtgagtcccgggacagcgctggtagggagtcagaaggagcccagcgaagtgccaacacctaagagacctcggggccgaccaaagggaagcaaaaacaagggtgctgccaagacccggaaaacactccacataccaggaagagaaggaatatactgcaacaaaatataggccagtcatgcaaggcccatggctgaaagtctttcagtcattttagatgaaagactgaaatctttgcc

SEQ ID NO: 443455 - DNA, 740 bp, Homo sapiens
gcctgttgggtgagagtgttgggtcaccctgaacaggcaggtaggtctgccccccatcactattgggcatcgggtgagcactgatgagcattttggacttaggagatattttctctaaccctctagaaaaccaccacaactccaggaaggaaaccaaggggcagacccaaaaaactggtaggtgaagaagcagactgctgcttgcctcctgggctcttttgagtgagggtgttgagtacacagtacctgatgctatgcaccccctatggaaaggctctccttgacctgctgggacatcagattttacagaagtccagagaggggaaggtacctggcctgggctgtgcccatgagaagtgaggggtcccaggtataaatcagaccacatccccctgccctgccctgccctagttgtgtgtgggggtccctccctctcctgctcctagaatactcagaacttctaggggagatcttggaagtcatctagcctgtgtccccctcaattagagatgaggaaaggaagccatagggggaaggtttgtccttcctatgagcctctgcagaagagaaacagcgaaggagctgggccctgggaggggtcggtgctggagttctgatgtgacccaccacactgcactggagggcaccatccaattctgggtccccaaacagctggtggaaaggctcggtgggctgagtcaagaagctgcctctagggggccactgcagttagggtcacc

SEQ ID NO: 443456 - DNA, 715 bp, Homo sapiens
  misc_feature (4)..(4): n is a, c, g, or t
  misc_feature (38)..(38): n is a, c, g, or t
  misc_feature (631)..(631): n is a, c, g, or t
  misc_feature (635)..(635): n is a, c, g, or t
  misc_feature (641)..(641): n is a, c, g, or t
  misc_feature (647)..(647): n is a, c, g, or t
taanataggctaggtacgaggctgggttaaattcggcngagggactccgagccggggctatttctggcgctggcgcggctccaagaaggcatccgcatttgctaccagcggcggccgcggcggagccaggccggtcctcagcgcccagcaccgccgctcccggcaacccggagcgcgcaccgcaggccggcggccgagctcgcgcatcccagccatcactcttccacctgctccttagagaagggaagatgagtgagtcgagctcgaagtccagccagcccttggcctccaagcaggaaaaggacggcactgagaagcggggccggggcaggccgcgcaagcagcctccgaaggagcccagcgaagtgccaacacctaagagacctcggggccgaccaaagggaagcaaaaacaagggtgctgccaagacccggaaaaccaccacaactccaggaaggaaaccaaggggcagacccaaaaaactggagaaggaggaagaggagggcatctcgcaggagtcctcggaggaggagcagtgacccatgcgtgccgcctgctcctcactggaggagcagcttccttctgggactggacagctttgctccgctcccaccgcccccagcgggccagnactnccaggncacatnacaccgcttggcgcaaccataaactggactaacacaaaaaaagaaaaaagtgaggcccaggagagggg

SEQ ID NO: 443457 - DNA, 1849 bp, Homo sapiens
gggtccccagcagcaagaggtggggggaggcaccagatggtatgagagcttccagggagacccgccaagatctccaggcaggccgggccaggctctctgggattccggactggcttcgcccaactggaaccccctcgatgagggggccccaggcagaccttatatgagcatcccagccatcactcttccacctgctccttagagaagggaagatgagtgagtcgagctcgaagtccagccagcccttggcctccaagcaggaaaaggacggcactgagaagcggggccggggcaggccgcgcaagcagcctccgaaggagcccagcgaagtgccaacacctaagagacctcggggccgaccaaagggaagcaaaaacaagggtgctgccaagacccggaaaaccaccacaactccaggaaggaaaccaaggggcagacccaaaaaactggagaaggaggaagaggagggcatctcgcaggagtcctcggaggaggagcagtgacccatgcgtgccgcctgctcctcactggaggagcagcttccttctgggactggacagctttgctccgctcccaccgcccccgccccttccccaggcccaccatcaccaccgcctctggccgccacccccatcttccacctgtgccctcaccaccacactacacagcacaccagccgctgcagggctcccatgggctgagtggggagcagttttcccctggcctcagttcccagctccccccgcccacccacgcatacacacatgccctcctggacaaggctaacatcccacttagccgcaccctgcacctgctgcgtccccactcccttggtggtggggacattgctctctgggcttttggtttgggggcgccctctctgctccttcactgttccctctggcttcccatagtggggcctgggagggttcccctggccttaaaaggggcccaagccccatctcatcctggcacgccctactccactgccctggcagcagcaggtgtggccaatggaggggggtgctggcccccaggattcccccagccaaactgtctttgtcaccacgtggggctcacttttcatccttccccaacttccctagtccccgtactaggttggacagcccccttcggctacaggaaggcaggaggggtgagtcccctactccctcttcactgtggccacagcccccttgccctccgcctgggatctgagtacatattgtggtgatggagatgcagtcacttattgtccaggtgaggcccaagagccctgtggccgccacctgaggtgggctggggctgctcccctaaccctactttgcttccgccactcagccatttccccctcctcagatggggcaccaataacaaggagctcaccctgcccgctcccaacccccctcctgctcctccctgccccccaaggttctggttccatttttcctctgttcacaaactacctctggacagttgtgttgttttttgttcaatgttccattcttcgacatccgtcattgctgctgctaccagcgccaaatgttcatcctcattgcctcctgttctgcccacgatcccctcccccaagatactctttgtggggaagaggggctggggcatggcaggctgggtgaccgactaccccagtcccagggaaggtggggccctgcccctaggatgctgcagcagagtgagcaagggggcccgaatcgaccataaagggtgtaggggccacctcctccccctgttctgttggggaggggtagccatgatttgtcccagcctggggctccctctctggtttcctatttgcagttacttgaataaaaaaaatatccttttctgg

SEQ ID NO: 443458 - DNA, 1811 bp, Homo sapiens
tggcgcgggcgggcccgtcccccctgcccctgggtcgctctttttaagctcccctgagccggtgctgcgctcctctaattgggactccgagccggggctatttctggcgctggcgcggctccaagaaggccatcccagccatcactcttccacctgctccttagagaagggaagatgagtgagtcgagctcgaagtccagccagcccttggcctccaagcaggaaaaggacggcactgagaagcggggccggggcaggccgcgcaagcagcctccgaaggagcccagcgaagtgccaacacctaagagacctcggggccgaccaaagggaagcaaaaacaagggtgctgccaagacccggaaaaccaccacaactccaggaaggaaaccaaggggcagacccaaaaaactggagaaggaggaagaggagggcatctcgcaggagtcctcggaggaggagcagtgacccatgcgtgccgcctgctcctcactggaggagcagcttccttctgggactggacagctttgctccgctcccaccgcccccgccccttccccaggcccaccatcaccaccgcctctggccgccacccccatcttccacctgtgccctcaccaccacactacacagcacaccagccgctgcagggctcccatgggctgagtggggagcagttttcccctggcctcagttcccagctccccccgcccacccacgcatacacacatgccctcctggacaaggctaacatcccacttagccgcaccctgcacctgctgcgtccccactcccttggtggtggggacattgctctctgggcttttggtttgggggcgccctctctgctccttcactgttccctctggcttcccatagtggggcctgggagggttcccctggccttaaaaggggcccaagccccatctcatcctggcacgccctactccactgccctggcagcagcaggtgtggccaatggaggggggtgctggcccccaggattcccccagccaaactgtctttgtcaccacgtggggctcacttttcatccttccccaacttccctagtccccgtactaggttggacagcccccttcggctacaggaaggcaggaggggtgagtcccctactccctcttcactgtggccacagcccccttgccctccgcctgggatctgagtacatattgtggtgatggagatgcagtcacttattgtccaggtgaggcccaagagccctgtggccgccacctgaggtgggctggggctgctcccctaaccctactttgcttccgccactcagccatttccccctcctcagatggggcaccaataacaaggagctcaccctgcccgctcccaacccccctcctgctcctccctgccccccaaggttctggttccatttttcctctgttcacaaactacctctggacagttgtgttgttttttgttcaatgttccattcttcgacatccgtcattgctgctgctaccagcgccaaatgttcatcctcattgcctcctgttctgcccacgatcccctcccccaagatactctttgtggggaagaggggctggggcatggcaggctgggtgaccgactaccccagtcccagggaaggtggggccctgcccctaggatgctgcagcagagtgagcaagggggcccgaatcgaccataaagggtgtaggggccacctcctccccctgttctgttggggaggggtagccatgatttgtcccagcctggggctccctctctggtttcctatttgcagttacttgaataaaaaaaatatccttttctgg

SEQ ID NO: 443459 - DNA, 604 bp, Homo sapiens
tgttggaactagtccctttgactccccgtttctattttattttcttctggggctttattttgcggggaggggacggagggagggggctttcttcctctcccccgcgcccgcgcgcgccaggtttcctgccccaaggcgggcttgggtgccccctctggcaggaagtggggccgggtgcacccgcgtggcggtgcatgcggtcggggtgcgctgctttcccgcgcctgcaggagcggcctgcgcccctccccccgcgcgccctggccccgggtcccgccggccggcctgcaacggccgggcgcagacacttgcagagtcaccctcgggccgggtctggagcctgatgcctcgggggtttagccctagccgctaggcgggtaggcaaagtgtcgggttgaaagggtctccgggaacctacttcttcctgctcgccaacttgctgtgtgaccttaggcaactcaaggcttctctgggctacttttttacgggggacggggaagaaaacaagggaacccccaagataatttcctagggcctttcctgcagagtccttaagtatttgaggagcacagtttgcatgcacagtgtatggaggagacaggct

SEQ ID NO: 443460 - DNA, 1918 bp, Homo sapiens
  misc_feature (4)..(4): n is a, c, g, or t
  misc_feature (38)..(38): n is a, c, g, or t
taanataggctaggtacgaggctgggttaaattcggcngagggactccgagccggggctatttctggcgctggcgcggctccaagaaggcatccgcatttgctaccagcggcggccgcggcggagccaggccggtcctcagcgcccagcaccgccgctcccggcaacccggagcgcgcaccgcaggccggcggccgagctcgcgcatcccagccatcactcttccacctgctccttagagaagggaagatgagtgagtcgagctcgaagtccagccagcccttggcctccaagcaggaaaaggacggcactgagaagcggggccggggcaggccgcgcaagcagcctccggtgagtcccgggacagcgctggtagggagtcagaaggagcccagcgaagtgccaacacctaagagacctcggggccgaccaaagggaagcaaaaacaagggtgctgccaagacccggaaaaccaccacaactccaggaaggaaaccaaggggcagacccaaaaaactggagaaggaggaagaggagggcatctcgcaggagtcctcggaggaggagcagtgacccatgcgtgccgcctgctcctcactggaggagcagcttccttctgggactggacagctttgctccgctcccaccgcccccgccccttccccaggcccaccatcaccaccgcctctggccgccacccccatcttccacctgtgccctcaccaccacactacacagcacaccagccgctgcagggctcccatgggctgagtggggagcagttttcccctggcctcagttcccagctccccccgcccacccacgcatacacacatgccctcctggacaaggctaacatcccacttagccgcaccctgcacctgctgcgtccccactcccttggtggtggggacattgctctctgggcttttggtttgggggcgccctctctgctccttcactgttccctctggcttcccatagtggggcctgggagggttcccctggccttaaaaggggcccaagccccatctcatcctggcacgccctactccactgccctggcagcagcaggtgtggccaatggaggggggtgctggcccccaggattcccccagccaaactgtctttgtcaccacgtggggctcacttttcatccttccccaacttccctagtccccgtactaggttggacagcccccttcggctacaggaaggcaggaggggtgagtcccctactccctcttcactgtggccacagcccccttgccctccgcctgggatctgagtacatattgtggtgatggagatgcagtcacttattgtccaggtgaggcccaagagccctgtggccgccacctgaggtgggctggggctgctcccctaaccctactttgcttccgccactcagccatttccccctcctcagatggggcaccaataacaaggagctcaccctgcccgctcccaacccccctcctgctcctccctgccccccaaggttctggttccatttttcctctgttcacaaactacctctggacagttgtgttgttttttgttcaatgttccattcttcgacatccgtcattgctgctgctaccagcgccaaatgttcatcctcattgcctcctgttctgcccacgatcccctcccccaagatactctttgtggggaagaggggctggggcatggcaggctgggtgaccgactaccccagtcccagggaaggtggggccctgcccctaggatgctgcagcagagtgagcaagggggcccgaatcgaccataaagggtgtaggggccacctcctccccctgttctgttggggaggggtagccatgatttgtcccagcctggggctccctctctggtttcctatttgcagttacttgaataaaaaaaatatccttttctgg

SEQ ID NO: 443461 - DNA, 2024 bp, Homo sapiens
  misc_feature (4)..(4): n is a, c, g, or t
  misc_feature (38)..(38): n is a, c, g, or t
  misc_feature (1939)..(1941): n is a, c, g, or t
  misc_feature (1944)..(1944): n is a, c, g, or t
taanataggctaggtacgaggctgggttaaattcggcngagggactccgagccggggctatttctggcgctggcgcggctccaagaaggcatccgcatttgctaccagcggcggccgcggcggagccaggccggtcctcagcgcccagcaccgccgctcccggcaacccggagcgcgcaccgcaggccggcggccgagctcgcgcatcccagccatcactcttccacctgctccttagagaagggaagatgagtgagtcgagctcgaagtccagccagcccttggcctccaagcaggaaaaggacggcactgagaagcggggccggggcaggccgcgcaagcagcctccggtgagtcccgggacagcgctggtagggagtcagaaggagcccagcgaagtgccaacacctaagagacctcggggccgaccaaagggaagcaaaaacaagggtgctgccaagacccggaaaaccaccacaactccaggaaggaaaccaaggggcagacccaaaaaactggagaaggaggaagaggagggcatctcgcaggagtcctcggaggaggagcagtgacccatgcgtgccgcctgctcctcactggaggagcagcttccttctgggactggacagctttgctccgctcccaccgcccccgccccttccccaggcccaccatcaccaccgcctctggccgccacccccatcttccacctgtgccctcaccaccacactacacagcacaccagccgctgcagggctcccatgggctgagtggggagcagttttcccctggcctcagttcccagctccccccgcccacccacgcatacacacatgccctcctggacaaggctaacatcccacttagccgcaccctgcacctgctgcgtccccactcccttggtggtggggacattgctctctgggcttttggtttgggggcgccctctctgctccttcactgttccctctggcttcccatagtggggcctgggagggttcccctggccttaaaaggggcccaagccccatctcatcctggcacgccctactccactgccctggcagcagcaggtgtggccaatggaggggggtgctggcccccaggattcccccagccaaactgtctttgtcaccacgtggggctcacttttcatccttccccaacttccctagtccccgtactaggttggacagcccccttcggctacaggaaggcaggaggggtgagtcccctactccctcttcactgtggccacagcccccttgccctccgcctgggatctgagtacatattgtggtgatggagatgcagtcacttattgtccaggtgaggcccaagagccctgtggccgccacctgaggtgggctggggctgctcccctaaccctactttgcttccgccactcagccatttccccctcctcagatggggcaccaataacaaggagctcaccctgcccgctcccaacccccctcctgctcctccctgccccccaaggttctggttccatttttcctctgttcacaaactacctctggacagttgtgttgttttttgttcaatgttccattcttcgacatccgtcattgctgctgctaccagcgccaaatgttcatcctcattgcctcctgttctgcccacgatcccctcccccaagatactctttgtggggaagaggggctggggcatggcaggctgggtgaccgactaccccagtcccagggaaggtggggccctgcccctaggatgctgcagcagagtgagcaagggggcccgaatcgaccataaagggtgtaggggccacctcctccccctgttctgttggggaggggtagccatgatttgtcccagcctggggctccctctctggtttcctatttgcagttacttgaataaaaaaaatatccttttctggcaacaaaaaaaaaatcgggannnatntgggggggaacaggtttgatggcaggcattgtgtccgacacttttgtcaagggaatgcggcccaggagagaaaaaacggc

SEQ ID NO: 443462 - DNA, 2135 bp, Homo sapiens
  misc_feature (4)..(4): n is a, c, g, or t
  misc_feature (38)..(38): n is a, c, g, or t
taanataggctaggtacgaggctgggttaaattcggcngagggactccgagccggggctatttctggcgctggcgcggctccaagaaggcatccgcatttgctaccagcggcggccgcggcggagccaggccggtcctcagcgcccagcaccgccgctcccggcaacccggagcgcgcaccgcaggccggcggccgagctcgcgcatcccagccatcactcttccacctgctccttagagaagggaagatgagtgagtcgagctcgaagtccagccagcccttggcctccaagcaggaaaaggacggcactgagaagcggggccggggcaggccgcgcaagcagcctccggtgagtcccgggacagcgctggtagggagtcagaaggagcccagcgaagtgccaacacctaagagacctcggggccgaccaaagggaagcaaaaacaagggtgctgccaagacccggaaaaccaccacaactccaggaaggaaaccaaggggcagacccaaaaaactggagaaggaggaagaggagggcatctcgcaggagtcctcggaggaggagcagtgacccatgcgtgccgcctgctcctcactggaggagcagcttccttctgggactggacagctttgctccgctcccaccgcccccgccccttccccaggcccaccatcaccaccgcctctggccgccacccccatcttccacctgtgccctcaccaccacactacacagcacaccagccgctgcagggctcccatgggctgagtggggagcagttttcccctggcctcagttcccagctccccccgcccacccacgcatacacacatgccctcctggacaaggctaacatcccacttagccgcaccctgcacctgctgcgtccccactcccttggtggtggggacattgctctctgggcttttggtttgggggcgccctctctgctccttcactgttccctctggcttcccatagtggggcctgggagggttcccctggccttaaaaggggcccaagccccatctcatcctggcacgccctactccactgccctggcagcagcaggtgtggccaatggaggggggtgctggcccccaggattcccccagccaaactgtctttgtcaccacgtggggctcacttttcatccttccccaacttccctagtccccgtactaggttggacagcccccttcggctacaggaaggcaggaggggtgagtcccctactccctcttcactgtggccacagcccccttgccctccgcctgggatctgagtacatattgtggtgatggagatgcagtcacttattgtccaggtgaggcccaagagccctgtggccgccacctgaggtgggctggggctgctcccctaaccctactttgcttccgccactcagccatttccccctcctcagatggggcaccaataacaaggagctcaccctgcccgctcccaacccccctcctgctcctccctgccccccaaggttctggttccatttttcctctgttcacaaactacctctggacagttgtgttgttttttgttcaatgttccattcttcgacatccgtcattgctgctgctaccagcgccaaatgttcatcctcattgcctcctgttctgcccacgatcccctcccccaagatactctttgtggggaagaggggctggggcatggcaggctgggtgaccgactaccccagtcccagggaaggtggggccctgcccctaggatgctgcagcagagtgagcaagggggcccgaatcgaccataaagggtgtaggggccacctcctccccctgttctgttggggaggggtagccatgatttgtcccagcctggggctccctctctggtttcctatttgcagttacttgaataaaaaaaatatccttttctggaaaaaaaaaagatgagcgatcaaacacacacagccacattttgttgggcgcactctcgcggacccctgagaaaaaagctttgtaaacaaccaatccgggtttggagcgcgcggggggccccattggggtgttgaggagacacgtgggccaaaacggtgttcctagggaaaaaacgcggggccaaacaaaggctgcgggaatctccccagcattaaag

SEQ ID NO: 443463 - DNA, 2244 bp, Homo sapiens
  misc_feature (4)..(4): n is a, c, g, or t
  misc_feature (38)..(38): n is a, c, g, or t
  misc_feature (1977)..(1977): n is a, c, g, or t
  misc_feature (1983)..(1983): n is a, c, g, or t
taanataggctaggtacgaggctgggttaaattcggcngagggactccgagccggggctatttctggcgctggcgcggctccaagaaggcatccgcatttgctaccagcggcggccgcggcggagccaggccggtcctcagcgcccagcaccgccgctcccggcaacccggagcgcgcaccgcaggccggcggccgagctcgcgcatcccagccatcactcttccacctgctccttagagaagggaagatgagtgagtcgagctcgaagtccagccagcccttggcctccaagcaggaaaaggacggcactgagaagcggggccggggcaggccgcgcaagcagcctccggtgagtcccgggacagcgctggtagggagtcagaaggagcccagcgaagtgccaacacctaagagacctcggggccgaccaaagggaagcaaaaacaagggtgctgccaagacccggaaaaccaccacaactccaggaaggaaaccaaggggcagacccaaaaaactggagaaggaggaagaggagggcatctcgcaggagtcctcggaggaggagcagtgacccatgcgtgccgcctgctcctcactggaggagcagcttccttctgggactggacagctttgctccgctcccaccgcccccgccccttccccaggcccaccatcaccaccgcctctggccgccacccccatcttccacctgtgccctcaccaccacactacacagcacaccagccgctgcagggctcccatgggctgagtggggagcagttttcccctggcctcagttcccagctccccccgcccacccacgcatacacacatgccctcctggacaaggctaacatcccacttagccgcaccctgcacctgctgcgtccccactcccttggtggtggggacattgctctctgggcttttggtttgggggcgccctctctgctccttcactgttccctctggcttcccatagtggggcctgggagggttcccctggccttaaaaggggcccaagccccatctcatcctggcacgccctactccactgccctggcagcagcaggtgtggccaatggaggggggtgctggcccccaggattcccccagccaaactgtctttgtcaccacgtggggctcacttttcatccttccccaacttccctagtccccgtactaggttggacagcccccttcggctacaggaaggcaggaggggtgagtcccctactccctcttcactgtggccacagcccccttgccctccgcctgggatctgagtacatattgtggtgatggagatgcagtcacttattgtccaggtgaggcccaagagccctgtggccgccacctgaggtgggctggggctgctcccctaaccctactttgcttccgccactcagccatttccccctcctcagatggggcaccaataacaaggagctcaccctgcccgctcccaacccccctcctgctcctccctgccccccaaggttctggttccatttttcctctgttcacaaactacctctggacagttgtgttgttttttgttcaatgttccattcttcgacatccgtcattgctgctgctaccagcgccaaatgttcatcctcattgcctcctgttctgcccacgatcccctcccccaagatactctttgtggggaagaggggctggggcatggcaggctgggtgaccgactaccccagtcccagggaaggtggggccctgcccctaggatgctgcagcagagtgagcaagggggcccgaatcgaccataaagggtgtaggggccacctcctccccctgttctgttggggaggggtagccatgatttgtcccagcctggggctccctctctggtttcctatttgcagttacttgaataaaaaaaatatccttttctggaaaaaaaaaaaaaaaaaaaaaaaaaaaaaaaaaaaaaaaaaaaaaaaaaaaaaaaaaanaaaaanaaaaaaaaaaaaagaaaaaaaaaaaaaaaaacaaaaaaaaaaaaaaaaacccgggggccttcatattgtcgggcgggggggaacaagaaggctaatctggaaacgggcacccggggccccaacacgccggtggttccgtggaaccccattttttttggtcaccagggggggacaaactcggcgggcccccccaaaaagagagggcggcaaaaattgcaaaaccccgggttaacccggttttagagctgcgcgaaaaacaca

SEQ ID NO: 443464 - DNA, 1885 bp, Homo sapiens
  misc_feature (4)..(4): n is a, c, g, or t
  misc_feature (38)..(38): n is a, c, g, or t
taanataggctaggtacgaggctgggttaaattcggcngagggactccgagccggggctatttctggcgctggcgcggctccaagaaggcatccgcatttgctaccagcggcggccgcggcggagccaggccggtcctcagcgcccagcaccgccgctcccggcaacccggagcgcgcaccgcaggccggcggccgagctcgcgcatcccagccatcactcttccacctgctccttagagaagggaagatgagtgagtcgagctcgaagtccagccagcccttggcctccaagcaggaaaaggacggcactgagaagcggggccggggcaggccgcgcaagcagcctccgaaggagcccagcgaagtgccaacacctaagagacctcggggccgaccaaagggaagcaaaaacaagggtgctgccaagacccggaaaaccaccacaactccaggaaggaaaccaaggggcagacccaaaaaactggagaaggaggaagaggagggcatctcgcaggagtcctcggaggaggagcagtgacccatgcgtgccgcctgctcctcactggaggagcagcttccttctgggactggacagctttgctccgctcccaccgcccccgccccttccccaggcccaccatcaccaccgcctctggccgccacccccatcttccacctgtgccctcaccaccacactacacagcacaccagccgctgcagggctcccatgggctgagtggggagcagttttcccctggcctcagttcccagctccccccgcccacccacgcatacacacatgccctcctggacaaggctaacatcccacttagccgcaccctgcacctgctgcgtccccactcccttggtggtggggacattgctctctgggcttttggtttgggggcgccctctctgctccttcactgttccctctggcttcccatagtggggcctgggagggttcccctggccttaaaaggggcccaagccccatctcatcctggcacgccctactccactgccctggcagcagcaggtgtggccaatggaggggggtgctggcccccaggattcccccagccaaactgtctttgtcaccacgtggggctcacttttcatccttccccaacttccctagtccccgtactaggttggacagcccccttcggctacaggaaggcaggaggggtgagtcccctactccctcttcactgtggccacagcccccttgccctccgcctgggatctgagtacatattgtggtgatggagatgcagtcacttattgtccaggtgaggcccaagagccctgtggccgccacctgaggtgggctggggctgctcccctaaccctactttgcttccgccactcagccatttccccctcctcagatggggcaccaataacaaggagctcaccctgcccgctcccaacccccctcctgctcctccctgccccccaaggttctggttccatttttcctctgttcacaaactacctctggacagttgtgttgttttttgttcaatgttccattcttcgacatccgtcattgctgctgctaccagcgccaaatgttcatcctcattgcctcctgttctgcccacgatcccctcccccaagatactctttgtggggaagaggggctggggcatggcaggctgggtgaccgactaccccagtcccagggaaggtggggccctgcccctaggatgctgcagcagagtgagcaagggggcccgaatcgaccataaagggtgtaggggccacctcctccccctgttctgttggggaggggtagccatgatttgtcccagcctggggctccctctctggtttcctatttgcagttacttgaataaaaaaaatatccttttctgg

SEQ ID NO: 443465 - DNA, 1579 bp, Homo sapiens
  misc_feature (4)..(4): n is a, c, g, or t
  misc_feature (38)..(38): n is a, c, g, or t
taanataggctaggtacgaggctgggttaaattcggcngagggactccgagccggggctatttctggcgctggcgcggctccaagaaggcatccgcatttgctaccagcggcggccgcggcggagccaggccggtcctcagcgcccagcaccgccgctcccggcaacccggagcgcgcaccgcaggccggcggccgagctcgcgcatcccagccatcactcttccacctgctccttagagaagggaagatgagtgagtcgagctcgaagtccagccagcccttggcctccaagcaggaaaaggacggcactgagaagcggggccggggcaggccgcgcaagcagcctccggtgagtcccgggacagcgctggtagggagtcagaaggagcccagcgaagtgccaacacctaagagacctcggggccgaccaaagggaagcaaaaacaagggtgctgccaagacccggaaaaccaccacaactccaggaaggaaaccaaggggcagacccaaaaaactggagaaggaggaagaggagggcatctcgcaggagtcctcggaggaggagcagtgacccatgcgtgccgcctgctcctcactggaggagcagcttccttctgggactggacagctttgctccgctcccaccgcccccgccccttccccaggcccaccatcaccaccgcctctggccgccacccccatcttccacctgtgccctcaccaccaccagcaggtgtggccaatggaggggggtgctggcccccaggattcccccagccaaactgtctttgtcaccacgtggggctcacttttcatccttccccaacttccctagtccccgtactaggttggacagcccccttcggctacaggaaggcaggaggggtgagtcccctactccctcttcactgtggccacagcccccttgccctccgcctgggatctgagtacatattgtggtgatggagatgcagtcacttattgtccaggtgaggcccaagagccctgtggccgccacctgaggtgggctggggctgctcccctaaccctactttgcttccgccactcagccatttccccctcctcagatggggcaccaataacaaggagctcaccctgcccgctcccaacccccctcctgctcctccctgccccccaaggttctggttccatttttcctctgttcacaaactacctctggacagttgtgttgttttttgttcaatgttccattcttcgacatccgtcattgctgctgctaccagcgccaaatgttcatcctcattgcctcctgttctgcccacgatcccctcccccaagatactctttgtggggaagaggggctggggcatggcaggctgggtgaccgactaccccagtcccagggaaggtggggccctgcccctaggatgctgcagcagagtgagcaagggggcccgaatcgaccataaagggtgtaggggccacctcctccccctgttctgttggggaggggtagccatgatttgtcccagcctggggctccctctctggtttcctatttgcagttacttgaataaaaaaaatatccttttctgg

SEQ ID NO: 443466 - DNA, 2127 bp, Homo sapiens
  misc_feature (4)..(4): n is a, c, g, or t
  misc_feature (38)..(38): n is a, c, g, or t
taanataggctaggtacgaggctgggttaaattcggcngagggactccgagccggggctatttctggcgctggcgcggctccaagaaggcgtgagttcgcggccgctccggtggcttcttttttttatatctataatttaattaaattatttatttattgaggccgcgcacgggccgtgcccagcttcctgcccctcgccatccttcgggggagggggaatatttttgtccccccgcctggctgtgacacataaataccccgcgggggcctgggcggcgagcacgcggcggcggcggtctctgagcgcctctgctctctctcccggtttcagatccgcatttgctaccagcggcggccgcggcggagccaggccggtcctcagcgcccagcaccgccgctcccggcaacccggagcgcgcaccgcaggccggcggccgagctcgcgcatcccagccatcactcttccacctgctccttagagaagggaagatgagtgagtcgagctcgaagtccagccagcccttggcctccaagcaggaaaaggacggcactgagaagcggggccggggcaggccgcgcaagcagcctccgaaggagcccagcgaagtgccaacacctaagagacctcggggccgaccaaagggaagcaaaaacaagggtgctgccaagacccggaaaaccaccacaactccaggaaggaaaccaaggggcagacccaaaaaactggagaaggaggaagaggagggcatctcgcaggagtcctcggaggaggagcagtgacccatgcgtgccgcctgctcctcactggaggagcagcttccttctgggactggacagctttgctccgctcccaccgcccccgccccttccccaggcccaccatcaccaccgcctctggccgccacccccatcttccacctgtgccctcaccaccacactacacagcacaccagccgctgcagggctcccatgggctgagtggggagcagttttcccctggcctcagttcccagctccccccgcccacccacgcatacacacatgccctcctggacaaggctaacatcccacttagccgcaccctgcacctgctgcgtccccactcccttggtggtggggacattgctctctgggcttttggtttgggggcgccctctctgctccttcactgttccctctggcttcccatagtggggcctgggagggttcccctggccttaaaaggggcccaagccccatctcatcctggcacgccctactccactgccctggcagcagcaggtgtggccaatggaggggggtgctggcccccaggattcccccagccaaactgtctttgtcaccacgtggggctcacttttcatccttccccaacttccctagtccccgtactaggttggacagcccccttcggctacaggaaggcaggaggggtgagtcccctactccctcttcactgtggccacagcccccttgccctccgcctgggatctgagtacatattgtggtgatggagatgcagtcacttattgtccaggtgaggcccaagagccctgtggccgccacctgaggtgggctggggctgctcccctaaccctactttgcttccgccactcagccatttccccctcctcagatggggcaccaataacaaggagctcaccctgcccgctcccaacccccctcctgctcctccctgccccccaaggttctggttccatttttcctctgttcacaaactacctctggacagttgtgttgttttttgttcaatgttccattcttcgacatccgtcattgctgctgctaccagcgccaaatgttcatcctcattgcctcctgttctgcccacgatcccctcccccaagatactctttgtggggaagaggggctggggcatggcaggctgggtgaccgactaccccagtcccagggaaggtggggccctgcccctaggatgctgcagcagagtgagcaagggggcccgaatcgaccataaagggtgtaggggccacctcctccccctgttctgttggggaggggtagccatgatttgtcccagcctggggctccctctctggtttcctatttgcagttacttgaataaaaaaaatatccttttctgg

SEQ ID NO: 443467 - DNA, 1926 bp, Homo sapiens
  misc_feature (4)..(4): n is a, c, g, or t
  misc_feature (38)..(38): n is a, c, g, or t
taanataggctaggtacgaggctgggttaaattcggcngagggactccgagccggggctatttctggcgctggcgcggctccaagaaggcatccgcatttgctaccagcggcggccgcggcggagccaggccggtcctcagcgcccagcaccgccgctcccggcaacccggagcgcgcaccgcaggccggcggccgagctcgcgcatcccagccatcactcttccacctgctccttagagaagggaagatgagtgagtcgagctcgaagtccagccagcccttggcctccaagcaggaaaaggacggcactgagaagcggggccggggcaggccgcgcaagcagcctccggtgagtcccgggacagcgctggtagggagtcagaaggagcccagcgaagtgccaacacctaagagacctcggggccgaccaaagggaagcaaaaacaagggtgctgccaagacccggaaaaccaccacaactccaggaaggaaaccaaggggcagacccaaaaaactggagaaggaggaagaggagggcatctcgcaggagtcctcggaggaggagcagtgacccatgcgtgccgcctgctcctcactggaggagcagcttccttctgggactggacagctttgctccgctcccaccgcccccggccccgacaaaaaaaacaggaaaaaaaataaaacaacgaaaaatggaagagaacaaaaaaaataaaatagggcactaaccagcaaaaaacacaaaaagagaagacgctgcacgacacccatgggatgaatgcgaagacaaaaaccaagggaaccagaacaaaaaacacaaagaacaaacaaaaaacacaaagaacgcagcagaagaaaacaaacagagagaaaaaacgaaagaacaaccaaaaacagaagacagaaaaaaaaaaaaaaaaagaaaaaaaatatattgcggaggtagcgaggctggtgtgcttcactgttccctctggcttcccatagtggggcctgggagggttcccctggccttaaaaggggcccaagccccatctcatcctggcacgccctactccactgccctggcagcagcaggtgtggccaatggaggggggtgctggcccccaggattcccccagccaaactgtctttgtcaccacgtggggctcacttttcatccttccccaacttccctagtccccgtactaggttggacagcccccttcggctacaggaaggcaggaggggtgagtcccctactccctcttcactgtggccacagcccccttgccctccgcctgggatctgagtacatattgtggtgatggagatgcagtcacttattgtccaggtgaggcccaagagccctgtggccgccacctgaggtgggctggggctgctcccctaaccctactttgcttccgccactcagccatttccccctcctcagatggggcaccaataacaaggagctcaccctgcccgctcccaacccccctcctgctcctccctgccccccaaggttctggttccatttttcctctgttcacaaactacctctggacagttgtgttgttttttgttcaatgttccattcttcgacatccgtcattgctgctgctaccagcgccaaatgttcatcctcattgcctcctgttctgcccacgatcccctcccccaagatactctttgtggggaagaggggctggggcatggcaggctgggtgaccgactaccccagtcccagggaaggtggggccctgcccctaggatgctgcagcagagtgagcaagggggcccgaatcgaccataaagggtgtaggggccacctcctccccctgttctgttggggaggggtagccatgatttgtcccagcctggggctccctctctggtttcctatttgcagttacttgaataaaaaaaatatccttttctgg

SEQ ID NO: 443468 - DNA, 1992 bp, Homo sapiens
  misc_feature (4)..(4): n is a, c, g, or t
  misc_feature (38)..(38): n is a, c, g, or t
  misc_feature (1725)..(1725): n is a, c, g, or t
  misc_feature (1731)..(1731): n is a, c, g, or t
taanataggctaggtacgaggctgggttaaattcggcngagggactccgagccggggctatttctggcgctggcgcggctccaagaaggcatccgcatttgctaccagcggcggccgcggcggagccaggccggtcctcagcgcccagcaccgccgctcccggcaacccggagcgcgcaccgcaggccggcggccgagctcgcgcatcccagccatcactcttccacctgctccttagagaagggaagatgagtgagtcgagctcgaagtccagccagcccttggcctccaagcaggaaaaggacggcactgagaagcggggccggggcaggccgcgcaagcagcctccggtgagtcccgggacagcgctggtagggagtcagaaggagcccagcgaagtgccaacacctaagagacctcggggccgaccaaagggaagcaaaaacaagggtgctgccaagacccggaaaaccaccacaactccaggaaggaaaccaaggggcagacccaaaaaactggagaaggaggaagaggagggcatctcgcaggagtcctcggaggaggagcagtgacccatgcgtgccgcctgctcctcactggaggagcagcttccttctgggactggacagctttgctccgctcccaccgcccccgccccttccccaggcccaccatcaccaccgcctctggccgccacccccatcttccacctgtgccctcaccaccacactacacagcacaccagccgctgcagggctcccatgggctgagtggggagcagttttcccctggcctcagttcccagctccccccgcccacccacgcatacacacatgccctcctggacaaggctaacatcccacttagccgcaccctgcacctgctgcgtccccactcccttggtggtggggacattgctctctgggcttttggtttgggggcgccctctctgctccttcactgttccctctggcttcccatagtggggcctgggagggttcccctggccttaaaaggggcccaagccccatctcatcctggcacgccctactccactgccctggcagcagcaggtgtggccaatggaggggggtgctggcccccaggattcccccagccaaactgtctttgtcaccacgtggggctcacttttcatccttccccaacttccctagtccccgtactaggttggacagcccccttcggctacaggaaggcaggaggggtgagtcccctactccctcttcactgtggccacagcccccttgccctccgcctgggatctgagtacatattgtggtgatggagatgcagtcacttattgtccaggtgaggcccaagagccctgtggccgccacctgaggtgggctggggctgctcccctaaccctactttgcttccgccactcagccatttccccctcctcagatggggcaccaataacaaggagctcaccctgcccgctcccaacccccctcctgctcctccctgccccccaaggttcagcagagtgagcaagggggcccgaatcgaccataaagggtgtaggggccacctcctccccctgttctgttggggaggggtagccatgatttgtcccagcctggggctccctctctggtttcctatttgcagttacttgaataaaaaaaatatccttttctggaaaaaaaaaaaaaaaaaaaaaaaaaaaaaaaaaaaaaaaaaaaaaaaaaaaaaaaaaanaaaaanaaaaaaaaaaaaagaaaaaaaaaaaaaaaaacaaaaaaaaaaaaaaaaacccgggggccttcatattgtcgggcgggggggaacaagaaggctaatctggaaacgggcacccggggccccaacacgccggtggttccgtggaaccccattttttttggtcaccagggggggacaaactcggcgggcccccccaaaaagagagggcggcaaaaattgcaaaaccccgggttaacccggttttagagctgcgcgaaaaacaca

SEQ ID NO: 443469 - DNA, 2155 bp, Homo sapiens
  misc_feature (4)..(4): n is a, c, g, or t
  misc_feature (38)..(38): n is a, c, g, or t
  misc_feature (1945)..(1945): n is a, c, g, or t
taanataggctaggtacgaggctgggttaaattcggcngagggactccgagccggggctatttctggcgctggcgcggctccaagaaggcatccgcatttgctaccagcggcggccgcggcggagccaggccggtcctcagcgcccagcaccgccgctcccggcaacccggagcgcgcaccgcaggccggcggccgagctcgcgcatcccagccatcactcttccacctgctccttagagaagggaagatgagtgagtcgagctcgaagtccagccagcccttggcctccaagcaggaaaaggacggcactgagaagcggggccggggcaggccgcgcaagcagcctccggtgagtcccgggacagcgctggtagggagtcagaaggagcccagcgaagtgccaacacctaagagacctcggggccgaccaaagggaagcaaaaacaagggtgctgccaagacccggaaaaccaccacaactccaggaaggaaaccaaggggcagacccaaaaaactggagaaggaggaagaggagggcatctcgcaggagtcctcggaggaggagcagtgacccatgcgtgccgcctgctcctcactggaggagcagcttccttctgggactggacagctttgctccgctcccaccgcccccgccccttccccaggcccaccatcaccaccgcctctggccgccacccccatcttccacctgtgccctcaccaccacactacacagcacaccagccgctgcagggctcccatgggctgagtggggagcagttttcccctggcctcagttcccagctccccccgcccacccacgcatacacacatgccctcctggacaaggctaacatcccacttagccgcaccctgcacctgctgcgtccccactcccttggtggtggggacattgctctctgggcttttggtttgggggcgccctctctgctccttcactgttccctctggcttcccatagtggggcctgggagggttcccctggccttaaaaggggcccaagccccatctcatcctggcacgccctactccactgccctggcagcagcaggtgtggccaatggaggggggtgctggcccccaggattcccccagccaaactgtctttgtcaccacgtggggctcacttttcatccttccccaacttccctagtccccgtactaggttggacagcccccttcggctacaggaaggcaggaggggtgagtcccctactccctcttcactgtggccacagcccccttgccctccgcctgggatctgagtacatattgtggtgatggagatgcagtcacttattgtccaggtgaggcccaagagccctgtggccgccacctgaggtgggctggggctgctcccctaaccctactttgcttccctggttccatttttcctctgttcacaaactacctctggacagttgtgttgttttttgttcaatgttccattcttcgacatccgtcattgctgctgctaccagcgccaaatgttcatcctcattgcctcctgttctgcccacgatcccctcccccaagatactctttgtggggaagaggggctggggcatggcaggctgggtgaccgactaccccagtcccagggaaggtggggccctgcccctaggatgctgcagcagagtgagcaagggggcccgaatcgaccataaagggtgtaggggccacctcctccccctgttctgttggggaggggtagccatgatttgtcccagcctggggctccctctctggtttcctatttgcagttacttgaataaaaaaaatatccttttctggaaaaaaaaagaaaactacggacaaaaaaaagaaatcgtcgggggcttttttttgcggggggggggagaaaagggttactagaaagggcactggctaatggtgttccctggaccgctttcctggtccaanggtgaaatctcgagggcccccatagaagacggaaaattgcagaagcagggtccgtgataatctcgaaaacaacagaaccaacagacgcaaagcgcgagcacaatcttgctcaacacggtgcacaacactcaacccatagaaaatacataagacaaaagaaagaagtgagaagaaaatacagacagactagacacgtaagcagcgaaaaat

SEQ ID NO: 443470 - DNA, 1878 bp, Homo sapiens
  misc_feature (4)..(4): n is a, c, g, or t
  misc_feature (38)..(38): n is a, c, g, or t
taanataggctaggtacgaggctgggttaaattcggcngagggactccgagccggggctatttctggcgctggcgcggctccaagaaggcatccgcatttgctaccagcggcggccgcggcggagccaggccggtcctcagcgcccagcaccgccgctcccggcaacccggagcgcgcaccgcaggccggcggccgagctcgcgcatcccagccatcactcttccacctgctccttagagaagggaagatgagtgagtcgagctcgaagtccagccagcccttggcctccaagcaggaaaaggacggcactgagaagcggggccggggcaggccgcgcaagcagcctccggtgagtcccgggacagcgctggtagggagtcagaaggagcccagcgaagtgccaacacctaagagacctcggggccgaccaaagggaagcaaaaacaagggtgctgccaagacccggaaaaccaccacaactccaggaaggaaaccaaggggcagacccaaaaaactggagaaggaggaagaggagggcatctcgcaggagtcctcggaggaggagcacttccttctgggactggacagctttgctccgctcccaccgcccccgccccttccccaggcccaccatcaccaccgcctctggccgccacccccatcttccacctgtgccctcaccaccacactacacagcacaccagccgctgcagggctcccatgggctgagtggggagcagttttcccctggcctcagttcccagctccccccgcccacccacgcatacacacatgccctcctggacaaggctaacatcccacttagccgcaccctgcacctgctgcgtccccactcccttggtggtggggacattgctctctgggcttttggtttgggggcgccctctctgctccttcactgttccctctggcttcccatagtggggcctgggagggttcccctggccttaaaaggggcccaagccccatctcatcctggcacgccctactccactgccctggcagcagcaggtgtggccaatggaggggggtgctggcccccaggattcccccagccaaactgtctttgtcaccacgtggggctcacttttcatccttccccaacttccctagtccccgtactaggttggacagcccccttcggctacaggaaggcaggaggggtgagtcccctactccctcttcactgtggccacagcccccttgccctccgcctgggatctgagtacatattgtggtgatggagatgcagtcacttattgtccaggtgaggcccaagagccctgtggccgccacctgaggtgggctggggctgctcccctaaccctactttgcttccgccactcagccatttccccctcctcagatggggcaccaataacaaggagctcaccctgcccgctcccaacccccctcctgctcctccctgccccccaaggttctggttccatttttcctctgttcacaaactacctctggacagttgtgttgttttttgttcaatgttccattcttcgacatccgtcattgctgctgctaccagcgccaaatgttcatcctcattgcctcctgttctgcccacgatcccctcccccaagatactctttgtggggaagaggggctggggcatggcaggctgggtgaccgactaccccagtcccagggaaggtggggccctgcccctaggatgctgcagcagagtgagcaagggggcccgaatcgaccataaagggtgtaggggccacctcctccccctgttctgttggggaggggtagccatgatttgtcccagcctggggctccctctctggtttcctatttgcagttacttgaataaaaaaaatatccttttctgg

SEQ ID NO: 443471 - DNA, 1065 bp, Homo sapiens
  misc_feature (4)..(4): n is a, c, g, or t
  misc_feature (38)..(38): n is a, c, g, or t
taanataggctaggtacgaggctgggttaaattcggcngagggactccgagccggggctatttctggcgctggcgcggctccaagaaggcgtgagttcgcggccgctccggtggcttcttttttttatatctataatttaattaaattatttatttattgaggccgcgcacgggccgtgcccagcttcctgcccctcgccatccttcgggggagggggaatatttttgtccccccgcctggctgtgacacataaataccccgcgggggcctgggcggcgagcacgcggcggcggcggtctctgagcgcctctgctctctctcccggtttcagatccgcatttgctaccagcggcggccgcggcggagccaggccggtcctcagcgcccagcaccgccgctcccggcaacccggagcgcgcaccgcaggccggcggccgagctcgcgcatcccagccatcactcttccacctgctccttagagaagggaagatgagtgagtcgagctcgaagtccagccagcccttggcctccaagcaggaaaaggacggcactgagaagcggggccggggcaggccgcgcaagcagcctccgaaggagcccagcgaagtgccaacacctaagagacctcggggccgaccaaagggaagcaaaaacaagggtgctgccaagacccggaaaaccaccacaactccaggaaggaaaccaaggggcagacccaaaaaactggagaaggaggaagaggagggcatctcgcaggagtcctcggaggaggagcagtgacccatgcgtgccgcctgctcctcactggaggagcagcttccttctgggactggacagctttgctccgctcccaccgcccccaggggctggggctatctgtcaggacagatgactctgaacggctgcaagacggtgcctctccttctcctatggagcctcgtcgggggcacggacagcggacgggtccaaacttgcgtgctgtccctcgaggcttggcactgatatctccagggctgggttgatcaagcagacagggggaaggaatggtactgaggacagtgagg

SEQ ID NO: 443472 - DNA, 536 bp, Homo sapiens
gtcagggaactgctcgctgagcacagctgcacagtgctgtcagaacggccgatctccagcccaagatgattccagcagtggtcttgctcttactccttttggttgaacaagcagatccaagtgcgaaaggcagctataaccagctatgagaaatcagatggtgtttacacgggcctgagcaccaggaaccaggagacttacgagactctgaagcatgagaaaccaccacagtagctttagaatagatgcggtcatattcttctttggcttctggttcttccagccctcatggttggcatcacatatgcctgcatgccattaacaccagctggccctacccctataatgatcctgtgtcctaaattaatatacaccagtggttcctcctccctgttaaagactaatgctcagatgctgtttacggatatttatattctagtctcactctcttgtcccacccttcttctcttccccattcccaactccagctaaaatatgggaagggagaacccccaataaaactgccatggactgga

SEQ ID NO: 443473 - DNA, 457 bp, Homo sapiens
ggaaggccggtggggggaggggggtcctgtggaggtgggaggggcctctgatggactccagctcctgatcgccctttgactcccatctccagggcctgagcaccaggaaccaggagacttacgagactctgaagcatgagaaaccaccacagtagctttagaatagatgcggtcatattcttctttggcttctggttcttccagccctcatggttggcatcacatatgcctgcatgccattaacaccagctggccctacccctataatgatcctgtgtcctaaattaatatacaccagtggttcctcctccctgttaaagactaatgctcagatgctgtttacggatatttatattctagtctcactctcttgtcccacccttcttctcttccccattcccaactccagctaaaatatgggaagggagaacccccaataaaactgccatggactgga

SEQ ID NO: 443474 - DNA, 570 bp, Homo sapiens
gtcagggaactgctcgctgagcacagctgcacagtgctgtcagaacggccgatctccagcccaagatgattccagcagtggtcttgctcttactccttttggttgaacaagcagcggccctgggagagcctcagctctgctatatcctggatgccatcctgtttctgtatggaattgtcctcaccctcctctactgtcgactgaagatccaagtgcgaaaggcagctataaccagctatgagaaatcagatggtgtttacacgatggagtctccctctatcaccaggctggagtgcagtggcatgatctgggctcactgcaacctctgcctcctgggttcaagagattctcgtgcttcaccctcccgagtagctaagactacaggcaccaccatgcccagctaattttttttgtatttttagtagagacagggtttcactatgttggtcttgatctcttgacctcgtgatctgctcgcctcagcctcctaaagtgctgggattacaggtgtgagccaccgagcctgacctggaagtaactcttttaaagataaagtgggaataaactttt

SEQ ID NO: 443475 - DNA, 628 bp, Homo sapiens
gtcagggaactgctcgctgagcacagctgcacagtgctgtcagaacggccgatctccagcccaagatgattccagcagtggtcttgctcttactccttttggttgaacaagcagcggccctgggagagcctcagctctgctatatcctggatgccatcctgtttctgtatggaattgtcctcaccctcctctactgtcgactgaagatccaagtgcgaaaggcagctataaccagctatgagaaatcagatggtgtttacacgggcctgagcaccaggaaccaggagacttacgagactctgaagcatgagaaaccaccacagtagctttagaatagatgcggtcatattcttctttggcttctggttcttccagccctcatggttggcatcacatatgcctgcatgccattaacaccagctggccctacccctataatgatcctgtgtcctaaattaatatacaccagtggttcctcctccctgttaaagactaatgctcagatgctgtttacggatatttatattctagtctcactctcttgtcccacccttcttctcttccccattcccaactccagctaaaatatgggaagggagaacccccaataaaactgccatggactgga

SEQ ID NO: 443476 - DNA, 494 bp, Homo sapiens
ctccctctcggtctctgggtgcggcctgttccgtatgcagtatgtcctcgccctcctctagtgttctctggagtccacctgcgagcgtccgctcttgccaccggtcgtcgttcagatggggtgtgactgggcctgagcaccaggaaccaggagacttacgagactctgaagcatgagaaaccaccacagtagctttagaatagatgcggtcatattcttctttggcttctggttcttccagccctcatggttggcatcacatatgcctgcatgccattaacaccagctggccctacccctataatgatcctgtgtcctaaattaatatacaccagtggttcctcctccctgttaaagactaatgctcagatgctgtttacggatatttatattctagtctcactctcttgtcccacccttcttctcttccccattcccaactccagctaaaatatgggaagggagaacccccaataaaactgccatggactgga

SEQ ID NO: 443477 - DNA, 543 bp, Homo sapiens
gtcagggaactgctcgctgagcacagctgcacagtgctgtcagaacggccgatctccagcccaagatgattccagcagtggtcttgctcttactccttttggttgaacaagcagcggccctgggagagcctcagctctgctatatcctggatgccatcctgtttctgtatggaattgtcctcaccctcctctactgtcgactgaagatccaagtgcgaaaggcagctataaccagctatgagaaatcagatggtgtttacacgggcctgagcaccaggaaccaggagacttacgagactctgaagcatgagaaaccagcatgccattaacaccagctggccctacccctataatgatcctgtgtcctaaattaatatacaccagtggttcctcctccctgttaaagactaatgctcagatgctgtttacggatatttatattctagtctcactctcttgtcccacccttcttctcttccccattcccaactccagctaaaatatgggaagggagaacccccaataaaactgccatggactgga

SEQ ID NO: 443478 - DNA, 934 bp, Homo sapiens
gtcagggaactgctcgctgagcacagctgcacagtgctgtcagaacggccgatctccagcccaagatgattccagcagtggtcttgctcttactccttttggttgaacaagcagcggccctgggagagcctcagctctgctatatcctggatgccatcctgtttctgtatggaattgtcctcaccctcctctactgtcgactgaagatccaagtgcgaaaggcagctataaccagctatgagaaatcagatggtgtttacacgggcctgagcaccaggaaccaggagacttacgagactctgaagcatgagaaaccaccacagtagctttagaatagatgcggtcatattcttctttggcttctggttcttccagccctcatggttggcatcacatatgcctgcatgccattaacaccagctggccctacccctataatgatcctgtgtcctaaattaatatacaccagtggttcctcctccctgttaaagactaatgctcagatgctgtttacggatatttatattctagtctcactctcttgtcccacccttcttctcttccccattcccaactccagctaaaatatgggaagggagaacccccaataaaactgccatggactggaaaaaaaaaaaaaaaaaaaaaaaaaaatttgtgggggggctggggcccgcgaaaaggtttttaaaccctatcgcgtggggggagcggcgccccagatggtgtaagctggaacagggggcaaaacggtgctcctaaaggaaaaacgctgggccaacgagaacaagggggcgtggctttccgcaccaattaaaaaaacgcgcgcgggggagccccgcagcgtttcgtgaacccacttccacgtggggagctccggacggcacagacggggctctcataagaggggtcccaggggagtccgattccaatc

SEQ ID NO: 443479 - DNA, 1257 bp, Homo sapiens
gggaaaggagtgtttcccagacagcccagcacctgcaggggatggagggcacataagtttgaatataaagtttaacaaatcaggggcagggcagaggaaccaagtccaagctcttgggttcaactataaagtaccatggaagtttgaaaactgaaagagatcaaaaagctgttagaagaaaacgcaggcatcaatctttatgaccttcgattaggcagtggtttcttagatatgacaccaaaagcaaagcaacaaaagaaagaaaacttaaagtggatgtcatcagaatgaaaaactcttgtgcttcaaaggataccatcacattttataattcatagatctggataaaggacttgtattaaggaaatacaaggaactcaactcattaacaggaaagacaacccaattttttaaaagggatttgaacaaagacttctcaaaagacaaatggccaaaagcacatgaaaaactactgagcgtcttttcataagggaaatgaaaaccaaaaccacaaggagaccatttcctatctactaggatggctaaaatttaaaaagacagtaataggcattatgtagaaaaactggaaccctcatacactgctggtaggggacagcccctgcaaaccttttgaagaactgccagcccctgttccccttttgaggaacagtctggcagttcctcaaaaggttaaacctagagttaccagatgacccagcaattccacccctagttatctgcccaaaagaaatgaaaacctgtctacacagaaatttgtacacaaatgttcacagcagcatgaatcataatggcccaaaagtggaaaacaaccccaaatgtcccatcaacaaagtggataaacaaaacccgtaggctgccccagacaatggaagacgattcggcctataaaaaggaaggaagcactgacacccctacagcatgaactctgaaaacatgcttggtgagagaagccagacacaaaaggccacatactgtatgatttcacttatatgaaatgtccccaataggcaaacccatagaaacggaaagtacattagtagctgtttaggtctgggggagaggggaaatggggaacatggaatctccttctggggtaacgaagatgctctgaaaccgattgtagcaacagttgaacgattctgtgaataactaaaaaccactgaattgtacactttaaatgggtgaattgaatggtacgtaaattatgtcaataaaacttatttttaaaaaaaaaaa

SEQ ID NO: 443480 - DNA, 1355 bp, Homo sapiens
gtttgttgaggtgggggtcagggggaagaagagtcaagtgaaatcttttccctcatttctgtcaccaaactctctgagcacagctcagaaaggtgggaagcttttgctcttacttagcatcataaaggacttgggaagtggggttcagttaccttagctaaaagtaataaaatgagacaaaaatcagtttcaaggaaccaagtccaagctcttgggttcaactataaagtaccatggaagtttgaaaactgaaagagatcaaaaagctgttagaagaaaacgcaggcatcaatctttatgaccttcgattaggcagtggtttcttagatatgacaccaaaagcaaagcaacaaaagaaagaaaacttaaagtggatgtcatcagaatgaaaaactcttgtgcttcaaaggataccatcacattttataattcatagatctggataaaggacttgtattaaggaaatacaaggaactcaactcattaacaggaaagacaacccaattttttaaaagggatttgaacaaagacttctcaaaagacaaatggccaaaagcacatgaaaaactactgagcgtcttttcataagggaaatgaaaaccaaaaccacaaggagaccatttcctatctactaggatggctaaaatttaaaaagacagtaataggcattatgtagaaaaactggaaccctcatacactgctggtaggggacagcccctgcaaaccttttgaagaactgccagcccctgttccccttttgaggaacagtctggcagttcctcaaaaggttaaacctagagttaccagatgacccagcaattccacccctagttatctgcccaaaagaaatgaaaacctgtctacacagaaatttgtacacaaatgttcacagcagcatgaatcataatggcccaaaagtggaaaacaaccccaaatgtcccatcaacaaagtggataaacaaaacccgtaggctgccccagacaatggaagacgattcggcctataaaaaggaaggaagcactgacacccctacagcatgaactctgaaaacatgcttggtgagagaagccagacacaaaaggccacatactgtatgatttcacttatatgaaatgtccccaataggcaaacccatagaaacggaaagtacattagtagctgtttaggtctgggggagaggggaaatggggaacatggaatctccttctggggtaacgaagatgctctgaaaccgattgtagcaacagttgaacgattctgtgaataactaaaaaccactgaattgtacactttaaatgggtgaattgaatggtacgtaaattatgtcaataaaacttatttttaaaaaaaaaaa

SEQ ID NO: 443481 - DNA, 498 bp, Homo sapiens
ttgtcttatgactacttttgttttatttaatagcatgaatacaactttgtctgagagccccttcaagtgtgatcctgatgctgccagagccattgtggatgctttaccaccaccctgtgaatctgcctgcacagtaccaacagacgtggataagtggttccatcaccagaaaaactaatgagatttctctggaatacaagctgatattgctacatcgtgttcatctggatgtattagaagtaaaagtagtagcttttcaaagctttaaatttgtagaactcatctaactaaagtaaattctgctgtgactaatccaatatactcagaatgttatccatctaaagcatttttcatatctcaactaagataacttttagcacatgcttaaatatcaaagcagttgtcatttggaagtcacttgtgaatagatgtgcaaggggagcacatattggatgtatatgttaccatatgttaggaaataaaattattttgctgaaa

SEQ ID NO: 443482 - DNA, 493 bp, Homo sapiens
attttgtatgtatgcctgttaattttcaggtaattcatagtaggattcattaaagcaagtatattagtctttgttatatgttaggtgtatttttgattctcaacaggaattctaatttgtttttcttttctctgaatacagtggataagtggttccatcaccagaaaaactaatgagatttctctggaatacaagctgatattgctacatcgtgttcatctggatgtattagaagtaaaagtagtagcttttcaaagctttaaatttgtagaactcatctaactaaagtaaattctgctgtgactaatccaatatactcagaatgttatccatctaaagcatttttcatatctcaactaagataacttttagcacatgcttaaatatcaaagcagttgtcatttggaagtcacttgtgaatagatgtgcaaggggagcacatattggatgtatatgttaccatatgttaggaaataaaattattttgctgaaa

SEQ ID NO: 443483 - DNA, 296 bp, Homo sapiens
ctaagataatgtcctttcattcccttcttaaaagaagcaatataaagaggtgtcctaagatgtcatctgtgagaatttcttttaaactgtgtcatcatctccaaccctatcacagttcatccagattgttatccctctaaagcatttttcatatctcaactaagataacttttagcacatgcttaaatatcaaagcagttgtcatttggaagtcacttgtgaatagatgtgcaaggggagcacatattggatgtatatgttaccatatgttaggaaataaaattattttgctgaaa

SEQ ID NO: 443484 - DNA, 1299 bp, Homo sapiens
cgccggtccagtgctcgcagtgcgcaggcgtggggctctctccttgtcagtcggcgccgcgtgcgggctggtggctctgtggcagcggcggcggcaggactccggcactatgagcggcttcagcaccgaggagcgcgccgcgcccttctccctggagtaccgagtcttcctcaaaaatgagaaaggacaatatatatctccatttcatgatattccaatttatgcagataaggatgtgtttcacatggtagttgaagtaccacgctggtctaatgcaaaaatggagattgctacaaaggaccctttaaaccctattaaacaagatgtgaaaaaaggaaaacttcgctatgttgcgaatttgttcccgtataaaggatatatctggaactatggtgccatccctcagacttgggaagacccagggcacaatgataaacatactggctgttgtggtgacaatgacccaattgatgtgtgtgaaattggaagcaaggtatgtgcaagaggtgaaataattggcgtgaaagttctaggcatattggctatgattgacgaaggggaaaccgactggaaagtcattgccattaatgtggatgatcctgatgcagccaattataatgatatcaatgatgtcaaacggctgaaacctggctacttagaagctactgtggactggtttagaaggtataaggttcctgatggaaaaccagaaaatgagtttgcgtttaatgcagaatttaaagataaggactttgccattgatattattaaaagcactcatgaccattggaaagcattagtgactaagaaaacgaatggaaaaggaatcagttgcatgaatacaactttgtctgagagccccttcaagtgtgatcctgatgctgccagagccattgtggatgctttaccaccaccctgtgaatctgcctgcacagtaccaacagacgtggataagtggttccatcaccagaaaaactaatgagatttctctggaatacaagctgatattgctacatcgtgttcatctggatgtattagaagtaaaagtagtagcttttcaaagctttaaatttgtagaactcatctaactaaagtaaattctgctgtgactaatccaatatactcagaatgttatccatctaaagcatttttcatatctcaactaagataacttttagcacatgcttaaatatcaaagcagttgtcatttggaagtcacttgtgaatagatgtgcaaggggagcacatattggatgtatatgttaccatatgttaggaaataaaattattttgctgaaa

SEQ ID NO: 443485 - DNA, 1275 bp, Homo sapiens
cgccggtccagtgctcgcagtgcgcaggcgtggggctctctccttgtcagtcggcgccgcgtgcgggctggtggctctgtggcagcggcggcggcaggactccggcactatgagcggcttcagcaccgaggagcgcgccgcgcccttctccctggagtaccgagtcttcctcaaaaatgagaaaggacaatatatatctccatttcatgatattccaatttatgcagataaggatgtgtttcacatggtagttgaagtaccacgctggtctaatgcaaaaatggagattgctacaaaggaccctttaaaccctattaaacaagatgtgaaaaaaggaaaacttcgctatgttgcgaatttgttcccgtataaaggatatatctggaactatggtgccatccctcagacttgggaagacccagggcacaatgataaacatactggctgttgtggtgacaatgacccaattgatgtgtgtgaaattggaagcaaggtatgtgcaagaggtgaaataattggcgtgaaagttctaggcatattggctatgattgacgaaggggaaaccgactggaaagtcattgccattaatgtggatgatcctgatgcagccaattataatgatatcaatgatgtcaaacggctgaaacctggctacttagaagctactgtggactggtttagaaggtataaggttcctgatggaaaaccagaaaatgagtttgcgtttaatgcagaatttaaagataaggactttgccattgatattattaaaagcactcatgaccattggaaagcattagtgactaagaaaacgaatggaaaaggaatcagttgcatgaatacaactttgtctgagagccccttcaagtgtgatcctgatgctgccagagccattgtggatgctttaccaccaccctgtgaatctgcctgcacagtaccaacagacgtggataagtggttccatcaccagaaaaactaatgagatttctctggaatacaagctgatattgctacatcgtgttcatctggatgtattagaagtaaaagtagtagcttttcaaagctttaaatttgtagaactcatctaactaaagtaaattctgctgtgactaatccaatatactcagaatgttatccattaagataacttttagcacatgcttaaatatcaaagcagttgtcatttggaagtcacttgtgaatagatgtgcaaggggagcacatattggatgtatatgttaccatatgttaggaaataaaattattttgctgaaa

SEQ ID NO: 443486 - DNA, 1257 bp, Homo sapiens
cgccggtccagtgctcgcagtgcgcaggcgtggggctctctccttgtcagtcggcgccgcgtgcgggctggtggctctgtggcagcggcggcggcaggactccggcactatgagcggcttcagcaccgaggagcgcgccgcgcccttctccctggagtaccgagtcttcctcaaaaatgagaaaggacaatatatatctccatttcatgatattccaatttatgcagataaggatgtgtttcacatggtagttgaagtaccacgctggtctaatgcaaaaatggagattgctacaaaggaccctttaaaccctattaaacaagatgtgaaaaaaggaaaacttcgctatgttgcgaatttgttcccgtataaaggatatatctggaactatggtgccatccctcagacttgggaagacccagggcacaatgataaacatactggctgttgtggtgacaatgacccaattgatgtgtgtgaaattggaagcaaggtatgtgcaagaggtgaaataattggcgtgaaagttctaggcatattggctatgattgacgaaggggaaaccgactggaaagtcattgccattaatgtggatgatcctgatgcagccaattataatgatatcaatgatgtcaaacggctgaaacctggctacttagaagctactgtggactggtttagaaggtataaggttcctgatggaaaaccagaaaatgagtttgcgtttaatgcagaatttaaagataaggactttgccattgatattattaaaagcactcatgaccattggaaagcattagtgactaagaaaacgaatggaaaaggaatcagttgcatgaatacaactttgtctgagagccccttcaagtgtgatcctgatgctgccagagccattgtggatgctttaccaccaccctgtgaatctgcctgcacagtaccaacagacgtggataagtggttccatcaccagaaaaactaatgagatttctctggaatacaagctgatattgctacatcgtgttcatctggatgtattagaagtaaaagtagtataaattctgctgtgactaatccaatatactcagaatgttatccatctaaagcatttttcatatctcaactaagataacttttagcacatgcttaaatatcaaagcagttgtcatttggaagtcacttgtgaatagatgtgcaaggggagcacatattggatgtatatgttaccatatgttaggaaataaaattattttgctgaaa

SEQ ID NO: 443487 - DNA, 1149 bp, Homo sapiens
tagaagagtgcctggcacatcctggtggttcacaacaaatatttgttgaaaaaaatcaatgaattgactctggcttttgcaggatgtgtttcacatggtagttgaagtaccacgctggtctaatgcaaaaatggagattgctacaaaggaccctttaaaccctattaaacaagatgtgaaaaaaggaaaacttcgctatgttgcgaatttgttcccgtataaaggatatatctggaactatggtgccatccctcagacttgggaagacccagggcacaatgataaacatactggctgttgtggtgacaatgacccaattgatgtgtgtgaaattggaagcaaggtatgtgcaagaggtgaaataattggcgtgaaagttctaggcatattggctatgattgacgaaggggaaaccgactggaaagtcattgccattaatgtggatgatcctgatgcagccaattataatgatatcaatgatgtcaaacggctgaaacctggctacttagaagctactgtggactggtttagaaggtataaggttcctgatggaaaaccagaaaatgagtttgcgtttaatgcagaatttaaagataaggactttgccattgatattattaaaagcactcatgaccattggaaagcattagtgactaagaaaacgaatggaaaaggaatcagttgcatgaatacaactttgtctgagagccccttcaagtgtgatcctgatgctgccagagccattgtggatgctttaccaccaccctgtgaatctgcctgcacagtaccaacagacgtggataagtggttccatcaccagaaaaactaatgagatttctctggaatacaagctgatattgctacatcgtgttcatctggatgtattagaagtaaaagtagtagcttttcaaagctttaaatttgtagaactcatctaactaaagtaaattctgctgtgactaatccaatatactcagaatgttatccatctaaagcatttttcatatctcaactaagataacttttagcacatgcttaaatatcaaagcagttgtcatttggaagtcacttgtgaatagatgtgcaaggggagcacatattggatgtatatgttaccatatgttaggaaataaaattattttgctgaaa

SEQ ID NO: 443488 - DNA, 1200 bp, Homo sapiens
cggcgggagcgctgcaacggcggtgctaaggacacccctcagagcatagatgagggaggctcacgcatctctttgctcatatacatggactctctgtatggcctgcaaatcacatttacttctcctcttatagagactattatctttaataaagcactggatataaatcaaagaaaaaaatagaaaaattgctacaaaggaccctttaaaccctattaaacaagatgtgaaaaaaggaaaacttcgctatgttgcgaatttgttcccgtataaaggatatatctggaactatggtgccatccctcagacttgggaagacccagggcacaatgataaacatactggctgttgtggtgacaatgacccaattgatgtgtgtgaaattggaagcaaggtatgtgcaagaggtgaaataattggcgtgaaagttctaggcatattggctatgattgacgaaggggaaaccgactggaaagtcattgccattaatgtggatgatcctgatgcagccaattataatgatatcaatgatgtcaaacggctgaaacctggctacttagaagctactgtggactggtttagaaggtataaggttcctgatggaaaaccagaaaatgagtttgcgtttaatgcagaatttaaagataaggactttgccattgatattattaaaagcactcatgaccattggaaagcattagtgactaagaaaacgaatggaaaaggaatcagttgcatgaatacaactttgtctgagagccccttcaagtgtgatcctgatgctgccagagccattgtggatgctttaccaccaccctgtgaatctgcctgcacagtaccaacagacgtggataagtggttccatcaccagaaaaactaatgagatttctctggaatacaagctgatattgctacatcgtgttcatctggatgtattagaagtaaaagtagtagcttttcaaagctttaaatttgtagaactcatctaactaaagtaaattctgctgtgactaatccaatatactcagaatgttatccatctaaagcatttttcatatctcaactaagataacttttagcacatgcttaaatatcaaagcagttgtcatttggaagtcacttgtgaatagatgtgcaaggggagcacatattggatgtatatgttaccatatgttaggaaataaaattattttgctgaaa

SEQ ID NO: 443489 - DNA, 1524 bp, Homo sapiens
cgccggtccagtgctcgcagtgcgcaggcgtggggctctctccttgtcagtcggcgccgcgtgcgggctggtggctctgtggcagcggcggcggcaggactccggcactatgagcggcttcagcaccgaggagcgcgccgcgcccttctccctggagtaccgagtcttcctcaaaaatgagaaaggacaatatatatctccatttcatgatattccaatttatgcagataaggatgtgtttcacatggtagttgaagtaccacgctggtctaatgcaaaaatggagattgctacaaaggaccctttaaaccctattaaacaagatgtgaaaaaaggaaaacttcgctatgttgcgaatttgttcccgtataaaggatatatctggaactatggtgccatccctcagacttgggaagacccagggcacaatgataaacatactggctgttgtggtgacaatgacccaattgatgtgtgtgaaattggaagcaaggtatgtgcaagaggtgaaataattggcgtgaaagttctaggcatattggctatgattgacgaaggggaaaccgactggaaagtcattgccattaatgtggatgatcctgatgcagccaattataatgtatgtaatagtgttgtgatcctctgacatagcctctgcctctggaccagggatagtacctcaagcctgtaatcccagtgctttgggaagccaaggcaggaggattgcttgagcccaggagtttgagaccagcctgggcaacatgacgagaccccatttctacaaaaaatttaaaaattagctgggcgtgtgcatgcttatagtcccagctactcaggaggctgagatatcaatgatgtcaaacggctgaaacctggctacttagaagctactgtggactggtttagaaggtataaggttcctgatggaaaaccagaaaatgagtttgcgtttaatgcagaatttaaagataaggactttgccattgatattattaaaagcactcatgaccattggaaagcattagtgactaagaaaacgaatggaaaaggaatcagttgcatgaatacaactttgtctgagagccccttcaagtgtgatcctgatgctgccagagccattgtggatgctttaccaccaccctgtgaatctgcctgcacagtaccaacagacgtggataagtggttccatcaccagaaaaactaatgagatttctctggaatacaagctgatattgctacatcgtgttcatctggatgtattagaagtaaaagtagtagcttttcaaagctttaaatttgtagaactcatctaactaaagtaaattctgctgtgactaatccaatatactcagaatgttatccatctaaagcatttttcatatctcaactaagataacttttagcacatgcttaaatatcaaagcagttgtcatttggaagtcacttgtgaatagatgtgcaaggggagcacatattggatgtatatgttaccatatgttaggaaataaaattattttgctgaaa

SEQ ID NO: 443490 - DNA, 1229 bp, Homo sapiens
cgccggtccagtgctcgcagtgcgcaggcgtggggctctctccttgtcagtcggcgccgcgtgcgggctggtggctctgtggcagcggcggcggcaggactccggcactatgagcggcttcagcaccgaggagcgcgccgcgcccttctccctggagtaccgagtcttcctcaaaaatgagaaaggacaatatatatctccatttcatgatattccaatttatgcagataaggatgtgtttcacatggtagttgaagtaccacgctggtctaatgcaaaaatggagattgctacaaaggaccctttaaaccctattaaacaagatgtgaaaaaaggaaaacttcgctatgttgcgaatttgttcccgtataaaggatatatctggaactatggtgccatccctcagacttgggaagacccagggcacaatgataaacatactggctgttgtggtgacaatgacccaattgatgtgtgtgaaattggaagcaaggtatgtgcaagaggtgaaataattggcgtgaaagttctaggcatattggctatgattgacgaaggggaaaccgactggaaagtcattgccattaatgtggatgatcctgatgcagccaattataatgatatcaatgatgtcaaacggctgaaacctggctacttagaagctactgtggactggtttagaaggtataaggttcctgatggaaaaccagaaaatgagtttgcgtttaatgcagaatttaaagataaggactttgccattgatattattaaaagcactcatgaccattggaaagcattagtgactaagaaaacgaatggaaaaggaatcagttgttaccaccaccctgtgaatctgcctgcacagtaccaacagacgtggataagtggttccatcaccagaaaaactaatgagatttctctggaatacaagctgatattgctacatcgtgttcatctggatgtattagaagtaaaagtagtagcttttcaaagctttaaatttgtagaactcatctaactaaagtaaattctgctgtgactaatccaatatactcagaatgttatccatctaaagcatttttcatatctcaactaagataacttttagcacatgcttaaatatcaaagcagttgtcatttggaagtcacttgtgaatagatgtgcaaggggagcacatattggatgtatatgttaccatatgttaggaaataaaattattttgctgaaa

SEQ ID NO: 443491 - DNA, 764 bp, Homo sapiens
gcaaactgccatcacacgtgtccccgatggatctgcatgaggctgaacccagtgatgaagtaaaattatcttagaaattataatgatatcaatgatgtcaaacggctgaaacctggctacttagaagctactgtggactggtttagaaggtataaggttcctgatggaaaaccagaaaatgagtttgcgtttaatgcagaatttaaagataaggactttgccattgatattattaaaagcactcatgaccattggaaagcattagtgactaagaaaacgaatggaaaaggaatcagttgcatgaatacaactttgtctgagagccccttcaagtgtgatcctgatgctgccagagccattgtggatgctttaccaccaccctgtgaatctgcctgcacagtaccaacagacgtggataagtggttccatcaccagaaaaactaatgagatttctctggaatacaagctgatattgctacatcgtgttcatctggatgtattagaagtaaaagtagtagcttttcaaagctttaaatttgtagaactcatctaactaaagtaaattctgctgtgactaatccaatatactcagaatgttatccatctaaagcatttttcatatctcaactaagataacttttagcacatgcttaaatatcaaagcagttgtcatttggaagtcacttgtgaatagatgtgcaaggggagcacatattggatgtatatgttaccatatgttaggaaataaaattattttgctgaaa

SEQ ID NO: 443492 - DNA, 653 bp, Homo sapiens
agctcggtacccgactacatacttccgcaggcttggggaaatgttgataataggaaaataatacctttttatcattgtaatgcaaatctcttcaaattataggactttgccattgatattattaaaagcactcatgaccattggaaagcattagtgactaagaaaacgaatggaaaaggaatcagttgcatgaatacaactttgtctgagagccccttcaagtgtgatcctgatgctgccagagccattgtggatgctttaccaccaccctgtgaatctgcctgcacagtaccaacagacgtggataagtggttccatcaccagaaaaactaatgagatttctctggaatacaagctgatattgctacatcgtgttcatctggatgtattagaagtaaaagtagtagcttttcaaagctttaaatttgtagaactcatctaactaaagtaaattctgctgtgactaatccaatatactcagaatgttatccatctaaagcatttttcatatctcaactaagataacttttagcacatgcttaaatatcaaagcagttgtcatttggaagtcacttgtgaatagatgtgcaaggggagcacatattggatgtatatgttaccatatgttaggaaataaaattattttgctgaaa

SEQ ID NO: 443493 - DNA, 636 bp, Homo sapiens
cgccggtccagtgctcgcagtgcgcaggcgtggggctctctccttgtcagtcggcgccgcgtgcgggctggtggctctgtggcagcggcggcggcaggactccggcactatgagcggcttcagcaccgaggagcgcgccgcgcccttctccctggagtaccgagtcttcctcaaaaatgagaaaggacaatatatatctccatttcatgatattccaatttatgcagataaggatgtgtttcacatggtagttgaagtaccacgctggtctaatgcaaaaatggagattgctacaaaggaccctttaaaccctattaaacaagatgtgaaaaaaggaaaacttcgctatgttgcgaatttgttcccgtataaaggatatatctggaaccttataccttctaaaccagtccacagtagcttctaagtagccaggtttcagccgtttgacatcattgatatcattataattggctgcatcaggatcatccacattaatggcaatgactttccagtcggtttccccttcgtcaatcatagccaatatgcctagaactttcacgccaattatttcacctcttgcacataccttgcttccaatttcacacacatcaatttggtcatagtcaccacaacagc

SEQ ID NO: 443494 - DNA, 398 bp, Homo sapiens
ctcggccgtgtctccccgttgcaaattctttctactagaaatgcttctacataataaaaagcatacattacatataaaagataccagtgtactaaaaagtgacagatgacgaggacgatgacgaggaggaatatggcaacggggaggaacggcttttcaaagctttaaatttgtagaactcatctaactaaagtaaattctgctgtgactaatccaatatactcagaatgttatccatctaaagcatttttcatatctcaactaagataacttttagcacatgcttaaatatcaaagcagttgtcatttggaagtcacttgtgaatagatgtgcaaggggagcacatattggatgtatatgttaccatatgttaggaaataaaattattttgctgaaa

SEQ ID NO: 443495 - DNA, 506 bp, Homo sapiens
tgctggaattacaggcatgagccaccacacctagcccaatctcagtttcttaaatccgaacttgttaagatatttgaataaaattgatcacaagaatagctatgccttgccaaaatacataattagaatgttaaatgtaggtgaaaaagctttcgactaaactaaacttgaatatcacctggtcaaccactttcaactcattttttaactcttaagagataatttttgttattttgtcttatgactacttttgttttatttaatagcatgaatacaactttgtctgagagccccttcaagtgtgatcctgatgctgccagagccattgtggatgctgtatgtaaaagtttccttaaaaaaaaaacaagcctggttgctaaaaactatgatgctaaatggggagaggaagtacttgtttcgacaaatacttgagtgccttttgtatgcatgttactgtgtggagtcttgaaattagaaaccatgaacacatgcaagtggccatttga

SEQ ID NO: 443496 - DNA, 1159 bp, Homo sapiens
aggctgcagtgagccttgttcgggccactgcattccagcgtgggtgacagagcgagaccttgtctctgaaaaaagaaaaaagataacctctgtctttttcagtatcttgtacacttctcataggaattatctacatttgccaaactggttgtttcattatgtagccaccagctgtttgcccttacctaacagagattactattgtactgattgttctctgtacttagtgtcagagctattcagagatactagatgattttctttcaatgtatatgtgtatggcttctcttctcaacaaggggcttcgctccaatgttatcttgaacttccgtgataagtcattccacagctctttcaaaataagtacttggaatttttgttgagtgtataattatttgtgcatcttgaaatctgcttattctcttctttctttttaaaaaaatcattctcactgtcatctcatgcttcttctcttcttagatatcaatgatgtcaaacggctgaaacctggctacttagaagctactgtggactggtttagaaggtataaggttcctgatggaaaaccagaaaatgagtttgcgtttaatgcagaatttaaagataaggactttgccattgatattattaaaagcactcatgaccattggaaagcattagtgactaagaaaacgaatggaaaaggaatcagttgcatgaatacaactttgtctgagagccccttcaagtgtgatcctgatgctgccagagccattgtggatgctttaccaccaccctgtgaatctgcctgcacagtaccaacagacgtggataagtggttccatcaccagaaaaactaatgagatttctctggaatacaagctgatattgctacatcgtgttcatctggatgtattagaagtaaaagtagtagcttttcaaagctttaaatttgtagaactcatctaactaaagtaaattctgctgtgactaatccaatatactcagaatgttatccatctaaagcatttttcatatctcaactaagataacttttagcacatgcttaaatatcaaagcagttgtcatttggaagtcacttgtgaatagatgtgcaaggggagcacatattggatgtatatgttaccatatgttaggaaataaaattattttgctgaaa

SEQ ID NO: 443497 - DNA, 1495 bp, Homo sapiens
cgccggtccagtgctcgcagtgcgcaggcgtggggctctctccttgtcagtcggcgccgcgtgcgggctggtggctctgtggcagcggcggcggcaggactccggcactatgagcggcttcagcaccgaggagcgcgccgcgcccttctccctggagtaccgagtcttcctcaaaaatgagaaaggacaatatatatctccatttcatgatattccaatttatgcagataaggatgtgtttcacatggtagttgaagtaccacgctggtctaatgcaaaaatggagattgctacaaaggaccctttaaaccctattaaacaagatgtgaaaaaaggaaaacttcgctatgttgcgaatttgttcccgtataaaggatatatctggaactatggtgccatccctcagacttgggaagacccagggcacaatgataaacatactggctgttgtggtgacaatgacccaattgatgtgtgtgaaattggaagcaaggtatgtgcaagaggtgaaataattggcgtgaaagttctaggcatattggctatgattgacgaaggggaaaccgactggaaagtcattgccattaatgtggatgatcctgatgcagccaattataatgatatcaatgatgtcaaacggctgaaacctggctacttagaagctactgtggactggtttagaaggtataaggttcctgatggaaaaccagaaaatgagtttgcgtttaatgcagaatttaaagataaggactttgccattgatattattaaaagcactcatgaccattggaaagcattagtgactaagaaaacgaatggaaaaggaatcagttgcatgaatacaactttgtctgagagccccttcaagtgtgatcctgatgctgccagagccattgtggatgctttaccaccaccctgtgaatctgcctgcacagtaccaacagacgtggataagtggttccatcaccagaaaaactaatgagatttctctggaatacaagctgatattgctacatcgtgttcatctggatgtattagaagtaaaagtagtagcttttcaaagctttaaatttgtagaactcatctaactaaagtaaattctgctgtgactaatccaatatactcagaatgttatccatctaaagcatttttcatatctcaactaagataacttttagcacatgcttaaatatcaaagcagttgtcatttggaagtcacttgtgaatagatgtgcaaggggagcacatattggatgtatatgttaccatatgttaggaaataaaattattttgctgaaaaaaaaaaaaaaaaaaatagaaaagtggagaagatagaaaaaaagagagaaaaaggaaagaaaggaaaaaatgaaccagggaaaaaaagaagaggggggggggaaataacagagggggggaatgaaaaagttgagaagaggcgaaaagataaaaaaggggggcaaaaggggaaggaggtaggaaaactgggggaaga

SEQ ID NO: 443498 - DNA, 1310 bp, Homo sapiens
gaagcgagtaccttactagtagccactaggggtgtcagtaatatggctcaactttgttacgacggatcagaaaaatgctcacctttaagaccgcaagcagagcctgtctggggaagcaggtgacttatcaacgccttttgagataaggaataggactgcggggaggagtgtgtgagaatcaaagaaaatgagaaaggacaatatatatctccatttcatgatattccaatttatgcagataaggatgtgtttcacatggtagttgaagtaccacgctggtctaatgcaaaaatggagattgctacaaaggaccctttaaaccctattaaacaagatgtgaaaaaaggaaaacttcgctatgttgcgaatttgttcccgtataaaggatatatctggaactatggtgccatccctcagacttgggaagacccagggcacaatgataaacatactggctgttgtggtgacaatgacccaattgatgtgtgtgaaattggaagcaaggtatgtgcaagaggtgaaataattggcgtgaaagttctaggcatattggctatgattgacgaaggggaaaccgactggaaagtcattgccattaatgtggatgatcctgatgcagccaattataatgatatcaatgatgtcaaacggctgaaacctggctacttagaagctactgtggactggtttagaaggtataaggttcctgatggaaaaccagaaaatgagtttgcgtttaatgcagaatttaaagataaggactttgccattgatattattaaaagcactcatgaccattggaaagcattagtgactaagaaaacgaatggaaaaggaatcagttgcatgaatacaactttgtctgagagccccttcaagtgtgatcctgatgctgccagagccattgtggatgctttaccaccaccctgtgaatctgcctgcacagtaccaacagacgtggataagtggttccatcaccagaaaaactaatgagatttctctggaatacaagctgatattgctacatcgtgttcatctggatgtattagaagtaaaagtagtagcttttcaaagctttaaatttgtagaactcatctaactaaagtaaattctgctgtgactaatccaatatactcagaatgttatccatctaaagcatttttcatatctcaactaagataacttttagcacatgcttaaatatcaaagcagttgtcatttggaagtcacttgtgaatagatgtgcaaggggagcacatattggatgtatatgttaccatatgttaggaaataaaattattttgctgaaa

SEQ ID NO: 443499 - DNA, 1325 bp, Homo sapiens
  misc_feature (24)..(24): n is a, c, g, or t
  misc_feature (68)..(68): n is a, c, g, or t
cgccccacggaaaatgttaactgnaacagcctaataaaatgggcggacccctgggaaggtacaacccngcgggggcgtactcgttactaattcgagttgatcagcaatcgcgaccgatcgcaacggcgcgggcggtcgctgtgctcgggcacgcgcgcaggctcggactatgacgctcacccgatgacgcgcgcgccttctcctgagtacgatcttcttcaaaatgagaagacatatatatctcattcatgatattcaattatgcaataggatgtgtcacatgctatgagtacagctgtctaatgcaaaatgattgctacaaaggaccctttaaaccctattaaacaagatgtgaaaaaaggaaaacttcgctatgttgcgaatttgttcccgtataaaggatatatctggaactatggtgccatccctcagacttgggaagacccagggcacaatgataaacatactggctgttgtggtgacaatgacccaattgatgtgtgtgaaattggaagcaaggtatgtgcaagaggtgaaataattggcgtgaaagttctaggcatattggctatgattgacgaaggggaaaccgactggaaagtcattgccattaatgtggatgatcctgatgcagccaattataatgatatcaatgatgtcaaacggctgaaacctggctacttagaagctactgtggactggtttagaaggtataaggttcctgatggaaaaccagaaaatgagtttgcgtttaatgcagaatttaaagataaggactttgccattgatattattaaaagcactcatgaccattggaaagcattagtgactaagaaaacgaatggaaaaggaatcagttgcatgaatacaactttgtctgagagccccttcaagtgtgatcctgatgctgccagagccattgtggatgctttaccaccaccctgtgaatctgcctgcacagtaccaacagacgtggataagtggttccatcaccagaaaaactaatgagatttctctggaatacaagctgatattgctacatcgtgttcatctggatgtattagaagtaaaagtagtagcttttcaaagctttaaatttgtagaactcatctaactaaagtaaattctgctgtgactaatccaatatactcagaatgttatccatctaaagcatttttcatatctcaactaagataacttttagcacatgcttaaatatcaaagcagttgtcatttggaagtcacttgtgaatagatgtgcaaggggagcacatattggatgtatatgttaccatatgttaggaaataaaattattttgctgaaa

SEQ ID NO: 443500 - DNA, 1370 bp, Homo sapiens
cgccggtccagtgctcgcagtgcgcaggcgtggggctctctccttgtcagtcggcgccgcgtgcgggctggtggctctgtggcagcggcggcggcaggactccggcactatgagcggcttcagcaccgaggagcgcgccgcgcccttctccctggagtaccgagtcttcctcaaaaatgagaaaggacaatatatatctccatttcatgatattccaatttatgcagataaggatgtgtttcacatggtagttgaagtaccacgctggtctaatgcaaaaatggagattgctacaaaggaccctttaaaccctattaaacaagatgtgaaaaaaggaaaacttcgctatgttgcgaatttgttcccgtataaaggatatatctggaactatggtgccatccctcagacttgggaagacccagggcacaatgataaacatactggctgttgtggtgacaatgacccaattgatgtgtgtgaaattggaagcaaggtatgtgcaagaggtgaaataattggcgtgaaagttctaggcatattggctatgattgacgaaggggaaaccgactggaaagtcattgccattaatgtggatgatcctgatgcagccaattataatgatatcaatgatgtcaaacggctgaaacctggctacttagaagctactgtggactggtttagaaggtataaggttcctgatggaaaaccagaaaatgagtttgcgtttaatgcagaatttaaagataaggactttgccattgatattattaaaagcactcatgaccattggaaagcattagtgactaagaaaacgaatggaaaaggaatcagttgcatgaatacaactttgtctgagagccccttcaagtgtgatcctgatgctgccagagccattgtggatgctttaccaccaccctgtgaatctgcctgcacagtaccaacagacggtaagatttctattccagtaaaatttcattaaacattacacagttatggaaaaattatgttacttttatttttagttgacaaatgataattaaatatatttatgggtacagtgtgatgttttgatatatgtttacaatgtggaatgattaaatctggctaattacgaaatcattacctcacatacttaatcattatttgttgtgtggtaaaaacatttgaaatctactcttagcaattttgaaatagatgttacagtcaccatcctgtgcaatagatcactaaagcttattccttttgtctaactaaaacttggtaccctttgaccatcgcctgccctttccccatccttcagctcctggcaaccaccattctactctctacctctatgaatttaccttttttatattgcacatataaatgag

SEQ ID NO: 443501 - DNA, 1242 bp, Homo sapiens
cgccggtccagtgctcgcagtgcgcaggcgtggggctctctccttgtcagtcggcgccgcgtgcgggctggtggctctgtggcagcggcggcggcaggactccggcactatgagcggcttcagcaccgaggagcgcgccgcgcccttctccctggagtaccgagtcttcctcaaaaatgagaaaggacaatatatatctccatttcatgatattccaatttatgcagataaggatgtgtttcacatggtagttgaagtaccacgctggtctaatgcaaaaatggagattgctacaaaggaccctttaaaccctattaaacaagatgtgaaaaaaggaaaacttcgctatgttgcgaatttgttcccgtataaaggatatatctggaactatggtgccatccctcagacttgggaagacccagggcacaatgataaacatactggctgttgtggtgacaatgacccaattgatgtgtgtgaaattggaagcaaggtatgtgcaagaggtgaaataattggcgtgaaagttctaggcatattggctatgattgacgaaggggaaaccgactggaaagtcattgccattaatgtggatgatcctgatgcagccaattataatgatatcaatgatgtcaaacggctgaaacctggctacttagaagctactgtggactggtttagaaggtataaggactttgccattgatattattaaaagcactcatgaccattggaaagcattagtgactaagaaaacgaatggaaaaggaatcagttgcatgaatacaactttgtctgagagccccttcaagtgtgatcctgatgctgccagagccattgtggatgctttaccaccaccctgtgaatctgcctgcacagtaccaacagacgtggataagtggttccatcaccagaaaaactaatgagatttctctggaatacaagctgatattgctacatcgtgttcatctggatgtattagaagtaaaagtagtagcttttcaaagctttaaatttgtagaactcatctaactaaagtaaattctgctgtgactaatccaatatactcagaatgttatccatctaaagcatttttcatatctcaactaagataacttttagcacatgcttaaatatcaaagcagttgtcatttggaagtcacttgtgaatagatgtgcaaggggagcacatattggatgtatatgttaccatatgttaggaaataaaattattttgctgaaa

SEQ ID NO: 443502 - DNA, 1079 bp, Homo sapiens
tagaagagtgcctggcacatcctggtggttcacaacaaatatttgttgaaaaaaatcaatgaattgactctggcttttgcaggatgtgtttcacatggtagttgaagtaccacgctggtctaatgcaaaaatggagattgctacaaaggaccctttaaaccctattaaacaagatgtgaaaaaaggaaaacttcgctatgttgcgaatttgttcccgtataaaggatatatctggaactatggtgccatccctcagacttgggaagacccagggcacaatgataaacatactggctgttgtggtgacaatgacccaattgatgtgtgtgaaattggaagcaaggtatgtgcaagaggtgaaataattggcgtgaaagttctaggcatattggctatgattgacgaaggggaaaccgactggaaagtcattgccattaatgtggatgatcctgatgcagccaattataatgatatcaatgatgtcaaacggctgaaacctggctacttagaagctactgtggactggtttagaaggtataaggttcctgatggaaaaccagaaaatgagtttgcgtttaatgcagaatttaaagataaggactttgccattgatattattaaaagcactcatgaccattggaaagcattagtgactaagaaaacgaatggaaaaggaatcagttgttaccaccaccctgtgaatctgcctgcacagtaccaacagacgtggataagtggttccatcaccagaaaaactaatgagatttctctggaatacaagctgatattgctacatcgtgttcatctggatgtattagaagtaaaagtagtagcttttcaaagctttaaatttgtagaactcatctaactaaagtaaattctgctgtgactaatccaatatactcagaatgttatccatctaaagcatttttcatatctcaactaagataacttttagcacatgcttaaatatcaaagcagttgtcatttggaagtcacttgtgaatagatgtgcaaggggagcacatattggatgtatatgttaccatatgttaggaaataaaattattttgctgaaa

SEQ ID NO: 443503 - DNA, 605 bp, Homo sapiens
cgccggtccagtgctcgcagtgcgcaggcgtggggctctctccttgtcagtcggcgccgcgtgcgggctggtggctctgtggcagcggcggcggcaggactccggcactatgagcggcttcagcaccgaggagcgcgccgcgcccttctccctggagtaccgagtcttcctcaaaaatgagaaaggacaatatatatctccatttcatgatattccaatttatgcagataaggatgtgtttcacatggtagttgaagtaccacgctggtctaatgcaaaaatggaggtaatatttcaccttacatttgagtcagacttaggatattggttttgatctagtcacactgacttgatcaaggatgaaccatctgaacgtcaaggtttttctctgtctggtcccagtctattttctagttgtatctcccattgcctactagtcttccctttgggctccagctaaactcaactgtttacaaatatgccccaaacttttcttcccaacatctttgcttccaatgttcccaaagcctagaattactttttctcctcttactctctgtaagcccttcactgacccctccttagtcaccccagccacagatact

SEQ ID NO: 443504 - DNA, 1330 bp, Homo sapiens
tgaactccatgttctactcagtcctacacagagcaccccaactggcgctggctggtcaacacctatccaacttgataaagtcaatcttcaagtatattgtgcatggtctcttctggataactttgagtggaaccagggatacagcagccggtttggtctcttccacgttgattttgaagacccagctagaccccgagtcccttacacatcggccaaggaatatgccaagatcatccgaaacaatggccttgaagcacatctgtaggcaagatggctgagaaatacaggagaggcgtctgcttttggaaaggaaatctgctttggtgatgatctttcaggcaatctcaacttacttctttaatcaacatttaatatcaatggatctgtgattaaaaggtctgaatatgtaatgcctcgtgaagtatttaataatggcctttatttgtatttggatcaatgaggtttttaaaaaaaatggaagagaaaaccactaaccttgatttttgtattgcaaaatcagatagacctggaaacataaatttaaatccttagacatttttctagaaaaaaatgcaaagtttataaagatgatacaaccatgatttgcaactgtaacaggagaccatttattataagcgtacctgtttgtgaacttaattattctgattccataagctgtttttgcttaggtgatccactgccatgtgatccataatttttctacataaaaaatcaaagttaaaagtcacattatacagttatgcattcatttcaacaaaatagtgaattgataatctacttgttaatatattcggcccatattttgtgtgtttggacaagtacatctcccttttgcctaatgaacttttgaaaaataataaaataatagaataaattagactttgaatggcaaaaaaagtatttgagtgttgatgttcagtaaaaaacagattcctaatttggcagagtggtgccaaattaaaagctaagtgataagcagggcataatttccacttttgaatgtttctttaaagtttagaaccttaagaacctcatgaaaaaaatacatgaagtgaatgaccaacctcagtgtaagcaaaggtggggtggggatttattaccccggtagttgaaatgtctgagattggtatggggttgactggaattggacattttactgaacttcctaaggtaggggtcaggagtagaggcagggctccttctggcctccatgtctcccctccagcaaacccttcacgtatgtggagtttggtctttcacatccatatttcagtagacttcagtaagcacctagttacccattagactt

SEQ ID NO: 443505 - DNA, 1329 bp, Homo sapiens
  misc_feature (29)..(29): n is a, c, g, or t
  misc_feature (49)..(49): n is a, c, g, or t
  misc_feature (53)..(53): n is a, c, g, or t
  misc_feature (61)..(61): n is a, c, g, or t
gggagcgacgcctggacgaagagtaggtntttttagccttctgggtatnccantcgtattnctatccaacttgataaagtcaatcttcaagtatattgtgcatggtctcttctggataactttgagtggaaccagggatacagcagccggtttggtctcttccacgttgattttgaagacccagctagaccccgagtcccttacacatcggccaaggaatatgccaagatcatccgaaacaatggccttgaagcacatctgtaggcaagatggctgagaaatacaggagaggcgtctgcttttggaaaggaaatctgctttggtgatgatctttcaggcaatctcaacttacttctttaatcaacatttaatatcaatggatctgtgattaaaaggtctgaatatgtaatgcctcgtgaagtatttaataatggcctttatttgtatttggatcaatgaggtttttaaaaaaaatggaagagaaaaccactaaccttgatttttgtattgcaaaatcagatagacctggaaacataaatttaaatccttagacatttttctagaaaaaaatgcaaagtttataaagatgatacaaccatgatttgcaactgtaacaggagaccatttattataagcgtacctgtttgtgaacttaattattctgattccataagctgtttttgcttaggtgatccactgccatgtgatccataatttttctacataaaaaatcaaagttaaaagtcacattatacagttatgcattcatttcaacaaaatagtgaattgataatctacttgttaatatattcggcccatattttgtgtgtttggacaagtacatctcccttttgcctaatgaacttttgaaaaataataaaataatagaataaattagactttgaatggcaaaaaaagtatttgagtgttgatgttcagtaaaaaacagattcctaatttggcagagtggtgccaaattaaaagctaagtgataagcagggcataatttccacttttgaatgtttctttaaagtttagaaccttaagaacctcatgaaaaaaatacatgaagtgaatgaccaacctcagtgtaagcaaaggtggggtggggatttattaccccggtagttgaaatgtctgagattggtatggggttgactggaattggacattttactgaacttcctaaggtaggggtcaggagtagaggcagggctccttctggcctccatgtctcccctccagcaaacccttcacgtatgtggagtttggtctttcacatccatatttcagtagacttcagtaagcacctagttacccattagactt

SEQ ID NO: 443506 - DNA, 1351 bp, Homo sapiens
  misc_feature (1)..(1): n is a, c, g, or t
  misc_feature (21)..(22): n is a, c, g, or t
  misc_feature (47)..(50): n is a, c, g, or t
  misc_feature (76)..(76): n is a, c, g, or t
naaaaaaaaaaagggggaaannaggaggggagaaaggtaataataannnntttgtggtaacagttgaaaagccttncttgcagctatccaacttgataaagtcaatcttcaagtatattgtgcatggtctcttctggataactttgagtggaaccagggatacagcagccggtttggtctcttccacgttgattttgaagacccagctagaccccgagtcccttacacatcggccaaggaatatgccaagatcatccgaaacaatggccttgaagcacatctgtaggcaagatggctgagaaatacaggagaggcgtctgcttttggaaaggaaatctgctttggtgatgatctttcaggcaatctcaacttacttctttaatcaacatttaatatcaatggatctgtgattaaaaggtctgaatatgtaatgcctcgtgaagtatttaataatggcctttatttgtatttggatcaatgaggtttttaaaaaaaatggaagagaaaaccactaaccttgatttttgtattgcaaaatcagatagacctggaaacataaatttaaatccttagacatttttctagaaaaaaatgcaaagtttataaagatgatacaaccatgatttgcaactgtaacaggagaccatttattataagcgtacctgtttgtgaacttaattattctgattccataagctgtttttgcttaggtgatccactgccatgtgatccataatttttctacataaaaaatcaaagttaaaagtcacattatacagttatgcattcatttcaacaaaatagtgaattgataatctacttgttaatatattcggcccatattttgtgtgtttggacaagtacatctcccttttgcctaatgaacttttgaaaaataataaaataatagaataaattagactttgaatggcaaaaaaagtatttgagtgttgatgttcagtaaaaaacagattcctaatttggcagagtggtgccaaattaaaagctaagtgataagcagggcataatttccacttttgaatgtttctttaaagtttagaaccttaagaacctcatgaaaaaaatacatgaagtgaatgaccaacctcagtgtaagcaaaggtggggtggggatttattaccccggtagttgaaatgtctgagattggtatggggttgactggaattggacattttactgaacttcctaaggtaggggtcaggagtagaggcagggctccttctggcctccatgtctcccctccagcaaacccttcacgtatgtggagtttggtctttcacatccatatttcagtagacttcagtaagcacctagttacccattagactt

SEQ ID NO: 443507 - DNA, 759 bp, Homo sapiens
  misc_feature (56)..(56): n is a, c, g, or t
  misc_feature (708)..(708): n is a, c, g, or t
  misc_feature (738)..(738): n is a, c, g, or t
ctcccgcccccccgaccgtctccgtcgggggggggaggaggaaacttcactgtaanaacctatccaacttgataaagtcaatcttcaagtatattgtgcatggtctcttctggataactttgagtggaaccagggatacagcagccggtttggtctcttccacgttgattttgaagacccagctagaccccgagtcccttacacatcggccaaggaatatgccaagatcatccgaaacaatggccttgaagcacatctgtaggcaagatggctgagaaatacaggagaggcgtctgcttttggaaaggaaatctgctttggtgatgatctttcaggcaatctcaacttacttctttaatcaacatttaatatcaatggatctgtgattaaaaggtctgaatatgtaatgcctcgtgaagtatttaataatggcctttatttgtatttggatcaatgaggtttttaaaaaaaatggaagagaaaaccactaaccttgatttttgtattgcaaaatcagatagacctggaaacataaatttaaatccttagacatttttctagaaaaaaatgcaaagtttataaagatgatacaaccatgatttgcaactgtaacaggagaccatttattataagcgtacctgtttgtgaacttaattattctgattccataagctgtttttgcttaggtgatccactgccatgtgatgncctggggatcaatatttttgtttctttttnaagtcggtggtttaaggtcac

SEQ ID NO: 443508 - DNA, 2578 bp, Homo sapiens
agggtgagagctcattttctgtttgcacaattgcctggctcctctggccaaagggtgctctgcttctggcagctgaagatcccagtagacagcttcttaaaccatggctttccctgcaggatttggatgggcggcagccactgcagcttatcaagtagaaggaggctgggatgcagatggaaaaggcccttgtgtctgggacacatttactcatcagggaggagagagagttttcaagaaccagactggcgatgtagcttgtggcagctacactctgtgggaggaagatttgaaatgtatcaaacagcttggattgactcattaccgcttctctctttcctggtcacgtctgttacctgatgggacgacaggtttcatcaaccagaaaggaattgattattacaacaagatcatcgatgatttgttaaaaaatggggttactcccattgtgaccctctaccactttgatttgcctcagactttagaagaccaaggaggttggttgtcagaggcaatcattgaatcctttgacaaatatgctcagttttgcttcagtacctttggggatcgtgtcaagcagtggatcaccataaatgaagctaatgttctttctgtgatgtcatatgacttaggtatgtttcctccgggtatccctcactttgggactggaggttatcaggcagctcataatttgattaaggctcatgccagatcctggcacagctatgattccttatttcgaaaaaagcagaaaggtatggtgtctctatcactttttgcggtctggttggaaccagcagatcccaactcagtgtctgaccaggaagctgctaaaagagccatcactttccatctggatttatttgctaaacccatattcatcgatggtgattatcctgaagttgtcaagtctcagattgcctccatgagtcaaaagcaaggctatccatcatcgaggcttccagaattcactgaagaagagaagaaaatgatcaaaggcactgctgatttttttgctgtgcaatattatacaactcgcttaatcaagtaccaggagaacaagaaaggagaactaggtattctccaggatgcggaaattgaattttttccagatccatcttggaaaaatgtggattggatctacgtggtaccatggggagtatgtaaactactgaaatatattaaggatacatataataaccctgtaatttacatcactgagaatgggtttccccagagtgacccagcgcctcttgatgacactcaacgctgggagtatttcagacaaacatttcaggaactgttcaaagctatccaacttgataaagtcaatcttcaagtatattgtgcatggtctcttctggataactttgagtggaaccagggatacagcagccggtttggtctcttccacgttgattttgaagacccagctagaccccgagtcccttacacatcggccaaggaatatgccaagatcatccgaaacaatggccttgaagcacatctgtaggcaagatggctgagaaatacaggagaggcgtctgcttttggaaaggaaatctgctttggtgatgatctttcaggcaatctcaacttacttctttaatcaacatttaatatcaatggatctgtgattaaaaggtctgaatatgtaatgcctcgtgaagtatttaataatggcctttatttgtatttggatcaatgaggtttttaaaaaaaatggaagagaaaaccactaaccttgatttttgtattgcaaaatcagatagacctggaaacataaatttaaatccttagacatttttctagaaaaaaatgcaaagtttataaagatgatacaaccatgatttgcaactgtaacaggagaccatttattataagcgtacctgtttgtgaacttaattattctgattccataagctgtttttgcttaggtgatccactgccatgtgatccataatttttctacataaaaaatcaaagttaaaagtcacattatacagttatgcattcatttcaacaaaatagtgaattgataatctacttgttaatatattcggcccatattttgtgtgtttggacaagtacatctcccttttgcctaatgaacttttgaaaaataataaaataatagaataaattagactttgaatggcaaaaaaagtatttgagtgttgatgttcagtaaaaaacagattcctaatttggcagagtggtgccaaattaaaagctaagtgataagcagggcataatttccacttttgaatgtttctttaaagtttagaaccttaagaacctcatgaaaaaaatacatgaagtgaatgaccaacctcagtgtaagcaaaggtggggtggggatttattaccccggtagttgaaatgtctgagattggtatggggttgactggaattggacattttactgaacttcctaaggtaggggtcaggagtagaggcagggctccttctggcctccatgtctcccctccagcaaacccttcacgtatgtggagtttggtctttcacatccatatttcagtagacttcagtaagcacctagttacccattagactt

SEQ ID NO: 443509 - DNA, 2477 bp, Homo sapiens
tgtccctttacacttgcttggtggagataactcttcccttccatttagaagaaaacgtaggaggctgggatgcagatggaaaaggcccttgtgtctgggacacatttactcatcagggaggagagagagttttcaagaaccagactggcgatgtagcttgtggcagctacactctgtgggaggaagatttgaaatgtatcaaacagcttggattgactcattaccgcttctctctttcctggtcacgtctgttacctgatgggacgacaggtttcatcaaccagaaaggaattgattattacaacaagatcatcgatgatttgttaaaaaatggggttactcccattgtgaccctctaccactttgatttgcctcagactttagaagaccaaggaggttggttgtcagaggcaatcattgaatcctttgacaaatatgctcagttttgcttcagtacctttggggatcgtgtcaagcagtggatcaccataaatgaagctaatgttctttctgtgatgtcatatgacttaggtatgtttcctccgggtatccctcactttgggactggaggttatcaggcagctcataatttgattaaggctcatgccagatcctggcacagctatgattccttatttcgaaaaaagcagaaaggtatggtgtctctatcactttttgcggtctggttggaaccagcagatcccaactcagtgtctgaccaggaagctgctaaaagagccatcactttccatctggatttatttgctaaacccatattcatcgatggtgattatcctgaagttgtcaagtctcagattgcctccatgagtcaaaagcaaggctatccatcatcgaggcttccagaattcactgaagaagagaagaaaatgatcaaaggcactgctgatttttttgctgtgcaatattatacaactcgcttaatcaagtaccaggagaacaagaaaggagaactaggtattctccaggatgcggaaattgaattttttccagatccatcttggaaaaatgtggattggatctacgtggtaccatggggagtatgtaaactactgaaatatattaaggatacatataataaccctgtaatttacatcactgagaatgggtttccccagagtgacccagcgcctcttgatgacactcaacgctgggagtatttcagacaaacatttcaggaactgttcaaagctatccaacttgataaagtcaatcttcaagtatattgtgcatggtctcttctggataactttgagtggaaccagggatacagcagccggtttggtctcttccacgttgattttgaagacccagctagaccccgagtcccttacacatcggccaaggaatatgccaagatcatccgaaacaatggccttgaagcacatctgtaggcaagatggctgagaaatacaggagaggcgtctgcttttggaaaggaaatctgctttggtgatgatctttcaggcaatctcaacttacttctttaatcaacatttaatatcaatggatctgtgattaaaaggtctgaatatgtaatgcctcgtgaagtatttaataatggcctttatttgtatttggatcaatgaggtttttaaaaaaaatggaagagaaaaccactaaccttgatttttgtattgcaaaatcagatagacctggaaacataaatttaaatccttagacatttttctagaaaaaaatgcaaagtttataaagatgatacaaccatgatttgcaactgtaacaggagaccatttattataagcgtacctgtttgtgaacttaattattctgattccataagctgtttttgcttaggtgatccactgccatgtgatccataatttttctacataaaaaatcaaagttaaaagtcacattatacagttatgcattcatttcaacaaaatagtgaattgataatctacttgttaatatattcggcccatattttgtgtgtttggacaagtacatctcccttttgcctaatgaacttttgaaaaataataaaataatagaataaattagactttgaatggcaaaaaaagtatttgagtgttgatgttcagtaaaaaacagattcctaatttggcagagtggtgccaaattaaaagctaagtgataagcagggcataatttccacttttgaatgtttctttaaagtttagaaccttaagaacctcatgaaaaaaatacatgaagtgaatgaccaacctcagtgtaagcaaaggtggggtggggatttattaccccggtagttgaaatgtctgagattggtatggggttgactggaattggacattttactgaacttcctaaggtaggggtcaggagtagaggcagggctccttctggcctccatgtctcccctccagcaaacccttcacgtatgtggagtttggtctttcacatccatatttcagtagacttcagtaagcacctagttacccattagactt

SEQ ID NO: 443510 - DNA, 1657 bp, Homo sapiens
agggtgagagctcattttctgtttgcacaattgcctggctcctctggccaaagggtgctctgcttctggcagctgaagatcccagtagacagcttcttaaaccatggctttccctgcaggatttggatgggcggcagccactgcagcttatcaagtagaaggaggctgggatgcagatggaaaaggcccttgtgtctgggacacatttactcatcagggaggagagagagttttcaagaaccagactggcgatgtagcttgtggcagctacactctgtgggaggaagatttgaaatgtatcaaacagcttggattgactcattaccgcttctctctttcctggtcacgtctgttacctgatgggacgacaggtttcatcaaccagaaagctatccaacttgataaagtcaatcttcaagtatattgtgcatggtctcttctggataactttgagtggaaccagggatacagcagccggtttggtctcttccacgttgattttgaagacccagctagaccccgagtcccttacacatcggccaaggaatatgccaagatcatccgaaacaatggccttgaagcacatctgtaggcaagatggctgagaaatacaggagaggcgtctgcttttggaaaggaaatctgctttggtgatgatctttcaggcaatctcaacttacttctttaatcaacatttaatatcaatggatctgtgattaaaaggtctgaatatgtaatgcctcgtgaagtatttaataatggcctttatttgtatttggatcaatgaggtttttaaaaaaaatggaagagaaaaccactaaccttgatttttgtattgcaaaatcagatagacctggaaacataaatttaaatccttagacatttttctagaaaaaaatgcaaagtttataaagatgatacaaccatgatttgcaactgtaacaggagaccatttattataagcgtacctgtttgtgaacttaattattctgattccataagctgtttttgcttaggtgatccactgccatgtgatccataatttttctacataaaaaatcaaagttaaaagtcacattatacagttatgcattcatttcaacaaaatagtgaattgataatctacttgttaatatattcggcccatattttgtgtgtttggacaagtacatctcccttttgcctaatgaacttttgaaaaataataaaataatagaataaattagactttgaatggcaaaaaaagtatttgagtgttgatgttcagtaaaaaacagattcctaatttggcagagtggtgccaaattaaaagctaagtgataagcagggcataatttccacttttgaatgtttctttaaagtttagaaccttaagaacctcatgaaaaaaatacatgaagtgaatgaccaacctcagtgtaagcaaaggtggggtggggatttattaccccggtagttgaaatgtctgagattggtatggggttgactggaattggacattttactgaacttcctaaggtaggggtcaggagtagaggcagggctccttctggcctccatgtctcccctccagcaaacccttcacgtatgtggagtttggtctttcacatccatatttcagtagacttcagtaagcacctagttacccattagactt

SEQ ID NO: 443511 - DNA, 1322 bp, Homo sapiens
ctcttcgttcttcatcctctcctaataggaaaagtgaagtgttcactgtaacccctatccaacttgataaagtcaatcttcaagtatattgtgcatggtctcttctggataactttgagtggaaccagggatacagcagccggtttggtctcttccacgttgattttgaagacccagctagaccccgagtcccttacacatcggccaaggaatatgccaagatcatccgaaacaatggccttgaagcacatctgtaggcaagatggctgagaaatacaggagaggcgtctgcttttggaaaggaaatctgctttggtgatgatctttcaggcaatctcaacttacttctttaatcaacatttaatatcaatggatctgtgattaaaaggtctgaatatgtaatgcctcgtgaagtatttaataatggcctttatttgtatttggatcaatgaggtttttaaaaaaaatggaagagaaaaccactaaccttgatttttgtattgcaaaatcagatagacctggaaacataaatttaaatccttagacatttttctagaaaaaaatgcaaagtttataaagatgatacaaccatgatttgcaactgtaacaggagaccatttattataagcgtacctgtttgtgaacttaattattctgattccataagctgtttttgcttaggtgatccactgccatgtgatccataatttttctacataaaaaatcaaagttaaaagtcacattatacagttatgcattcatttcaacaaaatagtgaattgataatctacttgttaatatattcggcccatattttgtgtgtttggacaagtacatctcccttttgcctaatgaacttttgaaaaataataaaataatagaataaattagactttgaatggcaaaaaaagtatttgagtgttgatgttcagtaaaaaacagattcctaatttggcagagtggtgccaaattaaaagctaagtgataagcagggcataatttccacttttgaatgtttctttaaagtttagaaccttaagaacctcatgaaaaaaatacatgaagtgaatgaccaacctcagtgtaagcaaaggtggggtggggatttattaccccggtagttgaaatgtctgagattggtatggggttgactggaattggacattttactgaacttcctaaggtaggggtcaggagtagaggcagggctccttctggcctccatgtctcccctccagcaaacccttcacgtatgtggagtttggtctttcacatccatatttcagtagacttcagtaagcacctagttacccattagactt

SEQ ID NO: 443512 - DNA, 1434 bp, Homo sapiens
tgaagacttcactgaaagtgttgaagctgatacattgtaacaagaaggttataaatcttgcagcttggatataccaccaagacaagatgctgagcacagaatcaccctgctgttgtctgtcagcattctccctccctctacgtctttcccttcccacggagagcagctatccaacttgataaagtcaatcttcaagtatattgtgcatggtctcttctggataactttgagtggaaccagggatacagcagccggtttggtctcttccacgttgattttgaagacccagctagaccccgagtcccttacacatcggccaaggaatatgccaagatcatccgaaacaatggccttgaagcacatctgtaggcaagatggctgagaaatacaggagaggcgtctgcttttggaaaggaaatctgctttggtgatgatctttcaggcaatctcaacttacttctttaatcaacatttaatatcaatggatctgtgattaaaaggtctgaatatgtaatgcctcgtgaagtatttaataatggcctttatttgtatttggatcaatgaggtttttaaaaaaaatggaagagaaaaccactaaccttgatttttgtattgcaaaatcagatagacctggaaacataaatttaaatccttagacatttttctagaaaaaaatgcaaagtttataaagatgatacaaccatgatttgcaactgtaacaggagaccatttattataagcgtacctgtttgtgaacttaattattctgattccataagctgtttttgcttaggtgatccactgccatgtgatccataatttttctacataaaaaatcaaagttaaaagtcacattatacagttatgcattcatttcaacaaaatagtgaattgataatctacttgttaatatattcggcccatattttgtgtgtttggacaagtacatctcccttttgcctaatgaacttttgaaaaataataaaataatagaataaattagactttgaatggcaaaaaaagtatttgagtgttgatgttcagtaaaaaacagattcctaatttggcagagtggtgccaaattaaaagctaagtgataagcagggcataatttccacttttgaatgtttctttaaagtttagaaccttaagaacctcatgaaaaaaatacatgaagtgaatgaccaacctcagtgtaagcaaaggtggggtggggatttattaccccggtagttgaaatgtctgagattggtatggggttgactggaattggacattttactgaacttcctaaggtaggggtcaggagtagaggcagggctccttctggcctccatgtctcccctccagcaaacccttcacgtatgtggagtttggtctttcacatccatatttcagtagacttcagtaagcacctagttacccattagactt

SEQ ID NO: 443513 - DNA, 1656 bp, Homo sapiens
agggtgagagctcattttctgtttgcacaattgcctggctcctctggccaaagggtgctctgcttctggcagctgaagatcccagtagacagcttcttaaaccatggctttccctgcaggatttggatgggcggcagccactgcagcttatcaagtagaaggaggctgggatgcagatggaaaaggcccttgtgtctgggacacatttactcatcagggaggagagagagttttcaagaaccagactggcgatgtagcttgtggcagctacactctgtgggaggaagatttgaaatgtatcaaacagcttggattgactcattaccgcttctctctttcctggtcacgtctgttacctgatgggacgacaggtttcatcaaccagaaaggaattgattattacaacaagatcatcgatgatttgttaaaaaatggggttactcccattgtgaccctctaccactttgatttgcctcagactttagaagaccaaggaggttggttgtcagaggcaatcattgaatcctttgacaaatatgctcagttttgcttcagtacctttggggatcgtgtcaagcagtggatcaccataaatgaagctaatgttctttctgtgatgtcatatgacttaggtatgtttcctccgggtatccctcactttgggactggaggttatcaggcagctcataatttgattaaggctcatgccagatcctggcacagctatgattccttatttcgaaaaaagcagaaaggtatggtgtctctatcactttttgcggtctggttggaaccagcagatcccaactcagtgtctgaccaggaagctgctaaaagagccatcactttccatctggatttatttgctaaacccatattcatcgatggtgattatcctgaagttgtcaagtctcagattgcctccatgagtcaaaagcaaggctatccatcatcgaggcttccagaattcactgaagaagagaagaaaatgatcaaaggcactgctgatttttttgctgtgcaatattatacaactcgcttaatcaagtaccaggagaacaagaaaggagaactaggtattctccaggatgcggaaattgaattttttccagatccatcttggaaaaatgtggattggatctacgtggtaccatggggagtatgtaaactactgaaatatattaaggatacatataataaccctgtaatttacatcactgagaatgggtttccccagagtgacccagcgcctcttgatgacactcaacgctgggagtatttcagacaaacatttcaggaactgttcaaagctatccaacttgataaagtcaatcttcaagtatattgtgcatggtctcttctggataactttgagtggaaccagggatacagcagccggtttggtctcttccacgttgattttgaagacccagctagaccccgagtcccttacacatcggccaaggaatatgccaagatcatccgaaacaatggccttgaagcacatctgtaggcaagatggctgagaaatacaggagaggcgtctgcttttggaaaggaaatctgctttggtgatgatctttcaggcaatctcaacttacttctttaatcaacatttaatatcaatggatctgtgattaaaaggtctgaatatgt

SEQ ID NO: 443514 - DNA, 1323 bp, Homo sapiens
ccaccgtctgcgtcacccggatgcccaacgctcgtcttaacacgcgaaaggcctgctatccaacttgataaagtcaatcttcaagtatattgtgcatggtctcttctggataactttgagtggaaccagggatacagcagccggtttggtctcttccacgttgattttgaagacccagctagaccccgagtcccttacacatcggccaaggaatatgccaagatcatccgaaacaatggccttgaagcacatctgtaggcaagatggctgagaaatacaggagaggcgtctgcttttggaaaggaaatctgctttggtgatgatctttcaggcaatctcaacttacttctttaatcaacatttaatatcaatggatctgtgattaaaaggtctgaatatgtaatgcctcgtgaagtatttaataatggcctttatttgtatttggatcaatgaggtttttaaaaaaaatggaagagaaaaccactaaccttgatttttgtattgcaaaatcagatagacctggaaacataaatttaaatccttagacatttttctagaaaaaaatgcaaagtttataaagatgatacaaccatgatttgcaactgtaacaggagaccatttattataagcgtacctgtttgtgaacttaattattctgattccataagctgtttttgcttaggtgatccactgccatgtgatccataatttttctacataaaaaatcaaagttaaaagtcacattatacagttatgcattcatttcaacaaaatagtgaattgataatctacttgttaatatattcggcccatattttgtgtgtttggacaagtacatctcccttttgcctaatgaacttttgaaaaataataaaataatagaataaattagactttgaatggcaaaaaaagtatttgagtgttgatgttcagtaaaaaacagattcctaatttggcagagtggtgccaaattaaaagctaagtgataagcagggcataatttccacttttgaatgtttctttaaagtttagaaccttaagaacctcatgaaaaaaatacatgaagtgaatgaccaacctcagtgtaagcaaaggtggggtggggatttattaccccggtagttgaaatgtctgagattggtatggggttgactggaattggacattttactgaacttcctaaggtaggggtcaggagtagaggcagggctccttctggcctccatgtctcccctccagcaaacccttcacgtatgtggagtttggtctttcacatccatatttcagtagacttcagtaagcacctagttacccattagactt

SEQ ID NO: 443515 - DNA, 1319 bp, Homo sapiens
  misc_feature (44)..(45): n is a, c, g, or t
cagccgatgcacctcacgtattgcctcggtgttcacccaggggnnccttcgctatccaacttgataaagtcaatcttcaagtatattgtgcatggtctcttctggataactttgagtggaaccagggatacagcagccggtttggtctcttccacgttgattttgaagacccagctagaccccgagtcccttacacatcggccaaggaatatgccaagatcatccgaaacaatggccttgaagcacatctgtaggcaagatggctgagaaatacaggagaggcgtctgcttttggaaaggaaatctgctttggtgatgatctttcaggcaatctcaacttacttctttaatcaacatttaatatcaatggatctgtgattaaaaggtctgaatatgtaatgcctcgtgaagtatttaataatggcctttatttgtatttggatcaatgaggtttttaaaaaaaatggaagagaaaaccactaaccttgatttttgtattgcaaaatcagatagacctggaaacataaatttaaatccttagacatttttctagaaaaaaatgcaaagtttataaagatgatacaaccatgatttgcaactgtaacaggagaccatttattataagcgtacctgtttgtgaacttaattattctgattccataagctgtttttgcttaggtgatccactgccatgtgatccataatttttctacataaaaaatcaaagttaaaagtcacattatacagttatgcattcatttcaacaaaatagtgaattgataatctacttgttaatatattcggcccatattttgtgtgtttggacaagtacatctcccttttgcctaatgaacttttgaaaaataataaaataatagaataaattagactttgaatggcaaaaaaagtatttgagtgttgatgttcagtaaaaaacagattcctaatttggcagagtggtgccaaattaaaagctaagtgataagcagggcataatttccacttttgaatgtttctttaaagtttagaaccttaagaacctcatgaaaaaaatacatgaagtgaatgaccaacctcagtgtaagcaaaggtggggtggggatttattaccccggtagttgaaatgtctgagattggtatggggttgactggaattggacattttactgaacttcctaaggtaggggtcaggagtagaggcagggctccttctggcctccatgtctcccctccagcaaacccttcacgtatgtggagtttggtctttcacatccatatttcagtagacttcagtaagcacctagttacccattagactt

SEQ ID NO: 443516 - DNA, 408 bp, Homo sapiens
tgaactccatgttctactcagtcctacacagagcaccccaactggcgctggctggtcaacacctatccaacttgataaagtcaatcttcaagtatattgtgcatggtctcttctggataactttgagtggaaccagggatacagcagccggtttggtctcttccacgttgattttgaagacccagctagaccccgagtcccttacacatcggccaaggaatatgccaagatcatccgaaacaatggccttgaagcacatctgtaggcaagatggctgagaaatacaggagaggcgtctgcttttggaaaggaaatctgctttggtgatgatctttcaggcaatctcaacttacttctttaatcaacatttaatatcaatggatctgtgattaaaaggtctgaatatgt

SEQ ID NO: 443517 - DNA, 1961 bp, Homo sapiens
  misc_feature (143)..(143): n is a, c, g, or t
tactagatcattcggtcaggcgcgaggctgcagtaggtatgtgaccttgttcctaactgtgcccaaagatatcctgtctcatgacatcattgctggggattttcgtcattgcaaatacagaaagcgatccgcgacgcgtcaantgcgtacgtgcagtcacgtgaagcacatgactctcagagtgaggacgcattcatgcatgtgtctcattcatgctgagtatactactgcactacaggcagcattcatagcacgtagactgcgatgtatcaatacttgagacctcgtccccgtctcagattgcctccatgagtcaaaagcaaggctatccatcatcgaggcttccagaattcactgaagaagagaagaaaatgatcaaaggcactgctgatttttttgctgtgcaatattatacaactcgcttaatcaagtaccaggagaacaagaaaggagaactaggtattctccaggatgcggaaattgaattttttccagatccatcttggaaaaatgtggattggatctacgtggtaccatggggagtatgtaaactactgaaatatattaaggatacatataataaccctgtaatttacatcactgagaatgggtttccccagagtgacccagcgcctcttgatgacactcaacgctgggagtatttcagacaaacatttcaggaactgttcaaagctatccaacttgataaagtcaatcttcaagtatattgtgcatggtctcttctggataactttgagtggaaccagggatacagcagccggtttggtctcttccacgttgattttgaagacccagctagaccccgagtcccttacacatcggccaaggaatatgccaagatcatccgaaacaatggccttgaagcacatctgtaggcaagatggctgagaaatacaggagaggcgtctgcttttggaaaggaaatctgctttggtgatgatctttcaggcaatctcaacttacttctttaatcaacatttaatatcaatggatctgtgattaaaaggtctgaatatgtaatgcctcgtgaagtatttaataatggcctttatttgtatttggatcaatgaggtttttaaaaaaaatggaagagaaaaccactaaccttgatttttgtattgcaaaatcagatagacctggaaacataaatttaaatccttagacatttttctagaaaaaaatgcaaagtttataaagatgatacaaccatgatttgcaactgtaacaggagaccatttattataagcgtacctgtttgtgaacttaattattctgattccataagctgtttttgcttaggtgatccactgccatgtgatccataatttttctacataaaaaatcaaagttaaaagtcacattatacagttatgcattcatttcaacaaaatagtgaattgataatctacttgttaatatattcggcccatattttgtgtgtttggacaagtacatctcccttttgcctaatgaacttttgaaaaataataaaataatagaataaattagactttgaatggcaaaaaaagtatttgagtgttgatgttcagtaaaaaacagattcctaatttggcagagtggtgccaaattaaaagctaagtgataagcagggcataatttccacttttgaatgtttctttaaagtttagaaccttaagaacctcatgaaaaaaatacatgaagtgaatgaccaacctcagtgtaagcaaaggtggggtggggatttattaccccggtagttgaaatgtctgagattggtatggggttgactggaattggacattttactgaacttcctaaggtaggggtcaggagtagaggcagggctccttctggcctccatgtctcccctccagcaaacccttcacgtatgtggagtttggtctttcacatccatatttcagtagacttcagtaagcacctagttacccattagactt

SEQ ID NO: 443518 - DNA, 1343 bp, Homo sapiens
  misc_feature (34)..(34): n is a, c, g, or t
tccttatcaccctttcttccgtccttctcttttngtttgttgatgctgcaccgtaggtcgcgtttgttttcccccctatccaacttgataaagtcaatcttcaagtatattgtgcatggtctcttctggataactttgagtggaaccagggatacagcagccggtttggtctcttccacgttgattttgaagacccagctagaccccgagtcccttacacatcggccaaggaatatgccaagatcatccgaaacaatggccttgaagcacatctgtaggcaagatggctgagaaatacaggagaggcgtctgcttttggaaaggaaatctgctttggtgatgatctttcaggcaatctcaacttacttctttaatcaacatttaatatcaatggatctgtgattaaaaggtctgaatatgtaatgcctcgtgaagtatttaataatggcctttatttgtatttggatcaatgaggtttttaaaaaaaatggaagagaaaaccactaaccttgatttttgtattgcaaaatcagatagacctggaaacataaatttaaatccttagacatttttctagaaaaaaatgcaaagtttataaagatgatacaaccatgatttgcaactgtaacaggagaccatttattataagcgtacctgtttgtgaacttaattattctgattccataagctgtttttgcttaggtgatccactgccatgtgatccataatttttctacataaaaaatcaaagttaaaagtcacattatacagttatgcattcatttcaacaaaatagtgaattgataatctacttgttaatatattcggcccatattttgtgtgtttggacaagtacatctcccttttgcctaatgaacttttgaaaaataataaaataatagaataaattagactttgaatggcaaaaaaagtatttgagtgttgatgttcagtaaaaaacagattcctaatttggcagagtggtgccaaattaaaagctaagtgataagcagggcataatttccacttttgaatgtttctttaaagtttagaaccttaagaacctcatgaaaaaaatacatgaagtgaatgaccaacctcagtgtaagcaaaggtggggtggggatttattaccccggtagttgaaatgtctgagattggtatggggttgactggaattggacattttactgaacttcctaaggtaggggtcaggagtagaggcagggctccttctggcctccatgtctcccctccagcaaacccttcacgtatgtggagtttggtctttcacatccatatttcagtagacttcagtaagcacctagttacccattagactt

SEQ ID NO: 443519 - DNA, 1719 bp, Homo sapiens
gggcgggaggcggctgaggcctggcgagaattccagcgtggcaggtgtggaccggcagtgctgggggacccagcgcaccctccacagctgctggccgggtgctaacctcctcactgcccagggctggccgcagcagccggctgttccgagtgtggggcctgctgagcccacatccacccggaactcgcgctggcccgcgagtgccctgcgcccgcgcctcttcctccacacctccccgcaagcagagggagccggctccagcctcagccagtccagagaggggctcacacagtgcagggactggccaaagggctcctcaagtacggccagagtggacgctgaggctgaggaggcgccgagagctagccaggtctgctagcacgttgtcacctctcagtaggaactgggcttctagttccattacccaaatagtgaacattatacctgattgctatccaacttgataaagtcaatcttcaagtatattgtgcatggtctcttctggataactttgagtggaaccagggatacagcagccggtttggtctcttccacgttgattttgaagacccagctagaccccgagtcccttacacatcggccaaggaatatgccaagatcatccgaaacaatggccttgaagcacatctgtaggcaagatggctgagaaatacaggagaggcgtctgcttttggaaaggaaatctgctttggtgatgatctttcaggcaatctcaacttacttctttaatcaacatttaatatcaatggatctgtgattaaaaggtctgaatatgtaatgcctcgtgaagtatttaataatggcctttatttgtatttggatcaatgaggtttttaaaaaaaatggaagagaaaaccactaaccttgatttttgtattgcaaaatcagatagacctggaaacataaatttaaatccttagacatttttctagaaaaaaatgcaaagtttataaagatgatacaaccatgatttgcaactgtaacaggagaccatttattataagcgtacctgtttgtgaacttaattattctgattccataagctgtttttgcttaggtgatccactgccatgtgatccataatttttctacataaaaaatcaaagttaaaagtcacattatacagttatgcattcatttcaacaaaatagtgaattgataatctacttgttaatatattcggcccatattttgtgtgtttggacaagtacatctcccttttgcctaatgaacttttgaaaaataataaaataatagaataaattagactttgaatggcaaaaaaagtatttgagtgttgatgttcagtaaaaaacagattcctaatttggcagagtggtgccaaattaaaagctaagtgataagcagggcataatttccacttttgaatgtttctttaaagtttagaaccttaagaacctcatgaaaaaaatacatgaagtgaatgaccaacctcagtgtaagcaaaggtggggtggggatttattaccccggtagttgaaatgtctgagattggtatggggttgactggaattggacattttactgaacttcctaaggtaggggtcaggagtagaggcagggctccttctggcctccatgtctcccctccagcaaacccttcacgtatgtggagtttggtctttcacatccatatttcagtagacttcagtaagcacctagttacccattagactt

SEQ ID NO: 443520 - DNA, 509 bp, Homo sapiens
agagagtgagaagaagccggtgagtgcagcagcacgcagctccaatttcaacgtctcaaatttgatttctcattgaagaacacaaagaccctcaacaaatggagttgccctttttcttattatcgtttaaacaaggacatcagggaacagtttacaaatgggtgacattctcaatgtgccctttagaaaaaagggatggctttgagttatctgcagctggcattttaaagtgggattttcttttctaaccgaaattcttttgcccaagatttgactgcttctgctcaggggtgacatggcattcatgggaatagtggggatgacgcctgctcctgtttggttttgtgtggatgccggtggaggtgagacaagccttctgagggtgccagtgcacgttggtggtttccattccgatcctctgtccctcaggtcccaactgtctcccagtggctgagccccaggcccaaacacctccctgcaaaacgtgacacctgcaagtgtggaaggca

SEQ ID NO: 443521 - DNA, 1203 bp, Homo sapiens
gagagccggcgcgtcattgtcgtcatcgttgcccgaccgctttccgggagactggagtcgaaggccgtgaggtatttttctaagtcagccataatggcaggtgaagaaattaatgaagactatccagtagaaattcacgagtatttgtcagcgtttgagaattccattggtgctgtggatgagatgctgaagaccatgatgtctgtttctagaaatgagttgttgcagaagttggatccacttgaacaagcaaaagtggatttggtttctgcatacacattaaattcaatgttttgggtttatttggcaacccaaggagttaatcctaaggaacatccagtaaaacaggaattggaaagaatcagagtatatatgaacagagtcaaggaaataacagacaagaaaaaggctggcaagctggacagaggtgcagcttcaagatttgtaaaaaatgccctctgggaaccaaaatcgaaaaatgcatcaaaagttgccaataaaggaaaaagtaaaagttaactttttggttttgatgtacacatattcaaaaagtacatctttccccccccccccccccgcaaaataattctgtggcagggcaaggtttaaatgtgtttcttattaatatgtaaattcacagtaaatatgtaaagctaaatactttcctctccaaagatcattatctttattgattagcactgaggattttaacattgtgatatattatatatttataatttaccatctcttgatgagactcttatttctttatataggtcagtcttgcaagtaccattttataagcagctgtgaaatttaagtgaaatgttctttgtaaacatttgtactattttaaatgaataatgaccttatgaagtatgctatctgtaggctgaaattataggtacatctgttttcactatatgatattaagaaagcgtgaaatgacttaaatgttcatttttttctgtatagatactttatcatgttttcatgattttaggaattactgctttgttgatattcaaagtgtgaaactaaaactttatggttgtactttaattcttggcatgttgcctctatgtcccatttaaaataaaatacattctcattaactttagatgggaaataaggttgtatgttgatggatgaattttggcatgatgactgtactctcaataaaggctgaaaatgttgtataac

SEQ ID NO: 443522 - DNA, 1575 bp, Homo sapiens
gagagccggcgcgtcattgtcgtcatcgttgcccgaccgctttccgggagactggagtcgaaggccgtgaggtatttttctaagtcagccataatggcaggtgaagaaattaatgaagactatccagtagaaattcacgagtatttgtcagcgtttgagaattccattggtgctgtggatgagatgctgaagaccatgatgtctgtttctagaaatgagttgttgcagaagttggatccacttgaacaagcaaaagtggatttggtttctgcatacacattaaattcaatgttttgggtttatttggcaacccaaggagttaatcctaaggaacatccagtaaaacaggaattggaaagaatcagagtatatatgaacagagtcaaggaaataacagacaagaaaaaggctggcaagctggacagaggtgcagcttcaagatttgtaaaaaatgccctctgggaaccaaaatcgaaaaatgcatcaaaagttgccaataaaggaaaaagtaaaagttaactttttggttttgatgtacacatattcaaaaagtacatctttccccccccccccccccgcaaaataattctgtggcagggcaaggtttaaatgtgtttcttattaatatgtaaattcacagtaaatatgtaaagctaaatactttcctctccaaagatcattatctttattgattagcactgaggattttaacattgtgatatattatatatttataatttaccatctcttgatgagactcttatttctttatataggtcagtcttgcaagtaccattttataagcagctgtgaaatttaagtgaaatgttctttgtaaacatttgtactattttaaatgaataatgaccttatgaagtatgctatctgtaggctgaaattataggtacatctgttttcactatatgatattaagaaagcgtgaaatgacttaaatgttcatttttttctgtatagatactttatcatgttttcatgattttaggaattactgctttgttgatattcaaagtgtgaaactaaaactttatggttgtactttaattcttggcatgttgcctctatgtcccatttaaaataaaatacattctcattaactttagatgggaaataaggttgtatgttgatggatgaattttggcatgatgactgtactctcaataaaggctgaaaatgttgtataactaaagaaagaagcaacataaaaaaaatgccaaggaagcagtgtggggggaacttcgggccctggaaaagagtttttaagcaaggaacggggggggggcgggggccccattagaggatagtggggacccttggggggattaagcgggggtccacagaaggagaaaagccctgggggccacaggacaagggggcgcgagagggaataccccacaccaagtaaaaaaaaaggccgcgggggggggacaccgcacacgctgttctgggaacaaaattccccaaaaatgggagagccagagaggggcagacacaacaggggaatttcatacccacacagggggggacccacagagggaggccggaatataaaattcg

SEQ ID NO: 443523 - DNA, 1150 bp, Homo sapiens
gagagccggcgcgtcattgtcgtcatcgttgcccgaccgctttccgggagactggagtcgaaggccgtgaggtatttttctaagtcagccataatggcaggtgaagaaattaatgaagactatccagtagaaattcacgagtatttgtcagcgtttgagaattccattggtgctgtggatgagatgctgaagaccatgatgtctgtttctagaaatgagttgttgcagaagttggatccacttgaacaagcaaaagtggatttggtttctgcatacacattaaattcaatgttttgggtttatttggcaacccaaggagttaatcctaaggaacatccagtaaaacaggaattggaaagaatcagagtatatatgaacagagtcaaggaaataacagacaagaaaaaggctggcaagctggacagaggtgcagcttcaagatttgtaaaaaatgccctctgggaaccaaaatcgaaaaatgcatcaaaagttgccaataaaggaaaaagtaaaagttaactttttggttttgatgtacacatattcaaaaagtacatctttcctcttattaatatgtaaattcacagtaaatatgtaaagctaaatactttcctctccaaagatcattatctttattgattagcactgaggattttaacattgtgatatattatatatttataatttaccatctcttgatgagactcttatttctttatataggtcagtcttgcaagtaccattttataagcagctgtgaaatttaagtgaaatgttctttgtaaacatttgtactattttaaatgaataatgaccttatgaagtatgctatctgtaggctgaaattataggtacatctgttttcactatatgatattaagaaagcgtgaaatgacttaaatgttcatttttttctgtatagatactttatcatgttttcatgattttaggaattactgctttgttgatattcaaagtgtgaaactaaaactttatggttgtactttaattcttggcatgttgcctctatgtcccatttaaaataaaatacattctcattaactttagatgggaaataaggttgtatgttgatggatgaattttggcatgatgactgtactctcaataaaggctgaaaatgttgtataac

SEQ ID NO: 443524 - DNA, 1091 bp, Homo sapiens
gagagccggcgcgtcattgtcgtcatcgttgcccgaccgctttccgggagactggagtcgaaggccgtgaggtatttttctaagtcagccataatggcaggtgaagaaattaatgaagactatccagtagaaattcacgagtatttgtcagcgtttgagaattccattggtgctgtggatgagatgctgaagaccatgatgtctgtttctagaaatgagttgttgcagaagttggatccacttgaacaagcaaaagtggatttggtttctgcatacacattaaattcaatgttttgggtttatttggcaacccaaggagttaatcctaaggaacatccagtaaaacaggaattggaaagaatcagagtatatatgaacagagtcaaggaaataacagacaagaaaaaggctggcaagctggacagaggtgcagcttcaagatttgtaaaaaatgccctctgggaaccaaaatcgaaaaatgcatcaaaagttgccaataaaggaaaaagtaaaagttaactttttggttttgatgtacacatattcaaaaagtacatctttccatcattatctttattgattagcactgaggattttaacattgtgatatattatatatttataatttaccatctcttgatgagactcttatttctttatataggtcagtcttgcaagtaccattttataagcagctgtgaaatttaagtgaaatgttctttgtaaacatttgtactattttaaatgaataatgaccttatgaagtatgctatctgtaggctgaaattataggtacatctgttttcactatatgatattaagaaagcgtgaaatgacttaaatgttcatttttttctgtatagatactttatcatgttttcatgattttaggaattactgctttgttgatattcaaagtgtgaaactaaaactttatggttgtactttaattcttggcatgttgcctctatgtcccatttaaaataaaatacattctcattaactttagatgggaaataaggttgtatgttgatggatgaattttggcatgatgactgtactctcaataaaggctgaaaatgttgtataac

SEQ ID NO: 443525 - DNA, 1155 bp, Homo sapiens
cgggctgcaggaattcggcacgaggaaggccgtgagtcagccataatggcaggtgaagaaattaatgaagactatccagtagaaattcacgagtatttgtcagcgtttgagaattccattggtgctgtggatgagatgctgaagaccatgatgtctgtttctagaaatgagttgttgcagaagttggatccacttgaacaagcaaaagtggatttggtttctgcatacacattaaattcaatgttttgggtttatttggcaacccaaggagttaatcctaaggaacatccagtaaaacaggaattggaaagaatcagagtatatatgaacagagtcaaggaaataacagacaagaaaaaggctggcaagctggacagaggtgcagcttcaagatttgtaaaaaatgccctctgggaaccaaaatcgaaaaatgcatcaaaagttgccaataaaggaaaaagtaaaagttaactttttggttttgatgtacacatattcaaaaagtacatctttccccccccccccccccgcaaaataattctgtggcagggcaaggtttaaatgtgtttcttattaatatgtaaattcacagtaaatatgtaaagctaaatactttcctctccaaagatcattatctttattgattagcactgaggattttaacattgtgatatattatatatttataatttaccatctcttgatgagactcttatttctttatataggtcagtcttgcaagtaccattttataagcagctgtgaaatttaagtgaaatgttctttgtaaacatttgtactattttaaatgaataatgaccttatgaagtatgctatctgtaggctgaaattataggtacatctgttttcactatatgatattaagaaagcgtgaaatgacttaaatgttcatttttttctgtatagatactttatcatgttttcatgattttaggaattactgctttgttgatattcaaagtgtgaaactaaaactttatggttgtactttaattcttggcatgttgcctctatgtcccatttaaaataaaatacattctcattaactttagatgggaaataaggttgtatgttgatggatgaattttggcatgatgactgtactctcaataaaggctgaaaatgttgtataac

SEQ ID NO: 443526 - DNA, 625 bp, Homo sapiens
gagagccggcgcgtcattgtcgtcatcgttgcccgaccgctttccgggagactggagtcgaaggccgtgaggtatttttctaagtcagccataatggcaggtgaagaaattaatgaagactatccagtagaaattcacgagtatttgtcagcgtttgagaattccattggtgctgtggatgagatgctgaagaccatgatgtctgtttctagaaatgagttgttgcagaagttggatccacttgaacaagcaaaagtggatttggtttctgcatacacattaaattcaatgttttgggtttatttggcaacccaaggagttaatcctaaggaacatccagtaaaacaggaattggaaagaatcagagtatatatgaacagagtcaaggaaataacagacaagaaaaaggctggcaagctggacagaggtgcagcttcaagatttgtaaaaaatgccctctgggaaccaaaatcgaaaaatgcatcaaaagttgccaataaaggaaaaagtaaaagttaactttttgattctcattaactttagatgggaaataaggttgtatgttgatggatgaattttggcatgatgactgtactctcaataaaggctgaaaatgttgtataac

SEQ ID NO: 443527 - DNA, 715 bp, Homo sapiens
  misc_feature (62)..(62): n is a, c, g, or t
  misc_feature (102)..(102): n is a, c, g, or t
tgagatgtagccgagaccgtgccactgcctccagcctgggcaacacagcgagactccgtctnagtgaaaaaaaaaagaaaagatacgtgcctgcggtgaggnagctgggcgcatgttttcgagttcagtcttattaatatgtaaattcacagtaaatatgtaaagctaaatactttcctctccaaagatcattatctttattgattagcactgaggattttaacattgtgatatattatatatttataatttaccatctcttgatgagactcttatttctttatataggtcagtcttgcaagtaccattttataagcagctgtgaaatttaagtgaaatgttctttgtaaacatttgtactattttaaatgaataatgaccttatgaagtatgctatctgtaggctgaaattataggtacatctgttttcactatatgatattaagaaagcgtgaaatgacttaaatgttcatttttttctgtatagatactttatcatgttttcatgattttaggaattactgctttgttgatattcaaagtgtgaaactaaaactttatggttgtactttaattcttggcatgttgcctctatgtcccatttaaaataaaatacattctcattaactttagatgggaaataaggttgtatgttgatggatgaattttggcatgatgactgtactctcaataaaggctgaaaatgttgtataac

SEQ ID NO: 443528 - DNA, 444 bp, Homo sapiens
aaaattgataatagggacactactcaaaggctgttgaaataatctagtcagtgagaatagaggaaagcttgtggtgtaaggagattaagggagccatattgacaggactgattggatttggggtgcctcccaggtttctgcctggattggccaccctgaagtggagaattaaaggaaagaggtagctgatgacttcagttctgtatgtgatgctatgcactcttgttttctcctatcggtactttggcttctgtataaccagtgagaggaaggactgagtggcagtaacatctgttagggttactgggcagcatccccgcaacccaggtactcagtctcagccacaccttactgagtggtgaagagaagcaagttttctcatgccctctccgtctgtctctacctctgcagccagtgttttagaaggagtatgtggaagggcaa

SEQ ID NO: 443529 - DNA, 1280 bp, Homo sapiens
gagagccggcgcgtcattgtcgtcatcgttgcccgaccgctttccgggagactggagtcgaaggccgtgaggtatttttctaagccagtgttttagaaggagtatgtggaagggcaaggagtacctatagaaccccggaggagggtgaggagcagagctggtcagccataatggcaggtgaagaaattaatgaagactatccagtagaaattcacgagtatttgtcagcgtttgagaattccattggtgctgtggatgagatgctgaagaccatgatgtctgtttctagaaatgagttgttgcagaagttggatccacttgaacaagcaaaagtggatttggtttctgcatacacattaaattcaatgttttgggtttatttggcaacccaaggagttaatcctaaggaacatccagtaaaacaggaattggaaagaatcagagtatatatgaacagagtcaaggaaataacagacaagaaaaaggctggcaagctggacagaggtgcagcttcaagatttgtaaaaaatgccctctgggaaccaaaatcgaaaaatgcatcaaaagttgccaataaaggaaaaagtaaaagttaactttttggttttgatgtacacatattcaaaaagtacatctttccccccccccccccccgcaaaataattctgtggcagggcaaggtttaaatgtgtttcttattaatatgtaaattcacagtaaatatgtaaagctaaatactttcctctccaaagatcattatctttattgattagcactgaggattttaacattgtgatatattatatatttataatttaccatctcttgatgagactcttatttctttatataggtcagtcttgcaagtaccattttataagcagctgtgaaatttaagtgaaatgttctttgtaaacatttgtactattttaaatgaataatgaccttatgaagtatgctatctgtaggctgaaattataggtacatctgttttcactatatgatattaagaaagcgtgaaatgacttaaatgttcatttttttctgtatagatactttatcatgttttcatgattttaggaattactgctttgttgatattcaaagtgtgaaactaaaactttatggttgtactttaattcttggcatgttgcctctatgtcccatttaaaataaaatacattctcattaactttagatgggaaataaggttgtatgttgatggatgaattttggcatgatgactgtactctcaataaaggctgaaaatgttgtataac

SEQ ID NO: 443530 - DNA, 1227 bp, Homo sapiens
gagagccggcgcgtcattgtcgtcatcgttgcccgaccgctttccgggagactggagtcgaaggccgtgaggtatttttctaagccagtgttttagaaggagtatgtggaagggcaaggagtacctatagaaccccggaggagggtgaggagcagagctggtcagccataatggcaggtgaagaaattaatgaagactatccagtagaaattcacgagtatttgtcagcgtttgagaattccattggtgctgtggatgagatgctgaagaccatgatgtctgtttctagaaatgagttgttgcagaagttggatccacttgaacaagcaaaagtggatttggtttctgcatacacattaaattcaatgttttgggtttatttggcaacccaaggagttaatcctaaggaacatccagtaaaacaggaattggaaagaatcagagtatatatgaacagagtcaaggaaataacagacaagaaaaaggctggcaagctggacagaggtgcagcttcaagatttgtaaaaaatgccctctgggaaccaaaatcgaaaaatgcatcaaaagttgccaataaaggaaaaagtaaaagttaactttttggttttgatgtacacatattcaaaaagtacatctttcctcttattaatatgtaaattcacagtaaatatgtaaagctaaatactttcctctccaaagatcattatctttattgattagcactgaggattttaacattgtgatatattatatatttataatttaccatctcttgatgagactcttatttctttatataggtcagtcttgcaagtaccattttataagcagctgtgaaatttaagtgaaatgttctttgtaaacatttgtactattttaaatgaataatgaccttatgaagtatgctatctgtaggctgaaattataggtacatctgttttcactatatgatattaagaaagcgtgaaatgacttaaatgttcatttttttctgtatagatactttatcatgttttcatgattttaggaattactgctttgttgatattcaaagtgtgaaactaaaactttatggttgtactttaattcttggcatgttgcctctatgtcccatttaaaataaaatacattctcattaactttagatgggaaataaggttgtatgttgatggatgaattttggcatgatgactgtactctcaataaaggctgaaaatgttgtataac

SEQ ID NO: 443531 - DNA, 1429 bp, Homo sapiens
gagagccggcgcgtcattgtcgtcatcgttgcccgaccgctttccgggagactggagtcgaaggccgtgaggtatttttctaagtgagaggaaggactgagtggcagtaacatctgttagggttactgggcagcatccccgcaacccaggtactcagtctcagccacaccttactgagtggtgaagagaagcaagttttctcatgccctctccgtctgtctctacctctgcagccagtgttttagaaggagtatgtggaagggcaaggagtacctatagaaccccggaggagggtgaggagcagagctggtcagccataatggcaggtgaagaaattaatgaagactatccagtagaaattcacgagtatttgtcagcgtttgagaattccattggtgctgtggatgagatgctgaagaccatgatgtctgtttctagaaatgagttgttgcagaagttggatccacttgaacaagcaaaagtggatttggtttctgcatacacattaaattcaatgttttgggtttatttggcaacccaaggagttaatcctaaggaacatccagtaaaacaggaattggaaagaatcagagtatatatgaacagagtcaaggaaataacagacaagaaaaaggctggcaagctggacagaggtgcagcttcaagatttgtaaaaaatgccctctgggaaccaaaatcgaaaaatgcatcaaaagttgccaataaaggaaaaagtaaaagttaactttttggttttgatgtacacatattcaaaaagtacatctttccccccccccccccccgcaaaataattctgtggcagggcaaggtttaaatgtgtttcttattaatatgtaaattcacagtaaatatgtaaagctaaatactttcctctccaaagatcattatctttattgattagcactgaggattttaacattgtgatatattatatatttataatttaccatctcttgatgagactcttatttctttatataggtcagtcttgcaagtaccattttataagcagctgtgaaatttaagtgaaatgttctttgtaaacatttgtactattttaaatgaataatgaccttatgaagtatgctatctgtaggctgaaattataggtacatctgttttcactatatgatattaagaaagcgtgaaatgacttaaatgttcatttttttctgtatagatactttatcatgttttcatgattttaggaattactgctttgttgatattcaaagtgtgaaactaaaactttatggttgtactttaattcttggcatgttgcctctatgtcccatttaaaataaaatacattctcattaactttagatgggaaataaggttgtatgttgatggatgaattttggcatgatgactgtactctcaataaaggctgaaaatgttgtataac

SEQ ID NO: 443532 - DNA, 927 bp, Homo sapiens
gagagccggcgcgtcattgtcgtcatcgttgcccgaccgctttccgggagactggagtcgaaggccgtgaggtatttttctaagccagtgttttagaaggagtatgtggaagggcaaggagtacctatagaaccccggaggagggtgaggagcagagctggtcagccataatggcaggtgaagaaattaatgaagactatccagtagaaattcacgagtatttgtcagcgtttgagaattccattggtgctgtggatgagatgctgaagaccatgatgtctgtttctagaaatgagttgttgcagaagttggatccacttgaacaagcaaaagtggatttggtttctgcatacacattaaattcaatgttttgggtttatttggcaacccaaggagttaatcctaaggaacatccagtaaaacaggaattggaaagaatcagagtatatatgaacagagtcaaggaaataacagacaagaaaaaggctggcaagctggacagaggtgcagcttcaagatttgtaaaaaatgccctctgggaaccaaaatcgaaaaatgcatcaaaagttgccaataaaggaaaaagtaaaagttaactttttggttttgatgtacacatattcaaaaagtacatctttccgtcattttttcccccggcccgggaaaaaaaaattgtgggggggaggagagtgcaaagggtgtccaataaaagtgtatcatccagacaagatgtgaaggagatttgtgcgcgagaaaaaaatttttgagtggagcgggggaaacatgtgtaattatttaataaaccctggtgagattaattataggagggaaacttacgaaggaaagaaagctgaagtggatagaagatatactggaaagatggcagttaagaaagtctgaaattgacgatggagattgttaacaggt

SEQ ID NO: 443533 - DNA, 5240 bp, Homo sapiens
caggtgtgcagaacggctcaacaacttgaagacctcaccagaagctgtcagtggatatagttttgcaatggctgctttgttaggtggagtacatcagtgtcctttgggcattcctcatgccaaaggaaagatggtagttagtattgctgaagatcttttacgaactgctgcccaaaatagcaggctatctttacagcgcacccaagctggctggcttttacttggagcacttatgactttaggaccatctgtcgttcgttaccatctgcccaagatgttgttattgtggcgaaatgttttcccacgttccttaaaggaattggaagctgagaaggcccgaggcgattcttttacctggcaggtaactttggaaggtcgtgctggagctctatgtgccatgaggagcttcgttgcacattgtcctgagctactaactgaagatgtgattcgaaaattgatgacccctattgaatgtgccatgactatgatgtcacacattccatctgtaatgaaagcccatggagctcatctgaaagctagtgctgcaatggtccgtttaagactttatgatatcttggctttgttacctccaaaaacttatgaaggatcttttaatgcacttcttagagaactggtagcggaattcactttgactgacaactcagccaacacaactacttccctcctcagatccctctgccattatgatgatagtgttcttcttggttcttggcttcaggaaactgatcataaatcaattgaagaccagctccagccaaacagtgcctctggaagtggggctctggagcatgatccttcctctatttatttacgcatacctgctggagaagcagtacctggtcccctccctctcggagtctcagtcattgatgcttctgtggccctttttggtgtagtgtttcctcatgtttcttataaacaccgattacaaatgttggatcactttgctgaatgtgttaaacaagctaaaggtgtccgccagcaggctgtgcagcttaacatatttactgctgttcttagtgcactaaagggcttagctgaaaacaaaagtactttaggacctgaggaagttcgtaaatctgccctgacactggttatgggtcctctggacaacccaaaccccatcttacgttgtgcagcgggggaagctcttggaagaatggctcaggtggttggagaagcaacttttattgctagaatggcccaatatagctttgacaagttgaaatcggctcgagatgttgtatctaggactggtcattcattggctcttggttgtttgcatcgttatgttggtggaataggctcaggacaacatctgaagaccagtgtcagcattttattggctctagcacaagatgggacatcccctgaagtccagacttggtctcttcattcacttgctttgatagtggattctagtggtccgatgtatcgtggctatgtggaaccaacattatctctagttcttaccttgctgttgacagttccgccttcacatacagaagttcatcagtgtttgggtcgatgcttgggtgctataataactactgttggccctgaactacaagggaatggagcaacaacttctacaattcgttcctcttgtttggtgggttgtgcaataacacaagaccattcagattctcttgttcaggcagctgccatatcttgccttcagcagcttcacatgtttgcaccacgacatgtcaatctatctagccttgttcctagcctttgtgttcacttatgtagttcccatttgttacttcgacgagcagctgtggcatgtcttcggcaacttgcacaaagagaagcagcggaagtatgtgaatatgccatgagcctggcaaaaaatacaggggacaaagagagcagtagtgccaatgtcagtccttttgcccctggggttagttctcgaactgatatccattgccggcaccaaggtgttaatataacagaaactggtcttgagggacttctttttggaatgctagaccgggagacagatcgaaaattatgttctgatattcatgacactttgggacatatgctttcttcgctggcagtagaaaaactttctcattggctaatgctttgtaaagatgtcctggcagcttctagtgatatgagtactgcaactctcttaagtagtggaaaagatgaagaagctgaaaagaaagatgagatggatgatgataccatgtttaccacgttaggtgaagaagataaatcaaagccctttgtggcccctcgctgggccactcgagtatttgctgccgattgcctgtgtcgaatcatcaatttgtgtgagaatgcagaccaggctcactttgatcttgccttggcacgttctgctaaacttcgaaaccctacaaatgacctcttggtacttcatctctctgacctcattcgcatggcattcatggctgcaactgatcatagcaaccagctgcgaatggctgggctccaggcgcttgaagacattatcaagaagtttgcgtctgtgcctgagccagaatttccaggtcatgtgatactggagcagtatcaggctaatgtgggagctgctctaagaccagccttttcacaagatacaccatcagatataatagcgaaagcttgccaggtatgtagtacatggataggaagtggagttgtcagtgatctcaatgatctccgtcgagtacacaatcttcttgtttcttctctggacaaagttcaggctggaaaaggatcttccagccagctgtaccgagagagtgccacgaccatggaaaaactggctgttctcaaagcttgggcagaggtatatgtggtcgctatgaatattaaaaaggaagcagagtcaaaaccaaaaagagcaattaaaaatactgacgatgatgatgacgactgtggtaccatcgatgaactgccaccagatagtttaataacactggtacaacctgaactaccaacactcagtcgcctgtggttagcagcattaaaagattatgcactcttgactttaccagccgaattttctagtcagcttcctccagatggtggagcattttatacccctgaaactattgatacagctagacttcactatcggaattcctgggccccaattctccatgcggtggcactttggttaaatagcacaggatttacgtgctcagagtctacagaagcagcagcaatatctggtttacaaaaacgttctacatctgtcaatttaaaccaggcatcaggagcagtgggtagtgctaaatctttgccagaaattaacaaagacagaatgcatctgattttaggtgtgagtatacagtttctttgttcccctagacctgaggagcccattgaacatgttacagcatgcctgcaggccttacataccttgctagactccccttatgctcgagtccatattgcagaagatcagctgataggtgttgagttgctgagtgttttgcaccgccttctattgacctggaatccatcatctgtccagctgttggttactggagttgtacaacagatagtaagagctgctcaggattatttgcaagagaaaagaaacactctaaatgaagatgatatggaaaaagaggcctgtaccgtattgggagaaggaggtgacagcggtggtctcattcctggaaaatctcttgtgtttgcaactatggagctgctgatgttcattttagtacggcatatgccacatctcagtaccaaggtgtcagactctccaagtcacatagccactaaaactcgactatcagaagaaagtgctcgtttggtggcagccacagttaccatactctctgatttaccatccctttgttcacccgctggatgtatgacaatcctgcccacaattctgttcttaattgcaagaatattgaaagacacagcaataaagtctgcagataatcaggttcctccaccagtcagtgcagctcttcaagggattaaaagtattgtgacactttcaatggccaaaactgaggctggcgttcaaaaacagtggacagctctgattcgtagcacgcttgcttgcatcctggaatattctcaaccagaagactctgtacctacacctgatgaagtaagcatgctaacagcaattgcactcttcctgtggtctgctagtaatgaaataataggagtccagtcattacagaatggctgcatgaacagatttaaaaatgcattaaattcatgcgacccatgggttcaagccaaatgttaccagcttctcctctcagtcttccagcattccaatcgtgccctttcaactccttatattcattcattagctccaatagtggttgaaaagctaaaagctgttgaaagaaacagaccagccagtaacatagagcttttagcggttcaagaaggaataaaagttcttgaaacactggttgctcttggtgaagaacaaaacagagtccagctacttgctcttttagttcccactttgatatcttacctgctggatgaaaattcttttgcctcagcaagttcagcttccaaagatcttcatgagtttgcactccagaatttaatgcatattggacctctgtatccacatgctttcaagacagtaatgggggctgctcctgagttgaaagtgcgtctagaaactgccgttcgagcaagccaagcgagcaaagctaaagcggctgccagacaaccagcccccgccatacattctgcaccaacaattaagctaaaaacaagttttttttaatttgtaatttcatttatttgtatttatgttgtcaactagcccctaattagtgatggccactgtatcattccaggctacctatgggttctgttttatttgtatattggtattatagtgcttccaagtaggttaagtgaaataatgctcacaccacttattgatttttaaggagtgattttttttatcatgtggtgaatatgttttcattttcctcctaataatgtttctcttttgttaacttatttatttttcaaacactgagccatagtcttaaatttaaatgctaaaaacaattgtatcatgtagtcgggcagcctattgatactgtcaggggaaaaaaatgggtcagaactcagcatctgtcatgaaaaaaatcaattgaaaaacaagcagattttaaattttgaagtaatcaaaataatggaaagtgtctgttttgtggtgtatatactatgaataaaatcacagcattttctaa

SEQ ID NO: 443534 - DNA, 4973 bp, Homo sapiens
caggtgtgcagaacggctcaacaacttgaagacctcaccagaagctgtcagtggatatagttttgcaatggctgctttgttaggtggagtacatcagtgtcctttgggcattcctcatgccaaaggaaagatggtagttagtattgctgaagatcttttacgaactgctgcccaaaatagcaggctatctttacagcgcacccaagctggctggcttttacttggagcacttatgactttaggaccatctgtcgttcgttaccatctgcccaagatgttgttattgtggcgaaatgttttcccacgttccttaaaggaattggaagctgagaaggcccgaggcgattcttttacctggcaggtaactttggaaggtcgtgctggagctctatgtgccatgaggagcttcgttgcacattgtcctgagctactaactgaagatgtgattcgaaaattgatgacccctattgaatgtgccatgactatgatgtcacacattccatctgtaatgaaagcccatggagctcatctgaaagctagtgctgcaatggtccgtttaagactttatgatatcttggctttgttacctccaaaaacttatgaaggatcttttaatgcacttcttagagaactggtagcggaattcactttgactgacaactcagccaacacaactacttccctcctcagatccctctgccattatgatgatagtgttcttcttggttcttggcttcaggaaactgatcataaatcaattgaagaccagctccagccaaacagtgcctctggaagtggggctctggagcatgatccttcctctatttatttacgcatacctgctggagaagcagtacctggtcccctccctctcggagtctcagtcattgatgcttctgtggccctttttggtgtagtgtttcctcatgtttcttataaacaccgattacaaatgttggatcactttgctgaatgtgttaaacaagctaaaggtgtccgccagcaggctgtgcagcttaacatatttactgctgttcttagtgcactaaagggcttagctgaaaacaaaagtactttaggacctgaggaagttcgtaaatctgccctgacactggttatgggtcctctggacaacccaaaccccatcttacgttgtgcagcgggggaagctcttggaagaatggctcaggtggttggagaagcaacttttattgctagaatggcccaatatagctttgacaagttgaaatcggctcgagatgttgtatctaggactggtcattcattggctcttggttgtttgcatcgttatgttggtggaataggctcaggacaacatctgaagaccagtgtcagcattttattggctctagcacaagatgggacatcccctgaagtccagacttggtctcttcattcacttgctttgatagtggattctagtggtccgatgtatcgtggctatgtggaaccaacattatctctagttcttaccttgctgttgacagttccgccttcacatacagaagttcatcagtgtttgggtcgatgcttgggtgctataataactactgttggccctgaactacaagggaatggagcaacaacttctacaattcgttcctcttgtttggtgggttgtgcaataacacaagaccattcagattctcttgttcaggcagctgccatatcttgccttcagcagcttcacatgtttgcaccacgacatgtcaatctatctagccttgttcctagcctttgtgttcacttatgtagttcccatttgttacttcgacgagcagctgtggcatgtcttcggcaacttgcacaaagagaagcagcggaagtatgtgaatatgccatgagcctggcaaaaaatacaggggacaaagagagcagtagtgccaatgtcagtccttttgcccctggggttagttctcgaactgatatccattgccggcaccaaggtgttaatataacagaaactggtcttgagggacttctttttggaatgctagaccgggagacagatcgaaaattatgttctgatattcatgacactttgggacatatgctttcttcgctggcagtagaaaaactttctcattggctaatgctttgtaaagatgtcctggcagcttctagtgatatgagtactgcaactctcttaagtagtggaaaagatgaagaagctgaaaagaaagatgagatggatgatgataccatgtttaccacgttaggtgaagaagataaatcaaagccctttgtggcccctcgctgggccactcgagtatttgctgccgattgcctgtgtcgaatcatcaatttgtgtgagaatgcagaccaggctcactttgatcttgccttggcacgttctgctaaacttcgaaaccctacaaatgacctcttggtacttcatctctctgacctcattcgcatggcattcatggctgcaactgatcatagcaaccagctgcgaatggctgggctccaggcgcttgaagacattatcaagaagtttgcgtctgtgcctgagccagaatttccaggtcatgtgatactggagcagtatcaggctaatgtgggagctgctctaagaccagccttttcacaagatacaccatcagatataatagcgaaagcttgccaggtatgtagtacatggataggaagtggagttgtcagtgatctcaatgatctccgtcgagtacacaatcttcttgtttcttctctggacaaagttcaggctggaaaaggatcttccagccagctgtaccgagagagtgccacgaccatggaaaaactggctgttctcaaagcttgggcagaggtatatgtggtcgctatgaatattaaaaaggaagcagagtcaaaaccaaaaagagcaattaaaaatactgacgatgatgatgacgactgtggtaccatcgatgaactgccaccagatagtttaataacactggtacaacctgaactaccaacactcagtcgcctgtggttagcagcattaaaagattatgcactcttgactttaccagccgaattttctagtcagcttcctccagatggtggagcattttatacccctgaaactattgatacagctagacttcactatcggaattcctgggccccaattctccatgcggtggcactttggttaaatagcacaggatttacgtgctcagagtctacagaagcagcagcaatatctggtttacaaaaacgttctacatctgtcaatttaaaccaggcatcaggagcagtgggtagtgctaaatctttgccagaaattaacaaagacagaatgcatctgattttaggtgtgagtatacagtttctttgttcccctagacctgaggagcccattgaacatgttacagcatgcctgcaggccttacataccttgctagactccccttatgctcgagtccatattgcagaagatcagctgataggtgttgagttgctgagtgttttgcaccgccttctattgacctggaatccatcatctgtccagctgttggttactggagttgtacaacagatagtaagagctgctcaggattatttgcaagagaaaagaaacactctaagatgtatgacaatcctgcccacaattctgttcttaattgcaagaatattgaaagacacagcaataaagtctgcagataatcaggttcctccaccagtcagtgcagctcttcaagggattaaaagtattgtgacactttcaatggccaaaactgaggctggcgttcaaaaacagtggacagctctgattcgtagcacgcttgcttgcatcctggaatattctcaaccagaagactctgtacctacacctgatgaagtaagcatgctaacagcaattgcactcttcctgtggtctgctagtaatgaaataataggagtccagtcattacagaatggctgcatgaacagatttaaaaatgcattaaattcatgcgacccatgggttcaagccaaatgttaccagcttctcctctcagtcttccagcattccaatcgtgccctttcaactccttatattcattcattagctccaatagtggttgaaaagctaaaagctgttgaaagaaacagaccagccagtaacatagagcttttagcggttcaagaaggaataaaagttcttgaaacactggttgctcttggtgaagaacaaaacagagtccagctacttgctcttttagttcccactttgatatcttacctgctggatgaaaattcttttgcctcagcaagttcagcttccaaagatcttcatgagtttgcactccagaatttaatgcatattggacctctgtatccacatgctttcaagacagtaatgggggctgctcctgagttgaaagtgcgtctagaaactgccgttcgagcaagccaagcgagcaaagctaaagcggctgccagacaaccagcccccgccatacattctgcaccaacaattaagctaaaaacaagttttttttaatttgtaatttcatttatttgtatttatgttgtcaactagcccctaattagtgatggccactgtatcattccaggctacctatgggttctgttttatttgtatattggtattatagtgcttccaagtaggttaagtgaaataatgctcacaccacttattgatttttaaggagtgattttttttatcatgtggtgaatatgttttcattttcctcctaataatgtttctcttttgttaacttatttatttttcaaacactgagccatagtcttaaatttaaatgctaaaaacaattgtatcatgtagtcgggcagcctattgatactgtcaggggaaaaaaatgggtcagaactcagcatctgtcatgaaaaaaatcaattgaaaaacaagcagattttaaattttgaagtaatcaaaataatggaaagtgtctgttttgtggtgtatatactatgaataaaatcacagcattttctaa

SEQ ID NO: 443535 - DNA, 5026 bp, Homo sapiens
caggtgtgcagaacggctcaacaacttgaagacctcaccagaagctgtcagtggatatagttttgcaatggctgctttgttaggtggagtacatcagtgtcctttgggcattcctcatgccaaaggaaagatggtagttagtattgctgaagatcttttacgaactgctgcccaaaatagcaggctatctttacagcgcacccaagctggctggcttttacttggagcacttatgactttaggaccatctgtcgttcgttaccatctgcccaagatgttgttattgtggcgaaatgttttcccacgttccttaaaggaattggaagctgagaaggcccgaggcgattcttttacctggcaggtaactttggaaggtcgtgctggagctctatgtgccatgaggagcttcgttgcacattgtcctgagctactaactgaagatgtgattcgaaaattgatgacccctattgaatgtgccatgactatgatgtcacacattccatctgtaatgaaagcccatggagctcatctgaaagctagtgctgcaatggtccgtttaagactttatgatatcttggctttgttacctccaaaaacttatgaaggatcttttaatgcacttcttagagaactggtagcggaattcactttgactgacaactcagccaacacaactacttccctcctcagatccctctgccattatgatgatagtgttcttcttggttcttggcttcaggaaactgatcataaatcaattgaagaccagctccagccaaacagtgcctctggaagtggggctctggagcatgatccttcctctatttatttacgcatacctgctggagaagcagtacctggtcccctccctctcggagtctcagtcattgatgcttctgtggccctttttggtgtagtgtttcctcatgtttcttataaacaccgattacaaatgttggatcactttgctgaatgtgttaaacaagctaaaggtgtccgccagcaggctgtgcagcttaacatatttactgctgttcttagtgcactaaagggcttagctgaaaacaaaagtactttaggacctgaggaagttcgtaaatctgccctgacactggttatgggtcctctggacaacccaaaccccatcttacgttgtgcagcgggggaagctcttggaagaatggctcaggtggttggagaagcaacttttattgctagaatggcccaatatagctttgacaagttgaaatcggctcgagatgttgtatctaggactggtcattcattggctcttggttgtttgcatcgttatgttggtggaataggctcaggacaacatctgaagaccagtgtcagcattttattggctctagcacaagatgggacatcccctgaagtccagacttggtctcttcattcacttgctttgatagtggattctagtggtccgatgtatcgtggctatgtggaaccaacattatctctagttcttaccttgctgttgacagttccgccttcacatacagaagttcatcagtgtttgggtcgatgcttgggtgctataataactactgttggccctgaactacaagggaatggagcaacaacttctacaattcgttcctcttgtttggtgggttgtgcaataacacaagaccattcagattctcttgttcaggcagctgccatatcttgccttcagcagcttcacatgtttgcaccacgacatgtcaatctatctagccttgttcctagcctttgtgttcacttatgtagttcccatttgttacttcgacgagcagctgtggcatgtcttcggcaacttgcacaaagagaagcagcggaagtatgtgaatatgccatgagcctggcaaaaaatacaggggacaaagagagcagtagtgccaatgtcagtccttttgcccctggggttagttctcgaactgatatccattgccggcaccaaggtgttaatataacagaaactggtcttgagggacttctttttggaatgctagaccgggagacagatcgaaaattatgttctgatattcatgacactttgggacatatgctttcttcgctggcagtagaaaaactttctcattggctaatgctttgtaaagatgtcctggcagcttctagtgatatgagtactgcaactctcttaagtagtggaaaagatgaagaagctgaaaagaaagatgagatggatgatgataccatgtttaccacgttaggtgaagaagataaatcaaagccctttgtggcccctcgctgggccactcgagtatttgctgccgattgcctgtgtcgaatcatcaatttgtgtgagaatgcagaccaggctcactttgatcttgccttggcacgttctgctaaacttcgaaaccctacaaatgacctcttggtacttcatctctctgacctcattcgcatggcattcatggctgcaactgatcatagcaaccagctgcgaatggctgggctccaggcgcttgaagacattatcaagaagtttgcgtctgtgcctgagccagaatttccaggtcatgtgatactggagcagtatcaggctaatgtgggagctgctctaagaccagccttttcacaagatacaccatcagatataatagcgaaagcttgccaggtatgtagtacatggataggaagtggagttgtcagtgatctcaatgatctccgtcgagtacacaatcttcttgtttcttctctggacaaagttcaggctggaaaaggatcttccagccagctgtaccgagagagtgccacgaccatggaaaaactggctgttctcaaagcttgggcagaggtatatgtggtcgctatgaatattaaaaaggaagcagagtcaaaaccaaaaagagcaattaaaaatactgacgatgatgatgacgactgtggtaccatcgatgaactgccaccagatagtttaataacactggtacaacctgaactaccaacactcagtcgcctgtggttagcagcattaaaagattatgcactcttgactttaccagccgaattttctagtcagcttcctccagatggtggagcattttatacccctgaaactattgatacagctagacttcactatcggaattcctgggccccaattctccatgcggtggcactttggttaaatagcacaggatttacgtgctcagagtctacagaagcagcagcaatatctggtttacaaaaacgttctacatctgtcaatttaaaccaggcatcaggagcagtgggtagtgctaaatctttgccagaaattaacaaagacagaatgcatctgattttaggtgtgagtatacagtttctttgttcccctagacctgaggagcccattgaacatgttacagcatgcctgcaggccttacataccttgctagactccccttatgctcgagtccatattgcagaagatcagctgataggtgttgagttgctgagtgttttgcaccgccttctattgacctggaatccatcatctgtccagctgttggttactggagttgtacaacagatagtaagagctgctcaggattatttgcaagagaaaagaaacactctaaatgaagatgatatggaaaaagaggcctgtaccgtattgggagaaggaggtgacagcggtggtctcattcctggaaaatctcttgtgtttgcaactatggagctgctgatgttcattttagtacggcatatgccacatctcagtaccaaggtgtcagactctccaagtcacatagccactaaaactcgactatcagaagaaagtgctcgtttggtggcagccacagttaccatactctctgatttaccatccctttgttcacccgctggatgtatgacaatcctgcccacaattctgttcttaattgcaagaatattgaaagacacagcaataaagtctgcagataatcaggttcctccaccagtcagtgcagctcttcaagggattaaaagtattgtgacactttcaatggccaaaactgaggctggcgttcaaaaacagtggacagctctgattcgtagcacgcttgcttgcatcctggaatattctcaaccagaagactctgtacctacacctgatgaagtaagcatgctaacagcaattgcactcttcctgtggtctgctagtaatgaaataataggagtccagtcattacagaatggctgcatgaacagatttaaaaatgcattaaattcatgcgacccatgggagtccagctacttgctcttttagttcccactttgatatcttacctgctggatgaaaattcttttgcctcagcaagttcagcttccaaagatcttcatgagtttgcactccagaatttaatgcatattggacctctgtatccacatgctttcaagacagtaatgggggctgctcctgagttgaaagtgcgtctagaaactgccgttcgagcaagccaagcgagcaaagctaaagcggctgccagacaaccagcccccgccatacattctgcaccaacaattaagctaaaaacaagttttttttaatttgtaatttcatttatttgtatttatgttgtcaactagcccctaattagtgatggccactgtatcattccaggctacctatgggttctgttttatttgtatattggtattatagtgcttccaagtaggttaagtgaaataatgctcacaccacttattgatttttaaggagtgattttttttatcatgtggtgaatatgttttcattttcctcctaataatgtttctcttttgttaacttatttatttttcaaacactgagccatagtcttaaatttaaatgctaaaaacaattgtatcatgtagtcgggcagcctattgatactgtcaggggaaaaaaatgggtcagaactcagcatctgtcatgaaaaaaatcaattgaaaaacaagcagattttaaattttgaagtaatcaaaataatggaaagtgtctgttttgtggtgtatatactatgaataaaatcacagcattttctaa

SEQ ID NO: 443536 - DNA, 5568 bp, Homo sapiens
caggtgtgcagaacggctcaacaacttgaagacctcaccagaagctgtcagtggatatagttttgcaatggctgctttgttaggtggagtacatcagtgtcctttgggcattcctcatgccaaaggaaagatggtagttagtattgctgaagatcttttacgaactgctgcccaaaatagcaggctatctttacagcgcacccaagctggctggcttttacttggagcacttatgactttaggaccatctgtcgttcgttaccatctgcccaagatgttgttattgtggcgaaatgttttcccacgttccttaaaggaattggaagctgagaaggcccgaggcgattcttttacctggcaggtaactttggaaggtcgtgctggagctctatgtgccatgaggagcttcgttgcacattgtcctgagctactaactgaagatgtgattcgaaaattgatgacccctattgaatgtgccatgactatgatgtcacacattccatctgtaatgaaagcccatggagctcatctgaaagctagtgctgcaatggtccgtttaagactttatgatatcttggctttgttacctccaaaaacttatgaaggatcttttaatgcacttcttagagaactggtagcggaattcactttgactgacaactcagccaacacaactacttccctcctcagatccctctgccattatgatgatagtgttcttcttggttcttggcttcaggaaactgatcataaatcaattgaagaccagctccagccaaacagtgcctctggaagtggggctctggagcatgatccttcctctatttatttacgcatacctgctggagaagcagtacctggtcccctccctctcggagtctcagtcattgatgcttctgtggccctttttggtgtagtgtttcctcatgtttcttataaacaccgattacaaatgttggatcactttgctgaatgtgttaaacaagctaaaggtgtccgccagcaggctgtgcagcttaacatatttactgctgttcttagtgcactaaagggcttagctgaaaacaaaagtactttaggacctgaggaagttcgtaaatctgccctgacactggttatgggtcctctggacaacccaaaccccatcttacgttgtgcagcgggggaagctcttggaagaatggctcaggtggttggagaagcaacttttattgctagaatggcccaatatagctttgacaagttgaaatcggctcgagatgttgtatctaggactggtcattcattggctcttggttgtttgcatcgttatgttggtggaataggctcaggacaacatctgaagaccagtgtcagcattttattggctctagcacaagatgggacatcccctgaagtccagacttggtctcttcattcacttgctttgatagtggattctagtggtccgatgtatcgtggctatgtggaaccaacattatctctagttcttaccttgctgttgacagttccgccttcacatacagaagttcatcagtgtttgggtcgatgcttgggtgctataataactactgttggccctgaactacaagggaatggagcaacaacttctacaattcgttcctcttgtttggtgggttgtgcaataacacaagaccattcagattctcttgttcaggcagctgccatatcttgccttcagcagcttcacatgtttgcaccacgacatgtcaatctatctagccttgttcctagcctttgtgttcacttatgtagttcccatttgttacttcgacgagcagctgtggcatgtcttcggcaacttgcacaaagagaagcagcggaagtatgtgaatatgccatgagcctggcaaaaaatacaggggacaaagagagcagtagtgccaatgtcagtccttttgcccctggggttagttctcgaactgatatccattgccggcaccaaggtgttaatataacagaaactggtcttgagggacttctttttggaatgctagaccgggagacagatcgaaaattatgttctgatattcatgacactttgggacatatgctttcttcgctggcagtagaaaaactttctcattggctaatgctttgtaaagatgtcctggcagcttctagtgatatgagtactgcaactctcttaagtagtggaaaagatgaagaagctgaaaagaaagatgagatggatgatgataccatgtttaccacgttaggtgaagaagataaatcaaagccctttgtggcccctcgctgggccactcgagtatttgctgccgattgcctgtgtcgaatcatcaatttgtgtgagaatgcagaccaggctcactttgatcttgccttggcacgttctgctaaacttcgaaaccctacaaatgacctcttggtacttcatctctctgacctcattcgcatggcattcatggctgcaactgatcatagcaaccagctgcgaatggctgggctccaggcgcttgaagacattatcaagaagtttgcgtctgtgcctgagccagaatttccaggtcatgtgatactggagcagtatcaggctaatgtgggagctgctctaagaccagccttttcacaagatacaccatcagatataatagcgaaagcttgccaggtatgtagtacatggataggaagtggagttgtcagtgatctcaatgatctccgtcgagtacacaatcttcttgtttcttctctggacaaagttcaggctggaaaaggatcttccagccagctgtaccgagagagtgccacgaccatggaaaaactggctgttctcaaagcttgggcagaggtatatgtggtcgctatgaatattaaaaaggaagcagagtcaaaaccaaaaagagcaattaaaaatactgacgatgatgatgacgactgtggtaccatcgatgaactgccaccagatagtttaataacactggtacaacctgaactaccaacactcagtcgcctgtggttagcagcattaaaagattatgcactcttgactttaccagccgaattttctagtcagcttcctccagatggtggagcattttatacccctgaaactattgatacagctagacttcactatcggaattcctgggccccaattctccatgcggtggcactttggttaaatagcacaggatttacgtgctcagagtctacagaagcagcagcaatatctggtttacaaaaacgttctacatctgtcaatttaaaccaggcatcaggagcagtgggtagtgctaaatctttgccagaaattaacaaagacagaatgcatctgattttaggtgtgagtatacagtttctttgttcccctagacctgaggagcccattgaacatgttacagcatgcctgcaggccttacataccttgctagactccccttatgctcgagtccatattgcagaagatcagctgataggtgttgagttgctgagtgttttgcaccgccttctattgacctggaatccatcatctgtccagctgttggttactggagttgtacaacagatagtaagagctgctcaggattatttgcaagagaaaagaaacactctaaatgaagatgatatggaaaaagaggcctgtaccgtattgggagaaggaggtgacagcggtggtctcattcctggaaaatctcttgtgtttgcaactatggagctgctgatgttcattttagtacggcatatgccacatctcagtaccaaggtgtcagactctccaagtcacatagccactaaaactcgactatcagaagaaagtgctcgtttggtggcagccacagttaccatactctctgatttaccatccctttgttcacccgctggatgtatgacaatcctgcccacaattctgttcttaattgcaagaatattgaaagacacagcaataaagtctgcagataatcaggttcctccaccagtcagtgcagctcttcaagggattaaaagtattgtgacactttcaatggccaaaactgaggctggcgttcaaaaacagtggacagctctgattcgtagcacgcttgcttgcatcctggaatattctcaaccagaagactctgtacctacacctgatgaagtaagcatgctaacagcaattgcactcttcctgtggtctgctagtaatgaaataataggagtccagtcattacagaatggctgcatgaacagatttaaaaatgcattaaattcatgcgacccatgggttcaagccaaatgttaccagcttctcctctcagtcttccagcattccaatcgtgccctttcaactccttatattcattcattagctccaatagtggttgaaaagctaaaagctgttgaaagaaacagaccagccagtaacatagagcttttagcggttcaagaaggaataaaagttcttgaaacactggttgctcttggtgaagaacaaaacagagtccagctacttgctcttttagttcccactttgatatcttacctgctggatgaaaattcttttgcctcagcaagttcagcttccaaagatcttcatgagtttgcactccagaatttaatgcatattggacctctgtatccacatgctttcaagacagtaatgggggctgctcctgagttgaaagtgcgtctagaaactgccgttcgagcaagccaagcgagcaaagctaaagcggctgccagacaaccagcccccgccatacattctgcaccaacaattaagctaaaaacaagttttttttaatttgtaatttcatttatttgtatttatgttgtcaactagcccctaattagtgatggccactgtatcattccaggctacctatgggttctgttttatttgtatattggtattatagtgcttccaagtaggttaagtgaaataatgctcacaccacttattgatttttaaggagtgattttttttatcatgtggtgaatatgttttcattttcctcctaataatgtttctcttttgttaacttatttatttttcaaacactgagccatagtcttaaatttaaatgctaaaaacaattgtatcatgtagtcgggcagcctattgatactgtcaggggaaaaaaatgggtcagaactcagcatctgtcatgaaaaaaatcaattgaaaaacaagcagattttaaattttgaagtaatcaaaataatggaaagtgtctgttttgtggtgtatatactatgaataaaatcacagcattttctaaaaaaaaaaaaaccccacaaacacaacacacaaacacaaaaaaacactttttggcgcccccgcggcgcccccacgaaaggttttagaaaaccactacggtagggagacgcagcggggaccaccaacgaggcacagagagacaagcggtcccacaaggattgggtttcccacgagaaaacccgcggtcctgacaacgagggtggaactcacacagcacaataaaaaagcccgggtggcaccccgaaactttgcgaaacacatccgagggacatcttgcgaggccaacaggggcactaaacaaggggagccacaggacccaaacaatgcgg

SEQ ID NO: 443537 - DNA, 5472 bp, Homo sapiens
caggtgtgcagaacggctcaacaacttgaagacctcaccagaagctgtcagtggatatagttttgcaatggctgctttgttaggtggagtacatcagtgtcctttgggcattcctcatgccaaaggaaagatggtagttagtattgctgaagatcttttacgaactgctgcccaaaatagcaggctatctttacagcgcacccaagctggctggcttttacttggagcacttatgactttaggaccatctgtcgttcgttaccatctgcccaagatgttgttattgtggcgaaatgttttcccacgttccttaaaggaattggaagctgagaaggcccgaggcgattcttttacctggcaggtaactttggaaggtcgtgctggagctctatgtgccatgaggagcttcgttgcacattgtcctgagctactaactgaagatgtgattcgaaaattgatgacccctattgaatgtgccatgactatgatgtcacacattccatctgtaatgaaagcccatggagctcatctgaaagctagtgctgcaatggtccgtttaagactttatgatatcttggctttgttacctccaaaaacttatgaaggatcttttaatgcacttcttagagaactggtagcggaattcactttgactgacaactcagccaacacaactacttccctcctcagatccctctgccattatgatgatagtgttcttcttggttcttggcttcaggaaactgatcataaatcaattgaagaccagctccagccaaacagtgcctctggaagtggggctctggagcatgatccttcctctatttatttacgcatacctgctggagaagcagtacctggtcccctccctctcggagtctcagtcattgatgcttctgtggccctttttggtgtagtgtttcctcatgtttcttataaacaccgattacaaatgttggatcactttgctgaatgtgttaaacaagctaaaggtgtccgccagcaggctgtgcagcttaacatatttactgctgttcttagtgcactaaagggcttagctgaaaacaaaagtactttaggacctgaggaagttcgtaaatctgccctgacactggttatgggtcctctggacaacccaaaccccatcttacgttgtgcagcgggggaagctcttggaagaatggctcaggtggttggagaagcaacttttattgctagaatggcccaatatagctttgacaagttgaaatcggctcgagatgttgtatctaggactggtcattcattggctcttggttgtttgcatcgttatgttggtggaataggctcaggacaacatctgaagaccagtgtcagcattttattggctctagcacaagatgggacatcccctgaagtccagacttggtctcttcattcacttgctttgatagtggattctagtggtccgatgtatcgtggctatgtggaaccaacattatctctagttcttaccttgctgttgacagttccgccttcacatacagaagttcatcagtgtttgggtcgatgcttgggtgctataataactactgttggccctgaactacaagggaatggagcaacaacttctacaattcgttcctcttgtttggtgggttgtgcaataacacaagaccattcagattctcttgttcaggcagctgccatatcttgccttcagcagcttcacatgtttgcaccacgacatgtcaatctatctagccttgttcctagcctttgtgttcacttatgtagttcccatttgttacttcgacgagcagctgtggcatgtcttcggcaacttgcacaaagagaagcagcggaagtatgtgaatatgccatgagcctggcaaaaaatacaggggacaaagagagcagtagtgccaatgtcagtccttttgcccctggggttagttctcgaactgatatccattgccggcaccaaggtgttaatataacagaaactggtcttgagggacttctttttggaatgctagaccgggagacagatcgaaaattatgttctgatattcatgacactttgggacatatgctttcttcgctggcagtagaaaaactttctcattggctaatgctttgtaaagatgtcctggcagcttctagtgatatgagtactgcaactctcttaagtagtggaaaagatgaagaagctgaaaagaaagatgagatggatgatgataccatgtttaccacgttaggtgaagaagataaatcaaagccctttgtggcccctcgctgggccactcgagtatttgctgccgattgcctgtgtcgaatcatcaatttgtgtgagaatgcagaccaggctcactttgatcttgccttggcacgttctgctaaacttcgaaaccctacaaatgacctcttggtacttcatctctctgacctcattcgcatggcattcatggctgcaactgatcatagcaaccagctgcgaatggctgggctccaggcgcttgaagacattatcaagaagtttgcgtctgtgcctgagccagaatttccaggtcatgtgatactggagcagtatcaggctaatgtgggagctgctctaagaccagccttttcacaagatacaccatcagatataatagcgaaagcttgccaggtatgtagtacatggataggaagtggagttgtcagtgatctcaatgatctccgtcgagtacacaatcttcttgtttcttctctggacaaagttcaggctggaaaaggatcttccagccagctgtaccgagagagtgccacgaccatggaaaaactggctgttctcaaagcttgggcagaggtatatgtggtcgctatgaatattaaaaaggaagcagagtcaaaaccaaaaagagcaattaaaaatactgacgatgatgatgacgactgtggtaccatcgatgaactgccaccagatagtttaataacactggtacaacctgaactaccaacactcagtcgcctgtggttagcagcattaaaagattatgcactcttgactttaccagccgaattttctagtcagcttcctccagatggtggagcattttatacccctgaaactattgatacagctagacttcactatcggaattcctgggccccaattctccatgcggtggcactttggttaaatagcacaggatttacgtgctcagagtctacagaagcagcagcaatatctggtttacaaaaacgttctacatctgtcaatttaaaccaggcatcaggagcagtgggtagtgctaaatctttgccagaaattaacaaagacagaatgcatctgattttaggtgtgagtatacagtttctttgttcccctagacctgaggagcccattgaacatgttacagcatgcctgcaggccttacataccttgctagactccccttatgctcgagtccatattgcagaagatcagctgataggtgttgagttgctgagtgttttgcaccgccttctattgacctggaatccatcatctgtccagctgttggttactggagttgtacaacagatagtaagagctgctcaggattatttgcaagagaaaagaaacactctaaatgaagatgatatggaaaaagaggcctgtaccgtattgggagaaggaggtgacagcggtggtctcattcctggaaaatctcttgtgtttgcaactatggagctgctgatgttcattttagtacggcatatgccacatctcagtaccaaggtgtcagactctccaagtcacatagccactaaaactcgactatcagaagaaagtgctcgtttggtggcagccacagttaccatactctctgatttaccatccctttgttcacccgctggatgtatgacaatcctgcccacaattctgttcttaattgcaagaatattgaaagacacagcaataaagtctgcagataatcaggttcctccaccagtcagtgcagctcttcaagggattaaaagtattgtgacactttcaatggccaaaactgaggctggcgttcaaaaacagtggacagctctgattcgtagcacgcttgcttgcatcctggaatattctcaaccagaagactctgtacctacacctgatgaagtaagcatgctaacagcaattgcactcttcctgtggtctgctagtaatgaaataataggagtccagtcattacagaatggctgcatgaacagatttaaaaatgcattaaattcatgcgacccatgggttcaagccaaatgttaccagcttctcctctcagtcttccagcattccaatcgtgccctttcaactccttatattcattcattagctccaatagtggttgaaaagctaaaagctgttgaaagaaacagaccagccagtaacatagagcttttagcggttcaagaaggaataaaagttcttgaaacactggttgctcttggtgaagaacaaaacagagtccagctacttgctcttttagttcccactttgatatcttacctgctggatgaaaattcttttgcctcagcaagttcagcttccaaagatcttcatgagtttgcactccagaatttaatgcatattggacctctgtatccacatgctttcaagacagtaatgggggctgctcctgagttgaaagtgcgtctagaaactgccgttcgagcaagccaagcgagcaaagctaaagcggctgccagacaaccagcccccgccatacattctgcaccaacaattaagctaaaaacaagttttttttaatttgtaatttcatttatttgtatttatgttgtcaactagcccctaattagtgatggccactgtatcattccaggctacctatgggttctgttttatttgtatattggtattatagtgcttccaagtaggttaagtgaaataatgctcacaccacttattgatttttaaggagtgattttttttatcatgtggtgaatatgttttcattttcctcctaataatgtttctcttttgttaacttatttatttttcaaacactgagccatagtcttaaatttaaatgctaaaaacaattgtatcatgtagtcgggcagcctattgatactgtcaggggaaaaaaatgggtcagaactcagcatctgtcatgaaaaaaatcaattgaaaaacaagcagattttaaattttgaagtaatcaaaataatggaaagtgtctgttttgtggtgtatatactatgaataaaatcacagcattttctaaaaaaaaaaagaaaaaaaaaaaaaaaaactttgttgcggccgcttgggccctaaaagtttttaacaccttcggtggggcgcggggcccaagtgtgttgtcgaccttggccatagtgcccaaggaaatcgtgggccgaacatggggtgggtccccccaataaaagccccgggggaccggcggtcggacaacccagatgggtctggggcctcggacttcacggtccaggcgtagg

SEQ ID NO: 443538 - DNA, 4554 bp, Homo sapiens
caggtgtgcagaacggctcaacaacttgaagacctcaccagaagctgtcagtggatatagttttgcaatggctgctttgttaggtggagtacatcagtgtcctttgggcattcctcatgccaaaggaaagatggtagttagtattgctgaagatcttttacgaactgctgcccaaaatagcaggctatctttacagcgcacccaagctggctggcttttacttggagcacttatgactttaggaccatctgtcgttcgttaccatctgcccaagatgttgttattgtggcgaaatgttttcccacgttccttaaaggaattggaagctgagaaggcccgaggcgattcttttacctggcaggtaactttggaaggtcgtgctggagctctatgtgccatgaggagcttcgttgcacattgtcctgagctactaactgaagatgtgattcgaaaattgatgacccctattgaatgtgccatgactatgatgtcacacattccatctgtaatgaaagcccatggagctcatctgaaagctagtgctgcaatggtccgtttaagactttatgatatcttggctttgttacctccaaaaacttatgaaggatcttttaatgcacttcttagagaactggtagcggaattcactttgactgacaactcagccaacacaactacttccctcctcagatccctctgccattatgatgatagtgttcttcttggttcttggcttcaggaaactgatcataaatcaattgaagaccagctccagccaaacagtgcctctggaagtggggctctggagcatgatccttcctctatttatttacgcatacctgctggagaagcagtacctggtcccctccctctcggagtctcagtcattgatgcttctgtggccctttttggtgtagtgtttcctcatgtttcttataaacaccgattacaaatgttggatcactttgctgaatgtgttaaacaagctaaaggtgtccgccagcaggctgtgcagcttaacatatttactgctgttcttagtgcactaaagggcttagctgaaaacaaaagtactttaggacctgaggaagttcgtaaatctgccctgacactggttatgggtcctctggacaacccaaaccccatcttacgttgtgcagcgggggaagctcttggaagaatggctcaggtggttggagaagcaacttttattgctagaatggcccaatatagctttgacaagttgaaatcggctcgagatgttgtatctaggactggtcattcattggctcttggttgtttgcatcgttatgttggtggaataggctcaggacaacatctgaagaccagtgtcagcattttattggctctagcacaagatgggacatcccctgaagtccagacttggtctcttcattcacttgctttgatagtggattctagtggtccgatgtatcgtggctatgtggaaccaacattatctctagttcttaccttgctgttgacagttccgccttcacatacagaagttcatcagtgtttgggtcgatgcttgggtgctataataactactgttggccctgaactacaagggaatggagcaacaacttctacaattcgttcctcttgtttggtgggttgtgcaataacacaagaccattcagattctcttgttcaggcagctgccatatcttgccttcagcagcttcacatgtttgcaccacgacatgtcaatctatctagccttgttcctagcctttgtgttcacttatgtagttcccatttgttacttcgacgagcagctgtggcatgtcttcggcaacttgcacaaagagaagcagcggaagtatgtgaatatgccatgagcctggcaaaaaatacaggggacaaagagagcagtagtgccaatgtcagtccttttgcccctggggttagttctcgaactgatatccattgccggcaccaaggtgttaatataacagaaactggtcttgagggacttctttttggaatgctagaccgggagacagatcgaaaattatgttctgatattcatgacactttgggacatatgctttcttcgctggcagtagaaaaactttctcattggctaatgctttgtaaagatgtcctggcagcttctagtgatatgagtactgcaactctcttaagtagtggaaaagatgaagaagctgaaaagaaagatgagatggatgatgataccatgtttaccacgttaggtgaagaagataaatcaaagccctttgtggcccctcgctgggccactcgagtatttgctgccgattgcctgtgtcgaatcatcaatttgtgtgagaatgcagaccaggctcactttgatcttgccttggcacgttctgctaaacttcgaaaccctacaaatgacctcttggtacttcatctctctgacctcattcgcatggcattcatggctgcaactgatcatagcaaccagctgcgaatggctgggctccaggcgcttgaagacattatcaagaagtttgcgtctgtgcctgagccagaatttccaggtcatgtgatactggagcagtatcaggctaatgtgggagctgctctaagaccagccttttcacaagatacaccatcagatataatagcgaaagcttgccaggtatgtagtacatggataggaagtggagttgtcagtgatctcaatgatctccgtcgagtacacaatcttcttgtttcttctctggacaaagttcaggctggaaaaggatcttccagccagctgtaccgagagagtgccacgaccatggaaaaactggctgttctcaaagcttgggcagaggtatatgtggtcgctatgaatattaaaaaggaagcagagtcaaaaccaaaaagagcaattaaaaatactgacgatgatgatgacgactgtggtaccatcgatgaactgccaccagatagtttaataacactggtacaacctgaactaccaacactcagtcgcctgtggttagcagcattaaaagattatgcactcttgactttaccagccgaattttctagtcagcttcctccagatggtggagcattttatacccctgaaactattgatacagctagacttcactatcggaattcctgggccccaattctccatgcggtggcactttggttaaatagcacaggatttacgtgctcagagtctacagaagcagcagcaatatctggtttacaaaaacgttctacatctgtcaatttaaaccaggcatcaggagcagtgggtagtgctaaatctttgccagaaattaacaaagacagaatgcatctgattttaggtgtgagtatacagtttctttgttcccctagacctgaggagcccattgaacatgttacagcatgcctgcaggccttacataccttgctagactccccttatgctcgagtccatattgcagaagatcagctgataggtgttgagttgctgagtgttttgcaccgccttctattgacctggaatccatcatctgtccagctgttggttactggagttgtacaacagatagtaagagctgctcaggattatttgcaagagaaaagaaacactctaaatgaagatgatatggaaaaagaggcctgtaccgtattgggagaaggaggtgacagcggtggtctcattcctggaaaatctcttgtgtttgcaactatggagctgctgatgttcattttagtacggcatatgccacatctcagtaccaaggtgtcagactctccaagtcacatagccactaaaactcgactatcagaagaaagtgctcgtttggtggcagccacagttaccatactctctgatttaccatccctttgttcacccgctggatgtatgacaatcctgcccacaattctgttcttaattgcaagaatattgaaagacacagcaataaagtctgcagataatcaggttcctccaccagtcagtgcagctcttcaagggattaaaagtattgtgacactttcaatggccaaaactgaggctggcgttcaaaaacagtggacagctctgattcgtagcacgcttgcttgcatcctggaatattctcaaccagaagactctgtacctacacctgatgaagtaagcatgctaacagcaattgcactcttcctgtggtctgctagtaatgaaataataggagtccagtcattacagaatggctgcatgaacagatttaaaaatgcattaaattcatgcgacccatgggtaagttacacgttacacagacatagataaaaacatttccctttatcaggaaaatgtcagattgattcattaaaatatgtgatacataatgaaaagctaagtatttgcactatggcttttaaatggaaaaactgaaacaaatcactgggtttaagcactagaacacatgtgtatgtttattcacatatgtagaaattcttcaatatctgaaatatttgattaaccccagggcatactggtagagacaagagtctatgattatgttttccagtgtttatttaaatgacgctaaggacattgaaggagaagct

SEQ ID NO: 443539 - DNA, 1057 bp, Homo sapiens
  misc_feature (12)..(12): n is a, c, g, or t
  misc_feature (34)..(34): n is a, c, g, or t
aagggtggctcnattgaacaagaatccccaaatntcattaaattcattgcgacccatggggttcaagccaaatgttaccagcttctcctctcagtcttccagcattccaatcgtgccctttcaactccttatattcattcattagctccaatagtggttgaaaagctaaaagctgttgaaagaaacagaccagccagtaacatagagcttttagcggttcaagaaggaataaaagttcttgaaacactggttgctcttggtgaagaacaaaacagagtccagctacttgctcttttagttcccactttgatatcttacctgctggatgaaaattcttttgcctcagcaagttcagcttccaaagatcttcatgagtttgcactccagaatttaatgcatattggacctctgtatccacatgctttcaagacagtaatgggggctgctcctgagttgaaagtgcgtctagaaactgccgttcgagcaagccaagcgagcaaagctaaagcggctgccagacaaccagcccccgccatacattctgcaccaacaattaagctaaaaacaagttttttttaatttgtaatttcatttatttgtatttatgttgtcaactagcccctaattagtgatggccactgtatcattccaggctacctatgggttctgttttatttgtatattggtattatagtgcttccaagtaggttaagtgaaataatgctcacaccacttattgatttttaaggagtgattttttttatcatgtggtgaatatgttttcattttcctcctaataatgtttctcttttgttaacttatttatttttcaaacactgagccatagtcttaaatttaaatgctaaaaacaattgtatcatgtagtcgggcagcctattgatactgtcaggggaaaaaaatgggtcagaactcagcatctgtcatgaaaaaaatcaattgaaaaacaagcagattttaaattttgaagtaatcaaaataatggaaagtgtctgttttgtggtgtatatactatgaataaaatcacagcattttctaa

SEQ ID NO: 443540 - DNA, 657 bp, Homo sapiens
gtttcactatgttggccaggatggtctcaatctcttgacctcatgatctacccgccttggcctcccaaagtcctgggattacaggtgtgagccaccgcacccagccaaagtgtatactttctaatatctatacccagttatctttgatgatttaactgtatttttataataacgtaaaatatcttatttttttatcttatgccttactattttgtcctcataaatatcatattaggtatatgtggtcgctatgaatattaaaaaggaagcagagtcaaaaccaaaaagagcaattaaaaatactgacgatgatgatgacgactgtggtaccatcgatgaactgccaccagatagtttaataacactggtacaacctgaactaccaacactcagtcgcctgtggttagcagcattaaaagattatgcactcttgactttaccagccgaattttctagtcagcttcctccagatggtgagtattacattctgagttttacttttatggagttcaaagtagtagttaaacaaaatagagacggtatagactagcaacaacagttgctatagtaacagtttaaatttctgtggcttaagtttgatgttgtctcagttagaatatgtactctatattgaatttgtagatagaagatatagag

SEQ ID NO: 443541 - DNA, 186 bp, Homo sapiens
actgcctttatatttatacaattttataaattaattcatgttcacaaaagctactccaaatctgtccttttaaacattttatctagccatgaggagcttcgttgcacattgtcctgagctactaactgaagatgtgattcgaaaattgatgacccctattgaatgtgccatgactatgatgtcaca

SEQ ID NO: 443542 - DNA, 729 bp, Homo sapiens
acttattctggtaagccattaccaactatgtttttgatattttagcattccatctgtaatgaaagcccatggagctcatctgaaagctagtgctgcaatggtccgtttaagactttatgatatcttggctttgttacctccaaaaacttatgaaggtaaattaaaaatttgtggtatctgataaaaatttttctttacaattcttcaccgtattatagagtcttgacaaaggctctcccactgacttactgtgcaaaggaaggccaccattttatttttcttcatgtagagtagctgatacttgttgactccttactgtgttctgggtctcgttttcagccttttgtattagctttttgactgtgttgcaacttatgaggcctttagccctattttatagatgaagaatctcagattgagagacttaaagaaacttaacttacccaagacttagaggtagttaagtggcagagcttggattcaaatctagctggtttatcttcaaagtgtgcacttttgattaatacactgaaatgcttcctatatactgtaatatagcaaataattcgaggatctggagggagaaatcaaatattatgtaaaatattaatagtaaaataaactattgatttctttccagtataatcatgccaaagaattttggtgtgctgtggttcattgtacattattgggcaataaataataataatcatatcacatttaatatat

SEQ ID NO: 443543 - DNA, 3460 bp, Homo sapiens
agcttattaaagacttaatgcccaatgtttttattgggggctgatgccataggcatggcctgcctggcacataccaaaagttcggactcagaaggaaagcagatgttcaacagaagccacagtttagatgtcagtccttttgcccctggggttagttctcgaactgatatccattgccggcaccaaggtgttaatataacagaaactggtcttgagggacttctttttggaatgctagaccgggagacagatcgaaaattatgttctgatattcatgacactttgggacatatgctttcttcgctggcagtagaaaaactttctcattggctaatgctttgtaaagatgtcctggcagcttctagtgatatgagtactgcaactctcttaagtagtggaaaagatgaagaagctgaaaagaaagatgagatggatgatgataccatgtttaccacgttaggtgaagaagataaatcaaagccctttgtggcccctcgctgggccactcgagtatttgctgccgattgcctgtgtcgaatcatcaatttgtgtgagaatgcagaccaggctcactttgatcttgccttggcacgttctgctaaacttcgaaaccctacaaatgacctcttggtacttcatctctctgacctcattcgcatggcattcatggctgcaactgatcatagcaaccagctgcgaatggctgggctccaggcgcttgaagacattatcaagaagtttgcgtctgtgcctgagccagaatttccaggtcatgtgatactggagcagtatcaggctaatgtgggagctgctctaagaccagccttttcacaagatacaccatcagatataatagcgaaagcttgccaggtatgtagtacatggataggaagtggagttgtcagtgatctcaatgatctccgtcgagtacacaatcttcttgtttcttctctggacaaagttcaggctggaaaaggatcttccagccagctgtaccgagagagtgccacgaccatggaaaaactggctgttctcaaagcttgggcagaggtatatgtggtcgctatgaatattaaaaaggaagcagagtcaaaaccaaaaagagcaattaaaaatactgacgatgatgatgacgactgtggtaccatcgatgaactgccaccagatagtttaataacactggtacaacctgaactaccaacactcagtcgcctgtggttagcagcattaaaagattatgcactcttgactttaccagccgaattttctagtcagcttcctccagatggtggagcattttatacccctgaaactattgatacagctagacttcactatcggaattcctgggccccaattctccatgcggtggcactttggttaaatagcacaggatttacgtgctcagagtctacagaagcagcagcaatatctggtttacaaaaacgttctacatctgtcaatttaaaccaggcatcaggagcagtgggtagtgctaaatctttgccagaaattaacaaagacagaatgcatctgattttaggtgtgagtatacagtttctttgttcccctagacctgaggagcccattgaacatgttacagcatgcctgcaggccttacataccttgctagactccccttatgctcgagtccatattgcagaagatcagctgataggtgttgagttgctgagtgttttgcaccgccttctattgacctggaatccatcatctgtccagctgttggttactggagttgtacaacagatagtaagagctgctcaggattatttgcaagagaaaagaaacactctaaatgaagatgatatggaaaaagaggcctgtaccgtattgggagaaggaggtgacagcggtggtctcattcctggaaaatctcttgtgtttgcaactatggagctgctgatgttcattttagtacggcatatgccacatctcagtaccaaggtgtcagactctccaagtcacatagccactaaaactcgactatcagaagaaagtgctcgtttggtggcagccacagttaccatactctctgatttaccatccctttgttcacccgctggatgtatgacaatcctgcccacaattctgttcttaattgcaagaatattgaaagacacagcaataaagtctgcagataatcaggttcctccaccagtcagtgcagctcttcaagggattaaaagtattgtgacactttcaatggccaaaactgaggctggcgttcaaaaacagtggacagctctgattcgtagcacgcttgcttgcatcctggaatattctcaaccagaagactctgtacctacacctgatgaagtaagcatgctaacagcaattgcactcttcctgtggtctgctagtaatgaaataataggagtccagtcattacagaatggctgcatgaacagatttaaaaatgcattaaattcatgcgacccatgggttcaagccaaatgttaccagcttctcctctcagtcttccagcattccaatcgtgccctttcaactccttatattcattcattagctccaatagtggttgaaaagctaaaagctgttgaaagaaacagaccagccagtaacatagagcttttagcggttcaagaaggaataaaagttcttgaaacactggttgctcttggtgaagaacaaaacagagtccagctacttgctcttttagttcccactttgatatcttacctgctggatgaaaattcttttgcctcagcaagttcagcttccaaagatcttcatgagtttgcactccagaatttaatgcatattggacctctgtatccacatgctttcaagacagtaatgggggctgctcctgagttgaaagtgcgtctagaaactgccgttcgagcaagccaagcgagcaaagctaaagcggctgccagacaaccagcccccgccatacattctgcaccaacaattaagctaaaaacaagttttttttaatttgtaatttcatttatttgtatttatgttgtcaactagcccctaattagtgatggccactgtatcattccaggctacctatgggttctgttttatttgtatattggtattatagtgcttccaagtaggttaagtgaaataatgctcacaccacttattgatttttaaggagtgattttttttatcatgtggtgaatatgttttcattttcctcctaataatgtttctcttttgttaacttatttatttttcaaacactgagccatagtcttaaatttaaatgctaaaaacaattgtatcatgtagtcgggcagcctattgatactgtcaggggaaaaaaatgggtcagaactcagcatctgtcatgaaaaaaatcaattgaaaaacaagcagattttaaattttgaagtaatcaaaataatggaaagtgtctgttttgtggtgtatatactatgaataaaatcacagcattttctaa

SEQ ID NO: 443544 - DNA, 4860 bp, Homo sapiens
caggtgtgcagaacggctcaacaacttgaagacctcaccagaagctgtcagtggatatagttttgcaatggctgctttgttaggtggagtacatcagtgtcctttgggcattcctcatgccaaaggaaagatggtagttagtattgctgaagatcttttacgaactgctgcccaaaatagcaggctatctttacagcgcacccaagctggctggcttttacttggagcacttatgactttaggaccatctgtcgttcgttaccatctgcccaagatgttgttattgtggcgaaatgttttcccacgttccttaaaggaattggaagctgagaaggcccgaggcgattcttttacctggcaggtaactttggaaggtcgtgctggagctctatgtgccatgaggagcttcgttgcacattgtcctgagctactaactgaagatgtgattcgaaaattgatgacccctattgaatgtgccatgactatgatgtcacacattccatctgtaatgaaagcccatggagctcatctgaaagctagtgctgcaatggtccgtttaagactttatgatatcttggctttgttacctccaaaaacttatgaaggatcttttaatgcacttcttagagaactggtagcggaattcactttgactgacaactcagccaacacaactacttccctcctcagatccctctgccattatgatgatagtgttcttcttggttcttggcttcaggaaactgatcataaatcaattgaagaccagctccagccaaacagtgcctctggaagtggggctctggagcatgatccttcctctatttatttacgcatacctgctggagaagcagtacctggtcccctccctctcggagtctcagtcattgatgcttctgtggccctttttggtgtagtgtttcctcatgtttcttataaacaccgattacaaatgttggatcactttgctgaatgtgttaaacaagctaaaggtgtccgccagcaggctgtgcagcttaacatatttactgctgttcttagtgcactaaagggcttagctgaaaacaaaagtactttaggacctgaggaagttcgtaaatctgccctgacactggttatgggtcctctggacaacccaaaccccatcttacgttgtgcagcgggggaagctcttggaagaatggctcaggtggttggagaagcaacttttattgctagaatggcccaatatagctttgacaagttgaaatcggctcgagatgttgtatctaggactggtcattcattggctcttggttgtttgcatcgttatgttggtggaataggctcaggacaacatctgaagaccagtgtcagcattttattggctctagcacaagatgggacatcccctgaagtccagacttggtctcttcattcacttgctttgatagtggattctagtggtccgatgtatcgtggctatgtggaaccaacattatctctagttcttaccttgctgttgacagttccgccttcacatacagaagttcatcagtgtttgggtcgatgcttgggtgctataataactactgttggccctgaactacaagggaatggagcaacaacttctacaattcgttcctcttgtttggtgggttgtgcaataacacaagaccattcagattctcttgttcaggcagctgccatatcttgccttcagcagcttcacatgtttgcaccacgacatgtcaatctatctagccttgttcctagcctttgtgttcacttatgtagttcccatttgttacttcgacgagcagctgtggcatgtcttcggcaacttgcacaaagagaagcagcggaagtatgtgaatatgccatgagcctggcaaaaaatacaggggacaaagagagcagtagtgccaatgtcagtccttttgcccctggggttagttctcgaactgatatccattgccggcaccaaggtgttaatataacagaaactggtcttgagggacttctttttggaatgctagaccgggagacagatcgaaaattatgttctgatattcatgacactttgggacatatgctttcttcgctggcagtagaaaaactttctcattggctaatgctttgtaaagatgtcctggcagcttctagtgatatgagtactgcaactctcttaagtagtggaaaagatgaagaagctgaaaagaaagatgagatggatgatgataccatgtttaccacgttaggtgaagaagataaatcaaagccctttgtggcccctcgctgggccactcgagtatttgctgccgattgcctgtgtcgaatcatcaatttgtgtgagaatgcagaccaggctcactttgatcttgccttggcacgttctgctaaacttcgaaaccctacaaatgacctcttggtacttcatctctctgacctcattcgcatggcattcatggctgcaactgatcatagcaaccagctgcgaatggctgggctccaggcgcttgaagacattatcaagaagtttgcgtctgtgcctgagccagaatttccaggtcatgtgatactggagcagtatcaggctaatgtgggagctgctctaagaccagccttttcacaagatacaccatcagatataatagcgaaagcttgccaggtatgtagtacatggataggaagtggagttgtcagtgatctcaatgatctccgtcgagtacacaatcttcttgtttcttctctggacaaagttcaggctggaaaaggatcttccagccagctgtaccgagagagtgccacgaccatggaaaaactggctgttctcaaagcttgggcagaggtatatgtggtcgctatgaatattaaaaaggaagcagagtcaaaaccaaaaagagcaattaaaaatactgacgatgatgatgacgactgtggtaccatcgatgaactgccaccagatagtttaataacactggtacaacctgaactaccaacactcagtcgcctgtggttagcagcattaaaagattatgcactcttgactttaccagccgaattttctagtcagcttcctccagatggtggagcattttatacccctgaaactattgatacagctagacttcactatcggaattcctgggccccaattctccatgcggtggcactttggttaaatagcacaggatttacgtgctcagagtctacagaagcagcagcaatatctggtttacaaaaacgttctacatctgtcaatttaaaccaggcatcaggagcagtgggtagtgctaaatctttgccagaaattaacaaagacagaatgcatctgattttaggtgtgagtatacagtttctttgttcccctagacctgaggagcccattgaacatgttacagcatgcctgcaggccttacataccttgctagactccccttatgctcgagtccatattgcagaagatcagctgataggtgttgagttgctgagtgttttgcaccgccttctattgacctggaatccatcatctgtccagctgttggttactggagttgtacaacagatagtaagagctgctcaggattatttgcaagagaaaagaaacactctaaatgaagatgatatggaaaaagaggcctgtaccgtattgggagaaggaggtgacagcggtggtctcattcctggaaaatctcttgtgtttgcaactatggagctgctgatgttcattttagtacggcatatgccacatctcagtaccaaggtgtcagactctccaagtcacatagccactaaaactcgactatcagaagaaagtgctcgtttggtggcagccacagttaccatactctctgatttaccatccctttgttcacccgctggttcaagccaaatgttaccagcttctcctctcagtcttccagcattccaatcgtgccctttcaactccttatattcattcattagctccaatagtggttgaaaagctaaaagctgttgaaagaaacagaccagccagtaacatagagcttttagcggttcaagaaggaataaaagttcttgaaacactggttgctcttggtgaagaacaaaacagagtccagctacttgctcttttagttcccactttgatatcttacctgctggatgaaaattcttttgcctcagcaagttcagcttccaaagatcttcatgagtttgcactccagaatttaatgcatattggacctctgtatccacatgctttcaagacagtaatgggggctgctcctgagttgaaagtgcgtctagaaactgccgttcgagcaagccaagcgagcaaagctaaagcggctgccagacaaccagcccccgccatacattctgcaccaacaattaagctaaaaacaagttttttttaatttgtaatttcatttatttgtatttatgttgtcaactagcccctaattagtgatggccactgtatcattccaggctacctatgggttctgttttatttgtatattggtattatagtgcttccaagtaggttaagtgaaataatgctcacaccacttattgatttttaaggagtgattttttttatcatgtggtgaatatgttttcattttcctcctaataatgtttctcttttgttaacttatttatttttcaaacactgagccatagtcttaaatttaaatgctaaaaacaattgtatcatgtagtcgggcagcctattgatactgtcaggggaaaaaaatgggtcagaactcagcatctgtcatgaaaaaaatcaattgaaaaacaagcagattttaaattttgaagtaatcaaaataatggaaagtgtctgttttgtggtgtatatactatgaataaaatcacagcattttctaa

SEQ ID NO: 443545 - DNA, 2562 bp, Homo sapiens
agcctgtggcaccagggaacatgcaacaataagacagtcgagatggttcttgagaggactaagacaatgctggaaatcgtgcttacacactgctcggccgtgagagtgcgactaccatggaaaagctggctgatttcaaagctggtgcatatgtatatgtggtcgctatgaatattaaaaaggaagcagagtcaaaaccaaaaagagcaattaaaaatactgacgatgatgatgacgactgtggtaccatcgatgaactgccaccagatagtttaataacactggtacaacctgaactaccaacactcagtcgcctgtggttagcagcattaaaagattatgcactcttgactttaccagccgaattttctagtcagcttcctccagatggtggagcattttatacccctgaaactattgatacagctagacttcactatcggaattcctgggccccaattctccatgcggtggcactttggttaaatagcacaggatttacgtgctcagagtctacagaagcagcagcaatatctggtttacaaaaacgttctacatctgtcaatttaaaccaggcatcaggagcagtgggtagtgctaaatctttgccagaaattaacaaagacagaatgcatctgattttaggtgtgagtatacagtttctttgttcccctagacctgaggagcccattgaacatgttacagcatgcctgcaggccttacataccttgctagactccccttatgctcgagtccatattgcagaagatcagctgataggtgttgagttgctgagtgttttgcaccgccttctattgacctggaatccatcatctgtccagctgttggttactggagttgtacaacagatagtaagagctgctcaggattatttgcaagagaaaagaaacactctaaatgaagatgatatggaaaaagaggcctgtaccgtattgggagaaggaggtgacagcggtggtctcattcctggaaaatctcttgtgtttgcaactatggagctgctgatgttcattttagtacggcatatgccacatctcagtaccaaggtgtcagactctccaagtcacatagccactaaaactcgactatcagaagaaagtgctcgtttggtggcagccacagttaccatactctctgatttaccatccctttgttcacccgctggatgtatgacaatcctgcccacaattctgttcttaattgcaagaatattgaaagacacagcaataaagtctgcagataatcaggttcctccaccagtcagtgcagctcttcaagggattaaaagtattgtgacactttcaatggccaaaactgaggctggcgttcaaaaacagtggacagctctgattcgtagcacgcttgcttgcatcctggaatattctcaaccagaagactctgtacctacacctgatgaagtaagcatgctaacagcaattgcactcttcctgtggtctgctagtaatgaaataataggagtccagtcattacagaatggctgcatgaacagatttaaaaatgcattaaattcatgcgacccatgggttcaagccaaatgttaccagcttctcctctcagtcttccagcattccaatcgtgccctttcaactccttatattcattcattagctccaatagtggttgaaaagctaaaagctgttgaaagaaacagaccagccagtaacatagagcttttagcggttcaagaaggaataaaagttcttgaaacactggttgctcttggtgaagaacaaaacagagtccagctacttgctcttttagttcccactttgatatcttacctgctggatgaaaattcttttgcctcagcaagttcagcttccaaagatcttcatgagtttgcactccagaatttaatgcatattggacctctgtatccacatgctttcaagacagtaatgggggctgctcctgagttgaaagtgcgtctagaaactgccgttcgagcaagccaagcgagcaaagctaaagcggctgccagacaaccagcccccgccatacattctgcaccaacaattaagctaaaaacaagttttttttaatttgtaatttcatttatttgtatttatgttgtcaactagcccctaattagtgatggccactgtatcattccaggctacctatgggttctgttttatttgtatattggtattatagtgcttccaagtaggttaagtgaaataatgctcacaccacttattgatttttaaggagtgattttttttatcatgtggtgaatatgttttcattttcctcctaataatgtttctcttttgttaacttatttatttttcaaacactgagccatagtcttaaatttaaatgctaaaaacaattgtatcatgtagtcgggcagcctattgatactgtcaggggaaaaaaatgggtcagaactcagcatctgtcatgaaaaaaatcaattgaaaaacaagcagattttaaattttgaagtaatcaaaataatggaaagtgtctgttttgtggtgtatatactatgaataaaatcacagcattttctaa

SEQ ID NO: 443546 - DNA, 4673 bp, Homo sapiens
caggtgtgcagaacggctcaacaacttgaagacctcaccagaagctgtcagtggatatagttttgcaatggctgctttgttaggtggagtacatcagtgtcctttgggcattcctcatgccaaaggaaagatggtagttagtattgctgaagatcttttacgaactgctgcccaaaatagcaggctatctttacagcgcacccaagctggctggcttttacttggagcacttatgactttaggaccatctgtcgttcgttaccatctgcccaagatgttgttattgtggcgaaatgttttcccacgttccttaaaggaattggaagctgagaaggcccgaggcgattcttttacctggcaggtaactttggaaggtcgtgctggagctctatgtgccatgaggagcttcgttgcacattgtcctgagctactaactgaagatgtgattcgaaaattgatgacccctattgaatgtgccatgactatgatgtcacacattccatctgtaatgaaagcccatggagctcatctgaaagctagtgctgcaatggtccgtttaagactttatgatatcttggctttgttacctccaaaaacttatgaaggatcttttaatgcacttcttagagaactggtagcggaattcactttgactgacaactcagccaacacaactacttccctcctcagatccctctgccattatgatgatagtgttcttcttggttcttggcttcaggaaactgatcataaatcaattgaagaccagctccagccaaacagtgcctctggaagtggggctctggagcatgatccttcctctatttatttacgcatacctgctggagaagcagtacctggtcccctccctctcggagtctcagtcattgatgcttctgtggccctttttggtgtagtgtttcctcatgtttcttataaacaccgattacaaatgttggatcactttgctgaatgtgttaaacaagctaaaggtgtccgccagcaggctgtgcagcttaacatatttactgctgttcttagtgcactaaagggcttagctgaaaacaaaagtactttaggacctgaggaagttcgtaaatctgccctgacactggttatgggtcctctggacaacccaaaccccatcttacgttgtgcagcgggggaagctcttggaagaatggctcaggtggttggagaagcaacttttattgctagaatggcccaatatagctttgacaagttgaaatcggctcgagatgttgtatctaggactggtcattcattggctcttggttgtttgcatcgttatgttggtggaataggctcaggacaacatctgaagaccagtgtcagcattttattggctctagcacaagatgggacatcccctgaagtccagacttggtctcttcattcacttgctttgatagtggattctagtggtccgatgtatcgtggctatgtggaaccaacattatctctagttcttaccttgctgttgacagttccgccttcacatacagaagttcatcagtgtttgggtcgatgcttgggtgctataataactactgttggccctgaactacaagggaatggagcaacaacttctacaattcgttcctcttgtttggtgggttgtgcaataacacaagaccattcagattctcttgttcaggcagctgccatatcttgccttcagcagcttcacatgtttgcaccacgacatgtcaatctatctagccttgttcctagcctttgtgttcacttatgtagttcccatttgttacttcgacgagcagctgtggcatgtcttcggcaacttgcacaaagagaagcagcggaagtatgtgaatatgccatgagcctggcaaaaaatacaggggacaaagagagcagtagtgccaatgtcagtccttttgcccctggggttagttctcgaactgatatccattgccggcaccaaggtgttaatataacagaaactggtcttgagggacttctttttggaatgctagaccgggagacagatcgaaaattatgttctgatattcatgacactttgggacatatgctttcttcgctggcagtagaaaaactttctcattggctaatgctttgtaaagatgtcctggcagcttctagtgatatgagtactgcaactctcttaagtagtggaaaagatgaagaagctgaaaagaaagatgagatggatgatgataccatgtttaccacgttaggtgaagaagataaatcaaagccctttgtggcccctcgctgggccactcgagtatttgctgccgattgcctgtgtcgaatcatcaatttgtgtgagaatgcagaccaggctcactttgatcttgccttggcacgttctgctaaacttcgaaaccctacaaatgacctcttggtacttcatctctctgacctcattcgcatggcattcatggctgcaactgatcatagcaaccagctgcgaatggctgggctccaggcgcttgaagacattatcaagaagtttgcgtctgtgcctgagccagaatttccaggtcatgtgatactggagcagtatcaggctaatgtgggagctgctctaagaccagccttttcacaagatacaccatcagatataatagcgaaagcttgccaggtatgtagtacatggataggaagtggagttgtcagtgatctcaatgatctccgtcgagtacacaatcttcttgtttcttctctggacaaagttcaggctggaaaaggatcttccagccagctgtaccgagagagtgccacgaccatggaaaaactggctgttctcaaagcttgggcagaggtatatgtggtcgctatgaatattaaaaaggaagcagagtcaaaaccaaaaagagcaattaaaaatactgacgatgatgatgacgactgtggtaccatcgatgaactgccaccagatagtttaataacactggtacaacctgaactaccaacactcagtcgcctgtggttagcagcattaaaagattatgcactcttgactttaccagccgaattttctagtcagcttcctccagatggtggagcattttatacccctgaaactattgatacagctagacttcactatcggaattcctgggccccaattctccatgcggtggcactttggttaaatagcacaggatttacgtgctcagagtctacagaagcagcagcaatatctggtttacaaaaacgttctacatctgtcaatttaaaccaggcatcaggagcagtgggtagtgctaaatctttgccagaaattaacaaagacagaatgcatctgattttaggtgtgagtatacagtttctttgttcccctagacctgaggagcccattgaacatgttacagcatgcctgcaggccttacataccttgctagactccccttatgctcgagtccatattgcagaagatcagctgataggtgttgagttgctgagtgttttgcaccgccttctattgacctggaatccatcatctgtccagctgttggttactggagttgtacaacagatagtaagagctgctcaggattatttgcaagagaaaagaaacactctaaatgaagatgatatggaaaaagaggcctgtaccgtattgggagaaggaggtgacagcggtggtctcattcctggaaaatctcttgtgtttgcaactatggagctgctgatgttcattttagtacggcatatgccacatctcagtaccaaggtgtcagactctccaagtcacatagccactaaaactcgactatcagaagaaagtgctcgtttggtggcagccacagttaccatactctctgatttaccatccctttgttcacccgctggatgtatgacaatcctgcccacaattctgttcttaattgcaagaatattgaaagacacagcaataaagtctgcagataatcaggttcctccaccagtcagtgcagctcttcaagggattaaaagtattgtgacactttcaatggccaaaactgaggctggcgttcaaaaacagtggacagctctgattcgtagcacgcttgcttgcatcctggaatattctcaaccagaagactctgtacctacacctgatgaagtaagcatgctaacagcaattgcactcttcctgtggtctgctagtaatgaaataataggagtccagtcattacagaatggctgcatgaacagatttaaaaatgcattaaattcatgcgacccatgggttcaagccaaatgttaccagcttctcctctcagtcttccagcattccaatcgtgccctttcaactccttatattcattcattagctccaatagtggttgaaaagctaaaagctgttgaaagaaacagaccagccagtaacatagagcttttagcggttcaagaaggaataaaagttcttgaaacactggttgctcttggtgaagaacaaaacattctaggtagtcagcctgaatctactttacgttccctgcctccagaccctattctcctgcctcctgcccacaactcccaggctccagtgatctacccgcctcggcctcccaaagtgctgggattacaggcgtgagccatggcgcctggccaaaatgtaaatgagtcctcgtaaagcaaaaaaagtattgtgagtaataaagttgaactacgaatta

SEQ ID NO: 443547 - DNA, 4521 bp, Homo sapiens
caggtgtgcagaacggctcaacaacttgaagacctcaccagaagctgtcagtggatatagttttgcaatggctgctttgttaggtggagtacatcagtgtcctttgggcattcctcatgccaaaggaaagatggtagttagtattgctgaagatcttttacgaactgctgcccaaaatagcaggctatctttacagcgcacccaagctggctggcttttacttggagcacttatgactttaggaccatctgtcgttcgttaccatctgcccaagatgttgttattgtggcgaaatgttttcccacgttccttaaaggaattggaagctgagaaggcccgaggcgattcttttacctggcaggtaactttggaaggtcgtgctggagctctatgtgccatgaggagcttcgttgcacattgtcctgagctactaactgaagatgtgattcgaaaattgatgacccctattgaatgtgccatgactatgatgtcacacattccatctgtaatgaaagcccatggagctcatctgaaagctagtgctgcaatggtccgtttaagactttatgatatcttggctttgttacctccaaaaacttatgaaggatcttttaatgcacttcttagagaactggtagcggaattcactttgactgacaactcagccaacacaactacttccctcctcagatccctctgccattatgatgatagtgttcttcttggttcttggcttcaggaaactgatcataaatcaattgaagaccagctccagccaaacagtgcctctggaagtggggctctggagcatgatccttcctctatttatttacgcatacctgctggagaagcagtacctggtcccctccctctcggagtctcagtcattgatgcttctgtggccctttttggtgtagtgtttcctcatgtttcttataaacaccgattacaaatgttggatcactttgctgaatgtgttaaacaagctaaaggtgtccgccagcaggctgtgcagcttaacatatttactgctgttcttagtgcactaaagggcttagctgaaaacaaaagtactttaggacctgaggaagttcgtaaatctgccctgacactggttatgggtcctctggacaacccaaaccccatcttacgttgtgcagcgggggaagctcttggaagaatggctcaggtggttggagaagcaacttttattgctagaatggcccaatatagctttgacaagttgaaatcggctcgagatgttgtatctaggactggtcattcattggctcttggttgtttgcatcgttatgttggtggaataggctcaggacaacatctgaagaccagtgtcagcattttattggctctagcacaagatgggacatcccctgaagtccagacttggtctcttcattcacttgctttgatagtggattctagtggtccgatgtatcgtggctatgtggaaccaacattatctctagttcttaccttgctgttgacagttccgccttcacatacagaagttcatcagtgtttgggtcgatgcttgggtgctataataactactgttggccctgaactacaagggaatggagcaacaacttctacaattcgttcctcttgtttggtgggttgtgcaataacacaagaccattcagattctcttgttcaggcagctgccatatcttgccttcagcagcttcacatgtttgcaccacgacatgtcaatctatctagccttgttcctagcctttgtgttcacttatgtagttcccatttgttacttcgacgagcagctgtggcatgtcttcggcaacttgcacaaagagaagcagcggaagtatgtgaatatgccatgagcctggcaaaaaatacaggggacaaagagagcagtagtgccaatgtcagtccttttgcccctggggttagttctcgaactgatatccattgccggcaccaaggtgttaatataacagaaactggtcttgagggacttctttttggaatgctagaccgggagacagatcgaaaattatgttctgatattcatgacactttgggacatatgctttcttcgctggcagtagaaaaactttctcattggctaatgctttgtaaagatgtcctggcagcttctagtgatatgagtactgcaactctcttaagtagtggaaaagatgaagaagctgaaaagaaagatgagatggatgatgataccatgtttaccacgttaggtgaagaagataaatcaaagccctttgtggcccctcgctgggccactcgagtatttgctgccgattgcctgtgtcgaatcatcaatttgtgtgagaatgcagaccaggctcactttgatcttgccttggcacgttctgctaaacttcgaaaccctacaaatgacctcttggtacttcatctctctgacctcattcgcatggcattcatggctgcaactgatcatagcaaccagctgcgaatggctgggctccaggcgcttgaagacattatcaagaagtttgcgtctgtgcctgagccagaatttccaggtcatgtgatactggagcagtatcaggctaatgtgggagctgctctaagaccagccttttcacaagatacaccatcagatataatagcgaaagcttgccaggtatgtagtacatggataggaagtggagttgtcagtgatctcaatgatctccgtcgagtacacaatcttcttgtttcttctctggacaaagttcaggctggaaaaggatcttccagccagctgtaccgagagagtgccacgaccatggaaaaactggctgttctcaaagcttgggcagaggtatatgtggtcgctatgaatattaaaaaggaagcagagtcaaaaccaaaaagagcaattaaaaatactgacgatgatgatgacgactgtggtaccatcgatgaactgccaccagatagtttaataacactggtacaacctgaactaccaacactcagtcgcctgtggttagcagcattaaaagattatgcactcttgactttaccagccgaattttctagtcagcttcctccagatggtggagcattttatacccctgaaactattgatacagctagacttcactatcggaattcctgggccccaattctccatgcggtggcactttggttaaatagcacaggatttacgtgctcagagtctacagaagcagcagcaatatctggtttacaaaaacgttctacatctgtcaatttaaaccaggcatcaggagcagtgggtagtgctaaatctttgccagaaattaacaaagacagaatgcatctgattttaggtgtgagtatacagtttctttgttcccctagacctgaggagcccattgaacatgttacagcatgcctgcaggccttacataccttgctagactccccttatgctcgagtccatattgcagaagatcagctgataggtgttgagttgctgagtgttttgcaccgccttctattgacctggaatccatcatctgtccagctgttggttactggagttgtacaacagatagtaagagctgctcaggattatttgcaagagaaaagaaacactctaaatgaagatgatatggaaaaagaggcctgtaccgtattgggagaaggaggtgacagcggtggtctcattcctggaaaatctcttgtgtttgcaactatggagctgctgatgttcattttagtacggcatatgccacatctcagtaccaaggtgtcagactctccaagtcacatagccactaaaactcgactatcagaagaaagtgctcgtttggtggcagccacagttaccatactctctgatttaccatccctttgttcacccgctggatgtatgacaatcctgcccacaattctgttcttaattgcaagaatattgaaagacacagcaataaagtctgcagataatcaggttcctccaccagtcagtgcagctcttcaagggattaaaagtattgtgacactttcaatggccaaaactgaggctggcgttcaaaaacagtggacagctctgattcgtagcacgcttgcttgcatcctggaatattctcaaccaggttcaagccaaatgttaccagcttctcctctcagtcttccagcattccaatcgtgccctttcaactccttatattcattcattagctccaatagtggttgaaaagctaaaagctgttgaaagaaacagaccagccagtaacatagagcttttagcggttcaagaaggaataaaagttcttgaaacactggttgctcttggtgaagaacaaaacattctaggtagtcagcctgaatctactttacgttccctgcctccagaccctattctcctgcctcctgcccacaactcccaggctccagtgatctacccgcctcggcctcccaaagtgctgggattacaggcgtgagccatggcgcctggccaaaatgtaaatgagtcctcgtaaagcaaaaaaagtattgtgagtaataaagttgaactacgaatta

SEQ ID NO: 443548 - DNA, 853 bp, Homo sapiens
aaaaaaaaaaaaaaagaagaaccaggaatggcatcctagagttactggggcccttttctcaactacacagattgtcaaacttggcaatattacaaaacaattctgaagacaataaaattatctctaaacctaaactgtccagtagagtagccactaacccctatagctattgagcatttgaatgtggtcaggccaaactaaggtgtgctatagcaatatacaaactacatttcaatgactttgtacaaaaaagaatgtaaaatatccctataataaaaaaaagacgtaaaatatcccattaatcatttgttagttgattacatgttgaaatgatattttggatatgttgggttaagtaaaatgttaaaatttcagctgtattttttttttcttttccgatgtggctactagaaaatttaaaatgacacatggctcacattttacttcttttagccagtgctgctctagactgagtttgcatgaggtgtaactgtctagagctatagtgacatgtaagtaatatacatgctttgtacaaaatctccctataaactgctgattttgaaattgaagtcatgaaagacagattgaaccgatagagtcctttgagagtcaccagttactggtccactctctgtatccttttgatatttgcatttggcaagtataaacccgaccaggataggggatggggggaggaatccactggttatttgatgcaaaaaaagagagagaaaaagtgggggggtgcacttatagtcccagctacttgggaggctgaggtgggaggatcacttgagcccaggagtatgcgtttagcctgggcaacatatgaaaccccatctctttttta

SEQ ID NO: 443549 - DNA, 896 bp, Homo sapiens
aaaaaaaaaaaaaaagaagaaccaggaatggcatcctagagttactggggcccttttctcaactacacagattgtcaaacttggcaatattacaaaacaattctgaagacaataaaattatctctaaacctaaactgtccagtagagtagccactaacccctatagctattgagcatttgaatgtggtcaggccaaactaaggtgtgctatagcaatatacaaactacatttcaatgactttgtacaaaaaagaatgtaaaatatccctataataaaaaaaagacgtaaaatatcccattaatcatttgttagttgattacatgttgaaatgatattttggatatgttgggttaagtaaaatgttaaaatttcagctgtattttttttttcttttccgatgtggctactagaaaatttaaaatgacacatggctcacattttacttcttttagccagtgctgctctagactgagtttgcatgaggtgtaactgtctagagctatagtgacatgtaagtaatatacatgctttgtacaaaatctccctataaactgctgattttgaaattgaagtcatgaaagacagattgaaccgatagagtcctttgagagtcaccagttactggtccactctctgtatccttttgatatttgcatttggcaagtataaacccgaccaggataggggatggggggaggaatccactggttatttgatgcaaaaaaagagagagaaaaagtgggggggtgcacttatagtcccagctacttgggaggctgaggtgggaggatcatacttccttcccagttctagattagtctgggcgacacagcaagaattatttctatcaaaaagtcaaaaaagaagtcgatcaaaataataatgtaacatctac

SEQ ID NO: 443550 - DNA, 3683 bp, Homo sapiens
caggtgcgagccactgcgctcggccgatactttcttagtgccccagtttaaggaagggcggttcaggagcagagagtctgacaggatcttactttatccctttagctctttttctttcaaattcctctgtctcgcttaaatcttcccgcatcttctcctttctatttaattctgccttccccggttctccttagaacctcatgtccttttctttagctccatttctttcacctcaaagctggccgccaccgctgccacctgctcagagtgaaataatgaaggtggtcaacctgaagcaagccattttgcaagcctggaaggagcgctggagtgactaccaatgggcaatcaacatgaagaaattctttcctaaaggagccacctgggatattctcaacctggcagatgcgttactagagcaggccatgattggaccatcccccaatcctctcatcttgtcctacctgaagtatgccattagttcccagatggtgtcctactcttctgtcctcacagccatcagtaagtttgatgacttttctcgggacctgtgtgtccaggcattgctggacatcatggacatgttttgtgaccgtctgagctgtcacggcaaagcagaggaatgcatcggactgtgccgagcccttcttagcgccctccactggctgctgcgctgcacggcagcctctgcagagcggctgcgggaggggctggaggccggcactccagccgctggggagaagcagcttgccatgtgccttcagcgcctggagaaaaccctcagcagcaccaagaaccgggccctgctgcacatcgccaaactagaggaggcctcttcttggactgccatcgagcattctctcttgaaacttggagagatcctggccaatctcagcaacccgcagctccggagtcaggccgagcagtgtggcaccctcattaggagcatccccacgatgctgtctgtgcatgcggagcagatgcacaagaccggcttccccactgtccacgccgtgatcctgctcgagggcaccatgaacctgacaggcgagacgcagtccctggtggagcagctgacgatggtgaagcgcatgcagcatatccccaccccactttttgtcctggagatctggaaagcttgcttcgtggggctcattgagtctcccgagggtacggaggagctcaagtggacagctttcactttcctcaagattccacaggttttggtgaagttgaagaagtactctcatggagacaaggacttcactgaggatgtcaactgtgcttttgagttcctgctgaagctcacccccttgttggacaaagctgaccagcgctgcaactgtgactgtacaaacttcctgctccaagaatgtggcaagcaggggcttctgtctgaggccagcgtcaacaaccttatggctaagcgcaaagcggaccgagagcacgcaccccagcagaaatcgggagagaatgccaacatccagcccaacatccagctgatcctccgggcggagcccactgtcacaaacatcctcaagacgatggatgcagaccactctaagtcaccggagggactgctgggagtcctgggccacatgctgtccgggaagagtctggacttgctgctggctgccgccgccgccactggaaagctgaaatccttcgcccggaaattcatcaatttgaatgaattcacaacctatggcagcgaagaaagcaccaaaccggcctccgtccgggccctgctgtttgacatctccttcctcatgctgtgccatgtggcccagacctatggttcagaggtgattctgtccgagtcgcgcacaggagctgaggtgcccttcttcgagacctggatgcagacctgcatgcctgaggagggcaagatcctgaaccctgaccacccctgcttccgccccgactccaccaaagtggagtccctggtggccctgctcaacaactcctcggagatgaagctagtgcagatgaagtggcatgaggcctgtctcagcatctcagccgccatcttggaaatcctcaatgcctgggagaatggggtcctggccttcgagtccatccagaaaatcactgataacatcaaagggaaggtatgcagtctggcggtgtgtgctgtggcttggcttgtggcccacgtccggatgctggggctggatgagcgtgagaagtcgctgcagatgatccgccagctggcagggccactgtttagtgagaacaccctgcagttctacaatgagagggtggtgatcatgaactcgatcctggagcgcatgtgtgccgacgtgctgcagcagacagccacgcagatcaagtttccctccaccggggtggacacaatgccctactggaacctgctgccccccaagcggcccatcaaagaggtgctgacggacatttttgccaaggtgctggagaagggctgggtggacagccgctccatccacatctttgacaccctgctgcacatgggcggcgtctactggttctgcaacaacctgattaaggagctgctgaaggagacgcggaaggagcacacgctgcgggcagtggagctgctctactccatcttctgcctggacatgcagcaagtgaccctggtcctgctgggccacatcctacctggcctgctcactgactcctccaagtggcacagcctcatggaccccccgggcactgctcttgccaagctggccgtgtggtgtgccctcagttcctactcctcccacaagggacaggcgtccacccgccagaagaagagacaccgcgaagacattgaggattatatcagcctcttccccctggacgatgtgcagccttcgaagttgatgcgactgctgagctctaatgaggacgatgccaacatcctttcgagccccacagaccgatccatgagcagctccctctcagcctctcagctccacacggtcaacatgcgggaccctctgaaccgagtcctggccaacctgttcctgctcatctcctccatcctggggtctcgcaccgctggcccccacacccagttcgtgcagtggttcatggaggagtgtgtggactgcctggagcagggtggccgtggcagcgtcctgcagttcatgcccttcaccaccgtgtcggaactggtgaaggtgtcagccatgtccagccccaaggtggttctggccatcacggacctcagcctgcccctgggccgccaggtggctgctaaagccattgctgcactctgaggggcttggcatggccgcagtgggggctggggactggcgcagccccaggcgcctccaagggaagcagtgaggaaagatgaggcatcgtgcctcacatccgctccacatggtgcaagagcctctagcggcttccagttccccgctcctgactcctgacctccaggatgtctcccggtttcttctttcaaaatttcctctccatctgctggcacctgaggagagtgagcagcctggaccacaagcccagtggtcacccctgtgtgcgcccgccccagcccaggagtagtcttacctctgaggaactttctagatgcaaagtgtgtatgtgtgtgtgtgtgtgtgtgtgtgtgtgtgtgtgtttatgtgtattttgtaatatgtgagggaaatctaccttcgttcatgtataaataaagctcctcgtggctccctttgtga

SEQ ID NO: 443551 - DNA, 3473 bp, Homo sapiens
aagtgccaaaatggcgatgcctaccacctagaactggattgtgcgctccatttctttcacctcaaagctggccgccaccgctgccacctgctcagagtgaaataatgaaggtggtcaacctgaagcaagccattttgcaagcctggaaggagcgctggagtgactaccaatgggcaatcaacatgaagaaattctttcctaaaggagccacctgggatattctcaacctggcagatgcgttactagagcaggccatgattggaccatcccccaatcctctcatcttgtcctacctgaagtatgccattagttcccagtttgatgacttttctcgggacctgtgtgtccaggcattgctggacatcatggacatgttttgtgaccgtctgagctgtcacggcaaagcagaggaatgcatcggactgtgccgagcccttcttagcgccctccactggctgctgcgctgcacggcagcctctgcagagcggctgcgggaggggctggaggccggcactccagccgctggggagaagcagcttgccatgtgccttcagcgcctggagaaaaccctcagcagcaccaagaaccgggccctgctgcacatcgccaaactagaggaggcctcttcttggactgccatcgagcattctctcttgaaacttggagagatcctggccaatctcagcaacccgcagctccggagtcaggccgagcagtgtggcaccctcattaggagcatccccacgatgctgtctgtgcatgcggagcagatgcacaagaccggcttccccactgtccacgccgtgatcctgctcgagggcaccatgaacctgacaggcgagacgcagtccctggtggagcagctgacgatggtgaagcgcatgcagcatatccccaccccactttttgtcctggagatctggaaagcttgcttcgtggggctcattgagtctcccgagggtacggaggagctcaagtggacagctttcactttcctcaagattccacaggttttggtgaagttgaagaagtactctcatggagacaaggacttcactgaggatgtcaactgtgcttttgagttcctgctgaagctcacccccttgttggacaaagctgaccagcgctgcaactgtgactgtacaaacttcctgctccaagaatgtggcaagcaggggcttctgtctgaggccagcgtcaacaaccttatggctaagcgcaaagcggaccgagagcacgcaccccagcagaaatcgggagagaatgccaacatccagcccaacatccagctgatcctccgggcggagcccactgtcacaaacatcctcaagacgatggatgcagaccactctaagtcaccggagggactgctgggagtcctgggccacatgctgtccgggaagagtctggacttgctgctggctgccgccgccgccactggaaagctgaaatccttcgcccggaaattcatcaatttgaatgaattcacaacctatggcagcgaagaaagcaccaaaccggcctccgtccgggccctgctgtttgacatctccttcctcatgctgtgccatgtggcccagacctatggttcagaggtgattctgtccgagtcgcgcacaggagctgaggtgcccttcttcgagacctggatgcagacctgcatgcctgaggagggcaagatcctgaaccctgaccacccctgcttccgccccgactccaccaaagtggagtccctggtggccctgctcaacaactcctcggagatgaagctagtgcagatgaagtggcatgaggcctgtctcagcatctcagccgccatcttggaaatcctcaatgcctgggagaatggggtcctggccttcgagtccatccagaaaatcactgataacatcaaagggaaggtatgcagtctggcggtgtgtgctgtggcttggcttgtggcccacgtccggatgctggggctggatgagcgtgagaagtcgctgcagatgatccgccagctggcagggccactgtttagtgagaacaccctgcagttctacaatgagagggtggtgatcatgaactcgatcctggagcgcatgtgtgccgacgtgctgcagcagacagccacgcagatcaagtttccctccaccggggtggacacaatgccctactggaacctgctgccccccaagcggcccatcaaagaggtgctgacggacatttttgccaaggtgctggagaagggctgggtggacagccgctccatccacatctttgacaccctgctgcacatgggcggcgtctactggttctgcaacaacctgattaaggagctgctgaaggagacgcggaaggagcacacgctgcgggcagtggagctgctctactccatcttctgcctggacatgcagcaagtgaccctggtcctgctgggccacatcctacctggcctgctcactgactcctccaagtggcacagcctcatggaccccccgggcactgctcttgccaagctggccgtgtggtgtgccctcagttcctactcctcccacaagggacaggcgtccacccgccagaagaagagacaccgcgaagacattgaggattatatcagcctcttccccctggacgatgtgcagccttcgaagttgatgcgactgctgagctctaatgaggacgatgccaacatcctttcgagccccacagaccgatccatgagcagctccctctcagcctctcagctccacacggtcaacatgcgggaccctctgaaccgagtcctggccaacctgttcctgctcatctcctccatcctggggtctcgcaccgctggcccccacacccagttcgtgcagtggttcatggaggagtgtgtggactgcctggagcagggtggccgtggcagcgtcctgcagttcatgcccttcaccaccgtgtcggaactggtgaaggtgtcagccatgtccagccccaaggtggttctggccatcacggacctcagcctgcccctgggccgccaggtggctgctaaagccattgctgcactctgaggggcttggcatggccgcagtgggggctggggactggcgcagccccaggcgcctccaagggaagcagtgaggaaagatgaggcatcgtgcctcacatccgctccacatggtgcaagagcctctagcggcttccagttccccgctcctgactcctgacctccaggatgtctcccggtttcttctttcaaaatttcctctccatctgctggcacctgaggagagtgagcagcctggaccacaagcccagtggtcacccctgtgtgcgcccgccccagcccaggagtagtcttacctctgaggaactttctagatgcaaagtgtgtatgtgtgtgtgtgtgtgtgtgtgtgtgtgtgtgtgtttatgtgtattttgtaatatgtgagggaaatctaccttcgttcatgtataaataaagctcctcgtggctccctttgtga

SEQ ID NO: 443552 - DNA, 3816 bp, Homo sapiens
caggtgcgagccactgcgctcggccgatactttcttagtgccccagtttaaggaagggcggttcaggagcagagagtctgacaggatcttactttatccctttagctctttttctttcaaattcctctgtctcgcttaaatcttcccgcatcttctcctttctatttaattctgccttccccggttctccttagaacctcatgtccttttctttagctccatttctttcacctcaaagctggccgccaccgctgccacctgctcagagtgaaataatgaaggtggtcaacctgaagcaagccattttgcaagcctggaaggagcgctggagtgactaccaatgggcaatcaacatgaagaaattctttcctaaaggagccacctgggatattctcaacctggcagatgcgttactagagcaggccatgattggaccatcccccaatcctctcatcttgtcctacctgaagtatgccattagttcccagatggtgtcctactcttctgtcctcacagccatcagtaagtttgatgacttttctcgggacctgtgtgtccaggcattgctggacatcatggacatgttttgtgaccgtctgagctgtcacggcaaagcagaggaatgcatcggactgtgccgagcccttcttagcgccctccactggctgctgcgctgcacggcagcctctgcagagcggctgcgggaggggctggaggccggcactccagccgctggggagaagcagcttgccatgtgccttcagcgcctggagaaaaccctcagcagcaccaagaaccgggccctgctgcacatcgccaaactagaggaggcctcttcttggactgccatcgagcattctctcttgaaacttggagagatcctggccaatctcagcaacccgcagctccggagtcaggccgagcagtgtggcaccctcattaggagcatccccacgatgctgtctgtgcatgcggagcagatgcacaagaccggcttccccactgtccacgccgtgatcctgctcgagggcaccatgaacctgacaggcgagacgcagtccctggtggagcagctgacgatggtgaagcgcatgcagcatatccccaccccactttttgtcctggagatctggaaagcttgcttcgtggggctcattgagtctcccgagggtacggaggagctcaagtggacagctttcactttcctcaagattccacaggttttggtgaagttgaagaagtactctcatggagacaaggacttcactgaggatgtcaactgtgcttttgagttcctgctgaagctcacccccttgttggacaaagctgaccagcgctgcaactgtgactgtacaaacttcctgctccaagaatgtggcaagcaggggcttctgtctgaggccagcgtcaacaaccttatggctaagcgcaaagcggaccgagagcacgcaccccagcagaaatcgggagagaatgccaacatccagcccaacatccagctgatcctccgggcggagcccactgtcacaaacatcctcaagacgatggatgcagaccactctaagtcaccggagggactgctgggagtcctgggccacatgctgtccgggaagagtctggacttgctgctggctgccgccgccgccactggaaagctgaaatccttcgcccggaaattcatcaatttgaatgaattcacaacctatggcagcgaagaaagcaccaaaccggcctccgtccgggccctgctgtttgacatctccttcctcatgctgtgccatgtggcccagacctatggttcagaggtgattctgtccgagtcgcgcacaggagctgaggtgcccttcttcgagacctggatgcagacctgcatgcctgaggagggcaagatcctgaaccctgaccacccctgcttccgccccgactccaccaaagtggagtccctggtggccctgctcaacaactcctcggagatgaagctagtgcagatgaagtggcatgaggcctgtctcagcatctcagccgccatcttggaaatcctcaatgcctgggagaatggggtcctggccttcgagtccatccagaaaatcactgataacatcaaagggaaggtatgcagtctggcggtgtgtgctgtggcttggcttgtggcccacgtccggatgctggggctggatgagcgtgagaagtcgctgcagatgatccgccagctggcagggccactgtttagtgagaacaccctgcagttctacaatgagagggtggtgatcatgaactcgatcctggagcgcatgtgtgccgacgtgctgcagcagacagccacgcagatcaagtttccctccaccggggtggacacaatgccctactggaacctgctgccccccaagcggcccatcaaagaggtgctgacggacatttttgccaaggtgctggagaagggctgggtggacagccgctccatccacatctttgacaccctgctgcacatgggcggcgtctactggttctgcaacaacctgattaaggagctgctgaaggagacgcggaaggagcacacgctgcgggcagtggagctgctctactccatcttctgcctggacatgcagcaagtgaccctggtcctgctgggccacatcctacctggcctgctcactgactcctccaagtggcacagcctcatggaccccccgggcactgctcttgccaagctggccgtgtggtgtgccctcagttcctactcctcccacaagggacaggcgtccacccgccagaagaagagacaccgcgaagacattgaggattatatcagcctcttccccctggacgatgtgcagccttcgaagttgatgcgactgctgagctctaatgaggacgatgccaacatcctttcgagccccatcagggtcttctctgggctctccatgtaccagttacctccgatgggtgaaggtcgggttggggcatccccggggagcaccacttttgcactcggcaggctgtttcccagcgctccatctgctccgtcccacagcagaccgatccatgagcagctccctctcagcctctcagctccacacggtcaacatgcgggaccctctgaaccgagtcctggccaacctgttcctgctcatctcctccatcctggggtctcgcaccgctggcccccacacccagttcgtgcagtggttcatggaggagtgtgtggactgcctggagcagggtggccgtggcagcgtcctgcagttcatgcccttcaccaccgtgtcggaactggtgaaggtgtcagccatgtccagccccaaggtggttctggccatcacggacctcagcctgcccctgggccgccaggtggctgctaaagccattgctgcactctgaggggcttggcatggccgcagtgggggctggggactggcgcagccccaggcgcctccaagggaagcagtgaggaaagatgaggcatcgtgcctcacatccgctccacatggtgcaagagcctctagcggcttccagttccccgctcctgactcctgacctccaggatgtctcccggtttcttctttcaaaatttcctctccatctgctggcacctgaggagagtgagcagcctggaccacaagcccagtggtcacccctgtgtgcgcccgccccagcccaggagtagtcttacctctgaggaactttctagatgcaaagtgtgtatgtgtgtgtgtgtgtgtgtgtgtgtgtgtgtgtgtttatgtgtattttgtaatatgtgagggaaatctaccttcgttcatgtataaataaagctcctcgtggctccctttgtga

SEQ ID NO: 443553 - DNA, 1724 bp, Homo sapiens
cggcactgcttcggatgaagctagtgcagatgaagtggcatgaggcctgtctcagcatctcagccgccatcttggaaatcctcaatgcctgggagaatggggtcctggccttcgagtccatccagaaaatcactgataacatcaaagggaaggtatgcagtctggcggtgtgtgctgtggcttggcttgtggcccacgtccggatgctggggctggatgagcgtgagaagtcgctgcagatgatccgccagctggcagggccactgtttagtgagaacaccctgcagttctacaatgagagggtggtgatcatgaactcgatcctggagcgcatgtgtgccgacgtgctgcagcagacagccacgcagatcaagtttccctccaccggggtggacacaatgccctactggaacctgctgccccccaagcggcccatcaaagaggtgctgacggacatttttgccaaggtgctggagaagggctgggtggacagccgctccatccacatctttgacaccctgctgcacatgggcggcgtctactggttctgcaacaacctgattaaggagctgctgaaggagacgcggaaggagcacacgctgcgggcagtggagctgctctactccatcttctgcctggacatgcagcaagtgaccctggtcctgctgggccacatcctacctggcctgctcactgactcctccaagtggcacagcctcatggaccccccgggcactgctcttgccaagctggccgtgtggtgtgccctcagttcctactcctcccacaagggacaggcgtccacccgccagaagaagagacaccgcgaagacattgaggattatatcagcctcttccccctggacgatgtgcagccttcgaagttgatgcgactgctgagctctaatgaggacgatgccaacatcctttcgagccccacagaccgatccatgagcagctccctctcagcctctcagctccacacggtcaacatgcgggaccctctgaaccgagtcctggccaacctgttcctgctcatctcctccatcctggggtctcgcaccgctggcccccacacccagttcgtgcagtggttcatggaggagtgtgtggactgcctggagcagggtggccgtggcagcgtcctgcagttcatgcccttcaccaccgtgtcggaactggtgaaggtgtcagccatgtccagccccaaggtggttctggccatcacggacctcagcctgcccctgggccgccaggtggctgctaaagccattgctgcactctgaggggcttggcatggccgcagtgggggctggggactggcgcagccccaggcgcctccaagggaagcagtgaggaaagatgaggcatcgtgcctcacatccgctccacatggtgcaagagcctctagcggcttccagttccccgctcctgactcctgacctccaggatgtctcccggtttcttctttcaaaatttcctctccatctgctggcacctgaggagagtgagcagcctggaccacaagcccagtggtcacccctgtgtgcgcccgccccagcccaggagtagtcttacctctgaggaactttctagatgcaaagtgtgtatgtgtgtgtgtgtgtgtgtgtgtgtgtgtgtgtgtttatgtgtattttgtaatatgtgagggaaatctaccttcgttcatgtataaataaagctcctcgtggctccctttgtga

SEQ ID NO: 443554 - DNA, 1117 bp, Homo sapiens
cgggtgcatgcatgtgggaaggcaaaagcattgtggacaaagaaggtgtccccggttctatatccgcatcctacctggcctgctcactgactcctccaagtggcacagcctcatggaccccccgggcactgctcttgccaagctggccgtgtggtgtgccctcagttcctactcctcccacaagggacaggcgtccacccgccagaagaagagacaccgcgaagacattgaggattatatcagcctcttccccctggacgatgtgcagccttcgaagttgatgcgactgctgagctctaatgaggacgatgccaacatcctttcgagccccacagaccgatccatgagcagctccctctcagcctctcagctccacacggtcaacatgcgggaccctctgaaccgagtcctggccaacctgttcctgctcatctcctccatcctggggtctcgcaccgctggcccccacacccagttcgtgcagtggttcatggaggagtgtgtggactgcctggagcagggtggccgtggcagcgtcctgcagttcatgcccttcaccaccgtgtcggaactggtgaaggtgtcagccatgtccagccccaaggtggttctggccatcacggacctcagcctgcccctgggccgccaggtggctgctaaagccattgctgcactctgaggggcttggcatggccgcagtgggggctggggactggcgcagccccaggcgcctccaagggaagcagtgaggaaagatgaggcatcgtgcctcacatccgctccacatggtgcaagagcctctagcggcttccagttccccgctcctgactcctgacctccaggatgtctcccggtttcttctttcaaaatttcctctccatctgctggcacctgaggagagtgagcagcctggaccacaagcccagtggtcacccctgtgtgcgcccgccccagcccaggagtagtcttacctctgaggaactttctagatgcaaagtgtgtatgtgtgtgtgtgtgtgtgtgtgtgtgtgtgtgtgtttatgtgtattttgtaatatgtgagggaaatctaccttcgttcatgtataaataaagctcctcgtggctccctttgtga

SEQ ID NO: 443555 - DNA, 945 bp, Homo sapiens
tcatggcccccactacgacaggttcacccgcgaggaaagagacaccgcgaagacattgaggattatatcagcctcttccccctggacgatgtgcagccttcgaagttgatgcgactgctgagctctaatgaggacgatgccaacatcctttcgagccccacagaccgatccatgagcagctccctctcagcctctcagctccacacggtcaacatgcgggaccctctgaaccgagtcctggccaacctgttcctgctcatctcctccatcctggggtctcgcaccgctggcccccacacccagttcgtgcagtggttcatggaggagtgtgtggactgcctggagcagggtggccgtggcagcgtcctgcagttcatgcccttcaccaccgtgtcggaactggtgaaggtgtcagccatgtccagccccaaggtggttctggccatcacggacctcagcctgcccctgggccgccaggtggctgctaaagccattgctgcactctgaggggcttggcatggccgcagtgggggctggggactggcgcagccccaggcgcctccaagggaagcagtgaggaaagatgaggcatcgtgcctcacatccgctccacatggtgcaagagcctctagcggcttccagttccccgctcctgactcctgacctccaggatgtctcccggtttcttctttcaaaatttcctctccatctgctggcacctgaggagagtgagcagcctggaccacaagcccagtggtcacccctgtgtgcgcccgccccagcccaggagtagtcttacctctgaggaactttctagatgcaaagtgtgtatgtgtgtgtgtgtgtgtgtgtgtgtgtgtgtgtgtttatgtgtattttgtaatatgtgagggaaatctaccttcgttcatgtataaataaagctcctcgtggctccctttgtga

SEQ ID NO: 443556 - DNA, 2926 bp, Homo sapiens
caggtgcgagccactgcgctcggccgatactttcttagtgccccagtttaaggaagggcggttcaggagcagagagtctgacaggatcttactttatccctttagctctttttctttcaaattcctctgtctcgcttaaatcttcccgcatcttctcctttctatttaattctgccttccccggttctccttagaacctcatgtccttttctttagctccatttctttcacctcaaagctggccgccaccgctgccacctgctcagagtgaaataatgaaggtggtcaacctgaagcaagccattttgcaagcctggaaggagcgctggagtgactaccaatgggcaatcaacatgaagaaattctttcctaaaggagccacctgggatattctcaacctggcagatgcgttactagagcaggccatgattggaccatcccccaatcctctcatcttgtcctacctgaagtatgccattagttcccagatggtgtcctactcttctgtcctcacagccatcagtaagtttgatgacttttctcgggacctgtgtgtccaggcattgctggacatcatggacatgttttgtgaccgtctgagctgtcacggcaaagcagaggaatgcatcggactgtgccgagcccttcttagcgccctccactggctgctgcgctgcacggcagcctctgcagagcggctgcgggaggggctggaggccggcactccagccgctggggagaagcagcttgccatgtgccttcagcgcctggagaaaaccctcagcagcaccaagaaccgggccctgctgcacatcgccaaactagaggaggcctcttcttggactgccatcgagcattctctcttgaaacttggagagatcctggccaatctcagcaacccgcagctccggagtcaggccgagcagtgtggcaccctcattaggagcatccccacgatgctgtctgtgcatgcggagcagatgcacaagaccggcttccccactgtccacgccgtgatcctgctcgagggcaccatgaacctgacaggcgagacgcagtccctggtggagcagctgacgatggtgaagcgcatgcagcatatccccaccccactttttgtcctggagatctggaaagcttgcttcgtggggctcattgagtctcccgagggtacggaggagctcaagtggacagctttcactttcctcaagattccacaggttttggtgaagttgaagaagtactctcatggagacaaggacttcactgaggatgtcaactgtgcttttgagttcctgctgaagctcacccccttgttggacaaagctgaccagcgctgcaactgtgactgtacaaacttcctgctccaagaatgtggcaagcaggggcttctgtctgaggccagcgtcaacaaccttatggctaagcgcaaagcggaccgagagcacgcaccccagcagaaatcgggagagaatgccaacatccagcccaacatccagctgatcctccgggcggagcccactgtcacaaacatcctcaagacgatggatgcagaccactctaagtcaccggagggactgctgggagtcctgggccacatgctgtccgggaagagtctggacttgctgctggctgccgccgccgccactggaaagctgaaatccttcgcccggaaattcatcaatttgaatgaattcacaacctatggcagcgaagaaagcaccaaaccggcctccgtccgggccctgctgtttgacatctccttcctcatgctgtgccatgtggcccagacctatggttcagaggtgattctgtccgagtcgcgcacaggagctgaggtgcccttcttcgagacctggatgcagacctgcatgcctgaggagggcaagatcctgaaccctgaccacccctgcttccgccccgactccaccaaagtggagtccctggtggccctgctcaacaactcctcggagatgaagctagtgcagatgaagtggcatgaggcctgtctcagcatctcagccgccatcttggaaatcctcaatgcctgggagaatggggtcctggccttcgagtccatccagaaaatcactgataacatcaaagggaaggtatgcagtctggcggtgtgtgctgtggcttggcttgtggcccacgtccggatgctggggctggatgagcgtgagaagtcgctgcagatgatccgccagctggcagggccactgtttagtgagaacaccctgcagttctacaatgagagggtggtgatcatgaactcgatcctggagcgcatgtgtgccgacgtgctgcagcagacagccacgcagatcaagtttccctccaccggggtggacacaatgccctactggaacctgctgccccccaagcggcccatcaaagaggtgctgacggacatttttgccaaggtgctggagaagggctgggtggacagccgctccatccacatctttgacaccctgctgcacatgggcggcgtctactggttctgcaacaacctgattaaggagctgctgaaggagacgcggaaggagcacacgctgcgggcagtggagctgctctactccatcttctgcctggacatgcagcaagtgaccctggtcctgctgggccacatcctacctggcctgctcactgactcctccaagtggcacagcctcatggaccccccgggcactgctcttgccaagctggccgtgtggtgtgccctcagttcctactcctcccacaagggacaggcgtccacccgccagaagaagagacaccgcgaagacattgaggattatatcagcctcttccccctggacgatgtgcagccttcgaagttgatgcgactgctgagctctaatgaggacgatgccaacatcctttcgagccccatatccatatccgatccatagatacagtt

SEQ ID NO: 443557 - DNA, 2829 bp, Homo sapiens
caggtgcgagccactgcgctcggccgatactttcttagtgccccagtttaaggaagggcggttcaggagcagagagtctgacaggatcttactttatccctttagctctttttctttcaaattcctctgtctcgcttaaatcttcccgcatcttctcctttctatttaattctgccttccccggttctccttagaacctcatgtccttttctttagctccatttctttcacctcaaagctggccgccaccgctgccacctgctcagagtgaaataatgaaggtggtcaacctgaagcaagccattttgcaagcctggaaggagcgctggagtgactaccaatgggcaatcaacatgaagaaattctttcctaaaggagccacctgggatattctcaacctggcagatgcgttactagagcaggccatgattggaccatcccccaatcctctcatcttgtcctacctgaagtatgccattagttcccagatggtgtcctactcttctgtcctcacagccatcagtaagtttgatgacttttctcgggacctgtgtgtccaggcattgctggacatcatggacatgttttgtgaccgtctgagctgtcacggcaaagcagaggaatgcatcggactgtgccgagcccttcttagcgccctccactggctgctgcgctgcacggcagcctctgcagagcggctgcgggaggggctggaggccggcactccagccgctggggagaagcagcttgccatgtgccttcagcgcctggagaaaaccctcagcagcaccaagaaccgggccctgctgcacatcgccaaactagaggaggcctcttcttggactgccatcgagcattctctcttgaaacttggagagatcctggccaatctcagcaacccgcagctccggagtcaggccgagcagtgtggcaccctcattaggagcatccccacgatgctgtctgtgcatgcggagcagatgcacaagaccggcttccccactgtccacgccgtgatcctgctcgagggcaccatgaacctgacaggcgagacgcagtccctggtggagcagctgacgatggtgaagcgcatgcagcatatccccaccccactttttgtcctggagatctggaaagcttgcttcgtggggctcattgagtctcccgagggtacggaggagctcaagtggacagctttcactttcctcaagattccacaggttttggtgaagttgaagaagtactctcatggagacaaggacttcactgaggatgtcaactgtgcttttgagttcctgctgaagctcacccccttgttggacaaagctgaccagcgctgcaactgtgactgtacaaacttcctgctccaagaatgtggcaagcaggggcttctgtctgaggccagcgtcaacaaccttatggctaagcgcaaagcggaccgagagcacgcaccccagcagaaatcgggagagaatgccaacatccagcccaacatccagctgatcctccgggcggagcccactgtcacaaacatcctcaagacgatggatgcagaccactctaagtcaccggagggactgctgggagtcctgggccacatgctgtccgggaagagtctggacttgctgctggctgccgccgccgccactggaaagctgaaatccttcgcccggaaattcatcaatttgaatgaattcacaacctatggcagcgaagaaagcaccaaaccggcctccgtccgggccctgctgtttgacatctccttcctcatgctgtgccatgtggcccagacctatggttcagaggtgattctgtccgagtcgcgcacaggagctgaggtgcccttcttcgagacctggatgcagacctgcatgcctgaggagggcaagatcctgaaccctgaccacccctgcttccgccccgactccaccaaagtggagtccctggtggccctgctcaacaactcctcggagatgaagctagtgcagatgaagtggcatgaggcctgtctcagcatctcagccgccatcttggaaatcctcaatgcctgggagaatggggtcctggccttcgagtccatccagaaaatcactgataacatcaaagggaaggtatgcagtctggcggtgtgtgctgtggcttggcttgtggcccacgtccggatgctggggctggatgagcgtgagaagtcgctgcagatgatccgccagctggcagggccactgtttagtgagaacaccctgcagttctacaatgagagggtggtgatcatgaactcgatcctggagcgcatgtgtgccgacgtgctgcagcagacagccacgcagatcaagtttccctccaccggggtggacacaatgccctactggaacctgctgccccccaagcggcccatcaaagaggtgctgacggacatttttgccaaggtgctggagaagggctgggtggacagccgctccatccacatctttgacaccctgctgcacatgggcggcgtctactggttctgcaacaacctgattaaggagctgctgaaggagacgcggaaggagcacacgctgcgggcagtggagctgctctactccatcttctgcctggacatgcagcaagtgaccctggtcctgctgggccacatcctacctggcctgctcactgactcctccaagtggcacagcctcatggaccccccgggcactgctcttgccaagctggccgtgtggtgtgccctcagttcctactcctcccacaagggacaggcgtccacccgccagcggaaggtctttcccagtgacaaccacgtaggctgggcagggttgtacatcataggaa

SEQ ID NO: 443558 - DNA, 2771 bp, Homo sapiens
caggtgcgagccactgcgctcggccgatactttcttagtgccccagtttaaggaagggcggttcaggagcagagagtctgacaggatcttactttatccctttagctctttttctttcaaattcctctgtctcgcttaaatcttcccgcatcttctcctttctatttaattctgccttccccggttctccttagaacctcatgtccttttctttagctccatttctttcacctcaaagctggccgccaccgctgccacctgctcagagtgaaataatgaaggtggtcaacctgaagcaagccattttgcaagcctggaaggagcgctggagtgactaccaatgggcaatcaacatgaagaaattctttcctaaaggagccacctgggatattctcaacctggcagatgcgttactagagcaggccatgattggaccatcccccaatcctctcatcttgtcctacctgaagtatgccattagttcccagatggtgtcctactcttctgtcctcacagccatcagtaagtttgatgacttttctcgggacctgtgtgtccaggcattgctggacatcatggacatgttttgtgaccgtctgagctgtcacggcaaagcagaggaatgcatcggactgtgccgagcccttcttagcgccctccactggctgctgcgctgcacggcagcctctgcagagcggctgcgggaggggctggaggccggcactccagccgctggggagaagcagcttgccatgtgccttcagcgcctggagaaaaccctcagcagcaccaagaaccgggccctgctgcacatcgccaaactagaggaggcctcttcttggactgccatcgagcattctctcttgaaacttggagagatcctggccaatctcagcaacccgcagctccggagtcaggccgagcagtgtggcaccctcattaggagcatccccacgatgctgtctgtgcatgcggagcagatgcacaagaccggcttccccactgtccacgccgtgatcctgctcgagggcaccatgaacctgacaggcgagacgcagtccctggtggagcagctgacgatggtgaagcgcatgcagcatatccccaccccactttttgtcctggagatctggaaagcttgcttcgtggggctcattgagtctcccgagggtacggaggagctcaagtggacagctttcactttcctcaagattccacaggttttggtgaagttgaagaagtactctcatggagacaaggacttcactgaggatgtcaactgtgcttttgagttcctgctgaagctcacccccttgttggacaaagctgaccagcgctgcaactgtgactgtacaaacttcctgctccaagaatgtggcaagcaggggcttctgtctgaggccagcgtcaacaaccttatggctaagcgcaaagcggaccgagagcacgcaccccagcagaaatcgggagagaatgccaacatccagcccaacatccagctgatcctccgggcggagcccactgtcacaaacatcctcaagacgatggatgcagaccactctaagtcaccggagggactgctgggagtcctgggccacatgctgtccgggaagagtctggacttgctgctggctgccgccgccgccactggaaagctgaaatccttcgcccggaaattcatcaatttgaatgaattcacaacctatggcagcgaagaaagcaccaaaccggcctccgtccgggccctgctgtttgacatctccttcctcatgctgtgccatgtggcccagacctatggttcagaggtgattctgtccgagtcgcgcacaggagctgaggtgcccttcttcgagacctggatgcagacctgcatgcctgaggagggcaagatcctgaaccctgaccacccctgcttccgccccgactccaccaaagtggagtccctggtggccctgctcaacaactcctcggagatgaagctagtgcagatgaagtggcatgaggcctgtctcagcatctcagccgccatcttggaaatcctcaatgcctgggagaatggggtcctggccttcgagtccatccagaaaatcactgataacatcaaagggaaggtatgcagtctggcggtgtgtgctgtggcttggcttgtggcccacgtccggatgctggggctggatgagcgtgagaagtcgctgcagatgatccgccagctggcagggccactgtttagtgagaacaccctgcagttctacaatgagagggtggtgatcatgaactcgatcctggagcgcatgtgtgccgacgtgctgcagcagacagccacgcagatcaagtttccctccaccggggtggacacaatgccctactggaacctgctgccccccaagcggcccatcaaagaggtgctgacggacatttttgccaaggtgctggagaagggctgggtggacagccgctccatccacatctttgacaccctgctgcacatgggcggcgtctactggttctgcaacaacctgattaaggagctgctgaaggagacgcggaaggagcacacgctgcgggcagtggagctgctctactccatcttctgcctggaccacaagcccagtggtcacccctgtgtgcgcccgccccagcccaggagtagtcttacctctgaggaactttctagatgcaaatgtgtgtgtgtttatgtgtattttgtaatatgtgagggaaatctaccttcgttcatgtataaataaagctcctcgtggctccctttgtga

SEQ ID NO: 443559 - DNA, 873 bp, Homo sapiens
caggtgcgagccactgcgctcggccgatactttcttagtgccccagtttaaggaagggcggttcaggagcagagagtctgacaggatcttactttatccctttagctctttttctttcaaattcctctgtctcgcttaaatcttcccgcatcttctcctttctatttaattctgccttccccggttctccttagaacctcatgtccttttctttagctccatttctttcacctcaaagctggccgccaccgctgccacctgctcagagtgaaataatgaaggtggtcaacctgaagcaagccattttgcaagcctggaaggagcgctggagtgactaccaatgggcaatcaacatgaagaaattctttcctaaaggagccacctgggatattctcaacctggcagatgcgttactagagcaggccatgattggaccatcccccaatcctctcatcttgtcctacctgaagtatgccattagttcccagatggtgtcctactcttctgtcctcacagccatcagtactcacatccgctccacatggtgcaagagcctctagcggcttccagttccccgctcctgactcctgacctccaggatgtctcccggtttcttctttcaaaatttcctctccatctgctggcacctgaggagagtgagcagcctggaccacaagcccagtggtcacccctgtgtgcgcccgccccagcccaggagtagtcttacctctgaggaactttctagatgcaaagtgtgtatgtgtgtgtgtgtgtgtgtgtgtgtgtgtgtgtgtttatgtgtattttgtaatatgtgagggaaatctaccttcgttcatgtataaataaagctcctcgtggctccctttgtga

SEQ ID NO: 443560 - DNA, 302 bp, Homo sapiens
aaggtgatgttggctcaagaaagggagatagatggtagcccatcacctttccgtctcccctagaaaatcactgataacatcaaagggaaggtatgcagtctggcggtgtgtgctgtggcttggcttgtggcccacgtccggatgctggggctggatgagcgtgagaagtcgctgcagatgatccgccagctggcagggccactgtttagtgagaacaccctgcagttctacaatgagaggtcggtaacctgccttcccttctcagacccttcaagtgtgttgtgagaagtcagcacatccaa

SEQ ID NO: 443561 - DNA, 3490 bp, Homo sapiens
aagtgccaaaatggcgatgcctaccacctagaactggattgtgcgctggccgccaccgctgccacctgctcagagtgaaataatgaaggtggtcaacctgaagcaagccattttgcaagcctggaaggagcgctggagtgactaccaatgggcaatcaacatgaagaaattctttcctaaaggagccacctgggatattctcaacctggcagatgcgttactagagcaggccatgattggaccatcccccaatcctctcatcttgtcctacctgaagtatgccattagttcccagatggtgtcctactcttctgtcctcacagccatcagtaagtttgatgacttttctcgggacctgtgtgtccaggcattgctggacatcatggacatgttttgtgaccgtctgagctgtcacggcaaagcagaggaatgcatcggactgtgccgagcccttcttagcgccctccactggctgctgcgctgcacggcagcctctgcagagcggctgcgggaggggctggaggccggcactccagccgctggggagaagcagcttgccatgtgccttcagcgcctggagaaaaccctcagcagcaccaagaaccgggccctgctgcacatcgccaaactagaggaggcctcttcttggactgccatcgagcattctctcttgaaacttggagagatcctggccaatctcagcaacccgcagctccggagtcaggccgagcagtgtggcaccctcattaggagcatccccacgatgctgtctgtgcatgcggagcagatgcacaagaccggcttccccactgtccacgccgtgatcctgctcgagggcaccatgaacctgacaggcgagacgcagtccctggtggagcagctgacgatggtgaagcgcatgcagcatatccccaccccactttttgtcctggagatctggaaagcttgcttcgtggggctcattgagtctcccgagggtacggaggagctcaagtggacagctttcactttcctcaagattccacaggttttggtgaagttgaagaagtactctcatggagacaaggacttcactgaggatgtcaactgtgcttttgagttcctgctgaagctcacccccttgttggacaaagctgaccagcgctgcaactgtgactgtacaaacttcctgctccaagaatgtggcaagcaggggcttctgtctgaggccagcgtcaacaaccttatggctaagcgcaaagcggaccgagagcacgcaccccagcagaaatcgggagagaatgccaacatccagcccaacatccagctgatcctccgggcggagcccactgtcacaaacatcctcaagacgatggatgcagaccactctaagtcaccggagggactgctgggagtcctgggccacatgctgtccgggaagagtctggacttgctgctggctgccgccgccgccactggaaagctgaaatccttcgcccggaaattcatcaatttgaatgaattcacaacctatggcagcgaagaaagcaccaaaccggcctccgtccgggccctgctgtttgacatctccttcctcatgctgtgccatgtggcccagacctatggttcagaggtgattctgtccgagtcgcgcacaggagctgaggtgcccttcttcgagacctggatgcagacctgcatgcctgaggagggcaagatcctgaaccctgaccacccctgcttccgccccgactccaccaaagtggagtccctggtggccctgctcaacaactcctcggagatgaagctagtgcagatgaagtggcatgaggcctgtctcagcatctcagccgccatcttggaaatcctcaatgcctgggagaatggggtcctggccttcgagtccatccagaaaatcactgataacatcaaagggaaggtatgcagtctggcggtgtgtgctgtggcttggcttgtggcccacgtccggatgctggggctggatgagcgtgagaagtcgctgcagatgatccgccagctggcagggccactgtttagtgagaacaccctgcagttctacaatgagagggtggtgatcatgaactcgatcctggagcgcatgtgtgccgacgtgctgcagcagacagccacgcagatcaagtttccctccaccggggtggacacaatgccctactggaacctgctgccccccaagcggcccatcaaagaggtgctgacggacatttttgccaaggtgctggagaagggctgggtggacagccgctccatccacatctttgacaccctgctgcacatgggcggcgtctactggttctgcaacaacctgattaaggagctgctgaaggagacgcggaaggagcacacgctgcgggcagtggagctgctctactccatcttctgcctggacatgcagcaagtgaccctggtcctgctgggccacatcctacctggcctgctcactgactcctccaagtggcacagcctcatggaccccccgggcactgctcttgccaagctggccgtgtggtgtgccctcagttcctactcctcccacaagggacaggcgtccacccgccagaagaagagacaccgcgaagacattgaggattatatcagcctcttccccctggacgatgtgcagccttcgaagttgatgcgactgctgagctctaatgaggacgatgccaacatcctttcgagccccacagaccgatccatgagcagctccctctcagcctctcagctccacacggtcaacatgcgggaccctctgaaccgagtcctggccaacctgttcctgctcatctcctccatcctggggtctcgcaccgctggcccccacacccagttcgtgcagtggttcatggaggagtgtgtggactgcctggagcagggtggccgtggcagcgtcctgcagttcatgcccttcaccaccgtgtcggaactggtgaaggtgtcagccatgtccagccccaaggtggttctggccatcacggacctcagcctgcccctgggccgccaggtggctgctaaagccattgctgcactctgaggggcttggcatggccgcagtgggggctggggactggcgcagccccaggcgcctccaagggaagcagtgaggaaagatgaggcatcgtgcctcacatccgctccacatggtgcaagagcctctagcggcttccagttccccgctcctgactcctgacctccaggatgtctcccggtttcttctttcaaaatttcctctccatctgctggcacctgaggagagtgagcagcctggaccacaagcccagtggtcacccctgtgtgcgcccgccccagcccaggagtagtcttacctctgaggaactttctagatgcaaagtgtgtatgtgtgtgtgtgtgtgtgtgtgtgtgtgtgtgtgtttatgtgtattttgtaatatgtgagggaaatctaccttcgttcatgtataaataaagctcctcgtggctccctttgtga

SEQ ID NO: 443562 - DNA, 3747 bp, Homo sapiens
  misc_feature (3598)..(3598): n is a, c, g, or t
caggtgcgagccactgcgctcggccgatactttcttagtgccccagtttaaggaagggcggttcaggagcagagagtctgacaggatcttactttatccctttagctctttttctttcaaattcctctgtctcgcttaaatcttcccgcatcttctcctttctatttaattctgccttccccggttctccttagaacctcatgtccttttctttagctccatttctttcacctcaaagctggccgccaccgctgccacctgctcagagtgaaataatgaaggtggtcaacctgaagcaagccattttgcaagcctggaaggagcgctggagtgactaccaatgggcaatcaacatgaagaaattctttcctaaaggagccacctgggatattctcaacctggcagatgcgttactagagcaggccatgattggaccatcccccaatcctctcatcttgtcctacctgaagtatgccattagttcccagatggtgtcctactcttctgtcctcacagccatcagtaagtttgatgacttttctcgggacctgtgtgtccaggcattgctggacatcatggacatgttttgtgaccgtctgagctgtcacggcaaagcagaggaatgcatcggactgtgccgagcccttcttagcgccctccactggctgctgcgctgcacggcagcctctgcagagcggctgcgggaggggctggaggccggcactccagccgctggggagaagcagcttgccatgtgccttcagcgcctggagaaaaccctcagcagcaccaagaaccgggccctgctgcacatcgccaaactagaggaggcctcttcttggactgccatcgagcattctctcttgaaacttggagagatcctggccaatctcagcaacccgcagctccggagtcaggccgagcagtgtggcaccctcattaggagcatccccacgatgctgtctgtgcatgcggagcagatgcacaagaccggcttccccactgtccacgccgtgatcctgctcgagggcaccatgaacctgacaggcgagacgcagtccctggtggagcagctgacgatggtgaagcgcatgcagcatatccccaccccactttttgtcctggagatctggaaagcttgcttcgtggggctcattgagtctcccgagggtacggaggagctcaagtggacagctttcactttcctcaagattccacaggttttggtgaagttgaagaagtactctcatggagacaaggacttcactgaggatgtcaactgtgcttttgagttcctgctgaagctcacccccttgttggacaaagctgaccagcgctgcaactgtgactgtacaaacttcctgctccaagaatgtggcaagcaggggcttctgtctgaggccagcgtcaacaaccttatggctaagcgcaaagcggaccgagagcacgcaccccagcagaaatcgggagagaatgccaacatccagcccaacatccagctgatcctccgggcggagcccactgtcacaaacatcctcaagacgatggatgcagaccactctaagtcaccggagggactgctgggagtcctgggccacatgctgtccgggaagagtctggacttgctgctggctgccgccgccgccactggaaagctgaaatccttcgcccggaaattcatcaatttgaatgaattcacaacctatggcagcgaagaaagcaccaaaccggcctccgtccgggccctgctgtttgacatctccttcctcatgctgtgccatgtggcccagacctatggttcagaggtgattctgtccgagtcgcgcacaggagctgaggtgcccttcttcgagacctggatgcagacctgcatgcctgaggagggcaagatcctgaaccctgaccacccctgcttccgccccgactccaccaaagtggagtccctggtggccctgctcaacaactcctcggagatgaagctagtgcagatgaagtggcatgaggcctgtctcagcatctcagccgccatcttggaaatcctcaatgcctgggagaatggggtcctggccttcgagtccatccagaaaatcactgataacatcaaagggaaggtatgcagtctggcggtgtgtgctgtggcttggcttgtggcccacgtccggatgctggggctggatgagcgtgagaagtcgctgcagatgatccgccagctggcagggccactgtttagtgagaacaccctgcagttctacaatgagagggtggtgatcatgaactcgatcctggagcgcatgtgtgccgacgtgctgcagcagacagccacgcagatcaagtttccctccaccggggtggacacaatgccctactggaacctgctgccccccaagcggcccatcaaagaggtgctgacggacatttttgccaaggtgctggagaagggctgggtggacagccgctccatccacatctttgacaccctgctgcacatgggcggcgtctactggttctgcaacaacctgattaaggagctgctgaaggagacgcggaaggagcacacgctgcgggcagtggagctgctctactccatcttctgcctggacatgcagcaagtgaccctggtcctgctgggccacatcctacctggcctgctcactgactcctccaagtggcacagcctcatggaccccccgggcactgctcttgccaagctggccgtgtggtgtgccctcagttcctactcctcccacaagggacaggcgtccacccgccagaagaagagacaccgcgaagacattgaggattatatcagcctcttccccctggacgatgtgcagccttcgaagttgatgcgactgctgagctctaatgaggacgatgccaacatcctttcgagccccacagaccgatccatgagcagctccctctcagcctctcagctccacacggtcaacatgcgggaccctctgaaccgagtcctggccaacctgttcctgctcatctcctccatcctggggtctcgcaccgctggcccccacacccagttcgtgcagtggttcatggaggagtgtgtggactgcctggagcagggtggccgtggcagcgtcctgcagttcatgcccttcaccaccgtgtcggaactggtgaaggtgtcagccatgtccagccccaaggtggttctggccatcacggacctcagcctgcccctgggccgccaggtggctgctaaagccattgctgcactctgaggggcttggcatggccgcagtgggggctggggactggcgcagccccaggcgcctccaagggaagcagtgaggaaagatgaggcatcgtgcctcacatccgctccacatggtgcaagagcctctagcggcttccagttccccgctcctgactcctgacctccaggatgtctcccggtttcttctttcaaaatttcctctccatctgctggcacctgaggagagtgagcagcctggaccacaagcccagtggtcacccctgtgtgcgcccgccccagcccaggagtagtcttacctctgaggaactttctagatgcaaagtgtgtatgtgtgtgtgtgtgtgtgtgtgtgcccgngatccccaagggtggggaattggtggccactgtttgtatgttcttgagtgcaagtgttttattaaaaaataaaacaataaccccaccattcacaagaaaaaaaaaaatttttgcctctgaaggagtatatggtaaaatatacttgaagg

SEQ ID NO: 443563 - DNA, 2116 bp, Homo sapiens
  misc_feature (25)..(25): n is a, c, g, or t
  misc_feature (30)..(30): n is a, c, g, or t
  misc_feature (48)..(48): n is a, c, g, or t
  misc_feature (66)..(66): n is a, c, g, or t
  misc_feature (106)..(106): n is a, c, g, or t
  misc_feature (117)..(117): n is a, c, g, or t
cgtccccagtctttgggctgggctnggagncagcagcctggcgggaanacagtgcagccccaggtnccagcgctggcaggcgccgcgccctccccactcggctggntgccccccttncccctttcccaggtgattctgtccgagtcgcgcacaggagctgaggtgcccttcttcgagacctggatgcagacctgcatgcctgaggagggcaagatcctgaaccctgaccacccctgcttccgccccgactccaccaaagtggagtccctggtggccctgctcaacaactcctcggagatgaagctagtgtcagtggcccgggcgccaactccaagggtggcggtgggggcagggtcaagacccgctccctgagcccgttccttgctcccctgtgctgacttctctgcacacccgcaggcagatgaagtggcatgaggcctgtctcagcatctcagccgccatcttggaaatcctcaatgcctgggagaatggggtcctggccttcgagtccatccagaaaatcactgataacatcaaagggaaggtatgcagtctggcggtgtgtgctgtggcttggcttgtggcccacgtccggatgctggggctggatgagcgtgagaagtcgctgcagatgatccgccagctggcagggccactgtttagtgagaacaccctgcagttctacaatgagagggtggtgatcatgaactcgatcctggagcgcatgtgtgccgacgtgctgcagcagacagccacgcagatcaagtttccctccaccggggtggacacaatgccctactggaacctgctgccccccaagcggcccatcaaagaggtgctgacggacatttttgccaaggtgctggagaagggctgggtggacagccgctccatccacatctttgacaccctgctgcacatgggcggcgtctactggttctgcaacaacctgattaaggagctgctgaaggagacgcggaaggagcacacgctgcgggcagtggagctgctctactccatcttctgcctggacatgcagcaagtgaccctggtcctgctgggccacatcctacctggcctgctcactgactcctccaagtggcacagcctcatggaccccccgggcactgctcttgccaagctggccgtgtggtgtgccctcagttcctactcctcccacaagggacaggcgtccacccgccagaagaagagacaccgcgaagacattgaggattatatcagcctcttccccctggacgatgtgcagccttcgaagttgatgcgactgctgagctctaatgaggacgatgccaacatcctttcgagccccacagaccgatccatgagcagctccctctcagcctctcagctccacacggtcaacatgcgggaccctctgaaccgagtcctggccaacctgttcctgctcatctcctccatcctggggtctcgcaccgctggcccccacacccagttcgtgcagtggttcatggaggagtgtgtggactgcctggagcagggtggccgtggcagcgtcctgcagttcatgcccttcaccaccgtgtcggaactggtgaaggtgtcagccatgtccagccccaaggtggttctggccatcacggacctcagcctgcccctgggccgccaggtggctgctaaagccattgctgcactctgaggggcttggcatggccgcagtgggggctggggactggcgcagccccaggcgcctccaagggaagcagtgaggaaagatgaggcatcgtgcctcacatccgctccacatggtgcaagagcctctagcggcttccagttccccgctcctgactcctgacctccaggatgtctcccggtttcttctttcaaaatttcctctccatctgctggcacctgaggagagtgagcagcctggaccacaagcccagtggtcacccctgtgtgcgcccgccccagcccaggagtagtcttacctctgaggaactttctagatgcaaagtgtgtatgtgtgtgtgtgtgtgtgtgtgtgtgtgtgtgtgtttatgtgtattttgtaatatgtgagggaaatctaccttcgttcatgtataaataaagctcctcgtggctccctttgtga

SEQ ID NO: 443564 - DNA, 1539 bp, Homo sapiens
  misc_feature (92)..(92): n is a, c, g, or t
ccagggagatttccgtaacctaagtccaagggaaagtctggcatgggtgttccctcctctccctccccaccctacagtggcacctgagcctncaggtcctctcggccctcccccagggtggtgatcatgaactcgatcctggagcgcatgtgtgccgacgtgctgcagcagacagccacgcagatcaagtttccctccaccggggtggacacaatgccctactggaacctgctgccccccaagcggcccatcaaagaggtgctgacggacatttttgccaaggtgctggagaagggctgggtggacagccgctccatccacatctttgacaccctgctgcacatgggcggcgtctactggttctgcaacaacctgattaaggagctgctgaaggagacgcggaaggagcacacgctgcgggcagtggagctgctctactccatcttctgcctggacatgcagcaagtgaccctggtcctgctgggccacatcctacctggcctgctcactgactcctccaagtggcacagcctcatggaccccccgggcactgctcttgccaagctggccgtgtggtgtgccctcagttcctactcctcccacaagggacaggcgtccacccgccagaagaagagacaccgcgaagacattgaggattatatcagcctcttccccctggacgatgtgcagccttcgaagttgatgcgactgctgagctctaatgaggacgatgccaacatcctttcgagccccacagaccgatccatgagcagctccctctcagcctctcagctccacacggtcaacatgcgggaccctctgaaccgagtcctggccaacctgttcctgctcatctcctccatcctggggtctcgcaccgctggcccccacacccagttcgtgcagtggttcatggaggagtgtgtggactgcctggagcagggtggccgtggcagcgtcctgcagttcatgcccttcaccaccgtgtcggaactggtgaaggtgtcagccatgtccagccccaaggtggttctggccatcacggacctcagcctgcccctgggccgccaggtggctgctaaagccattgctgcactctgaggggcttggcatggccgcagtgggggctggggactggcgcagccccaggcgcctccaagggaagcagtgaggaaagatgaggcatcgtgcctcacatccgctccacatggtgcaagagcctctagcggcttccagttccccgctcctgactcctgacctccaggatgtctcccggtttcttctttcaaaatttcctctccatctgctggcacctgaggagagtgagcagcctggaccacaagcccagtggtcacccctgtgtgcgcccgccccagcccaggagtagtcttacctctgaggaactttctagatgcaaagtgtgtatgtgtgtgtgtgtgtgtgtgtgtgtgtgtgtgtgtttatgtgtattttgtaatatgtgagggaaatctaccttcgttcatgtataaataaagctcctcgtggctccctttgtga

SEQ ID NO: 443565 - DNA, 2991 bp, Homo sapiens
  misc_feature (2900)..(2900): n is a, c, g, or t
caggtgcgagccactgcgctcggccgatactttcttagtgccccagtttaaggaagggcggttcaggagcagagagtctgacaggatcttactttatccctttagctctttttctttcaaattcctctgtctcgcttaaatcttcccgcatcttctcctttctatttaattctgccttccccggttctccttagaacctcatgtccttttctttagctccatttctttcacctcaaagctggccgccaccgctgccacctgctcagagtgaaataatgaaggtggtcaacctgaagcaagccattttgcaagcctggaaggagcgctggagtgactaccaatgggcaatcaacatgaagaaattctttcctaaaggagccacctgggatattctcaacctggcagatgcgttactagagcaggccatgattggaccatcccccaatcctctcatcttgtcctacctgaagtatgccattagttcccagatggtgtcctactcttctgtcctcacagccatcagtaagtttgatgacttttctcgggacctgtgtgtccaggcattgctggacatcatggacatgttttgtgaccgtctgagctgtcacggcaaagcagaggaatgcatcggactgtgccgagcccttcttagcgccctccactggctgctgcgctgcacggcagcctctgcagagcggctgcgggaggggctggaggccggcactccagccgctggggagaagcagcttgccatgtgccttcagcgcctggagaaaaccctcagcagcaccaagaaccgggccctgctgcacatcgccaaactagaggaggcctcttcttggactgccatcgagcattctctcttgaaacttggagagatcctggccaatctcagcaacccgcagctccggagtcaggccgagcagtgtggcaccctcattaggagcatccccacgatgctgtctgtgcatgcggagcagatgcacaagaccggcttccccactgtccacgccgtgatcctgctcgagggcaccatgaacctgacaggcgagacgcagtccctggtggagcagctgacgatggtgaagcgcatgcagcatatccccaccccactttttgtcctggagatctggaaagcttgcttcgtggggctcattgagtctcccgagggtacggaggagctcaagtggacagctttcactttcctcaagattccacaggttttggtgaagttgaagaagtactctcatggagacaaggacttcactgaggatgtcaactgtgcttttgagttcctgctgaagctcacccccttgttggacaaagctgaccagcgctgcaactgtgactgtacaaacttcctgctccaagaatgtggcaagcaggggcttctgtctgaggccagcgtcaacaaccttatggctaagcgcaaagcggaccgagagcacgcaccccagcagaaatcgggagagaatgccaacatccagcccaacatccagctgatcctccgggcggagcccactgtcacaaacatcctcaagacgatggatgcagaccactctaagtcaccggagggactgctgggagtcctgggccacatgctgtccgggaagagtctggacttgctgctggctgccgccgccgccactggaaagctgaaatccttcgcccggaaattcatcaatttgaatgaattcacaacctatggcagcgaagaaagcaccaaaccggcctccgtccgggccctgctgtttgacatctccttcctcatgctgtgccatgtggcccagacctatggttcagaggtgattctgtccgagtcgcgcacaggagctgaggtgcccttcttcgagacctggatgcagacctgcatgcctgaggagggcaagatcctgaaccctgaccacccctgcttccgccccgactccaccaaagtggagtccctggtggccctgctcaacaactcctcggagatgaagctagtgcagatgaagtggcatgaggcctgtctcagcatctcagccgccatcttggaaatcctcaatgcctgggagaatggggtcctggccttcgagtccatccagaaaatcactgataacatcaaagggaaggtatgcagtctggcggtgtgtgctgtggcttggcttgtggcccacgtccggatgctggggctggatgagcgtgagaagtcgctgcagatgatccgccagctggcagggccactgtttagtgagaacaccctgcagttctacaatgagagggtggtgatcatgaactcgatcctggagcgcatgtgtgccgacgtgctgcagcagacagccacgcagatcaagtttccctccaccggggtggacacaatgccctactggaacctgctgccccccaagcggcccatcaaagaggtgctgacggacatttttgccaaggtgctggagaagggctgggtggacagccgctccatccacatctttgacaccctgctgcacatgggcggcgtctactggttctgcaacaacctgattaaggagctgctgaaggagacgcggaaggagcacacgctgcgggcagtggagctgctctactccatcttctgcctggacatgcagcaagtgaccctggtcctgctgggccacatcctacctggcctgctcactgactcctccaagtggcacagcctcatggaccccccgggcactgctcttgccaagctggccgtgtggtgtgccctcagttcctactcctcccacaagggacaggcgtccacccgccagaagaagagacaccgcgaagacattgaggattatatcagcctcttccccctggacgatgtgcagccttcgaagttgatgcgactgctgagctctaatgaggacgatgccaacatcctttcgagccccagnccccccgcccccatgagcagctcgcccctgagttagcagctcgctcctgagttagcagctcgcctctgagctgcagctcgcgccctgaggt

SEQ ID NO: 443566 - DNA, 2857 bp, Homo sapiens
caggtgcgagccactgcgctcggccgatactttcttagtgccccagtttaaggaagggcggttcaggagcagagagtctgacaggatcttactttatccctttagctctttttctttcaaattcctctgtctcgcttaaatcttcccgcatcttctcctttctatttaattctgccttccccggttctccttagaacctcatgtccttttctttagctccatttctttcacctcaaagctggccgccaccgctgccacctgctcagagtgaaataatgaaggtggtcaacctgaagcaagccattttgcaagcctggaaggagcgctggagtgactaccaatgggcaatcaacatgaagaaattctttcctaaaggagccacctgggatattctcaacctggcagatgcgttactagagcaggccatgattggaccatcccccaatcctctcatcttgtcctacctgaagtatgccattagttcccagatggtgtcctactcttctgtcctcacagccatcagtaagtttgatgacttttctcgggacctgtgtgtccaggcattgctggacatcatggacatgttttgtgaccgtctgagctgtcacggcaaagcagaggaatgcatcggactgtgccgagcccttcttagcgccctccactggctgctgcgctgcacggcagcctctgcagagcggctgcgggaggggctggaggccggcactccagccgctggggagaagcagcttgccatgtgccttcagcgcctggagaaaaccctcagcagcaccaagaaccgggccctgctgcacatcgccaaactagaggaggcctcttcttggactgccatcgagcattctctcttgaaacttggagagatcctggccaatctcagcaacccgcagctccggagtcaggccgagcagtgtggcaccctcattaggagcatccccacgatgctgtctgtgcatgcggagcagatgcacaagaccggcttccccactgtccacgccgtgatcctgctcgagggcaccatgaacctgacaggcgagacgcagtccctggtggagcagctgacgatggtgaagcgcatgcagcatatccccaccccactttttgtcctggagatctggaaagcttgcttcgtggggctcattgagtctcccgagggtacggaggagctcaagtggacagctttcactttcctcaagattccacaggttttggtgaagttgaagaagtactctcatggagacaaggacttcactgaggatgtcaactgtgcttttgagttcctgctgaagctcacccccttgttggacaaagctgaccagcgctgcaactgtgactgtacaaacttcctgctccaagaatgtggcaagcaggggcttctgtctgaggccagcgtcaacaaccttatggctaagcgcaaagcggaccgagagcacgcaccccagcagaaatcgggagagaatgccaacatccagcccaacatccagctgatcctccgggcggagcccactgtcacaaacatcctcaagacgatggatgcagaccactctaagtcaccggagggactgctgggagtcctgggccacatgctgtccgggaagagtctggacttgctgctggctgccgccgccgccactggaaagctgaaatccttcgcccggaaattcatcaatttgaatgaattcacaacctatggcagcgaagaaagcaccaaaccggcctccgtccgggccctgctgtttgacatctccttcctcatgctgtgccatgtggcccagacctatggttcagaggtgattctgtccgagtcgcgcacaggagctgaggtgcccttcttcgagacctggatgcagacctgcatgcctgaggagggcaagatcctgaaccctgaccacccctgcttccgccccgactccaccaaagtggagtccctggtggccctgctcaacaactcctcggagatgaagctagtgcagatgaagtggcatgaggcctgtctcagcatctcagccgccatcttggaaatcctcaatgcctgggagaatggggtcctggccttcgagtccatccagaaaatcactgataacatcaaagggaaggtatgcagtctggcggtgtgtgctgtggcttggcttgtggcccacgtccggatgctggggctggatgagcgtgagaagtcgctgcagatgatccgccagctggcagggccactgtttagtgagaacaccctgcagttctacaatgagagggtggtgatcatgaactcgatcctggagcgcatgtgtgccgacgtgctgcagcagacagccacgcagatcaagtttccctccaccggggtggacacaatgccctactggaacctgctgccccccaagcggcccatcaaagaggtgctgacggacatttttgccaaggtgctggagaagggctgggtggacagccgctccatccacatctttgacaccctgctgcacatgggcggcgtctactggttctgcaacaacctgattaaggagctgctgaaggagacgcggaaggagcacacgctgcgggcagtggagctgctctactccatcttctgcctggacatgcagcaagtgaccctggtcctgctgggccacatcctacctggcctgctcactgactcctccaagtggcacagcctcatggaccccccgggcactgctcttgccaagctggccgtgtggtgtgccctcagttcctactcctcccacaagggacaggcgtccacccgccagaagaagagacaccgcgaagacattgaggattatatcgccaaactagaggaggcctgtatgtcccttgattcgactctgagccccac

SEQ ID NO: 443567 - DNA, 2802 bp, Homo sapiens
caggtgcgagccactgcgctcggccgatactttcttagtgccccagtttaaggaagggcggttcaggagcagagagtctgacaggatcttactttatccctttagctctttttctttcaaattcctctgtctcgcttaaatcttcccgcatcttctcctttctatttaattctgccttccccggttctccttagaacctcatgtccttttctttagctccatttctttcacctcaaagctggccgccaccgctgccacctgctcagagtgaaataatgaaggtggtcaacctgaagcaagccattttgcaagcctggaaggagcgctggagtgactaccaatgggcaatcaacatgaagaaattctttcctaaaggagccacctgggatattctcaacctggcagatgcgttactagagcaggccatgattggaccatcccccaatcctctcatcttgtcctacctgaagtatgccattagttcccagatggtgtcctactcttctgtcctcacagccatcagtaagtttgatgacttttctcgggacctgtgtgtccaggcattgctggacatcatggacatgttttgtgaccgtctgagctgtcacggcaaagcagaggaatgcatcggactgtgccgagcccttcttagcgccctccactggctgctgcgctgcacggcagcctctgcagagcggctgcgggaggggctggaggccggcactccagccgctggggagaagcagcttgccatgtgccttcagcgcctggagaaaaccctcagcagcaccaagaaccgggccctgctgcacatcgccaaactagaggaggcctcttcttggactgccatcgagcattctctcttgaaacttggagagatcctggccaatctcagcaacccgcagctccggagtcaggccgagcagtgtggcaccctcattaggagcatccccacgatgctgtctgtgcatgcggagcagatgcacaagaccggcttccccactgtccacgccgtgatcctgctcgagggcaccatgaacctgacaggcgagacgcagtccctggtggagcagctgacgatggtgaagcgcatgcagcatatccccaccccactttttgtcctggagatctggaaagcttgcttcgtggggctcattgagtctcccgagggtacggaggagctcaagtggacagctttcactttcctcaagattccacaggttttggtgaagttgaagaagtactctcatggagacaaggacttcactgaggatgtcaactgtgcttttgagttcctgctgaagctcacccccttgttggacaaagctgaccagcgctgcaactgtgactgtacaaacttcctgctccaagaatgtggcaagcaggggcttctgtctgaggccagcgtcaacaaccttatggctaagcgcaaagcggaccgagagcacgcaccccagcagaaatcgggagagaatgccaacatccagcccaacatccagctgatcctccgggcggagcccactgtcacaaacatcctcaagacgatggatgcagaccactctaagtcaccggagggactgctgggagtcctgggccacatgctgtccgggaagagtctggacttgctgctggctgccgccgccgccactggaaagctgaaatccttcgcccggaaattcatcaatttgaatgaattcacaacctatggcagcgaagaaagcaccaaaccggcctccgtccgggccctgctgtttgacatctccttcctcatgctgtgccatgtggcccagacctatggttcagaggtgattctgtccgagtcgcgcacaggagctgaggtgcccttcttcgagacctggatgcagacctgcatgcctgaggagggcaagatcctgaaccctgaccacccctgcttccgccccgactccaccaaagtggagtccctggtggccctgctcaacaactcctcggagatgaagctagtgcagatgaagtggcatgaggcctgtctcagcatctcagccgccatcttggaaatcctcaatgcctgggagaatggggtcctggccttcgagtccatccagaaaatcactgataacatcaaagggaaggtatgcagtctggcggtgtgtgctgtggcttggcttgtggcccacgtccggatgctggggctggatgagcgtgagaagtcgctgcagatgatccgccagctggcagggccactgtttagtgagaacaccctgcagttctacaatgagagggtggtgatcatgaactcgatcctggagcgcatgtgtgccgacgtgctgcagcagacagccacgcagatcaagtttccctccaccggggtggacacaatgccctactggaacctgctgccccccaagcggcccatcaaagaggtgctgacggacatttttgccaaggtgctggagaagggctgggtggacagccgctccatccacatctttgacaccctgctgcacatgggcggcgtctactggttctgcaacaacctgattaaggagctgctgaaggagacgcggaaggagcacacgctgcgggcagtggagctgctctactccatcttctgcctggaccacaagcccagtggtcacccctgtgtgcgcccgccccagcccaggagtagtcttacctctgaggaactttctagatgcaaagtgtgtatgtgtgtgtgtgtgtgtgtgtgtgtgtgtgtgtgtttatgtgtattttgtaatatgtgagggaaatctaccttcgttcatgtataaataaagctcctcgtggctccctttgtga

SEQ ID NO: 443568 - DNA, 2615 bp, Homo sapiens
caggtgcgagccactgcgctcggccgatactttcttagtgccccagtttaaggaagggcggttcaggagcagagagtctgacaggatcttactttatccctttagctctttttctttcaaattcctctgtctcgcttaaatcttcccgcatcttctcctttctatttaattctgccttccccggttctccttagaacctcatgtccttttctttagctccatttctttcacctcaaagctggccgccaccgctgccacctgctcagagtgaaataatgaaggtggtcaacctgaagcaagccattttgcaagcctggaaggagcgctggagtgactaccaatgggcaatcaacatgaagaaattctttcctaaaggagccacctgggatattctcaacctggcagatgcgttactagagcaggccatgattggaccatcccccaatcctctcatcttgtcctacctgaagtatgccattagttcccagatggtgtcctactcttctgtcctcacagccatcagtaagtttgatgacttttctcgggacctgtgtgtccaggcattgctggacatcatggacatgttttgtgaccgtctgagctgtcacggcaaagcagaggaatgcatcggactgtgccgagcccttcttagcgccctccactggctgctgcgctgcacggcagcctctgcagagcggctgcgggaggggctggaggccggcactccagccgctggggagaagcagcttgccatgtgccttcagcgcctggagaaaaccctcagcagcaccaagaaccgggccctgctgcacatcgccaaactagaggaggcctcttcttggactgccatcgagcattctctcttgaaacttggagagatcctggccaatctcagcaacccgcagctccggagtcaggccgagcagtgtggcaccctcattaggagcatccccacgatgctgtctgtgcatgcggagcagatgcacaagaccggcttccccactgtccacgccgtgatcctgctcgagggcaccatgaacctgacaggcgagacgcagtccctggtggagcagctgacgatggtgaagcgcatgcagcatatccccaccccactttttgtcctggagatctggaaagcttgcttcgtggggctcattgagtctcccgagggtacggaggagctcaagtggacagctttcactttcctcaagattccacaggttttggtgaagttgaagaagtactctcatggagacaaggacttcactgaggatgtcaactgtgcttttgagttcctgctgaagctcacccccttgttggacaaagctgaccagcgctgcaactgtgactgtacaaacttcctgctccaagaatgtggcaagcaggggcttctgtctgaggccagcgtcaacaaccttatggctaagcgcaaagcggaccgagagcacgcaccccagcagaaatcgggagagaatgccaacatccagcccaacatccagctgatcctccgggcggagcccactgtcacaaacatcctcaagacgatggatgcagaccactctaagtcaccggagggactgctgggagtcctgggccacatgctgtccgggaagagtctggacttgctgctggctgccgccgccgccactggaaagctgaaatccttcgcccggaaattcatcaatttgaatgaattcacaacctatggcagcgaagaaagcaccaaaccggcctccgtccgggccctgctgtttgacatctccttcctcatgctgtgccatgtggcccagacctatggttcagaggtgattctgtccgagtcgcgcacaggagctgaggtgcccttcttcgagacctggatgcagacctgcatgcctgaggagggcaagatcctgaaccctgaccacccctgcttccgccccgactccaccaaagtggagtccctggtggccctgctcaacaactcctcggagatgaagctagtgcagatgaagtggcatgaggcctgtctcagcatctcagccgccatcttggaaatcctcaatgcctgggagaatggggtcctggccttcgagtccatccagaaaatcactgataacatcaaagggaaggtatgcagtctggcggtgtgtgctgtggcttggcttgtggcccacgtccggatgctggggctggatgagcgtgagaagtcgctgcagatgatccgccagctggcagggccactgtttagtgagaacaccctgcagttctacaatgagaggtcggtaacctgccttcccttctcagacccttcaagtgtgttgtgagaagtcagcacatccaataacaagcacccctctctcttctgaccttcgcaaacacgctacttgatcactcactcactttcctattcatgcattcactcatctgactcagcaaacatgtactgtgtctctgtggcagaagcgtttatatgccagcacctgctgtgttgtcagaaatgcagaccctaaacagggtctgcccgcagagactcaagttctagacaactagctcccaaaagaacaaagctgtgtgactgtctaggagctaggaacctgtctgtagactttacaggccatgccccacctcctcag

SEQ ID NO: 443569 - DNA, 2571 bp, Homo sapiens
gcggagctccgcatccaaccccgggccgcggccaacttctctggactggaccagaagtttctagccggccagttgctacctccctttatctcctccttcccctctggcagcgaggaggctatttccagacacttccacccctctctggccacgtcacccccgcctttaattcataaaggtgcccggcgccggcttcccggacacgtcggcggcggagaggggcccacggcggcggcccggccagagactcggcgcccggagccagcgccccgcacccgcgccccagcgggcagaccccaacccagcatgagcgccgccacccactcgcccatgatgcaggtggcgtccggcaacggtgaccgcgaccctttgccccccggatgggagatcaagatcgacccgcagaccggctggcccttcttcgtggaccacaacagccgcaccactacgtggaacgacccgcgcgtgccctctgagggccccaaggagactccatcctctgccaatggcccttcccgggagggctctaggctgccgcctgctagggaaggccaccctgtgtacccccagctccgaccaggctacattcccattcctgtgctccatgaaggcgctgagaaccggcaggtgcaccctttccatgtctatccccagcctgggatgcagcgattccgaactgaggcggcagcagcggctcctcagaggtcccagtcacctctgcggggcatgccagaaaccactcagccagataaacagtgtggacaggtggcagcggcggcggcagcccagcccccagcctcccacggacctgagcggtcccagtctccagctgcctctgactgctcatcctcatcctcctcggccagcctgccttcctccggcaggagcagcctgggcagtcaccagctcccgcgggggtacatctccattccggtgatacacgagcagaacgttacccggccagcagcccagccctccttccaccaagcccagaagacgcactacccagcgcagcagggggagtaccagacccaccagcctgtgtaccacaagatccagggggatgactgggagccccggcccctgcgggcggcatccccgttcaggtcatctgtccagggtgcatcgagccgggagggctcaccagccaggagcagcacgccactccactccccctcgcccatccgtgtgcacaccgtggtcgacaggcctcagcagcccatgacccatcgagaaactgcacctgtttcccagcctgaaaacaaaccagaaagtaagccaggcccagttggaccagaactccctcctggacacatcccaattcaagtgatccgcaaagaggtggattctaaacctgtttcccagaagcccccacctccctctgagaaggtagaggtgaaagttccccctgctccagttccttgtcctcctcccagccctggcccttctgctgtcccctcttcccccaagagtgtggctacagaagagagggcagcccccagcactgcccctgcagaagctacacctccaaaaccaggagaagccgaggctcccccaaaacatccaggagtgctgaaagtggaagccatcctggagaaggtgcaggggctggagcaggctgtagacaactttgaaggcaagaagactgacaaaaagtacctgatgatcgaagagtatttgaccaaagagctgctggccctggattcagtggaccccgagggacgagccgatgtgcgtcaggccaggagagacggtgtcaggaaggttcagaccatcttggaaaaacttgaacagaaagccattgatgtcccaggtcaagtccaggtctatgaactccagcccagcaaccttgaagcagatcagccactgcaggcaatcatggagatgggtgccgtggcagcagacaagggcaagaaaaatgctggaaatgcagaagatccccacacagaaacccagcagccagaagccacagcagcagcgacttcaaaccccagcagcatgacagacacccctggtaacccagcagcaccgtagcctctgccctgtaaaaatcagactcggaaccgatgtgtgctttagggaattttaagttgcatgcatttcagagactttaagtcagttggtttttattagctgcttggtatgcagtaacttgggtggaggcaaaacactaataaaagggctaaaaaggaaaatgatgcttttcttctatattcttactctgtacaaataaagaagttgcttgttgtttgagaagtttaaccccgttgcttgttgttctgcagccctgtctacttgggcacccccaccacctgttagctgtggttgtgcactgtcttttgtagctctggactggaggggtagatggggagtcaattacccatcacataaatatgaaacatttatcagaaatgttgccattttaatgagatgattttcttcatctcataattaaaatacctgactttagagagagtaaaatgtgccaggagccataggaatatctgtatgttggatgactttaatgctacattttaaaaaaagaaaataaagtaataatataactcaaaa

SEQ ID NO: 443570 - DNA, 986 bp, Homo sapiens
gatgtgacatctaccagggacagaaaatatgtgctcttttcactctgctcagccaggctagagctgtgcctaccccacagcatgtgtttggagcctgagggagacagcagtgtgcattggggtcagataattacagaagcatctcccctccatgttttcctctctcctaaagactttgcttgttaactctgcatttacaggtaaccaagcccatatgatggcattagttaatgactgactgctgtttttttccaagctgctgtcaggcagattttactaattaatttcacttaaaatagtggtgttcaagcctgactgcatagtaaagtcatctggggagcttagaaaaaataaacaaactgatgccagagccccaccccaattaaattctgatttaattggtctaaggtccaagcattgatatgtttgaaaaattccccaggtgattctaataggcagccagggttggaaccatggatctaaaacatcaggaaaagtttcaatgaactaattaattgttttaaaacagttacaacagcattgttttcttcacatctggcaatgtaattcataaaacaataatgaaataatttgcaggatacaatgtcttcataggattttctcattctcatttttgctaagtcaacacatggctgaattaaacaatcaatctgaaaccgatggttccactgaagcttcttatagcttcattaccttctttctccaaatcacatcacaaagatttgatagagtaaccacctacctcgacctttatgttgaggtgtctggacagcacagaggcatggtacttagaaaagattccaggacgctttgttatcattggactttctgtgctatggaaattcaacactgtgggctggaataactagtcatgtggaactccttcctgcttttgtaccctctcacttttacttgagcagaaggttaaaagtattgctttctgagaagtcccattcggtcactcc

SEQ ID NO: 443571 - DNA, 769 bp, Homo sapiens
gtcccttggggaccccttttcccaagtgtcaacaaaacccatggggccccccccccccaaaccaattggttttaaaaactttttccaaggcccaaccgcccacaaaatttttattttttttttttttttttttttgcagctgctttaagacagcattttaatcctgaagccaaacatctcagggatatgtcaatggattctgtgcattaatagctaaaaaatagttcttaatctggttcttagctgagatttgaggcattcctagtaggattcctaagcagtaagtcctctcattttcctgtctgcacatcatcctgtggtgtgtgccagcgttgttcctgggcacaaactcccgtgtcctatctgcaccctgagtcatgcttgcctctcagctccgtctgaatctgttcagcttcacacctgatgatcgaagagtatttgaccaaagagctgctggccctggattcagtggaccccgagggacgagccgatgtgcgtcaggccaggagagacggtgtcaggaaggttcagaccatcttggaaaaactcgacctttatgttgaggtgtctggacagcacagaggcatggtacttagaaaagattccaggacgctttgttatcattggactttctgtgctatggaaattcaacactgtgggctggaataactagtcatgtggaactccttcctgcttttgtaccctctcacttttacttgagcagaaggttaaaagtattgctttctgagaagtcccattcggtcactcc

SEQ ID NO: 443572 - DNA, 2577 bp, Homo sapiens
  misc_feature (5)..(5): n is a, c, g, or t
  misc_feature (7)..(7): n is a, c, g, or t
  misc_feature (13)..(13): n is a, c, g, or t
  misc_feature (20)..(20): n is a, c, g, or t
gaacnanggctangtcgagnccggtgtgaatcggccgaggagttctctggactggaccagaagtttctagccggccagttgctacctccctttatctcctccttcccctctggcagcgaggaggctatttccagacacttccacccctctctggccacgtcacccccgcctttaattcataaaggtgcccggcgccggcttcccggacacgtcggcggcggagaggggcccacggcggcggcccggccagagactcggcgcccggagccagcgccccgcacccgcgccccagcgggcagaccccaacccagcatgagcgccgccacccactcgcccatgatgcaggtggcgtccggcaacggtgaccgcgaccctttgccccccggatgggagatcaagatcgacccgcagaccggctggcccttcttcgtggaccacaacagccgcaccactacgtggaacgacccgcgcgtgccctctgagggccccaaggagactccatcctctgccaatggcccttcccgggagggctctaggctgccgcctgctagggaaggccaccctgtgtacccccagctccgaccaggctacattcccattcctgtgctccatgaaggcgctgagaaccggcaggtgcaccctttccatgtctatccccagcctgggatgcagcgattccgaactgaggcggcagcagcggctcctcagaggtcccagtcacctctgcggggcatgccagaaaccactcagccagataaacagtgtggacaggtggcagcggcggcggcagcccagcccccagcctcccacggacctgagcggtcccagtctccagctgcctctgactgctcatcctcatcctcctcggccagcctgccttcctccggcaggagcagcctgggcagtcaccagctcccgcgggggtacatctccattccggtgatacacgagcagaacgttacccggccagcagcccagccctccttccaccaagcccagaagacgcactacccagcgcagcagggggagtaccagacccaccagcctgtgtaccacaagatccagggggatgactgggagccccggcccctgcgggcggcatccccgttcaggtcatctgtccagggtgcatcgagccgggagggctcaccagccaggagcagcacgccactccactccccctcgcccatccgtgtgcacaccgtggtcgacaggcctcagcagcccatgacccatcgagaaactgcacctgtttcccagcctgaaaacaaaccagaaagtaagccaggcccagttggaccagaactccctcctggacacatcccaattcaagtgatccgcaaagaggtggattctaaacctgtttcccagaagcccccacctccctctgagaaggtagaggtgaaagttccccctgctccagttccttgtcctcctcccagccctggcccttctgctgtcccctcttcccccaagagtgtggctacagaagagagggcagcccccagcactgcccctgcagaagctacacctccaaaaccaggagaagccgaggctcccccaaaacatccaggagtgctgaaagtggaagccatcctggagaaggtgcaggggctggagcaggctgtagacaactttgaaggcaagaagactgacaaaaagtacctgatgatcgaagagtatttgaccaaagagctgctggccctggattcagtggaccccgagggacgagccgatgtgcgtcaggccaggagagacggtgtcaggaaggttcagaccatcttggaaaaacttgaacagaaagccattgatgtcccaggtcaagtccaggtctatgaactccagcccagcaaccttgaagcagatcagccactgcaggcaatcatggagatgggtgccgtggcagcagacaagggcaagaaaaatgctggaaatgcagaagatccccacacagaaacccagcagccagaagccacagcagcagcgacttcaaaccccagcagcatgacagacacccctggtaacccagcagcaccgtagcctctgccctgtaaaaatcagactcggaaccgatgtgtgctttagggaattttaagttgcatgcatttcagagactttaagtcagttggtttttattagctgcttggtatgcagtaacttgggtggaggcaaaacactaataaaagggctaaaaaggaaaatgatgcttttcttctatattcttactctgtacaaataaagaagttgcttgttgtttgagaagtttaaccccgttgcttgttgttctgcagccctgtctacttgggcacccccaccacctgttagctgtggttgtgcactgtcttttgtagctctggactggaggggtagatggggagtcaattacccatcacataaatatgaaacatttatcagaaatgttgccattttaatgagatgattttcttcatctcataattaaaatacctgactttagagagagtaaaatgtgccaggagccataggaatatctgtatgttggatgactttaatgctacattttaaaaaaagaaaataaagtaataatataactcaaaa

SEQ ID NO: 443573 - DNA, 2586 bp, Homo sapiens
agagtgactaggtgcgtgctggtgttaattcagtcacagggcgcgtgcatttctctggtggtggatcggcagtaccttgccggccagttgctacctccctttatctcctccttcccctctggcagcgaggaggctatttccagacacttccacccctctctggccacgtcacccccgcctttaattcataaaggtgcccggcgccggcttcccggacacgtcggcggcggagaggggcccacggcggcggcccggccagagactcggcgcccggagccagcgccccgcacccgcgccccagcgggcagaccccaacccagcatgagcgccgccacccactcgcccatgatgcaggtggcgtccggcaacggtgaccgcgaccctttgccccccggatgggagatcaagatcgacccgcagaccggctggcccttcttcgtggaccacaacagccgcaccactacgtggaacgacccgcgcgtgccctctgagggccccaaggagactccatcctctgccaatggcccttcccgggagggctctaggctgccgcctgctagggaaggccaccctgtgtacccccagctccgaccaggctacattcccattcctgtgctccatgaaggcgctgagaaccggcaggtgcaccctttccatgtctatccccagcctgggatgcagcgattccgaactgaggcggcagcagcggctcctcagaggtcccagtcacctctgcggggcatgccagaaaccactcagccagataaacagtgtggacaggtggcagcggcggcggcagcccagcccccagcctcccacggacctgagcggtcccagtctccagctgcctctgactgctcatcctcatcctcctcggccagcctgccttcctccggcaggagcagcctgggcagtcaccagctcccgcgggggtacatctccattccggtgatacacgagcagaacgttacccggccagcagcccagccctccttccaccaagcccagaagacgcactacccagcgcagcagggggagtaccagacccaccagcctgtgtaccacaagatccagggggatgactgggagccccggcccctgcgggcggcatccccgttcaggtcatctgtccagggtgcatcgagccgggagggctcaccagccaggagcagcacgccactccactccccctcgcccatccgtgtgcacaccgtggtcgacaggcctcagcagcccatgacccatcgagaaactgcacctgtttcccagcctgaaaacaaaccagaaagtaagccaggcccagttggaccagaactccctcctggacacatcccaattcaagtgatccgcaaagaggtggattctaaacctgtttcccagaagcccccacctccctctgagaaggtagaggtgaaagttccccctgctccagttccttgtcctcctcccagccctggcccttctgctgtcccctcttcccccaagagtgtggctacagaagagagggcagcccccagcactgcccctgcagaagctacacctccaaaaccaggagaagccgaggctcccccaaaacatccaggagtgctgaaagtggaagccatcctggagaaggtgcaggggctggagcaggctgtagacaactttgaaggcaagaagactgacaaaaagtacctgatgatcgaagagtatttgaccaaagagctgctggccctggattcagtggaccccgagggacgagccgatgtgcgtcaggccaggagagacggtgtcaggaaggttcagaccatcttggaaaaacttgaacagaaagccattgatgtcccaggtcaagtccaggtctatgaactccagcccagcaaccttgaagcagatcagccactgcaggcaatcatggagatgggtgccgtggcagcagacaagggcaagaaaaatgctggaaatgcagaagatccccacacagaaacccagcagccagaagccacagcagcagcgacttcaaaccccagcagcatgacagacacccctggtaacccagcagcaccgtagcctctgccctgtaaaaatcagactcggaaccgatgtgtgctttagggaattttaagttgcatgcatttcagagactttaagtcagttggtttttattagctgcttggtatgcagtaacttgggtggaggcaaaacactaataaaagggctaaaaaggaaaatgatgcttttcttctatattcttactctgtacaaataaagaagttgcttgttgtttgagaagtttaaccccgttgcttgttgttctgcagccctgtctacttgggcacccccaccacctgttagctgtggttgtgcactgtcttttgtagctctggactggaggggtagatggggagtcaattacccatcacataaatatgaaacatttatcagaaatgttgccattttaatgagatgattttcttcatctcataattaaaatacctgactttagagagagtaaaatgtgccaggagccataggaatatctgtatgttggatgactttaatgctacattttaaaaaaagaaaataaagtaataatataactcaaaa

SEQ ID NO: 443574 - DNA, 2876 bp, Homo sapiens
gcggagctccgcatccaaccccgggccgcggccaacttctctggactggaccagaagtttctagccggccagttgctacctccctttatctcctccttcccctctggcagcgaggaggctatttccagacacttccacccctctctggccacgtcacccccgcctttaattcataaaggtgcccggcgccggcttcccggacacgtcggcggcggagaggggcccacggcggcggcccggccagagactcggcgcccggagccagcgccccgcacccgcgccccagcgggcagaccccaacccagcatgagcgccgccacccactcgcccatgatgcaggtggcgtccggcaacggtgaccgcgaccctttgccccccggatgggagatcaagatcgacccgcagaccggctggcccttcttcgtggaccacaacagccgcaccactacgtggaacgacccgcgcgtgccctctgagggccccaaggagactccatcctctgccaatggcccttcccgggagggctctaggctgccgcctgctagggaaggccaccctgtgtacccccagctccgaccaggctacattcccattcctgtgctccatgaaggcgctgagaaccggcaggtgcaccctttccatgtctatccccagcctgggatgcagcgattccgaactgaggcggcagcagcggctcctcagaggtcccagtcacctctgcggggcatgccagaaaccactcagccagataaacagtgtggacaggtggcagcggcggcggcagcccagcccccagcctcccacggacctgagcggtcccagtctccagctgcctctgactgctcatcctcatcctcctcggccagcctgccttcctccggcaggagcagcctgggcagtcaccagctcccgcgggggtacatctccattccggtgatacacgagcagaacgttacccggccagcagcccagccctccttccaccaagcccagaagacgcactacccagcgcagcagggggagtaccagacccaccagcctgtgtaccacaagatccagggggatgactgggagccccggcccctgcgggcggcatccccgttcaggtcatctgtccagggtgcatcgagccgggagggctcaccagccaggagcagcacgccactccactccccctcgcccatccgtgtgcacaccgtggtcgacaggcctcagcagcccatgacccatcgagaaactgcacctgtttcccagcctgaaaacaaaccagaaagtaagccaggcccagttggaccagaactccctcctggacacatcccaattcaagtgatccgcaaagaggtggattctaaacctgtttcccagaagcccccacctccctctgagaaggtagaggtgaaagttccccctgctccagttccttgtcctcctcccagccctggcccttctgctgtcccctcttcccccaagagtgtggctacagaagagagggcagcccccagcactgcccctgcagaagctacacctccaaaaccaggagaagccgaggctcccccaaaacatccaggagtgctgaaagtggaagccatcctggagaaggtgcaggggctggagcaggctgtagacaactttgaaggcaagaagactgacaaaaagtacctgatgatcgaagagtatttgaccaaagagctgctggccctggattcagtggaccccgagggacgagccgatgtgcgtcaggccaggagagacggtgtcaggaaggttcagaccatcttggaaaaacttgaacagaaagccattgatgtcccaggtcaagtccaggtctatgaactccagcccagcaaccttgaagcagatcagccactgcaggcaatcatggagatgggtgccgtggcagcagacaagggcaagaaaaatgctggaaatgcagaagatccccacacagaaacccagcagccagaagccacagcagcagcgacttcaaaccccagcagcatgacagacacccctggtaacccagcagcaccgtagcctctgccctgtaaaaatcagactcggaaccgatgtgtgctttagggaattttaagttgcatgcatttcagagactttaagtcagttggtttttattagctgcttggtatgcagtaacttgggtggaggcaaaacactaataaaagggctaaaaaggaaaatgatgcttttcttctatattcttactctgtacaaataaagaagttgcttgttgtttgagaagtttaaccccgttgcttgttgttctgcagccctgtctacttgggcacccccaccacctgttagctgtggttgtgcactgtcttttgtagctctggactggaggggtagatggggagtcaattacccatcacataaatatgaaacatttatcagaaatgttgccattttaatgagatgattttcttcatctcataattaaaatacctgactttagagagagtaaaatgtgccaggagccataggaatatctgtatgttggatgactttaatgctacattttaaaaaaagaaaataaagtaataatataactcaaaaaaaaaaaaaaaacaaaaataacaaagaatcttttctggcgcgcgctcggcgccctagaaagaggtcttcataacccaatttggtggggcggcgcggggccccaagtgtggtgatagtgtgaccacggcgcatacgggtgtccaaaggagagcatcccggggcaactaagcaatagtgtgtgggctctctccccaataaaaaaccgcgcgggggcgacagcccgcggctgttctggaccacaccccagaggggcgctggcgccataccgcggccatctccagaggtccagcagagcctagttaaaa

SEQ ID NO: 443575 - DNA, 2261 bp, Homo sapiens
tcatgtggcacatgtgataccatgtgaggtatctggtgttactaagtcgtcacgtatttcgatgaagggtccacaggctcagaaaagatggaacgagtgactgtggagaagggtagaacatgggcctgcccagagcgcgaaggcagatacagaagagctgcccgtgaaggatgcaggagactccatcctctgccaatggcccttcccgggagggctctaggctgccgcctgctagggaaggccaccctgtgtacccccagctccgaccaggctacattcccattcctgtgctccatgaaggcgctgagaaccggcaggtgcaccctttccatgtctatccccagcctgggatgcagcgattccgaactgaggcggcagcagcggctcctcagaggtcccagtcacctctgcggggcatgccagaaaccactcagccagataaacagtgtggacaggtggcagcggcggcggcagcccagcccccagcctcccacggacctgagcggtcccagtctccagctgcctctgactgctcatcctcatcctcctcggccagcctgccttcctccggcaggagcagcctgggcagtcaccagctcccgcgggggtacatctccattccggtgatacacgagcagaacgttacccggccagcagcccagccctccttccaccaagcccagaagacgcactacccagcgcagcagggggagtaccagacccaccagcctgtgtaccacaagatccagggggatgactgggagccccggcccctgcgggcggcatccccgttcaggtcatctgtccagggtgcatcgagccgggagggctcaccagccaggagcagcacgccactccactccccctcgcccatccgtgtgcacaccgtggtcgacaggcctcagcagcccatgacccatcgagaaactgcacctgtttcccagcctgaaaacaaaccagaaagtaagccaggcccagttggaccagaactccctcctggacacatcccaattcaagtgatccgcaaagaggtggattctaaacctgtttcccagaagcccccacctccctctgagaaggtagaggtgaaagttccccctgctccagttccttgtcctcctcccagccctggcccttctgctgtcccctcttcccccaagagtgtggctacagaagagagggcagcccccagcactgcccctgcagaagctacacctccaaaaccaggagaagccgaggctcccccaaaacatccaggagtgctgaaagtggaagccatcctggagaaggtgcaggggctggagcaggctgtagacaactttgaaggcaagaagactgacaaaaagtacctgatgatcgaagagtatttgaccaaagagctgctggccctggattcagtggaccccgagggacgagccgatgtgcgtcaggccaggagagacggtgtcaggaaggttcagaccatcttggaaaaacttgaacagaaagccattgatgtcccaggtcaagtccaggtctatgaactccagcccagcaaccttgaagcagatcagccactgcaggcaatcatggagatgggtgccgtggcagcagacaagggcaagaaaaatgctggaaatgcagaagatccccacacagaaacccagcagccagaagccacagcagcagcgacttcaaaccccagcagcatgacagacacccctggtaacccagcagcaccgtagcctctgccctgtaaaaatcagactcggaaccgatgtgtgctttagggaattttaagttgcatgcatttcagagactttaagtcagttggtttttattagctgcttggtatgcagtaacttgggtggaggcaaaacactaataaaagggctaaaaaggaaaatgatgcttttcttctatattcttactctgtacaaataaagaagttgcttgttgtttgagaagtttaaccccgttgcttgttgttctgcagccctgtctacttgggcacccccaccacctgttagctgtggttgtgcactgtcttttgtagctctggactggaggggtagatggggagtcaattacccatcacataaatatgaaacatttatcagaaatgttgccattttaatgagatgattttcttcatctcataattaaaatacctgactttagagagagtaaaatgtgccaggagccataggaatatctgtatgttggatgactttaatgctacattttaaaaaaagaaaataaagtaataatataactcaaaa

SEQ ID NO: 443576 - DNA, 1227 bp, Homo sapiens
  misc_feature (5)..(5): n is a, c, g, or t
  misc_feature (7)..(7): n is a, c, g, or t
  misc_feature (13)..(13): n is a, c, g, or t
  misc_feature (20)..(20): n is a, c, g, or t
gaacnanggctangtcgagnccggtgtgaatcggccgaggagaaggtagaggtgaaagttccccctgctccagttccttgtcctcctcccagccctggcccttctgctgtcccctcttcccccaagagtgtggctacagaagagagggcagcccccagcactgcccctgcagaagctacacctccaaaaccaggagaagccgaggctcccccaaaacatccaggagtgctgaaagtggaagccatcctggagaaggtgcaggggctggagcaggctgtagacaactttgaaggcaagaagactgacaaaaagtacctgatgatcgaagagtatttgaccaaagagctgctggccctggattcagtggaccccgagggacgagccgatgtgcgtcaggccaggagagacggtgtcaggaaggttcagaccatcttggaaaaacttgaacagaaagccattgatgtcccaggtcaagtccaggtctatgaactccagcccagcaaccttgaagcagatcagccactgcaggcaatcatggagatgggtgccgtggcagcagacaagggcaagaaaaatgctggaaatgcagaagatccccacacagaaacccagcagccagaagccacagcagcagcgacttcaaaccccagcagcatgacagacacccctggtaacccagcagcaccgtagcctctgccctgtaaaaatcagactcggaaccgatgtgtgctttagggaattttaagttgcatgcatttcagagactttaagtcagttggtttttattagctgcttggtatgcagtaacttgggtggaggcaaaacactaataaaagggctaaaaaggaaaatgatgcttttcttctatattcttactctgtacaaataaagaagttgcttgttgtttgagaagtttaaccccgttgcttgttgttctgcagccctgtctacttgggcacccccaccacctgttagctgtggttgtgcactgtcttttgtagctctggactggaggggtagatggggagtcaattacccatcacataaatatgaaacatttatcagaaatgttgccattttaatgagatgattttcttcatctcataattaaaatacctgactttagagagagtaaaatgtgccaggagccataggaatatctgtatgttggatgactttaatgctacattttaaaaaaagaaaataaagtaataatataactcaaaa

SEQ ID NO: 443577 - DNA, 2252 bp, Homo sapiens
gcggagctccgcatccaaccccgggccgcggccaacttctctggactggaccagaagtttctagccggccagttgctacctccctttatctcctccttcccctctggcagcgaggaggctatttccagacacttccacccctctctggccacgtcacccccgcctttaattcataaaggtgcccggcgccggcttcccggacacgtcggcggcggagaggggcccacggcggcggcccggccagagactcggcgcccggagccagcgccccgcacccgcgccccagcgggcagaccccaacccagcatgagcgccgccacccactcgcccatgatgcaggtggcgtccggcaacggtgaccgcgaccctttgccccccggatgggagatcaagatcgacccgcagaccggctggcccttcttcgtggaccacaacagccgcaccactacgtggaacgacccgcgcgtgccctctgagggccccaaggagactccatcctctgccaatggcccttcccgggagggctctaggctgccgcctgctagggaaggccaccctgtgtacccccagctccgaccaggctacattcccattcctgtgctccatgaaggcgctgagaaccggcaggtgcaccctttccatgtctatccccagcctgggatgcagcgattccgaactgaggcggcagcagcggctcctcagaggtcccagtcacctctgcggggcatgccagaaaccactcagccagataaacagtgtggacaggtggcagcggcggcggcagcccagcccccagcctcccacggacctgagcggtcccagtctccagctgcctctgactgctcatcctcatcctcctcggccagcctgccttcctccggcaggagcagcctgggcagtcaccagctcccgcgggggtacatctccattccggtgatacacgagcagaacgttacccggccagcagcccagccctccttccaccaagcccagaagacgcactacccagcgcagcagggggagtaccagacccaccagcctgtgtaccacaagatccagggggatgactgggagccccggcccctgcgggcggcatccccgttcaggtcatctgtccagggtgcatcgagccgggagggctcaccagccaggagcagcacgccactccactccccctcgcccatccgtgtgcacaccgtggtcgacaggcctcagcagcccatgacccatcgagaaactgcacctgtttcccagcctgaaaacaaaccagaaagtaagccaggcccagttggaccagaactccctcctggacacatcccaattcaagtgatccgcaaagaggtggattctaaacctgtttcccagaagcccccacctccctctgagaaggtagaggtgaaagttccccctgctccagttccttgtcctcctcccagccctggcccttctgctgtcccctcttcccccaagagtgtggctacagaagagagggcagcccccagcactgcccctgcagaagctacacctccaaaaccaggagaagccgaggctcccccaaaacatccaggagtgctgaaagtggaagccatcctggagaaggtgcaggggctggagcaggctgtagacaactttgaaggcaagaagactgacaaaaagtacctgatgatcgaagagtatttgaccaaagagctgctggccctggattcagtggaccccgagggacgagccgatgtgcgtcaggccaggagagacggtgtcaggaaggttcagaccatcttggaaaaacttgaacagaaagccattgatgtcccaggtcaagtccaggtctatgaactccagcccagcaaccttgaagcagatcagccactgcaggcaatcatggagatgggtgccgtggcagcagacaagggcaagaaaaatgctggaaatgcagaagatccccacacagaaacccagcagccagaagccacagcagcagcgacttcaaaccccagcagcatgacagacacccctggtaacccagcagcaccgtagcctctgccctgtaaaaatcagactcggaaccgatgtgtgctttagggaattttaagttgcatgcatttcagagactttaagtcagttggtttttattagctgcttggtatgcagtaacttgggtggaggcaaaacactaataaaagggctaaaaaggaaaatgatgcttttcttctatattcttactctgtacaaataaagaagttgcttgttgtttg

SEQ ID NO: 443578 - DNA, 2008 bp, Homo sapiens
gcggagctccgcatccaaccccgggccgcggccaacttctctggactggaccagaagtttctagccggccagttgctacctccctttatctcctccttcccctctggcagcgaggaggctatttccagacacttccacccctctctggccacgtcacccccgcctttaattcataaaggtgcccggcgccggcttcccggacacgtcggcggcggagaggggcccacggcggcggcccggccagagactcggcgcccggagccagcgccccgcacccgcgccccagcgggcagaccccaacccagcatgagcgccgccacccactcgcccatgatgcaggtggcgtccggcaacggtgaccgcgaccctttgccccccggatgggagatcaagatcgacccgcagaccggctggcccttcttcgtggaccacaacagccgcaccactacgtggaacgacccgcgcgtgccctctgagggccccaaggagactccatcctctgccaatggcccttcccgggagggctctaggctgccgcctgctagggaaggccaccctgtgtacccccagctccgaccaggctacattcccattcctgtgctccatgaaggcgctgagaaccggcaggtgcaccctttccatgtctatccccagcctgggatgcagcgattccgaactgaggcggcagcagcggctcctcagaggtcccagtcacctctgcggggcatgccagaaaccactcagccagataaacagtgtggacaggtggcagcggcggcggcagcccagcccccagcctcccacggacctgagcggtcccagtctccagctgcctctgactgctcatcctcatcctcctcggccagcctgccttcctccggcaggagcagcctgggcagtcaccagctcccgcgggggtacatctccattccggtgatacacgagcagaacgttacccggccagcagcccagccctccttccaccaagcccagaagacgcactacccagcgcagcagggggagtaccagacccaccagcctgtgtaccacaagatccagggggatgactgggagccccggcccctgcgggcggcatccccgttcaggtcatctgtccagggtgcatcgagccgggagggctcaccagccaggagcagcacgccactccactccccctcgcccatccgtgtgcacaccgtggtcgacaggcctcagcagcccatgacccatcgagaaactgcacctgtttcccagcctgaaaacaaaccagaaagtaagccaggcccagttggaccagaactccctcctggacacatcccaattcaagtgatccgcaaagaggtggattctaaacctgtttcccagaagcccccacctccctctgagaaggtagaggtgaaagttccccctgctccagttccttgtcctcctcccagccctggcccttctgctgtcccctcttcccccaagagtgtggctacagaagagagggcagcccccagcactgcccctgcagaagctacacctccaaaaccaggagaagccgaggctcccccaaaacatccaggagtgctgaaagtggaagccatcctggagaaggtgcaggggctggagcaggctgtagacaactttgaaggcaagaagactgacaaaaagtacctgatgatcgaagagtatttgaccaaagagctgctggccctggattcagtggaccccgagggacgagccgatgtgcgtcaggccaggagagacggtgtcaggaaggttcagaccatcttggaaaaactcgacctttatgttgaggtgtctggacagcacagaggcatggtacttagaaaagattccaggacgctttgttatcattggactttctgtgctatggaaattcaacactgtgggctggaataactagtcatgtggaactccttcctgcttttgtaccctctcacttttacttgagcagaaggttaaaagtattgctttctgagaagtcccattcggtcactcc

SEQ ID NO: 443579 - DNA, 1478 bp, Homo sapiens
  misc_feature (1413)..(1413): n is a, c, g, or t
  misc_feature (1461)..(1461): n is a, c, g, or t
gcggagctccgcatccaaccccgggccgcggccaacttctctggactggaccagaagtttctagccggccagttgctacctccctttatctcctccttcccctctggcagcgaggaggctatttccagacacttccacccctctctggccacgtcacccccgcctttaattcataaaggtgcccggcgccggcttcccggacacgtcggcggcggagaggggcccacggcggcggcccggccagagactcggcgcccggagccagcgccccgcacccgcgccccagcgggcagaccccaacccagcatgagcgccgccacccactcgcccatgatgcaggtggcgtccggcaacggtgaccgcgaccctttgccccccggatgggagatcaagatcgacccgcagaccggctggcccttcttcgtggaccacaacagccgcaccactacgtggaacgacccgcgcgtgccctctgagggccccaaggagactccatcctctgccaatggcccttcccgggagggctctaggctgccgcctgctagggaaggccaccctgtgtacccccagctccgaccaggctacattcccattcctgtgctccatgaaggcgctgagaaccggcaggtgcaccctttccatgtctatccccagcctgggatgcagcgattccgaactgaggcggcagcagcggctcctcagaggtcccagtcacctctgcggggcatgccagaaaccactcagccagataaacagtgtggacaggtggcagcggcggcggcagcccagcccccagcctcccacggacctgagcggtcccagtctccagctgcctctgactgctcatcctcatcctcctcggccagcctgccttcctccggcaggagcagcctgggcagtcaccagctcccgcgggggtacatctccattccggtgatacacgagcagaacgttacccggccagcagcccagccctccttccaccaagcccagaagacgcactacccagcgcagcagggggagtaccagacccaccagcctgtgtaccacaagatccagggggatgactgggagccccggcccctgcgggcggcatccccgttcaggtcatctgtccagggtgcatcgagccgggagggctcaccagccaggagcagcacgccactccactccccctcgcccatccgtgtgcacaccgtggtcgacaggcctcagcagcccatgacccatcgagaaactgcacctgtttcccagcctgaaaacaaaccagaaagtaagccaggcccagttggaccagaactccctcctggacacatcccaattcaagtgatccgcaaagaggtggattctaaacctgtttcccagaagcccccacctccctctgagaaggtagaggtgaaagttccccctgantgctcatcctcatcctcctcggccagcctgccttcctccggcagggcnagcctgggcagtcacca

SEQ ID NO: 443580 - DNA, 982 bp, Homo sapiens
cagcctgctggggagcaagccgctgtgcttcccaggccgggcccatcccctgaggacagtgccctgggccaggcacctgttcacatgcagggcatctgggtctagcctgcagcatcagaggtcacccagcagagacagggtgatggccccacatcatcccccagcatctcatagggctgttcttcagtggggcagggcaggaatcatgtggcttctttttgtagctaaggaacggctcggaagggcacactgcagcctgcctgctccagatgcacacaggtggagggagcagagctgggaccggaagcctggcctgccttctggcgcctaatttccatgctccttattcacactgggctttctattcagaagcacagagatagctgtgcattattttgttcagttcaatgcttatggataaatcttaaccgcttgtggagctatgttgacaggaaaatgagaccccatgcctgccctcaccgtgcaccacagtttcaaaagaaataaggagtcaggaaggcagctgctttaagacagcattttaatcctgaagccaaacatctcagggatatgtcaatggattctgtgcattaatagctaaaaaatagttcttaatctggttcttagctgagatttgaggcattcctagtaggattcctaagcagtaagtcctctcattttcctgtctgcacatcatcctgtggtgtgtgccagcgttgttcctgggcacaaactcccgtgtcctatctgcaccctgagtcatgcttgcctctcagctccgtctgaatctgttcagcttcacacctgcttgagagtgaaagttacagttaatgtgggataccttttttcttttcttagagaggtagtacctggctgaggcaggtggatcacttgaggccaggaattcaagaccagcctggctcaggtggtccactcacctaggcctcccaaagtgctgggattacaggtgtgagccaccgcg

SEQ ID NO: 443581 - DNA, 414 bp, Homo sapiens
cagcctcctgagtagctggcactacaggcatgcgccgccacacccagctaatttttgtatttttggtagagatggggtttcaccatgttggccaggctgctcttgaactcctgacctcaggtggtccactcacctaggcctcccaaagtgctgggattacaggtgtgagccaccgcgcccagccccagagctctcagtcttaaccgcacattttgaaaattgaaaattacagataggaggtcttacaatatggattgccctgaggaggtgcacagcagaaggcgtggtcaggatgccaagccaggggagtcatttgtggggtcatgccctctaccctgtgtctcttgcagcggtcccagtctccagctgcctctgactgctcatcctcatcctcctcggccagcctgccttcct

SEQ ID NO: 443582 - DNA, 908 bp, Homo sapiens
  misc_feature (5)..(5): n is a, c, g, or t
  misc_feature (7)..(7): n is a, c, g, or t
  misc_feature (13)..(13): n is a, c, g, or t
  misc_feature (20)..(20): n is a, c, g, or t
gaacnanggctangtcgagnccggtgtgaatcggccgaggagaaggtagaggtgaaagttccccctgctccagttccttgtcctcctcccagccctggcccttctgctgtcccctcttcccccaagagtgtggctacagaagagagggcagcccccagcactgcccctgcagaagctacacctccaaaaccaggagaagccgaggctcccccaaaacatccaggagtgctgaaagtggaagccatcctggagaaggtgcaggggctggagcaggctgtagacaactttgaaggcaagaagactgacaaaaagtacctgatgatcgaagagtatttgaccaaagagctgctggccctggattcagtggaccccgagggacgagccgatgtgcgtcaggccaggagagacggtgtcaggaaggttcagaccatcttggaaaaacttgaacagaaagccattgatgtcccaggtcaagtccaggtctatgaactccagcccagcaaccttgaagcagatcagccactgcaggcaatcatggagatgggtgccgtggcagcagacaagggcaagaaaaatgctggaaatgcagaagatccccacacagaaacccagcagccagaagccacagcagcagcgacttcaaaccccagcagcatgacagacacccctggtaacccagcagcaccgtagcctctgccctgtaaaaatcagactcggaaccgatgtgtgctttagggaattttaagttgcatgcatttcagagactttaagtcagttggtttttattagctgcttggtatgcagtaacttgggtggaggcaaaacactaataaaagggctaaaaaggaaaatgatgcttttcttctatattcttactctgtacaaataaagaagttgcttgttgtttg

SEQ ID NO: 443583 - DNA, 2787 bp, Homo sapiens
gcggagctccgcatccaaccccgggccgcggccaacttctctggactggaccagaagtttctagccggccagttgctacctccctttatctcctccttcccctctggcagcgaggaggctatttccagacacttccacccctctctggccacgtcacccccgcctttaattcataaaggtgcccggcgccggcttcccggacacgtcggcggcggagaggggcccacggcggcggcccggccagagactcggcgcccggagccagcgccccgcacccgcgccccagcgggcagaccccaacccagcatgagcgccgccacccactcgcccatgatgcaggtggcgtccggcaacggtgaccgcgaccctttgccccccggatgggagatcaagatcgacccgcagaccggctggcccttcttcgtggaccacaacagccgcaccactacgtggaacgacccgcgcgtgccctctgagggccccaaggagactccatcctctgccaatggcccttcccgggagggctctaggctgccgcctgctagggaaggccaccctgtgtacccccagctccgaccaggctacattcccattcctgtgctccatgaaggcgctgagaaccggcaggtgcaccctttccatgtctatccccagcctgggatgcagcgattccgaactgaggcggcagcagcggctcctcagaggtcccagtcacctctgcggggcatgccagaaaccactcagccagataaacagtgtggacaggtggcagcggcggcggcagcccagcccccagcctcccacggacctgagcggtcccagtctccagctgcctctgactgctcatcctcatcctcctcggccagcctgccttcctccggcaggagcagcctgggcagtcaccagctcccgcgggggtacatctccattccggtgatacacgagcagaacgttacccggccagcagcccagccctccttccaccaagcccagaagacgcactacccagcgcagcagggggagtaccagacccaccagcctgtgtaccacaagatccagggggatgactgggagccccggcccctgcgggcggcatccccgttcaggtcatctgtccagggtgcatcgagccgggagggctcaccagccaggagcagcacgccactccactccccctcgcccatccgtgtgcacaccgtggtcgacaggcctcagcagcccatgacccatcgagaaactgcacctgtttcccagcctgaaaacaaaccagaaagtaagccaggcccagttggaccagaactccctcctggacacatcccaattcaagtgatccgcaaagaggtggattctaaacctgtttcccagaagcccccacctccctctgagaaggtagaggtgaaagttccccctgctccagttccttgtcctcctcccagccctggcccttctgctgtcccctcttcccccaagagtgtggctacagaagagagggcagcccccagcactgcccctgcagaagctacacctccaaaaccaggagaagccgaggctcccccaaaacatccaggagtgctgaaagtggaagccatcctggagaaggtgcaggggctggagcaggctgtagacaactttgaaggcaagaagactgacaaaaagtacctgatgatcgaagagtatttgaccaaagagctgctggccctggattcagtggaccccgagggacgagccgatgtgcgtcaggccaggagagacggtgtcaggaaggttcagaccatcttggaaaaacttgaacagaaagccattgatgtcccaggtcaagtccaggtctatgaactccagcccagcaaccttgaagcagatcagccactgcaggcaatcatggagatgggtgccgtggcagcagacaagggcaagaaaaatgctggaaatgcagaagatccccacacagaaacccagcagccagaagccacagcagcagcgacttcaaaccccagcagcatgacagacacccctggtaacccagcagcaccgtagcctctgccctgtaaaaatcagactcggaaccgatgtgtgctttagggaattttaagttgcatgcatttcagagactttaagtcagttggtttttattagctgcttggtatgcagtaacttgggtggaggcaaaacactaataaaagggctaaaaaggaaaatgatgcttttcttctatattcttactctgtacaaataaagaagttgcttgttgtttgagaagtttaaccccgttgcttgttgttctgcagccctgtctacttgggcacccccaccacctgttagctgtggttgtgcactgtcttttgtagctctggactggaggggtagatggggagtcaattacccatcacataaatatgaaacatttatcagaaatgttgccattttaatgagatgattttcttcatctcataattaaaatacctgactttagagagagtaaaatgtgccaggagccataggaatatctgtatgttggatgactttaatgctacattttaaaaaaagaaaataaagtaataatataactcaaaaaaaaaaaaaaaaaagaaaaaaaaacttggggggcgccccgggcccgaaaaaggttcaaacccatccgtggggcggccgcgcccggggtgggacttggccaacgggggcgccaggaaacgtgtcccaccatgcggtggtctcaccaaaaaaaaacgccggggggacggcggtcgcacacccagggggcgggcaacggcatcacagggcagggcgtaa

SEQ ID NO: 443584 - DNA, 2378 bp, Homo sapiens
gcggagctccgcatccaaccccgggccgcggccaacttctctggactggaccagaagtttctagccggccagttgctacctccctttatctcctccttcccctctggcagcgaggaggctatttccagacacttccacccctctctggccacgtcacccccgcctttaattcataaaggtgcccggcgccggcttcccggacacgtcggcggcggagaggggcccacggcggcggcccggccagagactcggcgcccggagccagcgccccgcacccgcgccccagcgggcagaccccaacccagcatgagcgccgccacccactcgcccatgatgcaggtggcgtccggcaacggtgaccgcgaccctttgccccccggatgggagatcaagatcgacccgcagaccggctggcccttcttcgtggaccacaacagccgcaccactacgtggaacgacccgcgcgtgccctctgagggccccaaggagactccatcctctgccaatggcccttcccgggagggctctaggctgccgcctgctagggaaggccaccctgtgtacccccagctccgaccaggctacattcccattcctgtgctccatgaaggcgctgagaaccggcaggtgcaccctttccatgtctatccccagcctgggatgcagcgattccgaactgaggcggcagcagcggctcctcagaggtcccagtcacctctgcggggcatgccagaaaccactcagccagataaacagtgtggacaggtggcagcggcggcggcagcccagcccccagcctcccacggacctgagcggtcccagtctccagctgcctctgactgctcatcctcatcctcctcggccagcctgccttcctccggcaggagcagcctgggcagtcaccagctcccgcgggggtacatctccattccggtgatacacgagcagaacgttacccggccagcagcccagccctccttccaccaagcccagaagacgcactacccagcgcagcagggggacagcccatgacccatcgagaaactgcacctgtttcccagcctgaaaacaaaccagaaagtaagccaggcccagttggaccagaactccctcctggacacatcccaattcaagtgatccgcaaagaggtggattctaaacctgtttcccagaagcccccacctccctctgagaaggtagaggtgaaagttccccctgctccagttccttgtcctcctcccagccctggcccttctgctgtcccctcttcccccaagagtgtggctacagaagagagggcagcccccagcactgcccctgcagaagctacacctccaaaaccaggagaagccgaggctcccccaaaacatccaggagtgctgaaagtggaagccatcctggagaaggtgcaggggctggagcaggctgtagacaactttgaaggcaagaagactgacaaaaagtacctgatgatcgaagagtatttgaccaaagagctgctggccctggattcagtggaccccgagggacgagccgatgtgcgtcaggccaggagagacggtgtcaggaaggttcagaccatcttggaaaaacttgaacagaaagccattgatgtcccaggtcaagtccaggtctatgaactccagcccagcaaccttgaagcagatcagccactgcaggcaatcatggagatgggtgccgtggcagcagacaagggcaagaaaaatgctggaaatgcagaagatccccacacagaaacccagcagccagaagccacagcagcagcgacttcaaaccccagcagcatgacagacacccctggtaacccagcagcaccgtagcctctgccctgtaaaaatcagactcggaaccgatgtgtgctttagggaattttaagttgcatgcatttcagagactttaagtcagttggtttttattagctgcttggtatgcagtaacttgggtggaggcaaaacactaataaaagggctaaaaaggaaaatgatgcttttcttctatattcttactctgtacaaataaagaagttgcttgttgtttgagaagtttaaccccgttgcttgttgttctgcagccctgtctacttgggcacccccaccacctgttagctgtggttgtgcactgtcttttgtagctctggactggaggggtagatggggagtcaattacccatcacataaatatgaaacatttatcagaaatgttgccattttaatgagatgattttcttcatctcataattaaaatacctgactttagagagagtaaaatgtgccaggagccataggaatatctgtatgttggatgactttaatgctacattttaaaaaaagaaaataaagtaataatataactcaaaa

SEQ ID NO: 443585 - DNA, 1643 bp, Homo sapiens
ctccactccttcttggaattcatagacacaagtcactcctcatcatcactgttgcttgagcaccgaagacgcactacccagcgcagcagggggagtaccagacccaccagcctgtgtaccacaagatccagggggatgactgggagccccggcccctgcgggcggcatccccgttcaggtcatctgtccagggtgcatcgagccgggagggctcaccagccaggagcagcacgccactccactccccctcgcccatccgtgtgcacaccgtggtcgacaggcctcagcagcccatgacccatcgagaaactgcacctgtttcccagcctgaaaacaaaccagaaagtaagccaggcccagttggaccagaactccctcctggacacatcccaattcaagtgatccgcaaagaggtggattctaaacctgtttcccagaagcccccacctccctctgagaaggtagaggtgaaagttccccctgctccagttccttgtcctcctcccagccctggcccttctgctgtcccctcttcccccaagagtgtggctacagaagagagggcagcccccagcactgcccctgcagaagctacacctccaaaaccaggagaagccgaggctcccccaaaacatccaggagtgctgaaagtggaagccatcctggagaaggtgcaggggctggagcaggctgtagacaactttgaaggcaagaagactgacaaaaagtacctgatgatcgaagagtatttgaccaaagagctgctggccctggattcagtggaccccgagggacgagccgatgtgcgtcaggccaggagagacggtgtcaggaaggttcagaccatcttggaaaaacttgaacagaaagccattgatgtcccaggtcaagtccaggtctatgaactccagcccagcaaccttgaagcagatcagccactgcaggcaatcatggagatgggtgccgtggcagcagacaagggcaagaaaaatgctggaaatgcagaagatccccacacagaaacccagcagccagaagccacagcagcagcgacttcaaaccccagcagcatgacagacacccctggtaacccagcagcaccgtagcctctgccctgtaaaaatcagactcggaaccgatgtgtgctttagggaattttaagttgcatgcatttcagagactttaagtcagttggtttttattagctgcttggtatgcagtaacttgggtggaggcaaaacactaataaaagggctaaaaaggaaaatgatgcttttcttctatattcttactctgtacaaataaagaagttgcttgttgtttgagaagtttaaccccgttgcttgttgttctgcagccctgtctacttgggcacccccaccacctgttagctgtggttgtgcactgtcttttgtagctctggactggaggggtagatggggagtcaattacccatcacataaatatgaaacatttatcagaaatgttgccattttaatgagatgattttcttcatctcataattaaaatacctgactttagagagagtaaaatgtgccaggagccataggaatatctgtatgttggatgactttaatgctacattttaaaaaaagaaaataaagtaataatataactcaaaa

SEQ ID NO: 443586 - DNA, 1716 bp, Homo sapiens
cagcctgctggggagcaagccgctgtgcttcccaggccgggcccatcccctgaggacagtgccctgggccaggcacctgttcacatgcagggcatctgggtctagcctgcagcatcagaggtcacccagcagagacagggtgatggccccacatcatcccccagcatctcatagggctgttcttcagtggggcagggcaggaatcatgtggcttctttttgtagctaaggaacggctcggaagggcacactgcagcctgcctgctccagatgcacacaggtggagggagcagagctgggaccggaagcctggcctgccttctggcgcctaatttccatgctccttattcacactgggctttctattcagaagcacagagatagctgtgcattattttgttcagttcaatgcttatggataaatcttaaccgcttgtggagctatgttgacaggaaaatgagaccccatgcctgccctcaccgtgcaccacagtttcaaaagaaataaggagtcaggaaggcagctgctttaagacagcattttaatcctgaagccaaacatctcagggatatgtcaatggattctgtgcattaatagctaaaaaatagttcttaatctggttcttagctgagatttgaggcattcctagtaggattcctaagcagtaagtcctctcattttcctgtctgcacatcatcctgtggtgtgtgccagcgttgttcctgggcacaaactcccgtgtcctatctgcaccctgagtcatgcttgcctctcagctccgtctgaatctgttcagcttcacacctgatgatcgaagagtatttgaccaaagagctgctggccctggattcagtggaccccgagggacgagccgatgtgcgtcaggccaggagagacggtgtcaggaaggttcagaccatcttggaaaaacttgaacagaaagccattgatgtcccaggtcaagtccaggtctatgaactccagcccagcaaccttgaagcagatcagccactgcaggcaatcatggagatgggtgccgtggcagcagacaagggcaagaaaaatgctggaaatgcagaagatccccacacagaaacccagcagccagaagccacagcagcagcgacttcaaaccccagcagcatgacagacacccctggtaacccagcagcaccgtagcctctgccctgtaaaaatcagactcggaaccgatgtgtgctttagggaattttaagttgcatgcatttcagagactttaagtcagttggtttttattagctgcttggtatgcagtaacttgggtggaggcaaaacactaataaaagggctaaaaaggaaaatgatgcttttcttctatattcttactctgtacaaataaagaagttgcttgttgtttgagaagtttaaccccgttgcttgttgttctgcagccctgtctacttgggcacccccaccacctgttagctgtggttgtgcactgtcttttgtagctctggactggaggggtagatggggagtcaattacccatcacataaatatgaaacatttatcagaaatgttgccattttaatgagatgattttcttcatctcataattaaaatacctgactttagagagagtaaaatgtgccaggagccataggaatatctgtatgttggatgactttaatgctacattttaaaaaaagaaaataaagtaataatataactcaaaa

SEQ ID NO: 443587 - DNA, 1371 bp, Homo sapiens
gcggagctccgcatccaaccccgggccgcggccaacttctctggactggaccagaagtttctagccggccagttgctacctccctttatctcctccttcccctctggcagcgaggaggctatttccagacacttccacccctctctggccacgtcacccccgcctttaattcataaaggtgcccggcgccggcttcccggacacgtcggcggcggagaggggcccacggcggcggcccggccagagactcggcgcccggagccagcgccccgcacccgcgccccagcgggcagaccccaacccagcatgagcgccgccacccactcgcccatgatgcaggtggcgtccggcaacggtgaccgcgaccctttgccccccggatgggagatcaagatcgacccgcagaccggctggcccttcttcgtggaccacaacagccgcaccactacgtggaacgacccgcgcgtgccctctgagggccccaaggagactccatcctctgccaatggcccttcccgggagggctctaggctgccgcctgctagggaaggccaccctgtgtacccccagctccgaccaggctacattcccattcctgtgctccatgaaggcgctgagaaccggcaggtgcaccctttccatgtctatccccagcctgggatgcagcgattccgaactgaggcggcagcagcggctcctcagaggtcccagtcacctctgcggggcatgccagaaaccactcagccagataaacagtgtggacaggtggcagcggcggcggcagcccagcccccagcctcccacggacctgagcggtcccagtctccagctgcctctgactgctcatcctcatcctcctcggccagcctgccttcctccggcaggagcagcctgggcagtcaccagctcccgcgggggtacatctccattccggtgatacacgagcagaaacttgggtggaggcaaaacactaataaaagggctaaaaaggaaaatgatgcttttcttctatattcttactctgtacaaataaagaagttgcttgttgtttgagaagtttaaccccgttgcttgttgttctgcagccctgtctacttgggcacccccaccacctgttagctgtggttgtgcactgtcttttgtagctctggactggaggggtagatggggagtcaattacccatcacataaatatgaaacatttatcagaaatgttgccattttaatgagatgattttcttcatctcataattaaaatacctgactttagagagagtaaaatgtgccaggagccataggaatatctgtatgttggatgactttaatgctacattttaaaaaaagaaaataaagtaataatataactcaaaa

SEQ ID NO: 443588 - DNA, 852 bp, Homo sapiens
gcggagctccgcatccaaccccgggccgcggccaacttctctggactggaccagaagtttctagccggccagttgctacctccctttatctcctccttcccctctggcagcgaggaggctatttccagacacttccacccctctctggccacgtcacccccgcctttaattcataaaggtgcccggcgccggcttcccggacacgtcggcggcggagaggggcccacggcggcggcccggccagagactcggcgcccggagccagcgccccgcacccgcgccccagcgggcagaccccaacccagcatgagcgccgccacccactcgcccatgatgcaggtggcgtccggcaacggtgaccgcgaccctttgccccccggatgggagatcaagatcgacccgcagaccggctggcccttcttcgtggaccacaacagccgcaccactacgtggaacgacccgcgcgtgccctctgagggccccaaggagactccatcctctgccaatggcccttcccgggagggctctaggctgccgcctgctagggaaggccaccctgtgtacccccagctccgaccaggctacattcccattcctgtgctccatgaaggcactgtcttttgtagctctggactggaggggtagatggggagtcaattacccatcacataaatatgaaacatttatcagaaatgttgccattttaatgagatgattttcttcatctcataattaaaatacctgactttagagagagtaaaatgtgccaggagccataggaatatctgtatgttggatgactttaatgctacattttaaaaaaagaaaataaagtaataatataactcaaaa

SEQ ID NO: 443589 - DNA, 379 bp, Homo sapiens
tgagacagaggctcactctgtcacccaggctggagtgcaatggcatgacctcagctcactgcaacctccacctcctaggctcaagcgattctcctgcctcagcctccagagtagctgggattacaggcacctgccaccacggccggctaatttgtttttgtattttttagtagaaacagggtttcaccacattggccaggctggtcttgaactcctgacctcacgtggtccacctgcctcggcctcgcaaagtgctgagattataggtgtgagccactgcacctggccctagcttttgatactgtcatttccctttgggcttgagactgttctagtcaatcctggtctcattgtttgcctgacaggtaccatgatttaa

SEQ ID NO: 443590 - DNA, 4744 bp, Homo sapiens
cctttcctcgacgcccagccgtccgggccggggtgaaaaactgcgtgacacgcagtgagcgtggcggccatcttcgtcttctgggcacgtcagctgagccggttagggctgaagaggagcgttgcgcaagcgcacccaagacggtcacaggtaactcccatctgacgagcgaggcgtcgccgtcgtcgccggaagtttggtgtttgcgccgcgggggaggcggcggccgcagcagaagcagctgagtgtctcctgatacccggatgtgaggcgatccgctggcgctagtctgaccctccgccaggcaaaaggaagattgtctttggctatagagtttttttttttaaagattactaaacatacaggaagtgataagaagtatcattcatcagaagcatcattcatcaatcaacttgaagaaaaaggtgatatattatttctttaaggtgctgtgtgatgtgttaagagcatattagaaggaatggttttgtctaattttcttcatgagttatggtggctgagacatcgagtctatattttggggcaaaaactaaacggcagcacaaaaggaaatctatattaatagaatattttgttgaacaaaggaggttagataagaactgcaaaccaacagactcagcaaacaaggaaagaaacgtgttagccataagacatgtttcaagtgaatcgaagtccaataactgtagacttcagaagaaaaaagttttcaaaaattttatcaaaacaggtcactgataaataactcctccagtaatagagctaggcctgaaaccaaaattaattaaaaaattaacaaaacagattgaacctgaattaaatttcttttgataaaaaaacttattaaaaataatcaaaattttcctcaaatttttattaccttgtccaaagtaaagcaagtgtcttttagcattcatgccagcttttctcatgttctaggaatgacagaaaccttacttgaagcaaactagtatttttgttgaaaatgtatatcagcatcagttaaagttgatttttcagacctgctcctcagtaataatactagctagtcagcattcacgcctaccaggacacaaaaatcctcttcaaaactactcagaaaagaaagtcattactcaggaatgatgtccattcaggagaaatcaaaagagaattcctccaaagttactaaaaaaagtgacgataagaattcagaaacagaaattcaggattctcaaaagaatctagcaaaaaaatcaggtccaaaggagactataaaatcacaggctaaatcttccagtgaaagtaaaataaatcagccagaattggaaacacgcatgagtacaaggtcatcaaaggcagcatctaatgataaagctactaaatccattaataaaaatacggtgactgtgaggggatattcacaagaatctacaaaaaagaaattatctcagaaaaaattagtacatgaaaaccctaaagcaaatgaacagcttaaccggagatcacaaaggctacaacaattaacagaggtttcaagaaggtcgttacgcagtagagaaattcagggtcaagttcaagcagttaaacagagtttgccaccaactaaaaaagagcagtgtagcagtactcagagtaaatctaataaaacaagtcaaaaacatgtgaagagaaaagtactggaagtaaagtctgactctaaagaagatgaaaatctagtaattaatgaagtaataaattctcccaaagggaaaaaacgcaaggtagaacatcagacagcttgtgcttgtagttctcaatgcatgcaaggatctgaaaagtgtcctcagaagactactagaagagacgaaacgaaacctgtgcctgtaacttctgaggtgaaaagatcaaaaatggctacttcagtggtcccgaaaaagaatgagatgaagaagtcggttcatacacaagtgaatactaacacaacactcccaaaaagtccacagccatcagtgcctgaacaaagtgataatgagctggagcaagcaggaaagagcaaacgaggtagtattctccagctctgtgaagaaattgctggtgaaattgagtcagataatgtagaggtaaaaaaggaatcttcacaaatggaaagtgtaaaggaagaaaagcccacagaaataaaattggaagagaccagtgttgaaagacaaatacttcatcagaaggaaacaaatcaggatgtgcaatgtaatcgttttttcccaagtagaaaaacaaagcctgtgaaatgtatactaaatggaataaacagctcagccaagaagaactccaactggactaaaattaaactctcaaaatttaactctgtgcagcacaataagttggactctcaagtttcccctaaattaggcttattacgaaccagtttttcaccaccagctttagaaatgcatcatccagtgactcaaagtacatttttagggacaaagctacatgatagaaatataacttgccagcaggaaaaaatgaaagaaattaattctgaagaagtgaaaattaatgatattacagtagaaattaataaaaccacagaaagggctcctgaaaattgtcatttggccaatgagataaaaccttctgacccaccattggataatcagatgaaacattcttttgattcagcatcaaataagaatttcagccaatgtttggaatccaagctagaaaacagtccagtggaaaatgttactgctgcttcgactctgctcagtcaagcaaaaattgatacaggagagaataaatttccaggttcagctccccaacagcatagtattctcagtaaccagacatctaaaagcagtgataacagggagacaccacgaaatcattctttgcctaagtgtaattcccatttggagataacaattccaaaggacttgaaactaaaagaagcagagaaaactgatgaaaaacagttgattatagatgcaggacaaaaaagatttggagcagtttcttgtaatgtttgtggaatgctgtatacagcttcaaatccagaagatgaaacacagcatctgcttttccacaaccagtttataagtgctgttaaatatgtgggctggaagaaagaaagaattctggctgaataccctgatggcaggataataatggttcttcctgaagacccaaagtatgccctgaaaaaggttgacgagattagagagatggttgacaatgatttaggttttcaacaggctccactaatgtgctattccagaactaaaacacttctcttcatttccaatgacaaaaaagtagttggctgcctaattgcggaacatatccaatggggctacagagttatagaagagaaacttccagttatcaggtcagaagaagaaaaagtcagatttgaaaggcaaaaagcctggtgctgctcaacattaccagagcctgcaatctgcgggatcagtcgaatatgggtattcagcatgatgcgtcggaagaaaattgcttctcgcatgattgaatgcctaaggagtaactttatatatggctcatatttgagcaaagaagaaattgctttctcagatcccactcctgatggaaagctgtttgcaacacagtactgtggcactggtcaatttctggtatataattttattaatggacagaatagcacgtaaaacaaattcttgcctacaccactagaagacatctattgaagagaatggattggttgctgactttaaccaggaactagggccatttttattacaatgaactcaggactggcaacaaccatatggttgttccattttcataaaattggaaacaatgcagtaatagcttattgttttgttttttaaagaagatattttattatcttttacagaaatttatgattgatgtattttatctatagttatttagacatgtttacatgcagcagataattgttcatagtggactgaaaactaatgcaaggactatggtctcagtgataagtatattttgaagttcttaatatggaaatataccagtgtagcttggtactgtatttttttatattgatctgctgataccagtgataggcttaaagattgtattttcacagagtggaaaccaatttttttagttattgttcaaggagggtgcaatattaagtgttttggaatttgaagctaatttttaaaaggcctgaactatactttgaagaaacccctatagaaaaggaaagctccagctaaataggaagaattagaatattgagcttttttttcctgatttttctctttcctatctttgatggaaggaggaagtagaaagtggtaaagaattgaggctttccttcttggagagctgtaaatgacaagcattaggaaaggtaccctcctagattcattattctttcattctggtttcacttttaaaataaatggcaacttggcacacctaggctgttaacaaatctcaaagaggtttataaaaacgtatagaatacttggaagcaaagtatggatgactcggtatctgctttgttattcctcagaaatactgcactgagtatatgccctcattactggacttcattttgatacttgtctatccttcatagtgccctctacttttaaagggtttatatgttgaaaaactgctgtggccttttatgacctgtatataatgtagaataaaaataataaaatacttgatagctttttctaagtgaccaatgtactaactgagaaaaaaaaaaaaatacaaaaag

SEQ ID NO: 443591 - DNA, 5328 bp, Homo sapiens
cctttcctcgacgcccagccgtccgggccggggtgaaaaactgcgtgacacgcagtgagcgtggcggccatcttcgtcttctgggcacgtcagctgagccggttagggctgaagaggagcgttgcgcaagcgcacccaagacggtcacaggtaactcccatctgacgagcgaggcgtcgccgtcgtcgccggaagtttggtgtttgcgccgcgggggaggcggcggccgcagcagaagcagctgagtgtctcctgatacccggatgtgaggcgatccgctggcgctagtctgaccctccgccaggcaaaaggaagattgtctttggctatagagtttttttttttaaagattactaaacatacaggaagtgataagaagtatcattcatcagaagcatcattcatcaatcaacttgaagaaaaaggtgatatattatttctttaaggtgctgtgtgatgtgttaagagcatattagaaggaatggttttgtctaattttcttcatgagttatggtggctgagacatcgagtctatattttggggcaaaaactaaacggcagcacaaaaggaaatctatattaatagaatattttgttgaacaaaggaggttagataagaactgcaaaccaacagactcagcaaacaaggaaagaaacgtgttagccataagacatgtttcaagtgaatcgaagtccaataactgtagacttcagaagaaaaaagttttcaaaaattttatcaaaacaggtcactgataaataactcctccagtaatagagctaggcctgaaaccaaaattaattaaaaaattaacaaaacagattgaacctgaattaaatttcttttgataaaaaaacttattaaaaataatcaaaattttcctcaaatttttattaccttgtccaaagtaaagcaagtgtcttttagcattcatgccagcttttctcatgttctaggaatgacagaaaccttacttgaagcaaactagtatttttgttgaaaatgtatatcagcatcagttaaagttgatttttcagacctgctcctcagtaataatactagctagtcagcattcacgcctaccaggacacaaaaatcctcttcaaaactactcagaaaagaaagtcattactcaggaatgatgtccattcaggagaaatcaaaagagaattcctccaaagttactaaaaaaagtgacgataagaattcagaaacagaaattcaggattctcaaaagaatctagcaaaaaaatcaggtccaaaggagactataaaatcacaggctaaatcttccagtgaaagtaaaataaatcagccagaattggaaacacgcatgagtacaaggtcatcaaaggcagcatctaatgataaagctactaaatccattaataaaaatacggtgactgtgaggggatattcacaagaatctacaaaaaagaaattatctcagaaaaaattagtacatgaaaaccctaaagcaaatgaacagcttaaccggagatcacaaaggctacaacaattaacagaggtttcaagaaggtcgttacgcagtagagaaattcagggtcaagttcaagcagttaaacagagtttgccaccaactaaaaaagagcagtgtagcagtactcagagtaaatctaataaaacaagtcaaaaacatgtgaagagaaaagtactggaagtaaagtctgactctaaagaagatgaaaatctagtaattaatgaagtaataaattctcccaaagggaaaaaacgcaaggtagaacatcagacagcttgtgcttgtagttctcaatgcatgcaaggatctgaaaagtgtcctcagaagactactagaagagacgaaacgaaacctgtgcctgtaacttctgaggtgaaaagatcaaaaatggctacttcagtggtcccgaaaaagaatgagatgaagaagtcggttcatacacaagtgaatactaacacaacactcccaaaaagtccacagccatcagtgcctgaacaaagtgataatgagctggagcaagcaggaaagagcaaacgaggtagtattctccagctctgtgaagaaattgctggtgaaattgagtcagataatgtagaggtaaaaaaggaatcttcacaaatggaaagtgtaaaggaagaaaagcccacagaaataaaattggaagagaccagtgttgaaagacaaatacttcatcagaaggaaacaaatcaggatgtgcaatgtaatcgttttttcccaagtagaaaaacaaagcctgtgaaatgtatactaaatggaataaacagctcagccaagaagaactccaactggactaaaattaaactctcaaaatttaactctgtgcagcacaataagttggactctcaagtttcccctaaattaggcttattacgaaccagtttttcaccaccagctttagaaatgcatcatccagtgactcaaagtacatttttagggacaaagctacatgatagaaatataacttgccagcaggaaaaaatgaaagaaattaattctgaagaagtgaaaattaatgatattacagtagaaattaataaaaccacagaaagggctcctgaaaattgtcatttggccaatgagataaaaccttctgacccaccattggataatcagatgaaacattcttttgattcagcatcaaataagaatttcagccaatgtttggaatccaagctagaaaacagtccagtggaaaatgttactgctgcttcgactctgctcagtcaagcaaaaattgatacaggagagaataaatttccaggttcagctccccaacagcatagtattctcagtaaccagacatctaaaagcagtgataacagggagacaccacgaaatcattctttgcctaagtgtaattcccatttggagataacaattccaaaggacttgaaactaaaagaagcagagaaaactgatgaaaaacagttgattatagatgcaggacaaaaaagatttggagcagtttcttgtaatgtttgtggaatgctgtatacagcttcaaatccagaagatgaaacacagcatctgcttttccacaaccagtttataagtgctgttaaatatgtgggctggaagaaagaaagaattctggctgaataccctgatggcaggataataatggttcttcctgaagacccaaagtatgccctgaaaaaggttgacgagattagagagatggttgacaatgatttaggttttcaacaggctccactaatgtgctattccagaactaaaacacttctcttcatttccaatgacaaaaaagtagttggctgcctaattgcggaacatatccaatggggctacagagttatagaagagaaacttccagttatcaggtcagaagaagaaaaagtcagatttgaaaggcaaaaagcctggtgctgctcaacattaccagagcctgcaatctgcgggatcagtcgaatatgggtattcagcatgatgcgtcggaagaaaattgcttctcgcatgattgaatgcctaaggagtaactttatatatggctcatatttgagcaaagaagaaattgctttctcagatcccactcctgatggaaagctgtttgcaacacagtactgtggcactggtcaatttctggtatataattttattaatggacagaatagcacgtaaaacaaattcttgcctacaccactagaagacatctattgaagagaatggattggttgctgactttaaccaggaactagggccatttttattacaatgaactcaggactggcaacaaccatatggttgttccattttcataaaattggaaacaatgcagtaatagcttattgttttgttttttaaagaagatattttattatcttttacagaaatttatgattgatgtattttatctatagttatttagacatgtttacatgcagcagataattgttcatagtggactgaaaactaatgcaaggactatggtctcagtgataagtatattttgaagttcttaatatggaaatataccagtgtagcttggtactgtatttttttatattgatctgctgataccagtgataggcttaaagattgtattttcacagagtggaaaccaatttttttagttattgttcaaggagggtgcaatattaagtgttttggaatttgaagctaatttttaaaaggcctgaactatactttgaagaaacccctatagaaaaggaaagctccagctaaataggaagaattagaatattgagcttttttttcctgatttttctctttcctatctttgatggaaggaggaagtagaaagtggtaaagaattgaggctttccttcttggagagctgtaaatgacaagcattaggaaaggtaccctcctagattcattattctttcattctggtttcacttttaaaataaatggcaacttggcacacctaggctgttaacaaatctcaaagaggtttataaaaacgtatagaatacttggaagcaaagtatggatgactcggtatctgctttgttattcctcagaaatactgcactgagtatatgccctcattactggacttcattttgatacttgtctatccttcatagtgccctctacttttaaagggtttatatgttgaaaaactgctgtggccttttatgacctgtatataatgtagaataaaaataataaaatacttgatagctttttctaagtgaccaatgtactaactgagaataatggtgtgttgtcatttgtgctttttcagggtgtttttttggtttgatatcttgaaatatgattaaaacattggcttcctaaaggcagtttccaccagtttgccaaaggatcattgtgtcagcagcaaatcagctgaactttatttccaaaggcaaaatcctttctgattattttagtaacatagtacttttatgatgttgcaaataaatgaagggcccacagcccaagaatgaattaccactgtggttcaacttaggttatttttgtgagctgaaatgatcatatctcagttgaaaactggctaaaatttagggccttaaattaacaggtatacattttatttccctataaatttttgcttttacaatttctaggccaggcgcggtggctcacgcctataatcccaggactttggaaggctgaggcgggcggatcacgaggtcaggagttcgagaccagcctgaccaatatggtgaaatcccgtctctactaaaaatacaaaaattagctggttttggtggcatgcacctgtaatcccagctgctcaggaggctaaggcaggacaatagctggaacctgggaggtggagattgcagtgagc

SEQ ID NO: 443592 - DNA, 4737 bp, Homo sapiens
cctttcctcgacgcccagccgtccgggccggggtgaaaaactgcgtgacacgcagtgagcgtggcggccatcttcgtcttctgggcacgtcagctgagccggttagggctgaagaggagcgttgcgcaagcgcacccaagacggtcacaggtaactcccatctgacgagcgaggcgtcgccgtcgtcgccggaagtttggtgtttgcgccgcgggggaggcggcggccgcagcagaagcagctgagtgtctcctgatacccggatgtgaggcgatccgctggcgctagtctgaccctccgccaggcaaaaggaaggtgctgtgtgatgtgttaagagcatattagaaggaatggttttgtctaattttcttcatgagttatggtggctgagacatcgagtctatattttggggcaaaaactaaacggcagcacaaaaggaaatctatattaatagaatattttgttgaacaaaggaggttagataagaactgcaaaccaacagactcagcaaacaaggaaagaaacgtgttagccataagacatgtttcaagtgaatcgaagtccaataactgtagacttcagaagaaaaaagttttcaaaaattttatcaaaacaggtcactgataaataactcctccagtaatagagctaggcctgaaaccaaaattaattaaaaaattaacaaaacagattgaacctgaattaaatttcttttgataaaaaaacttattaaaaataatcaaaattttcctcaaatttttattaccttgtccaaagtaaagcaagtgtcttttagcattcatgccagcttttctcatgttctaggaatgacagaaaccttacttgaagcaaactagtatttttgttgaaaatgtatatcagcatcagttaaagttgatttttcagacctgctcctcagtaataatactagctagtcagcattcacgcctaccaggacacaaaaatcctcttcaaaactactcagaaaagaaagtcattactcaggaatgatgtccattcaggagaaatcaaaagagaattcctccaaagttactaaaaaaagtgacgataagaattcagaaacagaaattcaggattctcaaaagaatctagcaaaaaaatcaggtccaaaggagactataaaatcacaggctaaatcttccagtgaaagtaaaataaatcagccagaattggaaacacgcatgagtacaaggtcatcaaaggcagcatctaatgataaagctactaaatccattaataaaaatacggtgactgtgaggggatattcacaagaatctacaaaaaagaaattatctcagaaaaaattagtacatgaaaaccctaaagcaaatgaacagcttaaccggagatcacaaaggctacaacaattaacagaggtttcaagaaggtcgttacgcagtagagaaattcagggtcaagttcaagcagttaaacagagtttgccaccaactaaaaaagagcagtgtagcagtactcagagtaaatctaataaaacaagtcaaaaacatgtgaagagaaaagtactggaagtaaagtctgactctaaagaagatgaaaatctagtaattaatgaagtaataaattctcccaaagggaaaaaacgcaaggtagaacatcagacagcttgtgcttgtagttctcaatgcatgcaaggatctgaaaagtgtcctcagaagactactagaagagacgaaacgaaacctgtgcctgtaacttctgaggtgaaaagatcaaaaatggctacttcagtggtcccgaaaaagaatgagatgaagaagtcggttcatacacaagtgaatactaacacaacactcccaaaaagtccacagccatcagtgcctgaacaaagtgataatgagctggagcaagcaggaaagagcaaacgaggtagtattctccagctctgtgaagaaattgctggtgaaattgagtcagataatgtagaggtaaaaaaggaatcttcacaaatggaaagtgtaaaggaagaaaagcccacagaaataaaattggaagagaccagtgttgaaagacaaatacttcatcagaaggaaacaaatcaggatgtgcaatgtaatcgttttttcccaagtagaaaaacaaagcctgtgaaatgtatactaaatggaataaacagctcagccaagaagaactccaactggactaaaattaaactctcaaaatttaactctgtgcagcacaataagttggactctcaagtttcccctaaattaggcttattacgaaccagtttttcaccaccagctttagaaatgcatcatccagtgactcaaagtacatttttagggacaaagctacatgatagaaatataacttgccagcaggaaaaaatgaaagaaattaattctgaagaagtgaaaattaatgatattacagtagaaattaataaaaccacagaaagggctcctgaaaattgtcatttggccaatgagataaaaccttctgacccaccattggataatcagatgaaacattcttttgattcagcatcaaataagaatttcagccaatgtttggaatccaagctagaaaacagtccagtggaaaatgttactgctgcttcgactctgctcagtcaagcaaaaattgatacaggagagaataaatttccaggttcagctccccaacagcatagtattctcagtaaccagacatctaaaagcagtgataacagggagacaccacgaaatcattctttgcctaagtgtaattcccatttggagataacaattccaaaggacttgaaactaaaagaagcagagaaaactgatgaaaaacagttgattatagatgcaggacaaaaaagatttggagcagtttcttgtaatgtttgtggaatgctgtatacagcttcaaatccagaagatgaaacacagcatctgcttttccacaaccagtttataagtgctgttaaatatgtggttctgctcattaatcaccacgagtgtggatctgaagaagagtttattacctctctttttttgagtatgtttaacttcagatacacacaacgtagcttctccttccctattagattcttagaagggctggaagaaagaaagaattctggctgaataccctgatggcaggataataatggttcttcctgaagacccaaagtatgccctgaaaaaggttgacgagattagagagatggttgacaatgatttaggttttcaacaggctccactaatgtgctattccagaactaaaacacttctcttcatttccaatgacaaaaaagtagttggctgcctaattgcggaacatatccaatggggctacagagttatagaagagaaacttccagttatcaggtcagaagaagaaaaagtcagatttgaaaggcaaaaagcctggtgctgctcaacattaccagagcctgcaatctgcgggatcagtcgaatatgggtattcagcatgatgcgtcggaagaaaattgcttctcgcatgattgaatgcctaaggagtaactttatatatggctcatatttgagcaaagaagaaattgctttctcagatcccactcctgatggaaagctgtttgcaacacagtactgtggcactggtcaatttctggtatataattttattaatggacagaatagcacgtaaaacaaattcttgcctacaccactagaagacatctattgaagagaatggattggttgctgactttaaccaggaactagggccatttttattacaatgaactcaggactggcaacaaccatatggttgttccattttcataaaattggaaacaatgcagtaatagcttattgttttgttttttaaagaagatattttattatcttttacagaaatttatgattgatgtattttatctatagttatttagacatgtttacatgcagcagataattgttcatagtggactgaaaactaatgcaaggactatggtctcagtgataagtatattttgaagttcttaatatggaaatataccagtgtagcttggtactgtatttttttatattgatctgctgataccagtgataggcttaaagattgtattttcacagagtggaaaccaatttttttagttattgttcaaggagggtgcaatattaagtgttttggaatttgaagctaatttttaaaaggcctgaactatactttgaagaaacccctatagaaaaggaaagctccagctaaataggaagaattagaatattgagcttttttttcctgatttttctctttcctatctttgatggaaggaggaagtagaaagtggtaaagaattgaggctttccttcttggagagctgtaaatgacaagcattaggaaaggtaccctcctagattcattattctttcattctggtttcacttttaaaataaatggcaacttggcacacctaggctgttaacaaatctcaaagaggtttataaaaacgtatagaatacttggaagcaaagtatggatgactcggtatctgctttgttattcctcagaaatactgcactgagtatatgccctcattactggacttcattttgatacttgtctatccttcatagtgccctctacttttaaagggtttatatgttgaaaaactgctgtggccttttatgacctgtatataatgtagaataaaaataataaaatacttgatagctttttctaagtgaccaatgtactaactgagaaaaaaaaaaaaatacaaaaag

SEQ ID NO: 443593 - DNA, 1908 bp, Homo sapiens
gccgcgcgcggcatgcagaagcttcactgagcgggcactggaggtcgcgagcacgttgctagtgggcgcggctggcggggccgggggcggcagggggctagcgtccggctgagcccggcgggttcctgcacgcggacccacgctttgtcgggctgctctgctgagtgacaccgccgtggcatccgaggagctgtggtccagcctgcgcggcgggaagcggcggcggcggctccagcgtcctaagagaagctgaaacctatcaacactcttcaaaatgcaatggaatgtaccacggactgtatctcgactggcacgcaggacatgcttggaaccacataatgctggtctctttggacactgtcaaaatgtaaagggacctttacttttatacaatgctgaatccaaagtggttttggtacaaggccctcaaaaacaatggttgcatttatctgctgcccagtgtgttgcaaaggaaaggaggccattggatgctcatccaccccaaccaggagtccttcgccataagcaagggaagcaacatgtttcattcaggagggttttttcatccagtgccacagctcagggaactccggaaaaaaaggaagagcctgatcctttgcaagacaaatctattagtctttatcaacgattcaagaagacatttagacagtatggaaaagttctgattccagtgcatctaataacttctggtgttggtttggaacattttattatgcagccttgaaaggagtgaatgtcgttccttttctagaactcattgggttacctgacagtgtggtaagcatcctgaaaaactcccagagtggaaatgccctcacagcatatgccttgtttaagattgcaacacctgctcggtataccgtgactttgggaggaacatctgtcactgtgaagtatctgcgcagtcatggctacatgtccacgccgccacccgtcaaggagtatctgcaggacaggatggaagagacaaaggagcttatcacagagaaaatggaagaaacaaaagatagactcactgaaaagttacaagaaaccaaagaaaaagtttcctttaagaaaaaagtggaataaggtgccttatatagcagtatagaaaattcctgcactttaaccctttggaaactatgggcaaagatacatgtgtctgattatttttttggttagttgccgaaatatactagttctctgagggttaaagaagtaaaatacctttttaaagttaaatatcactagaaaaatcagtgttattacaagggaagaaatgaacccagtttaagaatttgccatcagtagcagtattaagcagtggttaatgtcttagaagtcagacttctttttcaaggtcttcagaaccacacttgatttctgttttgttgcagctgtaattgacacacactaggcagctgactccttgaatatccagtgtgacccataaaatagtctgttaataccggatcttaatttttatgttattcattaagattttaactatattcagtacgtaatttggagacaaactagcatcatcaaaactgcctgtaaataaggtgtttagtctttctataaaaacagaatagagcagttacctaccagttaaaatatcttatatgaagaaaatagaataaagatccagtcatatatgtaaataagatgtactgattgtacgtaaatgaaaaatggaccctttaaaaattatttttacctgaagcttgtcataatttttttaaagcaaatatatatatggtgatggtacttttcaaagtgtgtattagtggtgatcacctcaaacataaacctctgttgtgaatcatttgtgtccttttcaactgtctttcagaggaaaggtaaaaaatcattaaacctgaaattcattgttaaaatcaaata

SEQ ID NO: 443594 - DNA, 2048 bp, Homo sapiens
gccgcgcgcggcatgcagaagcttcactgagcgggcactggaggtcgcgagcacgttgctagtgggcgcggctggcggggccgggggcggcagggggctagcgtccggctgagcccggcgggttcctgcacgcggacccacgctttgtcgggctgctctgctgagtgacaccgccgtggcatccgaggagctgtggtccagcctgcgcggcgggaagcggcggcggcggctccagcgtcctaagagaagaaagaatttgactgatgggcgtaaggaagaaaaagagaccgaggcaagtttcagagaagtagtggaagatttttcaaaaaagctgtagaacaagaaagaaagtatgcttgggaaagacccaagcgggcatgtgaaggaagctgaaacctatcaacactcttcaaaatgcaatggaatgtaccacggactgtatctcgactggcacgcaggacatgcttggaaccacataatgctggtctctttggacactgtcaaaatgtaaagggacctttacttttatacaatgctgaatccaaagtggttttggtacaaggccctcaaaaacaatggttgcatttatctgctgcccagtgtgttgcaaaggaaaggaggccattggatgctcatccaccccaaccaggagtccttcgccataagcaagggaagcaacatgtttcattcaggagggttttttcatccagtgccacagctcagggaactccggaaaaaaaggaagagcctgatcctttgcaagacaaatctattagtctttatcaacgattcaagaagacatttagacagtatggaaaagttctgattccagtgcatctaataacttctggtgttggtttggaacattttattatgcagccttgaaaggagtgaatgtcgttccttttctagaactcattgggttacctgacagtgtggtaagcatcctgaaaaactcccagagtggaaatgccctcacagcatatgccttgtttaagattgcaacacctgctcggtataccgtgactttgggaggaacatctgtcactgtgaagtatctgcgcagtcatggctacatgtccacgccgccacccgtcaaggagtatctgcaggacaggatggaagagacaaaggagcttatcacagagaaaatggaagaaacaaaagatagactcactgaaaagttacaagaaaccaaagaaaaagtttcctttaagaaaaaagtggaataaggtgccttatatagcagtatagaaaattcctgcactttaaccctttggaaactatgggcaaagatacatgtgtctgattatttttttggttagttgccgaaatatactagttctctgagggttaaagaagtaaaatacctttttaaagttaaatatcactagaaaaatcagtgttattacaagggaagaaatgaacccagtttaagaatttgccatcagtagcagtattaagcagtggttaatgtcttagaagtcagacttctttttcaaggtcttcagaaccacacttgatttctgttttgttgcagctgtaattgacacacactaggcagctgactccttgaatatccagtgtgacccataaaatagtctgttaataccggatcttaatttttatgttattcattaagattttaactatattcagtacgtaatttggagacaaactagcatcatcaaaactgcctgtaaataaggtgtttagtctttctataaaaacagaatagagcagttacctaccagttaaaatatcttatatgaagaaaatagaataaagatccagtcatatatgtaaataagatgtactgattgtacgtaaatgaaaaatggaccctttaaaaattatttttacctgaagcttgtcataatttttttaaagcaaatatatatatggtgatggtacttttcaaagtgtgtattagtggtgatcacctcaaacataaacctctgttgtgaatcatttgtgtccttttcaactgtctttcagaggaaaggtaaaaaatcattaaacctgaaattcattgttaaaatcaaata

SEQ ID NO: 443595 - DNA, 1869 bp, Homo sapiens
gccgcgcgcggcatgcagaagcttcactgagcgggcactggaggtcgcgagcacgttgctagtgggcgcggctggcggggccgggggcggcagggggctagcgtccggctgagcccggcgggttcctgcacgcggacccacgctttgtcgggctgctctgctgagtgacaccgccgtggcatccgaggagctgtggtccagcctgcgcggcgggaagcggcggcggcggctccagcgtcctaagagaagctgaaacctatcaacactcttcaaaatgcaatggaatgtaccacggactgtatctcgactggcacgcaggacatgcttggaaccacataatgctggtctctttggacactgtcaaaatgtaaagggacctttacttttatacaatgctgaatccaaagtggttttggtacaaggccctcaaaaacaatggttgcatttatctgctgcccagtgtgttgcaaaggaaaggaggccattggatgctcatccaccccaaccaggagtccttcgccataagcaagggaagcaacatgtttcattcaggagggttttttcatccagtgccacagctcagggaactccggaaaaaaaggaagagcctgatcctttgcaagacaaatctattagtctttatcaacgattcaagaagacatttagacagtatggaaaagttctgattccagtgcatctaataacttctggtgttggtttggaacattttattatgcagccttgaaaggagtgaatgtcgttccttttctagaactcattgggttacctgacagtgtggtaagcatcctgaaaaactcccagagtggaaatgccctcacagcatatgccttgtttaagattgcaacacctgctcggtataccgtgactttgggaggaacatctgtcactgtgaagtatctgcgcagtcatggctacatgtccacgccgccacccgtcaaggagtatctgcaggacaggatggaagagacaaaggagcttatcacagagaaaatggaagaaacaaaagatagactcactgaaaagttacaagaaaccaaagaaaaagtttcctttaagaaaaaagtggaataaggtgccttatatagcagtatagaaaattcctgcactttaaccctttggaaactatgggcaaagatacatgtgtctgattatttttttggttagttgccgaaatatactagttctctgagggttaaagaagtaaaatacctttttaaagttaaatatcactagaaaaatcagtgttattacaagggaagaaatgaacccagtttaagaatttgccatcagtagcagtattaagcagtggttaatgtcttagaagtcagacttctttttcaaggtcttcagaaccacacttgatttctgttttgttgcagctgtaattgacacataaaatagtctgttaataccggatcttaatttttatgttattcattaagattttaactatattcagtacgtaatttggagacaaactagcatcatcaaaactgcctgtaaataaggtgtttagtctttctataaaaacagaatagagcagttacctaccagttaaaatatcttatatgaagaaaatagaataaagatccagtcatatatgtaaataagatgtactgattgtacgtaaatgaaaaatggaccctttaaaaattatttttacctgaagcttgtcataatttttttaaagcaaatatatatatggtgatggtacttttcaaagtgtgtattagtggtgatcacctcaaacataaacctctgttgtgaatcatttgtgtccttttcaactgtctttcagaggaaaggtaaaaaatcattaaacctgaaattcattgttaaaatcaaata

SEQ ID NO: 443596 - DNA, 743 bp, Homo sapiens
ggtccggaattatagggtagtcttctagtactaaattcgcggccgcgtcgacgttattcctcagaaatactgcactgagtatatgccctcattactggacttcattttgatacttgtctatccttcatagtgccctctacttttaaagggtttatatgttgaaaaactgctgtggccttttatgacctgtatataatgtagaataaaaataataaaatacttgatagctttttctaagtgaccaatgtactaactgagaataatggtgtgttgtcatttgtgctttttcagggtgtttttttggtttgatatcttgaaatatgattaaaacattggcttcctaaaggcagtttccaccagtttgccaaaggatcattgtgtcagcagcaaatcagctgaactttatttccaaaggcaaaatcctttctgattattttagtaacatagtacttttatgatgttgcaaataaatgaagggcccacagcccaagaatgaattaccactgtggttcaacttaggttatttttgtgagctgaaatgatcatatctcagttgaaaactggctaaaatttagggccttaaattaacaggtatacattttatttccctataaatttttgcttttacaatttctagccactgcacctggccctagcttttgatactgtcatttccctttgggcttgagactgttctagtcaatcctggtctcattgtttgcctgacaggtaccatgatttaa

SEQ ID NO: 443597 - DNA, 654 bp, Homo sapiens
agtaaccagacatctaaaagcagtgataacaggtaagctattaattaaattttagagcttaaggattttaacttacaagttttgagtttaggggattcttccctaaaaagttatgctagtaaccctcagtttacctacagattctcttttcattacagctttttctatgcctatacatactgtttactatggacattttttctaccctactacctcattctttatttctttatttatttattttttagagttgaggtcttgctcacttacccaggctggagtgcagtggcacaatcactgcagccttgaactcctgggctcaagtgatccttctgcctcagcctcccatgtagctaggactatagtgtggcaccatacctggataattaaaaaaaattctttttttagagagaaggtcttgctatgctgctcaggctggtctcgaactcctggcctcaagtgattctcccacctcggcctctcaaatctctgggattataggtgtgagccacagtatctggcagctaccttattcttctaaattctgcattaaatttcattgtgtgactttaccgtggtttaacagttctatgctttatgaacattttggatatttctggttcatttctatccagaaaagacaaatcctatgtt

SEQ ID NO: 443598 - DNA, 5207 bp, Homo sapiens
cctttcctcgacgcccagccgtccgggccggggtgaaaaactgcgtgacacgcagtgagcgtggcggccatcttcgtcttctgggcacgtcagctgagccggttagggctgaagaggagcgttgcgcaagcgcacccaagacggtcacaggtaactcccatctgacgagcgaggcgtcgccgtcgtcgccggaagtttggtgtttgcgccgcgggggaggcggcggccgcagcagaagcagctgagtgtctcctgatacccggatgtgaggcgatccgctggcgctagtctgaccctccgccaggcaaaaggaagattgtctttggctatagagtttttttttttaaagattactaaacatacaggaagtgataagaagtatcattcatcagaagcatcattcatcaatcaacttgaagaaaaaggtgatatattatttctttaaggtgctgtgtgatgtgttaagagcatattagaaggaatggttttgtctaattttcttcatgagttatggtggctgagacatcgagtctatattttggggcaaaaactaaacggcagcacaaaaggaaatctatattaatagaatattttgttgaacaaaggaggttagataagaactgcaaaccaacagactcagcaaacaaggaaagaaacgtgttagccataagacatgtttcaagtgaatcgaagtccaataactgtagacttcagaagaaaaaagttttcaaaaattttatcaaaacaggtcactgataaataactcctccagtaatagagctaggcctgaaaccaaaattaattaaaaaattaacaaaacagattgaacctgaattaaatttcttttgataaaaaaacttattaaaaataatcaaaattttcctcaaatttttattaccttgtccaaagtaaagcaagtgtcttttagcattcatgccagcttttctcatgttctaggaatgacagaaaccttacttgaagcaaactagtatttttgttgaaaatgtatatcagcatcagttaaagttgatttttcagacctgctcctcagtaataatactagctagtcagcattcacgcctaccaggacacaaaaatcctcttcaaaactactcagaaaagaaagtcattactcaggaatgatgtccattcaggagaaatcaaaagagaattcctccaaagttactaaaaaaagtgacgataagaattcagaaacagaaattcaggattctcaaaagaatctagcaaaaaaatcaggtccaaaggagactataaaatcacaggctaaatcttccagtgaaagtaaaataaatcagccagaattggaaacacgcatgagtacaaggtcatcaaaggcagcatctaatgataaagctactaaatccattaataaaaatacggtgactgtgaggggatattcacaagaatctacaaaaaagaaattatctcagaaaaaattagtacatgaaaaccctaaagcaaatgaacagcttaaccggagatcacaaaggctacaacaattaacagaggtttcaagaaggtcgttacgcagtagagaaattcagggtcaagttcaagcagttaaacagagtttgccaccaactaaaaaagagcagtgtagcagtactcagagtaaatctaataaaacaagtcaaaaacatgtgaagagaaaagtactggaagtaaagtctgactctaaagaagatgaaaatctagtaattaatgaagtaataaattctcccaaagggaaaaaacgcaaggtagaacatcagacagcttgtgcttgtagttctcaatgcatgcaaggatctgaaaagtgtcctcagaagactactagaagagacgaaacgaaacctgtgcctgtaacttctgaggtgaaaagatcaaaaatggctacttcagtggtcccgaaaaagaatgagatgaagaagtcggttcatacacaagtgaatactaacacaacactcccaaaaagtccacagccatcagtgcctgaacaaagtgataatgagctggagcaagcaggaaagagcaaacgaggtagtattctccagctctgtgaagaaattgctggtgaaattgagtcagataatgtagaggtaaaaaaggaatcttcacaaatggaaagtgtaaaggaagaaaagcccacagaaataaaattggaagagaccagtgttgaaagacaaatacttcatcagaaggaaacaaatcaggatgtgcaatgtaatcgttttttcccaagtagaaaaacaaagcctgtgaaatgtatactaaatggaataaacagctcagccaagaagaactccaactggactaaaattaaactctcaaaatttaactctgtgcagcacaataagttggactctcaagtttcccctaaattaggcttattacgaaccagtttttcaccaccagctttagaaatgcatcatccagtgactcaaagtacatttttagggacaaagctacatgatagaaatataacttgccagcaggaaaaaatgaaagaaattaattctgaagaagtgaaaattaatgatattacagtagaaattaataaaaccacagaaagggctcctgaaaattgtcatttggccaatgagataaaaccttctgacccaccattggataatcagatgaaacattcttttgattcagcatcaaataagaatttcagccaatgtttggaatccaagctagaaaacagtccagtggaaaatgttactgctgcttcgactctgctcagtcaagcaaaaattgatacaggagagaataaatttccaggttcagctccccaacagcatagtattctcagtaaccagacatctaaaagcagtgataacagggagacaccacgaaatcattctttgcctaagtgtaattcccatttggagataacaattccaaaggacttgaaactaaaagaagcagagaaaactgatgaaaaacagttgattatagatgcaggacaaaaaagatttggagcagtttcttgtaatgtttgtggaatgctgtatacagcttcaaatccagaagatgaaacacagcatctgcttttccacaaccagtttataagtgctgttaaatatgtgggctggaagaaagaaagaattctggctgaataccctgatggcaggataataatggttcttcctgaagacccaaagtatgccctgaaaaaggttgacgagattagagagatggttgacaatgatttaggttttcaacaggctccactaatgtgctattccagaactaaaacacttctcttcatttccaatgacaaaaaagtagttggctgcctaattgcggaacatatccaatggggctacagagttatagaagagaaacttccagttatcaggtcagaagaagaaaaagtcagatttgaaaggcaaaaagcctggtgctgctcaacattaccagagcctgcaatctgcgggatcagtcgaatatgggtattcagcatgatgcgtcggaagaaaattgcttctcgcatgattgaatgcctaaggagtaactttatatatggctcatatttgagcaaagaagaaattgctttctcagatcccactcctgatggaaagctgtttgcaacacagtactgtggcactggtcaatttctggtatataattttattaatggacagaatagcacgtaaaacaaattcttgcctacaccactagaagacatctattgaagagaatggattggttgctgactttaaccaggaactagggccatttttattacaatgaactcaggactggcaacaaccatatggttgttccattttcataaaattggaaacaatgcagtaatagcttattgttttgttttttaaagaagatattttattatcttttacagaaatttatgattgatgtattttatctatagttatttagacatgtttacatgcagcagataattgttcatagtggactgaaaactaatgcaaggactatggtctcagtgataagtatattttgaagttcttaatatggaaatataccagtgtagcttggtactgtatttttttatattgatctgctgataccagtgataggcttaaagattgtattttcacagagtggaaaccaatttttttagttattgttcaaggagggtgcaatattaagtgttttggaatttgaagctaatttttaaaaggcctgaactatactttgaagaaacccctatagaaaaggaaagctccagctaaataggaagaattagaatattgagcttttttttcctgatttttctctttcctatctttgatggaaggaggaagtagaaagtggtaaagaattgaggctttccttcttggagagctgtaaatgacaagcattaggaaaggtaccctcctagattcattattctttcattctggtttcacttttaaaataaatggcaacttggcacacctaggctgttaacaaatctcaaagaggtttataaaaacgtatagaatacttggaagcaaagtatggatgactcggtatctgctttgttattcctcagaaatactgcactgagtatatgccctcattactggacttcattttgatacttgtctatccttcatagtgccctctacttttaaagggtttatatgttgaaaaactgctgtggccttttatgacctgtatataatgtagaataaaaataataaaatacttgatagctttttctaagtgaccaatgtactaactgagaataatggtgtgttgtcatttgtgctttttcagggtgtttttttggtttgatatcttgaaatatgattaaaacattggcttcctaaaggcagtttccaccagtttgccaaaggatcattgtgtcagcagcaaatcagctgaactttatttccaaaggcaaaatcctttctgattattttagtaacatagtacttttatgatgttgcaaataaatgaagggcccacagcccaagaatgaattaccactgtggttcaacttaggttatttttgtgagctgaaatgatcatatctcagttgaaaactggctaaaatttagggccttaaattaacaggtatacattttatttccctataaatttttgcttttacaatttctagccactgcacctggccctagcttttgatactgtcatttccctttgggcttgagactgttctagtcaatcctggtctcattgtttgcctgacaggtaccatgatttaa

SEQ ID NO: 443599 - DNA, 4868 bp, Homo sapiens
cctttcctcgacgcccagccgtccgggccggggtgaaaaactgcgtgacacgcagtgagcgtggcggccatcttcgtcttctgggcacgtcagctgagccggttagggctgaagaggagcgttgcgcaagcgcacccaagacggtcacaggtaactcccatctgacgagcgaggcgtcgccgtcgtcgccggaagtttggtgtttgcgccgcgggggaggcggcggccgcagcagaagcagctgagtgtctcctgatacccggatgtgaggcgatccgctggcgctagtctgaccctccgccaggcaaaaggaagattgtctttggctatagagtttttttttttaaagattactaaacatacaggaagtgataagaagtatcattcatcagaagcatcattcatcaatcaacttgaagaaaaaggtgatatattatttctttaaggtgctgtgtgatgtgttaagagcatattagaaggaatggttttgtctaattttcttcatgagttatggtggctgagacatcgagtctatattttggggcaaaaactaaacggcagcacaaaaggaaatctatattaatagaatattttgttgaacaaaggaggttagataagaactgcaaaccaacagactcagcaaacaaggaaagaaacgtgttagccataagacatgtttcaagtgaatcgaagtccaataactgtagacttcagaagaaaaaagttttcaaaaattttatcaaaacaggtcactgataaataactcctccagtaatagagctaggcctgaaaccaaaattaattaaaaaattaacaaaacagattgaacctgaattaaatttcttttgataaaaaaacttattaaaaataatcaaaattttcctcaaatttttattaccttgtccaaagtaaagcaagtgtcttttagcattcatgccagcttttctcatgttctaggaatgacagaaaccttacttgaagcaaactagtatttttgttgaaaatgtatatcagcatcagttaaagttgatttttcagacctgctcctcagtaataatactagctagtcagcattcacgcctaccaggacacaaaaatcctcttcaaaactactcagaaaagaaagtcattactcaggaatgatgtccattcaggagaaatcaaaagagaattcctccaaagttactaaaaaaagtgacgataagaattcagaaacagaaattcaggattctcaaaagaatctagcaaaaaaatcaggtccaaaggagactataaaatcacaggctaaatcttccagtgaaagtaaaataaatcagccagaattggaaacacgcatgagtacaaggtcatcaaaggcagcatctaatgataaagctactaaatccattaataaaaatacggtgactgtgaggggatattcacaagaatctacaaaaaagaaattatctcagaaaaaattagtacatgaaaaccctaaagcaaatgaacagcttaaccggagatcacaaaggctacaacaattaacagaggtttcaagaaggtcgttacgcagtagagaaattcagggtcaagttcaagcagttaaacagagtttgccaccaactaaaaaagagcagtgtagcagtactcagagtaaatctaataaaacaagtcaaaaacatgtgaagagaaaagtactggaagtaaagtctgactctaaagaagatgaaaatctagtaattaatgaagtaataaattctcccaaagggaaaaaacgcaaggtagaacatcagacagcttgtgcttgtagttctcaatgcatgcaaggatctgaaaagtgtcctcagaagactactagaagagacgaaacgaaacctgtgcctgtaacttctgaggtgaaaagatcaaaaatggctacttcagtggtcccgaaaaagaatgagatgaagaagtcggttcatacacaagtgaatactaacacaacactcccaaaaagtccacagccatcagtgcctgaacaaagtgataatgagctggagcaagcaggaaagagcaaacgaggtagtattctccagctctgtgaagaaattgctggtgaaattgagtcagataatgtagaggtaaaaaaggaatcttcacaaatggaaagtgtaaaggaagaaaagcccacagaaataaaattggaagagaccagtgttgaaagacaaatacttcatcagaaggaaacaaatcaggatgtgcaatgtaatcgttttttcccaagtagaaaaacaaagcctgtgaaatgtatactaaatggaataaacagctcagccaagaagaactccaactggactaaaattaaactctcaaaatttaactctgtgcagcacaataagttggactctcaagtttcccctaaattaggcttattacgaaccagtttttcaccaccagctttagaaatgcatcatccagtgactcaaagtacatttttagggacaaagctacatgatagaaatataacttgccagcaggaaaaaatgaaagaaattaattctgaagaagtgaaaattaatgatattacagtagaaattaataaaaccacagaaagggctcctgaaaattgtcatttggccaatgagataaaaccttctgacccaccattggataatcagatgaaacattcttttgattcagcatcaaataagaatttcagccaatgtttggaatccaagctagaaaacagtccagtggaaaatgttactgctgcttcgactctgctcagtcaagcaaaaattgatacaggagagaataaatttccaggttcagctccccaacagcatagtattctcagtaaccagacatctaaaagcagtgataacagggagacaccacgaaatcattctttgcctaagtgtaattcccatttggagataacaattccaaaggacttgaaactaaaagaagcagagaaaactgatgaaaaacagttgattatagatgcaggacaaaaaagatttggagcagtttcttgtaatgtttgtggaatgctgtatacagcttcaaatccagaagatgaaacacagcatctgcttttccacaaccagtttataagtgctgttaaatatgtggttctgctcattaatcaccacgagtgtggatctgaagaagagtttattacctctctttttttgagtatgtttaacttcagatacacacaacgtagcttctccttccctattagattcttagaagggctggaagaaagaaagaattctggctgaataccctgatggcaggataataatggttcttcctgaagacccaaagtatgccctgaaaaaggttgacgagattagagagatggttgacaatgatttaggttttcaacaggctccactaatgtgctattccagaactaaaacacttctcttcatttccaatgacaaaaaagtagttggctgcctaattgcggaacatatccaatggggctacagagttatagaagagaaacttccagttatcaggtcagaagaagaaaaagtcagatttgaaaggcaaaaagcctggtgctgctcaacattaccagagcctgcaatctgcgggatcagtcgaatatgggtattcagcatgatgcgtcggaagaaaattgcttctcgcatgattgaatgcctaaggagtaactttatatatggctcatatttgagcaaagaagaaattgctttctcagatcccactcctgatggaaagctgtttgcaacacagtactgtggcactggtcaatttctggtatataattttattaatggacagaatagcacgtaaaacaaattcttgcctacaccactagaagacatctattgaagagaatggattggttgctgactttaaccaggaactagggccatttttattacaatgaactcaggactggcaacaaccatatggttgttccattttcataaaattggaaacaatgcagtaatagcttattgttttgttttttaaagaagatattttattatcttttacagaaatttatgattgatgtattttatctatagttatttagacatgtttacatgcagcagataattgttcatagtggactgaaaactaatgcaaggactatggtctcagtgataagtatattttgaagttcttaatatggaaatataccagtgtagcttggtactgtatttttttatattgatctgctgataccagtgataggcttaaagattgtattttcacagagtggaaaccaatttttttagttattgttcaaggagggtgcaatattaagtgttttggaatttgaagctaatttttaaaaggcctgaactatactttgaagaaacccctatagaaaaggaaagctccagctaaataggaagaattagaatattgagcttttttttcctgatttttctctttcctatctttgatggaaggaggaagtagaaagtggtaaagaattgaggctttccttcttggagagctgtaaatgacaagcattaggaaaggtaccctcctagattcattattctttcattctggtttcacttttaaaataaatggcaacttggcacacctaggctgttaacaaatctcaaagaggtttataaaaacgtatagaatacttggaagcaaagtatggatgactcggtatctgctttgttattcctcagaaatactgcactgagtatatgccctcattactggacttcattttgatacttgtctatccttcatagtgccctctacttttaaagggtttatatgttgaaaaactgctgtggccttttatgacctgtatataatgtagaataaaaataataaaatacttgatagctttttctaagtgaccaatgtactaactgagaaaaaaaaaaaaatacaaaaag

SEQ ID NO: 443600 - DNA, 1977 bp, Homo sapiens
cctttcctcgacgcccagccgtccgggccggggtgaaaaactgcgtgacacgcagtgagcgtggcggccatcttcgtcttctgggcacgtcagctgagccggttagggctgaagaggagcgttgcgcaagcgcacccaagacggtcacaggtaactcccatctgacgagcgaggcgtcgccgtcgtcgccggaagtttggtgtttgcgccgcgggggaggcggcggccgcagcagaagcagctgagtgtctcctgatacccggatgtgaggcgatccgctggcgctagtctgaccctccgccaggcaaaaggaagaagctgaaacctatcaacactcttcaaaatgcaatggaatgtaccacggactgtatctcgactggcacgcaggacatgcttggaaccacataatgctggtctctttggacactgtcaaaatgtaaagggacctttacttttatacaatgctgaatccaaagtggttttggtacaaggccctcaaaaacaatggttgcatttatctgctgcccagtgtgttgcaaaggaaaggaggccattggatgctcatccaccccaaccaggagtccttcgccataagcaagggaagcaacatgtttcattcaggagggttttttcatccagtgccacagctcagggaactccggaaaaaaaggaagagcctgatcctttgcaagacaaatctattagtctttatcaacgattcaagaagacatttagacagtatggaaaagttctgattccagtgcatctaataacttctggtgttggtttggaacattttattatgcagccttgaaaggagtgaatgtcgttccttttctagaactcattgggttacctgacagtgtggtaagcatcctgaaaaactcccagagtggaaatgccctcacagcatatgccttgtttaagattgcaacacctgctcggtataccgtgactttgggaggaacatctgtcactgtgaagtatctgcgcagtcatggctacatgtccacgccgccacccgtcaaggagtatctgcaggacaggatggaagagacaaaggagcttatcacagagaaaatggaagaaacaaaagatagactcactgaaaagttacaagaaaccaaagaaaaagtttcctttaagaaaaaagtggaataaggtgccttatatagcagtatagaaaattcctgcactttaaccctttggaaactatgggcaaagatacatgtgtctgattatttttttggttagttgccgaaatatactagttctctgagggttaaagaagtaaaatacctttttaaagttaaatatcactagaaaaatcagtgttattacaagggaagaaatgaacccagtttaagaatttgccatcagtagcagtattaagcagtggttaatgtcttagaagtcagacttctttttcaaggtcttcagaaccacacttgatttctgttttgttgcagctgtaattgacacacactaggcagctgactccttgaatatccagtgtgacccataaaatagtctgttaataccggatcttaatttttatgttattcattaagattttaactatattcagtacgtaatttggagacaaactagcatcatcaaaactgcctgtaaataaggtgtttagtctttctataaaaacagaatagagcagttacctaccagttaaaatatcttatatgaagaaaatagaataaagatccagtcatatatgtaaataagatgtactgattgtacgtaaatgaaaaatggaccctttaaaaattatttttacctgaagcttgtcataatttttttaaagcaaatatatatatggtgatggtacttttcaaagtgtgtattagtggtgatcacctcaaacataaacctctgttgtgaatcatttgtgtccttttcaactgtctttcagaggaaaggtaaaaaatcattaaacctgaaattcattgttaaaatcaaata

SEQ ID NO: 443601 - DNA, 1796 bp, Homo sapiens
gccgcgcgcggcatgcagaagcttcactgagcgggcactggaggtcgcgagcacgttgctagtgggcgcggctggcggggccgggggcggcagggggctagcgtccggctgagcccggcgggttcctgcacgcggacccacgctttgtcgggctgctctgctgagtgacaccgccgtggcatccgaggagctgtggtccagcctgcgcggcgggaagcggcggcggcggctccagcgtcctaagagaagctgaaacctatcaacactcttcaaaatgcaatggaatgtaccacggactgtatctcgactggcacgcaggacatgcttggaaccacataatgctggtctctttggacactgtcaaaatgtaaagggacctttacttttatacaatgctgaatccaaagtggttttggtacaaggccctcaaaaacaatggttgcatttatctgctgcccagtgtgttgcaaaggaaaggaggccattggatgctcatccaccccaaccaggagtccttcgccataagcaagggaagcaacatgtttcattcaggagggttttttcatccagtgccacagctcagggaactccggaaaaaaaggaagagcctgatcctttgcaagacaaatctattagtctttatcaacgattcaagaagacatttagacagtatggaaaagttctgattccagtgcatctaataacttctggtgttggtttggaacattttattatgcagccttgaaattgcaacacctgctcggtataccgtgactttgggaggaacatctgtcactgtgaagtatctgcgcagtcatggctacatgtccacgccgccacccgtcaaggagtatctgcaggacaggatggaagagacaaaggagcttatcacagagaaaatggaagaaacaaaagatagactcactgaaaagttacaagaaaccaaagaaaaagtttcctttaagaaaaaagtggaataaggtgccttatatagcagtatagaaaattcctgcactttaaccctttggaaactatgggcaaagatacatgtgtctgattatttttttggttagttgccgaaatatactagttctctgagggttaaagaagtaaaatacctttttaaagttaaatatcactagaaaaatcagtgttattacaagggaagaaatgaacccagtttaagaatttgccatcagtagcagtattaagcagtggttaatgtcttagaagtcagacttctttttcaaggtcttcagaaccacacttgatttctgttttgttgcagctgtaattgacacacactaggcagctgactccttgaatatccagtgtgacccataaaatagtctgttaataccggatcttaatttttatgttattcattaagattttaactatattcagtacgtaatttggagacaaactagcatcatcaaaactgcctgtaaataaggtgtttagtctttctataaaaacagaatagagcagttacctaccagttaaaatatcttatatgaagaaaatagaataaagatccagtcatatatgtaaataagatgtactgattgtacgtaaatgaaaaatggaccctttaaaaattatttttacctgaagcttgtcataatttttttaaagcaaatatatatatggtgatggtacttttcaaagtgtgtattagtggtgatcacctcaaacataaacctctgttgtgaatcatttgtgtccttttcaactgtctttcagaggaaaggtaaaaaatcattaaacctgaaattcattgttaaaatcaaata

SEQ ID NO: 443602 - DNA, 794 bp, Homo sapiens
cagacgccgtcgcaagcttgatactacgcctgatgaaaggaaggaggtgttaagggacaccttgccatggctctgtaacttgcatgacattttactaagagatgtagcctcgggacagcgtgtggttctagcctgttcagccctgaagaaaacgtacagagacatattaacacaaggaaaagatggtgtagctctgaagtgtgaggagtcgggaaaggaagcaaagcaggctgagatgcagctcctggtggtccatctgagcgggtcgtttgaggtcatctctggacgcttactcaaaagagagggacattttatgccccctgaattattgcagtcccagtttgagactctggagcccccagcagctccagaaaactttatccaaataagtgtggacaaaaatgtttcagagataattgctacaattatggaaaccctaaaaatgaaatgacaatgattttgtatcagtggtccaaacagaactaagcataaatcattgtgccatcccaaacctcgttccagccgccttgcccatactagattctaaatgtttctaaaggcaaaccccaatgtgtcaagacagacttgtttaggtgtaattttaggaattatgctggttcatcaggaagcagagggggagttttaaaagtcaagcttaaattgaagtttaaattcatctataaccaaatcaaatgatcagaggaaattctgtaatcaatgctggaaatcgttacattgtttagaacattcttgctcatgcctgtatttgcacaaataaatgaaacttcgctgtc

SEQ ID NO: 443603 - DNA, 750 bp, Homo sapiens
  misc_feature (37)..(37): n is a, c, g, or t
aaagaacctccgcctatcgtgagtcgtactgaaactngcatggcattttactaagagatgtagcctcgggacagcgtgtggttctagcctgttcagccctgaagaaaacgtacagagacatattaacacaaggaaaagatggtgtagctctgaagtgtgaggagtcgggaaaggaagcaaagcaggctgagatgcagctcctggtggtccatctgagcgggtcgtttgaggtcatctctggacgcttactcaaaagagagggacattttatgccccctgaattattgcagtcccagtttgagactctggagcccccagcagctccagaaaactttatccaaataagtgtggacaaaaatgtttcagagataattgctacaattatggaaaccctaaaaatgaaatgacaatgattttgtatcagtggtccaaacagaactaagcataaatcattgtgccatcccaaacctcgttccagccgccttgcccatactagattctaaatgtttctaaaggcaaaccccaatgtgtcaagacagacttgtttaggtgtaattttaggaattatgctggttcatcaggaagcagagggggagttttaaaagtcaagcttaaattgaagtttaaattcatctataaccaaatcaaatgatcagaggaaattctgtaatcaatgctggaaatcgttacattgtttagaacattcttgctcatgcctgtatttgcacaaataaatgaaacttcgctgtc

SEQ ID NO: 443604 - DNA, 1024 bp, Homo sapiens
agcgggcgcagaggggcacggccctcactgccccggccggggcgagagcggctccgcccctcgagcgccgggtaggccggggccggcggggcccggaaggcgacgggaaggagccgagcttgggttatggcggcgccgggcgcgctgctggtgatgggcgtgagcggatccaccgtgggcgccctgctggcatctgagctgggatggaaattctatgatgctgatgattatcacccggaggaaaatcgaaggaagatgggaaaaggcataccgctcaatgaccaggaccggattccatggctctgtaacttgcatgacattttactaagagatgtagcctcgggacagcgtgtggttctagcctgttcagccctgaagaaaacgtacagagacatattaacacaaggaaaagatggtgtagctctgaagtgtgaggagtcgggaaaggaagcaaagcaggctgagatgcagctcctggtggtccatctgagcgggtcgtttgaggtcatctctggacgcttactcaaaagagagggacattttatgccccctgaattattgcagtcccagtttgagactctggagcccccagcagctccagaaaactttatccaaataagtgtggacaaaaatgtttcagagataattgctacaattatggaaaccctaaaaatgaaatgacaatgattttgtatcagtggtccaaacagaactaagcataaatcattgtgccatcccaaacctcgttccagccgccttgcccatactagattctaaatgtttctaaaggcaaaccccaatgtgtcaagacagacttgtttaggtgtaattttaggaattatgctggttcatcaggaagcagagggggagttttaaaagtcaagcttaaattgaagtttaaattcatctataaccaaatcaaatgatcagaggaaattctgtaatcaatgctggaaatcgttacattgtttagaacattcttgctcatgcctgtatttgcacaaataaatgaaacttcgctgtc

SEQ ID NO: 443605 - DNA, 430 bp, Homo sapiens
ttgtcagtccgggcggcgggtggggggcggcgggctggggtttcagagataattgctacaattatggaaaccctaaaaatgaaatgacaatgattttgtatcagtggtccaaacagaactaagcataaatcattgtgccatcccaaacctcgttccagccgccttgcccatactagattctaaatgtttctaaaggcaaaccccaatgtgtcaagacagacttgtttaggtgtaattttaggaattatgctggttcatcaggaagcagagggggagttttaaaagtcaagcttaaattgaagtttaaattcatctataaccaaatcaaatgatcagaggaaattctgtaatcaatgctggaaatcgttacattgtttagaacattcttgctcatgcctgtatttgcacaaataaatgaaacttcgctgtc

SEQ ID NO: 443606 - DNA, 1592 bp, Homo sapiens
agcgggcgcagaggggcacggccctcactgccccggccggggcgagagcggctccgcccctcgagcgccgggtaggccggggccggcggggcccggaaggcgacgggaaggagccgagcttgggttatggcggcgccgggcgcgctgctggtgatgggcgtgagcggactctcgctctgtcgcccaggctggagtacagtggcgtgatctcggctcgctgcaacctctgcctcctgagttcgggcgattgtcatgcctcggcctccggagtagctggggttacaggcgtgcaccacaacacccggctgggttttgtatttttagttgagacggggttttgccgtgttggcagagctggtcccgaactcctggcctcaggtgatccgcctgcctcagcctcccaaagtgctgggattataggcgtgagccaagggctcaacctaacttggtcttaagtgtgatttctgctatgcacacttctggcttcaccagccatggagtttggccgggatggtctactcatccgtaggctgcatgtctccctgcgcagccttcaatagaatgaactaatgggaaaggtttcactgctctcgcaacctttggttacatccaggagcagatctcagtttggtacaactgtgtctaacacctctctgatagctttttagtgaaagaaagaggacctttgttaggcaacagtatccagctagaatttaatcacattgttctgttttcattatatacagcttttcaggtaccttctattcaaggcaagtgatgatagcttcttgtgcaagggaatgaaagaaagtttccttctttaacacacttatttaatttttaaaagtgaagcaattaaataaaaacatcaaaatgttgaggtgatatgtaaaatttaagagggcatgataaaatagtatggggataggtaaaaattaggaagatagtgcttaaataattggcatttgggcaacactttaaacattggaaagcgagaaagcactttatgggtcattggtctgctggctccacccctacctaccctatgtactagactgtttaggaaggctgaggccatgtgtcagtgagcttaccgttacatcctgggaactggtaggtgctcaataaagaaatgaaatgtaggtggatggatacatcatgtggctcagatcccttgttttgcaggtgagaaaactgaggtttaaaggaacaggtgacttggctgggagcactcagtcatttagtggcagtaggcaactgtggccccatctccagtactgagtcccgagcccctttcactagcacatgctgcctggtagagtatgaacagatagttaccaaatgctctacacagagaacatttaacccccagtcttaacaagtgccggtgattcatgagatattgacccatgtcctttattttacgagtgtgtctcttttaaactccaaaaatgtttttatgcttttatgagtgtcctgaactttacatgggtgctgctggagattaaatcctccatcagacccctccattcaatattttcagcagaattttatcactatgaattcaacatccccaccacaaaaaaaaaaaa

SEQ ID NO: 443607 - DNA, 309 bp, Homo sapiens
ctggtgacagagtgagactacatttcaaaaaaaaaaaaaaagtaatgaattaaaggaggctgtggtagcccagtcatgggggttgtgaaatggcatgacaaggtgcttccctcctgggggttgtccttggggttgatgggaaccaggcgggtggtattgtttctacacctgcctgttagtaatcccacaatgactatcacattggcccatctgcctgccacatacaccctttcactttgttcttaaagctgggatggaaattctatgatgctgatgattatcacccggaggaaaatcgaaggaagatgg

SEQ ID NO: 443608 - DNA, 1627 bp, Homo sapiens
agcgggcgcagaggggcacggccctcactgccccggccggggcgagagcggctccgcccctcgagcgccgggtaggccggggccggcggggcccggaaggcgacgggaaggagccgagcttgggttatggcggcgccgggcgcgctgctggtgatgggcgtgagcggactctcgctctgtcgcccaggctggagtacagtggcgtgatctcggctcgctgcaacctctgcctcctgagttcgggcgattgtcatgcctcggcctccggagtagctggggttacaggcgtgcaccacaacacccggctgggttttgtatttttagttgagacggggttttgccgtgttggcagagctggtcccgaactcctggcctcaggtgatccgcctgcctcagcctcccaaagtgctgggattataggcgtgagccaagggctcaacctaacttggtcttaagtgtgatttctgctatgcacacttctggcttcaccagccatggagtttggccgggatggtctactcatccgtaggctgcatgtctccctgcgcagccttcaatagaatgaactaatgggaaaggtttcactgctctcgcaacctttggttacatccaggagcagatctcagtttggtacaactgtgtctaacacctctctgatagctttttagtgaaagaaagaggacctttgttaggcaacagtatccagctagaatttaatcacattgttctgttttcattatatacagcttttcaggtaccttctattcaagatccaccgtgggcgccctgctggcatctgagctgggatggaaattctatgatgctgatgattatcacccggaggaaaatcgaaggaagatgggaaaaggcataccgctcaatgaccaggaccggattccatggctctgtaacttgcatgacattttactaagagatgtagcctcgggacagcgtgtggttctagcctgttcagccctgaagaaaacgtacagagacatattaacacaaggaaaagatggtgtagctctgaagtgtgaggagtcgggaaaggaagcaaagcaggctgagatgcagctcctggtggtccatctgagcgggtcgtttgaggtcatctctggacgcttactcaaaagagagggacattttatgccccctgaattattgcagtcccagtttgagactctggagcccccagcagctccagaaaactttatccaaataagtgtggacaaaaatgtttcagagataattgctacaattatggaaaccctaaaaatgaaatgacaatgattttgtatcagtggtccaaacagaactaagcataaatcattgtgccatcccaaacctcgttccagccgccttgcccatactagattctaaatgtttctaaaggcaaaccccaatgtgtcaagacagacttgtttaggtgtaattttaggaattatgctggttcatcaggaagcagagggggagttttaaaagtcaagcttaaattgaagtttaaattcatctataaccaaatcaaatgatcagaggaaattctgtaatcaatgctggaaatcgttacattgtttagaacattcttgctcatgcctgtatttgcacaaataaatgaaacttcgctgtc

SEQ ID NO: 443609 - DNA, 792 bp, Homo sapiens
cccctactctacctccaagattcccgccgtcgacccccccgtggccctttcgggaccggattccatggctctgtaacttgcatgacattttactaagagatgtagcctcgggacagcgtgtggttctagcctgttcagccctgaagaaaacgtacagagacatattaacacaaggaaaagatggtgtagctctgaagtgtgaggagtcgggaaaggaagcaaagcaggctgagatgcagctcctggtggtccatctgagcgggtcgtttgaggtcatctctggacgcttactcaaaagagagggacattttatgccccctgaattattgcagtcccagtttgagactctggagcccccagcagctccagaaaactttatccaaataagtgtggacaaaaatgtttcagagataattgctacaattatggaaaccctaaaaatgaaatgacaatgattttgtatcagtggtccaaacagaactaagcataaatcattgtgccatcccaaacctcgttccagccgccttgcccatactagattctaaatgtttctaaaggcaaaccccaatgtgtcaagacagacttgtttaggtgtaattttaggaattatgctggttcatcaggaagcagagggggagttttaaaagtcaagcttaaattgaagtttaaattcatctataaccaaatcaaatgatcagaggaaattctgtaatcaatgctggaaatcgttacattgtttagaacattcttgctcatgcctgtatttgcacaaataaatgaaacttcgctgtc

SEQ ID NO: 443610 - DNA, 780 bp, Homo sapiens
  misc_feature (1)..(2): n is a, c, g, or t
  misc_feature (5)..(5): n is a, c, g, or t
  misc_feature (7)..(8): n is a, c, g, or t
  misc_feature (16)..(16): n is a, c, g, or t
nnggngnnatcaaacntataggctaggtacgaggctgggtgtgttgctcagcccttgccttgagtcagtgcgccgctctccagcccgcttgaacgctccccgcagccaccgccacccattggaatggccaacaggggacctgcatatggcctgagccgggaggtgcagcagaagattgagaaacaatatgatgcagatctggagcagatcctgatccagtggatcaccacccagtgccgaaaggatgtgggccggccccagcctggacgcgagaacttccagaactggctcaaggatggcacggtgctatgtgagctcattaatgcactgtaccccgaggggcaggccccagtaaagaagatccaggcctccaccatggccttcaagcagatggagcagatctctcagttcctgcaagcagctgagcgctatggcattaacaccactgacatcttccaaactgtggacctctgggaaggaaagaacatggcctgtgtgcagcggacgctgatgaatctgggtgggctggcagtagcccgagatgatgggctcttctctggggatcccaactggttccctaagaaatccaaggagaatcctcggaacttctcggataaccagctgcaagagggcaagaacgtgatcgggttacagatgggcaccaaccgcggggcgtctcaggcaggcatgactggctacgggatgccacgccagatcctctgatcccaccccagcccccccgagggctttttcgcttttccgggttccgaagcccgttca

SEQ ID NO: 443611 - DNA, 1636 bp, Homo sapiens
cggtggtgaggggctgccctacggtggttcccttaattgtgggccgccccccatccttgctgctggctgtggcacctcgctctgtgggctggtgccctcactgtgctgctctttgagaacactccctgtcccaaatctgagttgggaagttctcctgtgttccatctgcacggtggatggagagtccctttgtcttcccaattaaacaccctagccaagaaccctgaagtcctccctgcccccacccatgtccgccttttctttggctttggctttggtgagctccccgcagccaccgccacccattggaatggccaacaggggacctgcatatggcctgagccgggaggtgcagcagaagattgagaaacaatatgatgcagatctggagcagatcctgatccagtggatcaccacccagtgccgaaaggatgtgggccggccccagcctggacgcgagaacttccagaactggctcaaggatggcacggtgctatgtgagctcattaatgcactgtaccccgaggggcaggccccagtaaagaagatccaggcctccaccatggccttcaagcagatggagcagatctctcagttcctgcaagcagctgagcgctatggcattaacaccactgacatcttccaaactgtggacctctgggaaggaaagaacatggcctgtgtgcagcggacgctgatgaatctgggtgggctggcagtagcccgagatgatgggctcttctctggggatcccaactggttccctaagaaatccaaggagaatcctcggaacttctcggataaccagctgcaagagggcaagaacgtgatcgggttacagatgggcaccaaccgcggggcgtctcaggcaggcatgactggctacgggatgccacgccagatcctctgatcccaccccaggccttgcccctgccctcccacgaatggttaatatatatgtagatatatattttagcagtgacattcccagagagccccagagctctcaagctcctttctgtcagggtggggggttcagcctgtcctgtcacctctgaggtgcctgctggcatcctctcccccatgcttactaatacattcccttccccatagccatcaaaactggaccaactggcctcttcctttcccctgggaccaaaatttaggggcctcagtccctcaccgccatgccctggcctattctgtctctccttcttccccctggcctgttctgtctctgagctctgtgtcctccgttcattccatggctgggagtcactgatgctgcctctgccttctgatgctggactggccttgcttctacaagtatgcttctcccacagctgtggctgcaggaacttaatttatagggaggagcctgtggcagctgctgccccagccacagctgcactgactgtgctcaccacacatctggggcagccttccctggcaggggccctcgtggcttctcattttccattcccttcactgtggctaaggggtggggtgaggggatggagagggagggctgcctaccatggtctggggcttgaggaagatgagtttgttgatttaaataaagaatttgtcatttttgaaaaaaaaacaaaagggcggccgactagttctagatcgc

SEQ ID NO: 443612 - DNA, 885 bp, Homo sapiens
cccattcgagctcggcaccccggctctctggggatcccaactggttccctaagaaatccaaggagaatcctcggaacttctcggataaccagctgcaagagggcaagaacgtgatcgggttacagatgggcaccaaccgcggggcgtctcaggcaggcatgactggctacgggatgccacgccagatcctctgatcccaccccaggccttgcccctgccctcccacgaatggttaatatatatgtagatatatattttagcagtgacattcccagagagccccagagctctcaagctcctttctgtcagggtggggggttcagcctgtcctgtcacctctgaggtgcctgctggcatcctctcccccatgcttactaatacattcccttccccatagccatcaaaactggaccaactggcctcttcctttcccctgggaccaaaatttaggggcctcagtccctcaccgccatgccctggcctattctgtctctccttcttccccctggcctgttctgtctctgagctctgtgtcctccgttcattccatggctgggagtcactgatgctgcctctgccttctgatgctggactggccttgcttctacaagtatgcttctcccacagctgtggctgcaggaacttaatttatagggaggagcctgtggcagctgctgccccagccacagctgcactgactgtgctcaccacacatctggggcagccttccctggcaggggccctcgtggcttctcattttccattcccttcactgtggctaaggggtggggtgaggggatggagagggagggctgcctaccatggtctggggctgagaataccgcgttgtatttatagatttttgtgttgtgtgtgattggaagt

SEQ ID NO: 443613 - DNA, 1477 bp, Homo sapiens
ttagatcaggcatatgtactgaggcctcggtggttatgaaaatccccggctgggcagggcgcaccacttgcagctgcagcccttgccttgagtcagtgcgccgctctccagcccgcttgaacgctccccgcagccaccgccacccattggaatggccaacaggggacctgcatatggcctgagccgggaggtgcagcagaagattgagaaacaatatgatgcagatctggagcagatcctgatccagtggatcaccacccagtgccgaaaggatgtgggccggccccagcctggacgcgagaacttccagaactggctcaaggatggcacggtgctatgtgagctcattaatgcactgtaccccgaggggcaggccccagtaaagaagatccaggcctccaccatggccttcaagcagatggagcagatctctcagttcctgcaagcagctgagcgctatggcattaacaccactgacatcttccaaactgtggacctctgggaaggaaagaacatggcctgtgtgcagcggacgctgatgaatctgggtgggctggcagtagcccgagatgatgggctcttctctggggatcccaactggttccctaagaaatccaaggagaatcctcggaacttctcggataaccagctgcaagagggcaagaacgtgatcgggttacagatgggcaccaaccgcggggcgtctcaggcaggcatgactggctacgggatgccacgccagatcctctgatcccaccccaggccttgcccctgccctcccacgaatggttaatatatatgtagatatatattttagcagtgacattcccagagagccccagagctctcaagctcctttctgtcagggtggggggttcagcctgtcctgtcacctctgaggtgcctgctggcatcctctcccccatgcttactaatacattcccttccccatagccatcaaaactggaccaactggcctcttcctttcccctgggaccaaaatttaggggcctcagtccctcaccgccatgccctggcctattctgtctctccttcttccccctggcctgttctgtctctgagctctgtgtcctccgttcattccatggctgggagtcactgatgctgcctctgccttctgatgctggactggccttgcttctacaagtatgcttctcccacagctgtggctgcaggaacttaatttatagggaggagcctgtggcagctgctgccccagccacagctgcactgactgtgctcaccacacatctggggcagccttccctggcaggggccctcgtggcttctcattttccattcccttcactgtggctaaggggtggggtgaggggatggagagggagggctgcctaccatggtctggggcttgaggaagatgagtttgttgatttaaataaagaatttgtcatttttgaaaaaaaaacaaaagggcggccgactagttctagatcgc

SEQ ID NO: 443614 - DNA, 1957 bp, Homo sapiens
ttagatcaggcatatgtactgaggcctcggtggttatgaaaatccccggctgggcagggcgcaccacttgcagctgcagcccttgccttgagtcagtgcgccgctctccagcccgcttgaacgctccccgcagccaccgccacccattggaatggccaacaggggacctgcatatggcctgagccgggaggtgcagcagaagattgagaaacaatatgatgcagatctggagcagatcctgatccagtggatcaccacccagtgccgaaaggatgtgggccggccccagcctggacgcgagaacttccagaactggctcaaggatggcacggtgctatgtgagctcattaatgcactgtaccccgaggggcaggccccagtaaagaagatccaggcctccaccatggccttcaagcagatggagcagatctctcagttcctgcaagcagctgagcgctatggcattaacaccactgacatcttccaaactgtggacctctgggaaggaaagaacatggcctgtgtgcagcggacgctgatgaatctgggtgggctggcagtagcccgagatgatgggctcttctctggggatcccaactggttccctaagaaatccaaggagaatcctcggaacttctcggataaccagctgcaagagggcaagaacgtgatcgggttacagatgggcaccaaccgcggggcgtctcaggcaggcatgactggctacgggatgccacgccagatcctctgatcccaccccaggccttgcccctgccctcccacgaatggttaatatatatgtagatatatattttagcagtgacattcccagagagccccagagctctcaagctcctttctgtcagggtggggggttcagcctgtcctgtcacctctgaggtgcctgctggcatcctctcccccatgcttactaatacattcccttccccatagccatcaaaactggaccaactggcctcttcctttcccctgggaccaaaatttaggggcctcagtccctcaccgccatgccctggcctattctgtctctccttcttccccctggcctgttctgtctctgagctctgtgtcctccgttcattccatggctgggagtcactgatgctgcctctgccttctgatgctggactggccttgcttctacaagtatgcttctcccacagctgtggctgcaggaacttaatttatagggaggagcctgtggcagctgctgccccagccacagctgcactgactgtgctcaccacacatctggggcagccttccctggcaggggccctcgtggcttctcattttccattcccttcactgtggctaaggggtggggtgaggggatggagagggagggctgcctaccatggtctggggcttgaggaagatgagtttgttgatttaaataaagaatttgtcatttttgaaaaaaaaaaaaaaaaaaaaaaaaaaaaaaaaaaaaaaaaaaaaaacaaaacaaaaaaaaaacaggggggcgcgcgccaaaagaaatattccccgcggggggcgccccacgaattgtaggcggcactaccccgcgcttttttttgtgaaaaaagggggggccccaataatggggggggcggatatattataataaaggggggggcgggggggcgggctgttttaaaaaaagggctagggacagggggaaaaagtggagtagccggggagcacctttgggggagagaggagcccccatatctgtcttgggggggggggggaccagtattgtgggacagcatatatccctccatgggagatttaaaagcggctagcaggggataaatatactaaaccttgagggtgtattatgtgggtgaacacacaacgagggaataatagcaggcgccgaaaagaatttgggctaaccgggagggtatattttgagatattttttacgagcgttgttttgaaataaagc

SEQ ID NO: 443615 - DNA, 1666 bp, Homo sapiens
  misc_feature (1517)..(1517): n is a, c, g, or t
  misc_feature (1519)..(1520): n is a, c, g, or t
  misc_feature (1522)..(1522): n is a, c, g, or t
  misc_feature (1525)..(1525): n is a, c, g, or t
  misc_feature (1528)..(1530): n is a, c, g, or t
  misc_feature (1532)..(1533): n is a, c, g, or t
  misc_feature (1536)..(1537): n is a, c, g, or t
  misc_feature (1539)..(1539): n is a, c, g, or t
  misc_feature (1542)..(1543): n is a, c, g, or t
  misc_feature (1551)..(1552): n is a, c, g, or t
  misc_feature (1579)..(1579): n is a, c, g, or t
  misc_feature (1662)..(1662): n is a, c, g, or t
ttagatcaggcatatgtactgaggcctcggtggttatgaaaatccccggctgggcagggcgcaccacttgcagctgcagcccttgccttgagtcagtgcgccgctctccagcccgcttgaacgctccccgcagccaccgccacccattggaatggccaacaggggacctgcatatggcctgagccgggaggtgcagcagaagattgagaaacaatatgatgcagatctggagcagatcctgatccagtggatcaccacccagtgccgaaaggatgtgggccggccccagcctggacgcgagaacttccagaactggctcaaggatggcacggtgctatgtgagctcattaatgcactgtaccccgaggggcaggccccagtaaagaagatccaggcctccaccatggccttcaagcagatggagcagatctctcagttcctgcaagcagctgagcgctatggcattaacaccactgacatcttccaaactgtggacctctgggaaggaaagaacatggcctgtgtgcagcggacgctgatgaatctgggtgggctggcagtagcccgagatgatgggctcttctctggggatcccaactggttccctaagaaatccaaggagaatcctcggaacttctcggataaccagctgcaagagggcaagaacgtgatcgggttacagatgggcaccaaccgcggggcgtctcaggcaggcatgactggctacgggatgccacgccagatcctctgatcccaccccaggccttgcccctgccctcccacgaatggttaatatatatgtagatatatattttagcagtgacattcccagagagccccagagctctcaagctcctttctgtcagggtggggggttcagcctgtcctgtcacctctgaggtgcctgctggcatcctctcccccatgcttactaatacattcccttccccatagccatcaaaactggaccaactggcctcttcctttcccctgggaccaaaatttaggggcctcagtccctcaccgccatgccctggcctattctgtctctccttcttccccctggcctgttctgtctctgagctctgtgtcctccgttcattccatggctgggagtcactgatgctgcctctgccttctgatgctggactggccttgcttctacaagtatgcttctcccacagctgtggctgcaggaacttaatttatagggaggagcctgtggcagctgctgccccagccacagctgcactgactgtgctcaccacacatctggggcagccttccctggcaggggccctcgtggcttctcattttccattcccttcactgtggctaaggggtggggtgaggggatggagagggagggctgcctaccatggtctggggcttgaggaagatgagtttgttgatttaaataaagaatttgtcatttttgaaaaaaaaaaaaaaaaaaaaaaaaaaaaaaaaaaaaaaaaaaaaaacaaaacaaaaaaaaaacaacccaaaaaaaaaantnnantanaannnannaanntnaanntttttttnnaattttttttttttttaatttcttctnttttttttttttttttttttttttttttttttttttttttttttttttttttttttttttttttttttttttttttttttttntttt

SEQ ID NO: 443616 - DNA, 1706 bp, Homo sapiens
  misc_feature (1557)..(1557): n is a, c, g, or t
  misc_feature (1559)..(1560): n is a, c, g, or t
  misc_feature (1562)..(1562): n is a, c, g, or t
  misc_feature (1565)..(1565): n is a, c, g, or t
  misc_feature (1568)..(1570): n is a, c, g, or t
  misc_feature (1572)..(1573): n is a, c, g, or t
  misc_feature (1576)..(1577): n is a, c, g, or t
  misc_feature (1579)..(1579): n is a, c, g, or t
  misc_feature (1582)..(1583): n is a, c, g, or t
  misc_feature (1591)..(1592): n is a, c, g, or t
  misc_feature (1619)..(1619): n is a, c, g, or t
  misc_feature (1702)..(1702): n is a, c, g, or t
ttagatcaggcatatgtactgaggcctcggtggttatgaaaatccccggctgggcagggcgcaccacttgcagctgcagcccttgccttgagtcagtgcgccgctctccagcccgcttgaacgctccccgcagccaccgccacccattggaatggccaacaggggacctgcatatggcctgagccgggaggtgcagcagaagattgagaaacaatatgatgcagatctggagcagatcctgatccagtggatcaccacccagtgccgaaaggatgtgggccggccccagcctggacgcgagaacttccagaactggctcaaggatggcacggtgctatgtgagctcattaatgcactgtaccccgaggggcaggccccagtaaagaagatccaggcctccaccatggccttcaagcagatggagcagatctctcagttcctgcaagcagctgagcgctatggcattaacaccactgacatcttccaaactgtggacctctgggaaggaaagaacatggcctgtgtgcagcggacgctgatgaatctgggtgggctggcagtagcccgagatgatgggctcttctctggggatcccaactggttccctaagaaatccaaggagaatcctcggaacttctcggataaccagctgcaagagggcaagaacgtgatcgggttacagatgggcaccaaccgcggggcgtctcaggcaggcatgactggctacgggatgccacgccagatcctctgatcccaccccaggccttgcccctgccctcccacgaatggttaatatatatgtagatatatattttagcagtgacattcccagagagccccagagctctcaagctcctttctgtcagggtggggggttcagcctgtcctgtcacctctgaggtgcctgctggcatcctctcccccatgcttactaatacattcccttccccatagccatcaaaactggaccaactggcctcttcctttcccctgggaccaaaatttaggggcctcagtccctcaccgccatgccctggcctattctgtctctccttcttccccctggcctgttctgtctctgagctctgtgtcctccgttcattccatggctgggagtcactgatgctgcctctgccttctgatgctggactggccttgcttctacaagtatgcttctcccacagctgtggctgcaggaacttaatttatagggaggagcctgtggcagctgctgccccagccacagctgcactgactgtgctcaccacacatctggggcagccttccctggcaggggccctcgtggcttctcattttccattcccttcactgtggctaaggggtggggtgaggggatggagagggagggctgcctaccatggtctggggcttgaggaagatgagtttgttgatttaaataaagaatttgtcatttttgaaacaaacaaaaacaaaacaaaaaaaaacaaaaacaaaaaaaaaaaaaaaaaaaaaaaaaaaaaaaaaaaaaaaaaaaaaaaaaaacaaaacaaaaaaaaaacaacccaaaaaaaaaantnnantanaannnannaanntnaanntttttttnnaattttttttttttttaatttcttctnttttttttttttttttttttttttttttttttttttttttttttttttttttttttttttttttttttttttttttttttttntttt

SEQ ID NO: 443617 - DNA, 1427 bp, Homo sapiens
  misc_feature (55)..(55): n is a, c, g, or t
ttaacagcagctatccaatccgataagcacatacacaactcatccacttaggacnagtacgaggctgggtgttgctgagtcagtgcgccgctctccagcccgcttgaacgctccccgcagccaccgccacccattggaatggccaacaggggacctgcatatggcctgagccgggaggtgcagcagaagattgagaaacaatatgatgcagatctggagcagatcctgatccagtggatcaccacccagtgccgaaaggatgtgggccggccccagcctggacgcgagaacttccagaactggctcaaggatggcacggtgctatgtgagctcattaatgcactgtaccccgaggggcaggccccagtaaagaagatccaggcctccaccatggccttcaagcagatggagcagatctctcagttcctgcaagcagctgagcgctatggcattaacaccactgacatcttccaaactgtggacctctgggaaggaaagaacatggcctgtgtgcagcggacgctgatgaatctgggtgggctggcagtagcccgagatgatgggctcttctctggggatcccaactggttccctaagaaatccaaggagaatcctcggaacttctcggataaccagctgcaagagggcaagaacgtgatcgggttacagatgggcaccaaccgcggggcgtctcaggcaggcatgactggctacgggatgccacgccagatcctctgatcccaccccaggccttgcccctgccctcccacgaatggttaatatatatgtagatatatattttagcagtgacattcccagagagccccagagctctcaagctcctttctgtcagggtggggggttcagcctgtcctgtcacctctgaggtgcctgctggcatcctctcccccatgcttactaatacattcccttccccatagccatcaaaactggaccaactggcctcttcctttcccctgggaccaaaatttaggggcctcagtccctcaccgccatgccctggcctattctgtctctccttcttccccctggcctgttctgtctctgagctctgtgtcctccgttcattccatggctgggagtcactgatgctgcctctgccttctgatgctggactggccttgcttctacaagtatgcttctcccacagctgtggctgcaggaacttaatttatagggaggagcctgtggcagctgctgccccagccacagctgcactgactgtgctcaccacacatctggggcagccttccctggcaggggccctcgtggcttctcattttccattcccttcactgtggctaaggggtggggtgaggggatggagagggagggctgcctaccatggtctggggcttgaggaagatgagtttgttgatttaaataaagaatttgtcatttttgaa

SEQ ID NO: 443618 - DNA, 1198 bp, Homo sapiens
ttagatcaggcatatgtactgaggcctcggtggttatgaaaatccccggctgggcagggcgcaccacttgcagctgcagcccttgccttgagtcagtgcgccgctctccagcccgcttgaacgctccccgcagccaccgccacccattggaatggccaacaggggacctgcatatggcctgagccgggaggtgcagcagaagattgagaaacaatatgatgcagatctggagcagatcctgatccagtggatcaccacccagtgccgaaaggatgtgggccggccccagcctggacgcgagaacttccagaactggctcaaggatggcacggtgctatgtgagctcattaatgcactgtaccccgaggggcaggccccagtaaagaagatccaggcctccaccatggccttcaagcagatggagcagatctctcagttcctgcaagcagctgagcgctatggcattaacaccactgacatcttccaaactgtggacctctgggaaggaaagaacatggcctgtgtgcagcggacgctgatgaatctgggtgggctggcagtagcccgagatgatgggctcttctctggggatcccaactggttccctaagaaatccaaggagaatcctcggaacttctcggataaccagctgcaagagggcaagaacgtgatcgggttacagatgggcaccaaccgcggggcgtctcaggcaggcatgactggctacgggatgccacgccagatcctctgatcccaccccaggccttgcccctgccctcccacgaatggttaatatatatgtagatatatattttagcagtgacattcccagagagccccagagctctcaagctcctttctgtcagggtggggggttcagcctgtcctgtcacctctgaggtgcctgctggcatcctctcccccatgcttactaatacattcccttccccatagccatcaaaactggaccaactggcctcttcctttcccctgggaccaaaatttaggggcctcagtccctcaccgccatgccctggcctattctgtctctccttcttccccctggcctgttctgtctctgagctctgtgtcctccgttcattccatggctgggagtcactgatgctgcctctaccatggtctggggcttgaggaagatgagtttgttgatttaaataaagaatttgtcatttttgaa

SEQ ID NO: 443619 - DNA, 1732 bp, Homo sapiens
ttagatcaggcatatgtactgaggcctcggtggttatgaaaatccccggctgggcagggcgcaccacttgcagctgcagcccttgccttgagtcagtgcgccgctctccagcccgcttgaacgctccccgcagccaccgccacccattggaatggccaacaggggacctgcatatggcctgagccgggaggtgcagcagaagattgagaaacaatatgatgcagatctggagcagatcctgatccagtggatcaccacccagtgccgaaaggatgtgggccggccccagcctggacgcgagaacttccagaactggctcaaggatggcacggtgctatgtgagctcattaatgcactgtaccccgaggggcaggccccagtaaagaagatccaggcctccaccatggccttcaagcagatggagcagatctctcagttcctgcaagcagctgagcgctatggcattaacaccactgacatcttccaaactgtggacctctgggaaggaaagaacatggcctgtgtgcagcggacgctgatgaatctgggtgggctggcagtagcccgagatgatgggctcttctctggggatcccaactggttccctaagaaatccaaggagaatcctcggaacttctcggataaccagctgcaagagggcaagaacgtgatcgggttacagatgggcaccaaccgcggggcgtctcaggcaggcatgactggctacgggatgccacgccagatcctctgatcccaccccaggccttgcccctgccctcccacgaatggttaatatatatgtagatatatattttagcagtgacattcccagagagccccagagctctcaagctcctttctgtcagggtggggggttcagcctgtcctgtcacctctgaggtgcctgctggcatcctctcccccatgcttactaatacattcccttccccatagccatcaaaactggaccaactggcctcttcctttcccctgggaccaaaatttaggggcctcagtccctcaccgccatgccctggcctattctgtctctccttcttccccctggcctgttctgtctctgagctcccttccctggcaggggccctcgtggcttctcattttccattcccttcactgtggctaaggggtggggtgaggggatggagagggagggctgcctaccatggtctggggcttgaggaagatgagtttgttgatttaaataaagaatttgtcatttttgaaaaaaaaaaaaaaaaaaaaaaaaaaaaaaaaaaaaaaaaaaaaaacaaaacaaaaaaaaaacacaacgcgcgtgtgtgcgcgcgcgcgcgccgcgcgcgcgcccgccgagaagaaacttttcataacacaccccatcgtgggtgaggggcgcgggggcggcgcccccacagggtaggcggacaccgcgtgggccacaagcgggggtcccccagaggaaagacacgccgggcgccagcacgacgacgacggcgggggtgggattctctcaccaaccaataataaaaaaagcaggcgcgcgggggggggaaaaacacgcgagcgggttttcgcgacgaaacaacactccgaagagaggggaagctgcagagagaagggctacgcaacgaggggggtacttcacaatcacacgcgaggagaggcccgccaggagggaagagccgcggtaatacatctaaaatatagccccccggcgcggggcggagaacac

SEQ ID NO: 443620 - DNA, 1395 bp, Homo sapiens
ttagatcaggcatatgtactgaggcctcggtggttatgaaaatccccggctgggcagggcgcaccacttgcagctgcagcccttgccttgagtcagtgcgccgctctccagcccgcttgaacgctccccgcagccaccgccacccattggaatggccaacaggggacctgcatatggcctgagccgggaggtgcagcagaagattgagaaacaatatgatgcagatctggagcagatcctgatccagtggatcaccacccagtgccgaaaggatgtgggccggccccagcctggacgcgagaacttccagaactggctcaaggatggcacggtgctatgtgagctcattaatgcactgtaccccgaggggcaggccccagtaaagaagatccaggcctccaccatggccttcaagcagatggagcagatctctcagttcctgcaagcagctgagcgctatggcattaacaccactgacatcttccaaactgtggacctctgggaaggaaagaacatggcctgtgtgcagcggacgctgatgaatctgggtgggctggcagtagcccgagatgatgggctcttctctggggatcccaactggttccctaagaaatccaaggagaatcctcggaacttctcggataaccagctgcaagagggcaagaacgtgatcgggttacagatgggcaccaaccgcggggcgtctcaggcaggcatgactggctacgggatgccacgccagatcctctgatcccaccccaggccttgcccctgccctcccacgaatggttaatatatatgtagatatatattttagcagtgacattcccagagagccccagagctctcaagctcctttctgtcagggtggggggttcagcctgtcctgtcacctctgaggtgcctgctggcatcctctcccccatgcttactaatacattcccttccccatagccatcaaaactggaccaactggcctcttcctttcccctgggactctgtctctccttcttccccctggcctgttctgtctctgagctctgtgtcctccgttcattccatggctgggagtcactgatgctgcctctgccttctgatgctggactggccttgcttctacaagtatgcttctcccacagctgtggctgcaggaacttaatttatagggaggagcctgtggcagctgctgccccagccacagctgcactgactgtgctcaccacacatctggggcagccttccctggcaggggccctcgtggcttctcattttccattcccttcactgtggctaaggggtggggtgaggggatggagagggagggctgcctaccatggtctggggcttgaggaagatgagtttgttgatttaaataaagaatttgtcatttttgaa

SEQ ID NO: 443621 - DNA, 1078 bp, Homo sapiens
ttagatcaggcatatgtactgaggcctcggtggttatgaaaatccccggctgggcagggcgcaccacttgcagctgcagcccttgccttgagtcagtgcgccgctctccagcccgcttgaacgctccccgcagccaccgccacccattggaatggccaacaggggacctgcatatggcctgagccgggaggtgcagcagaagattgagaaacaatatgatgcagatctggagcagatcctgatccagtggatcaccacccagtgccgaaaggatgtgggccggccccagcctggacgcgagaacttccagaactggctcaaggatggcacggtgctatgtgagctcattaatgcactgtaccccgaggggcaggccccagtaaagaagatccaggcctccaccatggccttcaagcagatggagcagatctctcagttcctgcaagcagctgagcgctatggcattaacaccactgacatcttccaaactgtggacctctgggaaggaaagaacatggcctgtgtgcagcggacgctgatgaatctgggtgggctggcagtagcccgagatgatgggctcttctctggggatcccaactggttccctaagaaatccaaggagaatcctcggaacttctcggataaccagctgcaagagggcaagaacgtgatcgggttacagatgggcaccaaccgcggggcgtctcaggcaggcatgactggctacgggatgccacgccagatcctctgatcccaccccaggccttgcccctgccctcccacgaatggttaatatatatgtagatatatattttagcagtgacattcccagagagccccagagctctcaagctcctttctgtcagggtggggggttcagcctgtcctgtcacctctgaggtgcctgctggcatcctctcccccatgcttactaatacattcccttccccatagccatcaaaactggaccaactggcctcttcctttcccctgggaccaaaatttaggggcctcagtccctcaccgccatgccctggcctattcgtcctgcctgaatgggacctctagagcgccaccc

SEQ ID NO: 443622 - DNA, 986 bp, Homo sapiens
ttagatcaggcatatgtactgaggcctcggtggttatgaaaatccccggctgggcagggcgcaccacttgcagctgcagcccttgccttgagtcagtgcgccgctctccagcccgcttgaacgctccccgcagccaccgccacccattggaatggccaacaggggacctgcatatggcctgagccgggaggtgcagcagaagattgagaaacaatatgatgcagatctggagcagatcctgatccagtggatcaccacccagtgccgaaaggatgtgggccggccccagcctggacgcgagaacttccagaactggctcaaggatggcacggtgctatgtgagctcattaatgcactgtaccccgaggggcaggccccagtaaagaagatccaggcctccaccatggccttcaagcagatggagcagatctctcagttcctgcaagcagctgagcgctatggcattaacaccactgacatcttccaaactgtggacctctgggaaggaaagaacatggcctgtgtgcagcggacgctgatgaatctgggtgggctggcagtagcccgagatgatgggctcttctctggggatcccaactggttccctaagaaatccaaggagaatcctcggaacttctcggataaccagctgcaagagggcaagaacgtgatcgggttacagatgggcaccaaccgcggggcgtctcaggcaggcatgactggctacgggatgccacgccagatcctctgatcccaccccaggccttgcccctgccctcccacgaatggttaatatatatgtagatatatattttagcagtgacattcccagagagccccagagctctcaagctcctttctgtcagggtggggggttcagcctgtcctgtcacctctgaggtgcctgctggcatcctctcccccatgcttactaatacattcccttccccatagccatgcacgagaaccacacgccagcacaagaa

SEQ ID NO: 443623 - DNA, 1401 bp, Homo sapiens
ttagatcaggcatatgtactgaggcctcggtggttatgaaaatccccggctgggcagggcgcaccacttgcagctgcagcccttgccttgagtcagtgcgccgctctccagcccgcttgaacgctccccgcagccaccgccacccattggaatggccaacaggggacctgcatatggcctgagccgggaggtgcagcagaagattgagaaacaatatgatgcagatctggagcagatcctgatccagtggatcaccacccagtgccgaaaggatgtgggccggccccagcctggacgcgagaacttccagaactggctcaaggatggcacgcaggccccagtaaagaagatccaggcctccaccatggccttcaagcagatggagcagatctctcagttcctgcaagcagctgagcgctatggcattaacaccactgacatcttccaaactgtggacctctgggaaggaaagaacatggcctgtgtgcagcggacgctgatgaatctgggtgggctggcagtagcccgagatgatgggctcttctctggggatcccaactggttccctaagaaatccaaggagaatcctcggaacttctcggataaccagctgcaagagggcaagaacgtgatcgggttacagatgggcaccaaccgcggggcgtctcaggcaggcatgactggctacgggatgccacgccagatcctctgatcccaccccaggccttgcccctgccctcccacgaatggttaatatatatgtagatatatattttagcagtgacattcccagagagccccagagctctcaagctcctttctgtcagggtggggggttcagcctgtcctgtcacctctgaggtgcctgctggcatcctctcccccatgcttactaatacattcccttccccatagccatcaaaactggaccaactggcctcttcctttcccctgggaccaaaatttaggggcctcagtccctcaccgccatgccctggcctattctgtctctccttcttccccctggcctgttctgtctctgagctctgtgtcctccgttcattccatggctgggagtcactgatgctgcctctgccttctgatgctggactggccttgcttctacaagtatgcttctcccacagctgtggctgcaggaacttaatttatagggaggagcctgtggcagctgctgccccagccacagctgcactgactgtgctcaccacacatctggggcagccttccctggcaggggccctcgtggcttctcattttccattcccttcactgtggctaaggggtggggtgaggggatggagagggagggctgcctaccatggtctggggcttgaggaagatgagtttgttgatttaaataaagaatttgtcatttttgaa

SEQ ID NO: 443624 - DNA, 1498 bp, Homo sapiens
  misc_feature (451)..(451): n is a, c, g, or t
  misc_feature (462)..(462): n is a, c, g, or t
  misc_feature (465)..(467): n is a, c, g, or t
ttagatcaggcatatgtactgaggcctcggtggttatgaaaatccccggctgggcagggcgcaccacttgcagctgcagcccttgccttgagtcagtgcgccgctctccagcccgcttgaacgctccccgcagccaccgccacccattggaatggccaacaggggacctgcatatggcctgagccgggaggtgcagcagaagattgagaaacaatatgatgcagatctggagcagatcctgatccagtggatcaccacccagtgccgaaaggatgtgggccggccccagcctggacgcgagaacttccagaactggctcaaggatggcacgctatgtgagctcattaatgcactgtaccccgagctccacagtttggaagatgtcagtggtgttaatgccatagcgctcagctgctgcaggaactgagagatctgctccatcgcttgaagnccatggtggangcnnngatcttctttactggggcctgcccctcggggtacagtgcattaatgagctcacatagcaccgtgccatccttgagccagttctggacctctgggaaggaaagaacatggcctgtgtgcagcggacgctgatgaatctgggtgggctggcagtagcccgagatgatgggctcttctctggggatcccaactggttccctaagaaatccaaggagaatcctcggaacttctcggataaccagctgcaagagggcaagaacgtgatcgggttacagatgggcaccaaccgcggggcgtctcaggcaggcatgactggctacgggatgccacgccagatcctctgatcccaccccaggccttgcccctgccctcccacgaatggttaatatatatgtagatatatattttagcagtgacattcccagagagccccagagctctcaagctcctttctgtcagggtggggggttcagcctgtcctgtcacctctgaggtgcctgctggcatcctctcccccatgcttactaatacattcccttccccatagccatcaaaactggaccaactggcctcttcctttcccctgggaccaaaatttaggggcctcagtccctcaccgccatgccctggcctattctgtctctccttcttccccctggcctgttctgtctctgagctctgtgtcctccgttcattccatggctgggagtcactgatgctgcctctgccttctgatgctggactggccttgcttctacaagtatgcttctcccacagctgtggctgcaggaacttaatttatagggaggagcctgtggcagctgctgccccagccacagctgcactgactgtgctcaccacacatctggggcagccttccctggcaggggccctcgtggcttctcattttccattcccttcactgtggctaaggggtggggtgaggggatggagagggagggctgcctaccatggtctggggcttgaggaagatgagtttgttgatttaaataaagaatttgtcatttttgaa

SEQ ID NO: 443625 - DNA, 1213 bp, Homo sapiens
ttagatcaggcatatgtactgaggcctcggtggttatgaaaatccccggctgggcagggcgcaccacttgcagctgcagcccttgccttgagtcagtgcgccgctctccagcccgcttgaacgctccccgcagccaccgccacccattggaatggccaacaggggacctgcatatggcctgagccgggaggtgcagcagaagattgagaaacaatatgatgcagatctggagcagatcctgatccagtggatcaccacccagtgccgaaaggatgtgggccggccccagcctggacgcgagaacttccagaactggctcaaggatggcacggtgctatgtgagctcattaatgcactgtaccccgaggggcaggccccagtaaagaagatccaggcctccaccatggccttcaagcagatggagcagatctctcagttcctgcaagcagctgagcgctatggcattaacaccactgacatcttccaaactgtggacctctgggaaggaaagaacatggcctgtgtgcagcggacggccttgcccctgccctcccacgaatggttaatatatatgtagatatatattttagcagtgacattcccagagagccccagagctctcaagctcctttctgtcagggtggggggttcagcctgtcctgtcacctctgaggtgcctgctggcatcctctcccccatgcttactaatacattcccttccccatagccatcaaaactggaccaactggcctcttcctttcccctgggaccaaaatttaggggcctcagtccctcaccgccatgccctggcctattctgtctctccttcttccccctggcctgttctgtctctgagctctgtgtcctccgttcattccatggctgggagtcactgatgctgcctctgccttctgatgctggactggccttgcttctacaagtatgcttctcccacagctgtggctgcaggaacttaatttatagggaggagcctgtggcagctgctgccccagccacagctgcactgactgtgctcaccacacatctggggcagccttccctggcaggggccctcgtggcttctcattttccattcccttcactgtggctaaggggtggggtgaggggatggagagggagggctgcctaccatggtctggggcttgaggaagatgagtttgttgatttaaataaagaatttgtcatttttgaa

SEQ ID NO: 443626 - DNA, 808 bp, Homo sapiens
ttagatcaggcatatgtactgaggcctcggtggttatgaaaatccccggctgggcagggcgcaccacttgcagctgcagcccttgccttgagtcagtgcgccgctctccagcccgcttgaacgctccccgcagccaccgccacccattggaatggccaacaggggacctgcatatggcctgagccgggaggtgcagcagaagattgagaaacaatatgatgcagatctggagcagatcctgatccagtggatcaccacccagtgccgaaaggatgtgggccggccccagcctggacgcgagaacttccagaactggctcaaggatggcacggtgctatgtgagctcattaatgcactgtaccccgaggggcaggccccagtaaagaagatccaggcctccaccatggccttcaagcagatggagcagatctctcagttcctgcaagcagctgagcgctatggcattaacaccactgacatcttccaaactgtggacctctgggaaggaaagaacatggcctgtgtgcagcggacgctgatgaatctgggtgggctggcagtagcccgagatgatgggctcttctctggggatcccaactggttccctaagaaatccaaggagaatcctcggaacttctcggataaccagctgcaagagggcaagaacgtgatcgggttacagatgggcaccaaccgcggggcgtctcaggcaggcatgactggctacgggatgccacgccagatcctctgatcccaccccagcccccccgagggctttttcgcttttccgggttccgaagcccgttca

SEQ ID NO: 443627 - DNA, 1073 bp, Homo sapiens
ttagatcaggcatatgtactgaggcctcggtggttatgaaaatccccggctgggcagggcgcaccacttgcagctgcagcccttgccttgagtcagtgcgccgctctccagcccgcttgaacgctccccgcagccaccgccacccattggaatggccaacaggggacctgcatatggcctgagccgggaggtgcagcagaagattgagaaacaatatgatgcagatctggagcagatcctgatccagtggatcaccacccagtgccgaaaggatgtgggccggccccagcctggacgcgagaacttccagaactggctcaaggatggcacggtgctatgtgagctcattaatgcactgtaccccgaggggcaggccccagtaaagaagatccaggcctccaccatggccttcaagcagatggagcagatctctcagttcctgcaagcagctgagcgctatggcattaacaccactgacatcttccaaactgtggacctctgggaaggaaagaacatggcctgtgtgcagcggacgctgatgaatctgggtgggctggcagtagcccgagatgatgggctcttctctggggatcccaactggttccctaagaaatccaaggagaatcctcggaacttctcggataaccagctgcaagagggcaagaacgtgatcgggttacagatgggcaccaaccgcggggcgtctcaggcaggcatgactggctacgggatgccacgccagatcctctgatcccaccccatgcatccagaatggtaagtcctaactgtagaactacaaacaaccgaagggacacgtccatgaaaggcccagagatcacaagccagtactgaaaggtggggggtcagacgagcagcaccataggaggtacagcagaagcgcacccgaggaacaacgaacgagcatacccagagacgaaacacggaccgcggccacgcctacccgcggacacaaacgggccacaaccacgcagcacggcggcaaaccgagcaccaagaccacgcagcaaggcgcgcgaaccaaaccagcgaagagaacgaaccagaaccaagag

SEQ ID NO: 443628 - DNA, 838 bp, Homo sapiens
ttagatcaggcatatgtactgaggcctcggtggttatgaaaatccccggctgggcagggcgcaccacttgcagctgcagcccttgccttgagtcagtgcgccgctctccagcccgcttgaacgctccccgcagccaccgccacccattggaatggccaacaggggacctgcatatggcctgagccgggaggtgcagcagaagattgagaaacaatatgatgcagatctggagcagatcctgatccagtggatcaccacccagtgccgaaaggatgtgggccggccccagcctggacgcgagaacttccagaactggctcaaggatggcacggtgctatgtgagctcattaatgcactgtaccccgaggggcaggccccagtaaagaagatccaggcctccaccatggccttcaagcagatggagcagatctctcagttcctgcaagcagctgagcgctatggcattaacaccactgacatcttccaaactgtggacctctgggaaggaaagaacatggcctgtgtgcagcggacgctgatgaatctgggtgggctggcagtagcccgagatgatgggctcttctctggggatcccaactggttccctaagaaatccaaggagaatcctcggaacttctcggataaccagctgcaagagggcaagaacgtgatcgggttacagatgggcaccaaccgcggggcgtctcaggcaggcatgactggctacgggatgccacgccagatcctctgatcccaccccatgtgcagtccacctccttgtgctgtccacctcctctgtgcggtccacctcctctgtctgtccacctcctctctgggg

SEQ ID NO: 443629 - DNA, 741 bp, Homo sapiens
ttagatcaggcatatgtactgaggcctcggtggttatgaaaatccccggctgggcagggcgcaccacttgcagctgcagcccttgccttgagtcagtgcgccgctctccagcccgcttgaacgctccccgcagccaccgccacccattggaatggccaacaggggacctgcatatggcctgagccgggaggtgcagcagaagattgagaaacaatatgatgcagatctggagcagatcctgatccagtggatcaccacccagtgccgaaaggatgtgggccggccccagcctggacgcgagaacttccagaactggctcaaggatggcacggtgctatgtgagctcattaatgcactgtaccccgaggggcaggccccagtaaagaagatccaggcctccaccatggccttcaagcagatggagcagatctctcagttcctgcaagcagctgagcgctatggcattaacaccactgacatcttccaaactgtggacctctgggaaggaaagaacatggcctgtgtgcagcggacgctgatgaatctgggtgggctggcagtagcccgagatgatgggctcttctctggggatcccaactggttccctaagaaatccaaggagaatcctcggaacttctcggataaccagctgcaagagggcaaggcctggggtgggatcagaggatctggcgtggcatcccgtagccagtcatgcctgcctgagacgccccgcggttggtg

SEQ ID NO: 443630 - DNA, 548 bp, Homo sapiens
ttagatcaggcatatgtactgaggcctcggtggttatgaaaatccccggctgggcagggcgcaccacttgcagctgcagcccttgccttgagtcagtgcgccgctctccagcccgcttgaacgctccccgcagccaccgccacccattggaatggccaacaggggacctgcatatggcctgagccgggaggtgcagcagaagattgagaaacaatatgatgcagatctggagcagatcctgatccagtggatcaccacccagtgccgaaaggatgtgggccggccccagcctggacgcgagaacttccagaactggctcaaggatggcacggtgctatgtgagctcattaatgcactgtaccccgaggggcaggccccagtaaagaagatccaggcctccaccatggccttcaagcagatggagcagatctctcagttcctgcaagcagctgagcgctatggcattaacaccactgacatcttccaaactgtggacctctgggaagaaagaacatggccccggtacattgcagggtacccgagctcga

SEQ ID NO: 443631 - DNA, 664 bp, Homo sapiens
ttagatcaggcatatgtactgaggcctcggtggttatgaaaatccccggctgggcagggcgcaccacttgcagctgcagcccttgccttgagtcagtgcgccgctctccagcccgcttgaacgctccccgcagccaccgccacccattggaatggccaacaggggacctgcatatggcctgagccgggaggtgcagcagaagattgagaaacaatatgatgcagatctggagcagatcctgatccagtggatcaccacccagtgccgaaaggatgtgggccggccccagcctggacgcgagaacttccagaactggctcaaggatggcacggtgctatgtgagctcattaatgcactgtaccccgaggggcaggccccagtaaagaagatccaggcctccaccatggccttcaagcagatggagcagatctctcagttcctgcaagcagctgagcgctatggcattaacaccactgtgactgtgctcaccacacatctggggcagccttccctggcaggggccctcgtggcttctcattttccattcccttcactgtggctaaggggtggggtgaggggatggagagggagggctgcctaccatggtctggggcttgaggaagatgagtttgttgatttaaataaagaatttgtcatttttgaa

SEQ ID NO: 443632 - DNA, 543 bp, Homo sapiens
ttagatcaggcatatgtactgaggcctcggtggttatgaaaatccccggctgggcagggcgcaccacttgcagctgcagcccttgccttgagtcagtgcgccgctctccagcccgcttgaacgctccccgcagccaccgccacccattggaatggccaacaggggacctgcatatggcctgagccgggaggtgcagcagaagattgagaaacaatatgatgcagatctggagcagatcctgatccagtggatcaccacccagtgccgaaaggatgtgggccggccccagcctggacgcgagaacttccagaactggctcaaggatggcacggtgctatgtgagctcattaatgcactgtaccccgaggggcaggccccagtaaagaagatccaggcctccaccatggccttcaagcagatggagcagatctctcagttcctgcaagcagctgagcgctatggcattaacaccactgctaccatggtctggggcttgaggaagatgagtttgttgatttaaataaagaatttgtcatttttgaa

SEQ ID NO: 443633 - DNA, 368 bp, Homo sapiens
ttagatcaggcatatgtactgaggcctcggtggttatgaaaatccccggctgggcagggcgcaccacttgcagctgcagcccttgccttgagtcagtgcgccgctctccagcccgcttgaacgctccccgcagccaccgccacccattggaatggccaacaggggacctgcatatggccttgactgtgctcaccacacatctggggcagccttccctggcaggggccctcgtggcttctcattttccattcccttcactgtggctaaggggtggggtgaggggatggagagggagggctgcctaccatggtctggggcttgaggaagatgagtttgttgatttaaataaagaatttgtcatttttgaa

SEQ ID NO: 443634 - DNA, 177 bp, Homo sapiens
ttagatcaggcatatgtactgaggcctcggtggttatgaaaatccccggctgggcagggcgcaccacttgcagctgcagcccttgccttgagtcagtgcgccgctctccagcccgcttgaacggtgagcaggtcgggggtacgggggtcggggacatgtgcgtgctgtgtagaaagc

SEQ ID NO: 443635 - DNA, 1400 bp, Homo sapiens
  misc_feature (1)..(2): n is a, c, g, or t
  misc_feature (5)..(5): n is a, c, g, or t
  misc_feature (7)..(8): n is a, c, g, or t
  misc_feature (16)..(16): n is a, c, g, or t
nnggngnnatcaaacntataggctaggtacgaggctgggtgtgttgcttgagtcagtgcgccgctctccagcccgcttgaacgctccccgcagccaccgccacccattggaatggccaacaggggacctgcatatggcctgagccgggaggtgcagcagaagattgagaaacaatatgatgcagatctggagcagatcctgatccagtggatcaccacccagtgccgaaaggatgtgggccggccccagcctggacgcgagaacttccagaactggctcaaggatggcacggtgctatgtgagctcattaatgcactgtaccccgaggggcaggccccagtaaagaagatccaggcctccaccatggccttcaagcagatggagcagatctctcagttcctgcaagcagctgagcgctatggcattaacaccactgacatcttccaaactgtggacctctgggaaggaaagaacatggcctgtgtgcagcggacgctgatgaatctgggtgggctggcagtagcccgagatgatgggctcttctctggggatcccaactggttccctaagaaatccaaggagaatcctcggaacttctcggataaccagctgcaagagggcaagaacgtgatcgggttacagatgggcaccaaccgcggggcgtctcaggcaggcatgactggctacgggatgccacgccagatcctctgatcccaccccaggccttgcccctgccctcccacgaatggttaatatatatgtagatatatattttagcagtgacattcccagagagccccagagctctcaagctcctttctgtcagggtggggggttcagcctgtcctgtcacctctgaggtgcctgctggcatcctctcccccatgcttactaatacattcccttccccatagccatcaaaactggaccaactggcctcttcctttcccctgggaccaaaatttaggggcctcagtccctcaccgccatgccctggcctattctgtctctccttcttccccctggcctgttctgtctctgagctctgtgtcctccgttcattccatggctgggagtcactgatgctgcctctgccttctgatgctggactggccttgcttctacaagtatgcttctcccacagctgtggctgcaggaacttaatttatagggaggagcctgtggcagctgctgccccagccacagctgcactgactgtgctcaccacacatctggggcagccttccctggcaggggccctcgtggcttctcattttccattcccttcactgtggctaaggggtggggtgaggggatggagagggagggctgcctaccatggtctggggcttgaggaagatgagtttgttgatttaaataaagaatttgtcatttttgaa

SEQ ID NO: 443636 - DNA, 1440 bp, Homo sapiens
ttagatcaggcatatgtactgaggcctcggtggttatgaaaatccccggctgggcagggcgcaccacttgcagctgcagcccttgccttgagtcagtgcgccgctctccagcccgcttgaacgctccccgcagccaccgccacccattggaatggccaacaggggacctgcatatggcctgagccgggaggtgcagcagaagattgagaaacaatatgatgcagatctggagcagatcctgatccagtggatcaccacccagtgccgaaaggatgtgggccggccccagcctggacgcgagaacttccagaactggctcaaggatggcacggtgctatgtgagctcattaatgcactgtaccccgaggggcaggccccagtaaagaagatccaggcctccaccatggccttcaagcagatggagcagatctctcagttcctgcaagcagctgagcgctatggcattaacaccactgacatcttccaaactgtggacctctgggaaggaaagaacatggcctgtgtgcagcggacgctgatgaatctgggtgggctggcagtagcccgagatgatgggctcttctctggggatcccaactggttccctaagaaatccaaggagaatcctcggaacttctcggataaccagctgcaagagggcaagaacgtgatcgggttacagatgggcaccaaccgcggggcgtctcaggcaggcatgactggctacgggatgccacgccagatcctctgatcccaccccaggccttgcccctgccctcccacgaatggttaatatatatgtagatatatattttagcagtgacattcccagagagccccagagctctcaagctcctttctgtcagggtggggggttcagcctgtcctgtcacctctgaggtgcctgctggcatcctctcccccatgcttactaatacattcccttccccatagccatcaaaactggaccaactggcctcttcctttcccctgggaccaaaatttaggggcctcagtccctcaccgccatgccctggcctattctgtctctccttcttccccctggcctgttctgtctctgagctctgtgtcctccgttcattccatggctgggagtcactgatgctgcctctgccttctgatgctggactggccttgcttctacaagtatgcttctcccacagctgtggctgcaggaacttaatttatagggaggagcctgtggcagctgctgccccagccacagctgcactgactgtgctcaccacacatctggggcagccttccctggcaggggccctcgtggcttctcattttccattcccttcactgtggctaaggggtggggtgaggggatggagagggagggctgcctaccatggtctggggcttgaggaagatgagtttgttgatttaaataaagaatttgtcatttttgaa

SEQ ID NO: 443637 - DNA, 1695 bp, Homo sapiens
  misc_feature (1459)..(1465): n is a, c, g, or t
  misc_feature (1546)..(1546): n is a, c, g, or t
  misc_feature (1548)..(1549): n is a, c, g, or t
  misc_feature (1551)..(1551): n is a, c, g, or t
  misc_feature (1554)..(1554): n is a, c, g, or t
  misc_feature (1557)..(1559): n is a, c, g, or t
  misc_feature (1561)..(1562): n is a, c, g, or t
  misc_feature (1565)..(1566): n is a, c, g, or t
  misc_feature (1568)..(1568): n is a, c, g, or t
  misc_feature (1571)..(1572): n is a, c, g, or t
  misc_feature (1580)..(1581): n is a, c, g, or t
  misc_feature (1608)..(1608): n is a, c, g, or t
  misc_feature (1691)..(1691): n is a, c, g, or t
ttagatcaggcatatgtactgaggcctcggtggttatgaaaatccccggctgggcagggcgcaccacttgcagctgcagcccttgccttgagtcagtgcgccgctctccagcccgcttgaacgctccccgcagccaccgccacccattggaatggccaacaggggacctgcatatggcctgagccgggaggtgcagcagaagattgagaaacaatatgatgcagatctggagcagatcctgatccagtggatcaccacccagtgccgaaaggatgtgggccggccccagcctggacgcgagaacttccagaactggctcaaggatggcacggtgctatgtgagctcattaatgcactgtaccccgaggggcaggccccagtaaagaagatccaggcctccaccatggccttcaagcagatggagcagatctctcagttcctgcaagcagctgagcgctatggcattaacaccactgacatcttccaaactgtggacctctgggaaggaaagaacatggcctgtgtgcagcggacgctgatgaatctgggtgggctggcagtagcccgagatgatgggctcttctctggggatcccaactggttccctaagaaatccaaggagaatcctcggaacttctcggataaccagctgcaagagggcaagaacgtgatcgggttacagatgggcaccaaccgcggggcgtctcaggcaggcatgactggctacgggatgccacgccagatcctctgatcccaccccaggccttgcccctgccctcccacgaatggttaatatatatgtagatatatattttagcagtgacattcccagagagccccagagctctcaagctcctttctgtcagggtggggggttcagcctgtcctgtcacctctgaggtgcctgctggcatcctctcccccatgcttactaatacattcccttccccatagccatcaaaactggaccaactggcctcttcctttcccctgggaccaaaatttaggggcctcagtccctcaccgccatgccctggcctattctgtctctccttcttccccctggcctgttctgtctctgagctctgtgtcctccgttcattccatggctgggagtcactgatgctgcctctgccttctgatgctggactggccttgcttctacaagtatgcttctcccacagctgtggctgcaggaacttaatttatagggaggagcctgtggcagctgctgccccagccacagctgcactgactgtgctcaccacacatctggggcagccttccctggcaggggccctcgtggcttctcattttccattcccttcactgtggctaaggggtggggtgaggggatggagagggagggctgcctaccatggtctggggcttgaggaagatgagtttgttgatttaaataaagaatttgtcatttttgaaaaaaaaaaaaaaaaaaaannnnnnnaaaaaaaaaaaaaaaaaaaaaaaaaaaaaaaaaaaaaaaaaaaaaaaacaaaacaaaaaaaaaacaacccaaaaaaaaaantnnantanaannnannaanntnaanntttttttnnaattttttttttttttaatttcttctnttttttttttttttttttttttttttttttttttttttttttttttttttttttttttttttttttttttttttttttttttntttt

SEQ ID NO: 443638 - DNA, 1927 bp, Homo sapiens
ttagatcaggcatatgtactgaggcctcggtggttatgaaaatccccggctgggcagggcgcaccacttgcagctgcagcccttgccttgagtcagtgcgccgctctccagcccgcttgaacgctccccgcagccaccgccacccattggaatggccaacaggggacctgcatatggcctgagccgggaggtgcagcagaagattgagaaacaatatgatgcagatctggagcagatcctgatccagtggatcaccacccagtgccgaaaggatgtgggccggccccagcctggacgcgagaacttccagaactggctcaaggatggcacggtgctatgtgagctcattaatgcactgtaccccgaggggcaggccccagtaaagaagatccaggcctccaccatggccttcaagcagatggagcagatctctcagttcctgcaagcagctgagcgctatggcattaacaccactgacatcttccaaactgtggacctctgggaaggaaagaacatggcctgtgtgcagcggacgctgatgaatctgggtgggctggcagtagcccgagatgatgggctcttctctggggatcccaactggttccctaagaaatccaaggagaatcctcggaacttctcggataaccagctgcaagagggcaagaacgtgatcgggttacagatgggcaccaaccgcggggcgtctcaggcaggcatgactggctacgggatgccacgccagatcctctgatcccaccccaggccttgcccctgccctcccacgaatggttaatatatatgtagatatatattttagcagtgacattcccagagagccccagagctctcaagctcctttctgtcagggtggggggttcagcctgtcctgtcacctctgaggtgcctgctggcatcctctcccccatgcttactaatacattcccttccccatagccatcaaaactggaccaactggcctcttcctttcccctgggaccaaaatttaggggcctcagtccctcaccgccatgccctggcctattctgtctctccttcttccccctggcctgttctgtctctgagctctgtgtcctccgttcattccatggctgggagtcactgatgctgcctctgccttctgatgctggactggccttgcttctacaagtatgcttctcccacagctgtggctgcaggaacttaatttatagggaggagcctgtggcagctgctgccccagccacagctgcactgactgtgctcaccacacatctggggcagccttccctggcaggggccctcgtggcttctcattttccattcccttcactgtggctaaggggtggggtgaggggatggagagggagggctgcctaccatggtctggggcttgaggaagatgagtttgttgatttaaataaagaatttgtcatttttgaaaaaaaaaaaaaaaaaaaaaaaaaaaaaaaaaaaaaaaaaaaaaacaaaacaaaaaaaaaacacaacgcgcgtgtgtgcgcgcgcgcgcgccgcgcgcgcgcccgccgagaagaaacttttcataacacaccccatcgtgggtgaggggcgcgggggcggcgcccccacagggtaggcggacaccgcgtgggccacaagcgggggtcccccagaggaaagacacgccgggcgccagcacgacgacgacggcgggggtgggattctctcaccaaccaataataaaaaaagcaggcgcgcgggggggggaaaaacacgcgagcgggttttcgcgacgaaacaacactccgaagagaggggaagctgcagagagaagggctacgcaacgaggggggtacttcacaatcacacgcgaggagaggcccgccaggagggaagagccgcggtaatacatctaaaatatagccccccggcgcggggcggagaacac

SEQ ID NO: 443639 - DNA, 1442 bp, Homo sapiens
ttagatcaggcatatgtactgaggcctcggtggttatgaaaatccccggctgggcagggcgcaccacttgcagctgcagcccttgccttgagtcagtgcgccgctctccagcccgcttgaacgctccccgcagccaccgccacccattggaatggccaacaggggacctgcatatggcctgagccgggaggtgcagcagaagattgagaaacaatatgatgcagatctggagcagatcctgatccagtggatcaccacccagtgccgaaaggatgtgggccggccccagcctggacgcgagaacttccagaactggctcaaggatggcacggtgctatgtgagctcattaatgcactgtaccccgaggggcaggccccagtaaagaagatccaggcctccaccatggccttcaagcagatggagcagatctctcagttcctgcaagcagctgagcgctatggcattaacaccactgacatcttccaaactgtggacctctgggaaggaaagaacatggcctgtgtgcagcggacgctgatgaatctgggtgggctggcagtagcccgagatgatgggctcttctctggggatcccaactggttccctaagaaatccaaggagaatcctcggaacttctcggataaccagctgcaagagggcaagaacgtgatcgggttacagatgggcaccaaccgcggggcgtctcaggcaggcatgactggctacgggatgccacgccagatcctctgatcccaccccaggccttgcccctgccctcccacgaatggttaatatatatgtagatatatattttagcagtgacattcccagagagccccagagctctcaagctcctttctgtcagggtggggggttcagcctgtcctgtcacctctgaggtgcctgctggcatcctctcccccatgcttactaatacattcccttccccatagccatcaaaactggaccaactggcctcttcctttcccctgggaccaaaatttaggggcctcagtccctcaccgccatgccctggcctattctgtctctccttcttccccctggcctgttctgtctctgagctctgtgtcctccgttcattccatggctgggagtcactgatgctgcctctgccttctgatgctggactggccttgcttctacaagtatgcttctcccacagctgtggctgcaggaacttaatttatagggaggagcctgtggcagctgctgccccagccacagctgcactgactgtgctcaccacacatctggggcagccttccctggcaggggccctcgtggcttctcattttccattcccttcactgtggctaaggggtggggtgaggggatggagagggagggctgcctaccatggtctggggctgagaataccgcgttgtatttatagatttttgtgttgtgtgtgattggaagt

SEQ ID NO: 443640 - DNA, 1420 bp, Homo sapiens
ttagatcaggcatatgtactgaggcctcggtggttatgaaaatccccggctgggcagggcgcaccacttgcagctgcagcccttgccttgagtcagtgcgccgctctccagcccgcttgaacgctccccgcagccaccgccacccattggaatggccaacaggggacctgcatatggcctgagccgggaggtgcagcagaagattgagaaacaatatgatgcagatctggagcagatcctgatccagtggatcaccacccagtgccgaaaggatgtgggccggccccagcctggacgcgagaacttccagaactggctcaaggatggcacggtgctatgtgagctcattaatgcactgtaccccgaggggcaggccccagtaaagaagatccaggcctccaccatggccttcaagcagatggagcagatctctcagttcctgcaagcagctgagcgctatggcattaacaccactgacatcttccaaactgtggacctctgggaaggaaagaacatggcctgtgtgcagcggacgctgatgaatctgggtgggctggcagtagcccgagatgatgggctcttctctggggatcccaactggttccctaagaaatccaaggagaatcctcggaacttctcggataaccagctgcaagagggcaagaacgtgatcgggttacagatgggcaccaaccgcggggcgtctcaggcaggcatgactggctacgggatgccacgccagatcctctgatcccaccccaggccttgcccctgccctcccacgaatggttaatatatatgtagatatatattttagcagtgacattcccagagagccccagagctctcaagctcctttctgtcagggtggggggttcagcctgtcctgtcacctctgaggtgcctgctggcatcctctcccccatgcttactaatacattcccttccccatagccatcaaaactggaccaactggcctcttcctttcccctgggaccaaaatttaggggcctcagtccctcaccgccatgccctggcctattctgtctctccttcttccccctggcctgttctgtctctgagctctgtgtcctccgttcattccatggctgggagtcactgatgctgcctctgccttctgatgctggactggccttgcttctacaagtatgcttctcccacagctgtggctgcaggaactgtggcagctgctgccccagccacagctgcactgactgtgctcaccacacatctggggcagccttccctggcaggggccctcgtggcttctcattttccattcccttcactgtggctaaggggtggggtgaggggatggagagggagggctgcctaccatggtctggggcttgaggaagatgagtttgttgatttaaataaagaatttgtcatttttgaa

SEQ ID NO: 443641 - DNA, 1395 bp, Homo sapiens
ttagatcaggcatatgtactgaggcctcggtggttatgaaaatccccggctgggcagggcgcaccacttgcagctgcagcccttgccttgagtcagtgcgccgctctccagcccgcttgaacgctccccgcagccaccgccacccattggaatggccaacaggggacctgcatatggcctgagccgggaggtgcagcagaagattgagaaacaatatgatgcagatctggagcagatcctgatccagtggatcaccacccagtgccgaaaggatgtgggccggccccagcctggacgcgagaacttccagaactggctcaaggatggcacggtgctatgtgagctcattaatgcactgtaccccgaggggcaggccccagtaaagaagatccaggcctccaccatggccttcaagcagatggagcagatctctcagttcctgcaagcagctgagcgctatggcattaacaccactgacatcttccaaactgtggacctctgggaaggaaagaacatggcctgtgtgcagcggacgctgatgaatctgggtgggctggcagtagcccgagatgatgggctcttctctggggatcccaactggttccctaagaaatccaaggagaatcctcggaacttctcggataaccagctgcaagagggcaagaacgtgatcgggttacagatgggcaccaaccgcggggcgtctcaggcaggcatgactggctacgggatgccacgccagatcctctgatcccaccccaggccttgcccctgccctcccacgaatggttaatatatatgtagatatatattttagcagtgacattcccagagagccccagagctctcaagctcctttctgtcagggtggggggttcagcctgtcctgtcacctctgaggtgcctgctggcatcctctcccccatgcttactaatacattcccttccccatagccatcaaaactggaccaactggcctcttcctttcccctgggaccaaaatttaggggcctcagtccctcaccgccatgccctggcctattctgtctctccttcttccccctggcctgttctgtctctgagctcctgccttctgatgctggactggccttgcttctacaagtatgcttctcccacagctgtggctgcaggaacttaatttatagggaggagcctgtggcagctgctgccccagccacagctgcactgactgtgctcaccacacatctggggcagccttccctggcaggggccctcgtggcttctcattttccattcccttcactgtggctaaggggtggggtgaggggatggagagggagggctgcctaccatggtctggggcttgaggaagatgagtttgttgatttaaataaagaatttgtcatttttgaa

SEQ ID NO: 443642 - DNA, 1109 bp, Homo sapiens
ttagatcaggcatatgtactgaggcctcggtggttatgaaaatccccggctgggcagggcgcaccacttgcagctgcagcccttgccttgagtcagtgcgccgctctccagcccgcttgaacgctccccgcagccaccgccacccattggaatggccaacaggggacctgcatatggcctgagccgggaggtgcagcagaagattgagaaacaatatgatgcagatctggagcagatcctgatccagtggatcaccacccagtgccgaaaggatgtgggccggccccagcctggacgcgagaacttccagaactggctcaaggatggcacggtgctatgtgagctcattaatgcactgtaccccgaggggcaggccccagtaaagaagatccaggcctccaccatggccttcaagcagatggagcagatctctcagttcctgcaagcagctgagcgctatggcattaacaccactgacatcttccaaactgtggacctctgggaaggaaagaacatggcctgtgtgcagcggacgctgatgaatctgggtgggctggcagtagcccgagatgatgggctcttctctggggatcccaactggttccctaagaaatccaaggagaatcctcggaacttctcggataaccagctgcaagagggcaagaacgtgatcgggttacagatgggcaccaaccgcggggcgtctcaggcaggcatgactggctacgggatgccacgccagatcctctgatcccaccccaggccttgcccctgccctcccacgaatggttaatatatatgtagatatatattttagcagtgacattcccagagagccccagagctctcaagctcctttctgtcagggtggggggttcagcctgtcctgtcacctctgaggtgcctgctggcatcctctcccccatgcttactaatacattcccttccccatagccatcaaaactggaccaactggcctcttcctttcccctgggaccaaaatttaggggcctcagtccctcaccgccatgccctggcctatctaccatggtctggggcttgaggaagatgagtttgttgatttaaataaagaatttgtcatttttgaa

SEQ ID NO: 443643 - DNA, 1233 bp, Homo sapiens
  misc_feature (993)..(993): n is a, c, g, or t
  misc_feature (1003)..(1003): n is a, c, g, or t
  misc_feature (1039)..(1039): n is a, c, g, or t
  misc_feature (1046)..(1046): n is a, c, g, or t
  misc_feature (1151)..(1151): n is a, c, g, or t
  misc_feature (1205)..(1205): n is a, c, g, or t
ttagatcaggcatatgtactgaggcctcggtggttatgaaaatccccggctgggcagggcgcaccacttgcagctgcagcccttgccttgagtcagtgcgccgctctccagcccgcttgaacgctccccgcagccaccgccacccattggaatggccaacaggggacctgcatatggcctgagccgggaggtgcagcagaagattgagaaacaatatgatgcagatctggagcagatcctgatccagtggatcaccacccagtgccgaaaggatgtgggccggccccagcctggacgcgagaacttccagaactggctcaaggatggcacggtgctatgtgagctcattaatgcactgtaccccgaggggcaggccccagtaaagaagatccaggcctccaccatggccttcaagcagatggagcagatctctcagttcctgcaagcagctgagcgctatggcattaacaccactgacatcttccaaactgtggacctctgggaaggaaagaacatggcctgtgtgcagcggacgctgatgaatctgggtgggctggcagtagcccgagatgatgggctcttctctggggatcccaactggttccctaagaaatccaaggagaatcctcggaacttctcggataaccagctgcaagagggcaagaacgtgatcgggttacagatgggcaccaaccgcggggcgtctcaggcaggcatgactggctacgggatgccacgccagatcctctgatcccaccccaggccttgcccctgccctcccacgaatggttaatatatatgtagatatatattttagcagtgacattcccagagagccccagagctctcaagctcctttctgtcagggtggggggttcagcctgtcctgtcacctctgaggtgcctgctggcatcctctcccccatgcttactaatacattcccttccccatagccatctcccccctccccccctcccccccccccccccccnccgaccccantctcggccctcctcccccccccccctcccctgcccnattctgnctctccttcttccccccccccccttctcccccccccccccgtccccccccccccttccctccccccccccccctcctccccccccccccccccccctcccccccnccccccccccccccccccccgccccccccccccccctccccccccccccccccntcctcggcgccccccccccccccccccc

SEQ ID NO: 443644 - DNA, 993 bp, Homo sapiens
ttagatcaggcatatgtactgaggcctcggtggttatgaaaatccccggctgggcagggcgcaccacttgcagctgcagcccttgccttgagtcagtgcgccgctctccagcccgcttgaacgctccccgcagccaccgccacccattggaatggccaacaggggacctgcatatggcctgagccgggaggtgcagcagaagattgagaaacaatatgatgcagatctggagcagatcctgatccagtggatcaccacccagtgccgaaaggatgtgggccggccccagcctggacgcgagaacttccagaactggctcaaggatggcacggtgctatgtgagctcattaatgcactgtaccccgaggggcaggccccagtaaagaagatccaggcctccaccatggccttcaagcagatggagcagatctctcagttcctgcaagcagctgagcgctatggcattaacaccactgacatcttccaaactgtggacctctgggaaggaaagaacatggcctgtgtgcagcggacgctgatgaatctgggtgggctggcagtagcccgagatgatgggctcttctctggggatcccaactggttccctaagaaatccaaggagaatcctcggaacttctcggataaccagctgcaagagggcaagaacgtgatcgggttacagatgggcaccaaccgcggggcgtctcaggcaggcatgactggctacgggatgccacgccagatcctctgatcccaccccaggccttgcccctgccctcccacgaatggttaatatatatgtagatatatattttagcagtgacattcccagagagccccagagctctcaagctcctttctgtcagggtggggggttcagcctgtcctgtcacctctgaggtgcctgctggcatcctctcccccatgcttactaatacattcccttccccatagccatctgggacacccctcgagcctggacacccctcgtgc

SEQ ID NO: 443645 - DNA, 1772 bp, Homo sapiens
ttagatcaggcatatgtactgaggcctcggtggttatgaaaatccccggctgggcagggcgcaccacttgcagctgcagcccttgccttgagtcagtgcgccgctctccagcccgcttgaacgctccccgcagccaccgccacccattggaatggccaacaggggacctgcatatggcctgagccgggaggtgcagcagaagattgagaaacaatatgatgcagatctggagcagatcctgatccagtggatcaccacccagtgccgaaaggatgtgggccggccccagcctggacgcgagaacttccagaactggctcaaggatggcacggtgctatgtgagctcattaatgcactgtaccccgaggggcaggccccagtaaagaagatccaggcctccaccatggccttcaagcagatggagcagatctctcagttcctgcaagcagctgagcgctatggcattaacaccactgacatcttccaaactgtggacctctgggaaggaaagaacatggcctgtgtgcagcggacgctgatgaatctgggtgggctggcagtagcccgagatgatgggctcttctctggggatcccaactggttccctaagtaagtattgctgggacagccgcagggtccagcaggtgcattgtttctgcccaatcctgtccctaggaaataacttatctcagtagcagctggccctttacaaagcactttcagaaaattcctcatctcacttaatcctcacaacaccctctgggatggcaaatgactgtccctttggacagatgaggaggtggcttcagagagcttatggctctcgagggcagagctggcaccagcccttgagccaacagcaaagcctgtgctctgtccaaggaagggatttactagggcagcctgtgatctcctctaaccaccactcccttgtcacccaggaaatccaaggagaatcctcggaacttctcggataaccagctgcaagagggcaagaacgtgatcgggttacagatgggcaccaaccgcggggcgtctcaggcaggcatgactggctacgggatgccacgccagatcctctgatcccaccccaggccttgcccctgccctcccacgaatggttaatatatatgtagatatatattttagcagtgacattcccagagagccccagagctctcaagctcctttctgtcagggtggggggttcagcctgtcctgtcacctctgaggtgcctgctggcatcctctcccccatgcttactaatacattcccttccccatagccatcaaaactggaccaactggcctcttcctttcccctgggaccaaaatttaggggcctcagtccctcaccgccatgccctggcctattctgtctctccttcttccccctggcctgttctgtctctgagctctgtgtcctccgttcattccatggctgggagtcactgatgctgcctctgccttctgatgctggactggccttgcttctacaagtatgcttctcccacagctgtggctgcaggaacttaatttatagggaggagcctgtggcagctgctgccccagccacagctgcactgactgtgctcaccacacatctggggcagccttccctggcaggggccctcgtggcttctcattttccattcccttcactgtggctaaggggtggggtgaggggatggagagggagggctgcctaccatggtctggggcttgaggaagatgagtttgttgatttaaataaagaatttgtcatttttgaa

SEQ ID NO: 443646 - DNA, 1278 bp, Homo sapiens
ttagatcaggcatatgtactgaggcctcggtggttatgaaaatccccggctgggcagggcgcaccacttgcagctgcagcccttgccttgagtcagtgcgccgctctccagcccgcttgaacgctccccgcagccaccgccacccattggaatggccaacaggggacctgcatatggcctgagccgggaggtgcagcagaagattgagaaacaatatgatgcagatctggagcagatcctgatccagtggatcaccacccagtgccgaaaggatgtgggccggccccagcctggacgcgagaacttccagaactggctcaaggatggcacggtgctatgtgagctcattaatgcactgtaccccgaggggcaggccccagtaaagaagatccaggcctccaccatggccttcaagcagatggagcagatctctcagttcctgcaagcagctgagcgctatggcattaacaccactgacatcttccaaactgtggacctctgggaaggaaagaacatggcctgtgtgcagcggacgctgatgaatctgggtgggctggcagtagcccgagatgatgggctcttctctggggatcccaactggttccctaagaaatccaaggagaatcctcggaacttctcggataaccagctgcaagagggcaagaacgtgatcgggttacagatgggcaccaactttctgtcagggtggggggttcagcctgtcctgtcacctctgaggtgcctgctggcatcctctcccccatgcttactaatacattcccttccccatagccatcaaaactggaccaactggcctcttcctttcccctgggaccaaaatttaggggcctcagtccctcaccgccatgccctggcctattctgtctctccttcttccccctggcctgttctgtctctgagctctgtgtcctccgttcattccatggctgggagtcactgatgctgcctctgccttctgatgctggactggccttgcttctacaagtatgcttctcccacagctgtggctgcaggaacttaatttatagggaggagcctgtggcagctgctgccccagccacagctgcactgactgtgctcaccacacatctggggcagccttccctggcaggggccctcgtggcttctcattttccattcccttcactgtggctaaggggtggggtgaggggatggagagggagggctgcctaccatggtctggggcttgaggaagatgagtttgttgatttaaataaagaatttgtcatttttgaa

SEQ ID NO: 443647 - DNA, 1141 bp, Homo sapiens
  misc_feature (1141)..(1141): n is a, c, g, or t
ttagatcaggcatatgtactgaggcctcggtggttatgaaaatccccggctgggcagggcgcaccacttgcagctgcagcccttgccttgagtcagtgcgccgctctccagcccgcttgaacgctccccgcagccaccgccacccattggaatggccaacaggggacctgcatatggcctgagccgggaggtgcagcagaagattgagaaacaatatgatgcagatctggagcagatcctgatccagtggatcaccacccagtgccgaaaggatgtgggccggccccagcctggacgcgagaacttccagaactggctcaaggatggcacggtgctatgtgagctcattaatgcactgtaccccgaggggcaggccccagtaaagaagatccaggcctccaccatggccttcaagcagatggagcagatctctcagttcctgcaagcagctgagcgctatggcattaacaccactgacatcttccaaactgtggacctctgggaaggaaagaacatggcctgtgtgcagcggacgctgatgaatctgggtgggctggcagtagcccgagatgatgggctcttctctggggatcccaactggttccctaagaaatccaaggagaatcctcggaacttctcggataaccagctgcaagagggcaagaacgtgatcgggttacagatgggcaccaaccgcggggcgtctcaggcaggcatgactggctacgggatgccacgccagatcctctgatcccaccccaccagaatcacaaccgacagcacgcaccagacacacacaagcaaggaacacacacacgaaaaacaaccacacaagacaacacaacaaacccagacaaacacagcacaacagccagagaagaaacagacagacgaacaacagagagccaacgacaacagacacagaacacacacaacagaacaaaaatgaaagacacgacatcaacccgagaacaacaagcgggaactacagacagccgagagactgacacaaaacagacagacgaaagacaaagcaacaacaagagagagaagcaacaaaaacgacgcagacaacaacgaaggaacacaaaacgcagacgaaaaacagcacaccagaaaaaagagaagcagcatacaccan

SEQ ID NO: 443648 - DNA, 1033 bp, Homo sapiens
  misc_feature (1)..(2): n is a, c, g, or t
  misc_feature (5)..(5): n is a, c, g, or t
  misc_feature (7)..(8): n is a, c, g, or t
  misc_feature (16)..(16): n is a, c, g, or t
nnggngnnatcaaacntataggctaggtacgaggctgggtgtgttgcttgagtcagtgcgccgctctccagcccgcttgaacgctccccgcagccaccgccacccattggaatggccaacaggggacctgcatatggcctgagccgggaggtgcagcagaagattgagaaacaatatgatgcagatctggagcagatcctgatccagtggatcaccacccagtgccgaaaggatgtgggccggccccagcctggacgcgagaacttccagaactggctcaaggatggcacggtgctatgtgagctcattaatgcactgtaccccgaggggcaggccccagtaaagaagatccaggcctccaccatggccttcaagcagatggagcagatctctcagttcctgcaagcagctgagcgctatggcattaacaccactgacatcttccaaactgtggacctctgggaaggaaagaacatggcctgtgtgcagcggacgctgatgaatctgggtgggctggcagtagcccgagatgatgggctcttctctggggatcccaactggttccctaagaaatccaaggagaatcctcggaacttctcggataaccagctgcaagagggcaagaacgtgatcgggttacagatgggcaccaaccgcggggcgtctcaggcaggcatgactggctacgggatgccacgccagatcctctgatcccaccccatgcatccagaatggtaagtcctaactgtagaactacaaacaaccgaagggacacgtccatgaaaggcccagagatcacaagccagtactgaaaggtggggggtcagacgagcagcaccataggaggtacagcagaagcgcacccgaggaacaacgaacgagcatacccagagacgaaacacggaccgcggccacgcctacccgcggacacaaacgggccacaaccacgcagcacggcggcaaaccgagcaccaagaccacgcagcaaggcgcgcgaaccaaaccagcgaagagaacgaaccagaaccaagag

SEQ ID NO: 443649 - DNA, 660 bp, Homo sapiens
ttagatcaggcatatgtactgaggcctcggtggttatgaaaatccccggctgggcagggcgcaccacttgcagctgcagcccttgccttgagtcagtgcgccgctctccagcccgcttgaacgctccccgcagccaccgccacccattggaatggccaacaggggacctgcatatggcctgagccgggaggtgcagcagaagattgagaaacaatatgatgcagatctggagcagatcctgatccagtggatcaccacccagtgccgaaaggatgtgggccggccccagcctggacgcgagaacttccagaactggctcaaggatggcacggtgctatgtgagctcattaatgcactgtaccccgaggggcaggccccagtaaagaagatccaggcctccaccatggccttcaagcagatggagcagatctctcagttcctgcaagcagctgagcgctatggcattaacaccactgacatcttccaaactgtggacctctgggaaggaaagaacatggcctgtgtgcagcggacgctgatgaatctgggtgggctggcagtagcccgagatgatgggctcttctctggggatcccaactggttccctaagaatccagagatcctcgggatcctctaggtcacctcgcatgcagcttcccc

SEQ ID NO: 443650 - DNA, 583 bp, Homo sapiens
  misc_feature (550)..(550): n is a, c, g, or t
ttagatcaggcatatgtactgaggcctcggtggttatgaaaatccccggctgggcagggcgcaccacttgcagctgcagcccttgccttgagtcagtgcgccgctctccagcccgcttgaacgctccccgcagccaccgccacccattggaatggccaacaggggacctgcatatggcctgagccgggaggtgcagcagaagattgagaaacaatatgatgcagatctggagcagatcctgatccagtggatcaccacccagtgccgaaaggatgtgggccggccccagcctggacgcgagaacttccagaactggctcaaggatggcacggtgctatgtgagctcattaatgcactgtaccccgaggggcaggccccagtaaagaagatccaggcctccaccatggccttcaagcagatggagcagatctctcagttcctgcaagcagctgagcgctatggcattaacaccactgacatcttccaaactgtggacctctgggaagaaagaacatggcctgtgtgcagcggcgttggatgcagtcagcgncgttggatagcagtcagcggcgttgatgcagtc

SEQ ID NO: 443651 - DNA, 351 bp, Homo sapiens
gggaattaggtgatcctgtagatccttccaactttatgatttttagagattttatttttgcccaagtcatcagtaagtatgaggacattttttttgtgtttttccaagtgggttgtttaaaattttttcctttttttattcctcttcccaaggcaaatgaaaaaaaagttgaccagcctccagaagctaaaaagcccattagggaaagaccttcttaacatgtatattgagacagaggtaagtacttcaattaaatatttttattttgaaatatgtttagtttcttggccctgatatctatatttctagtagataaatggccataattctttctcatcccaagttttatat

SEQ ID NO: 443652 - DNA, 255 bp, Homo sapiens
gcagggaaaaaaaggaatgaaacagtgataaaattctagtgtgtttgttcagagctttagtgatagttttcactgtctttgagtttatcttgcagattttgaaatctttaaagtctgtcgtcacactattttgcctcttgttccctcttgctgcttactttctggcattttctataggagaaggaaaaagtataaataaaatctgttcatagatgggaaattcagtgaaattggtgggcctcagggcaacttatg

SEQ ID NO: 443653 - DNA, 198 bp, Homo sapiens
gaaactctgtctcaaagaaaaaaaaaaatgtatctgcccttgactagttttcaactaatggcatagatcattctataaacagataatgttagagatacgtatctctaacattgaccttccactgaatatcgaatgctttatgaatgataaagatgtttccggaaagatgaacaggtgtgtcttgaattctacagatta

SEQ ID NO: 443654 - DNA, 5270 bp, Homo sapiens
tgagtaaatgccgcagattctggaaagttctgatcagtgcgatacataaggctgaggaagtgggacctccccttttgggtcggtagttcagcgccggcgccggtgtgcgagccgcggcagagtgaggcaggcaacccgaggtgcggagcgacctgcggaggctgagccccgctttctcccagggtttcttatcagccagccgccgctgtccccgggggagtaggaggctcctgacaggccgcggctgtctgtgtgtccttctgagtgtcagaggaacggccagaccccgcgggccggagcagaacgcggccagggcagaaagcggcggcaggagaagcaggcagggggccggaggacgcagaccgagacccgaggcggaggcggaccgcgagccggccatgtcggtggtggggttggacgtgggctcgcagagctgctacatcgcggtagcccgggccgggggcatcgagaccatcgccaatgagttcagcgaccggtgcaccccgtcagtcatatcatttggatcaaaaaatagaacaatcggagttgcagccaaaaatcagcaaatcactcatgcaaacaatacggtgtctaacttcaaaagatttcatggccgagcattcaatgaccccttcattcaaaaggagaaggaaaacttgagttacgatttggttccattgaaaaatggtggagttggaataaaggtaatgtacatgggtgaagaacatctatttagtgtggagcagataacagccatgttgttgactaagctgaaggaaactgctgaaaacagcctcaagaaaccagtaacagattgtgttatttcagtcccctccttctttacagatgctgagaggcgatctgtgttagatgctgcacagattgttggcctaaactgtttaagacttatgaatgacatgacagctgttgctttgaattacggaatttataagcaggatctcccaagcctggatgagaaacctcggatagtggtttttgttgatatgggacattcagcttttcaagtgtctgcttgtgcttttaacaagggaaaattgaaggtactgggaacagcttttgatcctttcttaggaggaaaaaacttcgatgaaaagttagtggaacatttttgtgcagaatttaaaactaagtacaagttggatgcaaaatccaaaatacgagcactcctacgtctgtatcaggaatgtgaaaaactgaaaaagctaatgagctctaacagcacagaccttccactgaatatcgaatgctttatgaatgataaagatgtttccggaaagatgaacaggtcacaatttgaagaactctgtgctgaacttctgcaaaagatagaagtacccctttattcactgttggaacaaactcatctcaaagtagaagatgtgagtgcagttgagattgttggaggcgctacacgaattccagctgtgaaggaaagaattgccaaattctttggaaaagatattagcacaacactcaatgcagatgaagcagtagccagaggatgtgcattacagtgtgcaatactttccccggcatttaaagttagagaattttccgtcacagatgcagttccttttccaatatctctgatctggaaccatgattcagaagatactgaaggtgttcatgaagtctttagtcgaaaccatgctgctcctttctccaaagttctcacctttctgagaagggggccttttgagctagaagctttctattctgatccccaaggagttccatatccagaagcaaaaataggccgctttgtagttcagaatgtttctgcacagaaagatggagaaaaatctagagtaaaagtcaaagtgcgagtcaacacccatggcattttcaccatctctacggcatctatggtggagaaagtcccaactgaggagaatgaaatgtcttctgaagctgacatggagtgtctgaatcagagaccaccagaaaacccagacactgataaaaatgtccagcaagacaacagtgaagctggaacacagccccaggtacaaactgatgctcaacaaacctcacagtctcccccttcacctgaacttacctcagaagaaaacaaaatcccagatgctgacaaagcaaatgaaaaaaaagttgaccagcctccagaagctaaaaagcccaaaataaaggtggtgaatgttgagctgcctattgaagccaacttggtctggcagttagggaaagaccttcttaacatgtatattgagacagagggtaagatgataatgcaagataaattggaaaaagaaaggaatgatgctaaaaatgcagttgaggaatatgtgtatgagttcagagacaagctgtgtggaccatatgaaaaatttatatgtgagcaggatcatcaaaattttttgagactcctcacagaaactgaagactggctgtatgaagaaggagaggaccaagctaaacaagcatatgttgacaagttggaagaattaatgaaaattggcactccagttaaagttcggtttcaggaagctgaagaacggccaaaaatgtttgaagaactaggacagaggctgcagcattatgccaagatagcagctgacttcagaaataaggatgagaaatacaaccatattgatgagtctgaaatgaaaaaagtggagaagtctgttaatgaagtgatggaatggatgaataatgtcatgaatgctcaggctaaaaagagtcttgatcaggatccagttgtacgtgctcaggaaattaaaacaaaaatcaaggaattgaacaacacatgtgaacccgttgtaacacaaccgaaaccaaaaattgaatcacccaaactggaaagaactccaaatggcccaaatattgataaaaaggaagaagatttagaagacaaaaacaattttggtgctgaacctccacatcagaatggtgaatgttaccctaatgagaaaaattctgttaatatggacttggactagataaccttaaattggcctattccttcaattaataaaatatttttgccatagtatgtgactctacataacatactgaaactatttatattttcttttttaaggatatttagaaattttgtgtattatatggaaaaagaaaaaaagcttaagtctgtagtctttatgatcctaaaagggaaaattgccttggtaactttcagattcctgtggaattgtgaattcatactaagctttctgtgcagtctcaccatttgcatcactgaggatgaaactgacttttgtcttttggagaaaaaaaactgtactgcttgttcaagagggctgtgattaaaatctttaagcatttgttcctgccaaggtagttttcttgcattttgctctccattcagcatgtgtgtgggtgtggatgtttataaacaagactaagtctgacttcataagggctttctaaaaccatttctgtccaagagaaaatgactttttgctttgatattaaaaattcaatgagtaaaacaaaagctagtcaaatgtgttagcagcatgcagaacaaaaactttaaactttctctctcactatacagtatattgtcatgtgaaagtgtggaatggaagaaatgtcgatcctgttgtaactgattgtgaacacttttatgagctttaaaataaagttcatcttatggtgtcatttctaaactgttgattttgtcactaatttaaaaaatgagatgagggagaatatgaattattctagcagaaatgaagttagtgtccagtttttcttttttactgcttatgttctctcttttctaagtgaaaatgtttttctcctgacagaaaaatagcatatgtttattacattaaagcattttaaaaatactataaagtgaataaaacttaaaatcttgccacccagaagaaaacattgttaacacttcgttatacatccttggagccttttacccctaatgatgggggtatatttgtgtgagtgtctatgttatagtgctgtaggctgtttttaaaaactctgtgccagggaaattagtaaatacagtcaagtgttgtaactgcataaatgtagtgagttcattataaagacatacttaaaaataccaatcttgctattggtagatttaggtgtttctcatttttgctgttctaaataatgctgcaatgaatctatctggttgttttgtaagcacaaaattgaagtagtgttggaggtaggggagaagacacatgcacttaggataggtgacaaccagctcctcactagggtgcaacagtttattctttttttttttttggtagagctggggtttcgctatgttgcccaagttcgtcttgaactcctgggctcaagcaatctgtctgcctcagcctcccaaagtgctgggattacatggtgtgagccaccatgcccagccatttatgatcttgatgagggccaactttccctcttccacaagggattaatcttagaactatagccaatttattataagtactatttagctactctgtgctccacacatcacggagtaatatcttcaaactatgaggtttagtaacacttgactgctgaggtttatttcctcagctctgatgcttcctgggtgaagatgtaagttattaaattaactcaaattttaaagctaacacttcattccatctagaccaggtagctcgtcatttgtacgtctgataggtgcttcaacatctcagaattggcttatttttcatgcattgcatattgtactcatttgtaatattggaatgtaaaatgttcttactaagaatctttatgtcagctattcaacatttccctactttataatttctagctgctttaccatttagcaactttaaatttttatgcagttaatatgtttctttggtttttatgttttctgaatgtctttaatgcacattaatgtatacttagtagatacacatttacacattgagaagtgaagataggtttgtgttctgtgtacaattaggacatccattaaaaaagatttttaaaaactgtgaatgggaaaacatgtttttcctcctgtcctaaaatagaacctgatgacgggagggagcatcagtcagtctggcctaaatcagtgtactgcgcttttggatgcgggcaaaagtattgtcatgttgattactttataataacgtattaatatcattggctcaaacagttgtgatatatacctagtaatcatcgaggatctcaaagatatgcaccagtttgaataaatgctgtttaaagattaaattttacaattcatttta

SEQ ID NO: 443655 - DNA, 4024 bp, Homo sapiens
  misc_feature (3693)..(3693): n is a, c, g, or t
  misc_feature (4024)..(4024): n is a, c, g, or t
tgagtaaatgccgcagattctggaaagttctgatcagtgcgatacataaggctgaggaagtgggacctccccttttgggtcggtagttcagcgccggcgccggtgtgcgagccgcggcagagtgaggcaggcaacccgaggtgcggagcgacctgcggaggctgagccccgctttctcccagggtttcttatcagccagccgccgctgtccccgggggagtaggaggctcctgacaggccgcggctgtctgtgtgtccttctgagtgtcagaggaacggccagaccccgcgggccggagcagaacgcggccagggcagaaagcggcggcaggagaagcaggcagggggccggaggacgcagaccgagacccgaggcggaggcggaccgcgagccggccatgtcggtggtggggttggacgtgggctcgcagagctgctacatcgcggtagcccgggccgggggcatcgagaccatcgccaatgagttcagcgaccggtgcaccccgtcagtcatatcatttggatcaaaaaatagaacaatcggagttgcagccaaaaatcagcaaatcactcatgcaaacaatacggtgtctaacttcaaaagatttcatggccgagcattcaatgaccccttcattcaaaaggagaaggaaaacttgagttacgatttggttccattgaaaaatggtggagttggaataaaggtaatgtacatgggtgaagaacatctatttagtgtggagcagataacagccatgttgttgactaagctgaaggaaactgctgaaaacagcctcaagaaaccagtaacagattgtgttatttcagtcccctccttctttacagatgctgagaggcgatctgtgttagatgctgcacagattgttggcctaaactgtttaagacttatgaatgacatgacagctgttgctttgaattacggaatttataagcaggatctcccaagcctggatgagaaacctcggatagtggtttttgttgatatgggacattcagcttttcaagtgtctgcttgtgcttttaacaagggaaaattgaaggtactgggaacagcttttgatcctttcttaggaggaaaaaacttcgatgaaaagttagtggaacatttttgtgcagaatttaaaactaagtacaagttggatgcaaaatccaaaatacgagcactcctacgtctgtatcaggaatgtgaaaaactgaaaaagctaatgagctctaacagcacagaccttccactgaatatcgaatgctttatgaatgataaagatgtttccggaaagatgaacaggtcacaatttgaagaactctgtgctgaacttctgcaaaagatagaagtacccctttattcactgttggaacaaactcatctcaaagtagaagatgtgagtgcagttgagattgttggaggcgctacacgaattccagctgtgaaggaaagaattgccaaattctttggaaaagatattagcacaacactcaatgcagatgaagcagtagccagaggatgtgcattacagtgtgcaatactttccccggcatttaaagttagagaattttccgtcacagatgcagttccttttccaatatctctgatctggaaccatgattcagaagatactgaaggtgttcatgaagtctttagtcgaaaccatgctgctcctttctccaaagttctcacctttctgagaagggggccttttgagctagaagctttctattctgatccccaaggagttccatatccagaagcaaaaataggccgctttgtagttcagaatgtttctgcacagaaagatggagaaaaatctagagtaaaagtcaaagtgcgagtcaacacccatggcattttcaccatctctacggcatctatggtggagaaagtcccaactgaggagaatgaaatgtcttctgaagctgacatggagtgtctgaatcagagaccaccagaaaacccagacactgataaaaatgtccagcaagacaacagtgaagctggaacacagccccaggtacaaactgatgctcaacaaacctcacagtctcccccttcacctgaacttacctcagaagaaaacaaaatcccagatgctgacaaagcaaatgaaaaaaaagttgaccagcctccagaagctaaaaagcccaaaataaaggtggtgaatgttgagctgcctattgaagccaacttggtctggcagttagggaaagaccttcttaacatgtatattgagacagagggtaagatgataatgcaagataaattggaaaaagaaaggaatgatgctaaaaatgcagttgaggaatatgtgtatgagttcagagacaagctgtgtggaccatatgaaaaatttatatgtgagcaggatcatcaaaattttttgagactcctcacagaaactgaagactggctgtatgaagaaggagaggaccaagctaaacaagcatatgttgacaagttggaagaattaatgaaaattggcactccagttaaagttcggtttcaggaagctgaagaacggccaaaaatgtttgaagaactaggacagaggctgcagcattatgccaagatagcagctgacttcagaaataaggatgagaaatacaaccatattgatgagtctgaaatgaaaaaagtggagaagtctgttaatgaagtgatggaatggatgaataatgtcatgaatgctcaggctaaaaagagtcttgatcaggatccagttgtacgtgctcaggaaattaaaacaaaaatcaaggaattgaacaacacatgtgaacccgttgtaacacaaccgaaaccaaaaattgaatcacccaaactggaaagaactccaaatggcccaaatattgataaaaaggaagaagatttagaagacaaaaacaattttggtgctgaacctccacatcagaatggtgaatgttaccctaatgagaaaaattctgttaatatggacttggactagataaccttaaattggcctattccttcaattaataaaatatttttgccatagtatgtgactctacataacatactgaaactatttatattttcttttttaaggatatttagaaattttgtgtattatatggaaaaagaaaaaaagcttaagtctgtagtctttatgatcctaaaagggaaaattgccttggtaactttcagattcctgtggaattgtgaattcatactaagctttctgtgcagtctcaccatttgcatcactgaggatgaaactgacttttgtcttttggagaaaaaaaactgtactgcttgttcaagagggctgtgattaaaatctttaagcatttgttcctgccaaggtagttttcttgcattttgctctccattcagcatgtgtgtgggtgtggatgtttataaacaagactaagtctgacttcataagggctttctaaaaccatttctgtccaagagaaaatgactttttgctttgatattaaaaattcaatgagtaaaacaaaagctagtcaaatgtgttagcagcatgcagaacaaaaactttaaactttctctctcactatacagtatattgtcatgtgaaagtgtggaatggaagaaatgtcgatcctgttgtaactgattgtgaacacttttatgagctttaaaataaagttcatcttatggtgtcatttctaaaaaaaaaaaaaaaaaaaaaaaaaaanaaaaaaaaaataaatattaaaaaaataaaaaaaataaaaaaaaaccttgtgggccgctttggccaattcgattttaaactcgaccaggcttatccttgcggcccaaattggggttaattgggccaattccccctatagggaggcgattaaccattacaagggccgtcgtttaacaccgtctgaattgaaaaacacctggggtaccccacttaaatcgcttggaacaaatccccttttcccagttgcctaattacaaaaacccccacccgatggcttttcaaacattggccacccttaatggcaaatggaatgggccttttttggtccgccn

SEQ ID NO: 443656 - DNA, 5310 bp, Homo sapiens
  misc_feature (292)..(292): n is a, c, g, or t
  misc_feature (297)..(297): n is a, c, g, or t
  misc_feature (316)..(316): n is a, c, g, or t
  misc_feature (334)..(334): n is a, c, g, or t
tgagtaaatgccgcagattctggaaagttctgatcagtgcgatacataaggctgaggaagtgggacctccccttttgggtcggtagttcagcgccggcgccggtgtgcgagccgcggcagagtgaggcaggcaacccgaggtgcggagcgacctgcggaggctgagccccgctttctcccagggtttcttatcagccagccgccgctgtccccgggggagtaggaggctcctgacaggccgcggctgtctgtgatcgatccttcctggagctggtcaacgcacgcgaacaancgtgnctcaagaagcccccgcggnccgggcggcctccgtgancccccaggaacgcggccagggcagaaagcggcggcaggagaagcaggcagggggccggaggacgcagaccgagacccgaggcggaggcggaccgcgagccggccatgtcggtggtggggttggacgtgggctcgcagagctgctacatcgcggtagcccgggccgggggcatcgagaccatcgccaatgagttcagcgaccggtgcaccccgtcagtcatatcatttggatcaaaaaatagaacaatcggagttgcagccaaaaatcagcaaatcactcatgcaaacaatacggtgtctaacttcaaaagatttcatggccgagcattcaatgaccccttcattcaaaaggagaaggaaaacttgagttacgatttggttccattgaaaaatggtggagttggaataaaggtaatgtacatgggtgaagaacatctatttagtgtggagcagataacagccatgttgttgactaagctgaaggaaactgctgaaaacagcctcaagaaaccagtaacagattgtgttatttcagtcccctccttctttacagatgctgagaggcgatctgtgttagatgctgcacagattgttggcctaaactgtttaagacttatgaatgacatgacagctgttgctttgaattacggaatttataagcaggatctcccaagcctggatgagaaacctcggatagtggtttttgttgatatgggacattcagcttttcaagtgtctgcttgtgcttttaacaagggaaaattgaaggtactgggaacagcttttgatcctttcttaggaggaaaaaacttcgatgaaaagttagtggaacatttttgtgcagaatttaaaactaagtacaagttggatgcaaaatccaaaatacgagcactcctacgtctgtatcaggaatgtgaaaaactgaaaaagctaatgagctctaacagcacagaccttccactgaatatcgaatgctttatgaatgataaagatgtttccggaaagatgaacaggtcacaatttgaagaactctgtgctgaacttctgcaaaagatagaagtacccctttattcactgttggaacaaactcatctcaaagtagaagatgtgagtgcagttgagattgttggaggcgctacacgaattccagctgtgaaggaaagaattgccaaattctttggaaaagatattagcacaacactcaatgcagatgaagcagtagccagaggatgtgcattacagtgtgcaatactttccccggcatttaaagttagagaattttccgtcacagatgcagttccttttccaatatctctgatctggaaccatgattcagaagatactgaaggtgttcatgaagtctttagtcgaaaccatgctgctcctttctccaaagttctcacctttctgagaagggggccttttgagctagaagctttctattctgatccccaaggagttccatatccagaagcaaaaataggccgctttgtagttcagaatgtttctgcacagaaagatggagaaaaatctagagtaaaagtcaaagtgcgagtcaacacccatggcattttcaccatctctacggcatctatggtggagaaagtcccaactgaggagaatgaaatgtcttctgaagctgacatggagtgtctgaatcagagaccaccagaaaacccagacactgataaaaatgtccagcaagacaacagtgaagctggaacacagccccaggtacaaactgatgctcaacaaacctcacagtctcccccttcacctgaacttacctcagaagaaaacaaaatcccagatgctgacaaagcaaatgaaaaaaaagttgaccagcctccagaagctaaaaagcccaaaataaaggtggtgaatgttgagctgcctattgaagccaacttggtctggcagttagggaaagaccttcttaacatgtatattgagacagagggtaagatgataatgcaagataaattggaaaaagaaaggaatgatgctaaaaatgcagttgaggaatatgtgtatgagttcagagacaagctgtgtggaccatatgaaaaatttatatgtgagcaggatcatcaaaattttttgagactcctcacagaaactgaagactggctgtatgaagaaggagaggaccaagctaaacaagcatatgttgacaagttggaagaattaatgaaaattggcactccagttaaagttcggtttcaggaagctgaagaacggccaaaaatgtttgaagaactaggacagaggctgcagcattatgccaagatagcagctgacttcagaaataaggatgagaaatacaaccatattgatgagtctgaaatgaaaaaagtggagaagtctgttaatgaagtgatggaatggatgaataatgtcatgaatgctcaggctaaaaagagtcttgatcaggatccagttgtacgtgctcaggaaattaaaacaaaaatcaaggaattgaacaacacatgtgaacccgttgtaacacaaccgaaaccaaaaattgaatcacccaaactggaaagaactccaaatggcccaaatattgataaaaaggaagaagatttagaagacaaaaacaattttggtgctgaacctccacatcagaatggtgaatgttaccctaatgagaaaaattctgttaatatggacttggactagataaccttaaattggcctattccttcaattaataaaatatttttgccatagtatgtgactctacataacatactgaaactatttatattttcttttttaaggatatttagaaattttgtgtattatatggaaaaagaaaaaaagcttaagtctgtagtctttatgatcctaaaagggaaaattgccttggtaactttcagattcctgtggaattgtgaattcatactaagctttctgtgcagtctcaccatttgcatcactgaggatgaaactgacttttgtcttttggagaaaaaaaactgtactgcttgttcaagagggctgtgattaaaatctttaagcatttgttcctgccaaggtagttttcttgcattttgctctccattcagcatgtgtgtgggtgtggatgtttataaacaagactaagtctgacttcataagggctttctaaaaccatttctgtccaagagaaaatgactttttgctttgatattaaaaattcaatgagtaaaacaaaagctagtcaaatgtgttagcagcatgcagaacaaaaactttaaactttctctctcactatacagtatattgtcatgtgaaagtgtggaatggaagaaatgtcgatcctgttgtaactgattgtgaacacttttatgagctttaaaataaagttcatcttatggtgtcatttctaaactgttgattttgtcactaatttaaaaaatgagatgagggagaatatgaattattctagcagaaatgaagttagtgtccagtttttcttttttactgcttatgttctctcttttctaagtgaaaatgtttttctcctgacagaaaaatagcatatgtttattacattaaagcattttaaaaatactataaagtgaataaaacttaaaatcttgccacccagaagaaaacattgttaacacttcgttatacatccttggagccttttacccctaatgatgggggtatatttgtgtgagtgtctatgttatagtgctgtaggctgtttttaaaaactctgtgccagggaaattagtaaatacagtcaagtgttgtaactgcataaatgtagtgagttcattataaagacatacttaaaaataccaatcttgctattggtagatttaggtgtttctcatttttgctgttctaaataatgctgcaatgaatctatctggttgttttgtaagcacaaaattgaagtagtgttggaggtaggggagaagacacatgcacttaggataggtgacaaccagctcctcactagggtgcaacagtttattctttttttttttttggtagagctggggtttcgctatgttgcccaagttcgtcttgaactcctgggctcaagcaatctgtctgcctcagcctcccaaagtgctgggattacatggtgtgagccaccatgcccagccatttatgatcttgatgagggccaactttccctcttccacaagggattaatcttagaactatagccaatttattataagtactatttagctactctgtgctccacacatcacggagtaatatcttcaaactatgaggtttagtaacacttgactgctgaggtttatttcctcagctctgatgcttcctgggtgaagatgtaagttattaaattaactcaaattttaaagctaacacttcattccatctagaccaggtagctcgtcatttgtacgtctgataggtgcttcaacatctcagaattggcttatttttcatgcattgcatattgtactcatttgtaatattggaatgtaaaatgttcttactaagaatctttatgtcagctattcaacatttccctactttataatttctagctgctttaccatttagcaactttaaatttttatgcagttaatatgtttctttggtttttatgttttctgaatgtctttaatgcacattaatgtatacttagtagatacacatttacacattgagaagtgaagataggtttgtgttctgtgtacaattaggacatccattaaaaaagatttttaaaaactgtgaatgggaaaacatgtttttcctcctgtcctaaaatagaacctgatgacgggagggagcatcagtcagtctggcctaaatcagtgtactgcgcttttggatgcgggcaaaagtattgtcatgttgattactttataataacgtattaatatcattggctcaaacagttgtgatatatacctagtaatcatcgaggatctcaaagatatgcaccagtttgaataaatgctgtttaaagattaaattttacaattcatttta

SEQ ID NO: 443657 - DNA, 5143 bp, Homo sapiens
aacatgctctccggacagctggccggcctccccaccatcccggtgtctggggtctctgcaaaaatggggtctgtctccgcccgcccagcctccctttagcgttaaggatcggacaccacctcccggtagtaaattgtgactattccgagttttggagtcattcttcgttgcctgttttattagggcagcaaaacgcctgtggctagggcgggagtgggcggaggcaggtttgagccaatggcacgggagcggccctgtcgctgccatggcaacggcggccgttctccggggaccggctgcccattgggtagaatctttccagaaggctcgagaagaaggaagcggaagtggcacgtggaggggccggtggaggcgccggtcagtcatatcatttggatcaaaaaatagaacaatcggagttgcagccaaaaatcagcaaatcactcatgcaaacaatacggtgtctaacttcaaaagatttcatggccgagcattcaatgaccccttcattcaaaaggagaaggaaaacttgagttacgatttggttccattgaaaaatggtggagttggaataaaggtaatgtacatgggtgaagaacatctatttagtgtggagcagataacagccatgttgttgactaagctgaaggaaactgctgaaaacagcctcaagaaaccagtaacagattgtgttatttcagtcccctccttctttacagatgctgagaggcgatctgtgttagatgctgcacagattgttggcctaaactgtttaagacttatgaatgacatgacagctgttgctttgaattacggaatttataagcaggatctcccaagcctggatgagaaacctcggatagtggtttttgttgatatgggacattcagcttttcaagtgtctgcttgtgcttttaacaagggaaaattgaaggtactgggaacagcttttgatcctttcttaggaggaaaaaacttcgatgaaaagttagtggaacatttttgtgcagaatttaaaactaagtacaagttggatgcaaaatccaaaatacgagcactcctacgtctgtatcaggaatgtgaaaaactgaaaaagctaatgagctctaacagcacagaccttccactgaatatcgaatgctttatgaatgataaagatgtttccggaaagatgaacaggtcacaatttgaagaactctgtgctgaacttctgcaaaagatagaagtacccctttattcactgttggaacaaactcatctcaaagtagaagatgtgagtgcagttgagattgttggaggcgctacacgaattccagctgtgaaggaaagaattgccaaattctttggaaaagatattagcacaacactcaatgcagatgaagcagtagccagaggatgtgcattacagtgtgcaatactttccccggcatttaaagttagagaattttccgtcacagatgcagttccttttccaatatctctgatctggaaccatgattcagaagatactgaaggtgttcatgaagtctttagtcgaaaccatgctgctcctttctccaaagttctcacctttctgagaagggggccttttgagctagaagctttctattctgatccccaaggagttccatatccagaagcaaaaataggccgctttgtagttcagaatgtttctgcacagaaagatggagaaaaatctagagtaaaagtcaaagtgcgagtcaacacccatggcattttcaccatctctacggcatctatggtggagaaagtcccaactgaggagaatgaaatgtcttctgaagctgacatggagtgtctgaatcagagaccaccagaaaacccagacactgataaaaatgtccagcaagacaacagtgaagctggaacacagccccaggtacaaactgatgctcaacaaacctcacagtctcccccttcacctgaacttacctcagaagaaaacaaaatcccagatgctgacaaagcaaatgaaaaaaaagttgaccagcctccagaagctaaaaagcccaaaataaaggtggtgaatgttgagctgcctattgaagccaacttggtctggcagttagggaaagaccttcttaacatgtatattgagacagagggtaagatgataatgcaagataaattggaaaaagaaaggaatgatgctaaaaatgcagttgaggaatatgtgtatgagttcagagacaagctgtgtggaccatatgaaaaatttatatgtgagcaggatcatcaaaattttttgagactcctcacagaaactgaagactggctgtatgaagaaggagaggaccaagctaaacaagcatatgttgacaagttggaagaattaatgaaaattggcactccagttaaagttcggtttcaggaagctgaagaacggccaaaaatgtttgaagaactaggacagaggctgcagcattatgccaagatagcagctgacttcagaaataaggatgagaaatacaaccatattgatgagtctgaaatgaaaaaagtggagaagtctgttaatgaagtgatggaatggatgaataatgtcatgaatgctcaggctaaaaagagtcttgatcaggatccagttgtacgtgctcaggaaattaaaacaaaaatcaaggaattgaacaacacatgtgaacccgttgtaacacaaccgaaaccaaaaattgaatcacccaaactggaaagaactccaaatggcccaaatattgataaaaaggaagaagatttagaagacaaaaacaattttggtgctgaacctccacatcagaatggtgaatgttaccctaatgagaaaaattctgttaatatggacttggactagataaccttaaattggcctattccttcaattaataaaatatttttgccatagtatgtgactctacataacatactgaaactatttatattttcttttttaaggatatttagaaattttgtgtattatatggaaaaagaaaaaaagcttaagtctgtagtctttatgatcctaaaagggaaaattgccttggtaactttcagattcctgtggaattgtgaattcatactaagctttctgtgcagtctcaccatttgcatcactgaggatgaaactgacttttgtcttttggagaaaaaaaactgtactgcttgttcaagagggctgtgattaaaatctttaagcatttgttcctgccaaggtagttttcttgcattttgctctccattcagcatgtgtgtgggtgtggatgtttataaacaagactaagtctgacttcataagggctttctaaaaccatttctgtccaagagaaaatgactttttgctttgatattaaaaattcaatgagtaaaacaaaagctagtcaaatgtgttagcagcatgcagaacaaaaactttaaactttctctctcactatacagtatattgtcatgtgaaagtgtggaatggaagaaatgtcgatcctgttgtaactgattgtgaacacttttatgagctttaaaataaagttcatcttatggtgtcatttctaaactgttgattttgtcactaatttaaaaaatgagatgagggagaatatgaattattctagcagaaatgaagttagtgtccagtttttcttttttactgcttatgttctctcttttctaagtgaaaatgtttttctcctgacagaaaaatagcatatgtttattacattaaagcattttaaaaatactataaagtgaataaaacttaaaatcttgccacccagaagaaaacattgttaacacttcgttatacatccttggagccttttacccctaatgatgggggtatatttgtgtgagtgtctatgttatagtgctgtaggctgtttttaaaaactctgtgccagggaaattagtaaatacagtcaagtgttgtaactgcataaatgtagtgagttcattataaagacatacttaaaaataccaatcttgctattggtagatttaggtgtttctcatttttgctgttctaaataatgctgcaatgaatctatctggttgttttgtaagcacaaaattgaagtagtgttggaggtaggggagaagacacatgcacttaggataggtgacaaccagctcctcactagggtgcaacagtttattctttttttttttttggtagagctggggtttcgctatgttgcccaagttcgtcttgaactcctgggctcaagcaatctgtctgcctcagcctcccaaagtgctgggattacatggtgtgagccaccatgcccagccatttatgatcttgatgagggccaactttccctcttccacaagggattaatcttagaactatagccaatttattataagtactatttagctactctgtgctccacacatcacggagtaatatcttcaaactatgaggtttagtaacacttgactgctgaggtttatttcctcagctctgatgcttcctgggtgaagatgtaagttattaaattaactcaaattttaaagctaacacttcattccatctagaccaggtagctcgtcatttgtacgtctgataggtgcttcaacatctcagaattggcttatttttcatgcattgcatattgtactcatttgtaatattggaatgtaaaatgttcttactaagaatctttatgtcagctattcaacatttccctactttataatttctagctgctttaccatttagcaactttaaatttttatgcagttaatatgtttctttggtttttatgttttctgaatgtctttaatgcacattaatgtatacttagtagatacacatttacacattgagaagtgaagataggtttgtgttctgtgtacaattaggacatccattaaaaaagatttttaaaaactgtgaatgggaaaacatgtttttcctcctgtcctaaaatagaacctgatgacgggagggagcatcagtcagtctggcctaaatcagtgtactgcgcttttggatgcgggcaaaagtattgtcatgttgattactttataataacgtattaatatcattggctcaaacagttgtgatatatacctagtaatcatcgaggatctcaaagatatgcaccagtttgaataaatgctgtttaaagattaaattttacaattcatttta

SEQ ID NO: 443658 - DNA, 5217 bp, Homo sapiens
tgagtaaatgccgcagattctggaaagttctgatcagtgcgatacataaggctgaggaagtgggacctccccttttgggtcggtagttcagcgccggcgccggtgtgcgagccgcggcagagtgaggcaggcaacccgaggtgcggagcgacctgcggaggctgagccccgctttctcccagggtttcttatcagccagccgccgctgtccccgggggagtaggaggctcctgacaggccgcggctgtctgtgtgtccttctgagtgtcagaggaacggccagaccccgcgggccggagcagaacgcggccagggcagaaagcggcggcaggagaagcaggcagggggccggaggacgcagaccgagacccgaggcggaggcggaccgcgagccggccatgtcggtggtggggttggacgtgggctcgcagagctgctacatcgcggtagcccgggccgggggcatcgagaccatcgccaatgagttcagcgaccggtgcaccccgtcagtcatatcatttggatcaaaaaatagaacaatcggagttgcagccaaaaatcagcaaatcactcatgcaaacaatacggtgtctaacttcaaaagatttcatggccgagcattcaatgaccccttcattcaaaaggagaaggaaaacttgagttacgatttggttccattgaaaaatggtggagttggaataaaggtaatgtacatgggtgaagaacatctatttagtgtggagcagataacagccatgttgttgactaagctgaaggaaactgctgaaaacagcctcaagaaaccagtaacagattgtgttatttcagtcccctccttctttacagatgctgagaggcgatctgtgttagatgctgcacagattgttggcctaaactgtttaagacttatgaatgacatgacagctgttgctttgaattacggaatttataagcaggatctcccaagcctggatgagaaacctcggatagtggtttttgttgatatgggacattcagcttttcaagtgtctgcttgtgcttttaacaagggaaaattgaaggtactgggaacagcttttgatcctttcttaggaggaaaaaacttcgatgaaaagttagtggaacatttttgtgcagaatttaaaactaagtacaagttggatgcaaaatccaaaatacgagcactcctacgtctgtatcaggaatgtgaaaaactgaaaaagctaatgagctctaacagcacagaccttccactgaatatcgaatgctttatgaatgataaagatgtttccggaaagatgaacaggtcacaatttgaagaactctgtgctgaacttctgcaaaagatagaagtacccctttattcactgttggaacaaactcatctcaaagtagaagatgtgagtgcagttgagattgttggaggcgctacacgaattccagctgtgaaggaaagaattgccaaattctttggaaaagatattagcacaacactcaatgcagatgaagcagtagccagaggatgtgcattacagtgtgcaatactttccccggcatttaaagttagagaattttccgtcacagatgcagttccttttccaatatctctgatctggaaccatgattcagaagatactgaaggtgttcatgaagtctttagtcgaaaccatgctgctcctttctccaaagttctcacctttctgagaagggggccttttgagctagaagctttctattctgatccccaaggagttccatatccagaagcaaaaataggccgctttgtagttcagaatgtttctgcacagaaagatggagaaaaatctagagtaaaagtcaaagtgcgagtcaacacccatggcattttcaccatctctacggcatctatggtggagaaagtcccaactgaggagaatgaaatgtcttctgaagctgacatggagtgtctgaatcagagaccaccagaaaacccagacactgataaaaatgtccagcaagacaacagtgaagctggaacacagccccaggtacaaactgatgctcaacaaacctcacagtctcccccttcacctgaacttacctcagaagaaaacaaaatcccagatgctgacaaagcaaatgaaaaaaaagttgaccagcctccagaagctaaaaagcccattagggaaagaccttcttaacatgtatattgagacagagggtaagatgataatgcaagataaattggaaaaagaaaggaatgatgctaaaaatgcagttgaggaatatgtgtatgagttcagagacaagctgtgtggaccatatgaaaaatttatatgtgagcaggatcatcaaaattttttgagactcctcacagaaactgaagactggctgtatgaagaaggagaggaccaagctaaacaagcatatgttgacaagttggaagaattaatgaaaattggcactccagttaaagttcggtttcaggaagctgaagaacggccaaaaatgtttgaagaactaggacagaggctgcagcattatgccaagatagcagctgacttcagaaataaggatgagaaatacaaccatattgatgagtctgaaatgaaaaaagtggagaagtctgttaatgaagtgatggaatggatgaataatgtcatgaatgctcaggctaaaaagagtcttgatcaggatccagttgtacgtgctcaggaaattaaaacaaaaatcaaggaattgaacaacacatgtgaacccgttgtaacacaaccgaaaccaaaaattgaatcacccaaactggaaagaactccaaatggcccaaatattgataaaaaggaagaagatttagaagacaaaaacaattttggtgctgaacctccacatcagaatggtgaatgttaccctaatgagaaaaattctgttaatatggacttggactagataaccttaaattggcctattccttcaattaataaaatatttttgccatagtatgtgactctacataacatactgaaactatttatattttcttttttaaggatatttagaaattttgtgtattatatggaaaaagaaaaaaagcttaagtctgtagtctttatgatcctaaaagggaaaattgccttggtaactttcagattcctgtggaattgtgaattcatactaagctttctgtgcagtctcaccatttgcatcactgaggatgaaactgacttttgtcttttggagaaaaaaaactgtactgcttgttcaagagggctgtgattaaaatctttaagcatttgttcctgccaaggtagttttcttgcattttgctctccattcagcatgtgtgtgggtgtggatgtttataaacaagactaagtctgacttcataagggctttctaaaaccatttctgtccaagagaaaatgactttttgctttgatattaaaaattcaatgagtaaaacaaaagctagtcaaatgtgttagcagcatgcagaacaaaaactttaaactttctctctcactatacagtatattgtcatgtgaaagtgtggaatggaagaaatgtcgatcctgttgtaactgattgtgaacacttttatgagctttaaaataaagttcatcttatggtgtcatttctaaactgttgattttgtcactaatttaaaaaatgagatgagggagaatatgaattattctagcagaaatgaagttagtgtccagtttttcttttttactgcttatgttctctcttttctaagtgaaaatgtttttctcctgacagaaaaatagcatatgtttattacattaaagcattttaaaaatactataaagtgaataaaacttaaaatcttgccacccagaagaaaacattgttaacacttcgttatacatccttggagccttttacccctaatgatgggggtatatttgtgtgagtgtctatgttatagtgctgtaggctgtttttaaaaactctgtgccagggaaattagtaaatacagtcaagtgttgtaactgcataaatgtagtgagttcattataaagacatacttaaaaataccaatcttgctattggtagatttaggtgtttctcatttttgctgttctaaataatgctgcaatgaatctatctggttgttttgtaagcacaaaattgaagtagtgttggaggtaggggagaagacacatgcacttaggataggtgacaaccagctcctcactagggtgcaacagtttattctttttttttttttggtagagctggggtttcgctatgttgcccaagttcgtcttgaactcctgggctcaagcaatctgtctgcctcagcctcccaaagtgctgggattacatggtgtgagccaccatgcccagccatttatgatcttgatgagggccaactttccctcttccacaagggattaatcttagaactatagccaatttattataagtactatttagctactctgtgctccacacatcacggagtaatatcttcaaactatgaggtttagtaacacttgactgctgaggtttatttcctcagctctgatgcttcctgggtgaagatgtaagttattaaattaactcaaattttaaagctaacacttcattccatctagaccaggtagctcgtcatttgtacgtctgataggtgcttcaacatctcagaattggcttatttttcatgcattgcatattgtactcatttgtaatattggaatgtaaaatgttcttactaagaatctttatgtcagctattcaacatttccctactttataatttctagctgctttaccatttagcaactttaaatttttatgcagttaatatgtttctttggtttttatgttttctgaatgtctttaatgcacattaatgtatacttagtagatacacatttacacattgagaagtgaagataggtttgtgttctgtgtacaattaggacatccattaaaaaagatttttaaaaactgtgaatgggaaaacatgtttttcctcctgtcctaaaatagaacctgatgacgggagggagcatcagtcagtctggcctaaatcagtgtactgcgcttttggatgcgggcaaaagtattgtcatgttgattactttataataacgtattaatatcattggctcaaacagttgtgatatatacctagtaatcatcgaggatctcaaagatatgcaccagtttgaataaatgctgtttaaagattaaattttacaattcatttta

SEQ ID NO: 443659 - DNA, 4246 bp, Homo sapiens
tctgtgtcagggggaaaaattttagaaggtaaaatggcagtcataagcatgtaaaatgatttgtttgagtaataccaggagaactgtcttccgcatcatctttctgcacctgtttggtgtatttatcaaaaacaaaagagctataaactacaatacagctaaacttggcccatgtgggatccaaggtgtctgagggggaaaataatgaaattcattgggttgtcaaaagtaggacaggatattggtcttaacttttctaaaaacaagtttttatttgctaaggtcacaatttgaagaactctgtgctgaacttctgcaaaagatagaagtacccctttattcactgttggaacaaactcatctcaaagtagaagatgtgagtgcagttgagattgttggaggcgctacacgaattccagctgtgaaggaaagaattgccaaattctttggaaaagatattagcacaacactcaatgcagatgaagcagtagccagaggatgtgcattacagtgtgcaatactttccccggcatttaaagttagagaattttccgtcacagatgcagttccttttccaatatctctgatctggaaccatgattcagaagatactgaaggtgttcatgaagtctttagtcgaaaccatgctgctcctttctccaaagttctcacctttctgagaagggggccttttgagctagaagctttctattctgatccccaaggagttccatatccagaagcaaaaataggccgctttgtagttcagaatgtttctgcacagaaagatggagaaaaatctagagtaaaagtcaaagtgcgagtcaacacccatggcattttcaccatctctacggcatctatggtggagaaagtcccaactgaggagaatgaaatgtcttctgaagctgacatggagtgtctgaatcagagaccaccagaaaacccagacactgataaaaatgtccagcaagacaacagtgaagctggaacacagccccaggtacaaactgatgctcaacaaacctcacagtctcccccttcacctgaacttacctcagaagaaaacaaaatcccagatgctgacaaagcaaatgaaaaaaaagttgaccagcctccagaagctaaaaagcccaaaataaaggtggtgaatgttgagctgcctattgaagccaacttggtctggcagttagggaaagaccttcttaacatgtatattgagacagagggtaagatgataatgcaagataaattggaaaaagaaaggaatgatgctaaaaatgcagttgaggaatatgtgtatgagttcagagacaagctgtgtggaccatatgaaaaatttatatgtgagcaggatcatcaaaattttttgagactcctcacagaaactgaagactggctgtatgaagaaggagaggaccaagctaaacaagcatatgttgacaagttggaagaattaatgaaaattggcactccagttaaagttcggtttcaggaagctgaagaacggccaaaaatgtttgaagaactaggacagaggctgcagcattatgccaagatagcagctgacttcagaaataaggatgagaaatacaaccatattgatgagtctgaaatgaaaaaagtggagaagtctgttaatgaagtgatggaatggatgaataatgtcatgaatgctcaggctaaaaagagtcttgatcaggatccagttgtacgtgctcaggaaattaaaacaaaaatcaaggaattgaacaacacatgtgaacccgttgtaacacaaccgaaaccaaaaattgaatcacccaaactggaaagaactccaaatggcccaaatattgataaaaaggaagaagatttagaagacaaaaacaattttggtgctgaacctccacatcagaatggtgaatgttaccctaatgagaaaaattctgttaatatggacttggactagataaccttaaattggcctattccttcaattaataaaatatttttgccatagtatgtgactctacataacatactgaaactatttatattttcttttttaaggatatttagaaattttgtgtattatatggaaaaagaaaaaaagcttaagtctgtagtctttatgatcctaaaagggaaaattgccttggtaactttcagattcctgtggaattgtgaattcatactaagctttctgtgcagtctcaccatttgcatcactgaggatgaaactgacttttgtcttttggagaaaaaaaactgtactgcttgttcaagagggctgtgattaaaatctttaagcatttgttcctgccaaggtagttttcttgcattttgctctccattcagcatgtgtgtgggtgtggatgtttataaacaagactaagtctgacttcataagggctttctaaaaccatttctgtccaagagaaaatgactttttgctttgatattaaaaattcaatgagtaaaacaaaagctagtcaaatgtgttagcagcatgcagaacaaaaactttaaactttctctctcactatacagtatattgtcatgtgaaagtgtggaatggaagaaatgtcgatcctgttgtaactgattgtgaacacttttatgagctttaaaataaagttcatcttatggtgtcatttctaaactgttgattttgtcactaatttaaaaaatgagatgagggagaatatgaattattctagcagaaatgaagttagtgtccagtttttcttttttactgcttatgttctctcttttctaagtgaaaatgtttttctcctgacagaaaaatagcatatgtttattacattaaagcattttaaaaatactataaagtgaataaaacttaaaatcttgccacccagaagaaaacattgttaacacttcgttatacatccttggagccttttacccctaatgatgggggtatatttgtgtgagtgtctatgttatagtgctgtaggctgtttttaaaaactctgtgccagggaaattagtaaatacagtcaagtgttgtaactgcataaatgtagtgagttcattataaagacatacttaaaaataccaatcttgctattggtagatttaggtgtttctcatttttgctgttctaaataatgctgcaatgaatctatctggttgttttgtaagcacaaaattgaagtagtgttggaggtaggggagaagacacatgcacttaggataggtgacaaccagctcctcactagggtgcaacagtttattctttttttttttttggtagagctggggtttcgctatgttgcccaagttcgtcttgaactcctgggctcaagcaatctgtctgcctcagcctcccaaagtgctgggattacatggtgtgagccaccatgcccagccatttatgatcttgatgagggccaactttccctcttccacaagggattaatcttagaactatagccaatttattataagtactatttagctactctgtgctccacacatcacggagtaatatcttcaaactatgaggtttagtaacacttgactgctgaggtttatttcctcagctctgatgcttcctgggtgaagatgtaagttattaaattaactcaaattttaaagctaacacttcattccatctagaccaggtagctcgtcatttgtacgtctgataggtgcttcaacatctcagaattggcttatttttcatgcattgcatattgtactcatttgtaatattggaatgtaaaatgttcttactaagaatctttatgtcagctattcaacatttccctactttataatttctagctgctttaccatttagcaactttaaatttttatgcagttaatatgtttctttggtttttatgttttctgaatgtctttaatgcacattaatgtatacttagtagatacacatttacacattgagaagtgaagataggtttgtgttctgtgtacaattaggacatccattaaaaaagatttttaaaaactgtgaatgggaaaacatgtttttcctcctgtcctaaaatagaacctgatgacgggagggagcatcagtcagtctggcctaaatcagtgtactgcgcttttggatgcgggcaaaagtattgtcatgttgattactttataataacgtattaatatcattggctcaaacagttgtgatatatacctagtaatcatcgaggatctcaaagatatgcaccagtttgaataaatgctgtttaaagattaaattttacaattcatttta

SEQ ID NO: 443660 - DNA, 5216 bp, Homo sapiens
tgagtaaatgccgcagattctggaaagttctgatcagtgcgatacataaggctgaggaagtgggacctccccttttgggtcggtagttcagcgccggcgccggtgtgcgagccgcggcagagtgaggcaggcaacccgaggtgcggagcgacctgcggaggctgagccccgctttctcccagggtttcttatcagccagccgccgctgtccccgggggagtaggaggctcctgacaggccgcggctgtctgtgtgtccttctgagtgtcagaggaacggccagaccccgcgggccggagcagaacgcggccagggcagaaagcggcggcaggagaagcaggcagggggccggaggacgcagaccgagacccgaggcggaggcggaccgcgagccggccatgtcggtggtggggttggacgtgggctcgcagagctgctacatcgcggtagcccgggccgggggcatcgagaccatcgccaatgagttcagcgaccggtgcaccccgtcagtcatatcatttggatcaaaaaatagaacaatcggagttgcagccaaaaatcagcaaatcactcatgcaaacaatacggtgtctaacttcaaaagatttcatggccgagcattcaatgaccccttcattcaaaaggagaaggaaaacttgagttacgatttggttccattgaaaaatggtggagttggaataaaggtaatgtacatgggtgaagaacatctatttagtgtggagcagataacagccatgttgttgactaagctgaaggaaactgctgaaaacagcctcaagaaaccagtaacagattgtgttatttcagtcccctccttctttacagatgctgagaggcgatctgtgttagatgctgcacagattgttggcctaaactgtttaagacttatgaatgacatgacagctgttgctttgaattacggaatttataagcaggatctcccaagcctggatgagaaacctcggatagtggtttttgttgatatgggacattcagcttttcaagtgtctgcttgtgcttttaacaagggaaaattgaaggtactgggaacagcttttgatcctttcttaggaggaaaaaacttcgatgaaaagttagtggaacatttttgtgcagaatttaaaactaagtacaagttggatgcaaaatccaaaatacgagcactcctacgtctgtatcaggaatgtgaaaaactgaaaaagctaatgagctctaacagcacagaccttccactgaatatcgaatgctttatgaatgataaagatgtttccggaaagatgaacaggtcacaatttgaagaactctgtgctgaacttctgcaaaagatagaagtacccctttattcactgttggaacaaactcatctcaaagtagaagatgtgagtgcagttgagattgttggaggcgctacacgaattccagctgtgaaggaaagaattgccaaattctttggaaaagatattagcacaacactcaatgcagatgaagcagtagccagaggatgtgcattacagtgtgcaatactttccccggcatttaaagttagagaattttccgtcacagatgcagttccttttccaatatctctgatctggaaccatgattcagaagatactgaaggtgttcatgaagtctttagtcgaaaccatgctgctcctttctccaaagttctcacctttctgagaagggggccttttgagctagaagctttctattctgatccccaaggagttccatatccagaagcaaaaataggccgctttgtagttcagaatgtttctgcacagaaagatggagaaaaatctagagtaaaagtcaaagtgcgagtcaacacccatggcattttcaccatctctacggcatctatggtggagaaagtcccaactgaggagaatgaaatgtcttctgaagctgacatggagtgtctgaatcagagaccaccagaaaacccagacactgataaaaatgtccagcaagacaacagtgaagctggaacacagccccaggtacaaactgatgctcaacaaacctcacagtctcccccttcacctgaacttacctcagaagaaaacaaaatcccagatgctgacaaagcaaatgaaaaaaaagttgaccagcctccagaagctaaaaagcccaaaataaaggtggtgaatgttgagctgcctattgaagccaacttggtctggcagttagggaaagaccttcttaacatgtatattgagacagagggtaagatgataatgcaagataaattggaaaaagaaaggaatgatgctaaaaatgcagttgaggaatatgtgtatgagttcagagacaagctgtgtggaccatatgaaaaatttatatgtgagcaggatcatcaaaattttttgagactcctcacagaaactgaagactggctgtatgaagaaggagaggaccaagctaaacaagcatatgttgacaagttggaagaattaatgaaaattggcactccagttaaagttcggtttcaggaagctgaagaacggccaaaaatgtttgaagaactaggacagaggctgcagcattatgccaagatagcagctgacttcagaaataaggatgagaaatacaaccatattgatgagtctgaaatgaaaaaagtggagaagtctgttaatgaagtgatggaatggatgaataatgtcatgaatgctcaggctaaaaagagtcttgatcaggatccagttgtacgtgctcaggaaattaaaacaaaaatcaaggaattgaacaacacatgtgaacccgttgtaacacaaccgaaaccaaaaattgaatcacccaaactggaaagaactccaaatggcccaaatattgataaaaaggaagaagatttagaagacaaaaacaattttggtgctgaacctccacatcagaatggtgaatgttaccctaatgagaaaaattctgttaatatggacttggactagataaccttaaattggcctattccttcaattaataaaatatttttgccatagtatgtgactctacataacatactgaaactatttatattttcttttttaaggatatttagaaattttgtgtattatatggaaaaagaaaaaaagcttaagtctgtagtctttatgatcctaaaagggaaaattgccttggtaactttcagattcctgtggaattgtgaattcatactaagctttctgtgcagtctcaccatttgcatcactgaggatgaaactgacttttgtcttttggagtgttcctgccaaggtagttttcttgcattttgctctccattcagcatgtgtgtgggtgtggatgtttataaacaagactaagtctgacttcataagggctttctaaaaccatttctgtccaagagaaaatgactttttgctttgatattaaaaattcaatgagtaaaacaaaagctagtcaaatgtgttagcagcatgcagaacaaaaactttaaactttctctctcactatacagtatattgtcatgtgaaagtgtggaatggaagaaatgtcgatcctgttgtaactgattgtgaacacttttatgagctttaaaataaagttcatcttatggtgtcatttctaaactgttgattttgtcactaatttaaaaaatgagatgagggagaatatgaattattctagcagaaatgaagttagtgtccagtttttcttttttactgcttatgttctctcttttctaagtgaaaatgtttttctcctgacagaaaaatagcatatgtttattacattaaagcattttaaaaatactataaagtgaataaaacttaaaatcttgccacccagaagaaaacattgttaacacttcgttatacatccttggagccttttacccctaatgatgggggtatatttgtgtgagtgtctatgttatagtgctgtaggctgtttttaaaaactctgtgccagggaaattagtaaatacagtcaagtgttgtaactgcataaatgtagtgagttcattataaagacatacttaaaaataccaatcttgctattggtagatttaggtgtttctcatttttgctgttctaaataatgctgcaatgaatctatctggttgttttgtaagcacaaaattgaagtagtgttggaggtaggggagaagacacatgcacttaggataggtgacaaccagctcctcactagggtgcaacagtttattctttttttttttttggtagagctggggtttcgctatgttgcccaagttcgtcttgaactcctgggctcaagcaatctgtctgcctcagcctcccaaagtgctgggattacatggtgtgagccaccatgcccagccatttatgatcttgatgagggccaactttccctcttccacaagggattaatcttagaactatagccaatttattataagtactatttagctactctgtgctccacacatcacggagtaatatcttcaaactatgaggtttagtaacacttgactgctgaggtttatttcctcagctctgatgcttcctgggtgaagatgtaagttattaaattaactcaaattttaaagctaacacttcattccatctagaccaggtagctcgtcatttgtacgtctgataggtgcttcaacatctcagaattggcttatttttcatgcattgcatattgtactcatttgtaatattggaatgtaaaatgttcttactaagaatctttatgtcagctattcaacatttccctactttataatttctagctgctttaccatttagcaactttaaatttttatgcagttaatatgtttctttggtttttatgttttctgaatgtctttaatgcacattaatgtatacttagtagatacacatttacacattgagaagtgaagataggtttgtgttctgtgtacaattaggacatccattaaaaaagatttttaaaaactgtgaatgggaaaacatgtttttcctcctgtcctaaaatagaacctgatgacgggagggagcatcagtcagtctggcctaaatcagtgtactgcgcttttggatgcgggcaaaagtattgtcatgttgattactttataataacgtattaatatcattggctcaaacagttgtgatatatacctagtaatcatcgaggatctcaaagatatgcaccagtttgaataaatgctgtttaaagattaaattttacaattcatttta

SEQ ID NO: 443661 - DNA, 3533 bp, Homo sapiens
tgagtaaatgccgcagattctggaaagttctgatcagtgcgatacataaggctgaggaagtgggacctccccttttgggtcggtagttcagcgccggcgccggtgtgcgagccgcggcagagtgaggcaggcaacccgaggtgcggagcgacctgcggaggctgagccccgctttctcccagggtttcttatcagccagccgccgctgtccccgggggagtaggaggctcctgacaggccgcggctgtctgtgtgtccttctgagtgtcagaggaacggccagaccccgcgggccggagcagaacgcggccagggcagaaagcggcggcaggagaagcaggcagggggccggaggacgcagaccgagacccgaggcggaggcggaccgcgagccggccatgtcggtggtggggttggacgtgggctcgcagagctgctacatcgcggtagcccgggccgggggcatcgagaccatcgccaatgagttcagcgaccggtgcaccccgtcagtcatatcatttggatcaaaaaatagaacaatcggagttgcagccaaaaatcagcaaatcactcatgcaaacaatacggtgtctaacttcaaaagatttcatggccgagcattcaatgaccccttcattcaaaaggagaaggaaaacttgagttacgatttggttccattgaaaaatggtggagttggaataaaggtaatgtacatgggtgaagaacatctatttagtgtggagcagataacagccatgttgttgactaagctgaaggaaactgctgaaaacagcctcaagaaaccagtaacagattgtgttatttcagtcccctccttctttacagatgctgagaggcgatctgtgttagatgctgcacagattgttggcctaaactgtttaagacttatgaatgacatgacagctgttgctttgaattacggaatttataagcaggatctcccaagcctggatgagaaacctcggatagtggtttttgttgatatgggacattcagcttttcaagtgtctgcttgtgcttttaacaagggaaaattgaaggtactgggaacagcttttgatcctttcttaggaggaaaaaacttcgatgaaaagttagtggaacatttttgtgcagaatttaaaactaagtacaagttggatgcaaaatccaaaatacgagcactcctacgtctgtatcaggaatgtgaaaaactgaaaaagctaatgagctctaacagcacagaccttccactgaatatcgaatgctttatgaatgataaagatgtttccggaaagatgaacaggtcacaatttgaagaactctgtgctgaacttctgcaaaagatagaagtacccctttattcactgttggaacaaactcatctcaaagtagaagatgtgagtgcagttgagattgttggaggcgctacacgaattccagctgtgaaggaaagaattgccaaattctttggaaaagatattagcacaacactcaatgcagatgaagcagtagccagaggatgtgcattacagtgtgcaatactttccccggcatttaaagttagagaattttccgtcacagatgcagttccttttccaatatctctgatctggaaccatgattcagaagatactgaaggtgttcatgaagtctttagtcgaaaccatgctgctcctttctccaaagttctcacctttctgagaagggggccttttgagctagaagctttctattctgatccccaaggagttccatatccagaagcaaaaataggccgctttgtagttcagaatgtttctgcacagaaagatggagaaaaatctagagtaaaagtcaaagtgcgagtcaacacccatggcattttcaccatctctacggcatctatggtggagaaagtcccaactgaggagaatgaaatgtcttctgaagctgacatggagtgtctgaatcagagaccaccagaaaacccagacactgataaaaatgtccagcaagacaacagtgaagctggaacacagccccaggtacaaactgatgctcaacaaacctcacagtctcccccttcacctgaacttacctcagaagaaaacaaaatcccagatgctgacaaagcaaatgaaaaaaaagttgaccagcctccagaagctaaaaagcccaaaataaaggtggtgaatgttgagctgcctattgaagccaacttggtctggcagttagggaaagaccttcttaacatgtatattgagacagagggtaagatgataatgcaagataaattggaaaaagaaaggaatgatgctaaaaatgcagttgaggaatatgtgtatgagttcagagacaagctgtgtggaccatatgaaaaatttatatgtgagcaggatcatcaaaattttttgagactcctcacagaaactgaagactggctgtatgaagaaggagaggaccaagctaaacaagcatatgttgacaagttggaagaattaatgaaaattggcactccagttaaagttcggtttcaggaagctgaagaacggccaaaaatgtttgaagaactaggacagaggctgcagcattatgccaagatagcagctgacttcagaaataaggatgagaaatacaaccatattgatgagtctgaaatgaaaaaagtggagaagtctgttaatgaagtgatggaatggatgaataatgtcatgaatgctcaggctaaaaagagtcttgatcaggatccagttgtacgtgctcaggaaattaaaacaaaaatcaaggaattgaacaacacatgtgaacccgttgtaacacaaccgaaaccaaaaattgaatcacccaaactggaaagaactccaaatggcccaaatattgataaaaaggaagaagatttagaagacaaaaacaattttggtgctgaacctccacatcagaatgattcctgtggaattgtgaattcatactaagctttctgtgcagtctcaccatttgcatcactgaggatgaaactgacttttgtcttttggagaaaaaaaactgtactgcttgttcaagagggctgtgattaaaatctttaagcatttgttcctgccaaggtagttttcttgcattttgctctccattcagcatgtgtgtgggtgtggatgtttataaacaagactaagtctgacttcataagggctttctaaaaccatttctgtccaagagaaaatgactttttgctttgatattaaaaattcaatgagtaaaacaaaagctagtcaaatgtgttagcagcatgcagaacaaaaactttaaactttctctctcactatacagtatattgtcatgtgaaagtgtggaatggaagaaatgtcgatcctgttgtaactgattgtgaacacttttatgagctttaaaataaagttcatcttatggtgtcatttctagtgggatctatttctggctccctcaggggggggcccgggcccccaaattcgccctattgttgagtcgttttttccgcccccctattgggctgtcgtttttaaaaaccttctggactg

SEQ ID NO: 443662 - DNA, 3108 bp, Homo sapiens
tgagtaaatgccgcagattctggaaagttctgatcagtgcgatacataaggctgaggaagtgggacctccccttttgggtcggtagttcagcgccggcgccggtgtgcgagccgcggcagagtgaggcaggcaacccgaggtgcggagcgacctgcggaggctgagccccgctttctcccagggtttcttatcagccagccgccgctgtccccgggggagtaggaggctcctgacaggccgcggctgtctgtgtgtccttctgagtgtcagaggaacggccagaccccgcgggccggagcagaacgcggccagggcagaaagcggcggcaggagaagcaggcagggggccggaggacgcagaccgagacccgaggcggaggcggaccgcgagccggccatgtcggtggtggggttggacgtgggctcgcagagctgctacatcgcggtagcccgggccgggggcatcgagaccatcgccaatgagttcagcgaccggtgcaccccgtcagtcatatcatttggatcaaaaaatagaacaatcggagttgcagccaaaaatcagcaaatcactcatgcaaacaatacggtgtctaacttcaaaagatttcatggccgagcattcaatgaccccttcattcaaaaggagaaggaaaacttgagttacgatttggttccattgaaaaatggtggagttggaataaaggtaatgtacatgggtgaagaacatctatttagtgtggagcagataacagccatgttgttgactaagctgaaggaaactgctgaaaacagcctcaagaaaccagtaacagattgtgttatttcagtcccctccttctttacagatgctgagaggcgatctgtgttagatgctgcacagattgttggcctaaactgtttaagacttatgaatgacatgacagctgttgctttgaattacggaatttataagcaggatctcccaagcctggatgagaaacctcggatagtggtttttgttgatatgggacattcagcttttcaagtgtctgcttgtgcttttaacaagggaaaattgaaggtactgggaacagcttttgatcctttcttaggaggaaaaaacttcgatgaaaagttagtggaacatttttgtgcagaatttaaaactaagtacaagttggatgcaaaatccaaaatacgagcactcctacgtctgtatcaggaatgtgaaaaactgaaaaagctaatgagctctaacagcacagaccttccactgaatatcgaatgctttatgaatgataaagatgtttccggaaagatgaacaggtcacaatttgaagaactctgtgctgaacttctgcaaaagatagaagtacccctttattcactgttggaacaaactcatctcaaagtagaagatgtgagtgcagttgagattgttggaggcgctacacgaattccagctgtgaaggaaagaattgccaaattctttggaaaagatattagcacaacactcaatgcagatgaagcagtagccagaggatgtgcattacagtgtgcaatactttccccggcatttaaagttagagaattttccgtcacagatgcagttccttttccaatatctctgatctggaaccatgattcagaagatactgaaggtgttcatgaagtctttagtcgaaaccatgctgctcctttctccaaagttctcacctttctgagaagggggccttttgagctagaagctttctattctgatccccaaggagttccatatccagaagcaaaaataggccgctttgtagttcagaatgtttctgcacagaaagatggagaaaaatctagagtaaaagtcaaagtgcgagtcaacacccatggcattttcaccatctctacggcatctatggtggagaaagtcccaactgaggagaatgaaatgtcttctgaagctgacatggagtgtctgaatcagagaccaccagaaaacccagacactgataaaaatgtccagcaagacaacagtgaagctggaacacagccccaggtacaaactgatgctcaacaaacctcacagtctcccccttcacctgaacttacctcagaagaaaacaaaatcccagatgctgacaaagcaaatgaaaaaaaagttgaccagcctccagaagctaaaaagcccaaaataaaggtggtgaatgttgagctgcctattgaagccaacttggtctggcagttagggaaagaccttcttaacatgtatattgagacagagggtaagatgataatgcaagataaattggaaaaagaaaggaatgatgctaaaaatgcagttgaggaatatgtgtatgagttcagagacaagctgtgtggaccatatgaaaaatttatatgtgagcaggatcatcaaaattttttgagactcctcacagaaactgaagactggctgtatgaagaaggagaggaccaagctaaacaagcatatgttgacaagttggaagaattaatgaaaattggcactccagttaaagttcggtttcaggaagctgaagaacggccaaaaatgtttgaagaactaggacagaggctgcagcattatgccaagatagcagctgacttcagaaataaggatgagaaatacaaccatattgatgagtctgaaatgaaaaaagtggagaagtctgttaatgaagtgatggaatggatgaataatgtcatgaatgctcaggctaaaaagagtcttgatcaggatccagttgtacgtgctcaggaaattaaaacaaaaatcaaggtgagtgttactgtctcgtgtttactgctgggttcacttacggactcaagttgcaatcatttgaaccttcaacatagccatttttcctgtaaatcttttacctcatcctaactgaaaccagcttttcttagtctattattctgtcacaaaatacagaagacctcataagtttgttgaatttccacttctccatttattcattcatttcaacaagtgtatttgttgagcacctgtcatgtaccagtccttgttctcaggattaaacaagtgtgcaaagtgtagtctctgcccttatggaactcatcttgtaatgggagggagaccaacagtaaacaagcct

SEQ ID NO: 443663 - DNA, 2723 bp, Homo sapiens
caccaggtttttcgtacttggcgatattaatgagaatcttgaagttgggatgctgccaaaaattgcttggtaagttgctggtgctggaattgtgaattcatactaagctttctgtgcagtctcaccatttgcatcactgaggatgaaactgacttttgtcttttggagaaaaaaaactgtactgcttgttcaagagggctgtgattaaaacaaaaatcaaggaattgaacaacacatgtgaacccgttgtaacacaaccgaaaccaaaaattgaatcacccaaactggaaagaactccaaatggcccaaatattgataaaaaggaagaagatttagaagacaaaaacaattttggtgctgaacctccacatcagaatggtgaatgttaccctaatgagaaaaattctgttaatatggacttggactagataaccttaaattggcctattccttcaattaataaaatatttttgccatagtatgtgactctacataacatactgaaactatttatattttcttttttaaggatatttagaaattttgtgtattatatggaaaaagaaaaaaagcttaagtctgtagtctttatgatcctaaaagggaaaattgccttggtaactttcagattcctgtggaattgtgaattcatactaagctttctgtgcagtctcaccatttgcatcactgaggatgaaactgacttttgtcttttggagaaaaaaaactgtactgcttgttcaagagggctgtgattaaaatctttaagcatttgttcctgccaaggtagttttcttgcattttgctctccattcagcatgtgtgtgggtgtggatgtttataaacaagactaagtctgacttcataagggctttctaaaaccatttctgtccaagagaaaatgactttttgctttgatattaaaaattcaatgagtaaaacaaaagctagtcaaatgtgttagcagcatgcagaacaaaaactttaaactttctctctcactatacagtatattgtcatgtgaaagtgtggaatggaagaaatgtcgatcctgttgtaactgattgtgaacacttttatgagctttaaaataaagttcatcttatggtgtcatttctaaactgttgattttgtcactaatttaaaaaatgagatgagggagaatatgaattattctagcagaaatgaagttagtgtccagtttttcttttttactgcttatgttctctcttttctaagtgaaaatgtttttctcctgacagaaaaatagcatatgtttattacattaaagcattttaaaaatactataaagtgaataaaacttaaaatcttgccacccagaagaaaacattgttaacacttcgttatacatccttggagccttttacccctaatgatgggggtatatttgtgtgagtgtctatgttatagtgctgtaggctgtttttaaaaactctgtgccagggaaattagtaaatacagtcaagtgttgtaactgcataaatgtagtgagttcattataaagacatacttaaaaataccaatcttgctattggtagatttaggtgtttctcatttttgctgttctaaataatgctgcaatgaatctatctggttgttttgtaagcacaaaattgaagtagtgttggaggtaggggagaagacacatgcacttaggataggtgacaaccagctcctcactagggtgcaacagtttattctttttttttttttggtagagctggggtttcgctatgttgcccaagttcgtcttgaactcctgggctcaagcaatctgtctgcctcagcctcccaaagtgctgggattacatggtgtgagccaccatgcccagccatttatgatcttgatgagggccaactttccctcttccacaagggattaatcttagaactatagccaatttattataagtactatttagctactctgtgctccacacatcacggagtaatatcttcaaactatgaggtttagtaacacttgactgctgaggtttatttcctcagctctgatgcttcctgggtgaagatgtaagttattaaattaactcaaattttaaagctaacacttcattccatctagaccaggtagctcgtcatttgtacgtctgataggtgcttcaacatctcagaattggcttatttttcatgcattgcatattgtactcatttgtaatattggaatgtaaaatgttcttactaagaatctttatgtcagctattcaacatttccctactttataatttctagctgctttaccatttagcaactttaaatttttatgcagttaatatgtttctttggtttttatgttttctgaatgtctttaatgcacattaatgtatacttagtagatacacatttacacattgagaagtgaagataggtttgtgttctgtgtacaattaggacatccattaaaaaagatttttaaaaactgtgaatgggaaaacatgtttttcctcctgtcctaaaatagaacctgatgacgggagggagcatcagtcagtctggcctaaatcagtgtactgcgcttttggatgcgggcaaaagtattgtcatgttgattactttataataacgtattaatatcattggctcaaacagttgtgatatatacctagtaatcatcgaggatctcaaagatatgcaccagtttgaataaatgctgtttaaagattaaattttacaattcatttta

SEQ ID NO: 443664 - DNA, 2562 bp, Homo sapiens
cgcggccgcgcgaccggctgcgagagacgacagagggtgctcaggaaaaaacaaaatcaggaattgaacaacacatgtgaacccgttgtaacacaaccgaaaccaaaaattgaatcacccaaactggaaagaactccaaatggcccaaatattgataaaaaggaagaagatttagaagacaaaaacaattttggtgctgaacctccacatcagaatggtgaatgttaccctaatgagaaaaattctgttaatatggacttggactagataaccttaaattggcctattccttcaattaataaaatatttttgccatagtatgtgactctacataacatactgaaactatttatattttcttttttaaggatatttagaaattttgtgtattatatggaaaaagaaaaaaagcttaagtctgtagtctttatgatcctaaaagggaaaattgccttggtaactttcagattcctgtggaattgtgaattcatactaagctttctgtgcagtctcaccatttgcatcactgaggatgaaactgacttttgtcttttggagaaaaaaaactgtactgcttgttcaagagggctgtgattaaaatctttaagcatttgttcctgccaaggtagttttcttgcattttgctctccattcagcatgtgtgtgggtgtggatgtttataaacaagactaagtctgacttcataagggctttctaaaaccatttctgtccaagagaaaatgactttttgctttgatattaaaaattcaatgagtaaaacaaaagctagtcaaatgtgttagcagcatgcagaacaaaaactttaaactttctctctcactatacagtatattgtcatgtgaaagtgtggaatggaagaaatgtcgatcctgttgtaactgattgtgaacacttttatgagctttaaaataaagttcatcttatggtgtcatttctaaactgttgattttgtcactaatttaaaaaatgagatgagggagaatatgaattattctagcagaaatgaagttagtgtccagtttttcttttttactgcttatgttctctcttttctaagtgaaaatgtttttctcctgacagaaaaatagcatatgtttattacattaaagcattttaaaaatactataaagtgaataaaacttaaaatcttgccacccagaagaaaacattgttaacacttcgttatacatccttggagccttttacccctaatgatgggggtatatttgtgtgagtgtctatgttatagtgctgtaggctgtttttaaaaactctgtgccagggaaattagtaaatacagtcaagtgttgtaactgcataaatgtagtgagttcattataaagacatacttaaaaataccaatcttgctattggtagatttaggtgtttctcatttttgctgttctaaataatgctgcaatgaatctatctggttgttttgtaagcacaaaattgaagtagtgttggaggtaggggagaagacacatgcacttaggataggtgacaaccagctcctcactagggtgcaacagtttattctttttttttttttggtagagctggggtttcgctatgttgcccaagttcgtcttgaactcctgggctcaagcaatctgtctgcctcagcctcccaaagtgctgggattacatggtgtgagccaccatgcccagccatttatgatcttgatgagggccaactttccctcttccacaagggattaatcttagaactatagccaatttattataagtactatttagctactctgtgctccacacatcacggagtaatatcttcaaactatgaggtttagtaacacttgactgctgaggtttatttcctcagctctgatgcttcctgggtgaagatgtaagttattaaattaactcaaattttaaagctaacacttcattccatctagaccaggtagctcgtcatttgtacgtctgataggtgcttcaacatctcagaattggcttatttttcatgcattgcatattgtactcatttgtaatattggaatgtaaaatgttcttactaagaatctttatgtcagctattcaacatttccctactttataatttctagctgctttaccatttagcaactttaaatttttatgcagttaatatgtttctttggtttttatgttttctgaatgtctttaatgcacattaatgtatacttagtagatacacatttacacattgagaagtgaagataggtttgtgttctgtgtacaattaggacatccattaaaaaagatttttaaaaactgtgaatgggaaaacatgtttttcctcctgtcctaaaatagaacctgatgacgggagggagcatcagtcagtctggcctaaatcagtgtactgcgcttttggatgcgggcaaaagtattgtcatgttgattactttataataacgtattaatatcattggctcaaacagttgtgatatatacctagtaatcatcgaggatctcaaagatatgcaccagtttgaataaatgctgtttaaagattaaattttacaattcatttta

SEQ ID NO: 443665 - DNA, 2254 bp, Homo sapiens
tgagtaaatgccgcagattctggaaagttctgatcagtgcgatacataaggctgaggaagtgggacctccccttttgggtcggtagttcagcgccggcgccggtgtgcgagccgcggcagagtgaggcaggcaacccgaggtgcggagcgacctgcggaggctgagccccgctttctcccagggtttcttatcagccagccgccgctgtccccgggggagtaggaggctcctgacaggccgcggctgtctgtgtgtccttctgagtgtcagaggaacggccagaccccgcgggccggagcagaacgcggccagggcagaaagcggcggcaggagaagcaggcagggggccggaggacgcagaccgagacccgaggcggaggcggaccgcgagccggccatgtcggtggtggggttggacgtgggctcgcagagctgctacatcgcggtagcccgggccgggggcatcgagaccatcgccaatgagttcagcgaccggtgcaccccgtcagtcatatcatttggatcaaaaaatagaacaatcggagttgcagccaaaaatcagcaaatcactcatgcaaacaatacggtgtctaacttcaaaagatttcatggccgagcattcaatgaccccttcattcaaaaggagaaggaaaacttgagttacgatttggttccattgaaaaatggtggagttggaataaaggtaatgtacatgggtgaagaacatctatttagtgtggagcagataacagccatgttgttgactaagctgaaggaaactgctgaaaacagcctcaagaaaccagtaacagattgtgttatttcagtcccctccttctttacagatgctgagaggcgatctgtgttagatgctgcacagattgttggcctaaactgtttaagacttatgaatgacatgacagctgttgctttgaattacggaatttataagcaggatctcccaagcctggatgagaaacctcggatagtggtttttgttgatatgggacattcagcttttcaagtgtctgcttgtgcttttaacaagggaaaattgaaggtactgggaacagcttttgatcctttcttaggaggaaaaaacttcgatgaaaagttagtggaacatttttgtgcagaatttaaaactaagtacaagttggatgcaaaatccaaaatacgagcactcctacgtctgtatcaggaatgtgaaaaactgaaaaagctaatgagctctaacagcacagaccttccactgaatatcgaatgctttatgaatgataaagatgtttccggaaagatgaacaggtcacaatttgaagaactctgtgctgaacttctgcaaaagatagaagtacccctttattcactgttggaacaaactcatctcaaagtagaagatgtgagtgcagttgagattgttggaggcgctacacgaattccagctgtgaaggaaagaattgccaaattctttggaaaagatattagcacaacactcaatgcagatgaagcagtagccagaggatgtgcattacagtgtgcaatactttccccggcatttaaagttagagaattttccgtcacagatgcagttccttttccaatatctctgatctggaaccatgattcagaagatactgaaggtgttcatgaagtctttagtcgaaaccatgctgctcctttctccaaagttctcacctttctgagaagggggccttttgagctagaagctttctattctgatccccaaggagttccatatccagaagcaaaaataggccgctttgtagttcagaatgtttctgcacagaaagatggagaaaaatctagagtaaaagtcaaagtgcgagtcaacacccatggcattttcaccatctctacggcatctatggtggagaaagtcccaactgaggagaatgaaatgtcttctgaagctgacatggagtgtctgaatcagagaccaccagaaaacccagacactgatgtaagtttgtggataaacctttgtgtttgaatagagttgacttagttctaagctataggagaattgggtagggaagggttaaaatgaatgttttccttcatgaataattttgatcagaattttaggtaatgataatagcgcttgccggttagtggtaatacacagcttgaaatttggtgaattgtgactaaattctgtgtaacttaatttgaagtaactagtatatgacagagtagatgatgttttatcttgttgggagcttttttggtttt

SEQ ID NO: 443666 - DNA, 2414 bp, Homo sapiens
tgagtaaatgccgcagattctggaaagttctgatcagtgcgatacataaggctgaggaagtgggacctccccttttgggtcggtagttcagcgccggcgccggtgtgcgagccgcggcagagtgaggcaggcaacccgaggtgcggagcgacctgcggaggctgagccccgctttctcccagggtttcttatcagccagccgccgctgtccccgggggagtaggaggctcctgacaggccgcggctgtctgtgtgtccttctgagtgtcagaggaacggccagaccccgcgggccggagcagaacgcggccagggcagaaagcggcggcaggagaagcaggcagggggccggaggacgcagaccgagacccgaggcggaggcggaccgcgagccggccatgtcggtggtggggttggacgtgggctcgcagagctgctacatcgcggtagcccgggccgggggcatcgagaccatcgccaatgagttcagcgaccggtgcaccccgtcagtcatatcatttggatcaaaaaatagaacaatcggagttgcagccaaaaatcagcaaatcactcatgcaaacaatacggtgtctaacttcaaaagatttcatggccgagcattcaatgaccccttcattcaaaaggagaaggaaaacttgagttacgatttggttccattgaaaaatggtggagttggaataaaggtaatgtacatgggtgaagaacatctatttagtgtggagcagataacagccatgttgttgactaagctgaaggaaactgctgaaaacagcctcaagaaaccagtaacagattgtgttatttcagtcccctccttctttacagatgctgagaggcgatctgtgttagatgctgcacagattgttggcctaaactgtttaagacttatgaatgacatgacagctgttgctttgaattacggaatttataagcaggatctcccaagcctggatgagaaacctcggatagtggtttttgttgatatgggacattcagcttttcaagtgtctgcttgtgcttttaacaagggaaaattgaaggtactgggaacagcttttgatcctttcttaggaggaaaaaacttcgatgaaaagttagtggaacatttttgtgcagaatttaaaactaagtacaagttggatgcaaaatccaaaatacgagcactcctacgtctgtatcaggaatgtgaaaaactgaaaaagctaatgagctctaacagcacagaccttccactgaatatcgaatgctttatgaatgataaagatgtttccggaaagatgaacaggtcacaatttgaagaactctgtgctgaacttctgcaaaagatagaagtacccctttattcactgttggaacaaactcatctcaaagtagaagatgtgagtgcagttgagattgttggaggcgctacacgaattccagctgtgaaggaaagaattgccaaattctttggaaaagatattagcacaacactcaatgcagatgaagcagtagccagaggatgtgcattacagtgtgcaatactttccccggcatttaaagttagagaattttccgtcacagatgcagttccttttccaatatctctgatctggaaccatgattcagaagatactgaaggtgttcatgaagtctttagtcgaaaccatgctgctcctttctccaaagttctcacctttctgagaagggggccttttgagctagaagctttctattctgatccccaaggagttccatatccagaagcaaaaatagcaaaaattgaatcacccaaactggaaagaactccaaatggcccaaatattgataaaaaggaagaagatttagaagacaaaaacaattttggtgctgaacctccacatcagaatggtgaatgttaccctaatgagaaaaattctgttaatatggacttggactagataaccttaaattggcctattccttcaattaataaaatatttttgccatagtatgtgactctacataacatactgaaactatttatattttcttttttaaggatatttagaaattttgtgtattatatggaaaaagaaaaaaagcttaagtctgtagtctttatgatcctaaaagggaaaattgccttggtaactttcagattcctgtggaattgtgaattcatactaagctttctgtgcagtctcaccatttgcatcactgaggatgaaactgacttttgtcttttggagaaaaaaaactgtactgcttgttcaagagggctgtgattaaaatctttaagcattgtccggcagggagtcccgccttggccccaacgatgggtgtgggggtttcacaaaaagccgacccaagggttaaccatggccagaaaagtcggaaaacaaaagggcacaagtacagcaaccatccccgcc

SEQ ID NO: 443667 - DNA, 1315 bp, Homo sapiens
tgagtaaatgccgcagattctggaaagttctgatcagtgcgatacataaggctgaggaagtgggacctccccttttgggtcggtagttcagcgccggcgccggtgtgcgagccgcggcagagtgaggcaggcaacccgaggtgcggagcgacctgcggaggctgagccccgctttctcccagggtttcttatcagccagccgccgctgtccccgggggagtaggaggctcctgacaggccgcggctgtctgtgtgtccttctgagtgtcagaggaacggccagaccccgcgggccggagcagaacgcggccagggcagaaagcggcggcaggagaagcaggcagggggccggaggacgcagaccgagacccgaggcggaggcggaccgcgagccggccatgtcggtggtggggttggacgtgggctcgcagagctgctacatcgcggtagcccgggccgggggcatcgagaccatcgccaatgagttcagcgaccggtgcaccccgtcagtcatatcatttggatcaaaaaatagaacaatcggagttgcagccaaaaatcagcaaatcactcatgcaaacaatacggtgtctaacttcaaaagatttcatggccgagcattcaatgaccccttcattcaaaaggagaaggaaaacttgagttacgatttggttccattgaaaaatggtggagttggaataaaggtaatgtacatgggtgaagaacatctatttagtgtggagcagataacagccatgttgttgactaagctgaaggaaactgctgaaaacagcctcaagaaaccagtaacagattgtgttatttcagtcccctccttctttacagatgctgagaggcgatctgtgttagatgctgcacagattgttggcctaaactgtttaagacttatgaatgacatgacagctgttgctttgaattacggaatttataagcaggatctcccaagcctggatgagaaacctcggatagtggtttttgttgatatgggacattcagcttttcaagtgtctgcttgtgcttttaacaagggaaaattgaaggtactgggaacagcttttgatcctttcttaggaggaaaaaacttcgatgaaaagttagtggaacatttttgtgcagaatttaaaactaagtacaagttggatgcaaaatccaaaatacgagcactcctacgtctgtatcaggaatgtgaaaaactgaaaaagctaatgagctctaacagcacattcactgctcgatcgctctatcgaccgatcaagcatgtttctccgcaacggctgaacaggcctctcttgct

SEQ ID NO: 443668 - DNA, 735 bp, Homo sapiens
aagcatatgttgacaagttggaagaattaatggtaggtcgttttctcccccaaaaggtggtacttgtgttttaaactatagactttaaaataaaattatgataactattaatttattacattttattttagaaaattggcactccagttaaagttcggtttcaggaagctgaagaacggccaaaaatgtttgaagaactaggacagaggctgcagcattatgccaagatagcagctgacttcagaaataaggtgagtcagtctttttgtacatagggaggaagttaacctagattttaataagctaacacttaagctgggaatcatcatgaatagtcttaactttgaaattttggtatttgaggttagaggtagatttgaacttgagcttcctggaaagttgagtcaaatgagatactattgttcaataaattctacagaatgaccgtgttatttttgttcaggatgagaaatacaaccatattgatgagtctgaaatgaaaaaagtggagaagtctgttaatgaagtgatggaatggatgaataatgtcatgaatgctcaggctaaaaagagtcttgatcaggatccagttgtacgtgctcaggaaattaaaacaaaaatcaaggtgagtgttactgtctcgtgtttactgctgggttcacttacggactcaagttgcaatcatttgaaccttcaacatagccatttttcctgtaaatcttttacctcatccta

SEQ ID NO: 443669 - DNA, 593 bp, Homo sapiens
gggtataaaacctcacaagtttagcagggaaaaaaaggaatgaaacagtgataaaattctagtgtgtttgttcagagctttagtgatagttttcactgtctttgagtttatcttgcagattttgaaatctttaaagtctgtcgtcacactattttgcctcttgttccctcttgctgcttactttctggcattttctataggagaaggaaaaagtataaataaaatctgttcatagatgggaaattcagtgaaattggtgggcctcagggcaacttatgtgcactcataggattggtttgagttgtaaagtgaataaataaaattactaaaattactggtaggtggtgaaattaaagaaaaaaattaaaatctcaaacttctttttgcagcaaatcactcatgcaaacaatacggtgtctaacttcaaaagatttcatggccgagcattcaatgaccccttcattcaaaaggagaaggaaaacttgagttacgatttggttccattgaaaaatggtggagttggaataaaggtaatataattgagcaaccttagaaaaataccaacttattaatacttaaaaatacgaacttat

SEQ ID NO: 443670 - DNA, 424 bp, Homo sapiens
actataactcgagagcgccgattaagccggagcgagaggatatgcattagcagatgtgcaatactttccccggcatttaaagttagagaattttccgtcacagatgcagttccttttccaatatctctgatctggaaccatgattcagaagatactgaaggtgttcatgaagtctttagtcgaaaccatgctgctcctttctccaaagttctcacctttctgagaagggggccttttgagctagaagctttctattctgatccccaaggagttccatatccagaagcaaaaatagtaggtaaggagttcattgtgtatattttactcttttagttaaagacttagcttctcactcattgtacaaactttaaaagttgtcttattcttagtaatgttgaggggaacataattctgtgtgaagaca

SEQ ID NO: 443671 - DNA, 5138 bp, Homo sapiens
tgagtaaatgccgcagattctggaaagttctgatcagtgcgatacataaggctgaggaagtgggacctccccttttgggtcggtagttcagcgccggcgccggtgtgcgagccgcggcagagtgaggcaggcaacccgaggtgcggagcgacctgcggaggctgagccccgctttctcccagggtttcttatcagccagccgccgctgtccccgggggagtaggaggctcctgacaggccgcggctgtctgtgtgtccttctgagtgtcagaggaacggccagaccccgcgggccggagcagaacgcggccagggcagaaagcggcggcaggagaagcaggcagggggccggaggacgcagaccgagacccgaggcggaggcggaccgcgagccggccatgtcggtggtggggttggacgtgggctcgcagagctgctacatcgcggtagcccgggccgggggcatcgagaccatcgccaatgagttcagcgaccggtgcaccccgtcagtcatatcatttggatcaaaaaatagaacaatcggagttgcagccaaaaatcagcaaatcactcatgcaaacaatacggtgtctaacttcaaaagatttcatggccgagcattcaatgaccccttcattcaaaaggagaaggaaaacttgagttacgatttggttccattgaaaaatggtggagttggaataaaggtaatgtacatgggtgaagaacatctatttagtgtggagcagataacagccatgttgttgactaagctgaaggaaactgctgaaaacagcctcaagaaaccagtaacagattgtgttatttcagtcccctccttctttacagatgctgagaggcgatctgtgttagatgctgcacagattgttggcctaaactgtttaagacttatgaatgacatgacagctgttgctttgaattacggaatttataagcaggatctcccaagcctggatgagaaacctcggatagtggtttttgttgatatgggacattcagcttttcaagtgtctgcttgtgcttttaacaagggaaaattgaaggtactgggaacagcttttgatcctttcttaggaggaaaaaacttcgatgaaaagttagtggaacatttttgtgcagaatttaaaactaagtacaagttggatgcaaaatccaaaatacgagcactcctacgtctgtatcaggaatgtgaaaaactgaaaaagctaatgagctctaacagcacagaccttccactgaatatcgaatgctttatgaatgataaagatgtttccggaaagatgaacaggtcacaatttgaagaactctgtgctgaacttctgcaaaagatagaagtacccctttattcactgttggaacaaactcatctcaaagtagaagatgtgagtgcagttgagattgttggaggcgctacacgaattccagctgtgaaggaaagaattgccaaattctttggaaaagatattagcacaacactcaatgcagatgaagcagtagccagaggatgtgcattacagtgtgcaatactttccccggcatttaaagttagagaattttccgtcacagatgcagttccttttccaatatctctgatctggaaccatgattcagaagatactgaaggtgttcatgaagtctttagtcgaaaccatgctgctcctttctccaaagttctcacctttctgagaagggggccttttgagctagaagctttctattctgatccccaaggagttccatatccagaagcaaaaataggccgctttgtagttcagaatgtttctgcacagaaagatggagaaaaatctagagtaaaagtcaaagtgcgagtcaacacccatggcattttcaccatctctacggcatctatggtggagaaagtcccaactgaggagaatgaaatgtcttctgaagctgacatggagtgtctgaatcagagaccaccagaaaacccagacactgatgcaaatgaaaaaaaagttgaccagcctccagaagctaaaaagcccaaaataaaggtggtgaatgttgagctgcctattgaagccaacttggtctggcagttagggaaagaccttcttaacatgtatattgagacagagggtaagatgataatgcaagataaattggaaaaagaaaggaatgatgctaaaaatgcagttgaggaatatgtgtatgagttcagagacaagctgtgtggaccatatgaaaaatttatatgtgagcaggatcatcaaaattttttgagactcctcacagaaactgaagactggctgtatgaagaaggagaggaccaagctaaacaagcatatgttgacaagttggaagaattaatgaaaattggcactccagttaaagttcggtttcaggaagctgaagaacggccaaaaatgtttgaagaactaggacagaggctgcagcattatgccaagatagcagctgacttcagaaataaggatgagaaatacaaccatattgatgagtctgaaatgaaaaaagtggagaagtctgttaatgaagtgatggaatggatgaataatgtcatgaatgctcaggctaaaaagagtcttgatcaggatccagttgtacgtgctcaggaaattaaaacaaaaatcaaggaattgaacaacacatgtgaacccgttgtaacacaaccgaaaccaaaaattgaatcacccaaactggaaagaactccaaatggcccaaatattgataaaaaggaagaagatttagaagacaaaaacaattttggtgctgaacctccacatcagaatggtgaatgttaccctaatgagaaaaattctgttaatatggacttggactagataaccttaaattggcctattccttcaattaataaaatatttttgccatagtatgtgactctacataacatactgaaactatttatattttcttttttaaggatatttagaaattttgtgtattatatggaaaaagaaaaaaagcttaagtctgtagtctttatgatcctaaaagggaaaattgccttggtaactttcagattcctgtggaattgtgaattcatactaagctttctgtgcagtctcaccatttgcatcactgaggatgaaactgacttttgtcttttggagaaaaaaaactgtactgcttgttcaagagggctgtgattaaaatctttaagcatttgttcctgccaaggtagttttcttgcattttgctctccattcagcatgtgtgtgggtgtggatgtttataaacaagactaagtctgacttcataagggctttctaaaaccatttctgtccaagagaaaatgactttttgctttgatattaaaaattcaatgagtaaaacaaaagctagtcaaatgtgttagcagcatgcagaacaaaaactttaaactttctctctcactatacagtatattgtcatgtgaaagtgtggaatggaagaaatgtcgatcctgttgtaactgattgtgaacacttttatgagctttaaaataaagttcatcttatggtgtcatttctaaactgttgattttgtcactaatttaaaaaatgagatgagggagaatatgaattattctagcagaaatgaagttagtgtccagtttttcttttttactgcttatgttctctcttttctaagtgaaaatgtttttctcctgacagaaaaatagcatatgtttattacattaaagcattttaaaaatactataaagtgaataaaacttaaaatcttgccacccagaagaaaacattgttaacacttcgttatacatccttggagccttttacccctaatgatgggggtatatttgtgtgagtgtctatgttatagtgctgtaggctgtttttaaaaactctgtgccagggaaattagtaaatacagtcaagtgttgtaactgcataaatgtagtgagttcattataaagacatacttaaaaataccaatcttgctattggtagatttaggtgtttctcatttttgctgttctaaataatgctgcaatgaatctatctggttgttttgtaagcacaaaattgaagtagtgttggaggtaggggagaagacacatgcacttaggataggtgacaaccagctcctcactagggtgcaacagtttattctttttttttttttggtagagctggggtttcgctatgttgcccaagttcgtcttgaactcctgggctcaagcaatctgtctgcctcagcctcccaaagtgctgggattacatggtgtgagccaccatgcccagccatttatgatcttgatgagggccaactttccctcttccacaagggattaatcttagaactatagccaatttattataagtactatttagctactctgtgctccacacatcacggagtaatatcttcaaactatgaggtttagtaacacttgactgctgaggtttatttcctcagctctgatgcttcctgggtgaagatgtaagttattaaattaactcaaattttaaagctaacacttcattccatctagaccaggtagctcgtcatttgtacgtctgataggtgcttcaacatctcagaattggcttatttttcatgcattgcatattgtactcatttgtaatattggaatgtaaaatgttcttactaagaatctttatgtcagctattcaacatttccctactttataatttctagctgctttaccatttagcaactttaaatttttatgcagttaatatgtttctttggtttttatgttttctgaatgtctttaatgcacattaatgtatacttagtagatacacatttacacattgagaagtgaagataggtttgtgttctgtgtacaattaggacatccattaaaaaagatttttaaaaactgtgaatgggaaaacatgtttttcctcctgtcctaaaatagaacctgatgacgggagggagcatcagtcagtctggcctaaatcagtgtactgcgcttttggatgcgggcaaaagtattgtcatgttgattactttataataacgtattaatatcattggctcaaacagttgtgatatatacctagtaatcatcgaggatctcaaagatatgcaccagtttgaataaatgctgtttaaagattaaattttacaattcatttta

SEQ ID NO: 443672 - DNA, 5147 bp, Homo sapiens
tgagtaaatgccgcagattctggaaagttctgatcagtgcgatacataaggctgaggaagtgggacctccccttttgggtcggtagttcagcgccggcgccggtgtgcgagccgcggcagagtgaggcaggcaacccgaggtgcggagcgacctgcggaggctgagccccgctttctcccagggtttcttatcagccagccgccgctgtccccgggggagtaggaggctcctgacaggccgcggctgtctgtgtgtccttctgagtgtcagaggaacggccagaccccgcgggccggagcagaacgcggccagggcagaaagcggcggcaggagaagcaggcagggggccggaggacgcagaccgagacccgaggcggaggcggaccgcgagccggccatgtcggtggtggggttggacgtgggctcgcagagctgctacatcgcggtagcccgggccgggggcatcgagaccatcgccaatgagttcagcgaccggtgcaccccgtcagtcatatcatttggatcaaaaaatagaacaatcggagttgcagccaaaaatcagcaaatcactcatgcaaacaatacggtgtctaacttcaaaagatttcatggccgagcattcaatgaccccttcattcaaaaggagaaggaaaacttgagttacgatttggttccattgaaaaatggtggagttggaataaaggtcccctccttctttacagatgctgagaggcgatctgtgttagatgctgcacagattgttggcctaaactgtttaagacttatgaatgacatgacagctgttgctttgaattacggaatttataagcaggatctcccaagcctggatgagaaacctcggatagtggtttttgttgatatgggacattcagcttttcaagtgtctgcttgtgcttttaacaagggaaaattgaaggtactgggaacagcttttgatcctttcttaggaggaaaaaacttcgatgaaaagttagtggaacatttttgtgcagaatttaaaactaagtacaagttggatgcaaaatccaaaatacgagcactcctacgtctgtatcaggaatgtgaaaaactgaaaaagctaatgagctctaacagcacagaccttccactgaatatcgaatgctttatgaatgataaagatgtttccggaaagatgaacaggtcacaatttgaagaactctgtgctgaacttctgcaaaagatagaagtacccctttattcactgttggaacaaactcatctcaaagtagaagatgtgagtgcagttgagattgttggaggcgctacacgaattccagctgtgaaggaaagaattgccaaattctttggaaaagatattagcacaacactcaatgcagatgaagcagtagccagaggatgtgcattacagtgtgcaatactttccccggcatttaaagttagagaattttccgtcacagatgcagttccttttccaatatctctgatctggaaccatgattcagaagatactgaaggtgttcatgaagtctttagtcgaaaccatgctgctcctttctccaaagttctcacctttctgagaagggggccttttgagctagaagctttctattctgatccccaaggagttccatatccagaagcaaaaataggccgctttgtagttcagaatgtttctgcacagaaagatggagaaaaatctagagtaaaagtcaaagtgcgagtcaacacccatggcattttcaccatctctacggcatctatggtggagaaagtcccaactgaggagaatgaaatgtcttctgaagctgacatggagtgtctgaatcagagaccaccagaaaacccagacactgataaaaatgtccagcaagacaacagtgaagctggaacacagccccaggtacaaactgatgctcaacaaacctcacagtctcccccttcacctgaacttacctcagaagaaaacaaaatcccagatgctgacaaagcaaatgaaaaaaaagttgaccagcctccagaagctaaaaagcccaaaataaaggtggtgaatgttgagctgcctattgaagccaacttggtctggcagttagggaaagaccttcttaacatgtatattgagacagagggtaagatgataatgcaagataaattggaaaaagaaaggaatgatgctaaaaatgcagttgaggaatatgtgtatgagttcagagacaagctgtgtggaccatatgaaaaatttatatgtgagcaggatcatcaaaattttttgagactcctcacagaaactgaagactggctgtatgaagaaggagaggaccaagctaaacaagcatatgttgacaagttggaagaattaatgaaaattggcactccagttaaagttcggtttcaggaagctgaagaacggccaaaaatgtttgaagaactaggacagaggctgcagcattatgccaagatagcagctgacttcagaaataaggatgagaaatacaaccatattgatgagtctgaaatgaaaaaagtggagaagtctgttaatgaagtgatggaatggatgaataatgtcatgaatgctcaggctaaaaagagtcttgatcaggatccagttgtacgtgctcaggaaattaaaacaaaaatcaaggaattgaacaacacatgtgaacccgttgtaacacaaccgaaaccaaaaattgaatcacccaaactggaaagaactccaaatggcccaaatattgataaaaaggaagaagatttagaagacaaaaacaattttggtgctgaacctccacatcagaatggtgaatgttaccctaatgagaaaaattctgttaatatggacttggactagataaccttaaattggcctattccttcaattaataaaatatttttgccatagtatgtgactctacataacatactgaaactatttatattttcttttttaaggatatttagaaattttgtgtattatatggaaaaagaaaaaaagcttaagtctgtagtctttatgatcctaaaagggaaaattgccttggtaactttcagattcctgtggaattgtgaattcatactaagctttctgtgcagtctcaccatttgcatcactgaggatgaaactgacttttgtcttttggagaaaaaaaactgtactgcttgttcaagagggctgtgattaaaatctttaagcatttgttcctgccaaggtagttttcttgcattttgctctccattcagcatgtgtgtgggtgtggatgtttataaacaagactaagtctgacttcataagggctttctaaaaccatttctgtccaagagaaaatgactttttgctttgatattaaaaattcaatgagtaaaacaaaagctagtcaaatgtgttagcagcatgcagaacaaaaactttaaactttctctctcactatacagtatattgtcatgtgaaagtgtggaatggaagaaatgtcgatcctgttgtaactgattgtgaacacttttatgagctttaaaataaagttcatcttatggtgtcatttctaaactgttgattttgtcactaatttaaaaaatgagatgagggagaatatgaattattctagcagaaatgaagttagtgtccagtttttcttttttactgcttatgttctctcttttctaagtgaaaatgtttttctcctgacagaaaaatagcatatgtttattacattaaagcattttaaaaatactataaagtgaataaaacttaaaatcttgccacccagaagaaaacattgttaacacttcgttatacatccttggagccttttacccctaatgatgggggtatatttgtgtgagtgtctatgttatagtgctgtaggctgtttttaaaaactctgtgccagggaaattagtaaatacagtcaagtgttgtaactgcataaatgtagtgagttcattataaagacatacttaaaaataccaatcttgctattggtagatttaggtgtttctcatttttgctgttctaaataatgctgcaatgaatctatctggttgttttgtaagcacaaaattgaagtagtgttggaggtaggggagaagacacatgcacttaggataggtgacaaccagctcctcactagggtgcaacagtttattctttttttttttttggtagagctggggtttcgctatgttgcccaagttcgtcttgaactcctgggctcaagcaatctgtctgcctcagcctcccaaagtgctgggattacatggtgtgagccaccatgcccagccatttatgatcttgatgagggccaactttccctcttccacaagggattaatcttagaactatagccaatttattataagtactatttagctactctgtgctccacacatcacggagtaatatcttcaaactatgaggtttagtaacacttgactgctgaggtttatttcctcagctctgatgcttcctgggtgaagatgtaagttattaaattaactcaaattttaaagctaacacttcattccatctagaccaggtagctcgtcatttgtacgtctgataggtgcttcaacatctcagaattggcttatttttcatgcattgcatattgtactcatttgtaatattggaatgtaaaatgttcttactaagaatctttatgtcagctattcaacatttccctactttataatttctagctgctttaccatttagcaactttaaatttttatgcagttaatatgtttctttggtttttatgttttctgaatgtctttaatgcacattaatgtatacttagtagatacacatttacacattgagaagtgaagataggtttgtgttctgtgtacaattaggacatccattaaaaaagatttttaaaaactgtgaatgggaaaacatgtttttcctcctgtcctaaaatagaacctgatgacgggagggagcatcagtcagtctggcctaaatcagtgtactgcgcttttggatgcgggcaaaagtattgtcatgttgattactttataataacgtattaatatcattggctcaaacagttgtgatatatacctagtaatcatcgaggatctcaaagatatgcaccagtttgaataaatgctgtttaaagattaaattttacaattcatttta

SEQ ID NO: 443673 - DNA, 5227 bp, Homo sapiens
tgagtaaatgccgcagattctggaaagttctgatcagtgcgatacataaggctgaggaagtgggacctccccttttgggtcggtagttcagcgccggcgccggtgtgcgagccgcggcagagtgaggcaggcaacccgaggtgcggagcgacctgcggaggctgagccccgctttctcccagggtttcttatcagccagccgccgctgtccccgggggagtaggaggctcctgacaggccgcggctgtctgtgtgtccttctgagtgtcagaggaacggccagaccccgcgggccggagcagaacgcggccagggcagaaagcggcggcaggagaagcaggcagggggccggaggacgcagaccgagacccgaggcggaggcggaccgcgagccggccatgtcggtggtggggccgggggcatcgagaccatcgccaatgagttcagcgaccggtgcaccccgtcagtcatatcatttggatcaaaaaatagaacaatcggagttgcagccaaaaatcagcaaatcactcatgcaaacaatacggtgtctaacttcaaaagatttcatggccgagcattcaatgaccccttcattcaaaaggagaaggaaaacttgagttacgatttggttccattgaaaaatggtggagttggaataaaggtaatgtacatgggtgaagaacatctatttagtgtggagcagataacagccatgttgttgactaagctgaaggaaactgctgaaaacagcctcaagaaaccagtaacagattgtgttatttcagtcccctccttctttacagatgctgagaggcgatctgtgttagatgctgcacagattgttggcctaaactgtttaagacttatgaatgacatgacagctgttgctttgaattacggaatttataagcaggatctcccaagcctggatgagaaacctcggatagtggtttttgttgatatgggacattcagcttttcaagtgtctgcttgtgcttttaacaagggaaaattgaaggtactgggaacagcttttgatcctttcttaggaggaaaaaacttcgatgaaaagttagtggaacatttttgtgcagaatttaaaactaagtacaagttggatgcaaaatccaaaatacgagcactcctacgtctgtatcaggaatgtgaaaaactgaaaaagctaatgagctctaacagcacagaccttccactgaatatcgaatgctttatgaatgataaagatgtttccggaaagatgaacaggtcacaatttgaagaactctgtgctgaacttctgcaaaagatagaagtacccctttattcactgttggaacaaactcatctcaaagtagaagatgtgagtgcagttgagattgttggaggcgctacacgaattccagctgtgaaggaaagaattgccaaattctttggaaaagatattagcacaacactcaatgcagatgaagcagtagccagaggatgtgcattacagtgtgcaatactttccccggcatttaaagttagagaattttccgtcacagatgcagttccttttccaatatctctgatctggaaccatgattcagaagatactgaaggtgttcatgaagtctttagtcgaaaccatgctgctcctttctccaaagttctcacctttctgagaagggggccttttgagctagaagctttctattctgatccccaaggagttccatatccagaagcaaaaataggccgctttgtagttcagaatgtttctgcacagaaagatggagaaaaatctagagtaaaagtcaaagtgcgagtcaacacccatggcattttcaccatctctacggcatctatggtggagaaagtcccaactgaggagaatgaaatgtcttctgaagctgacatggagtgtctgaatcagagaccaccagaaaacccagacactgataaaaatgtccagcaagacaacagtgaagctggaacacagccccaggtacaaactgatgctcaacaaacctcacagtctcccccttcacctgaacttacctcagaagaaaacaaaatcccagatgctgacaaagcaaatgaaaaaaaagttgaccagcctccagaagctaaaaagcccaaaataaaggtggtgaatgttgagctgcctattgaagccaacttggtctggcagttagggaaagaccttcttaacatgtatattgagacagagggtaagatgataatgcaagataaattggaaaaagaaaggaatgatgctaaaaatgcagttgaggaatatgtgtatgagttcagagacaagctgtgtggaccatatgaaaaatttatatgtgagcaggatcatcaaaattttttgagactcctcacagaaactgaagactggctgtatgaagaaggagaggaccaagctaaacaagcatatgttgacaagttggaagaattaatgaaaattggcactccagttaaagttcggtttcaggaagctgaagaacggccaaaaatgtttgaagaactaggacagaggctgcagcattatgccaagatagcagctgacttcagaaataaggatgagaaatacaaccatattgatgagtctgaaatgaaaaaagtggagaagtctgttaatgaagtgatggaatggatgaataatgtcatgaatgctcaggctaaaaagagtcttgatcaggatccagttgtacgtgctcaggaaattaaaacaaaaatcaaggaattgaacaacacatgtgaacccgttgtaacacaaccgaaaccaaaaattgaatcacccaaactggaaagaactccaaatggcccaaatattgataaaaaggaagaagatttagaagacaaaaacaattttggtgctgaacctccacatcagaatggtgaatgttaccctaatgagaaaaattctgttaatatggacttggactagataaccttaaattggcctattccttcaattaataaaatatttttgccatagtatgtgactctacataacatactgaaactatttatattttcttttttaaggatatttagaaattttgtgtattatatggaaaaagaaaaaaagcttaagtctgtagtctttatgatcctaaaagggaaaattgccttggtaactttcagattcctgtggaattgtgaattcatactaagctttctgtgcagtctcaccatttgcatcactgaggatgaaactgacttttgtcttttggagaaaaaaaactgtactgcttgttcaagagggctgtgattaaaatctttaagcatttgttcctgccaaggtagttttcttgcattttgctctccattcagcatgtgtgtgggtgtggatgtttataaacaagactaagtctgacttcataagggctttctaaaaccatttctgtccaagagaaaatgactttttgctttgatattaaaaattcaatgagtaaaacaaaagctagtcaaatgtgttagcagcatgcagaacaaaaactttaaactttctctctcactatacagtatattgtcatgtgaaagtgtggaatggaagaaatgtcgatcctgttgtaactgattgtgaacacttttatgagctttaaaataaagttcatcttatggtgtcatttctaaactgttgattttgtcactaatttaaaaaatgagatgagggagaatatgaattattctagcagaaatgaagttagtgtccagtttttcttttttactgcttatgttctctcttttctaagtgaaaatgtttttctcctgacagaaaaatagcatatgtttattacattaaagcattttaaaaatactataaagtgaataaaacttaaaatcttgccacccagaagaaaacattgttaacacttcgttatacatccttggagccttttacccctaatgatgggggtatatttgtgtgagtgtctatgttatagtgctgtaggctgtttttaaaaactctgtgccagggaaattagtaaatacagtcaagtgttgtaactgcataaatgtagtgagttcattataaagacatacttaaaaataccaatcttgctattggtagatttaggtgtttctcatttttgctgttctaaataatgctgcaatgaatctatctggttgttttgtaagcacaaaattgaagtagtgttggaggtaggggagaagacacatgcacttaggataggtgacaaccagctcctcactagggtgcaacagtttattctttttttttttttggtagagctggggtttcgctatgttgcccaagttcgtcttgaactcctgggctcaagcaatctgtctgcctcagcctcccaaagtgctgggattacatggtgtgagccaccatgcccagccatttatgatcttgatgagggccaactttccctcttccacaagggattaatcttagaactatagccaatttattataagtactatttagctactctgtgctccacacatcacggagtaatatcttcaaactatgaggtttagtaacacttgactgctgaggtttatttcctcagctctgatgcttcctgggtgaagatgtaagttattaaattaactcaaattttaaagctaacacttcattccatctagaccaggtagctcgtcatttgtacgtctgataggtgcttcaacatctcagaattggcttatttttcatgcattgcatattgtactcatttgtaatattggaatgtaaaatgttcttactaagaatctttatgtcagctattcaacatttccctactttataatttctagctgctttaccatttagcaactttaaatttttatgcagttaatatgtttctttggtttttatgttttctgaatgtctttaatgcacattaatgtatacttagtagatacacatttacacattgagaagtgaagataggtttgtgttctgtgtacaattaggacatccattaaaaaagatttttaaaaactgtgaatgggaaaacatgtttttcctcctgtcctaaaatagaacctgatgacgggagggagcatcagtcagtctggcctaaatcagtgtactgcgcttttggatgcgggcaaaagtattgtcatgttgattactttataataacgtattaatatcattggctcaaacagttgtgatatatacctagtaatcatcgaggatctcaaagatatgcaccagtttgaataaatgctgtttaaagattaaattttacaattcatttta

SEQ ID NO: 443674 - DNA, 5020 bp, Homo sapiens
tgagtaaatgccgcagattctggaaagttctgatcagtgcgatacataaggctgaggaagtgggacctccccttttgggtcggtagttcagcgccggcgccggtgtgcgagccgcggcagagtgaggcaggcaacccgaggtgcggagcgacctgcggaggctgagccccgctttctcccagggtttcttatcagccagccgccgctgtccccgggggagtaggaggctcctgacaggccgcggctgtctgtgtgtccttctgagtgtcagaggaacggccagaccccgcgggccggagcagaacgcggccagggcagaaagcggcggcaggagaagcaggcagggggccggaggacgcagaccgagacccgaggcggaggcggaccgcgagccggccatgtcggtggtggggttggacgtgggctcgcagagctgctacatcgcggtagcccgggccgggggcatcgagaccatcgccaatgagttcagcgaccggtgcaccccgtcagtcatatcatttggatcaaaaaatagaacaatcggagttgcagccaaaaatcagcaaatcactcatgcaaacaatacggtgtctaacttcaaaagatttcatggccgagcattcaatgaccccttcattcaaaaggagaaggaaaacttgagttacgatttggttccattgaaaaatggtggagttggaataaaggtaatgtacatgggtgaagaacatctatttagtgtggagcagataacagccatgttgttgactaagctgaaggaaactgctgaaaacagcctcaagaaaccagtaacagattgtgttatttcagtcccctccttctttacagatgctgagaggcgatctgtgttagatgctgcacagattgttggcctaaactgtttaagacttatgaatgacatgacagctgttgctttgaattacggaatttataagcaggatctcccaagcctggatgagaaacctcggatagtggtttttgttgatatgggacattcagcttttcaagtgtctgcttgtgcttttaacaagggaaaattgaaggtactgggaacagcttttgatcctttcttaggaggaaaaaacttcgatgaaaagttagtggaacatttttgtgcagaatttaaaactaagtacaagttggatgcaaaatccaaaatacgagcactcctacgtctgtatcaggaatgtgaaaaactgaaaaagctaatgagctctaacagcacagaccttccactgaatatcgaatgctttatgaatgataaagatgtttccggaaagatgaacaggtcacaatttgaagaactctgtgctgaacttctgcaaaagatagaagtacccctttattcactgttggaacaaactcatctcaaagtagaagatgtgagtgcagttgagattgttggaggcgctacacgaattccagctgtgaaggaaagaattgccaaattctttggaaaagatattagcacaacactcaatgcagatgaagcagtagccagaggatgtgcattacagtgtgcaatactttccccggcatttaaagttagagaattttccgtcacagatgcagttccttttccaatatctctgatctggaaccatgattcagaagatactgaaggtgttcatgaagtctttagtcgaaaccatgctgctcctttctccaaagttctcacctttctgagaagggggccttttgagctagaagctttctattctgatccccaaggagttccatatccagaagcaaaaataggccgctttgtagttcagaatgtttctgcacagaaagatggagaaaaatctagagtaaaagtcaaagtgcgagtcaacacccatggcattttcaccatctctacggcatctatggtggagaaagtcccaactgaggagaatgaaatgtcttctgaagctgacatggagtgtctgaatcagagaccaccagaaaacccagacactgataaaaatgtccagcaagacaacagtgaagctggaacacagccccaggtacaaactgatgctcaacaaacctcacagtctcccccttcacctgaacttacctcagaagaaaacaaaatcccagatgctgacaaagcaaatgaaaaaaaagttgaccagcctccagaagctaaaaagcccaaaataaaggtggtgaatgttgagctgcctattgaagccaacttggtctggcagttagggaaagaccttcttaacatgtatattgagacagagggtaagatgataatgcaagataaattggaaaaagaaaggaatgatgctaaaaatgcagttgaggaatatgtgtatgagttcagagacaagctgtgtggaccatatgaaaaatttatatgtgagcaggatcatcaaaattttttgagactcctcacagaaactgaagactggctgtatgaagaaggagaggaccaagctaaacaagcatatgttgacaagttggaagaattaatgaaaattggcactccagttaaagttcggtttcaggaagctgaagaacggccaaaaatgtttgaagaactaggacagaggctgcagcattatgccaagatagcagctgacttcagaaataaggatgagaaatacaaccatattgatgagtctgaaatgaaaaaagtggagaagtctgttaatgaagtgatggaatggatgaataatgtcatgaatgctcaggctaaaaagagtcttgatcaggatccagttgtacgtgctcaggaaattaaaacaaaaatcaaggaattgaacaacacatgtgaacccgttgtaacacaaccgaaaccaaaaattgaatcacccaaactggaaagaactccaaatggcccaaatattgataaaaaggaagaagatttagaagacaaaaacaattttggtgctgaacctccacatcagaatgattcctgtggaattgtgaattcatactaagctttctgtgcagtctcaccatttgcatcactgaggatgaaactgacttttgtcttttggagaaaaaaaactgtactgcttgttcaagagggctgtgattaaaatctttaagcatttgttcctgccaaggtagttttcttgcattttgctctccattcagcatgtgtgtgggtgtggatgtttataaacaagactaagtctgacttcataagggctttctaaaaccatttctgtccaagagaaaatgactttttgctttgatattaaaaattcaatgagtaaaacaaaagctagtcaaatgtgttagcagcatgcagaacaaaaactttaaactttctctctcactatacagtatattgtcatgtgaaagtgtggaatggaagaaatgtcgatcctgttgtaactgattgtgaacacttttatgagctttaaaataaagttcatcttatggtgtcatttctaaactgttgattttgtcactaatttaaaaaatgagatgagggagaatatgaattattctagcagaaatgaagttagtgtccagtttttcttttttactgcttatgttctctcttttctaagtgaaaatgtttttctcctgacagaaaaatagcatatgtttattacattaaagcattttaaaaatactataaagtgaataaaacttaaaatcttgccacccagaagaaaacattgttaacacttcgttatacatccttggagccttttacccctaatgatgggggtatatttgtgtgagtgtctatgttatagtgctgtaggctgtttttaaaaactctgtgccagggaaattagtaaatacagtcaagtgttgtaactgcataaatgtagtgagttcattataaagacatacttaaaaataccaatcttgctattggtagatttaggtgtttctcatttttgctgttctaaataatgctgcaatgaatctatctggttgttttgtaagcacaaaattgaagtagtgttggaggtaggggagaagacacatgcacttaggataggtgacaaccagctcctcactagggtgcaacagtttattctttttttttttttggtagagctggggtttcgctatgttgcccaagttcgtcttgaactcctgggctcaagcaatctgtctgcctcagcctcccaaagtgctgggattacatggtgtgagccaccatgcccagccatttatgatcttgatgagggccaactttccctcttccacaagggattaatcttagaactatagccaatttattataagtactatttagctactctgtgctccacacatcacggagtaatatcttcaaactatgaggtttagtaacacttgactgctgaggtttatttcctcagctctgatgcttcctgggtgaagatgtaagttattaaattaactcaaattttaaagctaacacttcattccatctagaccaggtagctcgtcatttgtacgtctgataggtgcttcaacatctcagaattggcttatttttcatgcattgcatattgtactcatttgtaatattggaatgtaaaatgttcttactaagaatctttatgtcagctattcaacatttccctactttataatttctagctgctttaccatttagcaactttaaatttttatgcagttaatatgtttctttggtttttatgttttctgaatgtctttaatgcacattaatgtatacttagtagatacacatttacacattgagaagtgaagataggtttgtgttctgtgtacaattaggacatccattaaaaaagatttttaaaaactgtgaatgggaaaacatgtttttcctcctgtcctaaaatagaacctgatgacgggagggagcatcagtcagtctggcctaaatcagtgtactgcgcttttggatgcgggcaaaagtattgtcatgttgattactttataataacgtattaatatcattggctcaaacagttgtgatatatacctagtaatcatcgaggatctcaaagatatgcaccagtttgaataaatgctgtttaaagattaaattttacaattcatttta

SEQ ID NO: 443675 - DNA, 5136 bp, Homo sapiens
tgagtaaatgccgcagattctggaaagttctgatcagtgcgatacataaggctgaggaagtgggacctccccttttgggtcggtagttcagcgccggcgccggtgtgcgagccgcggcagagtgaggcaggcaacccgaggtgcggagcgacctgcggaggctgagccccgctttctcccagggtttcttatcagccagccgccgctgtccccgggggagtaggaggctcctgacaggccgcggctgtctgtgtgtccttctgagtgtcagaggaacggccagaccccgcgggccggagcagaacgcggccagggcagaaagcggcggcaggagaagcaggcagggggccggaggacgcagaccgagacccgaggcggaggcggaccgcgagccggccatgtcggtggtggggttggacgtgggctcgcagagctgctacatcgcggtagcccgggccgggggcatcgagaccatcgccaatgagttcagcgaccggtgcaccccgtcagtcatatcatttggatcaaaaaatagaacaatcggagttgcagccaaaaatcagcaaatcactcatgcaaacaatacggtgtctaacttcaaaagatttcatggccgagcattcaatgaccccttcattcaaaaggagaaggaaaacttgagttacgatttggttccattgaaaaatggtggagttggaataaaggtaatgtacatgggtgaagaacatctatttagtgtggagcagataacagccatgttgttgactaagctgaaggaaactgctgaaaacagcctcaagaaaccagtaacagattgtgttatttcagtcccctccttctttacagatgctgagaggcgatctgtgttagatgctgcacagattgttggcctaaactgtttaagacttatgaatgacatgacagctgttgctttgaattacggaatttataagcaggatctcccaagcctggatgagaaacctcggatagtggtttttgttgatatgggacattcagcttttcaagtgtctgcttgtgcttttaacaagggaaaattgaaggtactgggaacagcttttgatcctttcttaggaggaaaaaacttcgatgaaaagttagtggaacatttttgtgcagaatttaaaactaagtacaagttggatgcaaaatccaaaatacgagcactcctacgtctgtatcaggaatgtgaaaaactgaaaaagctaatgagctctaacagcacagaccttccactgaatatcgaatgctttatgaatgataaagatgtttccggaaagatgaacaggtcacaatttgaagaactctgtgctgaacttctgcaaaagatagaagtacccctttattcactgttggaacaaactcatctcaaagtagaagatgtgagtgcagttgagattgttggaggcgctacacgaattccagctgtgaaggaaagaattgccaaattctttggaaaagatattagcacaacactcaatgcagatgaagcagtagccagaggatgtgcattacagtgtgcaatactttccccggcatttaaagttagagaattttccgtcacagatgcagttccttttccaatatctctgatctggaaccatgattcagaagatactgaaggtgttcatgaagtctttagtcgaaaccatgctgctcctttctccaaagttctcacctttctgagaagggggccttttgagctagaagctttctattctgatccccaaggagttccatatccagaagcaaaaataggccgctttgtagttcagaatgtttctgcacagaaagatggagaaaaatctagagtaaaagtcaaagtgcgagtcaacacccatggcattttcaccatctctacggcatctatggtggagaaagtcccaactgaggagaatgaaatgtcttctgaagctgacatggagtgtctgaatcagagaccaccagaaaacccagacactgataaaaatgtccagcaagacaacagtgaagctggaacacagccccaggtacaaactgatgctcaacaaacctcacagtctcccccttcacctgaacttacctcagaagaaaacaaaatcccagatgctgacaaagcaaatgaaaaaaaagttgaccagcctccagaagctaaaaagcccaaaataaaggtggtgaatgttgagctgcctattgaagccaacttggtctggcagttagggaaagaccttcttaacatgtatattgagacagagggtaagatgataatgcaagataaattggaaaaagaaaggaatgatgctaaaaatgcagttgaggaatatgtgtatgagttcagagacaagctgtgtggaccatatgaaaaatttatatgtgagcaggatcatcaaaattttttgagactcctcacagaaactgaagactggctgtatgaagaaggagaggaccaagctaaacaagcatatgttgacaagttggaagaattaatgaaaattggcactccagttaaagttcggtttcaggaagctgaagaacggccaaaaatgtttgaagaactaggacagaggctgcagcattatgccaagatagcagctgacttcagaaataaggatgagaaatacaaccatattgatgagtctgaaatgaaaaaagtggagaagtctgttaatgaagtgatggaatggatgaataatgtcatgaatgctcaggctaaaaagagtcttgatcaggatccagttgtacgtgctcaggaaattaaaacaaaaatcaaggaattgaacaacacatgtgaacccgttgtaacacaaccgaaaccaaaaattgaatcacccaaactggaaagaactccaaatggcccaaatattgataaaaaggaagaagatttagaagacaaaaacaattttggtgctgaacctccacatcagaatggtgaatgttaccctaatgagaaaaattctgttaatatggacttggactagataaccttaaattggcctattccttcaattaataaaatatttttgccatagtatgtgactctacataacatactgaaactatttatattttcttttttaaggatatttagaaattttgtgtattatatggaaaaagaaaaaaagcttaagtctgtagtctttatgatcctaaaagggaaaattgccttggtaactttcagattcctgtggaattgtgaattcatactaagctttctgtgcagtctcaccatttgcatcactgaggatgaaactgacttttgtcttttggagaaaaaaaactgtactgcttgttcaagagggctgtgattaaaatctttaagcatttgttcctgccaaggtagttttcttgcattttgctctccattcagcatgtgtgtgggtgtggatgtttataaacaagactaagtctgacttcataagggcttttatattgtcatgtgaaagtgtggaatggaagaaatgtcgatcctgttgtaactgattgtgaacacttttatgagctttaaaataaagttcatcttatggtgtcatttctaaactgttgattttgtcactaatttaaaaaatgagatgagggagaatatgaattattctagcagaaatgaagttagtgtccagtttttcttttttactgcttatgttctctcttttctaagtgaaaatgtttttctcctgacagaaaaatagcatatgtttattacattaaagcattttaaaaatactataaagtgaataaaacttaaaatcttgccacccagaagaaaacattgttaacacttcgttatacatccttggagccttttacccctaatgatgggggtatatttgtgtgagtgtctatgttatagtgctgtaggctgtttttaaaaactctgtgccagggaaattagtaaatacagtcaagtgttgtaactgcataaatgtagtgagttcattataaagacatacttaaaaataccaatcttgctattggtagatttaggtgtttctcatttttgctgttctaaataatgctgcaatgaatctatctggttgttttgtaagcacaaaattgaagtagtgttggaggtaggggagaagacacatgcacttaggataggtgacaaccagctcctcactagggtgcaacagtttattctttttttttttttggtagagctggggtttcgctatgttgcccaagttcgtcttgaactcctgggctcaagcaatctgtctgcctcagcctcccaaagtgctgggattacatggtgtgagccaccatgcccagccatttatgatcttgatgagggccaactttccctcttccacaagggattaatcttagaactatagccaatttattataagtactatttagctactctgtgctccacacatcacggagtaatatcttcaaactatgaggtttagtaacacttgactgctgaggtttatttcctcagctctgatgcttcctgggtgaagatgtaagttattaaattaactcaaattttaaagctaacacttcattccatctagaccaggtagctcgtcatttgtacgtctgataggtgcttcaacatctcagaattggcttatttttcatgcattgcatattgtactcatttgtaatattggaatgtaaaatgttcttactaagaatctttatgtcagctattcaacatttccctactttataatttctagctgctttaccatttagcaactttaaatttttatgcagttaatatgtttctttggtttttatgttttctgaatgtctttaatgcacattaatgtatacttagtagatacacatttacacattgagaagtgaagataggtttgtgttctgtgtacaattaggacatccattaaaaaagatttttaaaaactgtgaatgggaaaacatgtttttcctcctgtcctaaaatagaacctgatgacgggagggagcatcagtcagtctggcctaaatcagtgtactgcgcttttggatgcgggcaaaagtattgtcatgttgattactttataataacgtattaatatcattggctcaaacagttgtgatatatacctagtaatcatcgaggatctcaaagatatgcaccagtttgaataaatgctgtttaaagattaaattttacaattcatttta

SEQ ID NO: 443676 - DNA, 2967 bp, Homo sapiens
gagaatacctctttgttttgttgtgaaaaattctgaagtacgagtgccactaatattgtcatattttgtgttaaggatcatcaaaattttttgagactcctcacagaaactgaagactggctgtatgaagaaggagaggaccaagctaaacaagcatatgttgacaagttggaagaattaatgaaaattggcactccagttaaagttcggtttcaggaagctgaagaacggccaaaaatgtttgaagaactaggacagaggctgcagcattatgccaagatagcagctgacttcagaaataaggatgagaaatacaaccatattgatgagtctgaaatgaaaaaagtggagaagtctgttaatgaagtgatggaatggatgaataatgtcatgaatgctcaggctaaaaagagtcttgatcaggatccagttgtacgtgctcaggaaattaaaacaaaaatcaaggaattgaacaacacatgtgaacccgttgtaacacaaccgaaaccaaaaattgaatcacccaaactggaaagaactccaaatggcccaaatattgataaaaaggaagaagatttagaagacaaaaacaattttggtgctgaacctccacatcagaatggtgaatgttaccctaatgagaaaaattctgttaatatggacttggactagataaccttaaattggcctattccttcaattaataaaatatttttgccatagtatgtgactctacataacatactgaaactatttatattttcttttttaaggatatttagaaattttgtgtattatatggaaaaagaaaaaaagcttaagtctgtagtctttatgatcctaaaagggaaaattgccttggtaactttcagattcctgtggaattgtgaattcatactaagctttctgtgcagtctcaccatttgcatcactgaggatgaaactgacttttgtcttttggagaaaaaaaactgtactgcttgttcaagagggctgtgattaaaatctttaagcatttgttcctgccaaggtagttttcttgcattttgctctccattcagcatgtgtgtgggtgtggatgtttataaacaagactaagtctgacttcataagggctttctaaaaccatttctgtccaagagaaaatgactttttgctttgatattaaaaattcaatgagtaaaacaaaagctagtcaaatgtgttagcagcatgcagaacaaaaactttaaactttctctctcactatacagtatattgtcatgtgaaagtgtggaatggaagaaatgtcgatcctgttgtaactgattgtgaacacttttatgagctttaaaataaagttcatcttatggtgtcatttctaaactgttgattttgtcactaatttaaaaaatgagatgagggagaatatgaattattctagcagaaatgaagttagtgtccagtttttcttttttactgcttatgttctctcttttctaagtgaaaatgtttttctcctgacagaaaaatagcatatgtttattacattaaagcattttaaaaatactataaagtgaataaaacttaaaatcttgccacccagaagaaaacattgttaacacttcgttatacatccttggagccttttacccctaatgatgggggtatatttgtgtgagtgtctatgttatagtgctgtaggctgtttttaaaaactctgtgccagggaaattagtaaatacagtcaagtgttgtaactgcataaatgtagtgagttcattataaagacatacttaaaaataccaatcttgctattggtagatttaggtgtttctcatttttgctgttctaaataatgctgcaatgaatctatctggttgttttgtaagcacaaaattgaagtagtgttggaggtaggggagaagacacatgcacttaggataggtgacaaccagctcctcactagggtgcaacagtttattctttttttttttttggtagagctggggtttcgctatgttgcccaagttcgtcttgaactcctgggctcaagcaatctgtctgcctcagcctcccaaagtgctgggattacatggtgtgagccaccatgcccagccatttatgatcttgatgagggccaactttccctcttccacaagggattaatcttagaactatagccaatttattataagtactatttagctactctgtgctccacacatcacggagtaatatcttcaaactatgaggtttagtaacacttgactgctgaggtttatttcctcagctctgatgcttcctgggtgaagatgtaagttattaaattaactcaaattttaaagctaacacttcattccatctagaccaggtagctcgtcatttgtacgtctgataggtgcttcaacatctcagaattggcttatttttcatgcattgcatattgtactcatttgtaatattggaatgtaaaatgttcttactaagaatctttatgtcagctattcaacatttccctactttataatttctagctgctttaccatttagcaactttaaatttttatgcagttaatatgtttctttggtttttatgttttctgaatgtctttaatgcacattaatgtatacttagtagatacacatttacacattgagaagtgaagataggtttgtgttctgtgtacaattaggacatccattaaaaaagatttttaaaaactgtgaatgggaaaacatgtttttcctcctgtcctaaaatagaacctgatgacgggagggagcatcagtcagtctggcctaaatcagtgtactgcgcttttggatgcgggcaaaagtattgtcatgttgattactttataataacgtattaatatcattggctcaaacagttgtgatatatacctagtaatcatcgaggatctcaaagatatgcaccagtttgaataaatgctgtttaaagattaaattttacaattcatttta

SEQ ID NO: 443677 - DNA, 2487 bp, Homo sapiens
tgagtaaatgccgcagattctggaaagttctgatcagtgcgatacataaggctgaggaagtgggacctccccttttgggtcggtagttcagcgccggcgccggtgtgcgagccgcggcagagtgaggcaggcaacccgaggtgcggagcgacctgcggaggctgagccccgctttctcccagggtttcttatcagccagccgccgctgtccccgggggagtaggaggctcctgacaggccgcggctgtctgtgtgtccttctgagtgtcagaggaacggccagaccccgcgggccggagcagaacgcggccagggcagaaagcggcggcaggagaagcaggcagggggccggaggacgcagaccgagacccgaggcggaggcggaccgcgagccggccatgtcggtggtggggttggacgtgggctcgcagagctgctacatcgcggtagcccgggccgggggcatcgagaccatcgccaatgagttcagcgaccggtgcaccccgtcagtcatatcatttggatcaaaaaatagaacaatcggagttgcagccaaaaatcagcaaatcactcatgcaaacaatacggtgtctaacttcaaaagatttcatggccgagcattcaatgaccccttcattcaaaaggagaaggaaaacttgagttacgatttggttccattgaaaaatggtggagttggaataaaggtaatgtacatgggtgaagaacatctatttagtgtggagcagataacagccatgttgttgactaagctgaaggaaactgctgaaaacagcctcaagaaaccagtaacagattgtgttatttcagtcccctccttctttacagatgctgagaggcgatctgtgttagatgctgcacagattgttggcctaaactgtttaagacttatgaatgacatgacagctgttgctttgaattacggaatttataagcaggatctcccaagcctggatgagaaacctcggatagtggtttttgttgatatgggacattcagcttttcaagtgtctgcttgtgcttttaacaagggaaaattgaaggtactgggaacagcttttgatcctttcttaggaggaaaaaacttcgatgaaaagttagtggaacatttttgtgcagaatttaaaactaagtacaagttggatgcaaaatccaaaatacgagcactcctacgtctgtatcaggaatgtgaaaaactgaaaaagctaatgagctctaacagcacagaccttccactgaatatcgaatgctttatgaatgataaagatgtttccggaaagatgaacaggtcacaatttgaagaactctgtgctgaacttctgcaaaagatagaagtacccctttattcactgttggaacaaactcatctcaaagtagaagatgtgagtgcagttgagattgttggaggcgctacacgaattccagctgtgaaggaaagaattgccaaattctttggaaaagatattagcacaacactcaatgcagatgaagcagtagccagaggatgtgcattacagtgtgcaatactttccccggcatttaaagttagagaattttccgtcacagatgcagttccttttccaatatctctgatctggaaccatgattcagaagatactgaaggtgttcatgaagtctttagtcgaaaccatgctgctcctttctccaaagttctcacctttctgagaagggggccttttgagctagaagctttctattctgatccccaaggagttccatatccagaagcaaaaataggccgctttgtagttcagaatgtttctgcacagaaagatggagaaaaatctagagtaaaagtcaaagtgcgagtcaacacccatggcattttcaccatctctacggcatctatggtggagaaagtcccaactgaggagaatgaaatgtcttctgaagctgacatggagtgtctgaatcagagaccaccagaaaacccagacactgataaaaatgtccagcaagacaacagtgaagctggaacacagccccaggtacaaactgatgctcaacaaacctcacagtctcccccttcacctgaacttacctcagaagaaaacaaaatcccagatgctgacaaagcaaatgaaaaaaaagttgaccagcctccagaagctaaaaagcccaaaataaaggtggtgaatgttgagctgcctattgaagccaacttggtctggcagttagggaaagaccttcttaacatgtatattgagacagagttagatgataatgaagattaatgacagaaggatgagctaaaatgcgtggggaatgtgttgagtcgaaacaggggttggccttgaaattttggggcggggtcaattttgagaaccctagaagaacggggttaaggagggcacataagctttttaggggaatggactgctaagtgggtgaagaaagcgattgaaaacgggttcaaggaaaagaaaatggtagagcggagacgcgaat

SEQ ID NO: 443678 - DNA, 2390 bp, Homo sapiens
tgagtaaatgccgcagattctggaaagttctgatcagtgcgatacataaggctgaggaagtgggacctccccttttgggtcggtagttcagcgccggcgccggtgtgcgagccgcggcagagtgaggcaggcaacccgaggtgcggagcgacctgcggaggctgagccccgctttctcccagggtttcttatcagccagccgccgctgtccccgggggagtaggaggctcctgacaggccgcggctgtctgtgtgtccttctgagtgtcagaggaacggccagaccccgcgggccggagcagaacgcggccagggcagaaagcggcggcaggagaagcaggcagggggccggaggacgcagaccgagacccgaggcggaggcggaccgcgagccggccatgtcggtggtggggttggacgtgggctcgcagagctgctacatcgcggtagcccgggccgggggcatcgagaccatcgccaatgagttcagcgaccggtgcaccccgtcagtcatatcatttggatcaaaaaatagaacaatcggagttgcagccaaaaatcagcaaatcactcatgcaaacaatacggtgtctaacttcaaaagatttcatggccgagcattcaatgaccccttcattcaaaaggagaaggaaaacttgagttacgatttggttccattgaaaaatggtggagttggaataaaggtaatgtacatgggtgaagaacatctatttagtgtggagcagataacagccatgttgttgactaagctgaaggaaactgctgaaaacagcctcaagaaaccagtaacagattgtgttatttcagtcccctccttctttacagatgctgagaggcgatctgtgttagatgctgcacagattgttggcctaaactgtttaagacttatgaatgacatgacagctgttgctttgaattacggaatttataagcaggatctcccaagcctggatgagaaacctcggatagtggtttttgttgatatgggacattcagcttttcaagtgtctgcttgtgcttttaacaagggaaaattgaaggtactgggaacagcttttgatcctttcttaggaggaaaaaacttcgatgaaaagttagtggaacatttttgtgcagaatttaaaactaagtacaagttggatgcaaaatccaaaatacgagcactcctacgtctgtatcaggaatgtgaaaaactgaaaaagctaatgagctctaacagcacagaccttccactgaatatcgaatgctttatgaatgataaagatgtttccggaaagatgaacaggtcacaatttgaagaactctgtgctgaacttctgcaaaagatagaagtacccctttattcactgttggaacaaactcatctcaaagtagaagatgtgagtgcagttgagattgttggaggcgctacacgaattccagctgtgaaggaaagaattgccaaattctttggaaaagatattagcacaacactcaatgcagatgaagcagtagccagaggatgtgcattacagtgtgcaatactttccccggcatttaaagttagagaattttccgtcacagatgcagttccttttccaatatctctgatctggaaccatgattcagaagatactgaaggtgttcatgaagtctttagtcgaaaccatgctgctcctttctccaaagttctcacctttctgagaagggggccttttgagctagaagctttctattctgatccccaaggagttccatatccagaagcaaaaatagcaaaaattgaatcacccaaactggaaagaactccaaatggcccaaatattgataaaaaggaagaagatttagaagacaaaaacaattttggtgctgaacctccacatcagaatggtgaatgttaccctaatgagaaaaattctgttaatatggacttggactagataaccttaaattggcctattccttcaattaataaaatatttttgccatagtatgtgactctacataacatactgaaactatttatattttcttttttaaggatatttagaaattttgtgtattatatggaaaaagaaaaaaagcttaagtctgtagtctttatgatcctaaaagggaaaattgccttggtaactttcagattcctgtggaattgtgaattcatactaagctttctgtgcagtctcaccatttgcatcactgaggatgaaactgacttttgtcttttggagaaaaaaaactgtactgcttgttcaagagggctgtgattaaaatctttaagcatttgttcctgccaaggtagttttcttgcattttgctcaatccgttgtgtggtgctgttttccccaaaatgcctccaagggcgtccctttgcgcccttcgtcgttccc

SEQ ID NO: 443679 - DNA, 1684 bp, Homo sapiens
ccgcggcagaaacttcagtttgttggctgcggcagcaggtagcaaagtgacgccgagggcctgagtgctccagtagccaccgcatctggagaaccagcggttaccatggaggggatcagtatatacacttcagataactacaccgaggaaatgggctcaggggactatgactccatgaaggaaccctgtttccgtgaagaaaatgctaatttcaataaaatcttcctgcccaccatctactccatcatcttcttaactggcattgtgggcaatggattggtcatcctggtcatgggttaccagaagaaactgagaagcatgacggacaagtacaggctgcacctgtcagtggccgacctcctctttgtcatcacgcttcccttctgggcagttgatgccgtggcaaactggtactttgggaacttcctatgcaaggcagtccatgtcatctacacagtcaacctctacagcagtgtcctcatcctggccttcatcagtctggaccgctacctggccatcgtccacgccaccaacagtcagaggccaaggaagctgttggctgaaaaggtggtctatgttggcgtctggatccctgccctcctgctgactattcccgacttcatctttgccaacgtcagtgaggcagatgacagatatatctgtgaccgcttctaccccaatgacttgtgggtggttgtgttccagtttcagcacatcatggttggccttatcctgcctggtattgtcatcctgtcctgctattgcattatcatctccaagctgtcacactccaagggccaccagaagcgcaaggccctcaagaccacagtcatcctcatcctggctttcttcgcctgttggctgccttactacattgggatcagcatcgactccttcatcctcctggaaatcatcaagcaagggtgtgagtttgagaacactgtgcacaagtggatttccatcaccgaggccctagctttcttccactgttgtctgaaccccatcctctatgctttccttggagccaaatttaaaacctctgcccagcacgcactcacctctgtgagcagagggtccagcctcaagatcctctccaaaggaaagcgaggtggacattcatctgtttccactgagtctgagtcttcaagttttcactccagctaacacagatgtaaaagacttttttttatacgataaataacttttttttaagttacacatttttcagatataaaagactgaccaatattgtacagtttttattgcttgttggatttttgtcttgtgtttctttagtttttgtgaagtttaattgacttatttatataaattttttttgtttcatattgatgtgtgtctaggcaggacctgtggccaagttcttagttgctgtatgtctcgtggtaggactgtagaaaagggaactgaacattccagagcgtgtagtgaatcacgtaaagctagaaatgatccccagctgtttatgcatagataatctctccattcccgtggaacgtttttcctgttcttaagacgtgattttgctgtagaagatggcacttataaccaaagcccaaagtggtatagaaatgctggtttttcagttttcaggagtgggttgatttcagcacctacagtgtacagtcttgtattaagttgttaataaaagtacatgttaaactta

SEQ ID NO: 443680 - DNA, 1826 bp, Homo sapiens
ccgcggcagaaacttcagtttgttggctgcggcagcaggtagcaaagtgacgccgagggcctgagtgctccagtagccaccgcatctggagaaccagcggttaccatggaggggatcagtatatacacttcagataactacaccgaggaaatgggctcaggggactatgactccatgaaggaaccctgtttccgtgaagaaaatgctaatttcaataaaatcttcctgcccaccatctactccatcatcttcttaactggcattgtgggcaatggattggtcatcctggtcatgggttaccagaagaaactgagaagcatgacggacaagtacaggctgcacctgtcagtggccgacctcctctttgtcatcacgcttcccttctgggcagttgatgccgtggcaaactggtactttgggaacttcctatgcaaggcagtccatgtcatctacacagtcaacctctacagcagtgtcctcatcctggccttcatcagtctggaccgctacctggccatcgtccacgccaccaacagtcagaggccaaggaagctgttggctgaaaaggtggtctatgttggcgtctggatccctgccctcctgctgactattcccgacttcatctttgccaacgtcagtgaggcagatgacagatatatctgtgaccgcttctaccccaatgacttgtgggtggttgtgttccagtttcagcacatcatggttggccttatcctgcctggtattgtcatcctgtcctgctattgcattatcatctccaagctgtcacactccaagggccaccagaagcgcaaggccctcaagaccacagtcatcctcatcctggctttcttcgcctgttggctgccttactacattgggatcagcatcgactccttcatcctcctggaaatcatcaagcaagggtgtgagtttgagaacactgtgcacaagtggatttccatcaccgaggccctagctttcttccactgttgtctgaaccccatcctctatgctttccttggagccaaatttaaaacctctgcccagcacgcactcacctctgtgagcagagggtccagcctcaagatcctctccaaaggaaagcgaggtggacattcatctgtttccactgagtctgagtcttcaagttttcactccagctaacacagatgtaaaagacttttttttatacgataaataacttttttttaagttacacatttttcagatataaaagactgaccaatattgtacagtttttattgcttgttggatttttgtcttgtgtttctttagtttttgtgaagtttaattgacttatttatataaattttttttgtttcatattgatgtgtgtctaggcaggacctgtggccaagttcttagttgctgtatgtctcgtggtaggactgtagaaaagggaactgaacattccagagcgtgtagtgaatcacgtaaagctagaaatgatccccagctgtttatgcatagataatctctccattcccgtggaacgtttttcctgttcttaagacgtgattttgctgtagaagatggcacttataaccaaagcccaaagtggtatagaaatgctggtttttcagttttcaggagtgggttgatttcagcacctacagtgtacagtcttgtattaagttgttaataaaagtacatgttaaacttacttagtgttatgttctgatttctgttgacattcttttggctagtagaagacaaaagtaatacatttatggtatgcaaagcactatcctaggtatttcattgtaatattttacttaccccttatcacaactctgatagattct

SEQ ID NO: 443681 - DNA, 504 bp, Homo sapiens
ctaattaaaaaaatttttttgtttaaattatgggggttaggccggccctggggcaagttttaaagttgcggaaattctggggaaagccttgaaaaaagggaactgaacattccagagcgtgtagtgaatcacgtaaagctagaaatgatccccagctgtttatgcatagataatctctccattcccgtggaacgtttttcctgttcttaagacgtgattttgctgtagaagatggcacttataaccaaagcccaaagtggtatagaaatgctggtttttcagttttcaggagtgggttgatttcagcacctacagtgtacagtcttgtattaagttgttaataaaagtacatgttaaacttacttagtgttatgttctgatttctgttgacattcttttggctagtagaagacaaaagtaatacatttatggtatgcaaagcactatcctaggtatttcattgtaatattttacttaccccttatcacaactctgatagattct

SEQ ID NO: 443682 - DNA, 1630 bp, Homo sapiens
ccgcggcagaaacttcagtttgttggctgcggcagcaggtagcaaagtgacgccgagggcctgagtgctccagtagccaccgcatctggagaaccagcggttaccatggaggggatcagtatatacacttcagataactacaccgaggaaatgggctcaggggactatgactccatgaaggaaccctgtttccgtgaagaaaatgctaatttcaataatggattggtcatcctggtcatgggttaccagaagaaactgagaagcatgacggacaagtacaggctgcacctgtcagtggccgacctcctctttgtcatcacgcttcccttctgggcagttgatgccgtggcaaactggtactttgggaacttcctatgcaaggcagtccatgtcatctacacagtcaacctctacagcagtgtcctcatcctggccttcatcagtctggaccgctacctggccatcgtccacgccaccaacagtcagaggccaaggaagctgttggctgaaaaggtggtctatgttggcgtctggatccctgccctcctgctgactattcccgacttcatctttgccaacgtcagtgaggcagatgacagatatatctgtgaccgcttctaccccaatgacttgtgggtggttgtgttccagtttcagcacatcatggttggccttatcctgcctggtattgtcatcctgtcctgctattgcattatcatctccaagctgtcacactccaagggccaccagaagcgcaaggccctcaagaccacagtcatcctcatcctggctttcttcgcctgttggctgccttactacattgggatcagcatcgactccttcatcctcctggaaatcatcaagcaagggtgtgagtttgagaacactgtgcacaagtggatttccatcaccgaggccctagctttcttccactgttgtctgaaccccatcctctatgctttccttggagccaaatttaaaacctctgcccagcacgcactcacctctgtgagcagagggtccagcctcaagatcctctccaaaggaaagcgaggtggacattcatctgtttccactgagtctgagtcttcaagttttcactccagctaacacagatgtaaaagacttttttttatacgataaataacttttttttaagttacacatttttcagatataaaagactgaccaatattgtacagtttttattgcttgttggatttttgtcttgtgtttctttagtttttgtgaagtttaattgacttatttatataaattttttttgtttcatattgatgtgtgtctaggcaggacctgtggccaagttcttagttgctgtatgtctcgtggtaggactgtagaaaagggaactgaacattccagagcgtgtagtgaatcacgtaaagctagaaatgatccccagctgtttatgcatagataatctctccattcccgtggaacgtttttcctgttcttaagacgtgattttgctgtagaagatggcacttataaccaaagcccaaagtggtatagaaatgctggtttttcagttttcaggagtgggttgatttcagcacctacagtgtacagtcttgtattaagttgttaataaaagtacatgttaaactta

SEQ ID NO: 443683 - DNA, 686 bp, Homo sapiens
gttgtctgaattgttagtgaaggtctgtgtctgcttggtaggaatggtggtattacgcttgatgctgggcgactggtccagcctcaagatcctctccaaaggaaagcgaggtggacattcatctgtttccactgagtctgagtcttcaagttttcactccagctaacacagatgtaaaagacttttttttatacgataaataacttttttttaagttacacatttttcagatataaaagactgaccaatattgtacagtttttattgcttgttggatttttgtcttgtgtttctttagtttttgtgaagtttaattgacttatttatataaattttttttgtttcatattgatgtgtgtctaggcaggacctgtggccaagttcttagttgctgtatgtctcgtggtaggactgtagaaaagggaactgaacattccagagcgtgtagtgaatcacgtaaagctagaaatgatccccagctgtttatgcatagataatctctccattcccgtggaacgtttttcctgttcttaagacgtgattttgctgtagaagatggcacttataaccaaagcccaaagtggtatagaaatgctggtttttcagttttcaggagtgggttgatttcagcacctacagtgtacagtcttgtattaagttgttaataaaagtacatgttaaactta

SEQ ID NO: 443684 - DNA, 1932 bp, Homo sapiens
ggaattcggcacgaggagagagagaactagtctcgcgttttttttcttccctctagtgggcggggcagaggagttagccaagatgtgactttgaaaccctcagcgtctcagtgcccttttgttctaaacaaagaattttgtaattggttctaccaaagaaggatataatgaagtcactatgggaaaagatggggaggagagttgtaggattctacattaattctcttgtgcccttagcccactacttcagaatttcctgaagaaagcaagcctgaattggttttttaaattgctttaaaaattttttttaactgggttaatgcttgctgaattggaagtgaatgtccattcctttgcctcttttgcagatatacacttcagataactacaccgaggaaatgggctcaggggactatgactccatgaaggaaccctgtttccgtgaagaaaatgctaatttcaataaaatcttcctgcccaccatctactccatcatcttcttaactggcattgtgggcaatggattggtcatcctggtcatgggttaccagaagaaactgagaagcatgacggacaagtacaggctgcacctgtcagtggccgacctcctctttgtcatcacgcttcccttctgggcagttgatgccgtggcaaactggtactttgggaacttcctatgcaaggcagtccatgtcatctacacagtcaacctctacagcagtgtcctcatcctggccttcatcagtctggaccgctacctggccatcgtccacgccaccaacagtcagaggccaaggaagctgttggctgaaaaggtggtctatgttggcgtctggatccctgccctcctgctgactattcccgacttcatctttgccaacgtcagtgaggcagatgacagatatatctgtgaccgcttctaccccaatgacttgtgggtggttgtgttccagtttcagcacatcatggttggccttatcctgcctggtattgtcatcctgtcctgctattgcattatcatctccaagctgtcacactccaagggccaccagaagcgcaaggccctcaagaccacagtcatcctcatcctggctttcttcgcctgttggctgccttactacattgggatcagcatcgactccttcatcctcctggaaatcatcaagcaagggtgtgagtttgagaacactgtgcacaagtggatttccatcaccgaggccctagctttcttccactgttgtctgaaccccatcctctatgctttccttggagccaaatttaaaacctctgcccagcacgcactcacctctgtgagcagagggtccagcctcaagatcctctccaaaggaaagcgaggtggacattcatctgtttccactgagtctgagtcttcaagttttcactccagctaacacagatgtaaaagacttttttttatacgataaataacttttttttaagttacacatttttcagatataaaagactgaccaatattgtacagtttttattgcttgttggatttttgtcttgtgtttctttagtttttgtgaagtttaattgacttatttatataaattttttttgtttcatattgatgtgtgtctaggcaggacctgtggccaagttcttagttgctgtatgtctcgtggtaggactgtagaaaagggaactgaacattccagagcgtgtagtgaatcacgtaaagctagaaatgatccccagctgtttatgcatagataatctctccattcccgtggaacgtttttcctgttcttaagacgtgattttgctgtagaagatggcacttataaccaaagcccaaagtggtatagaaatgctggtttttcagttttcaggagtgggttgatttcagcacctacagtgtacagtcttgtattaagttgttaataaaagtacatgttaaactta

SEQ ID NO: 443685 - DNA, 1555 bp, Homo sapiens
ccgcggcagaaacttcagtttgttggctgcggcagcaggtagcaaagtgacgccgagggcctgagtgctccagtagccaccgcatctggagaaccagcggttaccatggaggggatcagtatatacacttcagataactacaccgaggaaatgggctcaggggactatgactccatgaaggaaccctgtttccgtgaagaaaatgctaatttcaataaaatcttcctgcccaccatctactccatcatcttcttaactggcattgtgggcaatggattggtcatcctggtcatgggttaccagaagaaactgagaagcatgacggacaagtacaggctgcacctgtcagtggccgacctcctctttgtcatcacgcttcccttctgggcagttgatgccgtggcaaactggtactttgggaacttcctatgcaaggcagtccatgtcatctacacagtcaacctctacagcagtgtcctcatcctggccttcatcagtctggaccgctacctggccatcgtccacgccaccaacagtcagaggccaaggaagctgttggctgaaaaggtggtctatgttggcgtctggatccctgccctcctgctgactattcccgacttcatctttgccaacgtcagtgaggcagatgacagatatatctgtgaccgcttctaccccaatgacttgtgggtggttgtgttccagtttcagcacatcatggttggccttatcctgccttactacattgggatcagcatcgactccttcatcctcctggaaatcatcaagcaagggtgtgagtttgagaacactgtgcacaagtggatttccatcaccgaggccctagctttcttccactgttgtctgaaccccatcctctatgctttccttggagccaaatttaaaacctctgcccagcacgcactcacctctgtgagcagagggtccagcctcaagatcctctccaaaggaaagcgaggtggacattcatctgtttccactgagtctgagtcttcaagttttcactccagctaacacagatgtaaaagacttttttttatacgataaataacttttttttaagttacacatttttcagatataaaagactgaccaatattgtacagtttttattgcttgttggatttttgtcttgtgtttctttagtttttgtgaagtttaattgacttatttatataaattttttttgtttcatattgatgtgtgtctaggcaggacctgtggccaagttcttagttgctgtatgtctcgtggtaggactgtagaaaagggaactgaacattccagagcgtgtagtgaatcacgtaaagctagaaatgatccccagctgtttatgcatagataatctctccattcccgtggaacgtttttcctgttcttaagacgtgattttgctgtagaagatggcacttataaccaaagcccaaagtggtatagaaatgctggtttttcagttttcaggagtgggttgatttcagcacctacagtgtacagtcttgtattaagttgttaataaaagtacatgttaaactta

SEQ ID NO: 443686 - DNA, 1575 bp, Homo sapiens
acatgcactgcatcctcagtcgacctatataatcccaatcataatctatatccaacttgtcctcacttactctcgattttgatgtccacacacactgcctatatagaataattagttaccccaactaccagaattatataatcatttttatactcaagatcatattgagctcctcatcattacgacctgaaagtcttcaacctcttcaactgacacttctctctccatttcttgtctctgggaaccctctcctctttgtcatcacgcttcccttctgggcagttgatgccgtggcaaactggtactttgggaacttcctatgcaaggcagtccatgtcatctacacagtcaacctctacagcagtgtcctcatcctggccttcatcagtctggaccgctacctggccatcgtccacgccaccaacagtcagaggccaaggaagctgttggctgaaaaggtggtctatgttggcgtctggatccctgccctcctgctgactattcccgacttcatctttgccaacgtcagtgaggcagatgacagatatatctgtgaccgcttctaccccaatgacttgtgggtggttgtgttccagtttcagcacatcatggttggccttatcctgcctggtattgtcatcctgtcctgctattgcattatcatctccaagctgtcacactccaagggccaccagaagcgcaaggccctcaagaccacagtcatcctcatcctggctttcttcgcctgttggctgccttactacattgggatcagcatcgactccttcatcctcctggaaatcatcaagcaagggtgtgagtttgagaacactgtgcacaagtggatttccatcaccgaggccctagctttcttccactgttgtctgaaccccatcctctatgctttccttggagccaaatttaaaacctctgcccagcacgcactcacctctgtgagcagagggtccagcctcaagatcctctccaaaggaaagcgaggtggacattcatctgtttccactgagtctgagtcttcaagttttcactccagctaacacagatgtaaaagacttttttttatacgataaataacttttttttaagttacacatttttcagatataaaagactgaccaatattgtacagtttttattgcttgttggatttttgtcttgtgtttctttagtttttgtgaagtttaattgacttatttatataaattttttttgtttcatattgatgtgtgtctaggcaggacctgtggccaagttcttagttgctgtatgtctcgtggtaggactgtagaaaagggaactgaacattccagagcgtgtagtgaatcacgtaaagctagaaatgatccccagctgtttatgcatagataatctctccattcccgtggaacgtttttcctgttcttaagacgtgattttgctgtagaagatggcacttataaccaaagcccaaagtggtatagaaatgctggtttttcagttttcaggagtgggttgatttcagcacctacagtgtacagtcttgtattaagttgttaataaaagtacatgttaaactta

SEQ ID NO: 443687 - DNA, 1150 bp, Homo sapiens
ttccctttcggccgtgggggagggggctcgtgtcccccccaacccagcccggaggccgcgtccgcccgcgcccgctctggcccccgcggagccgcgcaacttcccgggagcccgggccaaagtgagcgcaaagtgctgcccaagttgccgggatggagctgcagagccggcccgaggcgctcgccgtggaactcgcgcgccaccagaacggcgacctcaagaagcagctccacgaaaggcagccgcggatcgccgcgctcagcgacaaacaagatgattagtgagcaggggactgatttcctcgttcctcattcatgaacaacaactaacatttgtgtagcagcatcttgaggtattgggcattgccacttacattaacccgttggattcacgtttcatgggtttaaaaagcgaggtttgagggctggtgggccttttccagggcacccacaaataaaatccagcgttttctttggaggaggccaagctgagattggaggcagcttcctagagcccttctcatcactcgcacagcaccgccaccgccaacttgttccttgagtccggggtttgaggaacatccatgtgaagagttccctgaggtctcctgaccaggctgctttatctgtggcccttcagactatggtcctgtgatccgccagcctgccatgggctgcggagagttaggtagccaaggcctgaacgctgtgcccttcttgaagtacataccttgaaacctcaccccgagatgatggtattaggaggtggggccttgggaggtgattaggtccccagggctacaccctcataaataagattagtgcccttataaaagaggctgagggtgtctgtctgccttcgtgaggacacagcagccaggcaccatctttgaagcagagagcagccctcaccggacactgccatctgctggggccctccacgtggacttcccagcctccagaactgtgagcagtagactcctgttgtttgtaaattacccagtctaatcttttggtgtagcagccccaaaatgaccacagcatatgccattgctaaacttccacaatgcttttttctcgatgtgcagggaaaaagacacaatctgcagacctttctcaattaaacttttctttccctggcattcatattt

SEQ ID NO: 443688 - DNA, 3429 bp, Homo sapiens
ttccctttcggccgtgggggagggggctcgtgtcccccccaacccagcccggaggccgcgtccgcccgcgcccgctctggcccccgcggagccgcgcaacttcccgggagcccgggccaaagtgagcgcaaagtgctgcccaagttgccgggatggagctgcagagccggcccgaggcgctcgccgtggaactcgcgcgccaccagaacggcgacctcaagaagcagctccacgaaaggcagccgcggatcgccgcgctcagcgacaaacaaatcgcgggcagaacctctcatctgtgcacaagggacccagcacggggctttgggaacgatcactgcagtgcctgtcacgggtcctcaggtcagctccttgcagaggttggccgggcaaggagcggcagtgctacctcaggttaggccaaagactctgattccagacagcctccccgttgccccgggccgggaccggccacccaagcagcccccaacattccagaaggccaccgtggtcagcgtcaagaaccccagcccagccctccccaccgccaacaacactgtcagccatgtgccagcgcccggcagccagccccaggccctcgccgagcccgccgccctcgcctctccgctgagcagtgcgggggtggcctacgccatcatctccacctcccccagcaatgccgccgccatggcccccagcaccgccgtgtctgtggtcagtgacagcatcaaagtccagcccctcctcatcagtgctgacaacaaggtcatcatcattcagcctcaagtgcagacgcagcccgagagcacggcagagtcgcggccgcccacagaggagccatctcagggagctcaggccaccaaaaagaagaaggaagaccggcccccgacccaggagaaccccgagaaaatcgccttcatggtagcgctaggcctggttaccacggaacatttggaagaaatccagagcaagcgacaggagcggaagagaagaagcacagccaaccctgcctacagcggcctcctggagaccgagaggaaacggctggcctccaactatctcaacaaccccctgttcctcacagcgagagccaatgaggacccctgctggaagaacgagatcacccacgatgagcactgtgccgcctgcaagcgaggggccaacctgcagccctgcggcacctgcccgggggcctaccacctcagctgcctggagccgcccctcaagacggcgcccaagggcgtgtgggtgtgccccaggtgccagcagaaggccttaaagaaagacgagggtgtgccctggactgggatgctggccatcgtgcactcttatgtcacccatcatccctggaccgcctgcgggccctcctgagactgatacagggcgagcagctgctccaggtcaccatgacgaccactagccctgccccactgctggccgggccctggaccaagccctcagtggcagccacacaccccaccgtccagcacccccagggccacaactgaccccgagggaccagtcttcatacccacggaaagttattgggaccctgcttacacagcctgggggttctgtcggccttaattcataaacactatgaatttcagacaaaaattaaccagacagaggagaggagggaggaagagctgggcgagaggcctagagccaggaccaggtgggggtgcggccctgtgccctccaaattcacagggggtacctaggagccaggtggggtacgacaggctggggcacacagtctccccccggccacctcggggctgcctgggcctctggcttccaggccctgctctccacggcctccctctggcccgttggaggggcaggctgaggctgtggaggggacaagcacgccccccagaacgcagtctccactgagggcaccgcctattggtgtcctgtgggagggcgagctgagaacacatggactagctgagtggtagcggtagttgggacgagaagcggggtagtggatctaggtagttcctcaatgccccacgctcctaggaggtccccctggggtgggcgggcgggcctggggcactccgtcgcctttgcagaaccacctgggcccctttctgtcagtattattagggttacgaattgcagctgtttaacttgaaagacactgtcggaggtgagcatctgggcgccgggacgctgcagtgatccccgccagagcctgtgcccttcctgctccgtctttggggtcctcaaggctgcctccttccttttgccaatctcttggactcagtttgccgttgatgcgtttttctcatggagtttctgggcagagtggagctgcaaccctgttgtggggggcagcatttggcaggttttctccttggggttgaatcattcaacttaacgactgaagccctttcttgtctcctttggaagagccgataagtattccactcctcccttcttgccagtgcagacactatgccaaaaaataacttcacacttttgtatggcgtttttattgtgagatatttaatgtgaatggttggggggactctggctgacttcctttctgcttctagtagtctctgcttcaaggtacaaatgggaacacctcccctcgggaagcctggccaagctggaagatccggcaggttttttacgagccgggtggagggttggggaggaaagaaagggcggtggctcgggaggttccggccttcggggaccagacttgctgccaagggcttctgcatccagggtgggcagtggcagcttgtcacccttgcccgattcccacatcccagtcctgagggactcagcacaacaggataagcgtccaggagccacgggctcccaccccgagcatatcacatggtgccgaattgcactgaacacgcgtgtgtgcatcgcacgcggccacgaccacagacacgcatgcacacacgcagaggtgcagagcgaggaggccggcaaatcccgcagctgccacggtccctcctgtcattctcacgactccgggagaaactgtgctgtatgatacagatctattttaatacacttaccactgggtgaacaagatttttatattcttttattgatgaacaaagtgaaccgtgtgaggcacacgtcttctatattggctactctgtgccaagtatgcattaccgcgtggcttgcgatgtccatgtcttcagcttccttttctgttggtttggttttcttcgcggatggattgagttacatgttttaacagtgtaatgggaggatctgaaaggttggacccgggaggggtagctgccgatgtgtcttgagattgttaggttttttttggaccaaggaggaccgtccagtgggtagtgaggatagagaaaaagtgtttgtcttaaatacgccaatgtagttttccttctttacaatgtattaaactcgatcgatgatttcaaa

SEQ ID NO: 443689 - DNA, 3664 bp, Homo sapiens
ttccctttcggccgtgggggagggggctcgtgtcccccccaacccagcccggaggccgcgtccgcccgcgcccgctctggcccccgcggagccgcgcaacttcccgggagcccgggccaaagtgagcgcaaagtgctgcccaagttgccgggatggagctgcagagccggcccgaggcgctcgccgtggaactcgcgcgccaccagaacggcgacctcaagaagcagctccacgaaaggcagccgcggatcgccgcgctcagcgacaaacaagctttgggaacgatcactgcagtgcctgtcacgggtcctcaggtcagctccttgcagaggttggccgggcaaggagcggcagtgctacctcaggttaggccaaagactctgattccagacagcctccccgttgccccgggccgggaccggccacccaagcagcccccaacattccagaaggccaccgtggtcagcgtcaagaaccccagcccagccctccccaccgccaacaacactgtcagccatgtgccagcgcccggcagccagccccaggccctcgccgagcccgccgccctcgcctctccgctgagcagtgcgggggtggcctacgccatcatctccacctcccccagcaatgccgccgccatggcccccagcaccgccgtgtctgtggtcagtgacagcatcaaagtccagcccctcctcatcagtgctgacaacaagcctcctccacgcctcctctcttcccctcaccccgcaacccatcactgtcccctccacccctcctctcttcccctcacccctccctccccatcactgtccccttcacccctccatggcatcttccaggtcatcatcattcagcctcaagtgcagacgcagcccgagagcacggcagagtcgcggccgcccacagaggagccatctcagggagctcaggccaccaaaaagaagaaggaagaccggcccccgacccaggagaaccccgagaaaatcgccttcatggtagcgctaggcctggttaccacggaacatttggaagaaatccagagcaagcgacaggagcggaagagaagaagcacagccaaccctgcctacagcggcctcctggagaccgagaggaaacggctggcctccaactatctcaacaaccccctgttcctcacagcgagagccaatgaggacccctgctggaagaacgagatcacccacgatgagcactgtgccgcctgcaagcgaggggccaacctgcagccctgcggcacctgcccgggggcctaccacctcagctgcctggagccgcccctcaagacggcgcccaagggcgtgtgggtgtgccccaggtgccagcagaaggccttaaagaaagacgagggtgtgccctggactgggatgctggccatcgtgcactcttatgtcacccatcaaagaagaggagaagcagaagctgctgcaacgaggcagtgagctgcagaacgagcaccagcagctggaggagcgggaccggcggctggcgtcagcagtgcagaaatgcctggagttgaagacaagcctgctggcccgccagaggggcacccagtcatccctggaccgcctgcgggccctcctgagactgatacagggcgagcagctgctccaggtcaccatgacgaccactagccctgccccactgctggccgggccctggaccaagccctcagtggcagccacacaccccaccgtccagcacccccagggccacaactgaccccgagggaccagtcttcatacccacggaaagttattgggaccctgcttacacagcctgggggttctgtcggccttaattcataaacactatgaatttcagacaaaaattaaccagacagaggagaggagggaggaagagctgggcgagaggcctagagccaggaccaggtgggggtgcggccctgtgccctccaaattcacagggggtacctaggagccaggtggggtacgacaggctggggcacacagtctccccccggccacctcggggctgcctgggcctctggcttccaggccctgctctccacggcctccctctggcccgttggaggggcaggctgaggctgtggaggggacaagcacgccccccagaacgcagtctccactgagggcaccgcctattggtgtcctgtgggagggcgagctgagaacacatggactagctgagtggtagcggtagttgggacgagaagcggggtagtggatctaggtagttcctcaatgccccacgctcctaggaggtccccctggggtgggcgggcgggcctggggcactccgtcgcctttgcagaaccacctgggcccctttctgtcagtattattagggttacgaattgcagctgtttaacttgaaagacactgtcggaggtgagcatctgggcgccgggacgctgcagtgatccccgccagagcctgtgcccttcctgctccgtctttggggtcctcaaggctgcctccttccttttgccaatctcttggactcagtttgccgttgatgcgtttttctcatggagtttctgggcagagtggagctgcaaccctgttgtggggggcagcatttggcaggttttctccttggggttgaatcattcaacttaacgactgaagccctttcttgtctcctttggaagagccgataagtattccactcctcccttcttgccagtgcagacactatgccaaaaaataacttcacacttttgtatggcgtttttattgtgagatatttaatgtgaatggttggggggactctggctgacttcctttctgcttctagtagtctctgcttcaaggtacaaatgggaacacctcccctcgggaagcctggccaagctggaagatccggcaggttttttacgagccgggtggagggttggggaggaaagaaagggcggtggctcgggaggttccggccttcggggaccagacttgctgccaagggcttctgcatccagggtgggcagtggcagcttgtcacccttgcccgattcccacatcccagtcctgagggactcagcacaacaggataagcgtccaggagccacgggctcccaccccgagcatatcacatggtgccgaattgcactgaacacgcgtgtgtgcatcgcacgcggccacgaccacagacacgcatgcacacacgcagaggtgcagagcgaggaggccggcaaatcccgcagctgccacggtccctcctgtcattctcacgactccgggagaaactgtgctgtatgatacagatctattttaatacacttaccactgggtgaacaagatttttatattcttttattgatgaacaaagtgaaccgtgtgaggcacacgtcttctatattggctactctgtgccaagtatgcattaccgcgtggcttgcgatgtccatgtcttcagcttccttttctgttggtttggttttcttcgcggatggattgagttacatgttttaacagtgtaatgggaggatctgaaaggttggacccgggaggggtagctgccgatgtgtcttgagattgttaggttttttttggaccaaggaggaccgtccagtgggtagtgaggatagagaaaaagtgtttgtcttaaatacgccaatgtagttttccttctttacaatgtattaaactcgatcgatgatttcaaa

SEQ ID NO: 443690 - DNA, 2547 bp, Homo sapiens
agcggagggagagaactctggaggaacgctgagctgagcagcaccgaggacagcgcccggcagcgcccgcgcccaggtctccctccgcagccctgactcgcgcacacgctgagcttttgctcactccccttcgcgcggacacagacacacgcatattcacacacccagacacacaccccgctgtacaatggcagaatcccacctgcagtcatccctcatcacagcctcacagtttttcgagatctggctccatttcgacgctgacggaagtggttacctggaaggaaaggagctgcagaacttgatccaggagctccagcaggcgcgaaagaaggctggattggagttatcacctgaaatgaaaacttttgtggatcagtatgggcaaagagatgatggaaaaataggaattgtagagttggctcacgtattacccacagaagagaatttcctgctgctcttccgatgccagcagctgaagtcctgtgaggaattcatgaagacatggagaaaatatgatactgaccacagtggcttcatagaaactgaggagcttaagaactttctaaaggacctgctagaaaaagcaaacaagactgttgatgacacaaaattagccgagtatacagacctaatgctgaaactatttgattcaaataatgatgggaagctggaattaactgagatggccaggttactaccagtgcaggagaattttcttcttaaattccagggaatcaaaatgtgtgggaaagagttcaataaggcttttgagctgtatgatcaggacggcaatggatacatagatgaaaatgaactggatgctttactgaaggatctgtgcgagaagaataaacaggatctggatattaataatattacaacatacaagaagaacataatggctttgtcggatggagggaagctgtaccgaacggatcttgctcttattctctgtgctggggataactagagttggtggccgcaaccacttgctagtgatacactgtatctaaaaaataactgtgcactataagggagtaggctgtattttcttttatatctgtaaatttaactgcatatagataattatccaggatgtgtggctcattcttttcagcttgtttctatactgtttgtaatatacagtttttgtaaccatatgattgaaaagaagaaagtctatgcttaggccagtcagtacacccaattttaaaaaataacatattcttgctttcacaaatatagttgaacaagatttccctaaaaattccaccaggattaatctctaaaattctagtctctgatttgcaaatgcacatttgtcactgaataatggaattatgtataacaagccaaacattcttattttagacaaccatagaactgtcccacaaaatatttctaagcttatttctaactattaggaggaatgtgcttttccatctaaaatactcaccaaaatatagttaattgtggctttatgaagttaacagtctcattacagatttagtttaccaatcaacagcatgtctactgcttggatccatacaaaactatcggttcaagttgatgtgacaagggaagggagcaccagatgacacataaatctgtctgattctatgcctgtatttccaacaaacttactgtcagagaatatgacctaaatccattttctaaactgttttcatgtgttgcaaattattctagtcaactgctgttttatgtcatactctgtgtaatctctgattaaatttaatatactgcatatcctggtgtctagtttgcatacttcctggattttctttctatgtagaactgttcatttccaccaagggtatctgctgcctctgaaaatatttttttctagctataacaactctattttttactacataattaaattttaatgtaaaattcatagcatcctgattattgaatgttatatcatcaatacttttgtgtattctgtggattctatatttcatattgagatcagcattcaaaatagttctatttctatctgcaaatagtttcaaatgagtttaaaaaaataacatctgaaaagaaatgctaatgtaatcatttatcttatctagcaagaagattctaaaacattctttaacatacatctaagtcagtttcacatatttgtagctagaatatcctatactggttatagttgatatgtaacagttggtgattttagatttctttgattgtgaaacagggagctatgagagatgtgtccatgtgaaatttacagttactgcctaggagttaatgatcgttctgggtcagcttgaatgtccccattctataaattcaacacttattttctgaattcataaaaataaccaaaaaatgtgagctataatgtttccctcaagaacaaacagaaacgagatttgccaaaaactaaaattcaacaaatgatgttgagtgggagattggctttgcctttagcgtgtaaatggaagcactgccattagactgaatttaactactaagaataaataaagaagaaaataacttaaaaaaaaaaat

SEQ ID NO: 443691 - DNA, 1767 bp, Homo sapiens
agcggagggagagaactctggaggaacgctgagctgagcagcaccgaggacagcgcccggcagcgcccgcgcccaggtctccctccgcagccctgactcgcgcacacgctgagcttttgctcactccccttcgcgcggacacagacacacgcatattcacacacccagacacacaccccgctgtacaatggcagaatcccacctgcagtcatccctcatcacagcctcacagtttttcgagatctggctccatttcgacgctgacggaagtggttacctggaaggaaaggagctgcagaacttgatccaggagctccagcaggcgcgaaagaaggctggattggagttatcacctgaaatgaaaacttttgtggatcagtatgggcaaagagatgatggaaaaataggaattgtagagttggctcacgtattacccacagaagagaatttcctgctgctcttccgatgccagcagctgaagtcctgtgaggaattcatgaagacatggagaaaatatgatactgaccacagtggcttcatagaaactgaggagcttaagaactttctaaaggacctgctagaaaaagcaaacaagactgttgatgacacaaaattagccgagtatacagacctaatgctgaaactatttgattcaaataatgatgggaagctggaattaactgagatggccaggttactaccagtgcaggagaattttcttcttaaattccagggaatcaaaatgtgtgggaaagagttcaataaggcttttgagctgtatgatcaggacggcaatggatacatagatgaaaatgaactggatgctttactgaaggatctgtgcgagaagaataaacaggatctggatattaataatattacaacatacaagaagaacataatggctttgtcggatggagggaagctgtaccgaacggatcttgctcttattctctgtgctggggataactagagttggtggccgcaaccacttgctagtgatacactgtatctaaaaaataactgtgcactataagggagtaggctgtattttcttttatatctgtaaatttaactgcatatagataattatccaggatgtgtggctcattcttttcagcttgtttctatactgtttgtaatatacagtttttgtaaccatatgattgaaaagaagaaagtctatgcttaggccagtcagtacacccaattttaaaaaataacatattcttgctttcacaaatatagttgaacaagatttccctaaaaattccaccaggattaatctctaaaattctagtctctgatttgcaaatgcacatttgtcactgaataatggaattatgtataacaagccaaacattcttattttagacaaccatagaactgtcccacaaaatatttctaagcttatttctaactattaggaggaatgtgcttttccatctaaaatactcaccaaaatatagttaattgtggctttatgaagttaacagtctcattacagatttagtttaccaatcaacagcatgtctactgcttggatccatacaaaactatcggttcaagttgatgtgacaagggaagggagcaccagatgacacataaatctgtctgattctatgcctgtatttccaacaaacttactgtcagagaatatgacctaaatccattttctaaactgttttcatgtgttgcaaattattctagtcaactgctgttttatgtcatactctgtgtaatctctgattaaatttaatatactgc

SEQ ID NO: 443692 - DNA, 380 bp, Homo sapiens
agcggagggagagaactctggaggaacgctgagctgagcagcaccgaggacagcgcccggcagcgcccgcgcccaggtctccctccgcagccctgactcgcgcacacgctgagcttttgctcactccccttcgcgcggacacagacacacgcatattcacacacccagacacacaccccgctgtacaatggcagaatcccacctgcagtcatccctcatcacagcctcacagtttttcgagatctggctccatttcgacgctgacggtgattatcttctctttttaactgtttcaagacccgtttccatgccccttcccattctttgcccttttctgagcctcctgatcccattatccctcctttctattctttacttct

SEQ ID NO: 443693 - DNA, 2451 bp, Homo sapiens
tctcttcacacggacgcacatgaaatttggtgccgtgactcagatcagggacctcccttgggagataaatcccctgtcctcctgctctttgctctgtgagaaagatccacctacgacctcaggtcctcagaccgaccagcccaagaaacatctcaccaatttcaaatctggaagtggttacctggaaggaaaggagctgcagaacttgatccaggagctccagcaggcgcgaaagaaggctggattggagttatcacctgaaatgaaaacttttgtggatcagtatgggcaaagagatgatggaaaaataggaattgtagagttggctcacgtattacccacagaagagaatttcctgctgctcttccgatgccagcagctgaagtcctgtgaggaattcatgaagacatggagaaaatatgatactgaccacagtggcttcatagaaactgaggagcttaagaactttctaaaggacctgctagaaaaagcaaacaagactgttgatgacacaaaattagccgagtatacagacctaatgctgaaactatttgattcaaataatgatgggaagctggaattaactgagatggccaggttactaccagtgcaggagaattttcttcttaaattccagggaatcaaaatgtgtgggaaagagttcaataaggcttttgagctgtatgatcaggacggcaatggatacatagatgaaaatgaactggatgctttactgaaggatctgtgcgagaagaataaacaggatctggatattaataatattacaacatacaagaagaacataatggctttgtcggatggagggaagctgtaccgaacggatcttgctcttattctctgtgctggggataactagagttggtggccgcaaccacttgctagtgatacactgtatctaaaaaataactgtgcactataagggagtaggctgtattttcttttatatctgtaaatttaactgcatatagataattatccaggatgtgtggctcattcttttcagcttgtttctatactgtttgtaatatacagtttttgtaaccatatgattgaaaagaagaaagtctatgcttaggccagtcagtacacccaattttaaaaaataacatattcttgctttcacaaatatagttgaacaagatttccctaaaaattccaccaggattaatctctaaaattctagtctctgatttgcaaatgcacatttgtcactgaataatggaattatgtataacaagccaaacattcttattttagacaaccatagaactgtcccacaaaatatttctaagcttatttctaactattaggaggaatgtgcttttccatctaaaatactcaccaaaatatagttaattgtggctttatgaagttaacagtctcattacagatttagtttaccaatcaacagcatgtctactgcttggatccatacaaaactatcggttcaagttgatgtgacaagggaagggagcaccagatgacacataaatctgtctgattctatgcctgtatttccaacaaacttactgtcagagaatatgacctaaatccattttctaaactgttttcatgtgttgcaaattattctagtcaactgctgttttatgtcatactctgtgtaatctctgattaaatttaatatactgcatatcctggtgtctagtttgcatacttcctggattttctttctatgtagaactgttcatttccaccaagggtatctgctgcctctgaaaatatttttttctagctataacaactctattttttactacataattaaattttaatgtaaaattcatagcatcctgattattgaatgttatatcatcaatacttttgtgtattctgtggattctatatttcatattgagatcagcattcaaaatagttctatttctatctgcaaatagtttcaaatgagtttaaaaaaataacatctgaaaagaaatgctaatgtaatcatttatcttatctagcaagaagattctaaaacattctttaacatacatctaagtcagtttcacatatttgtagctagaatatcctatactggttatagttgatatgtaacagttggtgattttagatttctttgattgtgaaacagggagctatgagagatgtgtccatgtgaaatttacagttactgcctaggagttaatgatcgttctgggtcagcttgaatgtccccattctataaattcaacacttattttctgaattcataaaaataaccaaaaaatgtgagctataatgtttccctcaagaacaaacagaaacgagatttgccaaaaactaaaattcaacaaatgatgttgagtgggagattggctttgcctttagcgtgtaaatggaagcactgccattagactgaatttaactactaagaataaataaagaagaaaataacttaaaaaaaaaaat

SEQ ID NO: 443694 - DNA, 2047 bp, Homo sapiens
ttttcctccccaccccactaacaatcgttttttcctcccccacaacaaaaacaccttataactttctaaaggacctgctagaaaaagcaaacaagactgttgatgacacaaaattagccgagtatacagacctaatgctgaaactatttgattcaaataatgatgggaagctggaattaactgagatggccaggttactaccagtgcaggagaattttcttcttaaattccagggaatcaaaatgtgtgggaaagagttcaataaggcttttgagctgtatgatcaggacggcaatggatacatagatgaaaatgaactggatgctttactgaaggatctgtgcgagaagaataaacaggatctggatattaataatattacaacatacaagaagaacataatggctttgtcggatggagggaagctgtaccgaacggatcttgctcttattctctgtgctggggataactagagttggtggccgcaaccacttgctagtgatacactgtatctaaaaaataactgtgcactataagggagtaggctgtattttcttttatatctgtaaatttaactgcatatagataattatccaggatgtgtggctcattcttttcagcttgtttctatactgtttgtaatatacagtttttgtaaccatatgattgaaaagaagaaagtctatgcttaggccagtcagtacacccaattttaaaaaataacatattcttgctttcacaaatatagttgaacaagatttccctaaaaattccaccaggattaatctctaaaattctagtctctgatttgcaaatgcacatttgtcactgaataatggaattatgtataacaagccaaacattcttattttagacaaccatagaactgtcccacaaaatatttctaagcttatttctaactattaggaggaatgtgcttttccatctaaaatactcaccaaaatatagttaattgtggctttatgaagttaacagtctcattacagatttagtttaccaatcaacagcatgtctactgcttggatccatacaaaactatcggttcaagttgatgtgacaagggaagggagcaccagatgacacataaatctgtctgattctatgcctgtatttccaacaaacttactgtcagagaatatgacctaaatccattttctaaactgttttcatgtgttgcaaattattctagtcaactgctgttttatgtcatactctgtgtaatctctgattaaatttaatatactgcatatcctggtgtctagtttgcatacttcctggattttctttctatgtagaactgttcatttccaccaagggtatctgctgcctctgaaaatatttttttctagctataacaactctattttttactacataattaaattttaatgtaaaattcatagcatcctgattattgaatgttatatcatcaatacttttgtgtattctgtggattctatatttcatattgagatcagcattcaaaatagttctatttctatctgcaaatagtttcaaatgagtttaaaaaaataacatctgaaaagaaatgctaatgtaatcatttatcttatctagcaagaagattctaaaacattctttaacatacatctaagtcagtttcacatatttgtagctagaatatcctatactggttatagttgatatgtaacagttggtgattttagatttctttgattgtgaaacagggagctatgagagatgtgtccatgtgaaatttacagttactgcctaggagttaatgatcgttctgggtcagcttgaatgtccccattctataaattcaacacttattttctgaattcataaaaataaccaaaaaatgtgagctataatgtttccctcaagaacaaacagaaacgagatttgccaaaaactaaaattcaacaaatgatgttgagtgggagattggctttgcctttagcgtgtaaatggaagcactgccattagactgaatttaactactaagaataaataaagaagaaaataacttaaaaaaaaaaat

SEQ ID NO: 443695 - DNA, 2574 bp, Homo sapiens
tttccaggaacggtaatggtaggagagagagagcagggattggggaatgctgcccccccaaagtttctgtggctgcgcttagcaccccaaccatcctcctttgtcctcagtggatctaaagtttgataccccaggaggggagcgcttcaccgtctgtacactttgctggttaatcaacgtccaggcaagagagagcctctcgggtcgccagaaagataactgtcttggaaagtgaacgggaaagacacttggaatgagatatctgacacctgggtgcctctttgtctttgcaggaagtggttacctggaaggaaaggagctgcagaacttgatccaggagctccagcaggcgcgaaagaaggctggattggagttatcacctgaaatgaaaacttttgtggatcagtatgggcaaagagatgatggaaaaataggaattgtagagttggctcacgtattacccacagaagagaatttcctgctgctcttccgatgccagcagctgaagtcctgtgaggaattcatgaagacatggagaaaatatgatactgaccacagtggcttcatagaaactgaggagcttaagaactttctaaaggacctgctagaaaaagcaaacaagactgttgatgacacaaaattagccgagtatacagacctaatgctgaaactatttgattcaaataatgatgggaagctggaattaactgagatggccaggttactaccagtgcaggagaattttcttcttaaattccagggaatcaaaatgtgtgggaaagagttcaataaggcttttgagctgtatgatcaggacggcaatggatacatagatgaaaatgaactggatgctttactgaaggatctgtgcgagaagaataaacaggatctggatattaataatattacaacatacaagaagaacataatggctttgtcggatggagggaagctgtaccgaacggatcttgctcttattctctgtgctggggataactagagttggtggccgcaaccacttgctagtgatacactgtatctaaaaaataactgtgcactataagggagtaggctgtattttcttttatatctgtaaatttaactgcatatagataattatccaggatgtgtggctcattcttttcagcttgtttctatactgtttgtaatatacagtttttgtaaccatatgattgaaaagaagaaagtctatgcttaggccagtcagtacacccaattttaaaaaataacatattcttgctttcacaaatatagttgaacaagatttccctaaaaattccaccaggattaatctctaaaattctagtctctgatttgcaaatgcacatttgtcactgaataatggaattatgtataacaagccaaacattcttattttagacaaccatagaactgtcccacaaaatatttctaagcttatttctaactattaggaggaatgtgcttttccatctaaaatactcaccaaaatatagttaattgtggctttatgaagttaacagtctcattacagatttagtttaccaatcaacagcatgtctactgcttggatccatacaaaactatcggttcaagttgatgtgacaagggaagggagcaccagatgacacataaatctgtctgattctatgcctgtatttccaacaaacttactgtcagagaatatgacctaaatccattttctaaactgttttcatgtgttgcaaattattctagtcaactgctgttttatgtcatactctgtgtaatctctgattaaatttaatatactgcatatcctggtgtctagtttgcatacttcctggattttctttctatgtagaactgttcatttccaccaagggtatctgctgcctctgaaaatatttttttctagctataacaactctattttttactacataattaaattttaatgtaaaattcatagcatcctgattattgaatgttatatcatcaatacttttgtgtattctgtggattctatatttcatattgagatcagcattcaaaatagttctatttctatctgcaaatagtttcaaatgagtttaaaaaaataacatctgaaaagaaatgctaatgtaatcatttatcttatctagcaagaagattctaaaacattctttaacatacatctaagtcagtttcacatatttgtagctagaatatcctatactggttatagttgatatgtaacagttggtgattttagatttctttgattgtgaaacagggagctatgagagatgtgtccatgtgaaatttacagttactgcctaggagttaatgatcgttctgggtcagcttgaatgtccccattctataaattcaacacttattttctgaattcataaaaataaccaaaaaatgtgagctataatgtttccctcaagaacaaacagaaacgagatttgccaaaaactaaaattcaacaaatgatgttgagtgggagattggctttgcctttagcgtgtaaatggaagcactgccattagactgaatttaactactaagaataaataaagaagaaaataacttaaaaaaaaaaat

SEQ ID NO: 443696 - DNA, 2524 bp, Homo sapiens
gagtctctggtgcagctggggtggaatctggccaggccctgcttaggcccccatcctggggtcaggaaatttggaggataaggcccttcagccccaaggtcagcagggacgagcgggcagactggcgggtgtacaggagggctgggttgacctgtccttggtcactgaggccattggatcttcctccagtggctgccaggatttctggtggaagagacaggaaggcctcccccccttggtcgggtcagcctgggggctgagggcctggctgtcagccactcttcccagaacatatgtcatggcctcagtggctcatggggaagcaggggtgggcgagcttaggctagagcaagtcctgtgggagatggcagaggcctggtctgagaggcaactcggatgtgccctccagtggccatgctcccctccatgcgtctcccctgccctcctggagccctgcaggtcaatgtttaacagaaaccagagcagcggtggattaatgcgcaagggctcagccccccagccctgagcagtgggggaatcggagactttgcaacctgttctcagctctgcctcccctggccaggttgtcctcgaccagtcccgtgccatggcagcccacctgcttcccatctgcgccctcttcctgaccttactcgatatggcccaaggctttaggggccccttgctacccaaccggcccttcaccaccgtctggaatgcaaacacccagtggtgcctggagaggcacggtgtggacgtggatgtcagtgtcttcgatgtggtagccaacccagggcagaccttccgcggccctgacatgacaattttctatagctcccagctgggcacctacccctactacacgcccactggggagcctgtgtttggtggtctgccccagaatgccagcctgattgcccacctggcccgcacattccaggacatcctggctgccatacctgctcctgacttctcagggctggcagtcatcgactgggaggcatggcgcccacgctgggccttcaactgggacaccaaggacatttaccggcagcgctcacgggcactggtacaggcacagcaccctgattggccagctcctcaggtggaggcagtagcccaggaccagttccagggagctgcacgggcctggatggcaggcaccctccagctggggcgggcactgcgtcctcgcggcctctggggcttctatggcttccctgactgctacaactatgactttctaagccccaactacaccggccagtgcccatcaggcatccgtgcccaaaatgaccagctagggtggctgtggggccagagccgtgccctctatcccagcatctacatgcccgcagtgctggagggcacagggaagtcacagatgtatgtgcaacaccgtgtggccgaggcattccgtgtggctgtggctgctggtgaccccaatctgccggtgctgccctatgtccagatcttctatgacacgacaaaccactttctgcccctggatgagctggagcacagcctgggggagagtgcggcccagggggcagctggagtggtgctctgggtgagctgggaaaatacaagaaccaaggaatcatgtcaggccatcaaggagtatatggacactacactggggcccttcatcctgaacgtgaccagtggggcccttctctgcagtcaagccctgtgctccggccatggccgctgtgtccgccgcaccagccaccccaaagccctcctcctccttaaccctgccagtttctccatccagctcacgcctggtggtgggcccctgagcctgcggggtgccctctcacttgaagatcaggcacagatggctgtggagttcaaatgtcgatgctaccctggctggcaggcaccgtggtgtgagcggaagagcatgtggtgattggccacacactgagttgcacatattgagaacctaatgcactctgggtctggccagggcttcctcaaatacatgcacagtcatacaagtcatggtcacagtaaagagtacactcagccactgtcacaggcatattccctgcacacacatgcatacttacagactggaatagtggcataaggagttagaaccacagcagacaccattcattccatgtccatatgcatctacttggcaaggtcatagacaattcctccagagacactgagccagtctttgaactgcagcaatcacaaaggctgacattcactgagtgcctactctttgccaatccccgtgctaagcgttttatgtggacttattcattcctcacaatgaggctatgaggaaactgagtcactcacattgagagtaagcacgttgcccaaggttgcacagcaagaaaagggagaagttgagattcaaacccaggctgtctagctccgggggtacagcccttgcactcctactgagtttgtggtaaccagccctgcacgacccctgaatctgctgagaggcaccagtccagcaaataaagcagtcatgatttaaatacataagactgtttac

SEQ ID NO: 443697 - DNA, 2039 bp, Homo sapiens
gagtctctggtgcagctggggtggaatctggccaggccctgcttaggcccccatcctggggtcaggaaatttggaggataaggcccttcagccccaaggttgtcctcgaccagtcccgtgccatggcagcccacctgcttcccatctgcgccctcttcctgaccttactcgatatggcccaaggctttaggggccccttgctacccaaccggcccttcaccaccgtctggaatgcaaacacccagtggtgcctggagaggcacggtgtggacgtggatgtcagtgtcttcgatgtggtagccaacccagggcagaccttccgcggccctgacatgacaattttctatagctcccagctgggcacctacccctactacacgcccactggggagcctgtgtttggtggtctgccccagaatgccagcctgattgcccacctggcccgcacattccaggacatcctggctgccatacctgctcctgacttctcagggctggcagtcatcgactgggaggcatggcgcccacgctgggccttcaactgggacaccaaggacatttaccggcagcgctcacgggcactggtacaggcacagcaccctgattggccagctcctcaggtggaggcagtagcccaggaccagttccagggagctgcacgggcctggatggcaggcaccctccagctggggcgggcactgcgtcctcgcggcctctggggcttctatggcttccctgactgctacaactatgactttctaagccccaactacaccggccagtgcccatcaggcatccgtgcccaaaatgaccagctagggtggctgtggggccagagccgtgccctctatcccagcatctacatgcccgcagtgctggagggcacagggaagtcacagatgtatgtgcaacaccgtgtggccgaggcattccgtgtggctgtggctgctggtgaccccaatctgccggtgctgccctatgtccagatcttctatgacacgacaaaccactttctgcccctggatgagctggagcacagcctgggggagagtgcggcccagggggcagctggagtggtgctctgggtgagctgggaaaatacaagaaccaaggaatcatgtcaggccatcaaggagtatatggacactacactggggcccttcatcctgaacgtgaccagtggggcccttctctgcagtcaagccctgtgctccggccatggccgctgtgtccgccgcaccagccaccccaaagccctcctcctccttaaccctgccagtttctccatccagctcacgcctggtggtgggcccctgagcctgcggggtgccctctcacttgaagatcaggcacagatggctgtggagttcaaatgtcgatgctaccctggctggcaggcaccgtggtgtgagcggaagagcatgtggtgattggccacacactgagttgcacatattgagaacctaatgcactctgggtctggccagggcttcctcaaatacatgcacagtcatacaagtcatggtcacagtaaagagtacactcagccactgtcacaggcatattccctgcacacacatgcatacttacagactggaatagtggcataaggagttagaaccacagcagacaccattcattccatgtccatatgcatctacttggcaaggtcatagacaattcctccagagacactgagccagtctttgaactgcagcaatcacaaaggctgacattcactgagtgcctactctttgccaatccccgtgctaagcgttttatgtggacttattcattcctcacaatgaggctatgaggaaactgagtcactcacattgagagtaagcacgttgcccaaggttgcacagcaagaaaagggagaagttgagattcaaacccaggctgtctagctccgggggtacagcccttgcactcctactgagtttgtggtaaccagccctgcacgacccctgaatctgctgagaggcaccagtccagcaaataaagcagtcatgatttaaatacataagactgtttac

SEQ ID NO: 443698 - DNA, 1949 bp, Homo sapiens
gagtctctggtgcagctggggtggaatctggccaggccctgcttaggcccccatcctggggtcaggaaatttggaggataaggcccttcagccccaaggttgtcctcgaccagtcccgtgccatggcagcccacctgcttcccatctgcgccctcttcctgaccttactcgatatggcccaaggctttaggggccccttgctacccaaccggcccttcaccaccgtctggaatgcaaacacccagtggtgcctggagaggcacggtgtggacgtggatgtcagtgtcttcgatgtggtagccaacccagggcagaccttccgcggccctgacatgacaattttctatagctcccagctgggcacctacccctactacacgcccactggggagcctgtgtttggtggtctgccccagaatgccagcctgattgcccacctggcccgcacattccaggacatcctggctgccatacctgctcctgacttctcagggctggcagtcatcgactgggaggcatggcgcccacgctgggccttcaactgggacaccaaggacatttaccggcagcgctcacgggcactggtacaggcacagcaccctgattggccagctcctcaggtggaggcagtagcccaggaccagttccagggagctgcacgggcctggatggcaggcaccctccagctggggcgggcactgcgtcctcgcggcctctggggcttctatggcttccctgactgctacaactatgactttctaagccccaactacaccggccagtgcccatcaggcatccgtgcccaaaatgaccagctagggtggctgtggggccagagccgtgccctctatcccagcatctacatgcccgcagtgctggagggcacagggaagtcacagatgtatgtgcaacaccgtgtggccgaggcattccgtgtggctgtggctgctggtgaccccaatctgccggtgctgccctatgtccagatcttctatgacacgacaaaccactttctgcccctggaatcatgtcaggccatcaaggagtatatggacactacactggggcccttcatcctgaacgtgaccagtggggcccttctctgcagtcaagccctgtgctccggccatggccgctgtgtccgccgcaccagccaccccaaagccctcctcctccttaaccctgccagtttctccatccagctcacgcctggtggtgggcccctgagcctgcggggtgccctctcacttgaagatcaggcacagatggctgtggagttcaaatgtcgatgctaccctggctggcaggcaccgtggtgtgagcggaagagcatgtggtgattggccacacactgagttgcacatattgagaacctaatgcactctgggtctggccagggcttcctcaaatacatgcacagtcatacaagtcatggtcacagtaaagagtacactcagccactgtcacaggcatattccctgcacacacatgcatacttacagactggaatagtggcataaggagttagaaccacagcagacaccattcattccatgtccatatgcatctacttggcaaggtcatagacaattcctccagagacactgagccagtctttgaactgcagcaatcacaaaggctgacattcactgagtgcctactctttgccaatccccgtgctaagcgttttatgtggacttattcattcctcacaatgaggctatgaggaaactgagtcactcacattgagagtaagcacgttgcccaaggttgcacagcaagaaaagggagaagttgagattcaaacccaggctgtctagctccgggggtacagcccttgcactcctactgagtttgtggtaaccagccctgcacgacccctgaatctgctgagaggcaccagtccagcaaataaagcagtcatgatttaaatacataagactgtttac

SEQ ID NO: 443699 - DNA, 2001 bp, Homo sapiens
gagtctctggtgcagctggggtggaatctggccaggccctgcttaggcccccatcctggggtcaggaaatttggaggataaggcccttcagccccaaggttgtcctcgaccagtcccgtgccatggcagcccacctgcttcccatctgcgccctcttcctgaccttactcgatatggcccaaggctttaggggccccttgctacccaaccggcccttcaccaccgtctggaatgcaaacacccagtggtgcctggagaggcacggtgtggacgtggatgtcagtgtcttcgatgtggtagccaacccagggcagaccttccgcggccctgacatgacaattttctatagctcccagctgggcacctacccctactacacgcccactggggagcctgtgtttggtggtctgccccagaatgccagcctgattgcccacctggcccgcacattccaggacatcctggctgccatacctgctcctgacttctcagggctggcagtcatcgactgggaggcatggcgcccacgctgggccttcaactgggacaccaaggacatttaccggcagcgctcacgggcactggtacaggcacagcaccctgattggccagctcctcaggtggaggcagtagcccaggaccagttccagggagctgcacgggcctggatggcaggcaccctccagctggggcgggcactgcgtcctcgcggcctctggggcttctatggcttccctgactgctacaactatgactttctaagccccaactacaccggccagtgcccatcaggcatccgtgcccaaaatgaccagctagggtggctgtggggccagagccgtgccctctatcccagcatctacatgcccgcagtgctggagggcacagggaagtcacagatgtatgtgcaacaccgtgtggccgaggcattccgtgtggctgtggctgctggtgaccccaatctgccggtgctgccctatgtccagatcttctatgacacgacaaaccactttctgcccctggatgagctggagcacagcctgggggagagtgcggcccagggggcagctggagtggtgctctgggtgagctgggaaaatacaagaaccaagactggggcccttcatcctgaacgtgaccagtggggcccttctctgcagtcaagccctgtgctccggccatggccgctgtgtccgccgcaccagccaccccaaagccctcctcctccttaaccctgccagtttctccatccagctcacgcctggtggtgggcccctgagcctgcggggtgccctctcacttgaagatcaggcacagatggctgtggagttcaaatgtcgatgctaccctggctggcaggcaccgtggtgtgagcggaagagcatgtggtgattggccacacactgagttgcacatattgagaacctaatgcactctgggtctggccagggcttcctcaaatacatgcacagtcatacaagtcatggtcacagtaaagagtacactcagccactgtcacaggcatattccctgcacacacatgcatacttacagactggaatagtggcataaggagttagaaccacagcagacaccattcattccatgtccatatgcatctacttggcaaggtcatagacaattcctccagagacactgagccagtctttgaactgcagcaatcacaaaggctgacattcactgagtgcctactctttgccaatccccgtgctaagcgttttatgtggacttattcattcctcacaatgaggctatgaggaaactgagtcactcacattgagagtaagcacgttgcccaaggttgcacagcaagaaaagggagaagttgagattcaaacccaggctgtctagctccgggggtacagcccttgcactcctactgagtttgtggtaaccagccctgcacgacccctgaatctgctgagaggcaccagtccagcaaataaagcagtcatgatttaaatacataagactgtttac

SEQ ID NO: 443700 - DNA, 655 bp, Homo sapiens
gctgtagtttgtagtcttgcttgaaacaatagaaacagactgattaagcaggagaagttttttgaaagaattttgtttggctcacggaattattagaaggcaggtgaaccaggagggtaagcttccagcagcaatttgtaaaaccatgccttagaattggactaaggaagaagctgctgacactccactgccacacagggcactggaagaaagtgctgctgcctccctgccccacctttgccacttctgcagcaggaataggtagaagaatgcccccacccgcaccggaacagcaacaaaaggattctgcatgagatgcctccctaaattgctgaattcaaaaaagaagttgcatacaaagacatctgattgaaaaagggtatgttatatgcccctttcataggctgctagggagttttcctggttctactttcaggtggtgggatcaataagaccagaatttctcatatgttgtgagaggattcaaatgttacagggttgccagccaaactatcaatcatgtataaatccaacaaacactttgtaacatacaagaactcaggaaatgtgaaccattgttggagaatctactaaaatacggcttcccgcaaacgaagatgaatggaaaatgtaaataaaaagaactggcagtgta

SEQ ID NO: 443701 - DNA, 1046 bp, Homo sapiens
gctgtagtttgtagtcttgcttgaaacaatagaaacagactgattaagcaggagaagttttttgaaagaattttgtttggctcacggaattattagaaggcaggtgaaccaggagggtaagcttccagcagcaatttgtaaaaccatgccttagaattggactaaggaagaagctgctgacactccactgccacacagggcactggaagaaagtgctgctgcctccctgccccacctttgccacttctgcagcaggaataggtagaagaatgcccccacccgcaccggaacagcaacaaaaggattctgcatgagatgcctccctaaattgctgaattcaaaaaagaagttgcatacaaagacatctgattgaaaaagggtatgttatatgcccctttcataggctgctagggagttttcctggttctactttcaggtggtgggatcaataagaccagaatttctcatatgttgtgagaggattcaaatgttacagggttgccagccaaactatcaatcatgtataaatccaacaaacactttgtaacatacaagaactcaggaaatgtgaaccattgttggagaatctactaaaatacggcttcccgcaaacgaagatgaatggaaaatgtaaataaaaagaactggcagtgtatatcagatgtttaactataggaccagaactaagatgtggagactattgccatagaccacaatgtaaatttttaagtgaggaaggaaaaatcaggaatcaaaaggggccaggtgcagtggctcacatctataatcccagagctttgggagttcgaggcaggaggatcacttgaagccagttttgagaccagcctatgcaacacattgagaccctatctctacaaaaaatagattagctgggcacggtggtgcatgcctattgtcctacctactgtggaggctgaagtaggaaatcacttgagcccgagagtttgaggttacagtgagctatgattataccactgcactccagcctgggcaagagagcaagaccttgtctcttaaagaaaaaa

SEQ ID NO: 443702 - DNA, 253 bp, Homo sapiens
ggaggaaggggcggagagggacctctgctttccaggctgccttttatactgcctctggtcacctgacatggaacgtaccctaacctaatcagttacctgtaccttaattgcaattaacttaatccaattacatgacctggaaaggtctatctgcacagcccactctaagatcctgtccactgctgacagacattctaaaacctacttgtacagctgcaagctttgaacaatagatgttccccgtcagacatgt

SEQ ID NO: 443703 - DNA, 152 bp, Homo sapiens
ggaggaaggggcggagagggacctctgctttccaggctgccttttatactgcctctggtcacctgacatggaacgaggcgcttggaaaccaccgtgaattggaccgcactgggaaacacagatgaggaaagtcaacaacgctttgtccttca

SEQ ID NO: 443704 - DNA, 915 bp, Homo sapiens
ttttctaaatacacatcaaatcatgttacttccctacctaaactacccagtagctactgtgtacttagaataaaacccagcgttcttaactggggcccatagggtaatatgtgatctgcccccatctgtctacctgatttcctactcttcctctcttcttaagccccagcatactgggcttatcattatgagcacttaccactctctaatggcatatttattggtttactctttgtattgtcttgtttctttgcttgaattatagacacatttgcatagcatttttgtcttgttcatcactttatcttcagtgcctagggaaatgcttggcacacaattaaaaaggtgttcaacatttatctattgatgaatgggtaaatccagcactgtctccctcttccctgccacctccatatcccagtagtcactaggacctgtaggttcatgtatgtctctttactctttttgatttatcctgaatgtcatgtctcattttatattctgtattatttgttttctggtctgttactgccatcttttaactggttttccttcagtgttttgtctattccagtctgtattttgcactgtcaccaaaagatgatttatgaagcataggtctttaaaaattacatgatgggctcggtgcggtggctcacgcctgtaatcccagcactttgggaggccgaggcgggcggatcacctgaggtcaggaattcaagaccagcctggccaacgtggtgaaaccccgtctctactaaaaatataaaaattagccaggtgtggcggtgtatgcctgtaatcccagctactcgaaaggctaaggcgggagaatggcgtgaacccgggaggtggagcttgcagtgagccaagatcgtgtcactgcactccaacctgggtgacagagtgagactc

SEQ ID NO: 443705 - DNA, 199 bp, Homo sapiens
actttattgcttcagatatgctcatccttctgtgttttccaaatataagctgatttggagagctgccttacctggtagtcttactggcttattctatacattcgtattctagttttactaagttacctctcctatcttttgtacatattttgtcctcactctcatcaacactctcctgtgtgccagttgtctttttttt

SEQ ID NO: 443706 - DNA, 2487 bp, Homo sapiens
atagagccctcagtgggatgagggtgaaactgctattgccggcggctcctgttttaccgcgtcagcatgctggtgcatttatttcgggtcgggattcggggtggcccattcccaggcaggctgctaccgcccctccgcttccagacattctcagctgtcagaaacacatggcgtaatgggaaaactggacagttacacaaggcagaaggagagtactctgatggctaccgcagctcctccctcctccgggccgtggcccacctgcggtcccagctctgggcccacctccctcgagcccccctagctcccagatggagcccctctgcctggtgctgggttgggggagccctgctaggccccatggtactgagtaagcatccccacctctgccttgtggccctgtgtgaggcagaagaggcccctcctgccagctccacaccccatgtcgtggggtctcgctttaactggaagctcttctggcagtttctgcacccccacctgctggtcctgggggtagccgtcgtgctggccttgggtgcggcactcgtgaatgtacagatccccctgctcctgggccagctggtagaggtcgtggccaagtacacaagggaccacgtagggagtttcatgactgagtcccagaatctcagcacccacctgcttatcctctatggtgtccagggactgctgaccttcgggtacctggtgctgctgtcccacgttggcgagcgcatggctgtggacatgcggagggccctcttcagctccctgctccgacaagacatcaccttctttgacgccaataagacagggcagctggtgagccgcttgacaactgacgtgcaggagtttaagtcatccttcaagcttgtcatctcccaggggctgcgaagctgcacccaggtggcaggctgcctggtgtccctgtccatgctgtcgacacgcctcacgctgctgctgatggtggccacaccagccctgatgggagtgggcaccctgatgggctcaggcctccgaaaattgtctcgccagtgtcaggagcagatcgccagggcaatgggcgtagcagacgaggccctgggcaatgtgcggactgtgcgtgccttcgccatggagcaacgggaagaggagcgctatggggcagagctggaagcctgccgctgccgggcagaggagctgggccgcggcatcgccttgttccaagggctttccaacatcgccttcaactgcatggtcttgggtaccctatttattgggggctcccttgtggccggacagcagctgacagggggagacctcatgtccttcctggtggcctcccagacagtgcaaaggtccatggccaacctctctgtcctgtttgggcaggtggtccgggggctgagtgcaggtgcccgggtctttgagtacatggccctgaacccctgcatcccactgtctgggggctgctgcgtccccaaagagcagctgcgtggctccgttacatttcagaacgtctgcttcagctacccctgccgccccggcttcgaggtgctgaaagacttcaccctgacgctgccccctggcaagatcgtggccctcgtgggccagtctggcggaggaaagaccaccgtggcttccctgctggagcgcttctacgaccccacggcaggcgtggtgatgctggatgggcgggacctgcgcacccttgacccctcctggctccggggccaggttgtcggcttcatcagccaggagcccgtcctgtttgggacgaccatcatggaaaacatccgctttgggaagctggaagcttccgatgaagaggtgtacacagccgcccgggaagcgaatgctcacgagttcatcaccagcttccccgagggctacaacacggtcgtcggtgaacggggcactaccctgtctgggggccagaagcagcgcctggccatcgcccgagcccttatcaagcagcccacggtgctgatactggatgaagctaccagcgcgctggatgcagagtccgagcgggttgtacaggaggccctggaccgggccagtgcaggccgcacggtgctggtaattgcccaccggctcagcactgtccgtggggcccactgcattgtcgtcatggccgatggccgtgtctgggaggctgggacacatgaagagctcctgaagaaaggcgggctatacgccgagctcatccggaggcaggccctggatgccccgaggacagcggccccaccgcccaaaaagccagaaggccccaggagccaccagcacaagtcctgagaagggccccctgaggtgtggtcgctgccaagcatcagtgttagggctggggctcagcctgggggagcctactggggactgagcccccaggagggccagcatgtggagagtcgctgcggctgctcctgctcacaataaagccggggccgagcagctggcaggggaggccaatccctccctcccctccccagtcctgccggctgcctccctccc

SEQ ID NO: 443707 - DNA, 414 bp, Homo sapiens
  misc_feature (8)..(8): n is a, c, g, or t
gcacgagntcgtgccgagacagtgcaaaggctgtgacactccatgcatggaaggacatgaggtctccccctgtccttcctggtggcctcccagacagtgcaaaggctgtgacactccatgcatggaaggaccatccttgacaggctgtgtgagctgcccttccccatgcctgccacttccagggatgacaagctgacccctgtccccacacaccccacccttatagcttattgctttgcgttggtccaaaaccacccgctcagctgagcctctgggatgaccagagctgatcaccagacagctcaaggcgggcctcccccctcctatctctttccaagctaaacacaagcagttctacataaatatgttatggtaaataatgagatagtaaatatgctgtaacagatcaacaaa

SEQ ID NO: 443708 - DNA, 2123 bp, Homo sapiens
atagagccctcagtgggatgagggtgaaactgctattgccggcggctcctgttttaccgcgtcagcatgctggtgcatttatttcgggtcgggattcggggtggcccattcccaggcaggctgctaccgcccctccgcttccagacattctcagctgtcagctggccttgggtgcggcactcgtgaatgtacagatccccctgctcctgggccagctggtagaggtcgtggccaagtacacaagggaccacgtagggagtttcatgactgagtcccagaatctcagcacccacctgcttatcctctatggtgtccagggactgctgaccttcgggtacctggtgctgctgtcccacgttggcgagcgcatggctgtggacatgcggagggccctcttcagctccctgctccgacaagacatcaccttctttgacgccaataagacagggcagctggtgagccgcttgacaactgacgtgcaggagtttaagtcatccttcaagcttgtcatctcccaggggctgcgaagctgcacccaggtggcaggctgcctggtgtccctgtccatgctgtcgacacgcctcacgctgctgctgatggtggccacaccagccctgatgggagtgggcaccctgatgggctcaggcctccgaaaattgtctcgccagtgtcaggagcagatcgccagggcaatgggcgtagcagacgaggccctgggcaatgtgcggactgtgcgtgccttcgccatggagcaacgggaagaggagcgctatggggcagagctggaagcctgccgctgccgggcagaggagctgggccgcggcatcgccttgttccaagggctttccaacatcgccttcaactgcatggtcttgggtaccctatttattgggggctcccttgtggccggacagcagctgacagggggagacctcatgtccttcctggtggcctcccagacagtgcaaaggtccatggccaacctctctgtcctgtttgggcaggtggtccgggggctgagtgcaggtgcccgggtctttgagtacatggccctgaacccctgcatcccactgtctgggggctgctgcgtccccaaagagcagctgcgtggctccgttacatttcagaacgtctgcttcagctacccctgccgccccggcttcgaggtgctgaaagacttcaccctgacgctgccccctggcaagatcgtggccctcgtgggccagtctggcggaggaaagaccaccgtggcttccctgctggagcgcttctacgaccccacggcaggcgtggtgatgctggatgggcgggacctgcgcacccttgacccctcctggctccggggccaggttgtcggcttcatcagccaggagcccgtcctgtttgggacgaccatcatggaaaacatccgctttgggaagctggaagcttccgatgaagaggtgtacacagccgcccgggaagcgaatgctcacgagttcatcaccagcttccccgagggctacaacacggtcgtcggtgaacggggcactaccctgtctgggggccagaagcagcgcctggccatcgcccgagcccttatcaagcagcccacggtgctgatactggatgaagctaccagcgcgctggatgcagagtccgagcgggttgtacaggaggccctggaccgggccagtgcaggccgcacggtgctggtaattgcccaccggctcagcactgtccgtggggcccactgcattgtcgtcatggccgatggccgtgtctgggaggctgggacacatgaagagctcctgaagaaaggcgggctatacgccgagctcatccggaggcaggccctggatgccccgaggacagcggccccaccgcccaaaaagccagaaggccccaggagccaccagcacaagtcctgagaagggccccctgaggtgtggtcgctgccaagcatcagtgttagggctggggctcagcctgggggagcctactggggactgagcccccaggagggccagcatgtggagagtcgctgcggctgctcctgctcacaataaagccggggccgagcagctggcaggggaggccaatccctccctcccctccccagtcctgccggctgcctccctccc

SEQ ID NO: 443709 - DNA, 1636 bp, Homo sapiens
atagagccctcagtgggatgagggtgaaactgctattgccggcggctcctgttttaccgcgtcagcatgctggtgcatttatttcgggtcgggattcggggtggcccattcccaggcaggctgctaccgcccctccgcttccagacattctcagctgtcaggtactctgatggctaccgcagctcctccctcctccgggccgtggcccacctgcggtcccagctctgggcccacctccctcgagcccccctagctcccagatggagcccctctgcctggtgctgggttgggggagccctgctaggccccatggtactgagtaagcatccccacctctgccttgtggccctgtgtgaggcagaagaggcccctcctgccagctccacaccccatgtcgtggggtctcgctttaactggaagctcttctggcagtttctgcacccccacctgctggtcctgggggtagccgtcgtgctggccttgggtgcggcactcgtgaatgtacagatccccctgctcctgggccagctggtagaggtcgtggccaagtacacaagggaccacgtagggagtttcatgactgagtcccagaatctcagcacccacctgcttatcctctatggtgtccagggactgctgaccttcgggtacctggtgctgctgtcccacgttggcgagcgcatggctgtggacatgcggagggccctcttcagctccctgctccgacaagacatcaccttctttgacgccaataagacagggcagctggtgagccgcttgacaactgacgtgcaggagtttaagtcatccttcaagcttgtcatctcccaggggctgcgaagctgcacccaggtggcaggctgcctggtgtccctgtccatgctgtcgacacgcctcacgctgctgctgatggtggccacaccagccctgatgggagtgggcaccctgatgggctcaggcctccgaaaattgtctcgccagtgtcaggagcagatcgccagggcaatgggcgtagcagacgaggccctgggcaatgtgcggactgtgcgtgccttcgccatggagcaacgggaagaggagcgctatggggcagagctggaagcctgccgctgccgggcagaggagctgggccgcggcatcgccttgttccaagggctttccaacatcgccttcaactgcatggtcttgggtaccctatttattgggggctcccttgtggccggacagcagctgacagggggagacctcatgtccttcctggtggcctcccagacagtgcaaagcttcctccgtgttgcaccctgtccgaattcccttccgctgcaggctgtgacactccatgcatggaaggaccatccttgacaggctgtgtgagctgcccttccccatgcctgccacttccagggatgacaagctgacccctgtccccacacaccccacccttatagcttattgctttgcgttggtccaaaaccacccgctcagctgagcctctgggatgaccagagctgatcaccagacagctcaaggcgggcctcccccctcctatctctttccaagctaaacacaagcagttctacataaatatgttatggtaaataatgagatagtaaatatgctgtaacagatcaacaaa

SEQ ID NO: 443710 - DNA, 1593 bp, Homo sapiens
atagagccctcagtgggatgagggtgaaactgctattgccggcggctcctgttttaccgcgtcagcatgctggtgcatttatttcgggtcgggattcggggtggcccattcccaggcaggctgctaccgcccctccgcttccagacattctcagctgtcaggtactctgatggctaccgcagctcctccctcctccgggccgtggcccacctgcggtcccagctctgggcccacctccctcgagcccccctagctcccagatggagcccctctgcctggtgctgggttgggggagccctgctaggccccatggtactgagtaagcatccccacctctgccttgtggccctgtgtgaggcagaagaggcccctcctgccagctccacaccccatgtcgtggggtctcgctttaactggaagctcttctggcagtttctgcacccccacctgctggtcctgggggtagccgtcgtgctggccttgggtgcggcactcgtgaatgtacagatccccctgctcctgggccagctggtagaggtcgtggccaagtacacaagggaccacgtagggagtttcatgactgagtcccagaatctcagcacccacctgcttatcctctatggtgtccagggactgctgaccttcgggtacctggtgctgctgtcccacgttggcgagcgcatggctgtggacatgcggagggccctcttcagctccctgctccgacaagacatcaccttctttgacgccaataagacagggcagctggtgagccgcttgacaactgacgtgcaggagtttaagtcatccttcaagcttgtcatctcccaggggctgcgaagctgcacccaggtggcaggctgcctggtgtccctgtccatgctgtcgacacgcctcacgctgctgctgatggtggccacaccagccctgatgggagtgggcaccctgatgggctcaggcctccgaaaattgtctcgccagtgtcaggagcagatcgccagggcaatgggcgtagcagacgaggccctgggcaatgtgcggactgtgcgtgccttcgccatggagcaacgggaagaggagcgctatggggcagagctggaagcctgccgctgccgggcagaggagctgggccgcggcatcgccttgttccaagggctttccaacatcgccttcaactgcatggtcttgggtaccctatttattgggggctcccttgtggccggacagcagctgacagggggagacctcatgtccttcctggtggcctcccagacagtgcaaaggctgtgacactccatgcatggaaggaccatccttgacaggctgtgtgagctgcccttccccatgcctgccacttccagggatgacaagctgacccctgtccccacacaccccacccttatagcttattgctttgcgttggtccaaaaccacccgctcagctgagcctctgggatgaccagagctgatcaccagacagctcaaggcgggcctcccccctcctatctctttccaagctaaacacaagcagttctacataaatatgttatggtaaataatgagatagtaaatatgctgtaacagatcaacaaa

SEQ ID NO: 443711 - DNA, 497 bp, Homo sapiens
aaaatacaaaaattaaccaggcatggtggtgggcgcctgtagtcccagctactcgagaggctgaggcaggagaatcgcttgaacctgggaggtggaggttgcagtcagccagcatagcaccactgctctccagccggggcaaaagagtgagaccctgtcttgaaaagaaaagaaaagaatcagaatacatgttaagaattagagaaaatgttattttgtgaagcatttccattttgtgtggcatgtatgtgttcattgtactgggttgcaagtaagatatgtttcttgctgtaggccacagtaagtctaaacatttgcaaaaccctgtagtagttaggtcagattgtcctgcacctctaatgagggcatgcatgtgctcaacaagcataaacatttgcggaacatctattatgtaccggagttctgccagtgctgtctaagatataatttcctgcctttcagaaacacatggcgtaatgggaaaactggacagttac

SEQ ID NO: 443712 - DNA, 2436 bp, Homo sapiens
atagagccctcagtgggatgagggtgaaactgctattgccggcggctcctgttttaccgcgtcagcatgctggtgcatttatttcgggtcgggattcggggtggcccattcccaggcaggctgctaccgcccctccgcttccagacattctcagctgtcaggtactctgatggctaccgcagctcctccctcctccgggccgtggcccacctgcggtcccagctctgggcccacctccctcgagcccccctagctcccagatggagcccctctgcctggtgctgggttgggggagccctgctaggccccatggtactgagtaagcatccccacctctgccttgtggccctgtgtgaggcagaagaggcccctcctgccagctccacaccccatgtcgtggggtctcgctttaactggaagctcttctggcagtttctgcacccccacctgctggtcctgggggtagccgtcgtgctggccttgggtgcggcactcgtgaatgtacagatccccctgctcctgggccagctggtagaggtcgtggccaagtacacaagggaccacgtagggagtttcatgactgagtcccagaatctcagcacccacctgcttatcctctatggtgtccagggactgctgaccttcgggtacctggtgctgctgtcccacgttggcgagcgcatggctgtggacatgcggagggccctcttcagctccctgctccgacaagacatcaccttctttgacgccaataagacagggcagctggtgagccgcttgacaactgacgtgcaggagtttaagtcatccttcaagcttgtcatctcccaggggctgcgaagctgcacccaggtggcaggctgcctggtgtccctgtccatgctgtcgacacgcctcacgctgctgctgatggtggccacaccagccctgatgggagtgggcaccctgatgggctcaggcctccgaaaattgtctcgccagtgtcaggagcagatcgccagggcaatgggcgtagcagacgaggccctgggcaatgtgcggactgtgcgtgccttcgccatggagcaacgggaagaggagcgctatggggcagagctggaagcctgccgctgccgggcagaggagctgggccgcggcatcgccttgttccaagggctttccaacatcgccttcaactgcatggtcttgggtaccctatttattgggggctcccttgtggccggacagcagctgacagggggagacctcatgtccttcctggtggcctcccagacagtgcaaaggtccatggccaacctctctgtcctgtttgggcaggtggtccgggggctgagtgcaggtgcccgggtctttgagtacatggccctgaacccctgcatcccactgtctgggggctgctgcgtccccaaagagcagctgcgtggctccgttacatttcagaacgtctgcttcagctacccctgccgccccggcttcgaggtgctgaaagacttcaccctgacgctgccccctggcaagatcgtggccctcgtgggccagtctggcggaggaaagaccaccgtggcttccctgctggagcgcttctacgaccccacggcaggcgtggtgatgctggatgggcgggacctgcgcacccttgacccctcctggctccggggccaggttgtcggcttcatcagccaggagcccgtcctgtttgggacgaccatcatggaaaacatccgctttgggaagctggaagcttccgatgaagaggtgtacacagccgcccgggaagcgaatgctcacgagttcatcaccagcttccccgagggctacaacacggtcgtcggtgaacggggcactaccctgtctgggggccagaagcagcgcctggccatcgcccgagcccttatcaagcagcccacggtgctgatactggatgaagctaccagcgcgctggatgcagagtccgagcgggttgtacaggaggccctggaccgggccagtgcaggccgcacggtgctggtaattgcccaccggctcagcactgtccgtggggcccactgcattgtcgtcatggccgatggccgtgtctgggaggctgggacacatgaagagctcctgaagaaaggcgggctatacgccgagctcatccggaggcaggccctggatgccccgaggacagcggccccaccgcccaaaaagccagaaggccccaggagccaccagcacaagtcctgagaagggccccctgaggtgtggtcgctgccaagcatcagtgttagggctggggctcagcctgggggagcctactggggactgagcccccaggagggccagcatgtggagagtcgctgcggctgctcctgctcacaataaagccggggccgagcagctggcaggggaggccaatccctccctcccctccccagtcctgccggctgcctccctccc

SEQ ID NO: 443713 - DNA, 2361 bp, Homo sapiens
atagagccctcagtgggatgagggtgaaactgctattgccggcggctcctgttttaccgcgtcagcatgctggtgcatttatttcgggtcgggattcggggtggcccattcccaggcaggctgctaccgcccctccgcttccagacattctcagctgtcaggtactctgatggctaccgcagctcctccctcctccgggccgtggcccacctgcggtcccagctctgggcccacctccctcgagcccccctagctcccagatggagcccctctgcctggtgctgggttgggggagccctgctaggccccatggtactgagtaagcatccccacctctgccttgtggccctgtgtgaggcagaagaggcccctcctgccagctccacaccccatgtcgtggggtctcgctttaactggaagctcttctggcagtttctgcacccccacctgctggtcctgggggtagccgtcgtgctggccttgggtgcggcactcgtgaatgtacagatccccctgctcctgggccagctggtagaggtcgtggccaagtacacaagggaccacgtagggagtttcatgactgagtcccagaatctcagcacccacctgcttatcctctatggtgtccagggactgctgaccttcgggtacctggtgctgctgtcccacgttggcgagcgcatggctgtggacatgcggagggccctcttcagctccctgctccgacaagacatcaccttctttgacgccaataagacagggcagctggtgagccgcttgacaactgacgtgcaggagtttaagtcatccttcaagcttgtcatctcccaggggctgcgaagctgcacccaggtggcaggctgcctggtgtccctgtccatgctgtcgacacgcctcacgctgctgctgatggtggccacaccagccctgatgggagtgggcaccctgatgggctcaggcctccgaaaattgtctcgccagtgtcaggagcagatcgccagggcaatgggcgtagcagacgaggccctgggcaatgtgcggactgtgcgtgccttcgccatggagcaacgggaagaggagcgctatggggcagagctggaagcctgccgctgccgggcagaggagctgggccgcggcatcgccttgttccaagggctttccaacatcgccttcaactgcatggtcttgggtaccctatttattgggggctcccttgtggccggacagcagctgacagggggagacctcatgtccttcctggtggcctcccagacagtgcaaaggtccatggccaacctctctgtcctgtttgggcaggtggtccgggggctgagtgcaggtgcccgggtctttgagtacatggccctgaacccctgcatcccactgtctgggggctgctgcgtccccaaagagcagctgcgtggctccgttacatttcagaacgtctgcttcagctacccctgccgccccggcttcgaggtgctgaaagacttcaccctgacgctgccccctggcaagatcgtggccctcgtgggccagtctggcggaggaaagaccaccgtggcttccctgctggagcgcttctacgaccccacggcaggcgtggtgatgctggatgggcgggacctgcgcacccttgacccctcctggctccggggccaggttgtcggcttcatcagccaggagcccgtcctgtttgggacgaccatcatggaaaacatccgctttgggaagctggaagcttccgatgaagaggtgtacacagccgcccgggaagcgaatgctcacgagttcatcaccagcttccccgagggctacaacacggtcgtcggtgaacggggcactaccctgtctgggggccagaagcagcgcctggccatcgcccgagcccttatcaagcagcccacggtgctgatactggatgaagctaccagcgcgctggatgcagagtccgagcgggttgtacaggaggccctggaccgggccagtgcaggccgcacggtgctggctgggacacatgaagagctcctgaagaaaggcgggctatacgccgagctcatccggaggcaggccctggatgccccgaggacagcggccccaccgcccaaaaagccagaaggccccaggagccaccagcacaagtcctgagaagggccccctgaggtgtggtcgctgccaagcatcagtgttagggctggggctcagcctgggggagcctactggggactgagcccccaggagggccagcatgtggagagtcgctgcggctgctcctgctcacaataaagccggggccgagcagctggcaggggaggccaatccctccctcccctccccagtcctgccggctgcctccctccc

SEQ ID NO: 443714 - DNA, 2382 bp, Homo sapiens
atagagccctcagtgggatgagggtgaaactgctattgccggcggctcctgttttaccgcgtcagcatgctggtgcatttatttcgggtcgggattcggggtggcccattcccaggcaggctgctaccgcccctccgcttccagacattctcagctgtcaggtactctgatggctaccgcagctcctccctcctccgggccgtggcccacctgcggtcccagctctgggcccacctccctcgagcccccctagctcccagatggagcccctctgcctggtgctgggttgggggagccctgctaggccccatggtactgagtaagcatccccacctctgccttgtggccctgtgtgaggcagaagaggcccctcctgccagctccacaccccatgtcgtggggtctcgctttaactggaagctcttctggcagtttctgcacccccacctgctggtcctgggggtagccgtcgtgctggccttgggtgcggcactcgtgaatgtacagatccccctgctcctgggccagctggtagaggtcgtggccaagtacacaagggaccacgtagggagtttcatgactgagtcccagaatctcagcacccacctgcttatcctctatggtgtccagggactgctgaccttcgggtacctggtgctgctgtcccacgttggcgagcgcatggctgtggacatgcggagggccctcttcagctccctgctccgacaagacatcaccttctttgacgccaataagacagggcagctggtgagccgcttgacaactgacgtgcaggagtttaagtcatccttcaagcttgtcatctcccaggggctgcgaagctgcacccaggtggcaggctgcctggtgtccctgtccatgctgtcgacacgcctcacgctgctgctgatggtggccacaccagccctgatgggagtgggcaccctgatgggctcaggcctccgaaaattgtctcgccagtgtcaggagcagatcgccagggcaatgggcgtagcagacgaggccctgggcaatgtgcggactgtgcgtgccttcgccatggagcaacgggaagaggagcgctatggggcagagctggaagcctgccgctgccgggcagaggagctgggccgcggcatcgccttgttccaagggctttccaacatcgccttcaactgcatggtcttgggtaccctatttattgggggctcccttgtggccggacagcagctgacagggggagacctcatgtccttcctggtggcctcccagacagtgcaaaggtccatggccaacctctctgtcctgtttgggcaggtggtccgggggctgagtgcaggtgcccgggtctttgagtacatggccctgaacccctgcatcccactgtctgggggctgctgcgtccccaaagagcagctgcgtggctccgttacatttcagaacgtctgcttcagctacccctgccgccccggcttcgaggtgctgaaagacttcaccctgacgctgccccctggcaagatcgtggccctcgtgggccagtctggcggaggaaagaccaccgtggcttccctgctggagcgcttctacgaccccacggcaggcgtggtgatgctggatgggcgggacctgcgcacccttgacccctcctggctccggggccaggttgtcggcttcatcagccaggagcccgtcctgtttgggacgaccatcatggaaaacatccgctttgggaagctggaagcttccgatgaagaggtgtacacagccgcccgggaagcgaatgctcacgagttcatcaccagcttccccgagggctacaacacggtcgtcggtgaacggggcactaccctgtctgggggccagaagcagcgcctggccatcgcccgagcccttatcaagcagcccacggtgctgatactggatgaagctaccagcgcgctggatgcagagtccgagcgggttgtacaggaggccctggaccgggccagtgcaggccgcacggtgctggtaattgcccaccggctcagcactgtccgtggggcccactgcattgtcgtcatggccgatggccgtgtctgggaggctgggacacatgaagagctcctgaagaaaggcgggctatacgccgagctcatccggaggcaggccctggatgccccgaggacagcggccccaccgcccaaagtgtggtcgctgccaagcatcagtgttagggctggggctcagcctgggggagcctactggggactgagcccccaggagggccagcatgtggagagtcgctgcggctgctcctgctcacaataaagccggggccgagcagctggcaggggaggccaatccctccctcccctccccagtcctgccggctgcctccctccc

SEQ ID NO: 443715 - DNA, 914 bp, Homo sapiens
gcttccaagactctgaaataccaggatttccacaaactcatcttgccctgactgggaatctttcggagattggatttcagagtattccccaacctgatcggatatcacctcctcaatggaagcttccctaataccctctgatgtttctagaagcaggacacatggcttgtgtcataagtcttgacctgattatcatagattgcctcaccaagtttagcataccctgtctgagagtgatgctggcaaattagtgaataagaggactgtggaatttatttgattgctaatcttgtgtcaggacatggttattttttaaaaaagaagtgtcctcttttgatcttaactgtttgatatctcagcccttgagtgaggcagttatatgcaaaggagatgagaaggatgagaaaagtgagtacttttccttcataaaagccacatgaattgaacaagacttcagaattcagaagaactacatcaagttcttgggtcatttttttaacccattctccaagaattgaaaaaatgaccttgcaaatatgtgcaagactctggaatcttcctttggcagatgatgaatgagatgaatatttccaggtgcttgccttcagcaccagcacatgtacattctagtactcttggccttgatcctacactgaatctgagggtgcaaggactttagatagaggctcaggacagactggacctgtatgaacctctgaattgtagctagcctgggcagccagttacttggatccctctggggcttctggacaaacaactcttttatagcccaaggtagatggtcaggggcgaccagagagagcaatagattcgttgacttcaagcttaacatgagttagcagtatggtgaggcttccagcaaaatgtaagcactcaataaatgttagctatta

SEQ ID NO: 443716 - DNA, 956 bp, Homo sapiens
acaaagtctcactctgtcacctaggctggagtgcaatggtgcaatcttggctcactgcaacctctgcttcccgggttcaagcgattctccagcctcagcctcctgagtagctgggactatgggcctgtgccatcacacccagctaatttttctatttttggtagagatggggttttgccatgttggccaggctggtctcaaactgctgacttcaggtgatccacccgcctcggcctcccagggtgttgggattgcaggtgtgagccactgcgcctggcctaaacaaactttttgaaaagctgtttctaaaagattccttaaattcagatatgacagctaattacctcatcataaattacttttatactaattgtttccagggttttagagtagttgaatgtttatttcacaaggcaccctaaattctatagaaataaaacctcagatgagtctccttcttagagtgttacaatgaatgggagtttacaacttttatgtgtcatgtttccaacagctgtgtttggggtggtcactggcaggaggggaccgtatctcagaatggcacattatttctattttacacatgagcaaattgaggcatagagagttagataacttgcccaggttacacagattgtaagttgatgaagctgggatttgaatcttcacatgtgtgtacttataaatacaaatgtaaggaaaactctagtgagtccacctcttatattgagttattactgtgtgagtgccaagtactgttttagatgctttacatatactattttgtttaatatcctttttaaagaataaactaggttggtgcagtagctcacgcctgtaatcccaggactttgggaagctgaggcaggtggattgcttgagtctcaggagttcgagaccaggctggttaacatggcgaaaccctgtctttactaaaagtacaaaaaattagctgg

SEQ ID NO: 443717 - DNA, 461 bp, Homo sapiens
acaaagtctcactctgtcacctaggctggagtgcaatggtgcaatcttggctcactgcaacctctgcttcccgggttcaagcgattctccagcctcagcctcctgagtagctgggactatgggcctgtgccatcacacccagctaatttttctatttttggtagagatggggttttgccatgttggccaggctggtctcaaactgctgacttcaggtgatccacccgcctcggcctcccagggtgttgggattgcaggtgtgagccactgcgcctggcctaaacaaactttttgaaaagctgtttctaaaagattccttaaattcagatatgacagctaattacctcatcataaattacttttatactaattgtttccagggttttagagtagttgaatgtttatttcacaaggcaccctaaattctatagaaataaaacctcagatgagtctccttctta

SEQ ID NO: 443718 - DNA, 907 bp, Homo sapiens
ggaatgggtcctgggctcatagacaaaaagagagatgtcacatggagatctgagggctcaaagttttgggtttgttttgttttgagatagagtcttggtctctcgaacaggctggagtgcagtggcgcggtctcggctcactgcagcctccatctcccgggttcaggcggttctcctgcctcggcctcccagggtgttgggattgcaggtgtgagccactgcgcctggcctaaacaaactttttgaaaagctgtttctaaaagattccttaaattcagatatgacagctaattacctcatcataaattacttttatactaattgtttccagggttttagagtagttgaatgtttatttcacaaggcaccctaaattctatagaaataaaacctcagatgagtctccttcttagagtgttacaatgaatgggagtttacaacttttatgtgtcatgtttccaacagctgtgtttggggtggtcactggcaggaggggaccgtatctcagaatggcacattatttctattttacacatgagcaaattgaggcatagagagttagataacttgcccaggttacacagattgtaagttgatgaagctgggatttgaatcttcacatgtgtgtacttataaatacaaatgtaaggaaaactctagtgagtccacctcttatattgagttattactgtgtgagtgccaagtactgttttagatgctttacatatactattttgtttaatatcctttttaaagaataaactaggttggtgcagtagctcacgcctgtaatcccaggactttgggaagctgaggcaggtggattgcttgagtctcaggagttcgagaccaggctggttaacatggcgaaaccctgtctttactaaaagtacaaaaaattagctgg

SEQ ID NO: 443719 - DNA, 1170 bp, Homo sapiens
ggataggtagggttagggttgccagatgtcacgaagttacaggatgctcagttttaaggtatatcccttatactataagggttatagtaaaaaatattcattatgtgaaattcaaatataactgggtatcaggtattctatgtggcaaccctaggtaggggagcacaggttaggcaagcgattagaagatttgcagcctccaaagtttctgcacctcgatgggacactagaacaggaaggctcctgggcctttctggctctgggaatgaagcgtggaaaaccctccttaggcgggcgcagtgcttcaagtagccaagctctgacttccgagggaagaaaggaggccatgggcctctgccagagccatgctctgcactctggggtcagcagagttcaaaacgacctgcaacgtctggcgcttagctcctaaagaggtctccagtccagcgccgacggccagcggctagaggccgtccgcccgactccaagatggcgcccgccacagctgccaggtgttaagatggcggcgcggggccgcgcccgcgctcccaggctctcctcccccagccttcctccggctggcagcacgactcgcgtagccgtgcgccgattgcctctcggcctgggcaatggtcccggctgccggtcgacgaccgccccgcgtcatgcggctcctcggctggtggcaagtattgctgtgggtgctgggacttcccgtccgcggcgtggagggtgagtgtgggccgggggcggtgcatgagatgatggggcgagctgaggtccacccgggcgacgctctggacctgcgcgaaggccggcggtgcgcgactcgccccttcttggcgtctccccgggcgcgtctccccgacttctctccccgcgcaccgcccgctggtggcccgcgaaagggggccggtgggctgagggccggtggacgggagcccgggggtggttgggccgcgttcaggccgccctcagcccgtggctggtagccaggagggacagtgcggtaagcgctgctgaggcataccctctggtgataagcaatttattattaataacattatatcaaataccgacattgttgtggccgtattaggagccaggaactgtgcatcgtgctttatttacatcattatcccatttaatgctcccacaaaccctgtcaga

SEQ ID NO: 443720 - DNA, 2876 bp, Homo sapiens
ggataggtagggttagggttgccagatgtcacgaagttacaggatgctcagttttaaggtatatcccttatactataagggttatagtaaaaaatattcattatgtgaaattcaaatataactgggtatcaggtattctatgtggcaaccctaggtaggggagcacaggttaggcaagcgattagaagatttgcagcctccaaagtttctgcacctcgatgggacactagaacaggaaggctcctgggcctttctggctctgggaatgaagcgtggaaaaccctccttaggcgggcgcagtgcttcaagtagccaagctctgacttccgagggaagaaaggaggccatgggcctctgccagagccatgctctgcactctggggtcagcagagttcaaaacgacctgcaacgtctggcgcttagctcctaaagaggtctccagtccagcgccgacggccagcggctagaggccgtccgcccgactccaagatggcgcccgccacagctgccaggtgttaagatggcggcgcggggccgcgcccgcgctcccaggctctcctcccccagccttcctccggctggcagcacgactcgcgtagccgtgcgccgattgcctctcggcctgggcaatggtcccggctgccggtcgacgaccgccccgcgtcatgcggctcctcggctggtggcaagtattgctgtgggtgctgggacttcccgtccgcggcgtggaggttgcagaggaaagtggtcgcttatggtcagaggagcagcctgctcaccctctccaggtgggggctgtgtacctgggtgaggaggagctcctgcatgacccgatgggccaggacagggcagcagaagaggccaatgcggtgctggggctggacacccaaggcgatcacatggtgatgctgtctgtgattcctggggaagctgaggacaaagtgagttcagagcctagcggcgtcacctgtggtgctggaggagcggaggactcaaggtgcaacgtccgagagagccttttctctctggatggcgctggagcacacttccctgacagagaagaggagtattacacagagccagaagtggcggaatctgacgcagccccgacagaggactccaataacactgaaagtctgaaatccccaaaggtgaactgtgaggagagaaacattacaggattagaaaatttcactctgaaaattttaaatatgtcacaggaccttatggattttctgaacccaaacggtagtgactgtactctagtcctgttttacaccccgtggtgccgcttttctgccagtttggcccctcactttaactctctgccccgggcatttccagctcttcactttttggcactggatgcatctcagcacagcagcctttctaccaggtttggcaccgtagctgttcctaatattttattatttcaaggagctaaaccaatggccagatttaatcatacagatcgaacactggaaacactgaaaatcttcatttttaatcagacaggtatagaagccaagaagaatgtggtggtaactcaagccgaccaaataggccctcttcccagcactttgataaaaagtgtggactggttgcttgtattttccttattctttttaattagttttattatgtatgctaccattcgaactgagagtattcggtggctaattccaggacaagagcaggaacatgtggagtagtgatggtctgaaagaagttggaaagaggaacttcaatccttcgtttcagaaattagtgctacagtttcatacattttctccagtgacgtgttgacttgaaacttcaggcagattaaaagaatcatttgttgaacaactgaatgtataaaaaaattataaactggtgttttaactagtattgcaataagcaaatgcaaaaatattcaatagatgcactattcttgtttttactgcatgaacgtaatccagtatttggaaagtaatccagtttgaaatgtgaagatgtattccggcagaatagtgagtagaatgacatgcttactatacagaaggcaaaaataggactctcaggtaatagtttaaggaaacccttgattccttatatatgtttaagaaggttagttttctgtttctttgcagtttttcttctagagtccatagcaggaaagtatgtaaccagaattggttagagccactgcgcctggcctaaacaaactttttgaaaagctgtttctaaaagattccttaaattcagatatgacagctaattacctcatcataaattacttttatactaattgtttccagggttttagagtagttgaatgtttatttcacaaggcaccctaaattctatagaaataaaacctcagatgagtctccttcttagagtgttacaatgaatgggagtttacaacttttatgtgtcatgtttccaacagctgtgtttggggtggtcactggcaggaggggaccgtatctcagaatggcacattatttctattttacacatgagcaaattgaggcatagagagttagataacttgcccaggttacacagattgtaagttgatgaagctgggatttgaatcttcacatgtgtgtacttataaatacaaatgtaaggaaaactctagtgagtccacctcttatattgagttattactgtgtgagtgccaagtactgttttagatgctttacatatactattttgtttaatatcctttttaaagaataaactaggttggtgcagtagctcacgcctgtaatcccaggactttgggaagctgaggcaggtggattgcttgagtctcaggagttcgagaccaggctggttaacatggcgaaaccctgtctttactaaaagtacaaaaaattagctgg

SEQ ID NO: 443721 - DNA, 3107 bp, Homo sapiens
ggataggtagggttagggttgccagatgtcacgaagttacaggatgctcagttttaaggtatatcccttatactataagggttatagtaaaaaatattcattatgtgaaattcaaatataactgggtatcaggtattctatgtggcaaccctaggtaggggagcacaggttaggcaagcgattagaagatttgcagcctccaaagtttctgcacctcgatgggacactagaacaggaaggctcctgggcctttctggctctgggaatgaagcgtggaaaaccctccttaggcgggcgcagtgcttcaagtagccaagctctgacttccgagggaagaaaggaggccatgggcctctgccagagccatgctctgcactctggggtcagcagagttcaaaacgacctgcaacgtctggcgcttagctcctaaagaggtctccagtccagcgccgacggccagcggctagaggccgtccgcccgactccaagatggcgcccgccacagctgccaggtgttaagatggcggcgcggggccgcgcccgcgctcccaggctctcctcccccagccttcctccggctggcagcacgactcgcgtagccgtgcgccgattgcctctcggcctgggcaatggtcccggctgccggtcgacgaccgccccgcgtcatgcggctcctcggctggtggcaagtattgctgtgggtgctgggacttcccgtccgcggcgtggaggttgcagaggaaagtggtcgcttatggtcagaggagcagcctgctcaccctctccaggtgggggctgtgtacctgggtgaggaggagctcctgcatgacccgatgggccaggacagggcagcagaagaggccaatgcggtgctggggctggacacccaaggcgatcacatggtgatgctgtctgtgattcctggggaagctgaggacaaagtgagttcagagcctagcggcgtcacctgtggtgctggaggagcggaggactcaaggtgcaacgtccgagagagccttttctctctggatggcgctggagcacacttccctgacagagaagaggagtattacacagagccagaagtggcggaatctgacgcagccccgacagaggactccaataacactgaaagtctgaaatccccaaaggtgaactgtgaggagagaaacattacaggattagaaaatttcactctgaaaattttaaatatgtcacaggaccttatggattttctgaacccaaacggtagtgactgtactctagtcctgttttacaccccgtggtgccgcttttctgccagtttggcccctcactttaactctctgccccgggcatttccagctcttcactttttggcactggatgcatctcagcacagcagcctttctaccaggtttggcaccgtagctgttcctaatattttattatttcaaggagctaaaccaatggccagatttaatcatacagatcgaacactggaaacactgaaaatcttcatttttaatcagacaggtatagaagccaagaagaatgtggtggtaactcaagccgaccaaataggccctcttcccagcactttgataaaaagtgtggactggttgcttgtattttccttattctttttaattagttttattatgtatgctaccattcgaactgagagtattcggtggctaattccaggacaagagcaggaacatgtggagtagtgatggtctgaaagaagttggaaagaggaacttcaatccttcgtttcagaaattagtgctacagtttcatacattttctccagtgacgtgttgacttgaaacttcaggcagattaaaagaatcatttgttgaacaactgaatgtataaaaaaattataaactggtgttttaactagtattgcaataagcaaatgcaaaaatattcaatagatgcactattcttgtttttactgcatgaacgtaatccagtatttggaaagtaatccagtttgaaatgtgaagatgtattccggcagaatagtgagtagaatgacatgcttactatacagaaggcaaaaataggactctcaggtaatagtttaaggaaacccttgattccttatatatgtttaagaaggttagttttctgtttctttgcagtttttcttctagagtccatagcaggaaagtatgtaaccagaattggttagtgtgaccccctcaagtagcaagtgatggaaaataagagtcaaataccttgatgtttgtgatctctaactcaaaaaatttgaagtgttttaagttgtttctgggtaagggagatgttaggagaaaggaaatgctgtaactaaagctcaattattatcagttctatgctaacgtatacattttaatcatagttacctaagcagcatgcattaattgaaccttaaaatgttccgagccactgcgcctggcctaaacaaactttttgaaaagctgtttctaaaagattccttaaattcagatatgacagctaattacctcatcataaattacttttatactaattgtttccagggttttagagtagttgaatgtttatttcacaaggcaccctaaattctatagaaataaaacctcagatgagtctccttcttagagtgttacaatgaatgggagtttacaacttttatgtgtcatgtttccaacagctgtgtttggggtggtcactggcaggaggggaccgtatctcagaatggcacattatttctattttacacatgagcaaattgaggcatagagagttagataacttgcccaggttacacagattgtaagttgatgaagctgggatttgaatcttcacatgtgtgtacttataaatacaaatgtaaggaaaactctagtgagtccacctcttatattgagttattactgtgtgagtgccaagtactgttttagatgctttacatatactattttgtttaatatcctttttaaagaataaactaggttggtgcagtagctcacgcctgtaatcccaggactttgggaagctgaggcaggtggattgcttgagtctcaggagttcgagaccaggctggttaacatggcgaaaccctgtctttactaaaagtacaaaaaattagctgg

SEQ ID NO: 443722 - DNA, 2616 bp, Homo sapiens
ggataggtagggttagggttgccagatgtcacgaagttacaggatgctcagttttaaggtatatcccttatactataagggttatagtaaaaaatattcattatgtgaaattcaaatataactgggtatcaggtattctatgtggcaaccctaggtaggggagcacaggttaggcaagcgattagaagatttgcagcctccaaagtttctgcacctcgatgggacactagaacaggaaggctcctgggcctttctggctctgggaatgaagcgtggaaaaccctccttaggcgggcgcagtgcttcaagtagccaagctctgacttccgagggaagaaaggaggccatgggcctctgccagagccatgctctgcactctggggtcagcagagttcaaaacgacctgcaacgtctggcgcttagctcctaaagaggtctccagtccagcgccgacggccagcggctagaggccgtccgcccgactccaagatggcgcccgccacagctgccaggtgttaagatggcggcgcggggccgcgcccgcgctcccaggctctcctcccccagccttcctccggctggcagcacgactcgcgtagccgtgcgccgattgcctctcggcctgggcaatggtcccggctgccggtcgacgaccgccccgcgtcatgcggctcctcggctggtggcaagtattgctgtgggtgctgggacttcccgtccgcggcgtggaggttgcagaggaaagtggtcgcttatggtcagaggagcagcctgctcaccctctccaggtgggggctgtgtacctgggtgaggaggagctcctgcatgacccgatgggccaggacagggcagcagaagaggccaatgcggtgctggggctggacacccaaggcgatcacatggtgatgctgtctgtgattcctggggaagctgaggacaaagtgagttcagagcctagcggcgtcacctgtggtgctggaggagcggaggactcaaggtgcaacgtccgagagagccttttctctctggatggcgctggagcacacttccctgacagagaagaggagtattacacagagccagaagtggcggaatctgacgcagccccgacagaggactccaataacactgaaagtctgaaatccccaaaggtgaactgtgaggagagaaacattacaggattagaaaatttcactctgaaaattttaaatatgtcacaggaccttatggattttctgaacccaaacggtagtgactgtactctagtcctgttttacaccccgtggtgccgcttttctgccagtttggcccctcactttaactctctgccccgggcatttccagctcttcactttttggcactggatgcatctcagcacagcagcctttctaccaggtttggcaccgtagctgttcctaatattttattatttcaaggagctaaaccaatggccagatttaatcatacagatcgaacactggaaacactgaaaatcttcatttttaatcagacaggtatagaagccaagaagaatgtggtggtaactcaagccgaccaaataggccctcttcccagcactttgataaaaagtgtggactggttgcttgtattttccttattctttttaattagttttattatgtatgctaccattcgaactgagagtattcggtggctaattccaggacaagagcaggaacatgtggagtagtgatggtctgaaagaagttggaaagaggaacttcaatccttcgtttcagaaattagtgctacagtttcatacattttctccagtgacgtgttgacttgaaacttcaggcagattaaaagaatcatttgttgaacaactgaatgtataaaaaaattataaactggtgttttaactagtattgcaataagcaaatgcaaaaatattcaatagatgcactattcttgtttttactgcatgaacgtaatccagtatttggaaagtaatccagtttgaaatgtgaagatgtattccggcagaatagtgagtagaatgacatgcttactatacagaaggcaaaaataggactctcaggtaatagtttaaggaaacccttgattccttatatatgtttaagaaggttagttttctgtttctttgcagtttttcttctagagtccatagcaggaaagtatgtaaccagaattggttagtgtgaccccctcaagtagcaagtgatggaaaataagagtcaaataccttgatgtttgtgatctctaactcaaaaaatttgaagtgttttaagttgtttctgggtaagggagatgttaggagaaaggaaatgctgtaactaaagctcaattattatcagttctatgctaacgtatacattttaatcatagttacctaagcagcatgcattaattgaaccttaaaatgttcccagcaggctgggcgcagtggctcatgcctgtagtcccagcactttgggaggccaaggcgggaggatcacttgaggttaggacttttgagaccagcctggccaacttggtgaaaccctctctctactaaaaatacaaaaaattagctgggcgtggtggcgggcacctgtaatcccagctacttgggaaagctgaggcatgagaat

SEQ ID NO: 443723 - DNA, 1883 bp, Homo sapiens
ggataggtagggttagggttgccagatgtcacgaagttacaggatgctcagttttaaggtatatcccttatactataagggttatagtaaaaaatattcattatgtgaaattcaaatataactgggtatcaggtattctatgtggcaaccctaggtaggggagcacaggttaggcaagcgattagaagatttgcagcctccaaagtttctgcacctcgatgggacactagaacaggaaggctcctgggcctttctggctctgggaatgaagcgtggaaaaccctccttaggcgggcgcagtgcttcaagtagccaagctctgacttccgagggaagaaaggaggccatgggcctctgccagagccatgctctgcactctggggtcagcagagttcaaaacgacctgcaacgtctggcgcttagctcctaaagaggtctccagtccagcgccgacggccagcggctagaggccgtccgcccgactccaagatggcgcccgccacagctgccaggtgttaagatggcggcgcggggccgcgcccgcgctcccaggctctcctcccccagccttcctccggctggcagcacgactcgcgtagccgtgcgccgattgcctctcggcctgggcaatggtcccggctgccggtcgacgaccgccccgcgtcatgcggctcctcggctggtggcaagtattgctgtgggtgctgggacttcccgtccgcggcgtggaggttgcagaggaaagtggtcgcttatggtcagaggagcagcctgctcaccctctccaggtgggggctgtgtacctgggtgaggaggagctcctgcatgacccgatgggccaggacagggcagcagaagaggccaatgcggtgctggggctggacacccaaggcgatcacatggtgatgctgtctgtgattcctggggaagctgaggacaaagtgagttcagagcctagcggcgtcacctgtggtgctggaggagcggaggactcaaggtgcaacgtccgagagagccttttctctctggatggcgctggagcacacttccctgacagagaagaggagtattacacagagccagaagtggcggaatctgacgcagccccgacagaggactccaataacactgaaagtctgaaatccccaaaggtgaactgtgaggagagaaacattacaggattagaaaatttcactctgaaaattttaaatatgtcacaggaccttatggattttctgaacccaaacggtagtgactgtactctagtcctgttttacaccccgtggtgccgcttttctgccagtttggcccctcactttaactctctgccccgggcatttccagctcttcactttttggcactggatgcatctcagcacagcagcctttctaccaggtttggcaccgtagctgttcctaatattttattatttcaaggagctaaaccaatggccagatttaatcatacagatcgaacactggaaacactgaaaatcttcatttttaatcagacaggtatagaagccaagaagaatgtggtggtaactcaagccgaccaaataggccctcttcccagcactttgataaaaagtgtggactggttgcttgtattttccttattctttttaattagttttattatgtatgctaccattcgaactgagagtattcggtggctaattccaggacaagagcaggaacatgtggagtagtgatggtctgaaagaagttggaaagaggaacttcaatccttcgtttcagaaattagtgctacagtttcatacattttctccagtgacgtgttgacttgaaacttcaggcagattaaaagaatcatttgttgaacaactgaatgtataaaaaaattataaactggtgtttta

SEQ ID NO: 443724 - DNA, 1640 bp, Homo sapiens
ggataggtagggttagggttgccagatgtcacgaagttacaggatgctcagttttaaggtatatcccttatactataagggttatagtaaaaaatattcattatgtgaaattcaaatataactgggtatcaggtattctatgtggcaaccctaggtaggggagcacaggttaggcaagcgattagaagatttgcagcctccaaagtttctgcacctcgatgggacactagaacaggaaggctcctgggcctttctggctctgggaatgaagcgtggaaaaccctccttaggcgggcgcagtgcttcaagtagccaagctctgacttccgagggaagaaaggaggccatgggcctctgccagagccatgctctgcactctggggtcagcagagttcaaaacgacctgcaacgtctggcgcttagctcctaaagaggtctccagtccagcgccgacggccagcggctagaggccgtccgcccgactccaagatggcgcccgccacagctgccaggtgttaagatggcggcgcggggccgcgcccgcgctcccaggctctcctcccccagccttcctccggctggcagcacgactcgcgtagccgtgcgccgattgcctctcggcctgggcaatggtcccggctgccggtcgacgaccgccccgcgtcatgcggctcctcggctggtggcaagtattgctgtgggtgctgggacttcccgtccgcggcgtggaggttgcagaggaaagtggtcgcttatggtcagaggagcagcctgctcaccctctccaggtgggggctgtgtacctgggtgaggaggagctcctgcatgacccgatgggccaggacagggcagcagaagaggccaatgcggtgctggggctggacacccaaggcgatcacatggtgatgctgtctgtgattcctggggaagctgaggacaaagtgagttcagagcctagcggcgtcacctgtggtgctggaggagcggaggactcaaggtgcaacgtccgagagagccttttctctctggatggcgctggagcacacttccctgacagagaagaggagtattacacagagccagaagtggcggaatctgacgcagccccgacagaggactccaataacactgaaagtctgaaatccccaaaggtgaactgtgaggagagaaacattacaggattagaaaatttcactctgaaaattttaaatatgtcacaggaccttatggattttctgaacccaaacggtagtgactgtactctagtcctgttttacaccccgtggtgccgcttttctgccagtttggcccctcactttaactctctgccccgggcatttccagctcttcactttttggcactggatgcatctcagcacagcagacaggaacttaactagtggaataattgtgccattggtagatccatattataattgaaagcaactcagattgcagaaaaggagtgccccccagccatgacccataagcaaagaggtcagaaacaaatgaaaaagccaaaagtttcaagtatcagaaatctccgtaggtcacacgcaacttcctcatttatttctgtctattctgagatggtaattgtatgagaaagccctctattaataataaattcaggttttttg

SEQ ID NO: 443725 - DNA, 1847 bp, Homo sapiens
ggataggtagggttagggttgccagatgtcacgaagttacaggatgctcagttttaaggtatatcccttatactataagggttatagtaaaaaatattcattatgtgaaattcaaatataactgggtatcaggtattctatgtggcaaccctaggtaggggagcacaggttaggcaagcgattagaagatttgcagcctccaaagtttctgcacctcgatgggacactagaacaggaaggctcctgggcctttctggctctgggaatgaagcgtggaaaaccctccttaggcgggcgcagtgcttcaagtagccaagctctgacttccgagggaagaaaggaggccatgggcctctgccagagccatgctctgcactctggggtcagcagagttcaaaacgacctgcaacgtctggcgcttagctcctaaagaggtctccagtccagcgccgacggccagcggctagaggccgtccgcccgactccaagatggcgcccgccacagctgccaggtgttaagatggcggcgcggggccgcgcccgcgctcccaggctctcctcccccagccttcctccggctggcagcacgactcgcgtagccgtgcgccgattgcctctcggcctgggcaatggtcccggctgccggtcgacgaccgccccgcgtcatgcggctcctcggctggtggcaagtattgctgtgggtgctgggacttcccgtccgcggcgtggaggttgcagaggaaagtggtcgcttatggtcagaggagcagcctgctcaccctctccaggtgggggctgtgtacctgggtgaggaggagctcctgcatgacccgatgggccaggacagggcagcagaagaggccaatgcggtgctggggctggacacccaaggcgatcacatggtgatgctgtctgtgattcctggggaagctgaggacaaagtgagttcagagcctagcggcgtcacctgtggtgctggaggagcggaggactcaaggtgcaacgtccgagagagccttttctctctggatggcgctggagcacacttccctgacagagaagaggagtattacacagagccagaagtggcggaatctgacgcagccccgacagaggactccaataacactgaaagtctgaaatccccaaaggtgaactgtgaggagagaaacattacaggattagaaaatttcactctgaaaattttaaatatgtcacaggaccttatggattttctgaacccaaacggtagtgactgtactctagtcctgttttacaccccgtggtgccgcttttctgccagtttggcccctcactttaactctctgccccgggcatttccagctcttcactttttggcactggatgcatctcagcacagcagcctttctaccaggtttggcaccgtagctgttcctaatattttattatttcaaggagctaaaccaatggccagatttaatcatacagatcgaacactggaaacactgaaaatcttcatttttaatcagacaggtatagaagccaagaagaatgtggtggtaactcaagccgaccaaataggccctcttcccagcactttgataaaaagtgtggactggttgcttgtattttccttattctttttaattagttttattatgtatgctaccattcgaactgagagtattcggtggctaattccaggacaagagcaggaacatgtggagtagtgatggtctgaaagaagttggaaagaggaacttcaatccttcgtttcagaaattagtgctacagtttcatacattttctccagtgacgtgttgacttgaaacttcaggcagattaaaagaatcatttgttgaaca

SEQ ID NO: 443726 - DNA, 3175 bp, Homo sapiens
ggataggtagggttagggttgccagatgtcacgaagttacaggatgctcagttttaaggtatatcccttatactataagggttatagtaaaaaatattcattatgtgaaattcaaatataactgggtatcaggtattctatgtggcaaccctaggtaggggagcacaggttaggcaagcgattagaagatttgcagcctccaaagtttctgcacctcgatgggacactagaacaggaaggctcctgggcctttctggctctgggaatgaagcgtggaaaaccctccttaggcgggcgcagtgcttcaagtagccaagctctgacttccgagggaagaaaggaggccatgggcctctgccagagccatgctctgcactctggggtcagcagagttcaaaacgacctgcaacgtctggcgcttagctcctaaagaggtctccagtccagcgccgacggccagcggctagaggccgtccgcccgactccaagatggcgcccgccacagctgccaggtgttaagatggcggcgcggggccgcgcccgcgctcccaggctctcctcccccagccttcctccggctggcagcacgactcgcgtagccgtgcgccgattgcctctcggcctgggcaatggtcccggctgccggtcgacgaccgccccgcgtcatgcggctcctcggctggtggcaagtattgctgtgggtgctgggacttcccgtccgcggcgtggaggttgcagaggaaagtggtcgcttatggtcagaggagcagcctgctcaccctctccaggtgggggctgtgtacctgggtgaggaggagctcctgcatgacccgatgggccaggacagggcagcagaagaggccaatgcggtgctggggctggacacccaaggcgatcacatggtgatgctgtctgtgattcctggggaagctgaggacaaagtgagttcagagcctagcggcgtcacctgtggtgctggaggagcggaggactcaaggtgcaacgtccgagagagccttttctctctggatggcgctggagcacacttccctgacagagaagaggagtattacacagagccagaagtggcggaatctgacgcagccccgacagaggactccaataacactgaaagtctgaaatccccaaaggtgaactgtgaggagagaaacattacaggattagaaaatttcactctgaaaattttaaatatgtcacaggaccttatggattttctgaacccaaacggtagtgactgtactctagtcctgttttacaccccgtggtgccgcttttctgccagtttggcccctcactttaactctctgccccgggcatttccagctcttcactttttggcactggatgcatctcagcacagcagcctttctaccaggtttggcaccgtagctgttcctaatattttattatttcaaggagctaaaccaatggccagatttaatcatacagatcgaacactggaaacactgaaaatcttcatttttaatcagacaggtatagaagccaagaagaatgtggtggtaactcaagccgaccaaataggccctcttcccagcactttgataaaaagtgtggactggttgcttgtattttccttattctttttaattagttttattatgtatgctaccattcgaactgagagtattcggtggctaattccaggacaagagcaggaacatgtggagtagtgatggtctgaaagaagttggaaagaggaacttcaatccttcgtttcagaaattagtgctacagtttcatacattttctccagtgacgtgttgacttgaaacttcaggcagattaaaagaatcatttgttgaacaactgaatgtataaaaaaattataaactggtgttttaactagtattgcaataagcaaatgcaaaaatattcaatagatgcactattcttgtttttactgcatgaacgtaatccagtatttggaaagtaatccagtttgaaatgtgaagatgtattccggcagaatagtgagtagaatgacatgcttactatacagaaggcaaaaataggactctcaggtaatagtttaaggaaacccttgattccttatatatgtttaagaaggttagttttctgtttctttgcagtttttcttctagagtccatagcaggaaagtatgtaaccagaattggttagtgtgaccccctcaagtagcaagtgatggaaaataagagtcaaataccttgatgtttgtgatctctaactcaaaaaatttgaagtgttttaagttgtttctgggtaagggagatgttaggagaaaggaaatgctgtaactaaagctcaattattatcagttctatgctaacgtatacattttaatcatagttacctaagcagcatgcattaattgaaccttaaaatgttcccagcaggctgggcgcagtggctcatgcctgtagtcctcggcctcccagggtgttgggattgcaggtgtgagccactgcgcctggcctaaacaaactttttgaaaagctgtttctaaaagattccttaaattcagatatgacagctaattacctcatcataaattacttttatactaattgtttccagggttttagagtagttgaatgtttatttcacaaggcaccctaaattctatagaaataaaacctcagatgagtctccttcttagagtgttacaatgaatgggagtttacaacttttatgtgtcatgtttccaacagctgtgtttggggtggtcactggcaggaggggaccgtatctcagaatggcacattatttctattttacacatgagcaaattgaggcatagagagttagataacttgcccaggttacacagattgtaagttgatgaagctgggatttgaatcttcacatgtgtgtacttataaatacaaatgtaaggaaaactctagtgagtccacctcttatattgagttattactgtgtgagtgccaagtactgttttagatgctttacatatactattttgtttaatatcctttttaaagaataaactaggttggtgcagtagctcacgcctgtaatcccaggactttgggaagctgaggcaggtggattgcttgagtctcaggagttcgagaccaggctggttaacatggcgaaaccctgtctttactaaaagtacaaaaaattagctgg

SEQ ID NO: 443727 - DNA, 3123 bp, Homo sapiens
ggataggtagggttagggttgccagatgtcacgaagttacaggatgctcagttttaaggtatatcccttatactataagggttatagtaaaaaatattcattatgtgaaattcaaatataactgggtatcaggtattctatgtggcaaccctaggtaggggagcacaggttaggcaagcgattagaagatttgcagcctccaaagtttctgcacctcgatgggacactagaacaggaaggctcctgggcctttctggctctgggaatgaagcgtggaaaaccctccttaggcgggcgcagtgcttcaagtagccaagctctgacttccgagggaagaaaggaggccatgggcctctgccagagccatgctctgcactctggggtcagcagagttcaaaacgacctgcaacgtctggcgcttagctcctaaagaggtctccagtccagcgccgacggccagcggctagaggccgtccgcccgactccaagatggcgcccgccacagctgccaggtgttaagatggcggcgcggggccgcgcccgcgctcccaggctctcctcccccagccttcctccggctggcagcacgactcgcgtagccgtgcgccgattgcctctcggcctgggcaatggtcccggctgccggtcgacgaccgccccgcgtcatgcggctcctcggctggtggcaagtattgctgtgggtgctgggacttcccgtccgcggcgtggaggttgcagaggaaagtggtcgcttatggtcagaggactcctgcatgacccgatgggccaggacagggcagcagaagaggccaatgcggtgctggggctggacacccaaggcgatcacatggtgatgctgtctgtgattcctggggaagctgaggacaaagtgagttcagagcctagcggcgtcacctgtggtgctggaggagcggaggactcaaggtgcaacgtccgagagagccttttctctctggatggcgctggagcacacttccctgacagagaagaggagtattacacagagccagaagtggcggaatctgacgcagccccgacagaggactccaataacactgaaagtctgaaatccccaaaggtgaactgtgaggagagaaacattacaggattagaaaatttcactctgaaaattttaaatatgtcacaggaccttatggattttctgaacccaaacggtagtgactgtactctagtcctgttttacaccccgtggtgccgcttttctgccagtttggcccctcactttaactctctgccccgggcatttccagctcttcactttttggcactggatgcatctcagcacagcagcctttctaccaggtttggcaccgtagctgttcctaatattttattatttcaaggagctaaaccaatggccagatttaatcatacagatcgaacactggaaacactgaaaatcttcatttttaatcagacaggtatagaagccaagaagaatgtggtggtaactcaagccgaccaaataggccctcttcccagcactttgataaaaagtgtggactggttgcttgtattttccttattctttttaattagttttattatgtatgctaccattcgaactgagagtattcggtggctaattccaggacaagagcaggaacatgtggagtagtgatggtctgaaagaagttggaaagaggaacttcaatccttcgtttcagaaattagtgctacagtttcatacattttctccagtgacgtgttgacttgaaacttcaggcagattaaaagaatcatttgttgaacaactgaatgtataaaaaaattataaactggtgttttaactagtattgcaataagcaaatgcaaaaatattcaatagatgcactattcttgtttttactgcatgaacgtaatccagtatttggaaagtaatccagtttgaaatgtgaagatgtattccggcagaatagtgagtagaatgacatgcttactatacagaaggcaaaaataggactctcaggtaatagtttaaggaaacccttgattccttatatatgtttaagaaggttagttttctgtttctttgcagtttttcttctagagtccatagcaggaaagtatgtaaccagaattggttagtgtgaccccctcaagtagcaagtgatggaaaataagagtcaaataccttgatgtttgtgatctctaactcaaaaaatttgaagtgttttaagttgtttctgggtaagggagatgttaggagaaaggaaatgctgtaactaaagctcaattattatcagttctatgctaacgtatacattttaatcatagttacctaagcagcatgcattaattgaaccttaaaatgttcccagcaggctgggcgcagtggctcatgcctgtagtcctcggcctcccagggtgttgggattgcaggtgtgagccactgcgcctggcctaaacaaactttttgaaaagctgtttctaaaagattccttaaattcagatatgacagctaattacctcatcataaattacttttatactaattgtttccagggttttagagtagttgaatgtttatttcacaaggcaccctaaattctatagaaataaaacctcagatgagtctccttcttagagtgttacaatgaatgggagtttacaacttttatgtgtcatgtttccaacagctgtgtttggggtggtcactggcaggaggggaccgtatctcagaatggcacattatttctattttacacatgagcaaattgaggcatagagagttagataacttgcccaggttacacagattgtaagttgatgaagctgggatttgaatcttcacatgtgtgtacttataaatacaaatgtaaggaaaactctagtgagtccacctcttatattgagttattactgtgtgagtgccaagtactgttttagatgctttacatatactattttgtttaatatcctttttaaagaataaactaggttggtgcagtagctcacgcctgtaatcccaggactttgggaagctgaggcaggtggattgcttgagtctcaggagttcgagaccaggctggttaacatggcgaaaccctgtctttactaaaagtacaaaaaattagctgg

SEQ ID NO: 443728 - DNA, 2583 bp, Homo sapiens
agtagctctctgatagtttaatgaaaggagacctttttgtctccagaggggaaaatttcgtgttagaggggaactgtaattctttggggttcatttgttttgaagtcaaatatgactctgaatgtgctggcatgttttagttgcagaggaaagtggtcgcttatggtcagaggagcagcctgctcaccctctccaggtgggggctgtgtacctgggtgaggaggagctcctgcatgacccgatgggccaggacagggcagcagaagaggccaatgcggtgctggggctggacacccaaggcgatcacatggtgatgctgtctgtgattcctggggaagctgaggacaaagtgagttcagagcctagcggcgtcacctgtggtgctggaggagcggaggactcaaggtgcaacgtccgagagagccttttctctctggatggcgctggagcacacttccctgacagagaagaggagtattacacagagccagaagtggcggaatctgacgcagccccgacagaggactccaataacactgaaagtctgaaatccccaaaggtgaactgtgaggagagaaacattacaggattagaaaatttcactctgaaaattttaaatatgtcacaggaccttatggattttctgaacccaaacggtagtgactgtactctagtcctgttttacaccccgtggtgccgcttttctgccagtttggcccctcactttaactctctgccccgggcatttccagctcttcactttttggcactggatgcatctcagcacagcagcctttctaccaggtttggcaccgtagctgttcctaatattttattatttcaaggagctaaaccaatggccagatttaatcatacagatcgaacactggaaacactgaaaatcttcatttttaatcagacaggtatagaagccaagaagaatgtggtggtaactcaagccgaccaaataggccctcttcccagcactttgataaaaagtgtggactggttgcttgtattttccttattctttttaattagttttattatgtatgctaccattcgaactgagagtattcggtggctaattccaggacaagagcaggaacatgtggagtagtgatggtctgaaagaagttggaaagaggaacttcaatccttcgtttcagaaattagtgctacagtttcatacattttctccagtgacgtgttgacttgaaacttcaggcagattaaaagaatcatttgttgaacaactgaatgtataaaaaaattataaactggtgttttaactagtattgcaataagcaaatgcaaaaatattcaatagatgcactattcttgtttttactgcatgaacgtaatccagtatttggaaagtaatccagtttgaaatgtgaagatgtattccggcagaatagtgagtagaatgacatgcttactatacagaaggcaaaaataggactctcaggtaatagtttaaggaaacccttgattccttatatatgtttaagaaggttagttttctgtttctttgcagtttttcttctagagtccatagcaggaaagtatgtaaccagaattggttagtgtgaccccctcaagtagcaagtgatggaaaataagagtcaaataccttgatgtttgtgatctctaactcaaaaaatttgaagtgttttaagttgtttctgggtaagggagatgttaggagaaaggaaatgctgtaactaaagctcaattattatcagttctatgctaacgtatacattttaatcatagttacctaagcagcatgcattaattgaaccttaaaatgttcccagcaggctgggcgcagtggctcatgcctgtagtcctcggcctcccagggtgttgggattgcaggtgtgagccactgcgcctggcctaaacaaactttttgaaaagctgtttctaaaagattccttaaattcagatatgacagctaattacctcatcataaattacttttatactaattgtttccagggttttagagtagttgaatgtttatttcacaaggcaccctaaattctatagaaataaaacctcagatgagtctccttcttagagtgttacaatgaatgggagtttacaacttttatgtgtcatgtttccaacagctgtgtttggggtggtcactggcaggaggggaccgtatctcagaatggcacattatttctattttacacatgagcaaattgaggcatagagagttagataacttgcccaggttacacagattgtaagttgatgaagctgggatttgaatcttcacatgtgtgtacttataaatacaaatgtaaggaaaactctagtgagtccacctcttatattgagttattactgtgtgagtgccaagtactgttttagatgctttacatatactattttgtttaatatcctttttaaagaataaactaggttggtgcagtagctcacgcctgtaatcccaggactttgggaagctgaggcaggtggattgcttgagtctcaggagttcgagaccaggctggttaacatggcgaaaccctgtctttactaaaagtacaaaaaattagctgg

SEQ ID NO: 443729 - DNA, 2135 bp, Homo sapiens
ggataggtagggttagggttgccagatgtcacgaagttacaggatgctcagttttaaggtatatcccttatactataagggttatagtaaaaaatattcattatgtgaaattcaaatataactgggtatcaggtattctatgtggcaaccctaggtaggggagcacaggttaggcaagcgattagaagatttgcagcctccaaagtttctgcacctcgatgggacactagaacaggaaggctcctgggcctttctggctctgggaatgaagcgtggaaaaccctccttaggcgggcgcagtgcttcaagtagccaagctctgacttccgagggaagaaaggaggccatgggcctctgccagagccatgctctgcactctggggtcagcagagttcaaaacgacctgcaacgtctggcgcttagctcctaaagaggtctccagtccagcgccgacggccagcggctagaggccgtccgcccgactccaagatggcgcccgccacagctgccaggtgttaagatggcggcgcggggccgcgcccgcgctcccaggctctcctcccccagccttcctccggctggcagcacgactcgcgtagccgtgcgccgattgcctctcggcctgggcaatggtcccggctgccggtcgacgaccgccccgcgtcatgcggctcctcggctggtggcaagtattgctgtgggtgctgggacttcccgtccgcggcgtggaggttgcagaggaaagtggtcgcttatggtcagaggagcagcctgctcaccctctccaggtgggggctgtgtacctgggtgaggaggagctcctgcatgacccgatgggccaggacagggcagcagaagaggccaatgcggtgctggggctggacacccaaggcgatcacatggtgatgctgtctgtgattcctggggaagctgaggacaaagtgagttcagagcctagcggcgtcacctgtggtgctggaggagcggaggactcaaggtgcaacgtccgagagagccttttctctctggatggcgctggagcacacttccctgacagagaagaggagtattacacagagccagaagtggcggaatctgacgcagccccgacagaggactccaataacactgaaagtctgaaatccccaaaggtgaactgtgaggagagaaacattacaggattagaaaatttcactctgaaaattttaaatatgtcacaggaccttatggattttctgaacccaaacggtagtgactgtactctagtcctgttttacaccccgtggtgccgcttttctgccagtttggcccctcactttaactctctgccccgggcatttccagctcttcactttttggcactggatgcatctcagcacagcagcctttctaccaggtttggcaccgtagctgttcctaatattttattatttcaaggaggagccactgcgcctggcctaaacaaactttttgaaaagctgtttctaaaagattccttaaattcagatatgacagctaattacctcatcataaattacttttatactaattgtttccagggttttagagtagttgaatgtttatttcacaaggcaccctaaattctatagaaataaaacctcagatgagtctccttcttagagtgttacaatgaatgggagtttacaacttttatgtgtcatgtttccaacagctgtgtttggggtggtcactggcaggaggggaccgtatctcagaatggcacattatttctattttacacatgagcaaattgaggcatagagagttagataacttgcccaggttacacagattgtaagttgatgaagctgggatttgaatcttcacatgtgtgtacttataaatacaaatgtaaggaaaactctagtgagtccacctcttatattgagttattactgtgtgagtgccaagtactgttttagatgctttacatatactattttgtttaatatcctttttaaagaataaactaggttggtgcagtagctcacgcctgtaatcccaggactttgggaagctgaggcaggtggattgcttgagtctcaggagttcgagaccaggctggttaacatggcgaaaccctgtctttactaaaagtacaaaaaattagctgg

SEQ ID NO: 443730 - DNA, 2516 bp, Homo sapiens
  misc_feature (1907)..(1907): n is a, c, g, or t
aataatggcatagtaaaaaaaagatgggaaacaacccaaatgtccatcaatagtgactggttaaatacacatcggtctggctgcaaaatggaatagcatgcagcgctgatcagggtcggtgtacccgagagaactgcaagtaccttcaccctcctccacacttaaaaacgcagctggagattaatgggcggaacaatctgattcaacagaagactgccgcagccatgttcgcccagcagatgcagcttatgctccaaaacgctcaaatgtcatcacttggttcttttcctatgactccatcaattccagctaatcctcccatggctttcaatccttacataccacatcctgggatgggcctcgttcctgcagaacttgtaccaaatacacctgttctgattcctggaaacccacctcttgcaatgccaggagctgttggcccaaaactgatgcgttcagataaactggaggtttgccgagaatttcagcgtggaaattgtacccgtggggagaatgattgccgctatgctcaccctactgatgcttccatgattgaagcgagtgataatactgtgacaatctgcatggattacatcaaaggtcgatgctcgcgggagaaatgcaagtactttcatcctcctgcacacttgcaagccagactcaaggcagctcatcatcagatgaaccattcagctgcctctgccatggccctgcagcctggtacactgcaactgataccaaagagatcagcactggaaaagcccaatggtgccaccccggtctttaatcccactgttttccactgccaacaggctctgactaacctgcagctcccacagccggcatttatccctgcagggccaatactgtgcatggcacccgcttcaaatattgtgcccatgatgcacggtgctacacctaccactgtgtctgcagcaacaacacctgccaccagcgttccgttcgctgcaccaactacaggcaatcagctgaaattctgaacagcagagttatggagtatcagaatctttccatggaaacctccatatggcctttctatatatattctcgtatgtcttattctaccaacacaacaataagcgtgttgcagtcaatgtattaagcaaagcaaacctgccagccagcaaattcaaataaaaaataaagcattaaaaatcaatggagatgttaaaacaacacaaatagaaaactagtaactaccatccatcctatttgaattatcaagcagaacatgaccataaaatttggtaacttgttacattactctttgtgattttctaataaccatgctaagtgtatttccacagtgagcttttggcttactatatacattcttggtggataaattgttcatctgtttttgaagtgttaccttactattttgtttacaagatagtctattgggttgattcaggatgtaacaaatatattcagtaccatttcttgtgttgtattgtgttgtgctgtgttaggtttttacatactgtagtgttttgctgtatatgtgtggtgtttgatttcaactaaagtgttattagtggggaacagaagtatatgtgcttaagaacatgacaggttcatgcaaatatgctctctttctttagaatatttctgtaggtttcttgggactgacatttaaaacgcctcacttttgaatgtgcacaaaacctgctcattaacatgcatgtgtataatttgtacctgcagatctgatgttgcataatacaatcaaattactagattttttaaagagagaaataattacctgcacaaagcagagaacttcataaaacattaacccctaattcactcttcttaaatagcttggcaaataagactttacctttaaatgaatttctcagcatttatactaaaaattatgtaangtgctcattagattttttgtgtgtgtggcttgagaatcccatctcctaaattgagtgtctaaaactgagccatttgtcatcttcagctgagaaactggtacttgggagcttaaaaatatgctaattacaagttataaatcaaacggagagatgggggcatggagatagtttttacgtactggaggaaagtgtgtaaaaccatggcaatgtcaccttttacacaaatgccattttccaaatgcaaatggctcatgctctttagactactctttgaataacaagtaagatgcaatctagcaaaagtcagtcagggtgaaagagaattggttgcaaatgaggacttccctccccaaatggacagtcttctctgttgatcacagagggagcctgagtacaggcttggagaaatggctaggacagggaacagggaagcacttacaattattccttgatttattcaaaagaactgggaaagatggttgtagttgtctttagcttcggttcaactgagtttcgttttgttaaacagttcagtgaaggagaaagcacctgtgatatatggcaagtgtccccctgcccaaactttaacatcagaccctctcacatcat

SEQ ID NO: 443731 - DNA, 2480 bp, Homo sapiens
  misc_feature (1871)..(1871): n is a, c, g, or t
aataatggcatagtaaaaaaaagatgggaaacaacccaaatgtccatcaatagtgactggttaaatacacatcggtctggctgcaaaatggaatagcatgcagcgctgatcagggtcggtgtacccgagagaactgcaagtaccttcaccctcctccacacttaaaaacgcagctggagattaatgggcggaacaatctgattcaacagaagactgccgcagccatgttcgcccagcagatgcagcttatgctccaaaacgctcaaatgtcatcacttggttcttttcctatgactccatcaattccagctaatcctcccatggctttcaatccttacataccacatcctgggatgggcctcgttcctgcagaacttgtaccaaatacacctgttctgattcctggaaacccacctcttgcaatgccaggagctgttggcccaaaactgatgcgttcagataaactggaggtttgccgagaatttcagcgtggaaattgtacccgtggggagaatgattgccgctatgctcaccctactgatgcttccatgattgaagcgagtgataatactgtgacaatctgcatggattacatcaaaggtcgatgctcgcgggagaaatgcaagtactttcatcctcctgcacacttgcaagccagactcaaggcagctcatcatcagatgaaccattcagctgcctctgccatggccctgcagcctggtacactgcaactgataccaaagagatcagcactggaaaagcccaatggtgccaccccggtctttaatcccactgttttccactgccaacaggctctgactaacctgcagctcccacagccggcatttatccctgcagtgcccatgatgcacggtgctacacctaccactgtgtctgcagcaacaacacctgccaccagcgttccgttcgctgcaccaactacaggcaatcagctgaaattctgaacagcagagttatggagtatcagaatctttccatggaaacctccatatggcctttctatatatattctcgtatgtcttattctaccaacacaacaataagcgtgttgcagtcaatgtattaagcaaagcaaacctgccagccagcaaattcaaataaaaaataaagcattaaaaatcaatggagatgttaaaacaacacaaatagaaaactagtaactaccatccatcctatttgaattatcaagcagaacatgaccataaaatttggtaacttgttacattactctttgtgattttctaataaccatgctaagtgtatttccacagtgagcttttggcttactatatacattcttggtggataaattgttcatctgtttttgaagtgttaccttactattttgtttacaagatagtctattgggttgattcaggatgtaacaaatatattcagtaccatttcttgtgttgtattgtgttgtgctgtgttaggtttttacatactgtagtgttttgctgtatatgtgtggtgtttgatttcaactaaagtgttattagtggggaacagaagtatatgtgcttaagaacatgacaggttcatgcaaatatgctctctttctttagaatatttctgtaggtttcttgggactgacatttaaaacgcctcacttttgaatgtgcacaaaacctgctcattaacatgcatgtgtataatttgtacctgcagatctgatgttgcataatacaatcaaattactagattttttaaagagagaaataattacctgcacaaagcagagaacttcataaaacattaacccctaattcactcttcttaaatagcttggcaaataagactttacctttaaatgaatttctcagcatttatactaaaaattatgtaangtgctcattagattttttgtgtgtgtggcttgagaatcccatctcctaaattgagtgtctaaaactgagccatttgtcatcttcagctgagaaactggtacttgggagcttaaaaatatgctaattacaagttataaatcaaacggagagatgggggcatggagatagtttttacgtactggaggaaagtgtgtaaaaccatggcaatgtcaccttttacacaaatgccattttccaaatgcaaatggctcatgctctttagactactctttgaataacaagtaagatgcaatctagcaaaagtcagtcagggtgaaagagaattggttgcaaatgaggacttccctccccaaatggacagtcttctctgttgatcacagagggagcctgagtacaggcttggagaaatggctaggacagggaacagggaagcacttacaattattccttgatttattcaaaagaactgggaaagatggttgtagttgtctttagcttcggttcaactgagtttcgttttgttaaacagttcagtgaaggagaaagcacctgtgatatatggcaagtgtccccctgcccaaactttaacatcagaccctctcacatcat

SEQ ID NO: 443732 - DNA, 2590 bp, Homo sapiens
  misc_feature (1981)..(1981): n is a, c, g, or t
aataatggcatagtaaaaaaaagatgggaaacaacccaaatgtccatcaatagtgactggttaaatacacatcggtctggctgcaaaatggaatagcatgcagcgctgatcagggtcggtgtacccgagagaactgcaagtaccttcaccctcctccacacttaaaaacgcagctggagattaatgggcggaacaatctgattcaacagaagactgccgcagccatgttcgcccagcagatgcagcttatgctccaaaacgctcaaatgtcatcacttggttcttttcctatgactccatcaattccagctaatcctcccatggctttcaatccttacataccacatcctgggatgggcctcgttcctgcagaacttgtaccaaatacacctgttctgattcctggaaacccacctcttgcaatgccaggagctgttggcccaaaactgatgcgttcagataaactggaggtttgccgagaatttcagcgtggaaattgtacccgtggggagaatgattgccgctatgctcaccctactgatgcttccatgattgaagcgagtgataatactgtgacaatctgcatggattacatcaaaggtcgatgctcgcgggagaaatgcaagtactttcatcctcctgcacacttgcaagccagactcaaggcagctcatcatcagatgaaccattcagctgcctctgccatggccctgcagcctggtacactgcaactgataccaaagagatcagcactggaaaagcccaatggtgccaccccggtctttaatcccactgttttccactgccaacaggctctgactaacctgcagctcccacagccggcatttatccctgcagggccaatactgtgcatggcacccgcttcaaatattgtgcccatgatgcacggtgctacacctaccactgtgtctgcagcaacaacacctgccaccagcgttccgttcgctgcaccaactacaggcaatcagataccccaattatcaatagatgaactgaatagcagcatgtttgtttcacagatgtagaagttctcagtagaacactgaaattctgaacagcagagttatggagtatcagaatctttccatggaaacctccatatggcctttctatatatattctcgtatgtcttattctaccaacacaacaataagcgtgttgcagtcaatgtattaagcaaagcaaacctgccagccagcaaattcaaataaaaaataaagcattaaaaatcaatggagatgttaaaacaacacaaatagaaaactagtaactaccatccatcctatttgaattatcaagcagaacatgaccataaaatttggtaacttgttacattactctttgtgattttctaataaccatgctaagtgtatttccacagtgagcttttggcttactatatacattcttggtggataaattgttcatctgtttttgaagtgttaccttactattttgtttacaagatagtctattgggttgattcaggatgtaacaaatatattcagtaccatttcttgtgttgtattgtgttgtgctgtgttaggtttttacatactgtagtgttttgctgtatatgtgtggtgtttgatttcaactaaagtgttattagtggggaacagaagtatatgtgcttaagaacatgacaggttcatgcaaatatgctctctttctttagaatatttctgtaggtttcttgggactgacatttaaaacgcctcacttttgaatgtgcacaaaacctgctcattaacatgcatgtgtataatttgtacctgcagatctgatgttgcataatacaatcaaattactagattttttaaagagagaaataattacctgcacaaagcagagaacttcataaaacattaacccctaattcactcttcttaaatagcttggcaaataagactttacctttaaatgaatttctcagcatttatactaaaaattatgtaangtgctcattagattttttgtgtgtgtggcttgagaatcccatctcctaaattgagtgtctaaaactgagccatttgtcatcttcagctgagaaactggtacttgggagcttaaaaatatgctaattacaagttataaatcaaacggagagatgggggcatggagatagtttttacgtactggaggaaagtgtgtaaaaccatggcaatgtcaccttttacacaaatgccattttccaaatgcaaatggctcatgctctttagactactctttgaataacaagtaagatgcaatctagcaaaagtcagtcagggtgaaagagaattggttgcaaatgaggacttccctccccaaatggacagtcttctctgttgatcacagagggagcctgagtacaggcttggagaaatggctaggacagggaacagggaagcacttacaattattccttgatttattcaaaagaactgggaaagatggttgtagttgtctttagcttcggttcaactgagtttcgttttgttaaacagttcagtgaaggagaaagcacctgtgatatatggcaagtgtccccctgcccaaactttaacatcagaccctctcacatcat

SEQ ID NO: 443733 - DNA, 485 bp, Homo sapiens
cttaaaactaatctgtaattgtaaacatgggagattgttggacttgcatgtgctgagtaattgatattgcaaagaaataatctttctgttaaaatgtatttctatcagtaaatccttaataatcaaatatctcttttactttccacgcttttctgcgtggtgtacagggccaatactgtgcatggcacccgcttcaaatattggtaggttttctacaaaaattatcaacattttctaatctgaaaaaatgtgtttttctgttgtgactatgaaagatgaatgactgaaagatgtggctggaaattttctgagtatgttaaggtttaacatggtgctttctgttttatgtctttgtagcatcaaaatagtcctactttctcaagtcctagttggttgccactgtggccaaatactggccctgtcatttctctatttctaccctaacaacagcaactgaaatattaaaaaatcgtttcttttacaat

SEQ ID NO: 443734 - DNA, 384 bp, Homo sapiens
tccttaataatcaaatatctcttttactttccacgcttttctgcgtggtgtacagggccaatactgtgcatggcacccgcttcaaatattggtaggttttctacaaaaattatcaacattttctaatctgaaaaaatgtgtttttctgttgtgactatgaaagatgaatgactgaaagatgtggctggaaattttctgagtatgttaaggtttaacatggtgctttctgttttatgtctttgtagcatcaaaatagtcctactttctcaagtcctagttggttgccactgtggccaaatactggccctgtcatttctctatttctaccctaacaacagcaactgaaatattaaaaaatcgtttcttttacaatatttgaaacta

SEQ ID NO: 443735 - DNA, 2465 bp, Homo sapiens
  misc_feature (1856)..(1856): n is a, c, g, or t
gcaaatgaaggcctgggagagcctgggctgattccatggagagggcttctaagaatcttaagggtcggtgtacccgagagaactgcaagtaccttcaccctcctccacacttaaaaacgcagctggagattaatgggcggaacaatctgattcaacagaagactgccgcagccatgttcgcccagcagatgcagcttatgctccaaaacgctcaaatgtcatcacttggttcttttcctatgactccatcaattccagctaatcctcccatggctttcaatccttacataccacatcctgggatgggcctcgttcctgcagaacttgtaccaaatacacctgttctgattcctggaaacccacctcttgcaatgccaggagctgttggcccaaaactgatgcgttcagataaactggaggtttgccgagaatttcagcgtggaaattgtacccgtggggagaatgattgccgctatgctcaccctactgatgcttccatgattgaagcgagtgataatactgtgacaatctgcatggattacatcaaaggtcgatgctcgcgggagaaatgcaagtactttcatcctcctgcacacttgcaagccagactcaaggcagctcatcatcagatgaaccattcagctgcctctgccatggccctgcagcctggtacactgcaactgataccaaagagatcagcactggaaaagcccaatggtgccaccccggtctttaatcccactgttttccactgccaacaggctctgactaacctgcagctcccacagccggcatttatccctgcagggccaatactgtgcatggcacccgcttcaaatattgtgcccatgatgcacggtgctacacctaccactgtgtctgcagcaacaacacctgccaccagcgttccgttcgctgcaccaactacaggcaatcagctgaaattctgaacagcagagttatggagtatcagaatctttccatggaaacctccatatggcctttctatatatattctcgtatgtcttattctaccaacacaacaataagcgtgttgcagtcaatgtattaagcaaagcaaacctgccagccagcaaattcaaataaaaaataaagcattaaaaatcaatggagatgttaaaacaacacaaatagaaaactagtaactaccatccatcctatttgaattatcaagcagaacatgaccataaaatttggtaacttgttacattactctttgtgattttctaataaccatgctaagtgtatttccacagtgagcttttggcttactatatacattcttggtggataaattgttcatctgtttttgaagtgttaccttactattttgtttacaagatagtctattgggttgattcaggatgtaacaaatatattcagtaccatttcttgtgttgtattgtgttgtgctgtgttaggtttttacatactgtagtgttttgctgtatatgtgtggtgtttgatttcaactaaagtgttattagtggggaacagaagtatatgtgcttaagaacatgacaggttcatgcaaatatgctctctttctttagaatatttctgtaggtttcttgggactgacatttaaaacgcctcacttttgaatgtgcacaaaacctgctcattaacatgcatgtgtataatttgtacctgcagatctgatgttgcataatacaatcaaattactagattttttaaagagagaaataattacctgcacaaagcagagaacttcataaaacattaacccctaattcactcttcttaaatagcttggcaaataagactttacctttaaatgaatttctcagcatttatactaaaaattatgtaangtgctcattagattttttgtgtgtgtggcttgagaatcccatctcctaaattgagtgtctaaaactgagccatttgtcatcttcagctgagaaactggtacttgggagcttaaaaatatgctaattacaagttataaatcaaacggagagatgggggcatggagatagtttttacgtactggaggaaagtgtgtaaaaccatggcaatgtcaccttttacacaaatgccattttccaaatgcaaatggctcatgctctttagactactctttgaataacaagtaagatgcaatctagcaaaagtcagtcagggtgaaagagaattggttgcaaatgaggacttccctccccaaatggacagtcttctctgttgatcacagagggagcctgagtacaggcttggagaaatggctaggacagggaacagggaagcacttacaattattccttgatttattcaaaagaactgggaaagatggttgtagttgtctttagcttcggttcaactgagtttcgttttgttaaacagttcagtgaaggagaaagcacctgtgatatatggcaagtgtccccctgcccaaactttaacatcagaccctctcacatcat

SEQ ID NO: 443736 - DNA, 2411 bp, Homo sapiens
  misc_feature (1802)..(1802): n is a, c, g, or t
aataatggcatagtaaaaaaaagatgggaaacaacccaaatgtccatcaatagtgactggttaaatacacatcggtctggctgcaaaatggaatagcatgcagcgctgatcagggtcggtgtacccgagagaactgcaagtaccttcaccctcctccacacttaaaaacgcagctggagattaatgggcggaacaatctgattcaacagaagactgccgcagccatgttcgcccagcagatgcagcttatgctccaaaacgctcaaatgtcatcacttggttcttttcctatgactccatcaattccagctaatcctcccatggctttcaatccttacataccacatcctgggatgggcctcgttcctgcagaacttgtaccaaatacacctgttctgattcctggaaacccacctcttgcaatgccaggagctgttggcccaaaactgatgcgttcagataaactggaggtttgccgagaatttcagcgtggaaattgtacccgtggggagaatgattgccgctatgctcaccctactgatgcttccatgattgaagcgagtgataatactgtgacaatctgcatggattacatcaaaggtcgatgctcgcgggagaaatgcaagtactttcatcctcctgcacacttgcaagccagactcaaggcagctcatcatcagatgaaccattcagctgcctctgccatggctctgactaacctgcagctcccacagccggcatttatccctgcagggccaatactgtgcatggcacccgcttcaaatattgtgcccatgatgcacggtgctacacctaccactgtgtctgcagcaacaacacctgccaccagcgttccgttcgctgcaccaactacaggcaatcagctgaaattctgaacagcagagttatggagtatcagaatctttccatggaaacctccatatggcctttctatatatattctcgtatgtcttattctaccaacacaacaataagcgtgttgcagtcaatgtattaagcaaagcaaacctgccagccagcaaattcaaataaaaaataaagcattaaaaatcaatggagatgttaaaacaacacaaatagaaaactagtaactaccatccatcctatttgaattatcaagcagaacatgaccataaaatttggtaacttgttacattactctttgtgattttctaataaccatgctaagtgtatttccacagtgagcttttggcttactatatacattcttggtggataaattgttcatctgtttttgaagtgttaccttactattttgtttacaagatagtctattgggttgattcaggatgtaacaaatatattcagtaccatttcttgtgttgtattgtgttgtgctgtgttaggtttttacatactgtagtgttttgctgtatatgtgtggtgtttgatttcaactaaagtgttattagtggggaacagaagtatatgtgcttaagaacatgacaggttcatgcaaatatgctctctttctttagaatatttctgtaggtttcttgggactgacatttaaaacgcctcacttttgaatgtgcacaaaacctgctcattaacatgcatgtgtataatttgtacctgcagatctgatgttgcataatacaatcaaattactagattttttaaagagagaaataattacctgcacaaagcagagaacttcataaaacattaacccctaattcactcttcttaaatagcttggcaaataagactttacctttaaatgaatttctcagcatttatactaaaaattatgtaangtgctcattagattttttgtgtgtgtggcttgagaatcccatctcctaaattgagtgtctaaaactgagccatttgtcatcttcagctgagaaactggtacttgggagcttaaaaatatgctaattacaagttataaatcaaacggagagatgggggcatggagatagtttttacgtactggaggaaagtgtgtaaaaccatggcaatgtcaccttttacacaaatgccattttccaaatgcaaatggctcatgctctttagactactctttgaataacaagtaagatgcaatctagcaaaagtcagtcagggtgaaagagaattggttgcaaatgaggacttccctccccaaatggacagtcttctctgttgatcacagagggagcctgagtacaggcttggagaaatggctaggacagggaacagggaagcacttacaattattccttgatttattcaaaagaactgggaaagatggttgtagttgtctttagcttcggttcaactgagtttcgttttgttaaacagttcagtgaaggagaaagcacctgtgatatatggcaagtgtccccctgcccaaactttaacatcagaccctctcacatcat

SEQ ID NO: 443737 - DNA, 1051 bp, Homo sapiens
ttgacggtgtcctgtgaagtacagaagtttttaattttgagaaaagttcaatttatctgttttttttcttttgttgcttatgcttttagtgttgtagccaaggcttcacctaacctaaagtcaagaaaatttactcttatattttcttctatgtgttctatacttttagctcttatatttaggtcttttttccatcttgtgttaatttttgtgtgtggtatgaggaaggagttccaacttcatttttttgcatgtgtatatcctattgtcccagcaccatttgttgaaaatactgtgcttttaccattgaactgtcggcaccattttcaaaaatgaactgacttacagcaagaggtttatttatggactctaaatctgctccatctatatctttgttatattagcccattctcacactgctacaaagaactacctgagactgggtaatttatgaagaaaagaggtttaattaactcatagttctgcaggcttaacaggaagcatgactgggaggcctcaggaagcttacagtcatgggagaaggtgaaggagaagcaagcaccttcttctcaggaaagagaatgagagagtgaaggggaaagtgccatgcacttttaaaccatcagatctcgtgagaactcactcactatcatgagaacagcaagggggaaatatgccctcgtgatccaatcagctcccaccagacccttcccctgatatatgaggagtacaattcgacatgagatttgggtggggacacagaaaaaaccataccacctgtctttatgccaggaccacactgtctgaataactgtagctttgtaataagtcttgaaattgggaagtgcaagccttccaactttgttgggtttcaagattgtattggctgtttgggatctgttgcatttccctgtgatttttaagatcatcctttcagtttctataaataaaccagataggatttgatagcaattgtgttgaatccgtagatcaatttgagaagtattgcctttttaacagtattaagtctttcaatccatgaacacaaaat

SEQ ID NO: 443738 - DNA, 925 bp, Homo sapiens
ctgtttctgacctcctgacctggcttcccttcctggcagggtgcccgaacgcgctgatgccccgagtgctcgcagggcttcccgctaaccatgctgccgccgccgcggcccgcagctgccttggcgctgcctgtgctcctgctactgctggtggtgctgacgccgcccccgaccggcgcaaggccatccccaggcccagattacctgcggcgcggctggatgcggctgctagcggagggcgagggctgcgctccctgccggccagaagagtgcgccgcgccgcggggctgcctggcgggcagggtgcgcgacgcgtgcggctgctgctgggaatgcgccaacctcgagggccagctctgcgacctggaccccagtgctcacttctacgggcactgcggcgagcagcttgagtgccggctggacacaggcggcgacctgagccgcggagaggtgccggaacctctgtgtgcctgtcgttcgcagagtccgctctgcgggtccgacggtcacacctactcccagatctgccgcctgcaggaggcggcccgcgctcggcccgatgccaacctcactgtggcacacccggggccctgcgaatcggggccccagatcgtgtcacatccatatgacatcagagagggccaagactgcagaccttggggaccgaggacaccctcaccacgctggtgggggctggggggatggcgcgggcggtggcgtgcggggaagcgcctggggaacacctggctctgcaagttttgtgccttagcggaaagaggcgacatctctggcaagttgggagtacaggaagtagcgaaggagtgccatctggtggatccttctggtagtgacactcagacctgggccaggggccttgagacaatttacttgactggaaaaatctgaataaaaaaaagatgcttca

SEQ ID NO: 443739 - DNA, 1033 bp, Homo sapiens
ctggcttgccccgggtccttaagccagcgacagtttttattgccgaacccaggctggaagcgggcggccctaggagccgcgcacaacagcgcaagcgggctggataccgggagccgattccagggcgcccacagaagcagaatcagaggggttgctcacacccgagatgtgaggttccaggagcgccgacccagagttgccaggcctgaaggcgggagaggctcagtcgcaccctacatttcccacctccaagattttaagtatagttcgcttgaaatccctggaatgcgctttcttctggctcctacccggagatccggagtccggacaaaccggggcaggaagggtccgtcggaccagctcctcccaagccgaggcttccaggtctcggccgggctcttctccctgcttttagctgagccgggctgggcgtacctctctcctccatctagagcagggtgtgaagaggaagccagagggggctgtctgaaaatgaccctgaccccctcctcgggctgtcgtgaggaggagggccgcttcgcccggctgctcgtcaccgcgaaggctccaaagaagtgttgcgcagccgtgctggtataactgagggtgtcctggcgaagcccagcccctggcgccctggtgaccgggggggtcgatgtgcggactgggcagaactggagcccgaagctggagagcgcccctcaaaaagaagcctggaagcccgagagatgaacccgactcagagagggccaagactgcagaccttggggaccgaggacaccctcaccacgctggtgggggctggggggatggcgcgggcggtggcgtgcggggaagcgcctggggaacacctggctctgcaagttttgtgccttagcggaaagaggcgacatctctggcaagttgggagtacaggaagtagcgaaggagtgccatctggtggatccttctggtagtgacactcagacctgggccaggggccttgagacaatttacttgactggaaaaatctgaataaaaaaaagatgcttca

SEQ ID NO: 443740 - DNA, 2443 bp, Homo sapiens
ggccaggggctgggggaaatgacccgggagggtcccatgcggctacataaaattggcagccttagaactagtgggaaggcgggtgcgcgaagtcgaggggcggagagagggggccggaggagctgctttctgaatccaagttcgtgggctctctcagaagtcctcaggacggagcagaggtggccggcgggcccggctgactgcgcctctgctttctttccataaccttttctttcggactcgaatcacggctgctgcgaagggtctagttccggacactagggtgcccgaacgcgctgatgccccgagtgctcgcagggcttcccgctaaccatgctgccgccgccgcggcccgcagctgccttggcgctgcctgtgctcctgctactgctggtggtgctgacgccgcccccgaccggcgcaaggccatccccaggcccagattacctgcggcgcggctggatgcggctgctagcggagggcgagggctgcgctccctgccggccagaagagtgcgccgcgccgcggggctgcctggcgggcagggtgcgcgacgcgtgcggctgctgctgggaatgcgccaacctcgagggccagctctgcgacctggaccccagtgctcacttctacgggcactgcggcgagcagcttgagtgccggctggacacaggcggcgacctgagccgcggagaggtgccggaacctctgtgtgcctgtcgttcgcagagtccgctctgcgggtccgacggtcacacctactcccagatctgccgcctgcaggaggcggcccgcgctcggcccgatgccaacctcactgtggcacacccggggccctgcgaatcggggccccagatcgtgtcacatccatatgacacttggaatgtgacagggcaggatgtgatctttggctgtgaagtgtttgcctaccccatggcctccatcgagtggaggaaggatggcttggacatccagctgccaggggatgacccccacatctctgtgcagtttaggggtggaccccagaggtttgaggtgactggctggctgcagatccaggctgtgcgtcccagtgatgagggcacttaccgctgccttggccgcaatgccctgggtcaagtggaggcccctgctagcttgacagtgctcacacctgaccagctgaactctacaggcatcccccagctgcgatcactaaacctggttcctgaggaggaggctgagagtgaagagaatgacgattactactaggtccagagctctggcccatgggggtgggtgagcggctatagtgttcatccctgctcttgaaaagacctggaaaggggagcagggtcccttcatcgactgctttcatgctgtcagtagggatgatcatgggaggcctatttgactccaaggtagcagtgtggtaggatagagacaaaagctggaggagggtagggagagaagctgagaccaggaccggtggggtacaaaggggcccatgcaggagatgccctggccagtaggacctccaacaggttgtttcccaggctggggtgggggcctgagcagacacagaggtgcaggcaccaggattctccacttcttccagccctgctgggccacagttctaactgcccttcctcccaggccctggttcttgctatttcctggtccccaacgtttatctagcttgtttgccctttccccaaactcatcttccagaacttttccctctctcctaagccccagttgcacctactaactgcagtcccttttgctgtctgccgtcttttgtacaagagagagaacagcggagcatgacttagttcagtgcagagagataggtgaggccagctcgagatcttataccactctgtattggacaaaggctagcacagggctaggcaccaataaagatttctaatgatgcacagacagtttatgcagatgtgcacatgaaaactgaatatccctgggaggcctcccacactaacagaactctggcttccagaagctgcagggcctgctctctaagcacatgcctgccagatgtacaaagagaaagtttgaacttgggcctatcccgcctttgagggagggaggctggagccatatggctggagggaagttatcttccccgtctgccctccattggggctgatatacattatctgcttctttgctcatcttattccaaacccttccccaggccagaatggggaacagggctatgtgggttggcccccaaaatgaaagcataaactggatagaggagggtggaagtttggtcacctgtgtggtccatacccttccccagctcccataggaatctacccatttcctgcagaagccagagtcatggtaaggctgtttcctatctgccccaattgtgacctgtcctctctggcttggggtccccaaatctctttcctcattctccttacctatcccagggaca

SEQ ID NO: 443741 - DNA, 1647 bp, Homo sapiens
ggccaggggctgggggaaatgacccgggagggtcccatgcggctacataaaattggcagccttagaactagtgggaaggcgggtgcgcgaagtcgaggggcggagagagggggccggaggagctgctttctgaatccaagttcgtgggctctctcagaagtcctcaggacggagcagaggtggccggcgggcccggctgactgcgcctctgctttctttccataaccttttctttcggactcgaatcacggctgctgcgaagggtctagttccggacactagactggatgcctttgctgggccatgctattctcagacctcccgccttcacccccagggccccagatcgtgtcacatccatatgacacttggaatgtgacagggcaggatgtgatctttggctgtgaagtgtttgcctaccccatggcctccatcgagtggaggaaggatggcttggacatccagctgccaggggatgacccccacatctctgtgcagtttaggggtggaccccagaggtttgaggtgactggctggctgcagatccaggctgtgcgtcccagtgatgagggcacttaccgctgccttggccgcaatgccctgggtcaagtggaggcccctgctagcttgacagtgctcacacctgaccagctgaactctacaggcatcccccagctgcgatcactaaacctggttcctgaggaggaggctgagagtgaagagaatgacgattactactaggtccagagctctggcccatgggggttgctcacacccgagatgtgaggttccaggagcgccgacccagagttgccaggcctgaaggcgggagaggctcagtcgcaccctacatttcccacctccaagattttaagtatagttcgcttgaaatccctggaatgcgctttcttctggctcctacccggagatccggagtccggacaaaccggggcaggaagggtccgtcggaccagctcctcccaagccgaggcttccaggtctcggccgggctcttctccctgcttttagctgagccgggctgggcgtacctctctcctccatctagagcagggtgtgaagaggaagccagagggggctgtctgaaaatgaccctgaccccctcctcgggctgtcgtgaggaggagggccgcttcgcccggctgctcgtcaccgcgaaggctccaaagaagtgttgcgcagccgtgctggtataactgagggtgtcctggcgaagcccagcccctggcgccctggtgaccgggggggtcgatgtgcggactgggcagaactggagcccgaagctggagagcgcccctcaaaaagaagcctggaagcccgagagatgaacccgactcagagagggccaagactgcagaccttggggaccgaggacaccctcaccacgctggtgggggctggggggatggcgcgggcggtggcgtgcggggaagcgcctggggaacacctggctctgcaagttttgtgccttagcggaaagaggcgacatctctggcaagttgggagtacaggaagtagcgaaggagtgccatctggtggatccttctggtagtgacactcagacctgggccaggggccttgagacaatttacttgactggaaaaatctgaataaaaaaaagatgcttca

SEQ ID NO: 443742 - DNA, 1505 bp, Homo sapiens
ctggcttgccccgggtccttaagccagcgacagtttttattgccgaacccaggctggaagcgggcggccctaggagccgcgcacaacagcgcaagcgggctggataccgggagccgattccagggcgcccacagaagcagaatcagaggggtaggcgggggtggggcgtgctgttcggcgctgtggccaaaatccgcccggcgctgaaagaggggacgtgggtgtgagtcccagcatcagccagggaatccgcccctagcttgttcttcgcccagctgggctccaagacgccctctgcgggcccatagctcctaccgcgtccactgcagcggacccgctttaataatgtcgctggaaagtgacacgcgatttattattaaagtaatgcgggcgcagggacgggaaaggtttaataaacgtgctgagatgccgaggattattcaccgcaaataaatgagagcgcgggcggcgttttaataaataatttcccgctgctcccgggggaaggcaggggagggggagggagggggagggaggaggagggggaggctgagccgctgccagaactcccggtttcgcctgcccacgggcttccaagccatccccgcgttttgtgtcctaggttgctcacacccgagatgtgaggttccaggagcgccgacccagagttgccaggcctgaaggcgggagaggctcagtcgcaccctacatttcccacctccaagattttaagtatagttcgcttgaaatccctggaatgcgctttcttctggctcctacccggagatccggagtccggacaaaccggggcaggaagggtccgtcggaccagctcctcccaagccgaggcttccaggtctcggccgggctcttctccctgcttttagctgagccgggctgggcgtacctctctcctccatctagagcagggtgtgaagaggaagccagagggggctgtctgaaaatgaccctgaccccctcctcgggctgtcgtgaggaggagggccgcttcgcccggctgctcgtcaccgcgaaggctccaaagaagtgttgcgcagccgtgctggtataactgagggtgtcctggcgaagcccagcccctggcgccctggtgaccgggggggtcgatgtgcggactgggcagaactggagcccgaagctggagagcgcccctcaaaaagaagcctggaagcccgagagatgaacccgactcagagagggccaagactgcagaccttggggaccgaggacaccctcaccacgctggtgggggctggggggatggcgcgggcggtggcgtgcggggaagcgcctggggaacacctggctctgcaagttttgtgccttagcggaaagaggcgacatctctggcaagttgggagtacaggaagtagcgaaggagtgccatctggtggatccttctggtagtgacactcagacctgggccaggggccttgagacaatttacttgactggaaaaatctgaataaaaaaaagatgcttca

SEQ ID NO: 443743 - DNA, 1020 bp, Homo sapiens
ccactactggctgacccactactagcctgagaccaggaccggtggggtacaaaggggcccatgcaggagatgccctggccagtaggacctccaacaggttgtttcccaggctggggtgggggcctgagcagacacagaggtgcaggcaccaggattctccacttcttccagccctgctgggccacagttctaactgcccttcctcccaggccctggttcttgctatttcctggtccccaacgtttatctagcttgtttgccctttccccaaactcatcttccagaacttttccctctctcctaagccccagttgcacctactaactgcagtcccttttgctgtctgccgtcttttgtacaagagagagaacagcggagcatgacttagttcagtgcagagagataggtgaggccagctcgagatcttataccactctgtattggacaaaggctagcacagggctaggcaccaataaagatttctaatgatgcacagacagtttatgcagatgtgcacatgaaaactgaatatccctgggaggcctcccacactaacagaactctggcttccagaagctgcagggcctgctctctaagcacatgcctgccagatgtacaaagagaaagtttgaacttgggcctatcccgcctttgagggagggaggctggagccatatggctggagggaagttatcttccccgtctgccctccattggggctgatatacattatctgcttctttgctcatcttattccaaacccttccccaggccagaatggggaacagggctatgtgggttggcccccaaaatgaaagcataaactggatagaggagggtggaagtttggtcacctgtgtggtccatacccttccccagctcccataggaatctacccatttcctgcagaagccagagtcatggtaaggctgtttcctatctgccccaattgtgacctgtcctctctggcttggggtccccaaatctctttcctcattctccttacctatcccagggaca

SEQ ID NO: 443744 - DNA, 562 bp, Homo sapiens
  misc_feature (18)..(18): n is a, c, g, or t
ctttgtgctctgaggatncctcagacagcggacccctcctcgggctgtcgtgaggaggagggccgcttcgcccggctgctcgtcaccgcgaaggctccaaagaagtgttgcgcagccgtgctggtataactgagggtgtcctggcgaagcccagcccctggcgccctggtgaccgggggggtcgatgtgcggactgggcagaactggagcccgaagctggagagcgcccctcaaaaagaagcctggaagcccgagagatgaacccgactcagagagggccaagactgcagaccttggggaccgaggacaccctcaccacgctggtgggggctggggggatggcgcgggcggtggcgtgcggggaagcgcctggggaacacctggctctgcaagttttgtgccttagcggaaagaggcgacatctctggcaagttgggagtacaggaagtagcgaaggagtgccatctggtggatccttctggtagtgacactcagacctgggccaggggccttgagacaatttacttgactggaaaaatctgaataaaaaaaagatgcttca

SEQ ID NO: 443745 - DNA, 1919 bp, Homo sapiens
ggccaggggctgggggaaatgacccgggagggtcccatgcggctacataaaattggcagccttagaactagtgggaaggcgggtgcgcgaagtcgaggggcggagagagggggccggaggagctgctttctgaatccaagttcgtgggctctctcagaagtcctcaggacggagcagaggtggccggcgggcccggctgactgcgcctctgctttctttccataaccttttctttcggactcgaatcacggctgctgcgaagggtctagttccggacactagggtgcccgaacgcgctgatgccccgagtgctcgcagggcttcccgctaaccatgctgccgccgccgcggcccgcagctgccttggcgctgcctgtgctcctgctactgctggtggtgctgacgccgcccccgaccggcgcaaggccatccccaggcccagattacctgcggcgcggctggatgcggctgctagcggagggcgagggctgcgctccctgccggccagaagagtgcgccgcgccgcggggctgcctggcgggcagggtgcgcgacgcgtgcggctgctgctgggaatgcgccaacctcgagggccagctctgcgacctggaccccagtgctcacttctacgggcactgcggcgagcagcttgagtgccggctggacacaggcggcgacctgagccgcggagaggtgccggaacctctgtgtgcctgtcgttcgcagagtccgctctgcgggtccgacggtcacacctactcccagatctgccgcctgcaggaggcggcccgcgctcggcccgatgccaacctcactgtggcacacccggggccctgcgaatcggggccccagatcgtgtcacatccatatgacacttggaatgtgacagggcaggatgtgatctttggctgtgaagtgtttgcctaccccatggcctccatcgagtggaggaaggatggcttggacatccagctgccaggggatgacccccacatctctgtgcagtttaggggtggaccccagaggtttgaggtgactggctggctgcagatccaggctgtgcgtcccagtgatgagggcacttaccgctgccttggccgcaatgccctgggtcaagtggaggcccctgctagcttgacagtgctcacacctgaccagctgaactctacaggcatcccccagctgcgatcactaaacctggttcctgaggaggaggctgagagtgaagagaatgacgattactactaggtccagagctctggcccatgggggtgggtgagcggctatagtgttcatccctgctcttgaaaagacctggaaaggggagcagggtcccttcatcgactgctttcatgctgtcagtagggatgatcatgggaggcctatttgactccaaggtagcagtgtggtaggatagagacaaaagctggaggagggtagggagagaagctgagaccaggaccggtggggtacaaaggggcccatgcaggagatgccctggccagtaggacctccaacaggttgtttcccaggctggggtgggggcctgagcagacacagaggtgcaggcaccaggattctccacttcttccagccctgctgggccacagttctaactgcccttcctcccaggccctggttcttgctatttcctggtccccaacgtttatctagcttgtttgccctttccccaaactcatcttccagaacttttccctctctcctaagccccagttgcacctactaactgcagtcccttttgctgtctgccgtcttttgtacaagagagagaacagcggagcatgacttagttcagtgcagagagataggtgaggccagctcgagatcttataccactctgtattggacaaaggctagcacagggctaggcaccaataaagatttctaatgatgcacag

SEQ ID NO: 443746 - DNA, 2154 bp, Homo sapiens
ggccaggggctgggggaaatgacccgggagggtcccatgcggctacataaaattggcagccttagaactagtgggaaggcgggtgcgcgaagtcgaggggcggagagagggggccggaggagctgctttctgaatccaagttcgtgggctctctcagaagtcctcaggacggagcagaggtggccggcgggcccggctgactgcgcctctgctttctttccataaccttttctttcggactcgaatcacggctgctgcgaagggtctagttccggacactagggtgcccgaacgcgctgatgccccgagtgctcgcagggcttcccgctaaccatgctgccgccgccgcggcccgcagctgccttggcgctgcctgtgctcctgctactgctggtggtgctgacgccgcccccgaccggcgcaaggccatccccaggcccagattacctgcggcgcggctggatgcggctgctagcggagggcgagggctgcgctccctgccggccagaagagtgcgccgcgccgcggggctgcctggcgggcagggtgcgcgacgcgtgcggctgctgctgggaatgcgccaacctcgagggccagctctgcgacctggaccccagtgctcacttctacgggcactgcggcgagcagcttgagtgccggctggacacaggcggcgacctgagccgcggagaggtgccggaacctctgtgtgcctgtcgttcgcagagtccgctctgcgggtccgacggtcacacctactcccagatctgccgcctgcaggaggcggcccgcgctcggcccgatgccaacctcactgtggcacacccggggccctgcgaatcggggccccagatcgtgtcacatccatatgacacttggaatgtgacagggcaggatgtgatctttggctgtgaagtgtttgcctaccccatggcctccatcgagtggaggaaggatggcttggacatccagctgccaggggatgacccccacatctctgtgcagtttaggggtggaccccagaggtttgaggtgactggctggctgcagatccaggctgtgcgtcccagtgatgagggcacttaccgctgccttggccgcaatgccctgggtcaagtggaggcccctgctagcttgacagtgctcacacctgaccagctgaactctacaggcatcccccagctgcgatcactaaacctggttcctgaggaggaggctgagagtgaagagaatgacgattactactaggtccagagctctggcccatgggggttgctcacacccgagatgtgaggttccaggagcgccgacccagagttgccaggcctgaaggcgggagaggctcagtcgcaccctacatttcccacctccaagattttaagtatagttcgcttgaaatccctggaatgcgctttcttctggctcctacccggagatccggagtccggacaaaccggggcaggaagggtccgtcggaccagctcctcccaagccgaggcttccaggtctcggccgggctcttctccctgcttttagctgagccgggctgggcgtacctctctcctccatctagagcagggtgtgaagaggaagccagagggggctgtctgaaaatgaccctgaccccctcctcgggctgtcgtgaggaggagggccgcttcgcccggctgctcgtcaccgcgaaggctccaaagaagtgttgcgcagccgtgctggtataactgagggtgtcctggcgaagcccagcccctggcgccctggtgaccgggggggtcgatgtgcggactgggcagaactggagcccgaagctggagagcgcccctcaaaaagaagcctggaagcccgagagatgaacccgactcagagagggccaagactgcagaccttggggaccgaggacaccctcaccacgctggtgggggctggggggatggcgcgggcggtggcgtgcggggaagcgcctggggaacacctggctctgcaagttttgtgccttagcggaaagaggcgacatctctggcaagttgggagtacaggaagtagcgaaggagtgccatctggtggatccttctggtagtgacactcagacctgggccaggggccttgagacaatttacttgactggaaaaatctgaataaaaaaaagatgcttca

SEQ ID NO: 443747 - DNA, 1732 bp, Homo sapiens
ctggcttgccccgggtccttaagccagcgacagtttttattgccgaacccaggctggaagcgggcggccctaggagccgcgcacaacagcgcaagcgggctggataccgggagccgattccagggcgcccacagaagcagaatcagaggggtaggcgggggtggggcgtgctgttcggcgctgtggccaaaatccgcccggcgctgaaagaggggacgtgggtgtgagtcccagcatcagccagggaatccgcccctagcttgttcttcgcccagctgggctccaagacgccctctgcgggcccatagctcctaccgcgtccacctgcagagcagaggctcctcaccaaaagccccaccccaccggagagggtcacgcaggtcccggggaatccgcactccttaatcgcgttagccgactttgtaggtgttcaggagcagcctcctagcagcctcagttttcccctccccgccctgctggttcaagcaccacagcctggaatgggagaactgttgtccaccgccccctccctccccgcaccccgcctctgctgcagcggacccgctttaataatgtcgctggaaagtgacacgcgatttattattaaagtaatgcgggcgcagggacgggaaaggtttaataaacgtgctgagatgccgaggattattcaccgcaaataaatgagagcgcgggcggcgttttaataaataatttcccgctgctcccgggggaaggcaggggagggggagggagggggagggaggaggagggggaggctgagccgctgccagaactcccggtttcgcctgcccacgggcttccaagccatccccgcgttttgtgtcctaggttgctcacacccgagatgtgaggttccaggagcgccgacccagagttgccaggcctgaaggcgggagaggctcagtcgcaccctacatttcccacctccaagattttaagtatagttcgcttgaaatccctggaatgcgctttcttctggctcctacccggagatccggagtccggacaaaccggggcaggaagggtccgtcggaccagctcctcccaagccgaggcttccaggtctcggccgggctcttctccctgcttttagctgagccgggctgggcgtacctctctcctccatctagagcagggtgtgaagaggaagccagagggggctgtctgaaaatgaccctgaccccctcctcgggctgtcgtgaggaggagggccgcttcgcccggctgctcgtcaccgcgaaggctccaaagaagtgttgcgcagccgtgctggtataactgagggtgtcctggcgaagcccagcccctggcgccctggtgaccgggggggtcgatgtgcggactgggcagaactggagcccgaagctggagagcgcccctcaaaaagaagcctggaagcccgagagatgaacccgactcagagagggccaagactgcagaccttggggaccgaggacaccctcaccacgctggtgggggctggggggatggcgcgggcggtggcgtgcggggaagcgcctggggaacacctggctctgcaagttttgtgccttagcggaaagaggcgacatctctggcaagttgggagtacaggaagtagcgaaggagtgccatctggtggatccttctggtagtgacactcagacctgggccaggggccttgagacaatttacttgactggaaaaatctgaataaaaaaaagatgcttca

SEQ ID NO: 443748 - DNA, 1453 bp, Homo sapiens
  misc_feature (1443)..(1443): n is a, c, g, or t
ggccaggggctgggggaaatgacccgggagggtcccatgcggctacataaaattggcagccttagaactagtgggaaggcgggtgcgcgaagtcgaggggcggagagagggggccggaggagctgctttctgaatccaagttcgtgggctctctcagaagtcctcaggacggagcagaggtggccggcgggcccggctgactgcgcctctgctttctttccataaccttttctttcggactcgaatcacggctgctgcgaagggtctagttccggacactagggtgcccgaacgcgctgatgccccgagtgctcgcagggcttcccgctaaccatgctgccgccgccgcggcccgcagctgccttggcgctgcctgtgctcctgctactgctggtggtgctgacgccgcccccgaccggcgcaaggccatccccaggcccagattacctgcggcgcggctggatgcggctgctagcggagggcgagggctgcgctccctgccggccagaagagtgcgccgcgccgcggggctgcctggcgggcagggtgcgcgacgcgtgcggctgctgctgggaatgcgccaacctcgagggccagctctgcgacctggaccccagtgctcacttctacgggcactgcggcgagcagcttgagtgccggctggacacaggcggcgacctgagccgcggagaggtgccggaacctctgtgtgcctgtcgttcgcagagtccgctctgcgggtccgacggtcacacctactcccagatctgccgcctgcaggaggcggcccgcgctcggcccgatgccaacctcactgtggcacacccggggccctgcgaatcggggccccagatcgtgtcacatccatatgacacttggaatgtgacagggcaggatgtgatctttggctgtgaagtgtttgcctaccccatggcctccatcgagtggaggaaggatggcttggacatccagctgccaggggatgacccccacatctctgtgcagtttaggggtggaccccagaggtttgaggtgactggctggctgcagatccaggctgtgcgtcccagtgatgagggcacttaccgctgccttggccgcaatgccctgggtcaagtggaggcccctgctagcttgacagtgctcacacctgaccagctgaactctacaggcatcccccagctgcgatcactaaacctggttcctgaggaggaggctgagagtgaagagaatgacgattactactaggtccagagctctggcccatgggggtgggtgagcggctatagtgttcatccctgctcttgaaaagacctggaaaggggagcagggtcccttcatcgactgctttcatgctgtcagtagggatgatcatgggaggcctatttgactccaaggtagcagtgtggtaggatagagacaccgtatagtagggggatcctnagagtcacct

SEQ ID NO: 443749 - DNA, 3187 bp, Homo sapiens
acccggttggcaggcggcctggcccagccccttctctaaggaagcgcatttcctgcctccctgggccggccgggctggatgagccgggagctccctgctgccggtcataccacagccttcatctgcgccctggggccaggactgctgctgtcactgccatccattggagcccagcaccccctccccgcccatccttcggacagcaactccagcccagccccgcgtccctgtgtccacttctcctgacccctcggccgccaccccagaaggctggagcagggacgccgtcgctccggccgcctgctcccctcgggtccccgtgcgagcccacgccggccccggtgcccgcccgcagccctgccactggacacaggataaggcccagcgcacaggcccccacgtggacagcatggaccgcggcacgctccctctggctgttgccctgctgctggccagctgcagcctcagccccacaagtcttgcagaaacagtccattgtgaccttcagcctgtgggccccgagaggggcgaggtgacatataccactagccaggtctcgaagggctgcgtggctcaggcccccaatgccatccttgaagtccatgtcctcttcctggagttcccaacgggcccgtcacagctggagctgactctccaggcatccaagcaaaatggcacctggccccgagaggtgcttctggtcctcagtgtaaacagcagtgtcttcctgcatctccaggccctgggaatcccactgcacttggcctacaattccagcctggtcaccttccaagagcccccgggggtcaacaccacagagctgccatccttccccaagacccagatccttgagtgggcagctgagaggggccccatcacctctgctgctgagctgaatgacccccagagcatcctcctccgactgggccaagcccaggggtcactgtccttctgcatgctggaagccagccaggacatgggccgcacgctcgagtggcggccgcgtactccagccttggtccggggctgccacttggaaggcgtggccggccacaaggaggcgcacatcctgagggtcctgccgggccactcggccgggccccggacggtgacggtgaaggtggaactgagctgcgcacccggggatctcgatgccgtcctcatcctgcagggtcccccctacgtgtcctggctcatcgacgccaaccacaacatgcagatctggaccactggagaatactccttcaagatctttccagagaaaaacattcgtggcttcaagctcccagacacacctcaaggcctcctgggggaggcccggatgctcaatgccagcattgtggcatccttcgtggagctaccgctggccagcattgtctcacttcatgcctccagctgcggtggtaggctgcagacctcacccgcaccgatccagaccactcctcccaaggacacttgtagcccggagctgctcatgtccttgatccagacaaagtgtgccgacgacgccatgaccctggtactaaagaaagagcttgttgcgcatttgaagtgcaccatcacgggcctgaccttctgggaccccagctgtgaggcagaggacaggggtgacaagtttgtcttgcgcagtgcttactccagctgtggcatgcaggtgtcagcaagtatgatcagcaatgaggcggtggtcaatatcctgtcgagctcatcaccacagcggaaaaaggtgcactgcctcaacatggacagcctctctttccagctgggcctctacctcagcccacacttcctccaggcctccaacaccatcgagccggggcagcagagctttgtgcaggtcagagtgtccccatccgtctccgagttcctgctccagttagacagctgccacctggacttggggcctgagggaggcaccgtggaactcatccagggccgggcggccaagggcaactgtgtgagcctgctgtccccaagccccgagggtgacccgcgcttcagcttcctcctccacttctacacagtacccatacccaaaaccggcaccctcagctgcacggtagccctgcgtcccaagaccgggtctcaagaccaggaagtccataggactgtcttcatgcgcttgaacatcatcagccctgacctgtctggttgcacaagcaaaggcctcgtcctgcccgccgtgctgggcatcacctttggtgccttcctcatcggggccctgctcactgctgcactctggtacatctactcgcacacgcgtgagtaccccaggcccccacagtgagcatgccgggcccctccatccacccgggggagcccagtgaagcctctgagggattgaggggccctggcaggaccctgacctccgcccctgcccccgctcccgctcccaggttcccccagcaagcgggagcccgtggtggcggtggctgccccggcctcctcggagagcagcagcaccaaccacagcatcgggagcacccagagcaccccctgctccaccagcagcatggcatagccccggccccccgcgctcgcccagcaggagagactgagcagccgccagctgggagcactggtgtgaactcaccctgggagccagtcctccactcgacccagaatggagcctgctctccgcgcctacccttcccgcctccctctcagaggcctgctgccagtgcagccactggcttggaacaccttggggtccctccaccccacagaaccttcaacccagtgggtctgggatatggctgcccaggagacagaccacttgccacgctgttgtaaaaacccaagtccctgtcatttgaacctggatccagcactggtgaactgagctgggcaggaagggagaacttgaaacagattcaggccagcccagccaggccaacagcacctccccgctgggaagagaagagggcccagcccagagccacctggatctatccctgcggcctccacacctgaacttgcctaactaactggcaggggagacaggagcctagcggagcccagcctgggagcccagagggtggcaagaacagtgggcgttgggagcctagctcctgccacatggagccccctctgccggtcgggcagccagcagagggggagtagccaagctgcttgtcctgggcctgcccctgtgtattcaccaccaataaatcagaccatgaaacca

SEQ ID NO: 443750 - DNA, 3052 bp, Homo sapiens
acccggttggcaggcggcctggcccagccccttctctaaggaagcgcatttcctgcctccctgggccggccgggctggatgagccgggagctccctgctgccggtcataccacagccttcatctgcgccctggggccaggactgctgctgtcactgccatccattggagcccagcaccccctccccgcccatccttcggacagcaactccagcccagccccgcgtccctgtgtccacttctcctgacccctcggccgccaccccagaaggctggagcagggacgccgtcgctccggccgcctgctcccctcgggtccccgtgcgagcccacgccggccccggtgcccgcccgcagccctgccactggacacaggataaggcccagcgcacaggcccccacgtggacagcatggaccgcggcacgctccctctggctgttgccctgctgctggccagctgcagcctcagccccacaagtcttgcagaaacagtccattgtgaccttcagcctgtgggccccgagaggggcgaggtgacatataccactagccaggtctcgaagggctgcgtggctcaggcccccaatgccatccttgaagtccatgtcctcttcctggagttcccaacgggcccgtcacagctggagctgactctccaggcatccaagcaaaatggcacctggccccgagaggtgcttctggtcctcagtgtaaacagcagtgtcttcctgcatctccaggccctgggaatcccactgcacttggcctacaattccagcctggtcaccttccaagagcccccgggggtcaacaccacagagctgccatccttccccaagacccagatccttgagtgggcagctgagaggggccccatcacctctgctgctgagctgaatgacccccagagcatcctcctccgactgggccaagcccaggggtcactgtccttctgcatgctggaagccagccaggacatgggccgcacgctcgagtggcggccgcgtactccagccttggtccggggctgccacttggaaggcgtggccggccacaaggaggcgcacatcctgagggtcctgccgggccactcggccgggccccggacggtgacggtgaaggtggaactgagctgcgcacccggggatctcgatgccgtcctcatcctgcagggtcccccctacgtgtcctggctcatcgacgccaaccacaacatgcagatctggaccactggagaatactccttcaagatctttccagagaaaaacattcgtggcttcaagctcccagacacacctcaaggcctcctgggggaggcccggatgctcaatgccagcattgtggcatccttcgtggagctaccgctggccagcattgtctcacttcatgcctccagctgcggtggtaggctgcagacctcacccgcaccgatccagaccactcctcccaaggacacttgtagcccggagctgctcatgtccttgatccagacaaagtgtgccgacgacgccatgaccctggtactaaagaaagagcttgttgcgcatttgaagtgcaccatcacgggcctgaccttctgggaccccagctgtgaggcagaggacaggggtgacaagtttgtcttgcgcagtgcttactccagctgtggcatgcaggtgtcagcaagtatgatcagcaatgaggcggtggtcaatatcctgtcgagctcatcaccacagcggaaaaaggtgcactgcctcaacatggacagcctctctttccagctgggcctctacctcagcccacacttcctccaggcctccaacaccatcgagccggggcagcagagctttgtgcaggtcagagtgtccccatccgtctccgagttcctgctccagttagacagctgccacctggacttggggcctgagggaggcaccgtggaactcatccagggccgggcggccaagggcaactgtgtgagcctgctgtccccaagccccgagggtgacccgcgcttcagcttcctcctccacttctacacagtacccatacccaaaaccggcaccctcagctgcacggtagccctgcgtcccaagaccgggtctcaagaccaggaagtccataggactgtcttcatgcgcttgaacatcatcagccctgacctgtctggttgcacaagcaaaggcctcgtcctgcccgccgtgctgggcatcacctttggtgccttcctcatcggggccctgctcactgctgcactctggtacatctactcgcacacgcgttcccccagcaagcgggagcccgtggtggcggtggctgccccggcctcctcggagagcagcagcaccaaccacagcatcgggagcacccagagcaccccctgctccaccagcagcatggcatagccccggccccccgcgctcgcccagcaggagagactgagcagccgccagctgggagcactggtgtgaactcaccctgggagccagtcctccactcgacccagaatggagcctgctctccgcgcctacccttcccgcctccctctcagaggcctgctgccagtgcagccactggcttggaacaccttggggtccctccaccccacagaaccttcaacccagtgggtctgggatatggctgcccaggagacagaccacttgccacgctgttgtaaaaacccaagtccctgtcatttgaacctggatccagcactggtgaactgagctgggcaggaagggagaacttgaaacagattcaggccagcccagccaggccaacagcacctccccgctgggaagagaagagggcccagcccagagccacctggatctatccctgcggcctccacacctgaacttgcctaactaactggcaggggagacaggagcctagcggagcccagcctgggagcccagagggtggcaagaacagtgggcgttgggagcctagctcctgccacatggagccccctctgccggtcgggcagccagcagagggggagtagccaagctgcttgtcctgggcctgcccctgtgtattcaccaccaataaatcagaccatgaaacca

SEQ ID NO: 443751 - DNA, 2542 bp, Homo sapiens
acccggttggcaggcggcctggcccagccccttctctaaggaagcgcatttcctgcctccctgggccggccgggctggatgagccgggagctccctgctgccggtcataccacagccttcatctgcgccctggggccaggactgctgctgtcactgccatccattggagcccagcaccccctccccgcccatccttcggacagcaactccagcccagccccgcgtccctgtgtccacttctcctgacccctcggccgccaccccagaaggctggagcagggacgccgtcgctccggccgcctgctcccctcgggtccccgtgcgagcccacgccggccccggtgcccgcccgcagccctgccactggacacaggataaggcccagcgcacaggcccccacgtggacagcatggaccgcggcacgctccctctggctgttgccctgctgctggccagctgcagcctcagccccacaagtcttgcagaaacagtccattgtgaccttcagcctgtgggccccgagaggggcgaggtgacatataccactagccaggtctcgaagggctgcgtggctcaggcccccaatgccatccttgaagtccatgtcctcttcctggagttcccaacgggcccgtcacagctggagctgactctccaggcatccaagcaaaatggcacctggccccgagaggtgcttctggtcctcagtgtaaacagcagtgtcttcctgcatctccaggccctgggaatcccactgcacttggcctacaattccagcctggtcaccttccaagagcccccgggggtcaacaccacagagctgccatccttccccaagacccagatccttgagtgggcagctgagaggggccccatcacctctgctgctgagctgaatgacccccagagcatcctcctccgactgggccaagcccaggggtcactgtccttctgcatgctggaagccagccaggacatgggccgcacgctcgagtggcggccgcgtactccagccttggtccggggctgccacttggaaggcgtggccggccacaaggaggcgcacatcctgagggtcctgccgggccactcggccgggccccggacggtgacggtgaaggtggaactgagctgcgcacccggggatctcgatgccgtcctcatcctgcagggtcccccctacgtgtcctggctcatcgacgccaaccacaacatgcagatctggaccactggagaatactccttcaagatctttccagagaaaaacattcgtggcttcaagctcccagacacacctcaaggcctcctgggggaggcccggatgctcaatgccagcattgtggcatccttcgtggagctaccgctggccagcattgtctcacttcatgcctccagctgcggtggtaggctgcagacctcacccgcaccgatccagaccactcctcccaaggacacttgtagcccggagctgctcatgtccttgatccagacaaagtgtgccgacgacgccatgaccctggtactaaagaaagagcttgttgcgcatttgaagtgcaccatcacgggcctgaccttctgggaccccagctgtgaggcagaggacaggggtgacaagtttgtcttgcgcagtgcttactccagctgtggcatgcaggtgtcagcaagtatgatcagcaatgaggcggtggtcaatatcctgtcgagctcatcaccacagcggaaaaaggtgcactgcctcaacatggacagcctctctttccagctgggcctctacctcagcccacacttcctccaggcctcctcggagagcagcagcaccaaccacagcatcgggagcacccagagcaccccctgctccaccagcagcatggcatagccccggccccccgcgctcgcccagcaggagagactgagcagccgccagctgggagcactggtgtgaactcaccctgggagccagtcctccactcgacccagaatggagcctgctctccgcgcctacccttcccgcctccctctcagaggcctgctgccagtgcagccactggcttggaacaccttggggtccctccaccccacagaaccttcaacccagtgggtctgggatatggctgcccaggagacagaccacttgccacgctgttgtaaaaacccaagtccctgtcatttgaacctggatccagcactggtgaactgagctgggcaggaagggagaacttgaaacagattcaggccagcccagccaggccaacagcacctccccgctgggaagagaagagggcccagcccagagccacctggatctatccctgcggcctccacacctgaacttgcctaactaactggcaggggagacaggagcctagcggagcccagcctgggagcccagagggtggcaagaacagtgggcgttgggagcctagctcctgccacatggagccccctctgccggtcgggcagccagcagagggggagtagccaagctgcttgtcctgggcctgcccctgtgtattcaccaccaataaatcagaccatgaaacca

SEQ ID NO: 443752 - DNA, 3194 bp, Homo sapiens
acccggttggcaggcggcctggcccagccccttctctaaggaagcgcatttcctgcctccctgggccggccgggctggatgagccgggagctccctgctgccggtcataccacagccttcatctgcgccctggggccaggactgctgctgtcactgccatccattggagcccagcaccccctccccgcccatccttcggacagcaactccagcccagccccgcgtccctgtgtccacttctcctgacccctcggccgccaccccagaaggctggagcagggacgccgtcgctccggccgcctgctcccctcgggtccccgtgcgagcccacgccggccccggtgcccgcccgcagccctgccactggacacaggataaggcccagcgcacaggcccccacgtggacagcatggaccgcggcacgctccctctggctgttgccctgctgctggccagctgcagcctcagccccacaagtcttgcagaaacagtccattgtgaccttcagcctgtgggccccgagaggggcgaggtgacatataccactagccaggtctcgaagggctgcgtggctcaggcccccaatgccatccttgaagtccatgtcctcttcctggagttcccaacgggcccgtcacagctggagctgactctccaggcatccaagcaaaatggcacctggccccgagaggtgcttctggtcctcagtgtaaacagcagtgtcttcctgcatctccaggccctgggaatcccactgcacttggcctacgcggggagcacccatcacatgctgggtgtcagggtgacgctggcatgtcaggatcctgtgatgggcccagggcccagcacaaagtcagacaaatctctctcagtgcgtactacgtgtcaagcactgtgcaaggatgggcaagaattccagcctggtcaccttccaagagcccccgggggtcaacaccacagagctgccatccttccccaagacccagatccttgagtgggcagctgagaggggccccatcacctctgctgctgagctgaatgacccccagagcatcctcctccgactgggccaagcccaggggtcactgtccttctgcatgctggaagccagccaggacatgggccgcacgctcgagtggcggccgcgtactccagccttggtccggggctgccacttggaaggcgtggccggccacaaggaggcgcacatcctgagggtcctgccgggccactcggccgggccccggacggtgacggtgaaggtggaactgagctgcgcacccggggatctcgatgccgtcctcatcctgcagggtcccccctacgtgtcctggctcatcgacgccaaccacaacatgcagatctggaccactggagaatactccttcaagatctttccagagaaaaacattcgtggcttcaagctcccagacacacctcaaggcctcctgggggaggcccggatgctcaatgccagcattgtggcatccttcgtggagctaccgctggccagcattgtctcacttcatgcctccagctgcggtggtaggctgcagacctcacccgcaccgatccagaccactcctcccaaggacacttgtagcccggagctgctcatgtccttgatccagacaaagtgtgccgacgacgccatgaccctggtactaaagaaagagcttgttgcgcatttgaagtgcaccatcacgggcctgaccttctgggaccccagctgtgaggcagaggacaggggtgacaagtttgtcttgcgcagtgcttactccagctgtggcatgcaggtgtcagcaagtatgatcagcaatgaggcggtggtcaatatcctgtcgagctcatcaccacagcggaaaaaggtgcactgcctcaacatggacagcctctctttccagctgggcctctacctcagcccacacttcctccaggcctccaacaccatcgagccggggcagcagagctttgtgcaggtcagagtgtccccatccgtctccgagttcctgctccagttagacagctgccacctggacttggggcctgagggaggcaccgtggaactcatccagggccgggcggccaagggcaactgtgtgagcctgctgtccccaagccccgagggtgacccgcgcttcagcttcctcctccacttctacacagtacccatacccaaaaccggcaccctcagctgcacggtagccctgcgtcccaagaccgggtctcaagaccaggaagtccataggactgtcttcatgcgcttgaacatcatcagccctgacctgtctggttgcacaagcaaaggcctcgtcctgcccgccgtgctgggcatcacctttggtgccttcctcatcggggccctgctcactgctgcactctggtacatctactcgcacacgcgttcccccagcaagcgggagcccgtggtggcggtggctgccccggcctcctcggagagcagcagcaccaaccacagcatcgggagcacccagagcaccccctgctccaccagcagcatggcatagccccggccccccgcgctcgcccagcaggagagactgagcagccgccagctgggagcactggtgtgaactcaccctgggagccagtcctccactcgacccagaatggagcctgctctccgcgcctacccttcccgcctccctctcagaggcctgctgccagtgcagccactggcttggaacaccttggggtccctccaccccacagaaccttcaacccagtgggtctgggatatggctgcccaggagacagaccacttgccacgctgttgtaaaaacccaagtccctgtcatttgaacctggatccagcactggtgaactgagctgggcaggaagggagaacttgaaacagattcaggccagcccagccaggccaacagcacctccccgctgggaagagaagagggcccagcccagagccacctggatctatccctgcggcctccacacctgaacttgcctaactaactggcaggggagacaggagcctagcggagcccagcctgggagcccagagggtggcaagaacagtgggcgttgggagcctagctcctgccacatggagccccctctgccggtcgggcagccagcagagggggagtagccaagctgcttgtcctgggcctgcccctgtgtattcaccaccaataaatcagaccatgaaacca

SEQ ID NO: 443753 - DNA, 1978 bp, Homo sapiens
ccatccgcgtctgtctccccgcaggccccggacggtgacggtgaaggtggaactgagctgcgcacccggggatctcgatgccgtcctcatcctgcagggtcccccctacgtgtcctggctcatcgacgccaaccacaacatgcagatctggaccactggagaatactccttcaagatctttccagagaaaaacattcgtggcttcaagctcccagacacacctcaaggcctcctgggggaggcccggatgctcaatgccagcattgtggcatccttcgtggagctaccgctggccagcattgtctcacttcatgcctccagctgcggtggtaggctgcagacctcacccgcaccgatccagaccactcctcccaaggacacttgtagcccggagctgctcatgtccttgatccagacaaagtgtgccgacgacgccatgaccctggtactaaagaaagagcttgttgcgcatttgaagtgcaccatcacgggcctgaccttctgggaccccagctgtgaggcagaggacaggggtgacaagtttgtcttgcgcagtgcttactccagctgtggcatgcaggtgtcagcaagtatgatcagcaatgaggcggtggtcaatatcctgtcgagctcatcaccacagcggaaaaaggtgcactgcctcaacatggacagcctctctttccagctgggcctctacctcagcccacacttcctccaggcctccaacaccatcgagccggggcagcagagctttgtgcaggtcagagtgtccccatccgtctccgagttcctgctccagttagacagctgccacctggacttggggcctgagggaggcaccgtggaactcatccagggccgggcggccaagggcaactgtgtgagcctgctgtccccaagccccgagggtgacccgcgcttcagcttcctcctccacttctacacagtacccatacccaaaaccggcaccctcagctgcacggtagccctgcgtcccaagaccgggtctcaagaccaggaagtccataggactgtcttcatgcgcttgaacatcatcagccctgacctgtctggttgcacaagcaaaggcctcgtcctgcccgccgtgctgggcatcacctttggtgccttcctcatcggggccctgctcactgctgcactctggtacatctactcgcacacgcgttcccccagcaagcgggagcccgtggtggcggtggctgccccggcctcctcggagagcagcagcaccaaccacagcatcgggagcacccagagcaccccctgctccaccagcagcatggcatagccccggccccccgcgctcgcccagcaggagagactgagcagccgccagctgggagcactggtgtgaactcaccctgggagccagtcctccactcgacccagaatggagcctgctctccgcgcctacccttcccgcctccctctcagaggcctgctgccagtgcagccactggcttggaacaccttggggtccctccaccccacagaaccttcaacccagtgggtctgggatatggctgcccaggagacagaccacttgccacgctgttgtaaaaacccaagtccctgtcatttgaacctggatccagcactggtgaactgagctgggcaggaagggagaacttgaaacagattcaggccagcccagccaggccaacagcacctccccgctgggaagagaagagggcccagcccagagccacctggatctatccctgcggcctccacacctgaacttgcctaactaactggcaggggagacaggagcctagcggagcccagcctgggagcccagagggtggcaagaacagtgggcgttgggagcctagctcctgccacatggagccccctctgccggtcgggcagccagcagagggggagtagccaagctgcttgtcctgggcctgcccctgtgtattcaccaccaataaatcagaccatgaaacca

SEQ ID NO: 443754 - DNA, 1704 bp, Homo sapiens
ctacttgaggatccctgcaactgtttcggatcacttcatgcctccagctgcggtggtaggctgcagacctcacccgcaccgatccagaccactcctcccaaggacacttgtagcccggagctgctcatgtccttgatccagacaaagtgtgccgacgacgccatgaccctggtactaaagaaagagcttgttgcgcatttgaagtgcaccatcacgggcctgaccttctgggaccccagctgtgaggcagaggacaggggtgacaagtttgtcttgcgcagtgcttactccagctgtggcatgcaggtgtcagcaagtatgatcagcaatgaggcggtggtcaatatcctgtcgagctcatcaccacagcggaaaaaggtgcactgcctcaacatggacagcctctctttccagctgggcctctacctcagcccacacttcctccaggcctccaacaccatcgagccggggcagcagagctttgtgcaggtcagagtgtccccatccgtctccgagttcctgctccagttagacagctgccacctggacttggggcctgagggaggcaccgtggaactcatccagggccgggcggccaagggcaactgtgtgagcctgctgtccccaagccccgagggtgacccgcgcttcagcttcctcctccacttctacacagtacccatacccaaaaccggcaccctcagctgcacggtagccctgcgtcccaagaccgggtctcaagaccaggaagtccataggactgtcttcatgcgcttgaacatcatcagccctgacctgtctggttgcacaagcaaaggcctcgtcctgcccgccgtgctgggcatcacctttggtgccttcctcatcggggccctgctcactgctgcactctggtacatctactcgcacacgcgttcccccagcaagcgggagcccgtggtggcggtggctgccccggcctcctcggagagcagcagcaccaaccacagcatcgggagcacccagagcaccccctgctccaccagcagcatggcatagccccggccccccgcgctcgcccagcaggagagactgagcagccgccagctgggagcactggtgtgaactcaccctgggagccagtcctccactcgacccagaatggagcctgctctccgcgcctacccttcccgcctccctctcagaggcctgctgccagtgcagccactggcttggaacaccttggggtccctccaccccacagaaccttcaacccagtgggtctgggatatggctgcccaggagacagaccacttgccacgctgttgtaaaaacccaagtccctgtcatttgaacctggatccagcactggtgaactgagctgggcaggaagggagaacttgaaacagattcaggccagcccagccaggccaacagcacctccccgctgggaagagaagagggcccagcccagagccacctggatctatccctgcggcctccacacctgaacttgcctaactaactggcaggggagacaggagcctagcggagcccagcctgggagcccagagggtggcaagaacagtgggcgttgggagcctagctcctgccacatggagccccctctgccggtcgggcagccagcagagggggagtagccaagctgcttgtcctgggcctgcccctgtgtattcaccaccaataaatcagaccatgaaacca

SEQ ID NO: 443755 - DNA, 1701 bp, Homo sapiens
taggctagtacgaggcctgggtggtgtgctcatcgacgccaaccacaacatgcagatctggaccactggagaatactccttcaagatctttccagagaaaaacattcgtggcttcaagctcccagacacacctcaaggcctcctgggggaggcccggatgctcaatgccagcattgtggcatccttcgtggagctaccgctggccagcattgtctcacttcatgcctccagctgcggtggtaggctgcagacctcacccgcaccgatccagaccactcctcccaaggacacttgtagcccggagctgctcatgtccttgatccagacaaagtgtgccgacgacgccatgaccctggtactaaagaaagagcttgttgcgcatttgaagtgcaccatcacgggcctgaccttctgggcctctacctcagcccacacttcctccaggcctccaacaccatcgagccggggcagcagagctttgtgcaggtcagagtgtccccatccgtctccgagttcctgctccagttagacagctgccacctggacttggggcctgagggaggcaccgtggaactcatccagggccgggcggccaagggcaactgtgtgagcctgctgtccccaagccccgagggtgacccgcgcttcagcttcctcctccacttctacacagtacccatacccaaaaccggcaccctcagctgcacggtagccctgcgtcccaagaccgggtctcaagaccaggaagtccataggactgtcttcatgcgcttgaacatcatcagccctgacctgtctggttgcacaagcaaaggcctcgtcctgcccgccgtgctgggcatcacctttggtgccttcctcatcggggccctgctcactgctgcactctggtacatctactcgcacacgcgttcccccagcaagcgggagcccgtggtggcggtggctgccccggcctcctcggagagcagcagcaccaaccacagcatcgggagcacccagagcaccccctgctccaccagcagcatggcatagccccggccccccgcgctcgcccagcaggagagactgagcagccgccagctgggagcactggtgtgaactcaccctgggagccagtcctccactcgacccagaatggagcctgctctccgcgcctacccttcccgcctccctctcagaggcctgctgccagtgcagccactggcttggaacaccttggggtccctccaccccacagaaccttcaacccagtgggtctgggatatggctgcccaggagacagaccacttgccacgctgttgtaaaaacccaagtccctgtcatttgaacctggatccagcactggtgaactgagctgggcaggaagggagaacttgaaacagattcaggccagcccagccaggccaacagcacctccccgctgggaagagaagagggcccagcccagagccacctggatctatccctgcggcctccacacctgaacttgcctaactaactggcaggggagacaggagcctagcggagcccagcctgggagcccagagggtggcaagaacagtgggcgttgggagcctagctcctgccacatggagccccctctgccggtcgggcagccagcagagggggagtagccaagctgcttgtcctgggcctgcccctgtgtattcaccaccaataaatcagaccatgaaacca

SEQ ID NO: 443756 - DNA, 1566 bp, Homo sapiens
acccggttggcaggcggcctggcccagccccttctctaaggaagcgcatttcctgcctccctgggccggccgggctggatgagccgggagctccctgctgccggtcataccacagccttcatctgcgccctggggccaggactgctgctgtcactgccatccattggagcccagcaccccctccccgcccatccttcggacagcaactccagcccagccccgcgtccctgtgtccacttctcctgacccctcggccgccaccccagaaggctggagcagggacgccgtcgctccggccgcctgctcccctcgggtccccgtgcgagcccacgccggccccggtgcccgcccgcagccctgccactggacacaggataaggcccagcgcacaggcccccacgtggacagcatggaccgcggcacgctccctctggctgttgccctgctgctggccagctgcagcctcagccccacaagtcttgcagaaacagtccattgtgaccttcagcctgtgggccccgagaggggcgaggtgacatataccactagccaggtctcgaagggctgcgtggctcaggcccccaatgccatccttgaagtccatgtcctcttcctggagttcccaacgggcccgtcacagctggagctgactctccaggcatccaagcaaaatggcacctggccccgagaggtgcttctggtcctcagtgtaaacagcagtgtcttcctgcatctccaggccctgggaatcccactgcacttggcctacaattccagcctggtcaccttccaagagcccccgggggtcaacaccacagagctgccatccttccccaagacccagatccttgagtgggcagctgagaggggccccatcactccaccagcagcatggcatagccccggccccccgcgctcgcccagcaggagagactgagcagccgccagctgggagcactggtgtgaactcaccctgggagccagtcctccactcgacccagaatggagcctgctctccgcgcctacccttcccgcctccctctcagaggcctgctgccagtgcagccactggcttggaacaccttggggtccctccaccccacagaaccttcaacccagtgggtctgggatatggctgcccaggagacagaccacttgccacgctgttgtaaaaacccaagtccctgtcatttgaacctggatccagcactggtgaactgagctgggcaggaagggagaacttgaaacagattcaggccagcccagccaggccaacagcacctccccgctgggaagagaagagggcccagcccagagccacctggatctatccctgcggcctccacacctgaacttgcctaactaactggcaggggagacaggagcctagcggagcccagcctgggagcccagagggtggcaagaacagtgggcgttgggagcctagctcctgccacatggagccccctctgccggtcgggcagccagcagagggggagtagccaagctgcttgtcctgggcctgcccctgtgtattcaccaccaataaatcagaccatgaaacca

SEQ ID NO: 443757 - DNA, 2045 bp, Homo sapiens
acatagcacatggcaagggggaccccagagaaagcggcccagaaggggcaggaggagggcttcccagagccatagcagcctagagcaggggccagagctgcactttgcagatggagagcccttgcccgggaccgccctgtggggtgggagtctaggcctctgcccccactcacggctccactccatccccacagttattggctgaccttgctgggaggatggagtctcctgggtgagacagaggccctttgagggtgggtgctggccttgccttccttgaggcctctccctgcaggacgccccctctagcctctccatcagttccccccaggcccaggcccacaccaggcagaagagtcccgacactggtggcagaggcaggggtgagggatgggggcacctacctctttgccaccccatccaggccaggatggagcctccactcccagcccaggaccaagaaggcagggctgataaccccatgacacagaatcggatgtcagaggctcaaggaaagactgcttggcccatagccacacaggagtcaggaatgtggagggaatgaggcttggagcaatccaagagcagagctgcagggcactcggagctgctctggcccattctctacctgctaaaggcctcagagaggggcagggttgacccaaggtcatgcagcaggtggggcaggctctgtactcccgagcctcagtttcctcacgttaccccatccatcctccctgaaaacgccatctccatcagccttgaggggcagaggcatgacccaaaaggcctggctgggccctctaggtggacagtcctagcaaccatggctcaatgccaggcctggctgtgatgagcccgtttgctgcaagaggagactgaggttcagagaagtcgagggtccatggctgagcagagctggcaccaaagcccacatgggccagcacaacagggtaggggatggggcaggggcagagtggcagtgctgatggcgtcggccctctctaggttgcacaagcaaaggcctcgtcctgcccgccgtgctgggcatcacctttggtgccttcctcatcggggccctgctcactgctgcactctggtacatctactcgcacacgcgtgagtaccccaggcccccacagtgagcatgccgggcccctccatccacccgggggagcccagtgaagcctctgagggattgaggggccctggcaggaccctgacctccgcccctgcccccgctcccgctcccaggttcccccagcaagcgggagcccgtggtggcggtggctgccccggcctcctcggagagcagcagcaccaaccacagcatcgggagcacccagagcaccccctgctccaccagcagcatggcatagccccggccccccgcgctcgcccagcaggagagactgagcagccgccagctgggagcactggtgtgaactcaccctgggagccagtcctccactcgacccagaatggagcctgctctccgcgcctacccttcccgcctccctctcagaggcctgctgccagtgcagccactggcttggaacaccttggggtccctccaccccacagaaccttcaacccagtgggtctgggatatggctgcccaggagacagaccacttgccacgctgttgtaaaaacccaagtccctgtcatttgaacctggatccagcactggtgaactgagctgggcaggaagggagaacttgaaacagattcaggccagcccagccaggccaacagcacctccccgctgggaagagaagagggcccagcccagagccacctggatctatccctgcggcctccacacctgaacttgcctaactaactggcaggggagacaggagcctagcggagcccagcctgggagcccagagggtggcaagaacagtgggcgttgggagcctagctcctgccacatggagccccctctgccggtcgggcagccagcagagggggagtagccaagctgcttgtcctgggcctgcccctgtgtattcaccaccaataaatcagaccatgaaacca

SEQ ID NO: 443758 - DNA, 616 bp, Homo sapiens
tctcaggcttctcctgcccaaagggacactgctcaggctgcctctacacgtgaaatccccagagcctcctctccccatcgaatcacccaaagggacacctccagggcctcatccacccaacaggaaatctccagggcctcatccaccctacaggaaaccttcaacccagtgggtctgggatatggctgcccaggagacagaccacttgccacgctgttgtaaaaacccaagtccctgtcatttgaacctggatccagcactggtgaactgagctgggcaggaagggagaacttgaaacagattcaggccagcccagccaggccaacagcacctccccgctgggaagagaagagggcccagcccagagccacctggatctatccctgcggcctccacacctgaacttgcctaactaactggcaggggagacaggagcctagcggagcccagcctgggagcccagagggtggcaagaacagtgggcgttgggagcctagctcctgccacatggagccccctctgccggtcgggcagccagcagagggggagtagccaagctgcttgtcctgggcctgcccctgtgtattcaccaccaataaatcagaccatgaaacca

SEQ ID NO: 443759 - DNA, 1259 bp, Homo sapiens
acccggttggcaggcggcctggcccagccccttctctaaggaagcgcatttcctgcctccctgggccggccgggctggatgagccgggagctccctgctgccggtcataccacagccttcatctgcgccctggggccaggactgctgctgtcactgccatccattggagcccagcaccccctccccgcccatccttcggacagcaactccagcccagccccgcgtccctgtgtccacttctcctgacccctcggccgccaccccagaaggctggagcagggacgccgtcgctccggccgcctgctcccctcgggtccccgtgcgagcccacgccggccccggtgcccgcccgcagccctgccactggacacaggataaggcccagcgcacaggcccccacgtggacagcatggaccgcggcacgctccctctggctgttgccctgctgctggccagctgcagcctcagccccacaagtcttgcagaaacagtccattgtgaccttcagcctgtgggccccgagaggggcgaggtgacatataccactagccaggtctcgaagggctgcgtggctcaggcccccaatgccatccttgaagtccatgtcctcttcctggagttcccaacgggcccgtcacagctggagctgactctccaggcatccaagcaaaatggcacctggccccgagaggtgcttctggtcctcagtgtaaacagcagtgtcttcctgcatctccaggccctgggaatcccactgcacttggcctacgcggggagcacccatcacatgctgggtgtcagggtgacgctggcatgtcaggatcctgtgatgggcccagggcccagcacaaagtcagacaaatctctctcagtgcgtactacgtgtcaagcactgtgcaaggatgggcaaggtagacgttgccccctgtagaccctcacagtgtagggagatccagagcctcagggtatagggagagacagccgcaggatggcgtagatgtgggttgaatgagaacagctctggaggggtgggtgatgtttggacaggtggatgaacaaggtggtgtgttcatctggccccccaggtatgcaagggagaaggggctgatctgactgctagggggctccgggctgactgcagatccaccagccagcattctcagctccggcctctttctctcagccaatgggctgactccacaaattacttcctgacctcctacatgggatagagagggcacagggccaggaacagcgtg

SEQ ID NO: 443760 - DNA, 424 bp, Homo sapiens
ccatcgagccggggcagcagagctttgtgcaggtacctggcatgcctgtcacccctcgggcctcccagctcctggaacttcctctccgcctttcttcccaccatgactccagaggagatgagactcccagagtcaggagggagacagcctgggtgcacgggagagggagagacagagaaggcattgctcagggacactgacaaggatgtggccctgtcctcctcctctgccccagacaggtccatgtctttctttccactgtgaggactcaggggtgggaactcttaattctagccgatatttgaaggcagcaggtggggtggggtgaagagcagctgcccatgccgcgtggccctacctacccatgcagtcagagtgtccccatccgtctccgagttcctgctccagttagacagctgccacc

SEQ ID NO: 443761 - DNA, 769 bp, Homo sapiens
agtgcaggaggggacacgctgtgccacagttcacatgccacaagccagtgctgccttgggacagtgatggctcctccaccaaatatcagattgaagcatgtggaatatgccaggttctgacctaaaaccccagcattttcatacgatctattgtgcatctactatgtgccaaagccctatcatgctaggcacttggggacacactcaggccctgccttcctggagctgatactgtgatgagggaggtgacaataaacatgtacatgtacacagataaatctataatttcgggtcttgctgggtggtttcggggctgcagcctaacatgtgtcatgggctcatcccttatgttaacacacggaggcccggggacttgcacagggtcacttggcaggtgagtggtggaagggaagttcgaacctaggtcctctgacgcctctccccctctgcagcaccgtcctgcctgccccaccactatctttggctgtgggtgagggcggggctctgttaggtgcagggctgctgagggaagggactgaggtgcgcgtgtctctgcagcccaggggtcactgtccttctgcatgctggaagccagccaggacatgggccgcacgctcgagtggcggccgcgtactccagccttggtccggggctgccacttggaaggcgtggccggccacaaggaggcgcacatcctgagggtcctgccgggccactcggccgggtatggctctcgccccgcccctgacactagtccccaccccgagag

SEQ ID NO: 443762 - DNA, 3034 bp, Homo sapiens
  misc_feature (7)..(7): n is a, c, g, or t
  misc_feature (23)..(23): n is a, c, g, or t
aacccanctcactacagaaccanctctcggaatccgggtaaagccttaagagcagcgcaattcctcgtgcactgttggcctactgtatataccacagccttcatctgcgccctggggccaggactgctgctgtcactgccatccattggagcccagcaccccctccccgcccatccttcggacagcaactccagcccagccccgcgtccctgtgtccacttctcctgacccctcggccgccaccccagaaggctggagcagggacgccgtcgctccggccgcctgctcccctcgggtccccgtgcgagcccacgccggccccggtgcccgcccgcagccctgccactggacacaggataaggcccagcgcacaggcccccacgtggacagcatggaccgcggcacgctccctctggctgttgccctgctgctggccagctgcagcctcagccccacaagtcttgcagaaacagtccattgtgaccttcagcctgtgggccccgagaggggcgaggtgacatataccactagccaggtctcgaagggctgcgtggctcaggcccccaatgccatccttgaagtccatgtcctcttcctggagttcccaacgggcccgtcacagctggagctgactctccaggcatccaagcaaaatggcacctggccccgagaggtgcttctggtcctcagtgtaaacagcagtgtcttcctgcatctccaggccctgggaatcccactgcacttggcctacaattccagcctggtcaccttccaagagcccccgggggtcaacaccacagagctgccatccttccccaagacccagatccttgagtgggcagctgagaggggccccatcacctctgctgctgagctgaatgacccccagagcatcctcctccgactgggccaagcccaggggtcactgtccttctgcatgctggaagccagccaggacatgggccgcacgctcgagtggcggccgcgtactccagccttggtccggggctgccacttggaaggcgtggccggccacaaggaggcgcacatcctgagggtcctgccgggccactcggccgggccccggacggtgacggtgaaggtggaactgagctgcgcacccggggatctcgatgccgtcctcatcctgcagggtcccccctacgtgtcctggctcatcgacgccaaccacaacatgcagatctggaccactggagaatactccttcaagatctttccagagaaaaacattcgtggcttcaagctcccagacacacctcaaggcctcctgggggaggcccggatgctcaatgccagcattgtggcatccttcgtggagctaccgctggccagcattgtctcacttcatgcctccagctgcggtggtaggctgcagacctcacccgcaccgatccagaccactcctcccaaggacacttgtagcccggagctgctcatgtccttgatccagacaaagtgtgccgacgacgccatgaccctggtactaaagaaagagcttgttgcgcatttgaagtgcaccatcacgggcctgaccttctgggaccccagctgtgaggcagaggacaggggtgacaagtttgtcttgcgcagtgcttactccagctgtggcatgcaggtgtcagcaagtatgatcagcaatgaggcggtggtcaatatcctgtcgagctcatcaccacagcggaaaaaggtgcactgcctcaacatggacagcctctctttccagctgggcctctacctcagcccacacttcctccaggcctccaacaccatcgagccggggcagcagagctttgtgcaggtcagagtgtccccatccgtctccgagttcctgctccagttagacagctgccacctggacttggggcctgagggaggcaccgtggaactcatccagggccgggcggccaagggcaactgtgtgagcctgctgtccccaagccccgagggtgacccgcgcttcagcttcctcctccacttctacacagtacccatacccaaaaccggcaccctcagctgcacggtagccctgcgtcccaagaccgggtctcaagaccaggaagtccataggactgtcttcatgcgcttgaacatcatcagccctgacctgtctggttgcacaagcaaaggcctcgtcctgcccgccgtgctgggcatcacctttggtgccttcctcatcggggccctgctcactgctgcactctggtacatctactcgcacacgcgttcccccagcaagcgggagcccgtggtggcggtggctgccccggcctcctcggagagcagcagcaccaaccacagcatcgggagcacccagagcaccccctgctccaccagcagcatggcatagccccggccccccgcgctcgcccagcaggagagactgagcagccgccagctgggagcactggtgtgaactcaccctgggagccagtcctccactcgacccagaatggagcctgctctccgcgcctacccttcccgcctccctctcagaggcctgctgccagtgcagccactggcttggaacaccttggggtccctccaccccacagaaccttcaacccagtgggtctgggatatggctgcccaggagacagaccacttgccacgctgttgtaaaaacccaagtccctgtcatttgaacctggatccagcactggtgaactgagctgggcaggaagggagaacttgaaacagattcaggccagcccagccaggccaacagcacctccccgctgggaagagaagagggcccagcccagagccacctggatctatccctgcggcctccacacctgaacttgcctaactaactggcaggggagacaggagcctagcggagcccagcctgggagcccagagggtggcaagaacagtgggcgttgggagcctagctcctgccacatggagccccctctgccggtcgggcagccagcagagggggagtagccaagctgcttgtcctgggcctgcccctgtgtattcaccaccaataaatcagaccatgaaacca

SEQ ID NO: 443763 - DNA, 2678 bp, Homo sapiens
agtgcaggaggggacacgctgtgccacagttcacatgccacaagccagtgctgccttgggacagtgatggctcctccaccaaatatcagattgaagcatgtggaatatgccaggttctgacctaaaaccccagcattttcatacgatctattgtgcatctactatgtgccaaagccctatcatgctaggcacttggggacacactcaggccctgccttcctggagctgatactgtgatgagggaggtgacaataaacatgtacatgtacacagataaatctataatttcgggtcttgctgggtggtttcggggctgcagcctaacatgtgtcatgggctcatcccttatgttaacacacggaggcccggggacttgcacagggtcacttggcaggtgagtggtggaagggaagttcgaacctaggtcctctgacgcctctccccctctgcagcaccgtcctgcctgccccaccactatctttggctgtgggtgagggcggggctctgttaggtgcagggctgctgagggaagggactgaggtgcgcgtgtctctgcagcccaggggtcactgtccttctgcatgctggaagccagccaggacatgggccgcacgctcgagtggcggccgcgtactccagccttggtccggggctgccacttggaaggcgtggccggccacaaggaggcgcacatcctgagggtcctgccgggccactcggccgggccccggacggtgacggtgaaggtggaactgagctgcgcacccggggatctcgatgccgtcctcatcctgcagggtcccccctacgtgtcctggctcatcgacgccaaccacaacatgcagatctggaccactggagaatactccttcaagatctttccagagaaaaacattcgtggcttcaagctcccagacacacctcaaggcctcctgggggaggcccggatgctcaatgccagcattgtggcatccttcgtggagctaccgctggccagcattgtctcacttcatgcctccagctgcggtggtaggctgcagacctcacccgcaccgatccagaccactcctcccaaggacacttgtagcccggagctgctcatgtccttgatccagacaaagtgtgccgacgacgccatgaccctggtactaaagaaagagcttgttgcgcatttgaagtgcaccatcacgggcctgaccttctgggaccccagctgtgaggcagaggacaggggtgacaagtttgtcttgcgcagtgcttactccagctgtggcatgcaggtgtcagcaagtatgatcagcaatgaggcggtggtcaatatcctgtcgagctcatcaccacagcggaaaaaggtgcactgcctcaacatggacagcctctctttccagctgggcctctacctcagcccacacttcctccaggcctccaacaccatcgagccggggcagcagagctttgtgcaggtcagagtgtccccatccgtctccgagttcctgctccagttagacagctgccacctggacttggggcctgagggaggcaccgtggaactcatccagggccgggcggccaagggcaactgtgtgagcctgctgtccccaagccccgagggtgacccgcgcttcagcttcctcctccacttctacacagtacccatacccaaaaccggcaccctcagctgcacggtagccctgcgtcccaagaccgggtctcaagaccaggaagtccataggactgtcttcatgcgcttgaacatcatcagccctgacctgtctggttgcacaagcaaaggcctcgtcctgcccgccgtgctgggcatcacctttggtgccttcctcatcggggccctgctcactgctgcactctggtacatctactcgcacacgcgttcccccagcaagcgggagcccgtggtggcggtggctgccccggcctcctcggagagcagcagcaccaaccacagcatcgggagcacccagagcaccccctgctccaccagcagcatggcatagccccggccccccgcgctcgcccagcaggagagactgagcagccgccagctgggagcactggtgtgaactcaccctgggagccagtcctccactcgacccagaatggagcctgctctccgcgcctacccttcccgcctccctctcagaggcctgctgccagtgcagccactggcttggaacaccttggggtccctccaccccacagaaccttcaacccagtgggtctgggatatggctgcccaggagacagaccacttgccacgctgttgtaaaaacccaagtccctgtcatttgaacctggatccagcactggtgaactgagctgggcaggaagggagaacttgaaacagattcaggccagcccagccaggccaacagcacctccccgctgggaagagaagagggcccagcccagagccacctggatctatccctgcggcctccacacctgaacttgcctaactaactggcaggggagacaggagcctagcggagcccagcctgggagcccagagggtggcaagaacagtgggcgttgggagcctagctcctgccacatggagccccctctgccggtcgggcagccagcagagggggagtagccaagctgcttgtcctgggcctgcccctgtgtattcaccaccaataaatcagaccatgaaacca

SEQ ID NO: 443764 - DNA, 1704 bp, Homo sapiens
aaaaaacccaactttcttgtacaaagttgtgcggccgctcgcgatgactgcggtggtaggctgcagacctcacccgcaccgatccagaccactcctcccaaggacacttgtagcccggagctgctcatgtccttgatccagacaaagtgtgccgacgacgccatgaccctggtactaaagaaagagcttgttgcgcatttgaagtgcaccatcacgggcctgaccttctgggaccccagctgtgaggcagaggacaggggtgacaagtttgtcttgcgcagtgcttactccagctgtggcatgcaggtgtcagcaagtatgatcagcaatgaggcggtggtcaatatcctgtcgagctcatcaccacagcggaaaaaggtgcactgcctcaacatggacagcctctctttccagctgggcctctacctcagcccacacttcctccaggcctccaacaccatcgagccggggcagcagagctttgtgcaggtcagagtgtccccatccgtctccgagttcctgctccagttagacagctgccacctggacttggggcctgagggaggcaccgtggaactcatccagggccgggcggccaagggcaactgtgtgagcctgctgtccccaagccccgagggtgacccgcgcttcagcttcctcctccacttctacacagtacccatacccaaaaccggcaccctcagctgcacggtagccctgcgtcccaagaccgggtctcaagaccaggaagtccataggactgtcttcatgcgcttgaacatcatcagccctgacctgtctggttgcacaagcaaaggcctcgtcctgcccgccgtgctgggcatcacctttggtgccttcctcatcggggccctgctcactgctgcactctggtacatctactcgcacacgcgttcccccagcaagcgggagcccgtggtggcggtggctgccccggcctcctcggagagcagcagcaccaaccacagcatcgggagcacccagagcaccccctgctccaccagcagcatggcatagccccggccccccgcgctcgcccagcaggagagactgagcagccgccagctgggagcactggtgtgaactcaccctgggagccagtcctccactcgacccagaatggagcctgctctccgcgcctacccttcccgcctccctctcagaggcctgctgccagtgcagccactggcttggaacaccttggggtccctccaccccacagaaccttcaacccagtgggtctgggatatggctgcccaggagacagaccacttgccacgctgttgtaaaaacccaagtccctgtcatttgaacctggatccagcactggtgaactgagctgggcaggaagggagaacttgaaacagattcaggccagcccagccaggccaacagcacctccccgctgggaagagaagagggcccagcccagagccacctggatctatccctgcggcctccacacctgaacttgcctaactaactggcaggggagacaggagcctagcggagcccagcctgggagcccagagggtggcaagaacagtgggcgttgggagcctagctcctgccacatggagccccctctgccggtcgggcagccagcagagggggagtagccaagctgcttgtcctgggcctgcccctgtgtattcaccaccaataaatcagaccatgaaacca

SEQ ID NO: 443765 - DNA, 2090 bp, Homo sapiens
acccggttggcaggcggcctggcccagccccttctctaaggaagcgcatttcctgcctccctgggccggccgggctggatgagccgggagctccctgctgccggtcataccacagccttcatctgcgccctggggccaggactgctgctgtcactgccatccattggagcccagcaccccctccccgcccatccttcggacagcaactccagcccagccccgcgtccctgtgtccacttctcctgacccctcggccgccaccccagaaggctggagcagggacgccgtcgctccggccgcctgctcccctcgggtccccgtgcgagcccacgccggccccggtgcccgcccgcagccctgccactggacacaggataaggcccagcgcacaggcccccacgtggacagcatggaccgcggcacgctccctctggctgttgccctgctgctggccagctgcagcctcagccccacaagtcttgcagaaacagtccattgtgaccttcagcctgtgggccccgagaggggcgaggtgacatataccactagccaggtctcgaagggctgcgtggctcaggcccccaatgccatccttgaagtccatgtcctcttcctggagttcccaacgggcccgtcacagctggagctgactctccaggcatccaagcaaaatggcacctggccccgagaggtgcttctggtcctcagtgtaaacagcagtgtcttcctgcatctccaggccctgggaatcccactgcacttggcctacaattccagcctggtcaccttccaagagcccccgggggtcaacaccacagagctgccatccttccccaagacccagatccttgagtgggcagctgagaggggccccatcacctctgctgctgagctgaatgacccccagagcatcctcctccgactgggccaagcccaggggtcactgtccttctgcatgctggaagccagccaggacatgggccgcacgctcgagtggcggccgcgtactccagccttggtccggggctgccacttggaaggcgtggccggccacaaggaggcgcacatcctgagggtcctgccgggccactcggccgggccccggacggtgacggtgaaggtggaactgagctgcgcacccggggatctcgatgccgtcctcatcctgcagggtcccccctacgtgtcctggctcatcgacgccaaccacaacatgcagatctggaccactggagaatactccttcaagatctttccagagaaaaacattcgtggcttcaagctcccagacacacctcaaggcctcctgggggaggcccggatgctcaatgccagcattgtggcatccttcgtggagctaccgctggccagcattgtctcacttcatgcctccagctgcggtggtaggctgcagacctcacccgcaccgatccagaccactcctcccaaggacacttgtagcccggagctgctcatgtccttgatccagacaaagtgtgccgacgacgccatgaccctggtactaaagaaagagcttgttgcgcatttgaagtgcaccatcacgggcctgaccttctgggaccccagctgtgaggcagaggacaggggtgacaagtttgtcttgcgcagtgcttactccagctgtggcatgcaggtgtcagcaagtatgatcagcaatgaggcggtggtcaatatcctgtcgagctcatcaccacagcgggtgagatggacagtcacgtgctaacccacctggcccaggggctgctgctgggccggggcctcttcctggcctgggagggagcaggcctcgggaaactcctggcaagccatgtgtgtctggaatgcctcggtctccccttctgtatgaccggagcaggactgctgagggtgacgctctcggtctctcaagtcagagggcttagcacatactggctgtgtggccttgggcaagtcactttagttttctgggcccaaaggtggcctaagaaaggactctgcgccacagggtgcttctgggcagccaatgaggtgctgtgtggaagctcttcacacagcctggcagctggtgcctccttgataaatattagttt

SEQ ID NO: 443766 - DNA, 1473 bp, Homo sapiens
agagacgaggtctcgctctgtcaccaaggctggagtgcaatgatgtgatctcggctcactgcagcctcctcctctcaggttcaagcgattcttgtgcctcagccttcccagtagctgggactatgggtgtctgccaccacacgtacctggcatgcctgtcacccctcgggcctcccagctcctggaacttcctctccgcctttcttcccaccatgactccagaggagatgagactcccagagtcaggagggagacagcgtcagagtgtccccatccgtctccgagttcctgctccagttagacagctgccacctggacttggggcctgagggaggcaccgtggaactcatccagggccgggcggccaagggcaactgtgtgagcctgctgtccccaagccccgagggtgacccgcgcttcagcttcctcctccacttctacacagtacccatacccaaaaccggcaccctcagctgcacggtagccctgcgtcccaagaccgggtctcaagaccaggaagtccataggactgtcttcatgcgcttgaacatcatcagccctgacctgtctggttgcacaagcaaaggcctcgtcctgcccgccgtgctgggcatcacctttggtgccttcctcatcggggccctgctcactgctgcactctggtacatctactcgcacacgcgttcccccagcaagcgggagcccgtggtggcggtggctgccccggcctcctcggagagcagcagcaccaaccacagcatcgggagcacccagagcaccccctgctccaccagcagcatggcatagccccggccccccgcgctcgcccagcaggagagactgagcagccgccagctgggagcactggtgtgaactcaccctgggagccagtcctccactcgacccagaatggagcctgctctccgcgcctacccttcccgcctccctctcagaggcctgctgccagtgcagccactggcttggaacaccttggggtccctccaccccacagaaccttcaacccagtgggtctgggatatggctgcccaggagacagaccacttgccacgctgttgtaaaaacccaagtccctgtcatttgaacctggatccagcactggtgaactgagctgggcaggaagggagaacttgaaacagattcaggccagcccagccaggccaacagcacctccccgctgggaagagaagagggcccagcccagagccacctggatctatccctgcggcctccacacctgaacttgcctaactaactggcaggggagacaggagcctagcggagcccagcctgggagcccagagggtggcaagaacagtgggcgttgggagcctagctcctgccacatggagccccctctgccggtcgggcagccagcagagggggagtagccaagctgcttgtcctgggcctgcccctgtgtattcaccaccaataaatcagaccatgaaacca

SEQ ID NO: 443767 - DNA, 1475 bp, Homo sapiens
acccggttggcaggcggcctggcccagccccttctctaaggaagcgcatttcctgcctccctgggccggccgggctggatgagccgggagctccctgctgccggtcataccacagccttcatctgcgccctggggccaggactgctgctgtcactgccatccattggagcccagcaccccctccccgcccatccttcggacagcaactccagcccagccccgcgtccctgtgtccacttctcctgacccctcggccgccaccccagaaggctggagcagggacgccgtcgctccggccgcctgctcccctcgggtccccgtgcgagcccacgccggccccggtgcccgcccgcagccctgccactggacacaggataaggcccagcgcacaggcccccacgtggacagcatggaccgcggcacgctccctctggctgttgccctgctgctggccagctgcagcctcagccccacaagtcttgcagaaacagtccattgtgaccttcagcctgtgggccccgagaggggcgaggtgacatataccactagccaggtctcgaagggctgcgtggctcaggcccccaatgccatccttgaagtccatgtcctcttcctggagttcccaacgggcccgtcacagctggagctgactctccaggcatccaagcaaaatggcacctggccccgagaggtgcttctggtcctcagtgtaaacagcagtgtcttcctgcatctccaggccctgggaatcccactgcacttggcctacaattccagcctggtcaccttccaagagcccccgggggtcaacaccacagagctgccatccttccccaagacccagatccttgagtgggcagctgagaggggccccatcacctctgctgctgagctgaatgacccccagagcatcctcctccgactgggccaagcccaggggtcactgtccttctgcatgctggaagccagccaggacatgggccgcacgctcgagtggcggccgcgtactccagccttggtccggggctgccacttggaaggcgtggccggccacaaggaggcgcacatcctgagggtcctgccgggccactcggccgggccccggacggtgacggtgaaggtggaactgagctgcgcacccggggatctcgatgccgtcctcatcctgcagggtcccccctacgtgtcctggctcatcgacgccaaccacaacatgcagatctggaccactggagaatactccttcaagatctttccagagaaaaacattcgtggcttcaagctcccagacacacctcaaggcctcctgggggaggcccggatgctcaatgccagcattgtggcatccttcgtggagctaccgctggccagcattgtctcacttcatgcctccagctgcggtggtaagctgtacctcacccgtagctgtacctcacccgtagctgtacctcacccgtagctgtacctcacccgta

SEQ ID NO: 443768 - DNA, 1473 bp, Homo sapiens
tagtccatgaggtactttggctccatccccctcaaaaacaaaacaaaaaatccatttaaagtgtcctcctagaaaagcctcagaactgccttcaactacatctgtcacctttatagaatattttgaaattctggaagaggatgggaaacaaaattctaatttagctagagctgtgatccccaaataagtgctgacaaaattgtctaccacagaaaggccgtccttgtcatcttgtaggcatcactgctgctaaatcacatcagtacatgccttctgtggggagatggcagggggcaggggcaggaccaggggatgggattagataaagtgtgataatgtcctttagataaaagaaatcctacgctatagaacaaggttctgtactcttgagttggtgtctgagatcacctgcacagtgttacagagattttccactccataaatcactctaaaagagtttgcataagactcggtagacctgtgctattcaatgtggcagtcaacagccatatgtggcgatgactactcaaagtttggcttgttcaaatcgagactgtgttgtacacatacaatacacaccagattttgaaggcttggtaccaaaaaggaatttaaaatatttcaccaatatttcatattgataacatgctgaaatgacactattttggatgtactaagtaaaatattaacaatttaatatatttatataattgaaattaaaattcttttcacccatttttatttttttaaaaatgtggcccctaaagaacttcaaattagacatgtggataacgttatacttctattggacagccccactctagacttacatggtgtggggtaggcagtgaaatccgtaaataggaaacgcaattctgcaaagtatctaaatagacagaaacaacacaaatatttttgctggagtcaggagcactgtgaggcacagaacatctcccagaaagcagattttttttttctgccgaaaaaccaatatatatatgtatgatcccaattaaaagacaaaagcaaatgagccccaaactgcctgtcttcagctttgcctgggagctgctacctttgctcttctagcatcttctaggtaccaaggatattagccacttgagggtgttgggcatatttgtttcattgtaggcaaaatcctcttgtggtttcccctccccaggtattgttgagtctgttcaaagctgggtgtgttgaaacactgcacaaatcctgccactcttgatgtgccgcttgtctcagccttggcagaggctgagtctgttcctgtgcccacctgtccagcaggttttgatgttggctcctgaaagagtttgtatttattttattttgcactagtcacagttgttgttaaactgtatcaaatgttttgggagattatttgcctgagatggaaagagagatggatgatttattgcttcaattgttttaaattaaaagctattctcacaa

SEQ ID NO: 443769 - DNA, 742 bp, Homo sapiens
cgcagtggttgccgggatcgcgctgatgtggccccaaccccgcctccctccccgccccgcgatgtcggaagaaacccgacagagcaaattggccgcagcgaagaaaaagttgagagaatatcagcagaggaatagccctggtgttcctacaggagcgaaaaagaagaagaaaataaaaaatggcagtaaccctgagacaaccacttctggtggttgccactcacctgaggatgtgagtcttggatggccaggctcctggggacagggggcccaaggggcagtagagggtaattgttatgattgtggaagaactgttgggtactgattaagagttctgggtttgtatcctacctgtccatctgctagggatgtgatttagggcaaattgcttgagctttttgggcctctcttttcacaactataaagtattgttttacttacacttgtgaagtttaaatgagatttgttattgttgtttttatgttaatccctagtacagggcctgctgtcctaaacacccaggacacccaggaaatggtagttgctgtttcattttcctcatctccagtctcaaagggaagccaggccaatgagaacagctacttgccatcaggctatccctttaggagtcactgaaagggccccagggtgtggtgaggagagtcccaggtgctaggattaggggaagatctaacttttgagttcatctttgccaccagcttgctgcgtgaccacagaaaaa

SEQ ID NO: 443770 - DNA, 4272 bp, Homo sapiens
cgcagtggttgccgggatcgcgctgatgtggccccaaccccgcctccctccccgccccgcgatgtcggaagaaacccgacagagcaaattggccgcagcgaagaaaaagttgagagaatatcagcagaggaatagccctggtgttcctacaggagcgaaaaagaagaagaaaataaaaaatggcagtaaccctgagacaaccacttctggtggttgccactcacctgaggatacacccaaggacaatgctgctactctacaaccatctgatgacaccgtgttacctggcggtgtcccttcccctggtgccagtctcactagcatggcggcatctcagaatcatgatgctgacaatgtccctaatctcatggatgaaaccaagactttctcatcaaccgagagcctgcgacaactctcccaacagctcaatggtcttgtttgtgagtctgcgacatgtgtcaatggggagggccctgcatcgtctgctaacctgaaggatctggagagccggtaccaacagctagcggtagccctggactccagctatgtaacaaacaaacaactcaatatcacgatagagaaattgaaacaacagaaccaagaaattacggatcagttggaagaagaaaagaaagaatgccaccaaaagcagggagccctaagggagcagttacaggttcacattcagaccatagggatcctcgtatcagagaaagctgagttacagacagccctggctcacactcagcatgctgccaggcagaaagaaggagagtctgaagatctggccagccgcctgcagtattcccggcggcgtgtgggagagttggagcgggctctctctgctgtctccacgcagcagaagaaggcagacaggtacaacaaggagttaaccaaagagagagacgccctcaggctggagttatacaagaacacccaaagcaatgaggacctgaagcaagagaaatcagaattggaagagaagcttcgggtcctagtgactgagaaggctggcatgcagcttaacttggaagaattgcaaaagaagttagagatgacggaactcctgcttcaacagttttcaagccggtgtgaagcccctgatgctaaccagcagttacagcaggccatggaggagcgggcacagctggaagcacacctggggcaggtaatggagtcggttagacaactacaaatggagagagataaatatgcggagaatctcaaaggagagagcgccatgtggcggcagaggatgcagcagatgtcagagcaggtgcacacattgagagaggagaaggaatgtagcatgagtcgggtacaggagctggagacgagcttggctgaactgaggaaccagatggctgaacccccgcccccagagcccccagcagggccctccgaggtggagcagcagctacaagcggaggctgagcacctgcggaaggagctggagggtctggcaggacagcttcaagcccaggtgcaagacaatgagggcttgagtcgcctgaaccgggagcaggaggagaggctgctggagctggagcgggcggccgagctctggggggagcaggcggaggcgcgcaggcaaatcctggagaccatgcagaacgaccgcactaccatcagccgcgcactctcccagaaccgggagctcaaggagcagctggctgagctgcagagcggatttgtaaagctgactaatgagaacatggagatcaccagcgcactgcagtcggagcagcacgtcaagagggagctgggaaagaagctgggcgagctgcaggagaagctgagcgagctgaaggaaacggtggagctgaagagccaagaggctcaaagtctgcagcagcagcgagaccagtacctgggacacctgcagcagtatgtggccgcctatcagcagctgacctctgagaaggaggtgctgcataatcagctactgctgcagacccagctcgtggaccagctgcagcagcaggaagctcagggcaaagcggtggccgagatggcccgccaagagttgcaggaaacccaggagcgcctggaagctgccacccagcagaatcagcagctacgggcccagttgagcctcatggctcaccctggggaaggagatggactggaccgggaggaggaggaggatgaggaggaggaggaggaggaggcggtggcagtacctcagcccatgccaagcatcccggaggacctggagagccgggaagccatggtggcatttttcaactcagctgtagccagtgccgaggaggagcaggcaaggctacgtgggcagctgaaggagcaaagggtgcgctgccggcgcctggctcacctgctggcctcggcccagaaggagcctgaggcagcagccccagccccagggaccgggggtgattctgtgtgtggggagacccaccgggccctgcagggggccatggagaagctgcagagccgctttatggagctcatgcaggagaaggcagacctgaaggagagggtagaggaactggaacatcgctgcatccagctttctggagagacagacaccattggagagtacattgcactgtaccagagccagagggcagtgctgaaggagcggcaccgggagaaggaggagtacatcagcaggctggcccaagacaaggaggagatgaaggtgaagctgctggagctgcaggagctggtcttacggcttgtgggcgaccgcaacgagtggcatggcagattcctggcagctgcccagaaccctgctgatgagcccacttcaggggccccagccccccaggaacttggggctgccaaccagcagggtgatctttgcgaggtgagcctcgccggcagtgtggagcctgcccaaggagaggccagggagggttctccccgtgacaaccccactgcacagcagatcatgcagctgcttcgtgagatgcagaacccccgggagcgcccaggcttgggcagcaacccctgcattccttttttttaccgggctgacgagaatgatgaggtgaagatcactgtcatctaaaagccggctactgtcagcaaagcctgaagaagtggggctggataccctgcccccaccatatccctaccatcccttctcagtcaaccctttacccttacagtagcaagcatagacccctgtctaacgggggtagacaggtgcagatgaggtgaagatcactgtcatctaaaagctggccactaaattaaaaaaaaattaaaagttatgggattaaaaaaagttatgggataaaaaaggttatgggtaacttatggtataaaagttatgaaaaaaggccaggtgcagtggctcacgcctgtaatcccagcacttttgggaggctgaggttgggagttcaagaccagcctggtcaacatggtgaaactgtgtctctactaaaaatacaaaaattagccaggcatggtggcacgtgcctgtaatcccagctactcgggaggctgaggcaggagaatcgcttgaacctgggaggtggaggttgcagtgggctgagatcacgccattgcactccagcctgggcgacagagtgagactctgtctcaaaaaaaaaaaaaattatgaaaaaagttatgggattaaagaaagtcaggataaaaattttaaaaagcaggccactgtcagcaaagcctggagaagtggggccggaggctccgcccccatcatgtgcctgccaccccttcccagtcatccctttactcttacagtagcaaataagacccctgtctaatggggggagacaaatgtgtagacccttagccaccttggccagggctgactccttaaatttctggatgatgatgattgttatttaatagccagaggctcatataattggcctctttggaagaggcctcatggcctccttactctcaccaaagcaatttttccctcaggggggctcccatcttcttacacagagaggcagctgaggcaggacagtggggctaactgtagaccaggcgagggcacgggctgctggggtggccctgcttccccagtgtacatattgtatctgtgtaacattttgtatattccaggggtagggccgccccctgtatcatacctagcagaggttggagctggcacatggggaggaggttctaataattatttggggctgggaaacttatttattgatagcataggacagaggaaggaggcggggatggggtcgtggcgccctggtgatgcgactcctgtttattttgctttttatttcggaataaatggatttagccata

SEQ ID NO: 443771 - DNA, 4272 bp, Homo sapiens
cgcagtggttgccgggatcgcgctgatgtggccccaaccccgcctccctccccgccccgcgatgtcggaagaaacccgacagagcaaattggccgcagcgaagaaaaagttgagagaatatcagcagaggaatagccctggtgttcctacaggagcgaaaaagaagaagaaaataaaaaatggcagtaaccctgagacaaccacttctggtggttgccactcacctgaggatattcaggacattctgaaggtgctggtgtccgaccttaaccgttccaatggggtagcgctccccccattggacaagtggaagacacccaaggacaatgctgctactctacaaccatctgatgacaccgtgttacctggcggtgtcccttcccctggtgccagtctcactagcatggcggcatctcagaatcatgatgctgacaatgtccctaatctcatggatgaaaccaagactttctcatcaaccgagagcctgcgacaactctcccaacagctcaatggtcttgtttgtgagtctgcgacatgtgtcaatggggagggccctgcatcgtctgctaacctgaaggatctggagaaacaacagaaccaagaaattacggatcagttggaagaagaaaagaaagaatgccaccaaaagcagggagccctaagggagcagttacaggttcacattcagaccatagggatcctcgtatcagagaaagctgagttacagacagccctggctcacactcagcatgctgccaggcagaaagaaggagagtctgaagatctggccagccgcctgcagtattcccggcggcgtgtgggagagttggagcgggctctctctgctgtctccacgcagcagaagaaggcagacaggtacaacaaggagttaaccaaagagagagacgccctcaggctggagttatacaagaacacccaaagcaatgaggacctgaagcaagagaaatcagaattggaagagaagcttcgggtcctagtgactgagaaggctggcatgcagcttaacttggaagaattgcaaaagaagttagagatgacggaactcctgcttcaacagttttcaagccggtgtgaagcccctgatgctaaccagcagttacagcaggccatggaggagcgggcacagctggaagcacacctggggcaggtaatggagtcggttagacaactacaaatggagagagataaatatgcggagaatctcaaaggagagagcgccatgtggcggcagaggatgcagcagatgtcagagcaggtgcacacattgagagaggagaaggaatgtagcatgagtcgggtacaggagctggagacgagcttggctgaactgaggaaccagatggctgaacccccgcccccagagcccccagcagggccctccgaggtggagcagcagctacaagcggaggctgagcacctgcggaaggagctggagggtctggcaggacagcttcaagcccaggtgcaagacaatgagggcttgagtcgcctgaaccgggagcaggaggagaggctgctggagctggagcgggcggccgagctctggggggagcaggcggaggcgcgcaggcaaatcctggagaccatgcagaacgaccgcactaccatcagccgcgcactctcccagaaccgggagctcaaggagcagctggctgagctgcagagcggatttgtaaagctgactaatgagaacatggagatcaccagcgcactgcagtcggagcagcacgtcaagagggagctgggaaagaagctgggcgagctgcaggagaagctgagcgagctgaaggaaacggtggagctgaagagccaagaggctcaaagtctgcagcagcagcgagaccagtacctgggacacctgcagcagtatgtggccgcctatcagcagctgacctctgagaaggaggtgctgcataatcagctactgctgcagacccagctcgtggaccagctgcagcagcaggaagctcagggcaaagcggtggccgagatggcccgccaagagttgcaggaaacccaggagcgcctggaagctgccacccagcagaatcagcagctacgggcccagttgagcctcatggctcaccctggggaaggagatggactggaccgggaggaggaggaggatgaggaggaggaggaggaggaggcggtggcagtacctcagcccatgccaagcatcccggaggacctggagagccgggaagccatggtggcatttttcaactcagctgtagccagtgccgaggaggagcaggcaaggctacgtgggcagctgaaggagcaaagggtgcgctgccggcgcctggctcacctgctggcctcggcccagaaggagcctgaggcagcagccccagccccagggaccgggggtgattctgtgtgtggggagacccaccgggccctgcagggggccatggagaagctgcagagccgctttatggagctcatgcaggagaaggcagacctgaaggagagggtagaggaactggaacatcgctgcatccagctttctggagagacagacaccattggagagtacattgcactgtaccagagccagagggcagtgctgaaggagcggcaccgggagaaggaggagtacatcagcaggctggcccaagacaaggaggagatgaaggtgaagctgctggagctgcaggagctggtcttacggcttgtgggcgaccgcaacgagtggcatggcagattcctggcagctgcccagaaccctgctgatgagcccacttcaggggccccagccccccaggaacttggggctgccaaccagcagggtgatctttgcgaggtgagcctcgccggcagtgtggagcctgcccaaggagaggccagggagggttctccccgtgacaaccccactgcacagcagatcatgcagctgcttcgtgagatgcagaacccccgggagcgcccaggcttgggcagcaacccctgcattccttttttttaccgggctgacgagaatgatgaggtgaagatcactgtcatctaaaagccggctactgtcagcaaagcctgaagaagtggggctggataccctgcccccaccatatccctaccatcccttctcagtcaaccctttacccttacagtagcaagcatagacccctgtctaacgggggtagacaggtgcagatgaggtgaagatcactgtcatctaaaagctggccactaaattaaaaaaaaattaaaagttatgggattaaaaaaagttatgggataaaaaaggttatgggtaacttatggtataaaagttatgaaaaaaggccaggtgcagtggctcacgcctgtaatcccagcacttttgggaggctgaggttgggagttcaagaccagcctggtcaacatggtgaaactgtgtctctactaaaaatacaaaaattagccaggcatggtggcacgtgcctgtaatcccagctactcgggaggctgaggcaggagaatcgcttgaacctgggaggtggaggttgcagtgggctgagatcacgccattgcactccagcctgggcgacagagtgagactctgtctcaaaaaaaaaaaaaattatgaaaaaagttatgggattaaagaaagtcaggataaaaattttaaaaagcaggccactgtcagcaaagcctggagaagtggggccggaggctccgcccccatcatgtgcctgccaccccttcccagtcatccctttactcttacagtagcaaataagacccctgtctaatggggggagacaaatgtgtagacccttagccaccttggccagggctgactccttaaatttctggatgatgatgattgttatttaatagccagaggctcatataattggcctctttggaagaggcctcatggcctccttactctcaccaaagcaatttttccctcaggggggctcccatcttcttacacagagaggcagctgaggcaggacagtggggctaactgtagaccaggcgagggcacgggctgctggggtggccctgcttccccagtgtacatattgtatctgtgtaacattttgtatattccaggggtagggccgccccctgtatcatacctagcagaggttggagctggcacatggggaggaggttctaataattatttggggctgggaaacttatttattgatagcataggacagaggaaggaggcggggatggggtcgtggcgccctggtgatgcgactcctgtttattttgctttttatttcggaataaatggatttagccata

SEQ ID NO: 443772 - DNA, 4012 bp, Homo sapiens
atttatataatatataaatccaaaatcttatgataaagatcgtaagggtcagcacacccaaggacaatgctgctactctacaaccatctgatgacaccgtgttacctggcggtgtcccttcccctggtgccagtctcactagcatggcggcatctcagaatcatgatgctgacaatgtccctaatctcatggatgaaaccaagactttctcatcaaccgagagcctgcgacaactctcccaacagctcaatggtcttgtttgtgagtctgcgacatgtgtcaatggggagggccctgcatcgtctgctaacctgaaggatctggagaaacaacagaaccaagaaattacggatcagttggaagaagaaaagaaagaatgccaccaaaagcagggagccctaagggagcagttacaggttcacattcagaccatagggatcctcgtatcagagaaagctgagttacagacagccctggctcacactcagcatgctgccaggcagaaagaaggagagtctgaagatctggccagccgcctgcagtattcccggcggcgtgtgggagagttggagcgggctctctctgctgtctccacgcagcagaagaaggcagacaggtacaacaaggagttaaccaaagagagagacgccctcaggctggagttatacaagaacacccaaagcaatgaggacctgaagcaagagaaatcagaattggaagagaagcttcgggtcctagtgactgagaaggctggcatgcagcttaacttggaagaattgcaaaagaagttagagatgacggaactcctgcttcaacagttttcaagccggtgtgaagcccctgatgctaaccagcagttacagcaggccatggaggagcgggcacagctggaagcacacctggggcaggtaatggagtcggttagacaactacaaatggagagagataaatatgcggagaatctcaaaggagagagcgccatgtggcggcagaggatgcagcagatgtcagagcaggtgcacacattgagagaggagaaggaatgtagcatgagtcgggtacaggagctggagacgagcttggctgaactgaggaaccagatggctgaacccccgcccccagagcccccagcagggccctccgaggtggagcagcagctacaagcggaggctgagcacctgcggaaggagctggagggtctggcaggacagcttcaagcccaggtgcaagacaatgagggcttgagtcgcctgaaccgggagcaggaggagaggctgctggagctggagcgggcggccgagctctggggggagcaggcggaggcgcgcaggcaaatcctggagaccatgcagaacgaccgcactaccatcagccgcgcactctcccagaaccgggagctcaaggagcagctggctgagctgcagagcggatttgtaaagctgactaatgagaacatggagatcaccagcgcactgcagtcggagcagcacgtcaagagggagctgggaaagaagctgggcgagctgcaggagaagctgagcgagctgaaggaaacggtggagctgaagagccaagaggctcaaagtctgcagcagcagcgagaccagtacctgggacacctgcagcagtatgtggccgcctatcagcagctgacctctgagaaggaggtgctgcataatcagctactgctgcagacccagctcgtggaccagctgcagcagcaggaagctcagggcaaagcggtggccgagatggcccgccaagagttgcaggaaacccaggagcgcctggaagctgccacccagcagaatcagcagctacgggcccagttgagcctcatggctcaccctggggaaggagatggactggaccgggaggaggaggaggatgaggaggaggaggaggaggaggcggtggcagtacctcagcccatgccaagcatcccggaggacctggagagccgggaagccatggtggcatttttcaactcagctgtagccagtgccgaggaggagcaggcaaggctacgtgggcagctgaaggagcaaagggtgcgctgccggcgcctggctcacctgctggcctcggcccagaaggagcctgaggcagcagccccagccccagggaccgggggtgattctgtgtgtggggagacccaccgggccctgcagggggccatggagaagctgcagagccgctttatggagctcatgcaggagaaggcagacctgaaggagagggtagaggaactggaacatcgctgcatccagctttctggagagacagacaccattggagagtacattgcactgtaccagagccagagggcagtgctgaaggagcggcaccgggagaaggaggagtacatcagcaggctggcccaagacaaggaggagatgaaggtgaagctgctggagctgcaggagctggtcttacggcttgtgggcgaccgcaacgagtggcatggcagattcctggcagctgcccagaaccctgctgatgagcccacttcaggggccccagccccccaggaacttggggctgccaaccagcagggtgatctttgcgaggtgagcctcgccggcagtgtggagcctgcccaaggagaggccagggagggttctccccgtgacaaccccactgcacagcagatcatgcagctgcttcgtgagatgcagaacccccgggagcgcccaggcttgggcagcaacccctgcattccttttttttaccgggctgacgagaatgatgaggtgaagatcactgtcatctaaaagccggctactgtcagcaaagcctgaagaagtggggctggataccctgcccccaccatatccctaccatcccttctcagtcaaccctttacccttacagtagcaagcatagacccctgtctaacgggggtagacaggtgcagatgaggtgaagatcactgtcatctaaaagctggccactaaattaaaaaaaaattaaaagttatgggattaaaaaaagttatgggataaaaaaggttatgggtaacttatggtataaaagttatgaaaaaaggccaggtgcagtggctcacgcctgtaatcccagcacttttgggaggctgaggttgggagttcaagaccagcctggtcaacatggtgaaactgtgtctctactaaaaatacaaaaattagccaggcatggtggcacgtgcctgtaatcccagctactcgggaggctgaggcaggagaatcgcttgaacctgggaggtggaggttgcagtgggctgagatcacgccattgcactccagcctgggcgacagagtgagactctgtctcaaaaaaaaaaaaaattatgaaaaaagttatgggattaaagaaagtcaggataaaaattttaaaaagcaggccactgtcagcaaagcctggagaagtggggccggaggctccgcccccatcatgtgcctgccaccccttcccagtcatccctttactcttacagtagcaaataagacccctgtctaatggggggagacaaatgtgtagacccttagccaccttggccagggctgactccttaaatttctggatgatgatgattgttatttaatagccagaggctcatataattggcctctttggaagaggcctcatggcctccttactctcaccaaagcaatttttccctcaggggggctcccatcttcttacacagagaggcagctgaggcaggacagtggggctaactgtagaccaggcgagggcacgggctgctggggtggccctgcttccccagtgtacatattgtatctgtgtaacattttgtatattccaggggtagggccgccccctgtatcatacctagcagaggttggagctggcacatggggaggaggttctaataattatttggggctgggaaacttatttattgatagcataggacagaggaaggaggcggggatggggtcgtggcgccctggtgatgcgactcctgtttattttgctttttatttcggaataaatggatttagccata

SEQ ID NO: 443773 - DNA, 4461 bp, Homo sapiens
  misc_feature (4222)..(4222): n is a, c, g, or t
  misc_feature (4224)..(4225): n is a, c, g, or t
cgcagtggttgccgggatcgcgctgatgtggccccaaccccgcctccctccccgccccgcgatgtcggaagaaacccgacagagcaaattggccgcagcgaagaaaaagttgagagaatatcagcagaggaatagccctggtgttcctacaggagcgaaaaagaagaagaaaataaaaaatggcagtaaccctgagacaaccacttctggtggttgccactcacctgaggatacacccaaggacaatgctgctactctacaaccatctgatgacaccgtgttacctggcggtgtcccttcccctggtgccagtctcactagcatggcggcatctcagaatcatgatgctgacaatgtccctaatctcatggatgaaaccaagactttctcatcaaccgagagcctgcgacaactctcccaacagctcaatggtcttgtttgtgagtctgcgacatgtgtcaatggggagggccctgcatcgtctgctaacctgaaggatctggagagccggtaccaacagctagcggtagccctggactccagctatgtaacaaacaaacaactcaatatcacgatagagaaattgaaacaacagaaccaagaaattacggatcagttggaagaagaaaagaaagaatgccaccaaaagcagggagccctaagggagcagttacaggttcacattcagaccatagggatcctcgtatcagagaaagctgagttacagacagccctggctcacactcagcatgctgccaggcagaaagaaggagagtctgaagatctggccagccgcctgcagtattcccggcggcgtgtgggagagttggagcgggctctctctgctgtctccacgcagcagaagaaggcagacaggtacaacaaggagttaaccaaagagagagacgccctcaggctggagttatacaagaacacccaaagcaatgaggacctgaagcaagagaaatcagaattggaagagaagcttcgggtcctagtgactgagaaggctggcatgcagcttaacttggaagaattgcaaaagaagttagagatgacggaactcctgcttcaacagttttcaagccggtgtgaagcccctgatgctaaccagcagttacagcaggccatggaggagcgggcacagctggaagcacacctggggcaggtaatggagtcggttagacaactacaaatggagagagataaatatgcggagaatctcaaaggagagagcgccatgtggcggcagaggatgcagcagatgtcagagcaggtgcacacattgagagaggagaaggaatgtagcatgagtcgggtacaggagctggagacgagcttggctgaactgaggaaccagatggctgaacccccgcccccagagcccccagcagggccctccgaggtggagcagcagctacaagcggaggctgagcacctgcggaaggagctggagggtctggcaggacagcttcaagcccaggtgcaagacaatgagggcttgagtcgcctgaaccgggagcaggaggagaggctgctggagctggagcgggcggccgagctctggggggagcaggcggaggcgcgcaggcaaatcctggagaccatgcagaacgaccgcactaccatcagccgcgcactctcccagaaccgggagctcaaggagcagctggctgagctgcagagcggatttgtaaagctgactaatgagaacatggagatcaccagcgcactgcagtcggagcagcacgtcaagagggagctgggaaagaagctgggcgagctgcaggagaagctgagcgagctgaaggaaacggtggagctgaagagccaagaggctcaaagtctgcagcagcagcgagaccagtacctgggacacctgcagcagtatgtggccgcctatcagcagctgacctctgagaaggaggtgctgcataatcagctactgctgcagacccagctcgtggaccagctgcagcagcaggaagctcagggcaaagcggtggccgagatggcccgccaagagttgcaggaaacccaggagcgcctggaagctgccacccagcagaatcagcagctacgggcccagttgagcctcatggctcaccctggggaaggagatggactggaccgggaggaggaggaggatgaggaggaggaggaggaggaggcggtggcagtacctcagcccatgccaagcatcccggaggacctggagagccgggaagccatggtggcatttttcaactcagctgtagccagtgccgaggaggagcaggcaaggctacgtgggcagctgaaggagcaaagggtgcgctgccggcgcctggctcacctgctggcctcggcccagaaggagcctgaggcagcagccccagccccagggaccgggggtgattctgtgtgtggggagacccaccgggccctgcagggggccatggagaagctgcagagccgctttatggagctcatgcaggagaaggcagacctgaaggagagggtagaggaactggaacatcgctgcatccagctttctggagagacagacaccattggagagtacattgcactgtaccagagccagagggcagtgctgaaggagcggcaccgggagaaggaggagtacatcagcaggctggcccaagacaaggaggagatgaaggtgaagctgctggagctgcaggagctggtcttacggcttgtgggcgaccgcaacgagtggcatggcagattcctggcagctgcccagaaccctgctgatgagcccacttcaggggccccagccccccaggaacttggggctgccaaccagcagggtgatctttgcgaggtgagcctcgccggcagtgtggagcctgcccaaggagaggccagggagggttctccccgtgacaaccccactgcacagcagatcatgcagctgcttcgtgagatgcagaacccccgggagcgcccaggcttgggcagcaacccctgcattccttttttttaccgggctgacgagaatgatgaggtgaagatcactgtcatctaaaagccggctactgtcagcaaagcctgaagaagtggggctggataccctgcccccaccatatccctaccatcccttctcagtcaaccctttacccttacagtagcaagcatagacccctgtctaacgggggtagacaggtgcagatgaggtgaagatcactgtcatctaaaagctggccactaaattaaaaaaaaattaaaagttatgggattaaaaaaagttatgggataaaaaaggttatgggtaacttatggtataaaagttatgaaaaaaggccaggtgcagtggctcacgcctgtaatcccagcacttttgggaggctgaggttgggagttcaagaccagcctggtcaacatggtgaaactgtgtctctactaaaaatacaaaaattagccaggcatggtggcacgtgcctgtaatcccagctactcgggaggctgaggcaggagaatcgcttgaacctgggaggtggaggttgcagtgggctgagatcacgccattgcactccagcctgggcgacagagtgagactctgtctcaaaaaaaaaaaaaattatgaaaaaagttatgggattaaagaaagtcaggataaaaattttaaaaagcaggccactgtcagcaaagcctggagaagtggggccggaggctccgcccccatcatgtgcctgccaccccttcccagtcatccctttactcttacagtagcaaataagacccctgtctaatggggggagacaaatgtgtagacccttagccaccttggccagggctgactccttaaatttctggatgatgatgattgttatttaatagccagaggctcatataattggcctctttggaagaggcctcatggcctccttactctcaccaaagcaatttttccctcaggggggctcccatcttcttacacagagaggcagctgaggcaggacagtggggctaactgtagaccaggcgagggcacgggctgctggggtggccctgcttccccagtgtacatattgtatctgtgtaacattttgtatattccaggggtagggccgccccctgtatcatacctagcagaggttggagctggcacatggggaggaggttctaataattatttggggctgggaaacttatttattgatagcataggacagaggaaggagtggaattccgaataaattggcattaccactanannaaataataataacaaataataaaaaacttcaaggggggccccgtccccaatctgcctatattgagtcgattacaatcacttgccgcgcttacacctcttactggaaaccctgcgttcccactaaaccctttcaccaatcccctgtgcaacttcctaatacgaaaagccgctcccaacccctccaaaaattgccacctcatggcaatgcactttaaccgaaattttgtaaaatccgt

SEQ ID NO: 443774 - DNA, 4252 bp, Homo sapiens
cgcagtggttgccgggatcgcgctgatgtggccccaaccccgcctccctccccgccccgcgatgtcggaagaaacccgacagagcaaattggccgcagcgaagaaaaagttgagagaatatcagcagaggaatagccctggtgttcctacaggagcgaaaaagaagaagaaaataaaaaatggcagtaaccctgagacaaccacttctggtggttgccactcacctgaggatacacccaaggacaatgctgctactctacaaccatctgatgacaccgtgttacctggcggtgtcccttcccctggtgccagtctcactagcatggcggcatctcagaatcatgatgctgacaatgtccctaatctcatggatgaaaccaagactttctcatcaaccgagagcctgcgacaactctcccaacagctcaatggtcttgtttgtgagtctgcgacatgtgtcaatggggagggccctgcatcgtctgctaacctgaaggatctggagagccggtaccaacagctagcggtagccctggactccagctatgtaacaaacaaacaactcaatatcacgatagagaaattgaaacaacagaaccaagaaattacggatcagttggaagaagaaaagaaagaatgccaccaaaagcagggagccctaagggagcagttacaggttcacattcagaccatagggatcctcgtatcagagaaagctgagttacagacagccctggctcacactcagcatgctgccaggcagaaagaaggagagtctgaagatctggccagccgcctgcagtattcccggcggcgtgtgggagagttggagcgggctctctctgctgtctccacgcagcagaagaaggcagacaggtacaacaaggagttaaccaaagagagagacgccctcaggctggagttatacaagaacacccaaagcaatgaggacctgaagcaagagaaatcagaattggaagagaagcttcgggtcctagtgactgagaaggctggcatgcagcttaacttggaagaattgcaaaagaagttagagatgacggaactcctgcttcaacagttttcaagccggtgtgaagcccctgatgctaaccagcagttacagcaggccatggaggagcgggcacagctggaagcacacctggggcaggtaatggagtcggttagacaactacaaatggagagagataaatatgcggagaatctcaaaggagagagcgccatgtggcggcagaggatgcagcagatgtcagagcaggtgcacacattgagagaggagaaggaatgtagcatgagtcgggtacaggagctggagacgagcttggctgaactgaggaaccagatggctgaacccccgcccccagagcccccagcagggccctccgaggtggagcagcagctacaagcggaggctgagcacctgcggaaggagctggagggtctggcaggacagcttcaagcccaggtgcaagacaatgagggcttgagtcgcctgaaccgggagcaggaggagaggctgctggagctggagcgggcggccgagctctggggggagcaggcggaggcgcgcaggcaaatcctggagaccatgcagaacgaccgcactaccatcagccgcgcactctcccagaaccgggagctcaaggagcagctggctgagctgcagagcggatttgtaaagctgactaatgagaacatggagatcaccagcgcactgcagtcggagcagcacgtcaagagggagctgggaaagaagctgggcgagctgcaggagaagctgagcgagctgaaggaaacggtggagctgaagagccaagaggctcaaagtctgcagcagcagcgagaccagtacctgggacacctgcagcagtatgtggccgcctatcagcagctgacctctgagaaggaggtgctgcataatcagctactgctgcagacccagctcgtggaccagctgcagcagcaggaagctcagggcaaagcggtggccgagatggcccgccaagagttgcaggaaacccaggagcgcctggaagctgccacccagcagaatcagcagctacgggcccagttgagcctcatggctcaccctggggaaggagatggactggaccgggaggaggaggaggatgaggaggaggaggaggaggaggcggtggcagtacctcagcccatgccaagcatcccggaggacctggagagccgggaagccatggtggcatttttcaactcagctgtagccagtgccgaggaggagcaggcaaggctacgtgggcagctgaaggagcaaagggtgcgctgccggcgcctggctcacctgctggcctcggcccagaaggagcctgaggcagcagccccagccccagggaccgggggtgattctgtgtgtggggagacccaccgggccctgcagggggccatggagaagctgcagagccgctttatggagctcatgcaggagaaggcagacctgaaggagagggtagaggaactggaacatcgctgcatccagctttctggagagacagacaccattggagagtacattgcactgtaccagagccagagggcagtgctgaaggagcggcaccgggagaaggaggagtacatcagcaggctggcccaagacaaggaggagatgaaggtgaagctgctggagctgcaggagctggtcttacggcttgtgggcgaccgcaacgagtggcatggcagattcctggcagctgcccagaaccctgctgatgagcccacttcaggggccccagccccccaggaacttggggctgccaaccagcagggtgatctttgcgaggtgagcctcgccggcagtgtggagcctgcccaaggagaggccagggagggttctccccgtgacaaccccactgcacagcagatcatgcagctgcttcgtgagatgcagaacccccgggagcgcccaggcttgggcagcaacccctgcattccttttttttaccgggctgacgagaatgatgaggtgaagatcactgtcatctaaaagccggctactgtcagcaaagcctgaagaagtggggctggataccctgcccccaccatatccctaccatcccttctcagtcaaccctttacccttacagtagcaagcatagacccctgtctaacgggggtagacaggtgcagatgaggtgaagatcactgtcatctaaaagctggccactaaattaaaaaaaaattaaaagttatgggattaaaaaaagttatgggataaaaaaggttatgggtaacttatggtataaaagttatgaaaaaaggccaggtgcagtggctcacgcctgtaatcccagcacttttgggaggctgaggttgggagttcaagaccagcctggtcaacatggtgaaactgtgtctctactaaaaatacaaaaattagccaggcatggtggcacgtgcctgtaatcccagctactcgggaggctgaggcaggagaatcgcttgaacctgggaggtggaggttgcagtgggctgagatcacgccattgcactccagcctgggcgacagagtgagactctgtctcaaaaaaaaaaaaaattatgaaaaaagttatgggattaaagaaagtcaggataaaaattttaaaaagcaggccactgtcagcaaagcctggagaagtggggccggaggctccgcccccatcatgtgcctgccaccccttcccagtcatccctttactcttacagtagcaaataagacccctgtctaatggggggagacaaatgtgtagacccttagccaccttggccagggctgactccttaaatttctggatgatgatgattgttatttaatagccagaggctcatataattggcctctttggaagaggcctcatggcctccttactctcaccaaagcaatttttccctcaggggggctcccatcttcttacacagagaggcagctgaggcaggacagtggggctaactgtagaccaggcgagggcacgggctgctggggtggccctgcttccccagtgtacatattgtatctgtgtaacattttgtatattccaggggtagggccgccccctgtatcatacctagcagaggttggagctggcacatggggaggaggttctaataattatttggggctgggaaacttatttattgatagcataggacagaggaaggagtcgcatcaccagcgcgccacgaccccatccccgcctccttcgtcgacgcggccgcgaattta

SEQ ID NO: 443775 - DNA, 3950 bp, Homo sapiens
cgcagtggttgccgggatcgcgctgatgtggccccaaccccgcctccctccccgccccgcgatgtcggaagaaacccgacagagcaaattggccgcagcgaagaaaaagttgagagaatatcagcagaggaatagccctggtgttcctacaggagcgaaaaagaagaagaaaataaaaaatggcagtaaccctgagacaaccacttctggtggttgccactcacctgaggatacacccaaggacaatgctgctactctacaaccatctgatgacaccgtgttacctggcggtgtcccttcccctggtgccagtctcactagcatggcggcatctcagaatcatgatgctgacaatgtccctaatctcatggatgaaaccaagactttctcatcaaccgagagcctgcgacaactctcccaacagctcaatggtcttgtttgtgagtctgcgacatgtgtcaatggggagggccctgcatcgtctgctaacctgaaggatctggagagccggtaccaacagctagcggtagccctggactccagctatgtaacaaacaaacaactcaatatcacgatagagaaattgaaacaacagaaccaagaaattacggatcagttggaagaagaaaagaaagaatgccaccaaaagcagggagccctaagggagcagttacaggttcacattcagaccatagggatcctcgtatcagagaaagctgagttacagacagccctggctcacactcagcatgctgccaggcagaaagaaggagagtctgaagatctggccagccgcctgcagtattcccggcggcgtgtgggagagttggagcgggctctctctgctgtctccacgcagcagaagaaggcagacaggtacaacaaggagttaaccaaagagagagacgccctcaggctggagttatacaagaacacccaaagcaatgaggacctgaagcaagagaaatcagaattggaagagaagcttcgggtcctagtgactgagaaggctggcatgcagcttaacttggaagaattgcaaaagaagttagagatgacggaactcctgcttcaacagttttcaagccggtgtgaagcccctgatgctaaccagcagttacagcaggccatggaggagcgggcacagctggaagcacacctggggcaggtaatggagtcggttagacaactacaaatggagagagataaatatgcggagaatctcaaaggagagagcgccatgtggcggcagaggatgcagcagatgtcagagcaggtgcacacattgagagaggagaaggaatgtagcatgagtcgggtacaggagctggagacgagcttggctgaactgaggaaccagatggctgaacccccgcccccagagcccccagcagggccctccgaggtggagcagcagctacaagcggaggctgagcacctgcggaaggagctggagggtctggcaggacagcttcaagcccaggtgcaagacaatgagggcttgagtcgcctgaaccgggagcaggaggagaggctgctggagctggagcgggcggccgagctctggggggagcaggcggaggcgcgcaggcaaatcctggagaccatgcagaacgaccgcactaccatcagccgcgcactctcccagaaccgggagctcaaggagcagctggctgagctgcagagcggatttgtaaagctgactaatgagaacatggagatcaccagcgcactgcagtcggagcagcacgtcaagagggagctgggaaagaagctgggcgagctgcaggagaagctgagcgagctgaaggaaacggtggagctgaagagccaagaggctcaaagtctgcagcagcagcgagaccagtacctgggacacctgcagcagtatgtggccgcctatcagcagctgacctctgagaaggaggtgctgcataatcagctactgctgcagacccagctcgtggaccagctgcagcagcaggaagctcagggcaaagcggtggccgagatggcccgccaagagttgcaggaaacccaggagcgcctggaagctgccacccagcagaatcagcagctacgggcccagttgagcctcatggctcaccctggggaaggagatggactggaccgggaggaggaggaggatgaggaggaggaggaggaggaggcggtggcagtacctcagcccatgccaagcatcccggaggacctggagagccgggaagccatggtggcatttttcaactcagctgtagccagtgccgaggaggagcaggcaaggctacgtgggcagctgaaggagcaaagggtgcgctgccggcgcctggctcacctgctggcctcggcccagaaggagcctgaggcagcagccccagccccagggaccgggggtgattctgtgtgtggggagacccaccgggccctgcagggggccatggagaagctgcagagccgctttatggagctcatgcaggagaaggcagacctgaaggagagggtagaggaactggaacatcgctgcatccagctttctggagagacagacaccattggagagtacattgcactgtaccagagccagagggcagtgctgaaggagcggcaccgggagaaggaggagtacatcagcaggctggcccaagacaaggaggagatgaaggtgaagctgctggagctgcaggagctggtcttacggcttgtgggcgaccgcaacgagtggcatggcagattcctggcagctgcccagaaccctgctgatgagcccacttcaggggccccagccccccaggaacttggggctgccaaccagcagggtgatctttgcgaggtgagcctcgccggcagtgtggagcctgcccaaggagaggccagggagggttctccccgtgacaaccccactgcacagcagatcatgcagctgcttcgtgagatgcagaacccccgggagcgcccaggcttgggcagcaacccctgcattccttttttttaccgggctgacgagaatgatgaggtgaagatcactgtcatctaaaagccggctactgtcagcaaagcctggtcaacatggtgaaactgtgtctctactaaaaatacaaaaattagccaggcatggtggcacgtgcctgtaatcccagctactcgggaggctgaggcaggagaatcgcttgaacctgggaggtggaggttgcagtgggctgagatcacgccattgcactccagcctgggcgacagagtgagactctgtctcaaaaaaaaaaaaaattatgaaaaaagttatgggattaaagaaagtcaggataaaaattttaaaaagcaggccactgtcagcaaagcctggagaagtggggccggaggctccgcccccatcatgtgcctgccaccccttcccagtcatccctttactcttacagtagcaaataagacccctgtctaatggggggagacaaatgtgtagacccttagccaccttggccagggctgactccttaaatttctggatgatgatgattgttatttaatagccagaggctcatataattggcctctttggaagaggcctcatggcctccttactctcaccaaagcaatttttccctcaggggggctcccatcttcttacacagagaggcagctgaggcaggacagtggggctaactgtagaccaggcgagggcacgggctgctggggtggccctgcttccccagtgtacatattgtatctgtgtaacattttgtatattccaggggtagggccgccccctgtatcatacctagcagaggttggagctggcacatggggaggaggttctaataattatttggggctgggaaacttatttattgatagcataggacagaggaaggaggcggggatggggtcgtggcgccctggtgatgcgactcctgtttattttgctttttatttcggaataaatggatttagccata

SEQ ID NO: 443776 - DNA, 4639 bp, Homo sapiens
cgcagtggttgccgggatcgcgctgatgtggccccaaccccgcctccctccccgccccgcgatgtcggaagaaacccgacagagcaaattggccgcagcgaagaaaaagttgagagaatatcagcagaggaatagccctggtgttcctacaggagcgaaaaagaagaagaaaataaaaaatggcagtaaccctgagacaaccacttctggtggttgccactcacctgaggatattcaggacattctgaaggtgctggtgtccgaccttaaccgttccaatggggtagcgctccccccattggacaagtggaagacacccaaggacaatgctgctactctacaaccatctgatgacaccgtgttacctggcggtgtcccttcccctggtgccagtctcactagcatggcggcatctcagaatcatgatgctgacaatgtccctaatctcatggatgaaaccaagactttctcatcaaccgagagcctgcgacaactctcccaacagctcaatggtcttgtttgtgagtctgcgacatgtgtcaatggggagggccctgcatcgtctgctaacctgaaggatctggagagccggtaccaacagctagcggtagccctggactccagctatgtaacaaacaaacaactcaatatcacgatagagaaattgaaacaacagaaccaagaaattacggatcagttggaagaagaaaagaaagaatgccaccaaaagcagggagccctaagggagcagttacaggttcacattcagaccatagggatcctcgtatcagagaaagctgagttacagacagccctggctcacactcagcatgctgccaggcagaaagaaggagagtctgaagatctggccagccgcctgcagtattcccggcggcgtgtgggagagttggagcgggctctctctgctgtctccacgcagcagaagaaggcagacaggtacaacaaggagttaaccaaagagagagacgccctcaggctggagttatacaagaacacccaaagcaatgaggacctgaagcaagagaaatcagaattggaagagaagcttcgggtcctagtgactgagaaggctggcatgcagcttaacttggaagaattgcaaaagaagttagagatgacggaactcctgcttcaacagttttcaagccggtgtgaagcccctgatgctaaccagcagttacagcaggccatggaggagcgggcacagctggaagcacacctggggcaggtaatggagtcggttagacaactacaaatggagagagataaatatgcggagaatctcaaaggagagagcgccatgtggcggcagaggatgcagcagatgtcagagcaggtgcacacattgagagaggagaaggaatgtagcatgagtcgggtacaggagctggagacgagcttggctgaactgaggaaccagatgggtaagctggggctggggtgacctgggagcaggaatggtgtcagagggttgtgggggtggtttagaatgccccagggagttgggtggatggaatggctttgaggcagagggaaagaggtctgtgccaggagatggcaagtctcgtcatctccatgagcctcagtgccccatcagcaaagacgaaggagtgcccgttgtcagccacccacagttgtcgctatcggaaagtggtttggaagattggctaacatccgggtgcgaggaatcatcagcagggaggccaagtttggggagcttgagaggagagcccccagcagggccctccgaggtggagcagcagctacaagcggaggctgagcacctgcggaaggagctggagggtctggcaggacagcttcaagcccaggtgcaagacaatgagggcttgagtcgcctgaaccgggagcaggaggagaggctgctggagctggagcgggcggccgagctctggggggagcaggcggaggcgcgcaggcaaatcctggagaccatgcagaacgaccgcactaccatcagccgcgcactctcccagaaccgggagctcaaggagcagctggctgagctgcagagcggatttgtaaagctgactaatgagaacatggagatcaccagcgcactgcagtcggagcagcacgtcaagagggagctgggaaagaagctgggcgagctgcaggagaagctgagcgagctgaaggaaacggtggagctgaagagccaagaggctcaaagtctgcagcagcagcgagaccagtacctgggacacctgcagcagtatgtggccgcctatcagcagctgacctctgagaaggaggtgctgcataatcagctactgctgcagacccagctcgtggaccagctgcagcagcaggaagctcagggcaaagcggtggccgagatggcccgccaagagttgcaggaaacccaggagcgcctggaagctgccacccagcagaatcagcagctacgggcccagttgagcctcatggctcaccctggggaaggagatggactggaccgggaggaggaggaggatgaggaggaggaggaggaggaggcggtggcagtacctcagcccatgccaagcatcccggaggacctggagagccgggaagccatggtggcatttttcaactcagctgtagccagtgccgaggaggagcaggcaaggctacgtgggcagctgaaggagcaaagggtgcgctgccggcgcctggctcacctgctggcctcggcccagaaggagcctgaggcagcagccccagccccagggaccgggggtgattctgtgtgtggggagacccaccgggccctgcagggggccatggagaagctgcagagccgctttatggagctcatgcaggagaaggcagacctgaaggagagggtagaggaactggaacatcgctgcatccagctttctggagagacagacaccattggagagtacattgcactgtaccagagccagagggcagtgctgaaggagcggcaccgggagaaggaggagtacatcagcaggctggcccaagacaaggaggagatgaaggtgaagctgctggagctgcaggagctggtcttacggcttgtgggcgaccgcaacgagtggcatggcagattcctggcagctgcccagaaccctgctgatgagcccacttcaggggccccagccccccaggaacttggggctgccaaccagcagggtgatctttgcgaggtgagcctcgccggcagtgtggagcctgcccaaggagaggccagggagggttctccccgtgacaaccccactgcacagcagatcatgcagctgcttcgtgagatgcagaacccccgggagcgcccaggcttgggcagcaacccctgcattccttttttttaccgggctgacgagaatgatgaggtgaagatcactgtcatctaaaagccggctactgtcagcaaagcctgaagaagtggggctggataccctgcccccaccatatccctaccatcccttctcagtcaaccctttacccttacagtagcaagcatagacccctgtctaacgggggtagacaggtgcagatgaggtgaagatcactgtcatctaaaagctggccactaaattaaaaaaaaattaaaagttatgggattaaaaaaagttatgggataaaaaaggttatgggtaacttatggtataaaagttatgaaaaaaggccaggtgcagtggctcacgcctgtaatcccagcacttttgggaggctgaggttgggagttcaagaccagcctggtcaacatggtgaaactgtgtctctactaaaaatacaaaaattagccaggcatggtggcacgtgcctgtaatcccagctactcgggaggctgaggcaggagaatcgcttgaacctgggaggtggaggttgcagtgggctgagatcacgccattgcactccagcctgggcgacagagtgagactctgtctcaaaaaaaaaaaaaattatgaaaaaagttatgggattaaagaaagtcaggataaaaattttaaaaagcaggccactgtcagcaaagcctggagaagtggggccggaggctccgcccccatcatgtgcctgccaccccttcccagtcatccctttactcttacagtagcaaataagacccctgtctaatggggggagacaaatgtgtagacccttagccaccttggccagggctgactccttaaatttctggatgatgatgattgttatttaatagccagaggctcatataattggcctctttggaagaggcctcatggcctccttactctcaccaaagcaatttttccctcaggggggctcccatcttcttacacagagaggcagctgaggcaggacagtggggctaactgtagaccaggcgagggcacgggctgctggggtggccctgcttccccagtgtacatattgtatctgtgtaacattttgtatattccaggggtagggccgccccctgtatcatacctagcagaggttggagctggcacatggggaggaggttctaataattatttggggctgggaaacttatttattgatagcataggacagaggaaggaggcggggatggggtcgtggcgccctggtgatgcgactcctgtttattttgctttttatttcggaataaatggatttagccata

SEQ ID NO: 443777 - DNA, 3782 bp, Homo sapiens
ccacctcagcctcccaaagtgttgagattacaggcatcagccaccatgcctggcctgagatctttttaaaattattttttatttctaaagcaaagaaacttgacagcagagttgtattgactgagttgcacattgagcctagccctagcccttttaaggggcactatttggaacggcctgggctccccagatctaaacttctcgctcttcaccatccagttttcaagccggtgtgaagcccctgatgctaaccagcagttacagcaggccatggaggagcgggcacagctggaagcacacctggggcaggtaatggagtcggttagacaactacaaatggagagagataaatatgcggagaatctcaaaggagagagcgccatgtggcggcagaggatgcagcagatgtcagagcaggtgcacacattgagagaggagaaggaatgtagcatgagtcgggtacaggagctggagacgagcttggctgaactgaggaaccagatgggtaagctggggctggggtgacctgggagcaggaatggtgtcagagggttgtgggggtggtttagaatgccccagggagttgggtggatggaatggctttgaggcagagggaaagaggtctgtgccaggagatggcaagtctcgtcatctccatgagcctcagtgccccatcagcaaagacgaaggagtgcccgttgtcagccacccacagttgtcgctatcggaaagtggtttggaagattggctaacatccgggtgcgaggaatcatcagcagggaggccaagtttggggagcttgagaggaggtatggaccaagaggagggtttttttgagaatccagaggcttttattgtctgcgtcctttctcagctgaacccccgcccccagagcccccagcagggccctccgaggtggagcagcagctacaagcggaggctgagcacctgcggaaggagctggagggtctggcaggacagcttcaagcccaggtgcaagacaatgagggcttgagtcgcctgaaccgggagcaggaggagaggctgctggagctggagcgggcggccgagctctggggggagcaggcggaggcgcgcaggcaaatcctggagaccatgcagaacgaccgcactaccatcagccgcgcactctcccagaaccgggagctcaaggagcagctggctgagctgcagagcggatttgtaaagctgactaatgagaacatggagatcaccagcgcactgcagtcggagcagcacgtcaagagggagctgggaaagaagctgggcgagctgcaggagaagctgagcgagctgaaggaaacggtggagctgaagagccaagaggctcaaagtctgcagcagcagcgagaccagtacctgggacacctgcagcagtatgtggccgcctatcagcagctgacctctgagaaggaggtgctgcataatcagctactgctgcagacccagctcgtggaccagctgcagcagcaggaagctcagggcaaagcggtggccgagatggcccgccaagagttgcaggaaacccaggagcgcctggaagctgccacccagcagaatcagcagctacgggcccagttgagcctcatggctcaccctggggaaggagatggactggaccgggaggaggaggaggatgaggaggaggaggaggaggaggcggtggcagtacctcagcccatgccaagcatcccggaggacctggagagccgggaagccatggtggcatttttcaactcagctgtagccagtgccgaggaggagcaggcaaggctacgtgggcagctgaaggagcaaagggtgcgctgccggcgcctggctcacctgctggcctcggcccagaaggagcctgaggcagcagccccagccccagggaccgggggtgattctgtgtgtggggagacccaccgggccctgcagggggccatggagaagctgcagagccgctttatggagctcatgcaggagaaggcagacctgaaggagagggtagaggaactggaacatcgctgcatccagctttctggagagacagacaccattggagagtacattgcactgtaccagagccagagggcagtgctgaaggagcggcaccgggagaaggaggagtacatcagcaggctggcccaagacaaggaggagatgaaggtgaagctgctggagctgcaggagctggtcttacggcttgtgggcgaccgcaacgagtggcatggcagattcctggcagctgcccagaaccctgctgatgagcccacttcaggggccccagccccccaggaacttggggctgccaaccagcagggtgatctttgcgaggtgagcctcgccggcagtgtggagcctgcccaaggagaggccagggagggttctccccgtgacaaccccactgcacagcagatcatgcagctgcttcgtgagatgcagaacccccgggagcgcccaggcttgggcagcaacccctgcattccttttttttaccgggctgacgagaatgatgaggtgaagatcactgtcatctaaaagccggctactgtcagcaaagcctgaagaagtggggctggataccctgcccccaccatatccctaccatcccttctcagtcaaccctttacccttacagtagcaagcatagacccctgtctaacgggggtagacaggtgcagatgaggtgaagatcactgtcatctaaaagctggccactaaattaaaaaaaaattaaaagttatgggattaaaaaaagttatgggataaaaaaggttatgggtaacttatggtataaaagttatgaaaaaaggccaggtgcagtggctcacgcctgtaatcccagcacttttgggaggctgaggttgggagttcaagaccagcctggtcaacatggtgaaactgtgtctctactaaaaatacaaaaattagccaggcatggtggcacgtgcctgtaatcccagctactcgggaggctgaggcaggagaatcgcttgaacctgggaggtggaggttgcagtgggctgagatcacgccattgcactccagcctgggcgacagagtgagactctgtctcaaaaaaaaaaaaaattatgaaaaaagttatgggattaaagaaagtcaggataaaaattttaaaaagcaggccactgtcagcaaagcctggagaagtggggccggaggctccgcccccatcatgtgcctgccaccccttcccagtcatccctttactcttacagtagcaaataagacccctgtctaatggggggagacaaatgtgtagacccttagccaccttggccagggctgactccttaaatttctggatgatgatgattgttatttaatagccagaggctcatataattggcctctttggaagaggcctcatggcctccttactctcaccaaagcaatttttccctcaggggggctcccatcttcttacacagagaggcagctgaggcaggacagtggggctaactgtagaccaggcgagggcacgggctgctggggtggccctgcttccccagtgtacatattgtatctgtgtaacattttgtatattccaggggtagggccgccccctgtatcatacctagcagaggttggagctggcacatggggaggaggttctaataattatttggggctgggaaacttatttattgatagcataggacagaggaaggaggcggggatggggtcgtggcgccctggtgatgcgactcctgtttattttgctttttatttcggaataaatggatttagccata

SEQ ID NO: 443778 - DNA, 3343 bp, Homo sapiens
atttatataatatataaatccaaaatcttatgataaagatcgtaagggtcagcacacccaaggacaatgctgctactctacaaccatctgatgacaccgtgttacctggcggtgtcccttcccctggtgccagtctcactagcatggcggcatctcagaatcatgatgctgacaatgtccctaatctcatggatgaaaccaagactttctcatcaaccgagagcctgcgacaactctcccaacagctcaatggtcttgtttgtgagtctgcgacatgtgtcaatggggagggccctgcatcgtctgctaacctgaaggatctggagaaacaacagaaccaagaaattacggatcagttggaagaagaaaagaaagaatgccaccaaaagcagggagccctaagggagcagttacaggttcacattcagaccatagggatcctcgtatcagagaaagctgagttacagacagccctggctcacactcagcatgctgccaggcagaaagaaggagagtctgaagatctggccagccgcctgcagtattcccggcggcgtgtgggagagttggagcgggctctctctgctgtctccacgcagcagaagaaggcagacaggtacaacaaggagttaaccaaagaggagcaggcggaggcgcgcaggcaaatcctggagaccatgcagaacgaccgcactaccatcagccgcgcactctcccagaaccgggagctcaaggagcagctggctgagctgcagagcggatttgtaaagctgactaatgagaacatggagatcaccagcgcactgcagtcggagcagcacgtcaagagggagctgggaaagaagctgggcgagctgcaggagaagctgagcgagctgaaggaaacggtggagctgaagagccaagaggctcaaagtctgcagcagcagcgagaccagtacctgggacacctgcagcagtatgtggccgcctatcagcagctgacctctgagaaggaggtgctgcataatcagctactgctgcagacccagctcgtggaccagctgcagcagcaggaagctcagggcaaagcggtggccgagatggcccgccaagagttgcaggaaacccaggagcgcctggaagctgccacccagcagaatcagcagctacgggcccagttgagcctcatggctcaccctggggaaggagatggactggaccgggaggaggaggaggatgaggaggaggaggaggaggaggcggtggcagtacctcagcccatgccaagcatcccggaggacctggagagccgggaagccatggtggcatttttcaactcagctgtagccagtgccgaggaggagcaggcaaggctacgtgggcagctgaaggagcaaagggtgcgctgccggcgcctggctcacctgctggcctcggcccagaaggagcctgaggcagcagccccagccccagggaccgggggtgattctgtgtgtggggagacccaccgggccctgcagggggccatggagaagctgcagagccgctttatggagctcatgcaggagaaggcagacctgaaggagagggtagaggaactggaacatcgctgcatccagctttctggagagacagacaccattggagagtacattgcactgtaccagagccagagggcagtgctgaaggagcggcaccgggagaaggaggagtacatcagcaggctggcccaagacaaggaggagatgaaggtgaagctgctggagctgcaggagctggtcttacggcttgtgggcgaccgcaacgagtggcatggcagattcctggcagctgcccagaaccctgctgatgagcccacttcaggggccccagccccccaggaacttggggctgccaaccagcagggtgatctttgcgaggtgagcctcgccggcagtgtggagcctgcccaaggagaggccagggagggttctccccgtgacaaccccactgcacagcagatcatgcagctgcttcgtgagatgcagaacccccgggagcgcccaggcttgggcagcaacccctgcattccttttttttaccgggctgacgagaatgatgaggtgaagatcactgtcatctaaaagccggctactgtcagcaaagcctgaagaagtggggctggataccctgcccccaccatatccctaccatcccttctcagtcaaccctttacccttacagtagcaagcatagacccctgtctaacgggggtagacaggtgcagatgaggtgaagatcactgtcatctaaaagctggccactaaattaaaaaaaaattaaaagttatgggattaaaaaaagttatgggataaaaaaggttatgggtaacttatggtataaaagttatgaaaaaaggccaggtgcagtggctcacgcctgtaatcccagcacttttgggaggctgaggttgggagttcaagaccagcctggtcaacatggtgaaactgtgtctctactaaaaatacaaaaattagccaggcatggtggcacgtgcctgtaatcccagctactcgggaggctgaggcaggagaatcgcttgaacctgggaggtggaggttgcagtgggctgagatcacgccattgcactccagcctgggcgacagagtgagactctgtctcaaaaaaaaaaaaaattatgaaaaaagttatgggattaaagaaagtcaggataaaaattttaaaaagcaggccactgtcagcaaagcctggagaagtggggccggaggctccgcccccatcatgtgcctgccaccccttcccagtcatccctttactcttacagtagcaaataagacccctgtctaatggggggagacaaatgtgtagacccttagccaccttggccagggctgactccttaaatttctggatgatgatgattgttatttaatagccagaggctcatataattggcctctttggaagaggcctcatggcctccttactctcaccaaagcaatttttccctcaggggggctcccatcttcttacacagagaggcagctgaggcaggacagtggggctaactgtagaccaggcgagggcacgggctgctggggtggccctgcttccccagtgtacatattgtatctgtgtaacattttgtatattccaggggtagggccgccccctgtatcatacctagcagaggttggagctggcacatggggaggaggttctaataattatttggggctgggaaacttatttattgatagcataggacagaggaaggaggcggggatggggtcgtggcgccctggtgatgcgactcctgtttattttgctttttatttcggaataaatggatttagccata

SEQ ID NO: 443779 - DNA, 1965 bp, Homo sapiens
gaacgagaattgatagcatatttgagtctgtataatgctgactcgtttgcctgtggaaagatgtagggccccacagagagagcgtcgacgctctctctgtggggagacccaccgggccctgcagggggccatggagaagctgcagagccgctttatggagctcatgcaggagaaggcagacctgaaggagagggtagaggaactggaacatcgctgcatccagctttctggagagacagacaccattggagagtacattgcactgtaccagagccagagggcagtgctgaaggagcggcaccgggagaaggaggagtacatcagcaggctggcccaagacaaggaggagatgaaggtgaagctgctggagctgcaggagctggtcttacggcttgtgggcgaccgcaacgagtggcatggcagattcctggcagctgcccagaaccctgctgatgagcccacttcaggggccccagccccccaggaacttggggctgccaaccagcagggtgatctttgcgaggtgagcctcgccggcagtgtggagcctgcccaaggagaggccagggagggttctccccgtgacaaccccactgcacagcagatcatgcagctgcttcgtgagatgcagaacccccgggagcgcccaggcttgggcagcaacccctgcattccttttttttaccgggctgacgagaatgatgaggtgaagatcactgtcatctaaaagccggctactgtcagcaaagcctgaagaagtggggctggataccctgcccccaccatatccctaccatcccttctcagtcaaccctttacccttacagtagcaagcatagacccctgtctaacgggggtagacaggtgcagatgaggtgaagatcactgtcatctaaaagctggccactaaattaaaaaaaaattaaaagttatgggattaaaaaaagttatgggataaaaaaggttatgggtaacttatggtataaaagttatgaaaaaaggccaggtgcagtggctcacgcctgtaatcccagcacttttgggaggctgaggttgggagttcaagaccagcctggtcaacatggtgaaactgtgtctctactaaaaatacaaaaattagccaggcatggtggcacgtgcctgtaatcccagctactcgggaggctgaggcaggagaatcgcttgaacctgggaggtggaggttgcagtgggctgagatcacgccattgcactccagcctgggcgacagagtgagactctgtctcaaaaaaaaaaaaaattatgaaaaaagttatgggattaaagaaagtcaggataaaaattttaaaaagcaggccactgtcagcaaagcctggagaagtggggccggaggctccgcccccatcatgtgcctgccaccccttcccagtcatccctttactcttacagtagcaaataagacccctgtctaatggggggagacaaatgtgtagacccttagccaccttggccagggctgactccttaaatttctggatgatgatgattgttatttaatagccagaggctcatataattggcctctttggaagaggcctcatggcctccttactctcaccaaagcaatttttccctcaggggggctcccatcttcttacacagagaggcagctgaggcaggacagtggggctaactgtagaccaggcgagggcacgggctgctggggtggccctgcttccccagtgtacatattgtatctgtgtaacattttgtatattccaggggtagggccgccccctgtatcatacctagcagaggttggagctggcacatggggaggaggttctaataattatttggggctgggaaacttatttattgatagcataggacagaggaaggaggcggggatggggtcgtggcgccctggtgatgcgactcctgtttattttgctttttatttcggaataaatggatttagccata

SEQ ID NO: 443780 - DNA, 2064 bp, Homo sapiens
cgcagtggttgccgggatcgcgctgatgtggccccaaccccgcctccctccccgccccgcgatgtcggaagaaacccgacagagcaaattggccgcagcgaagaaaaagttgagagaatatcagcagaggaatagccctggtgttcctacaggagcgaaaaagaagaagaaaataaaaaatggcagtaaccctgagacaaccacttctggtggttgccactcacctgaggatattcaggacattctgaaggtgctggtgtccgaccttaaccgttccaatggggtagcgctccccccattggacaagtggaagacacccaaggacaatgctgctactctacaaccatctgatgacaccgtgttacctggcggtgtcccttcccctggtgccagtctcactagcatggcggcatctcagaatcatgatgctgacaatgtccctaatctcatggatgaaaccaagactttctcatcaaccgagagcctgcgacaactctcccaacagctcaatggtcttgtttgtgagtctgcgacatgtgtcaatggggagggccctgcatcgtctgctaacctgaaggatctggagagccggtaccaacagctagcggtagccctggactccagctatgtaacaaacaaacaactcaatatcacgatagagaaattgaaacaacagaaccaagaaattacggatcagttggaagaagaaaagaaagaatgccaccaaaagcagggagccctaagggagcagttacaggttcacattcagaccatagggatcctcgtatcagagaaagctgagttacagacagccctggctcacactcagcatgctgccaggcagaaagaaggagagtctgaagatctggccagccgcctgcagtattcccggcggcgtgtgggagagttggagcgggctctctctgctgtctccacgcagcagaagaaggcagacaggtacaacaaggagttaaccaaagagagagacgccctcaggctggagttatacaagaacacccaaagcaatgaggacctgaagcaagagaaatcagaattggaagagaagcttcgggtcctagtgactgagaaggctggcatgcagcttaacttggaagaattgcaaaagaagttagagatgacggaactcctgcttcaacagttttcaagccggtgtgaagcccctgatgctaaccagcagttacagcaggccatggaggagcgggcacagctggaagcacacctggggcaggtaatggagtcggttagacaactacaaatggagagagataaatatgcggaggttgcagtgggctgagatcacgccattgcactccagcctgggcgacagagtgagactctgtctcaaaaaaaaaaaaaattatgaaaaaagttatgggattaaagaaagtcaggataaaaattttaaaaagcaggccactgtcagcaaagcctggagaagtggggccggaggctccgcccccatcatgtgcctgccaccccttcccagtcatccctttactcttacagtagcaaataagacccctgtctaatggggggagacaaatgtgtagacccttagccaccttggccagggctgactccttaaatttctggatgatgatgattgttatttaatagccagaggctcatataattggcctctttggaagaggcctcatggcctccttactctcaccaaagcaatttttccctcaggggggctcccatcttcttacacagagaggcagctgaggcaggacagtggggctaactgtagaccaggcgagggcacgggctgctggggtggccctgcttccccagtgtacatattgtatctgtgtaacattttgtatattccaggggtagggccgccccctgtatcatacctagcagaggttggagctggcacatggggaggaggttctaataattatttggggctgggaaacttatttattgatagcataggacagaggaaggaggcggggatggggtcgtggcgccctggtgatgcgactcctgtttattttgctttttatttcggaataaatggatttagccata

SEQ ID NO: 443781 - DNA, 953 bp, Homo sapiens
agcactttgggagactgaggagggtggatcacctgaggtcaggagttcgagagcagcctggccaacatggtgaaaccccatctctactaaaaatacaaaaattagctgggcgtgatggtggcacgtgcctgtaatcccagctactcgggaggctgaggcaggagaatcgcttgaacctgggaggtggaggttgcagtgggctgagatcacgccattgcactccagcctgggcgacagagtgagactctgtctcaaaaaaaaaaaaaattatgaaaaaagttatgggattaaagaaagtcaggataaaaattttaaaaagcaggccactgtcagcaaagcctggagaagtggggccggaggctccgcccccatcatgtgcctgccaccccttcccagtcatccctttactcttacagtagcaaataagacccctgtctaatggggggagacaaatgtgtagacccttagccaccttggccagggctgactccttaaatttctggatgatgatgattgttatttaatagccagaggctcatataattggcctctttggaagaggcctcatggcctccttactctcaccaaagcaatttttccctcaggggggctcccatcttcttacacagagaggcagctgaggcaggacagtggggctaactgtagaccaggcgagggcacgggctgctggggtggccctgcttccccagtgtacatattgtatctgtgtaacattttgtatattccaggggtagggccgccccctgtatcatacctagcagaggttggagctggcacatggggaggaggttctaataattatttggggctgggaaacttatttattgatagcataggacagaggaaggaggcggggatggggtcgtggcgccctggtgatgcgactcctgtttattttgctttttatttcggaataaatggatttagccata

SEQ ID NO: 443782 - DNA, 2767 bp, Homo sapiens
cgcagtggttgccgggatcgcgctgatgtggccccaaccccgcctccctccccgccccgcgatgtcggaagaaacccgacagagcaaattggccgcagcgaagaaaaagttgagagaatatcagcagaggaatagccctggtgttcctacaggagcgaaaaagaagaagaaaataaaaaatggcagtaaccctgagacaaccacttctggtggttgccactcacctgaggatattcaggacattctgaaggtgctggtgtccgaccttaaccgttccaatggggtagcgctccccccattggacaagtggaagacacccaaggacaatgctgctactctacaaccatctgatgacaccgtgttacctggcggtgtcccttcccctggtgccagtctcactagcatggcggcatctcagaatcatgatgctgacaatgtccctaatctcatggatgaaaccaagactttctcatcaaccgagagcctgcgacaactctcccaacagctcaatggtcttgtttgtgagtctgcgacatgtgtcaatggggagggccctgcatcgtctgctaacctgaaggatctggagagccggtaccaacagctagcggtagccctggactccagctatgtaacaaacaaacaactcaatatcacgatagagaaattgaaacaacagaaccaagaaattacggatcagttggaagaagaaaagaaagaatgccaccaaaagcagggagccctaagggagcagttacaggttcacattcagaccatagggatcctcgtatcagagaaagctgagttacagacagccctggctcacactcagcatgctgccaggcagaaagaaggagagtctgaagatctggccagccgcctgcagtattcccggcggcgtgtgggagagttggagcgggctctctctgctgtctccacgcagcagaagaaggcagacaggtacaacaaggagttaaccaaagagagagacgccctcaggctggagttatacaagaacacccaaagcaatgaggacctgaagcaagagaaatcagaattggaagagaagcttcgggtcctagtgactgagaaggctggcatgcagcttaacttggaagaattgcaaaagaagttagagatgacggaactcctgcttcaacagttttcaagccggtgtgaagcccctgatgctaaccagcagttacagcaggccatggaggagcgggcacagctggaagcacacctggggcaggtaatggagtcggttagacaactacaaatggagagagataaatatgcggagaatctcaaaggagagagcgccatgtggcggcagaggatgcagcagatgtcagagcaggtgcacacattgagagaggagaaggaatgtagcatgagtcgggtacaggagctggagacgagcttggctgaactgaggaaccagatggctgaacccccgcccccagagcccccagcagggccctccgaggtggagcagcagctacaagcggaggctgagcacctgcggaaggagctggagggtctggcaggacagcttcaagcccaggtgcaagacaatgagggcttgagtcgcctgaaccgggagcaggaggagaggctgctggagctggagcgggcggccgagctctggggggagcaggcggaggcgcgcaggcaaatcctggagaccatgcagaacgaccgcactaccatcagccgcgcactctcccagaaccgggagctcaaggagcagctggctgagctgcagagcggatttgtaaagctggtgcgctgccccacctggagagcccgccctcctccctagccctccagacctttgttttcccacctgtaaagtggggcagtgtagccctcacttgaaatggtacttctggaggcatctgtgagccagagccctgctccgatggctgtgggggagaggggatgatttttctaacctgcctccacccttcccggtgccatgggaggcagacaccaaggcagcaagttctggggtctccagctgcagtgggtggccgctgattgcttctctctgtccagactaatgagaacatggagatcaccagcgcactgcagtcggagcagcacgtcaagagggagctgggaaagaagctgggcgagctgcaggagaagctgagcgagctgaaggaaacggtggagctgaagagccaagaggctcaaagtctgcagcagcagcgagaccagtacctgggacacctgcagcagtatgtggccgcctatcagcagctgacctctgagaaggaggtgctgcataatcagctactgctgcagacccagctcgtggaccagctgcagcagcaggaagctcagggcaaagcggtggccgagatggcccgccaagagttgcaggaaacccaggagcgcctggaagctgccacccagcagaatcagcagctacgggcccagttgagcctcatggctcaccctggggaaggtacgggaacctgctcacaggaagaggagagagccccaggaagaaggggggactgttagcagcgtagaattgaggagttggaagagacctttagaacagctggtcattatgccaactgggtgtccacactaagttcggcatcaatatggtgacttcctgggagcagggcactaccagcttacctaaggatgggtgaactggcccaggtcagaaatgaagcaggtcagaactcccatgctgatcggtagtgggactgcacctgggcagcatagcgagcccttggctcttaaaaaa

SEQ ID NO: 443783 - DNA, 1274 bp, Homo sapiens
cgcagtggttgccgggatcgcgctgatgtggccccaaccccgcctccctccccgccccgcgatgtcggaagaaacccgacagagcaaattggccgcagcgaagaaaaagttgagagaatatcagcagaggaatagccctggtgttcctacaggagcgaaaaagaagaagaaaataaaaaatggcagtaaccctgagacaaccacttctggtggttgccactcacctgaggatattcaggacattctgaaggtgctggtgtccgaccttaaccgttccaatggggtagcgctccccccattggacaagtggaagacacccaaggacaatgctgctactctacaaccatctgatgacaccgtgttacctggcggtgtcccttcccctggtgccagtctcactagcatggcggcatctcagaatcatgatgctgacaatgtccctaatctcatggatgaaaccaagactttctcatcaaccgagagcctgcgacaactctcccaacagctcaatggtcttgtttgtgagtctgcgacatgtgtcaatggggagggccctgcatcgtctgctaacctgaaggatctggagagccggtaccaacagctagcggtagccctggactccagctatgtaacaaacaaacaactcaatatcacgatagagaaattgaaacaacagaaccaagaaattacggatcagttggaagaagaaaagaaagaatgccaccaaaagcagggagccctaagggagcagttacaggttcacattcagaccatagggatcctcgtatcagagaaagctgagttacagacagccctggctcacactcagcatgctgccaggcagaaagaaggagagtctgaagatctggccagccgcctgcagtattcccggcggcgtgtgggagagttggagcgggctctctctgctgtctccacgcagcagaagaaggcagacaggtacaacaaggagttaaccaaagagagagacgccctcaggctggagttatacaagaacacccaaagcaatgaggacctgaagcaagagaaatcagaattggaagagaagcttcgggtcctagtgactgagaaggctggcatgcagcttaacttggaagaattgcaaaagaagttagagatgacggaactcctgcttcaacagttttcaagccggtgtgaagcccctgatgctaaccagcagttacagcaggccatggaggagcgggcacagctggaagcacacctggggcaggtgaggctttgcaggggagggatgt

SEQ ID NO: 443784 - DNA, 358 bp, Homo sapiens
ggaagaaacgaagttagagggcttagacactgaggggacagaacatctccatgtgcactctcgtctcttatagtctgcgacatgtgtcaatggggagggccctgcatcgtctgctaacctgaaggatctggaggtaagaggccctgggccgtggcccagtgaccctgcaggccagccctccaacctcctcccacagcgggggctgggtgcccctctgccagctgagacagcccacacaccccccaaccctaatgattgctctctctacctctccccccaatcctcctccaactcctcctctctgcatgcgcctcagagccggtaccaacagctagcggtagccctggactccagctat

SEQ ID NO: 443785 - DNA, 148 bp, Homo sapiens
gtttttcccttttcgcctcctgtagattcaggacattctgaaggtgctggtgtccgaccttaaccgttccaatggggtagcgctccccccattggacaagtggaaggtgaggcagtgccgagacccctctctggcttgctctctccag

SEQ ID NO: 443786 - DNA, 611 bp, Homo sapiens
  misc_feature (587)..(587): n is a, c, g, or t
cagctcgactctagagagtcccctccagactgccttcagaccgcgcactctcccagaaccgggagctcaaggagcagctggctgagctgcagagcggatttgtaaagctgactaatgagaacatggagatcaccagcgcactgcagtcggagcagcacgtcaagagggagctgggaaagaagctgggcgagctgcaggagaagctgagcgagctgaaggaaacggtggagctgaagagccaagaggctcaaagtctgcagcagcagcgagaccagtacctgggacacctgcagcagtatgtggccgcctatcagcagctgacctctgagaaggaggtgctgcataatcagctactgctgcagacccagctcgtggaccagctgcagcagcaggaagctcagggcaaagcggtggccgagatggcccgccaagagttgcaggaaacccaggagcgcctggaagctgccacccagcagaatcagcagctacgggcccagttgagcctcatggctcaccctggggaaggagatggactggaccgggaggaggaggaggatgaggaggaggaggaggaggagtctgaagcngtctggaggttagcgctcgctcgt

SEQ ID NO: 443787 - DNA, 4353 bp, Homo sapiens
cgcagtggttgccgggatcgcgctgatgtggccccaaccccgcctccctccccgccccgcgatgtcggaagaaacccgacagagcaaattggccgcagcgaagaaaaagttgagagaatatcagcagaggaatagccctggtgttcctacaggagcgaaaaagaagaagaaaataaaaaatggcagtaaccctgagacaaccacttctggtggttgccactcacctgaggatattcaggacattctgaaggtgctggtgtccgaccttaaccgttccaatggggtagcgctccccccattggacaagtggaagacacccaaggacaatgctgctactctacaaccatctgatgacaccgtgttacctggcggtgtcccttcccctggtgccagtctcactagcatggcggcatctcagaatcatgatgctgacaatgtccctaatctcatggatgaaaccaagactttctcatcaaccgagagcctgcgacaactctcccaacagctcaatggtcttgtttgtgagtctgcgacatgtgtcaatggggagggccctgcatcgtctgctaacctgaaggatctggagagccggtaccaacagctagcggtagccctggactccagctatgtaacaaacaaacaactcaatatcacgatagagaaattgaaacaacagaaccaagaaattacggatcagttggaagaagaaaagaaagaatgccaccaaaagcagggagccctaagggagcagttacaggttcacattcagaccatagggatcctcgtatcagagaaagctgagttacagacagccctggctcacactcagcatgctgccaggcagaaagaaggagagtctgaagatctggccagccgcctgcagtattcccggcggcgtgtgggagagttggagcgggctctctctgctgtctccacgcagcagaagaaggcagacaggtacaacaaggagttaaccaaagagagagacgccctcaggctggagttatacaagaacacccaaagcaatgaggacctgaagcaagagaaatcagaattggaagagaagcttcgggtcctagtgactgagaaggctggcatgcagcttaacttggaagaattgcaaaagaagttagagatgacggaactcctgcttcaacagttttcaagccggtgtgaagcccctgatgctaaccagcagttacagcaggccatggaggagcgggcacagctggaagcacacctggggcaggtaatggagtcggttagacaactacaaatggagagagataaatatgcggagaatctcaaaggagagagcgccatgtggcggcagaggatgcagcagatgtcagagcaggtgcacacattgagagaggagaaggaatgtagcatgagtcgggtacaggagctggagacgagcttggctgaactgaggaaccagatggctgaacccccgcccccagagcccccagcagggccctccgaggtggagcagcagctacaagcggaggctgagcacctgcggaaggagctggagggtctggcaggacagcttcaagcccaggtgcaagacaatgagggcttgagtcgcctgaaccgggagcaggaggagaggctgctggagctggagcgggcggccgagctctggggggagcaggcggaggcgcgcaggcaaatcctggagaccatgcagaacgaccgcactaccatcagccgcgcactctcccagaaccgggagctcaaggagcagctggctgagctgcagagcggatttgtaaagctgactaatgagaacatggagatcaccagcgcactgcagtcggagcagcacgtcaagagggagctgggaaagaagctgggcgagctgcaggagaagctgagcgagctgaaggaaacggtggagctgaagagccaagaggctcaaagtctgcagcagcagcgagaccagtacctgggacacctgcagcagtatgtggccgcctatcagcagctgacctctgagaaggaggtgctgcataatcagctactgctgcagacccagctcgtggaccagctgcagcagcaggaagctcagggcaaagcggtggccgagatggcccgccaagagttgcaggaaacccaggagcgcctggaagctgccacccagcagaatcagcagctacgggcccagttgagcctcatggctcaccctggggaaggagatggactggaccgggaggaggaggaggatgaggaggaggaggaggaggaggcggtggcagtacctcagcccatgccaagcatcccggaggacctggagagccgggaagccatggtggcatttttcaactcagctgtagccagtgccgaggaggagcaggcaaggctacgtgggcagctgaaggagcaaagggtgcgctgccggcgcctggctcacctgctggcctcggcccagaaggagcctgaggcagcagccccagccccagggaccgggggtgattctgtgtgtggggagacccaccgggccctgcagggggccatggagaagctgcagagccgctttatggagctcatgcaggagaaggcagacctgaaggagagggtagaggaactggaacatcgctgcatccagctttctggagagacagacaccattggagagtacattgcactgtaccagagccagagggcagtgctgaaggagcggcaccgggagaaggaggagtacatcagcaggctggcccaagacaaggaggagatgaaggtgaagctgctggagctgcaggagctggtcttacggcttgtgggcgaccgcaacgagtggcatggcagattcctggcagctgcccagaaccctgctgatgagcccacttcaggggccccagccccccaggaacttggggctgccaaccagcagggtgatctttgcgaggtgagcctcgccggcagtgtggagcctgcccaaggagaggccagggagggttctccccgtgacaaccccactgcacagcagatcatgcagctgcttcgtgagatgcagaacccccgggagcgcccaggcttgggcagcaacccctgcattccttttttttaccgggctgacgagaatgatgaggtgaagatcactgtcatctaaaagccggctactgtcagcaaagcctgaagaagtggggctggataccctgcccccaccatatccctaccatcccttctcagtcaaccctttacccttacagtagcaagcatagacccctgtctaacgggggtagacaggtgcagatgaggtgaagatcactgtcatctaaaagctggccactaaattaaaaaaaaattaaaagttatgggattaaaaaaagttatgggataaaaaaggttatgggtaacttatggtataaaagttatgaaaaaaggccaggtgcagtggctcacgcctgtaatcccagcacttttgggaggctgaggttgggagttcaagaccagcctggtcaacatggtgaaactgtgtctctactaaaaatacaaaaattagccaggcatggtggcacgtgcctgtaatcccagctactcgggaggctgaggcaggagaatcgcttgaacctgggaggtggaggttgcagtgggctgagatcacgccattgcactccagcctgggcgacagagtgagactctgtctcaaaaaaaaaaaaaattatgaaaaaagttatgggattaaagaaagtcaggataaaaattttaaaaagcaggccactgtcagcaaagcctggagaagtggggccggaggctccgcccccatcatgtgcctgccaccccttcccagtcatccctttactcttacagtagcaaataagacccctgtctaatggggggagacaaatgtgtagacccttagccaccttggccagggctgactccttaaatttctggatgatgatgattgttatttaatagccagaggctcatataattggcctctttggaagaggcctcatggcctccttactctcaccaaagcaatttttccctcaggggggctcccatcttcttacacagagaggcagctgaggcaggacagtggggctaactgtagaccaggcgagggcacgggctgctggggtggccctgcttccccagtgtacatattgtatctgtgtaacattttgtatattccaggggtagggccgccccctgtatcatacctagcagaggttggagctggcacatggggaggaggttctaataattatttggggctgggaaacttatttattgatagcataggacagaggaaggaggcggggatggggtcgtggcgccctggtgatgcgactcctgtttattttgctttttatttcggaataaatggatttagccata

SEQ ID NO: 443788 - DNA, 3819 bp, Homo sapiens
cgcagtggttgccgggatcgcgctgatgtggccccaaccccgcctccctccccgccccgcgatgtcggaagaaacccgacagagcaaattggccgcagcgaagaaaaagttgagagaatatcagcagaggaatagccctggtgttcctacaggagcgaaaaagaagaagaaaataaaaaatggcagtaaccctgagacaaccacttctggtggttgccactcacctgaggatacacccaaggacaatgctgctactctacaaccatctgatgacaccgtgttacctggcggtgtcccttcccctggtgccagtctcactagcatggcggcatctcagaatcatgatgctgacaatgtccctaatctcatggatgaaaccaaggctctctctgctgtctccacgcagcagaagaaggcagacaggtacaacaaggagttaaccaaagagagagacgccctcaggctggagttatacaagaacacccaaagcaatgaggacctgaagcaagagaaatcagaattggaagagaagcttcgggtcctagtgactgagaaggctggcatgcagcttaacttggaagaattgcaaaagaagttagagatgacggaactcctgcttcaacagttttcaagccggtgtgaagcccctgatgctaaccagcagttacagcaggccatggaggagcgggcacagctggaagcacacctggggcaggtaatggagtcggttagacaactacaaatggagagagataaatatgcggagaatctcaaaggagagagcgccatgtggcggcagaggatgcagcagatgtcagagcaggtgcacacattgagagaggagaaggaatgtagcatgagtcgggtacaggagctggagacgagcttggctgaactgaggaaccagatggctgaacccccgcccccagagcccccagcagggccctccgaggtggagcagcagctacaagcggaggctgagcacctgcggaaggagctggagggtctggcaggacagcttcaagcccaggtgcaagacaatgagggcttgagtcgcctgaaccgggagcaggaggagaggctgctggagctggagcgggcggccgagctctggggggagcaggcggaggcgcgcaggcaaatcctggagaccatgcagaacgaccgcactaccatcagccgcgcactctcccagaaccgggagctcaaggagcagctggctgagctgcagagcggatttgtaaagctgactaatgagaacatggagatcaccagcgcactgcagtcggagcagcacgtcaagagggagctgggaaagaagctgggcgagctgcaggagaagctgagcgagctgaaggaaacggtggagctgaagagccaagaggctcaaagtctgcagcagcagcgagaccagtacctgggacacctgcagcagtatgtggccgcctatcagcagctgacctctgagaaggaggtgctgcataatcagctactgctgcagacccagctcgtggaccagctgcagcagcaggaagctcagggcaaagcggtggccgagatggcccgccaagagttgcaggaaacccaggagcgcctggaagctgccacccagcagaatcagcagctacgggcccagttgagcctcatggctcaccctggggaaggagatggactggaccgggaggaggaggaggatgaggaggaggaggaggaggaggcggtggcagtacctcagcccatgccaagcatcccggaggacctggagagccgggaagccatggtggcatttttcaactcagctgtagccagtgccgaggaggagcaggcaaggctacgtgggcagctgaaggagcaaagggtgcgctgccggcgcctggctcacctgctggcctcggcccagaaggagcctgaggcagcagccccagccccagggaccgggggtgattctgtgtgtggggagacccaccgggccctgcagggggccatggagaagctgcagagccgctttatggagctcatgcaggagaaggcagacctgaaggagagggtagaggaactggaacatcgctgcatccagctttctggagagacagacaccattggagagtacattgcactgtaccagagccagagggcagtgctgaaggagcggcaccgggagaaggaggagtacatcagcaggctggcccaagacaaggaggagatgaaggtgaagctgctggagctgcaggagctggtcttacggcttgtgggcgaccgcaacgagtggcatggcagattcctggcagctgcccagaaccctgctgatgagcccacttcaggggccccagccccccaggaacttggggctgccaaccagcagggtgatctttgcgaggtgagcctcgccggcagtgtggagcctgcccaaggagaggccagggagggttctccccgtgacaaccccactgcacagcagatcatgcagctgcttcgtgagatgcagaacccccgggagcgcccaggcttgggcagcaacccctgcattccttttttttaccgggctgacgagaatgatgaggtgaagatcactgtcatctaaaagccggctactgtcagcaaagcctgaagaagtggggctggataccctgcccccaccatatccctaccatcccttctcagtcaaccctttacccttacagtagcaagcatagacccctgtctaacgggggtagacaggtgcagatgaggtgaagatcactgtcatctaaaagctggccactaaattaaaaaaaaattaaaagttatgggattaaaaaaagttatgggataaaaaaggttatgggtaacttatggtataaaagttatgaaaaaaggccaggtgcagtggctcacgcctgtaatcccagcacttttgggaggctgaggttgggagttcaagaccagcctggtcaacatggtgaaactgtgtctctactaaaaatacaaaaattagccaggcatggtggcacgtgcctgtaatcccagctactcgggaggctgaggcaggagaatcgcttgaacctgggaggtggaggttgcagtgggctgagatcacgccattgcactccagcctgggcgacagagtgagactctgtctcaaaaaaaaaaaaaattatgaaaaaagttatgggattaaagaaagtcaggataaaaattttaaaaagcaggccactgtcagcaaagcctggagaagtggggccggaggctccgcccccatcatgtgcctgccaccccttcccagtcatccctttactcttacagtagcaaataagacccctgtctaatggggggagacaaatgtgtagacccttagccaccttggccagggctgactccttaaatttctggatgatgatgattgttatttaatagccagaggctcatataattggcctctttggaagaggcctcatggcctccttactctcaccaaagcaatttttccctcaggggggctcccatcttcttacacagagaggcagctgaggcaggacagtggggctaactgtagaccaggcgagggcacgggctgctggggtggccctgcttccccagtgtacatattgtatctgtgtaacattttgtatattccaggggtagggccgccccctgtatcatacctagcagaggttggagctggcacatggggaggaggttctaataattatttggggctgggaaacttatttattgatagcataggacagaggaaggaggcggggatggggtcgtggcgccctggtgatgcgactcctgtttattttgctttttatttcggaataaatggatttagccata

SEQ ID NO: 443789 - DNA, 3666 bp, Homo sapiens
gttccgtcctgtcctctggagaatgtttctttccttctttttcagcacttgcttgggtttcctcccaaaggttcacattcagaccatagggatcctcgtatcagagaaagctgagttacagacagccctggctcacactcagcatgctgccaggcagaaagaaggagagtctgaagatctggccagccgcctgcagtattcccggcggcgtgtgggagagttggagcgggctctctctgctgtctccacgcagcagaagaaggcagacaggtacaacaaggagttaaccaaagagagagacgccctcaggctggagttatacaagaacacccaaagcaatgaggacctgaagcaagagaaatcagaattggaagagaagcttcgggtcctagtgactgagaaggctggcatgcagcttaacttggaagaattgcaaaagaagttagagatgacggaactcctgcttcaacagttttcaagccggtgtgaagcccctgatgctaaccagcagttacagcaggccatggaggagcgggcacagctggaagcacacctggggcaggtaatggagtcggttagacaactacaaatggagagagataaatatgcggagaatctcaaaggagagagcgccatgtggcggcagaggatgcagcagatgtcagagcaggtgcacacattgagagaggagaaggaatgtagcatgagtcgggtacaggagctggagacgagcttggctgaactgaggaaccagatggctgaacccccgcccccagagcccccagcagggccctccgaggtggagcagcagctacaagcggaggctgagcacctgcggaaggagctggagggtctggcaggacagcttcaagcccaggtgcaagacaatgagggcttgagtcgcctgaaccgggagcaggaggagaggctgctggagctggagcgggcggccgagctctggggggagcaggcggaggcgcgcaggcaaatcctggagaccatgcagaacgaccgcactaccatcagccgcgcactctcccagaaccgggagctcaaggagcagctggctgagctgcagagcggatttgtaaagctgactaatgagaacatggagatcaccagcgcactgcagtcggagcagcacgtcaagagggagctgggaaagaagctgggcgagctgcaggagaagctgagcgagctgaaggaaacggtggagctgaagagccaagaggctcaaagtctgcagcagcagcgagaccagtacctgggacacctgcagcagtatgtggccgcctatcagcagctgacctctgagaaggaggtgctgcataatcagctactgctgcagacccagctcgtggaccagctgcagcagcaggaagctcagggcaaagcggtggccgagatggcccgccaagagttgcaggaaacccaggagcgcctggaagctgccacccagcagaatcagcagctacgggcccagttgagcctcatggctcaccctggggaaggagatggactggaccgggaggaggaggaggatgaggaggaggaggaggaggaggcggtggcagtacctcagcccatgccaagcatcccggaggacctggagagccgggaagccatggtggcatttttcaactcagctgtagccagtgccgaggaggagcaggcaaggctacgtgggcagctgaaggagcaaagggtgcgctgccggcgcctggctcacctgctggcctcggcccagaaggagcctgaggcagcagccccagccccagggaccgggggtgattctgtgtgtggggagacccaccgggccctgcagggggccatggagaagctgcagagccgctttatggagctcatgcaggagaaggcagacctgaaggagagggtagaggaactggaacatcgctgcatccagctttctggagagacagacaccattggagagtacattgcactgtaccagagccagagggcagtgctgaaggagcggcaccgggagaaggaggagtacatcagcaggctggcccaagacaaggaggagatgaaggtgaagctgctggagctgcaggagctggtcttacggcttgtgggcgaccgcaacgagtggcatggcagattcctggcagctgcccagaaccctgctgatgagcccacttcaggggccccagccccccaggaacttggggctgccaaccagcagggtgatctttgcgaggtgagcctcgccggcagtgtggagcctgcccaaggagaggccagggagggttctccccgtgacaaccccactgcacagcagatcatgcagctgcttcgtgagatgcagaacccccgggagcgcccaggcttgggcagcaacccctgcattccttttttttaccgggctgacgagaatgatgaggtgaagatcactgtcatctaaaagccggctactgtcagcaaagcctgaagaagtggggctggataccctgcccccaccatatccctaccatcccttctcagtcaaccctttacccttacagtagcaagcatagacccctgtctaacgggggtagacaggtgcagatgaggtgaagatcactgtcatctaaaagctggccactaaattaaaaaaaaattaaaagttatgggattaaaaaaagttatgggataaaaaaggttatgggtaacttatggtataaaagttatgaaaaaaggccaggtgcagtggctcacgcctgtaatcccagcacttttgggaggctgaggttgggagttcaagaccagcctggtcaacatggtgaaactgtgtctctactaaaaatacaaaaattagccaggcatggtggcacgtgcctgtaatcccagctactcgggaggctgaggcaggagaatcgcttgaacctgggaggtggaggttgcagtgggctgagatcacgccattgcactccagcctgggcgacagagtgagactctgtctcaaaaaaaaaaaaaattatgaaaaaagttatgggattaaagaaagtcaggataaaaattttaaaaagcaggccactgtcagcaaagcctggagaagtggggccggaggctccgcccccatcatgtgcctgccaccccttcccagtcatccctttactcttacagtagcaaataagacccctgtctaatggggggagacaaatgtgtagacccttagccaccttggccagggctgactccttaaatttctggatgatgatgattgttatttaatagccagaggctcatataattggcctctttggaagaggcctcatggcctccttactctcaccaaagcaatttttccctcaggggggctcccatcttcttacacagagaggcagctgaggcaggacagtggggctaactgtagaccaggcgagggcacgggctgctggggtggccctgcttccccagtgtacatattgtatctgtgtaacattttgtatattccaggggtagggccgccccctgtatcatacctagcagaggttggagctggcacatggggaggaggttctaataattatttggggctgggaaacttatttattgatagcataggacagaggaaggaggcggggatggggtcgtggcgccctggtgatgcgactcctgtttattttgctttttatttcggaataaatggatttagccata

SEQ ID NO: 443790 - DNA, 4409 bp, Homo sapiens
cgcagtggttgccgggatcgcgctgatgtggccccaaccccgcctccctccccgccccgcgatgtcggaagaaacccgacagagcaaattggccgcagcgaagaaaaagttgagagaatatcagcagaggaatagccctggtgttcctacaggagcgaaaaagaagaagaaaataaaaaatggcagtaaccctgagacaaccacttctggtggttgccactcacctgaggatacacccaaggacaatgctgctactctacaaccatctgatgacaccgtgttacctggcggtgtcccttcccctggtgccagtctcactagcatggcggcatctcagaatcatgatgctgacaatgtccctaatctcatggatgaaaccaagactttctcatcaaccgagagcctgcgacaactctcccaacagctcaatggtcttgtttgtgagtctgcgacatgtgtcaatggggagggccctgcatcgtctgctaacctgaaggatctggagagccggtaccaacagctagcggtagccctggactccagctatgtaacaaacaaacaactcaatatcacgatagagaaattgaaacaacagaaccaagaaattacggatcagttggaagaagaaaagaaagaatgccaccaaaagcagggagccctaagggagcagttacaggttcacattcagaccatagggatcctcgtatcagagaaagctgagttacagacagccctggctcacactcagcatgctgccaggcagaaagaaggagagtctgaagatctggccagccgcctgcagtattcccggcggcgtgtgggagagttggagcgggctctctctgctgtctccacgcagcagaagaaggcagacaggtacaacaaggagttaaccaaagagagagacgccctcaggctggagttatacaagaacacccaaagcaatgaggacctgaagcaagagaaatcagaattggaagagaagcttcgggtcctagtgactgagaaggctggcatgcagcttaacttggaagaattgcaaaagaagttagagatgacggaactcctgcttcaacagttttcaagccggtgtgaagcccctgatgctaaccagcagttacagcaggccatggaggagcgggcacagctggaagcacacctggggcaggtaatggagtcggttagacaactacaaatggagagagataaatatgcggagaatctcaaaggagagagcgccatgtggcggcagaggatgcagcagatgtcagagcaggtgcacacattgagagaggagaaggaatgtagcatgagtcgggtacaggagctggagacgagcttggctgaactgaggaaccagatggctgaacccccgcccccagagcccccagcagggccctccgaggtggagcagcagctacaagcggaggctgagcacctgcggaaggagctggagggtctggcaggacagcttcaagcccaggtgcaagacaatgagggcttgagtcgcctgaaccgggagcaggaggagaggctgctggagctggagcgggcggccgagctctggggggagcaggcggaggcgcgcaggcaaatcctggagaccatgcagaacgaccgcactaccatcagccgcgcactctcccagaaccgggagctcaaggagcagctggctgagctgcagagcggatttgtaaagctgactaatgagaacatggagatcaccagcgcactgcagtcggagcagcacgtcaagagggagctgggaaagaagctgggcgagctgcaggagaagctgagcgagctgaaggaaacggtggagctgaagagccaagaggctcaaagtctgcagcagcagcgagaccagtacctgggacacctgcagcagtatgtggccgcctatcagcagctgacctctgagaaggaggtgctgcataatcagctactgctgcagacccagctcgtggaccagctgcagcagcaggaagctcagggcaaagcggtggccgagatggcccgccaagagttgcaggaaacccaggagcgcctggaagctgccacccagcagaatcagcagctacgggcccagttgagcctcatggctcaccctggggaaggagatggactggaccgggaggaggaggaggatgaggaggaggaggaggaggaggcggtggcagtacctcagcccatgccaagcatcccggaggacctggagagccgggaagccatggtggcatttttcaactcagctgtagccagtgccgaggaggagcaggcaaggctacgtgggcagctgaaggagcaaagggtgcgctgccggcgcctggctcacctgctggcctcggcccagaaggagcctgaggcagcagccccagccccagggaccgggggtgattctgtgtgtggggagacccaccgggccctgcagggggccatggagaagctgcagagccgctttatggagctcatgcaggagaaggcagacctgaaggagagggtagaggaactggaacatcgctgcatccagctttctggagagacagacaccattggagagtacattgcactgtaccagagccagagggcagtgctgaaggagcggcaccgggagaaggaggagtacatcagcaggctggcccaagacaaggaggagatgaaggtgaagctgctggagctgcaggagctggtcttacggcttgtgggcgaccgcaacgagtggcatggcagattcctggcagctgcccagaaccctgctgatgagcccacttcaggggccccagccccccaggaacttggggctgccaaccagcagggtgatctttgcgaggtgagcctcgccggcagtgtggagcctgcccaaggagaggccagggagggttctccccgtgacaaccccactgcacagcagatcatgcagctgcttcgtgagatgcagaacccccgggagcgcccaggcttgggcagcaacccctgcattccttttttttaccgggctgacgagaatgatgaggtgaagatcactgtcatctaaaagccggctactgtcagcaaagcctgaagaagtggggctggataccctgcccccaccatatccctaccatcccttctcagtcaaccctttacccttacagtagcaagcatagacccctgtctaacgggggtagacaggtgcagatgaggtgaagatcactgtcatctaaaagctggccactaaattaaaaaaaaattaaaagttatgggattaaaaaaagttatgggataaaaaaggttatgggtaacttatggtataaaagttatgaaaaaaggccaggtgcagtggctcacgcctgtaatcccagcacttttgggaggctgaggttgggagttcaagaccagcctggtcaacatggtgaaactgtgtctctactaaaaatacaaaaattagccaggcatggtggcacgtgcctgtaatcccagctactcgggaggctgaggcaggagaatcgcttgaacctgggaggtggaggttgcagtgggctgagatcacgccattgcactccagcctgggcgacagagtgagactctgtctcaaaaaaaaaaaaaattatgaaaaaagttatgggattaaagaaagtcaggataaaaattttaaaaagcaggccactgtcagcaaagcctggagaagtggggccggaggctccgcccccatcatgtgcctgccaccccttcccagtcatccctttactcttacagtagcaaataagacccctgtctaatggggggagacaaatgtgtagacccttagccaccttggccagggctgactccttaaatttctggatgatgatgattgttatttaatagccagaggctcatataattggcctctttggaagaggcctcatggcctccttactctcaccaaagcaatttttccctcaggggggctcccatcttcttacacagagaggcagctgaggcaggacagtggggctaactgtagaccaggcgagggcacgggctgctggggtggccctgcttccccagtgtacatattgtatctgtgtaacattttgtatattccaggggtagggccgccccctgtatcatacctagcagaggttggagctggcacatggggaggaggtatagctgaggctataccaccccaaaattcccacagacacttgaagactcaaaagaaacacccagaagggttgtgaagaagggcactcacaagcttatttcaggatcaaaaatgagcaggctaaaacatcctgagctgacagagcaggaacagacaagaaggaaaaaacacctgttacggttacatgccaagccagtgtacgctagcaacctcagggtcccaaagcagtaacacagagtttaatcatattcttctctggtaattagcggttagacacagg

SEQ ID NO: 443791 - DNA, 4722 bp, Homo sapiens
cgcagtggttgccgggatcgcgctgatgtggccccaaccccgcctccctccccgccccgcgatgtcggaagaaacccgacagagcaaattggccgcagcgaagaaaaagttgagagaatatcagcagaggaatagccctggtgttcctacaggagcgaaaaagaagaagaaaataaaaaatggcagtaaccctgagacaaccacttctggtggttgccactcacctgaggatattcaggacattctgaaggtgctggtgtccgaccttaaccgttccaatggggtagcgctccccccattggacaagtggaagacacccaaggacaatgctgctactctacaaccatctgatgacaccgtgttacctggcggtgtcccttcccctggtgccagtctcactagcatggcggcatctcagaatcatgatgctgacaatgtccctaatctcatggatgaaaccaagactttctcatcaaccgagagcctgcgacaactctcccaacagctcaatggtcttgtttgtgagtctgcgacatgtgtcaatggggagggccctgcatcgtctgctaacctgaaggatctggagagccggtaccaacagctagcggtagccctggactccagctatgtaacaaacaaacaactcaatatcacgatagagaaattgaaacaacagaaccaagaaattacggatcagttggaagaagaaaagaaagaatgccaccaaaagcagggagccctaagggagcagttacaggttcacattcagaccatagggatcctcgtatcagagaaagctgagttacagacagccctggctcacactcagcatgctgccaggcagaaagaaggagagtctgaagatctggccagccgcctgcagtattcccggcggcgtgtgggagagttggagcgggctctctctgctgtctccacgcagcagaagaaggcagacaggtacaacaaggagttaaccaaagagagagacgccctcaggctggagttatacaagaacacccaaagcaatgaggacctgaagcaagagaaatcagaattggaagagaagcttcgggtcctagtgactgagaaggctggcatgcagcttaacttggaagaattgcaaaagaagttagagatgacggaactcctgcttcaacagttttcaagccggtgtgaagcccctgatgctaaccagcagttacagcaggccatggaggagcgggcacagctggaagcacacctggggcaggtaatggagtcggttagacaactacaaatggagagagataaatatgcggagaatctcaaaggagagagcgccatgtggcggcagaggatgcagcagatgtcagagcaggtgcacacattgagagaggagaaggaatgtagcatgagtcgggtacaggagctggagacgagcttggctgaactgaggaaccagatgggtaagctggggctggggtgacctgggagcaggaatggtgtcagagggttgtgggggtggtttagaatgccccagggagttgggtggatggaatggctttgaggcagagggaaagaggtctgtgccaggagatggcaagtctcgtcatctccatgagcctcagtgccccatcagcaaagacgaaggagtgcccgttgtcagccacccacagttgtcgctatcggaaagtggtttggaagattggctaacatccgggtgcgaggaatcatcagcagggaggccaagtttggggagcttgagaggaggtatggaccaagaggagggtttttttgagaatccagaggcttttattgtctgcgtcctttctcagctgaacccccgcccccagagcccccagcagggccctccgaggtggagcagcagctacaagcggaggctgagcacctgcggaaggagctggagggtctggcaggacagcttcaagcccaggtgcaagacaatgagggcttgagtcgcctgaaccgggagcaggaggagaggctgctggagctggagcgggcggccgagctctggggggagcaggcggaggcgcgcaggcaaatcctggagaccatgcagaacgaccgcactaccatcagccgcgcactctcccagaaccgggagctcaaggagcagctggctgagctgcagagcggatttgtaaagctgactaatgagaacatggagatcaccagcgcactgcagtcggagcagcacgtcaagagggagctgggaaagaagctgggcgagctgcaggagaagctgagcgagctgaaggaaacggtggagctgaagagccaagaggctcaaagtctgcagcagcagcgagaccagtacctgggacacctgcagcagtatgtggccgcctatcagcagctgacctctgagaaggaggtgctgcataatcagctactgctgcagacccagctcgtggaccagctgcagcagcaggaagctcagggcaaagcggtggccgagatggcccgccaagagttgcaggaaacccaggagcgcctggaagctgccacccagcagaatcagcagctacgggcccagttgagcctcatggctcaccctggggaaggagatggactggaccgggaggaggaggaggatgaggaggaggaggaggaggaggcggtggcagtacctcagcccatgccaagcatcccggaggacctggagagccgggaagccatggtggcatttttcaactcagctgtagccagtgccgaggaggagcaggcaaggctacgtgggcagctgaaggagcaaagggtgcgctgccggcgcctggctcacctgctggcctcggcccagaaggagcctgaggcagcagccccagccccagggaccgggggtgattctgtgtgtggggagacccaccgggccctgcagggggccatggagaagctgcagagccgctttatggagctcatgcaggagaaggcagacctgaaggagagggtagaggaactggaacatcgctgcatccagctttctggagagacagacaccattggagagtacattgcactgtaccagagccagagggcagtgctgaaggagcggcaccgggagaaggaggagtacatcagcaggctggcccaagacaaggaggagatgaaggtgaagctgctggagctgcaggagctggtcttacggcttgtgggcgaccgcaacgagtggcatggcagattcctggcagctgcccagaaccctgctgatgagcccacttcaggggccccagccccccaggaacttggggctgccaaccagcagggtgatctttgcgaggtgagcctcgccggcagtgtggagcctgcccaaggagaggccagggagggttctccccgtgacaaccccactgcacagcagatcatgcagctgcttcgtgagatgcagaacccccgggagcgcccaggcttgggcagcaacccctgcattccttttttttaccgggctgacgagaatgatgaggtgaagatcactgtcatctaaaagccggctactgtcagcaaagcctgaagaagtggggctggataccctgcccccaccatatccctaccatcccttctcagtcaaccctttacccttacagtagcaagcatagacccctgtctaacgggggtagacaggtgcagatgaggtgaagatcactgtcatctaaaagctggccactaaattaaaaaaaaattaaaagttatgggattaaaaaaagttatgggataaaaaaggttatgggtaacttatggtataaaagttatgaaaaaaggccaggtgcagtggctcacgcctgtaatcccagcacttttgggaggctgaggttgggagttcaagaccagcctggtcaacatggtgaaactgtgtctctactaaaaatacaaaaattagccaggcatggtggcacgtgcctgtaatcccagctactcgggaggctgaggcaggagaatcgcttgaacctgggaggtggaggttgcagtgggctgagatcacgccattgcactccagcctgggcgacagagtgagactctgtctcaaaaaaaaaaaaaattatgaaaaaagttatgggattaaagaaagtcaggataaaaattttaaaaagcaggccactgtcagcaaagcctggagaagtggggccggaggctccgcccccatcatgtgcctgccaccccttcccagtcatccctttactcttacagtagcaaataagacccctgtctaatggggggagacaaatgtgtagacccttagccaccttggccagggctgactccttaaatttctggatgatgatgattgttatttaatagccagaggctcatataattggcctctttggaagaggcctcatggcctccttactctcaccaaagcaatttttccctcaggggggctcccatcttcttacacagagaggcagctgaggcaggacagtggggctaactgtagaccaggcgagggcacgggctgctggggtggccctgcttccccagtgtacatattgtatctgtgtaacattttgtatattccaggggtagggccgccccctgtatcatacctagcagaggttggagctggcacatggggaggaggttctaataattatttggggctgggaaacttatttattgatagcataggacagaggaaggaggcggggatggggtcgtggcgccctggtgatgcgactcctgtttattttgctttttatttcggaataaatggatttagccata

SEQ ID NO: 443792 - DNA, 4628 bp, Homo sapiens
cgcagtggttgccgggatcgcgctgatgtggccccaaccccgcctccctccccgccccgcgatgtcggaagaaacccgacagagcaaattggccgcagcgaagaaaaagttgagagaatatcagcagaggaatagccctggtgttcctacaggagcgaaaaagaagaagaaaataaaaaatggcagtaaccctgagacaaccacttctggtggttgccactcacctgaggatattcaggacattctgaaggtgctggtgtccgaccttaaccgttccaatggggtagcgctccccccattggacaagtggaagacacccaaggacaatgctgctactctacaaccatctgatgacaccgtgttacctggcggtgtcccttcccctggtgccagtctcactagcatggcggcatctcagaatcatgatgctgacaatgtccctaatctcatggatgaaaccaagactttctcatcaaccgagagcctgcgacaactctcccaacagctcaatggtcttgtttgtgagtctgcgacatgtgtcaatggggagggccctgcatcgtctgctaacctgaaggatctggagagccggtaccaacagctagcggtagccctggactccagctatgtaacaaacaaacaactcaatatcacgatagagaaattgaaacaacagaaccaagaaattacggatcagttggaagaagaaaagaaagaatgccaccaaaagcagggagccctaagggagcagttacaggttcacattcagaccatagggatcctcgtatcagagaaagctgagttacagacagccctggctcacactcagcatgctgccaggcagaaagaaggagagtctgaagatctggccagccgcctgcagtattcccggcggcgtgtgggagagttggagcgggctctctctgctgtctccacgcagcagaagaaggcagacaggtacaacaaggagttaaccaaagagagagacgccctcaggctggagttatacaagaacacccaaagcaatgaggacctgaagcaagagaaatcagaattggaagagaagcttcgggtcctagtgactgagaaggctggcatgcagcttaacttggaagaattgcaaaagaagttagagatgacggaactcctgcttcaacagttttcaagccggtgtgaagcccctgatgctaaccagcagttacagcaggccatggaggagcgggcacagctggaagcacacctggggcaggtaatggagtcggttagacaactacaaatggagagagataaatatgcggagaatctcaaaggagagagcgccatgtggcggcagaggatgcagcagatgtcagagcaggtgcacacattgagagaggagaaggaatgtagcatgagtcgggtacaggagctggagacgagcttggctgaactgaggaaccagatggctgaacccccgcccccagagcccccagcagggccctccgaggtggagcagcagctacaagcggaggctgagcacctgcggaaggagctggagggtctggcaggacagcttcaagcccaggtgcaagacaatgagggcttgagtcgcctgaaccgggagcaggaggagaggctgctggagctggagcgggcggccgagctctggggggagcaggcggaggcgcgcaggcaaatcctggagaccatgcagaacgaccgcactaccatcagccgcgcactctcccagaaccgggagctcaaggagcagctggctgagctgcagagcggatttgtaaagctggtgcgctgccccacctggagagcccgccctcctccctagccctccagacctttgttttcccacctgtaaagtggggcagtgtagccctcacttgaaatggtacttctggaggcatctgtgagccagagccctgctccgatggctgtgggggagaggggatgatttttctaacctgcctccacccttcccggtgccatgggaggcagacaccaaggcagcaagttctggggtctccagctgcagtgggtggccgctgattgcttctctctgtccagactaatgagaacatggagatcaccagcgcactgcagtcggagcagcacgtcaagagggagctgggaaagaagctgggcgagctgcaggagaagctgagcgagctgaaggaaacggtggagctgaagagccaagaggctcaaagtctgcagcagcagcgagaccagtacctgggacacctgcagcagtatgtggccgcctatcagcagctgacctctgagaaggaggtgctgcataatcagctactgctgcagacccagctcgtggaccagctgcagcagcaggaagctcagggcaaagcggtggccgagatggcccgccaagagttgcaggaaacccaggagcgcctggaagctgccacccagcagaatcagcagctacgggcccagttgagcctcatggctcaccctggggaaggagatggactggaccgggaggaggaggaggatgaggaggaggaggaggaggaggcggtggcagtacctcagcccatgccaagcatcccggaggacctggagagccgggaagccatggtggcatttttcaactcagctgtagccagtgccgaggaggagcaggcaaggctacgtgggcagctgaaggagcaaagggtgcgctgccggcgcctggctcacctgctggcctcggcccagaaggagcctgaggcagcagccccagccccagggaccgggggtgattctgtgtgtggggagacccaccgggccctgcagggggccatggagaagctgcagagccgctttatggagctcatgcaggagaaggcagacctgaaggagagggtagaggaactggaacatcgctgcatccagctttctggagagacagacaccattggagagtacattgcactgtaccagagccagagggcagtgctgaaggagcggcaccgggagaaggaggagtacatcagcaggctggcccaagacaaggaggagatgaaggtgaagctgctggagctgcaggagctggtcttacggcttgtgggcgaccgcaacgagtggcatggcagattcctggcagctgcccagaaccctgctgatgagcccacttcaggggccccagccccccaggaacttggggctgccaaccagcagggtgatctttgcgaggtgagcctcgccggcagtgtggagcctgcccaaggagaggccagggagggttctccccgtgacaaccccactgcacagcagatcatgcagctgcttcgtgagatgcagaacccccgggagcgcccaggcttgggcagcaacccctgcattccttttttttaccgggctgacgagaatgatgaggtgaagatcactgtcatctaaaagccggctactgtcagcaaagcctgaagaagtggggctggataccctgcccccaccatatccctaccatcccttctcagtcaaccctttacccttacagtagcaagcatagacccctgtctaacgggggtagacaggtgcagatgaggtgaagatcactgtcatctaaaagctggccactaaattaaaaaaaaattaaaagttatgggattaaaaaaagttatgggataaaaaaggttatgggtaacttatggtataaaagttatgaaaaaaggccaggtgcagtggctcacgcctgtaatcccagcacttttgggaggctgaggttgggagttcaagaccagcctggtcaacatggtgaaactgtgtctctactaaaaatacaaaaattagccaggcatggtggcacgtgcctgtaatcccagctactcgggaggctgaggcaggagaatcgcttgaacctgggaggtggaggttgcagtgggctgagatcacgccattgcactccagcctgggcgacagagtgagactctgtctcaaaaaaaaaaaaaattatgaaaaaagttatgggattaaagaaagtcaggataaaaattttaaaaagcaggccactgtcagcaaagcctggagaagtggggccggaggctccgcccccatcatgtgcctgccaccccttcccagtcatccctttactcttacagtagcaaataagacccctgtctaatggggggagacaaatgtgtagacccttagccaccttggccagggctgactccttaaatttctggatgatgatgattgttatttaatagccagaggctcatataattggcctctttggaagaggcctcatggcctccttactctcaccaaagcaatttttccctcaggggggctcccatcttcttacacagagaggcagctgaggcaggacagtggggctaactgtagaccaggcgagggcacgggctgctggggtggccctgcttccccagtgtacatattgtatctgtgtaacattttgtatattccaggggtagggccgccccctgtatcatacctagcagaggttggagctggcacatggggaggaggttctaataattatttggggctgggaaacttatttattgatagcataggacagaggaaggaggcggggatggggtcgtggcgccctggtgatgcgactcctgtttattttgctttttatttcggaataaatggatttagccata

SEQ ID NO: 443793 - DNA, 2974 bp, Homo sapiens
atttatataatatataaatccaaaatcttatgataaagatcgtaagggtcagcacacccaaggacaatgctgctactctacaaccatctgatgacaccgtgttacctggcggtgtcccttcccctggtgccagtctcactagcatggcggcatctcagaatcatgatgctgacaatgtccctaatctcatggatgaaaccaagactttctcatcaaccgagagcctgcgacaactctcccaacagctcaatggtcttgtttgtgagtctgcgacatgtgtcaatggggagggccctgcatcgtctgctaacctgaaggatctggagaaacaacagaaccaagaaattacggatcagttggaagaagaaaagaaagaatgccaccaaaagcagggagccctaagggagcagttacaggttcacattcagaccatagggatcctcgtatcagagaaagctgagttacagacagccctggctcacactcagcatgctgccaggcagaaagaaggagagtctgaagatctggccagccgcctgcagtattcccggcggcgtgtgggagagttggagcgggctctctctgctgtctccacgcagcagaagaaggcagacaggtacaacaaggagttaaccaaagaggagcaggcggaggcgcgcaggcaaatcctggagaccatgcagaacgaccgcactaccatcagccgcgcactctcccagaaccgggagctcaaggagcagctggctgagctgcagagcggatttgtaaagctgactaatgagaacatggagatcaccagcgcactgcagtcggagcagcacgtcaagagggagctgggaaagaagctgggcgagctgcaggagaagctgagcgagctgaaggaaacggtggagctgaagagccaagaggctcaaagtctgcagcagcagcgagaccagtacctgggacacctgcagcagtatgtggccgcctatcagcagctgacctctgagaaggaggtgctgcataatcagctactgctgcagacccagctcgtggaccagctgcagcagcaggaagctcagggcaaagcggtggccgagatggcccgccaagagttgcaggaaacccaggagcgcctggaagctgccacccagcagaatcagcagctacgggcccagttgagcctcatggctcaccctggggaaggagatggactggaccgggaggaggaggaggatgaggaggaggaggaggaggaggcggtggcagtacctcagcccatgccaagcatcccggaggacctggagagccgggaagccatggtggcatttttcaactcagctgtagccagtgccgaggaggagcaggcaaggctacgtgggcagctgaaggagcaaagggtgcgctgccggcgcctggctcacctgctggcctcggcccagaaggagcctgaggcagcagccccagccccagggaccgggggtgattctgtgtgtggggagacccaccgggccctgcagggggccatggagaagctgcagagccgctttatggagctcatgcaggagaaggcagacctgaaggagagggccagggagggttctccccgtgacaaccccactgcacagcagatcatgcagctgcttcgtgagatgcagaacccccgggagcgcccaggcttgggcagcaacccctgcattccttttttttaccgggctgacgagaatgatgaggtgaagatcactgtcatctaaaagccggctactgtcagcaaagcctgaagaagtggggctggataccctgcccccaccatatccctaccatcccttctcagtcaaccctttacccttacagtagcaagcatagacccctgtctaacgggggtagacaggtgcagatgaggtgaagatcactgtcatctaaaagctggccactaaattaaaaaaaaattaaaagttatgggattaaaaaaagttatgggataaaaaaggttatgggtaacttatggtataaaagttatgaaaaaaggccaggtgcagtggctcacgcctgtaatcccagcacttttgggaggctgaggttgggagttcaagaccagcctggtcaacatggtgaaactgtgtctctactaaaaatacaaaaattagccaggcatggtggcacgtgcctgtaatcccagctactcgggaggctgaggcaggagaatcgcttgaacctgggaggtggaggttgcagtgggctgagatcacgccattgcactccagcctgggcgacagagtgagactctgtctcaaaaaaaaaaaaaattatgaaaaaagttatgggattaaagaaagtcaggataaaaattttaaaaagcaggccactgtcagcaaagcctggagaagtggggccggaggctccgcccccatcatgtgcctgccaccccttcccagtcatccctttactcttacagtagcaaataagacccctgtctaatggggggagacaaatgtgtagacccttagccaccttggccagggctgactccttaaatttctggatgatgatgattgttatttaatagccagaggctcatataattggcctctttggaagaggcctcatggcctccttactctcaccaaagcaatttttccctcaggggggctcccatcttcttacacagagaggcagctgaggcaggacagtggggctaactgtagaccaggcgagggcacgggctgctggggtggccctgcttccccagtgtacatattgtatctgtgtaacattttgtatattccaggggtagggccgccccctgtatcatacctagcagaggttggagctggcacatggggaggaggttctaataattatttggggctgggaaacttatttattgatagcataggacagaggaaggaggcggggatggggtcgtggcgccctggtgatgcgactcctgtttattttgctttttatttcggaataaatggatttagccata

SEQ ID NO: 443794 - DNA, 1834 bp, Homo sapiens
ggctaggtagaggccgggtgtttaatcggccgaggtgcaggcgaaggatactgaaggagagggtagaggaactggaacatcgctgcatccagctttctggagagacagacaccattggagagtacattgcactgtaccagagccagagggcagtgctgaaggagcggcaccgggagaaggaggagtacatcagcaggctggcccaagacaaggaggagatgaaggtgaagctgctggagctgcaggagctggtcttacggcttgtgggcgaccgcaacgagtggcatggcagattcctggcagctgcccagaaccctgctgatgagcccacttcaggggccccagccccccaggaacttggggctgccaaccagcagggtgatctttgcgaggtgagcctcgccggcagtgtggagcctgcccaaggagaggccagggagggttctccccgtgacaaccccactgcacagcagatcatgcagctgcttcgtgagatgcagaacccccgggagcgcccaggcttgggcagcaacccctgcattccttttttttaccgggctgacgagaatgatgaggtgaagatcactgtcatctaaaagccggctactgtcagcaaagcctgaagaagtggggctggataccctgcccccaccatatccctaccatcccttctcagtcaaccctttacccttacagtagcaagcatagacccctgtctaacgggggtagacaggtgcagatgaggtgaagatcactgtcatctaaaagctggccactaaattaaaaaaaaattaaaagttatgggattaaaaaaagttatgggataaaaaaggttatgggtaacttatggtataaaagttatgaaaaaaggccaggtgcagtggctcacgcctgtaatcccagcacttttgggaggctgaggttgggagttcaagaccagcctggtcaacatggtgaaactgtgtctctactaaaaatacaaaaattagccaggcatggtggcacgtgcctgtaatcccagctactcgggaggctgaggcaggagaatcgcttgaacctgggaggtggaggttgcagtgggctgagatcacgccattgcactccagcctgggcgacagagtgagactctgtctcaaaaaaaaaaaaaattatgaaaaaagttatgggattaaagaaagtcaggataaaaattttaaaaagcaggccactgtcagcaaagcctggagaagtggggccggaggctccgcccccatcatgtgcctgccaccccttcccagtcatccctttactcttacagtagcaaataagacccctgtctaatggggggagacaaatgtgtagacccttagccaccttggccagggctgactccttaaatttctggatgatgatgattgttatttaatagccagaggctcatataattggcctctttggaagaggcctcatggcctccttactctcaccaaagcaatttttccctcaggggggctcccatcttcttacacagagaggcagctgaggcaggacagtggggctaactgtagaccaggcgagggcacgggctgctggggtggccctgcttccccagtgtacatattgtatctgtgtaacattttgtatattccaggggtagggccgccccctgtatcatacctagcagaggttggagctggcacatggggaggaggttctaataattatttggggctgggaaacttatttattgatagcataggacagaggaaggaggcggggatggggtcgtggcgccctggtgatgcgactcctgtttattttgctttttatttcggaataaatggatttagccata

SEQ ID NO: 443795 - DNA, 2492 bp, Homo sapiens
cgcagtggttgccgggatcgcgctgatgtggccccaaccccgcctccctccccgccccgcgatgtcggaagaaacccgacagagcaaattggccgcagcgaagaaaaagttgagagaatatcagcagaggaatagccctggtgttcctacaggagcgaaaaagaagaagaaaataaaaaatggcagtaaccctgagacaaccacttctggtggttgccactcacctgaggatattcaggacattctgaaggtgctggtgtccgaccttaaccgttccaatggggtagcgctccccccattggacaagtggaagacacccaaggacaatgctgctactctacaaccatctgatgacaccgtgttacctggcggtgtcccttcccctggtgccagtctcactagcatggcggcatctcagaatcatgatgctgacaatgtccctaatctcatggatgaaaccaagactttctcatcaaccgagagcctgcgacaactctcccaacagctcaatggtcttgtttgtgagtctgcgacatgtgtcaatggggagggccctgcatcgtctgctaacctgaaggatctggagagccggtaccaacagctagcggtagccctggactccagctatgtaacaaacaaacaactcaatatcacgatagagaaattgaaacaacagaaccaagaaattacggatcagttggaagaagaaaagaaagaatgccaccaaaagcagggagccctaagggagcagttacaggttcacattcagaccatagggatcctcgtatcagagaaagctgagttacagacagccctggctcacactcagcatgctgccaggcagaaagaaggagagtctgaagatctggccagccgcctgcagtattcccggcggcgtgtgggagagttggagcgggctctctctgctgtctccacgcagcagaagaaggcagacaggtacaacaaggagttaaccaaagagagagacgccctcaggctggagttatacaagaacacccaaagcaatgaggacctgaagcaagagaaatcagaattggaagagaagcttcgggtcctagtgactgagaaggctggcatgcagcttaacttggaagaattgcaaaagaagttagagatgacggaactcctgcttcaacagttttcaagccggtgtgaagcccctgatgctaaccagcagttacagcaggccatggaggagcgggcacagctggaagcacacctggggcaggtaatggagtcggttagacaactacaaatggagagagataaatatgcggagaatctcaaaggagagagcgccatgtggcggcagaggatgcagcagatgtcagagcaggtgcacacattgagagaggagaaggaatgtagcatgagtcgggtacaggagctggagacgagcttggctgaactgaggaaccagatggctgaacccccgcccccagagcccccagcagggccctccgaggtggagcagcagctacaagcggaggctgagcacctgcggaaggagctggagggtctggcaggacagcttcaagcccaggtgcaagacaatgagggcttgagtcgcctgaaccgggagcaggaggagaggctgctggagctggagcgggcggccgagctctggggggagcaggcggaggcgcgcaggcaaatcctggagaccatgcagaacgaccgcactaccatcagccgcgcactctcccagaaccgggagctcaaggagcagctggctgagctgcagagcggatttgtaaagctgactaatgagaacatggagatcaccagcgcactgcagtcggagcagcacgtcaagagggagctgggaaagaagctgggcgagctgcaggagaagctgagcgagctgaaggaaacggtggagctgaagagccaagaggctcaaagtctgcagcagcagcgagaccagtacctgggacacctgcagcagtatgtggccgcctatcagcagctgacctctgagaaggaggtgctgcataatcagctactgctgcagacccagctcgtggaccagctgcagcagcaggaagctcagggcaaagcggtggccgagatggcccgccaagagttgcaggaaacccaggagcgcctggaagctgccacccagcagaatcagcagctacgggcccagttgagcctcatggctcaccctggggaaggtacgggaacctgctcacaggaagaggagagagccccaggaagaaggggggactgttagcagcgtagaattgaggagttggaagagacctttagaacagctggtcattatgccaactgggtgtccacactaagttcggcatcaatatggtgacttcctgggagcagggcactaccagcttacctaaggatgggtgaactggcccaggtcagaaatgaagcaggtcagaactcccatgctgatcggtagtgggactgcacctgggcagcatagcgagcccttggctcttaaaaaa

SEQ ID NO: 443796 - DNA, 391 bp, Homo sapiens
gcctcatggcctccttactctcaccaaagcaatttttccctcaggggggctcccatcttcttacacagagaggcagctgaggcaggacagtggggctaactgtagaccaggcgagggcacgggctgctggggtggccctgcttccccagtgtacatattgtatctgtgtaacattttgtatattccaggggtagggccgccccctgtatcatacctagcagaggttggagctggcacatggggaggaggttctaataattatttggggctgggaaacttatttattgatagcataggacagaggaaggaggcggggatggggtcgtggcgccctggtgatgcgactcctgtttattttgctttttatttcggaataaatggatttagccat

SEQ ID NO: 443797 - DNA, 938 bp, Homo sapiens
atcagaactgacatggccattttcatttatacagcaatattgtgtttatcatttaaaatacttgaacaaacaagtgtgatatgtctttatctgagacctatacatggtatggacttcatatactgccacaggatgtgaggaaagaaaaggaaatcaattctgactgtgttgcctttattatctggataatactgtcttgtcacctcagattggggttgtgcactttagatctgaactgtacagtgttgcaaatcaacatgtgtttctgtaaaagcttgtacaatatattattgatatgtctttttctgtgtggtagctgtattgaactttgatattatgaaaactacatttgcatctgttcctgttctctctctctttcctaactatatgccctccacatcggctctaatagagaacatgccctcagctaagccccctactgagaaacttcctttgagaattgtgcgacttcacaaaatgcaaggtgaacaccactttgtctctgagaacagacgttaccaattatggagtgtcaccagctgccaaaatcgtaggtgttggctctgctggtcactggagtagttgctactcttcagaatatggacaaagaaggcacaggtgtaaatatagtagcaggatgaggaacctcaaactgggtatcattttgcacgtgctcttctgttctcaaatgctaaatgcaaacactgtgtatttattagttaggtgtgccaaactaccgttcccaaattggtgtttctgaatgacatcaacattcccccaacattactccattactaaagacagaaaaaaataaaaacataaaatatacaaacatgtggcaacctgttcttcctaccaaatataaacttgtgtatgatccaagtattttatctgtgttgtctctctaaacccaaataaatgtgtaaatgtggacacat

SEQ ID NO: 443798 - DNA, 1035 bp, Homo sapiens
tcagtagactccagcgtggattttaattgcctcaatcagcagtcattctccccagccgtcactcagagcctggacggtgggtcccgcgatctagcccttggctacgcaggaacggtgcgcccccgggtacggcgcggttcagcaggcaggcgtcaggttctaccaaggcgctgaaatgagcccatcagcgggtaggagcccttcccccgccgtcccctccccaggctcgtgaacggcgcctgatgcccgcccggggcgcgagctctcgaggtcgcagtgacctcagcacctgcttggaggaaaacggcgcgggaaccccgcttccttcccctcagctggagccagacctcaaacaaaaccccaatcgatgcacacagaaaactcctctgggccacgcttcccgcctcgccgaggtctccccagtctgcccctcgctgacgctggcgcgcagcggctgtggcagcacccgggacagcggccgcccgcacttcccgcctatggctctggggattccgagaatcccggcacaggtaggaaagagaacgggggcctgcggcgggcgagttttgcggtggtctggggtttgcggaactacggagaagacgaaggaggtttttccacctgcaacaggaaacttcttcgggcgcttctccctgcttttgggctaagtccttgacggcccaagagctcaagacctctacagcctcttgtaccctgggaagacgcccaaatagtctcaggcccgttccacagaaggttggaagagccccccaaagaccgcggtgtctcggggacatggaattccgtggtcctggggcgctgctaagatccgggtgtctggaccctggggtgggacggagtgaccgtgaagatagaaaaaaaaaatgggaaaggtgagagatttctttatctagaaagacagtctgcgaaaaaatggatagcttcagtgtttaggaaaactcgtccaaggtaggcagggagaggaatttgcctgagccgattggcacctggaagggcagcggtgtgggcttctcc

SEQ ID NO: 443799 - DNA, 3325 bp, Homo sapiens
  misc_feature (3320)..(3320): n is a, c, g, or t
  misc_feature (3325)..(3325): n is a, c, g, or t
tcagtagactccagcgtggattttaattgcctcaatcagcagtcattctccccagccgtcactcagagcctggacggtgggtcccgcgatctagcccttggctacgcaggaacggtgcgcccccgggtacggcgcggttcagcaggcaggcgtcaggttctaccaaggcgctgaaatgagcccatcagcgggtaggagcccttcccccgccgtcccctccccaggctcgtgaacggcgcctgatgcccgcccggggcgcgagctctcgaggtcgcagtgacctcagcacctgcttggaggaaaacggcgcgggaaccccgcttccttcccctcagctggagccagacctcaaacaaaaccccaatcgatgcacacagaaaactcctctgggccacgcttcccgcctcgccgaggtctccccagtctgcccctcgctgacgctggcgcgcagcggctgtggcagcacccgggacagcggccgcccgcacttcccgcctctggctcgcccgaggacgcgctggcacgcctcccaccccctcactctgactccagctggcgtgcatggtctgcctcgcatcctcacgactcagctccctccctctctcgtgtttttttcctccgccgccccctcattcatccccactgggctccctttccctcaaatgctctggggctctccgcgctttcctgagtccgggctccgaggacccttaggtagtcccggtctcttttaaagctccccggcttccaaagggttgccacgtccctaaaccctgtctccagctcgcatacacacacgcacagacacgcacgttttctgttcctgcgtgacacccgccctcgccgctcggccccgccggtccccgcgcggtgccctcctcccgccacacgggcacgcacgcgcgcgcagggccaagcccgaggcagctcgcccgcagctcgcactcgcaggcgacctgctccagtctccaaagccgatggcatctccgggctctggcttttggtctttcgggtcggaagatggctctggggattccgagaatcccggcacagcgcgagcctggtgccaagtggctcagaagttcacgggcggcatcggaaacaaactgtgcgccctgctctacggagacgccgagaagccggcggagagcggcgggagccaacccccgcgggccgccgcccggaaggccgcctgcgcctgcgaccagaagccctgcagctgctccaaagtggatgtcaactacgcgtttctccatgcaacagacctgctgccggcgtgtgatggagaaaggcccactttggcgtttctgcaagatgttatgaacattttacttcagtatgtggtgaaaagtttcgatagatcaaccaaagtgattgatttccattatcctaatgagcttctccaagaatataattgggaattggcagaccaaccacaaaatttggaggaaattttgatgcattgccaaacaactctaaaatatgcaattaaaacagggcatcctagatacttcaatcaactttctactggtttggatatggttggattagcagcagactggctgacatcaacagcaaatactaacatgttcacctatgaaattgctccagtatttgtgcttttggaatatgtcacactaaagaaaatgagagaaatcattggctggccagggggctctggcgatgggatattttctcccggtggcgccatatctaacatgtatgccatgatgatcgcacgctttaagatgttcccagaagtcaaggagaaaggaatggctgctcttcccaggctcattgccttcacgtctgaacatagtcatttttctctcaagaagggagctgcagccttagggattggaacagacagcgtgattctgattaaatgtgatgagagagggaaaatgattccatctgatcttgaaagaaggattcttgaagccaaacagaaagggtttgttcctttcctcgtgagtgccacagctggaaccaccgtgtacggagcatttgaccccctcttagctgtcgctgacatttgcaaaaagtataagatctggatgcatgtggatgcagcttggggtgggggattactgatgtcccgaaaacacaagtggaaactgagtggcgtggagagggccaactctgtgacgtggaatccacacaagatgatgggagtccctttgcagtgctctgctctcctggttagagaagagggattgatgcagaattgcaaccaaatgcatgcctcctacctctttcagcaagataaacattatgacctgtcctatgacactggagacaaggccttacagtgcggacgccacgttgatgtttttaaactatggctgatgtggagggcaaaggggactaccgggtttgaagcgcatgttgataaatgtttggagttggcagagtatttatacaacatcataaaaaaccgagaaggatatgagatggtgtttgatgggaagcctcagcacacaaatgtctgcttctggtacattcctccaagcttgcgtactctggaagacaatgaagagagaatgagtcgcctctcgaaggtggctccagtgattaaagccagaatgatggagtatggaaccacaatggtcagctaccaacccttgggagacaaggtcaatttcttccgcatggtcatctcaaacccagcggcaactcaccaagacattgacttcctgattgaagaaatagaacgccttggacaagatttataataaccttgctcaccaagctgttccacttctctaggtagacaattaagttgtcacaaactgtgtgaatgtatttgtagtttgttccaaagtaaatctatttctatattgtggtgtcaaagtagagtttaaaaattaaacaaaaaagacattgctccttttaaaagtcctttcttaagtttagaatacctctctaagaattcgtgacaaaaggctatgttctaatcaataaggaaaagcttaaaattgttataaatacttcccttacttttaatatagtgtgcaaagcaaactttattttcacttcagactagtaggactgaatagtgccaaattgcccctgaatcataaaaggttctttggggtgcagtaaaaaggacaaagtaaatataaaatatatgttgacaataaaaactcttgcctttttcatagtattagaaaaaaatttctaatttacctatagcaacatttcaaatgtatttaaatacatataattttacaaaaggaaaatatatatattaaaaaagatatcctattttgtaacatatagatttttattttatataggttatacaaactgcgggggcngaatn

SEQ ID NO: 443800 - DNA, 1558 bp, Homo sapiens
tcagtagactccagcgtggattttaattgcctcaatcagcagtcattctccccagccgtcactcagagcctggacggtgggtcccgcgatctagcccttggctacgcaggaacggtgcgcccccgggtacggcgcggttcagcaggcaggcgtcaggttctaccaaggcgctgaaatgagcccatcagcgggtaggagcccttcccccgccgtcccctccccaggctcgtgaacggcgcctgatgcccgcccggggcgcgagctctcgaggtcgcagtgacctcagcacctgcttggaggaaaacggcgcgggaaccccgcttccttcccctcagctggagccagacctcaaacaaaaccccaatcgatgcacacagaaaactcctctgggccacgcttcccgcctcgccgaggtctccccagtctgcccctcgctgacgctggcgcgcagcggctgtggcagcacccgggacagcggccgcccgcacttcccgcctctggctcgcccgaggacgcgctggcacgcctcccaccccctcactctgactccagctggcgtgcatggtctgcctcgcatcctcacgactcagctccctccctctctcgtgtttttttcctccgccgccccctcattcatccccactgggctccctttccctcaaatgctctggggctctccgcgctttcctgagtccgggctccgaggacccttaggtagtcccggtctcttttaaagctccccggcttccaaagggttgccacgtccctaaaccctgtctccagctcgcatacacacacgcacagacacgcacgttttctgttcctgcgtgacacccgccctcgccgctcggccccgccggtccccgcgcggtgccctcctcccgccacacgggcacgcacgcgcgcgcagggccaagcccgaggcagctcgcccgcagctcgcactcgcaggcgacctgctccagtctccaaagccgatggcatctccgggctctggcttttggtctttcgggtcggaagatggctctggggattccgagaatcccggcacaggtaggaaagagaacgggggcctgcggcgggcgagttttgcggtggtctggggtttgcggaactacggagaagacgaaggaggtttttccacctgcaacaggaaacttcttcgggcgcttctccctgcttttgggctaagtccttgacggcccaagagctcaagacctctacagcctcttgtaccctgggaagacgcccaaatagtctcaggcccgttccacagaaggttggaagagccccccaaagaccgcggtgtctcggggacatggaattccgtggtcctggggcgctgctaagatccgggtgtctggaccctggggtgggacggagtgaccgtgaagatagaaaaaaaaaatgggaaaggtgagagatttctttatctagaaagacagtctgcgaaaaaatggatagcttcagtgtttaggaaaactcgtccaaggtaggcagggagaggaatttgcctgagccgattggcacctggaagggcagcggtgtgggcttctcc

SEQ ID NO: 443801 - DNA, 1541 bp, Homo sapiens
tcagtagactccagcgtggattttaattgcctcaatcagcagtcattctccccagccgtcactcagagcctggacggtgggtcccgcgatctagcccttggctacgcaggaacggtgcgcccccgggtacggcgcggttcagcaggcaggcgtcaggttctaccaaggcgctgaaatgagcccatcagcgggtaggagcccttcccccgccgtcccctccccaggctcgtgaacggcgcctgatgcccgcccggggcgcgagctctcgaggtcgcagtgacctcagcacctgcttggaggaaaacggcgcgggaaccccgcttccttcccctcagctggagccagacctcaaacaaaaccccaatcgatgcacacagaaaactcctctgggccacgcttcccgcctcgccgaggtctccccagtctgcccctcgctgacgctggcgcgcagcggctgtggcagcacccgggacagcggccgcccgcacttcccgcctctggctcgcccgaggacgcgctggcacgcctcccaccccctcactctgactccagctggcgtgcatggtctgcctcgcatcctcacgactcagctccctccctctctcgtgtttttttcctccgccgccccctcattcatccccactgggctccctttccctcaaatgctctggggctctccgcgctttcctgagtccgggctccgaggacccttaggtagtcccggtctcttttaaagctccccggcttccaaagggttgccacgtccctaaaccctgtctccagctcgcatacacacacgcacagacacgcacgttttctgttcctgcgtgacacccgccctcgccgctcggccccgccggtccccgcgcggtgccctcctcccgccacacgggcacgcacgcgcgcgcagggccaagcccgaggcagctcgcccgcagctcgcactcgcaggcgacctgctccagtctccaaagccgatggcatctccgggctctggcttttggtctttcgggtcggaagatggctctggggattccgagaatcccggcacagcgcgagcctggtgccaagtggctcagaagttcacgggcggcatcggaaacaaactgtgcgccctgctctacggagacgccgagaagccggcggagagcggcgggagccaacccccgcgggccgccgcccggaaggccgcctgcgcctgcgaccagaagccctgcagctgctccaaagtggatgtcaactacgcgtttctccatgcaacagacctgctgccggcgtgtgatggagaaaggcccactttggcgtttctgcaagatgttatgaacattttacttcagtatgtggtgaaaagtttcgatagatcaaccaaagtgattgatttccattatcctaatgagcttctccaagaatataattgggaattggcagaccaaccacaaaatttggaggaaattttgatgcattgccaaacaactctaaaatatgcaattaaaacaggtattgtctcatcgaaaataataaagctcttttttcgtttacaa

SEQ ID NO: 443802 - DNA, 3295 bp, Homo sapiens
tcagtagactccagcgtggattttaattgcctcaatcagcagtcattctccccagccgtcactcagagcctggacggtgggtcccgcgatctagcccttggctacgcaggaacggtgcgcccccgggtacggcgcggttcagcaggcaggcgtcaggttctaccaaggcgctgaaatgagcccatcagcgggtaggagcccttcccccgccgtcccctccccaggctcgtgaacggcgcctgatgcccgcccggggcgcgagctctcgaggtcgcagtgacctcagcacctgcttggaggaaaacggcgcgggaaccccgcttccttcccctcagctggagccagacctcaaacaaaaccccaatcgatgcacacagaaaactcctctgggccacgcttcccgcctcgccgaggtctccccagtctgcccctcgctgacgctggcgcgcagcggctgtggcagcacccgggacagcggccgcccgcacttcccgcctctggctcgcccgaggacgcgctggcacgcctcccaccccctcactctgactccagctggcgtgcatggtctgcctcgcatcctcacgactcagctccctccctctctcgtgtttttttcctccgccgccccctcattcatccccactgggctccctttccctcaaatgctctggggctctccgcgctttcctgagtccgggctccgaggacccttaggtagtcccggtctcttttaaagctccccggcttccaaagggttgccacgtccctaaaccctgtctccagctcgcatacacacacgcacagacacgcacgttttctgttcctgcgtgacacccgccctcgccgctcggccccgccggtccccgcgcggtgccctcctcccgccacacgggcacgcacgcgcgcgcagggccaagcccgaggcagctcgcccgcagctcgcactcgcaggcgacctgctccagtctccaaagccgatggcatctccgggctctggcttttggtctttcgggtcggaagatggctctggggattccgagaatcccggcacagcgcgagcctggtgccaagtggctcagaagttcacgggcggcatcggaaacaaactgtgcgccctgctctacggagacgccgagaagccggcggagagcggcgggagccaacccccgcgggccgccgcccggaaggccgcctgcgcctgcgaccagaagccctgcagctgctccaaagtggatgtcaactacgcgtttctccatgcaacagacctgctgccggcgtgtgatggagaaaggcccactttggcgtttctgcaagatgttatgaacattttacttcagtatgtggtgaaaagtttcgatagatcaaccaaagtgattgatttccattatcctaatgagcttctccaagaatataattgggaattggcagaccaaccacaaaatttggaggaaattttgatgcattgccaaacaactctaaaatatgcaattaaaacagggcatcctagatacttcaatcaactttctactggtttggatatggttggattagcagcagactggctgacatcaacagcaaatactaacatgttcacctatgaaattgctccagtatttgtgcttttggaatatgtcacactaaagaaaatgagagaaatcattggctggccagggggctctggcgatgggatattttctcccggtggcgccatatctaacatgtatgccatgatgatcgcacgctttaagatgttcccagaagtcaaggagaaaggaatggctgctcttcccaggctcattgccttcacgtctgaacatagtcatttttctctcaagaagggagctgcagccttagggattggaacagacagcgtgattctgattaaatgtgatgagagagggaaaatgattccatctgatcttgaaagaaggattcttgaagccaaacagaaagggtttgttcctttcctcgtgagtgccacagctggaaccaccgtgtacggagcatttgaccccctcttagctgtcgctgacatttgcaaaaagtataagatctggatgcatgtggatgcagcttggggtgggggattactgatgtcccgaaaacacaagtggaaactgagtggcgtggagagggccaactctgtgacgtggaatccacacaagatgatgggagtccctttgcagtgctctgctctcctggttagagaagagggattgatgcagaattgcaaccaaatgcatgcctcctacctctttcagcaagataaacattatgacctgtcctatgacactggagacaaggccttacagtgcggacgccacgttgatgtttttaaactatggctgatgtggagggcaaaggggactaccgggtttgaagcgcatgttgataaatgtttggagttggcagagtatttatacaacatcataaaaaaccgagaaggatatgagatggtgtttgatgggaagcctcagcacacaaatgtctgcttctggtacattcctccaagcttgcgtactctggaagacaatgaagagagaatgagtcgcctctcgaaggtggctccagtgattaaagccagaatgatggagtatggaaccacaatggtcagctaccaacccttgggagacaaggtcaatttcttccgcatggtcatctcaaacccagcggcaactcaccaagacattgacttcctgattgaagaaatagaacgccttggacaagatttataataaccttgctcaccaagctgttccacttctctagagaacatgccctcagctaagccccctactgagaaacttcctttgagaattgtgcgacttcacaaaatgcaaggtgaacaccactttgtctctgagaacagacgttaccaattatggagtgtcaccagctgccaaaatcgtaggtgttggctctgctggtcactggagtagttgctactcttcagaatatggacaaagaaggcacaggtgtaaatatagtagcaggatgaggaacctcaaactgggtatcattttgcacgtgctcttctgttctcaaatgctaaatgcaaacactgtgtatttattagttaggtgtgccaaactaccgttcccaaattggtgtttctgaatgacatcaacattcccccaacattactccattactaaagacagaaaaaaataaaaacataaaatatacaaacatgtggcaacctgttcttcctaccaaatataaacttgtgtatgatccaagtattttatctgtgttgtctctctaaacccaaataaatgtgtaaatgtggacacat

SEQ ID NO: 443803 - DNA, 2363 bp, Homo sapiens
atgtcccctatacatcaccatcaccatcacctggttccgcgtggatccgaagcttcgaattctggcttttggtctttcgggtcggaagatggctctggggattccgagaatcccggcacagcgcgagcctggtgccaagtggctcagaagttcacgggcggcatcggaaacaaactgtgcgccctgctctacggagacgccgagaagccggcggagagcggcgggagccaacccccgcgggccgccgcccggaaggccgcctgcgcctgcgaccagaagccctgcagctgctccaaagtggatgtcaactacgcgtttctccatgcaacagacctgctgccggcgtgtgatggagaaaggcccactttggcgtttctgcaagatgttatgaacattttacttcagtatgtggtgaaaagtttcgatagatcaaccaaagtgattgatttccattatcctaatgagcttctccaagaatataattgggaattggcagaccaaccacaaaatttggaggaaattttgatgcattgccaaacaactctaaaatatgcaattaaaacagggcatcctagatacttcaatcaactttctactggtttggatatggttggattagcagcagactggctgacatcaacagcaaatactaacatgttcacctatgaaattgctccagtatttgtgcttttggaatatgtcacactaaagaaaatgagagaaatcattggctggccagggggctctggcgatgggatattttctcccggtggcgccatatctaacatgtatgccatgatgatcgcacgctttaagatgttcccagaagtcaaggagaaaggaatggctgctcttcccaggctcattgccttcacgtctgaacatagtcatttttctctcaagaagggagctgcagccttagggattggaacagacagcgtgattctgattaaatgtgatgagagagggaaaatgattccatctgatcttgaaagaaggattcttgaagccaaacagaaagggtttgttcctttcctcgtgagtgccacagctggaaccaccgtgtacggagcatttgaccccctcttagctgtcgctgacatttgcaaaaagtataagatctggatgcatgtggatgcagcttggggtgggggattactgatgtcccgaaaacacaagtggaaactgagtggcgtggagagggccaactctgtgacgtggaatccacacaagatgatgggagtccctttgcagtgctctgctctcctggttagagaagagggattgatgcagaattgcaaccaaatgcatgcctcctacctctttcagcaagataaacattatgacctgtcctatgacactggagacaaggccttacagtgcggacgccacgttgatgtttttaaactatggctgatgtggagggcaaaggggactaccgggtttgaagcgcatgttgataaatgtttggagttggcagagtatttatacaacatcataaaaaaccgagaaggatatgagatggtgtttgatgggaagcctcagcacacaaatgtctgcttctggtacattcctccaagcttgcgtactctggaagacaatgaagagagaatgagtcgcctctcgaaggtggctccagtgattaaagccagaatgatggagtatggaaccacaatggtcagctaccaacccttgggagacaaggtcaatttcttccgcatggtcatctcaaacccagcggcaactcaccaagacattgacttcctgattgaagaaatagaacgccttggacaagatttataataaccttgctcaccaagctgttccacttctctagagaacatgccctcagctaagccccctactgagaaacttcctttgagaattgtgcgacttcacaaaatgcaaggtgaacaccactttgtctctgagaacagacgttaccaattatggagtgtcaccagctgccaaaatcgtaggtgttggctctgctggtcactggagtagttgctactcttcagaatatggacaaagaaggcacaggtgtaaatatagtagcaggatgaggaacctcaaactgggtatcattttgcacgtgctcttctgttctcaaatgctaaatgcaaacactgtgtatttattagttaggtgtgccaaactaccgttcccaaattggtgtttctgaatgacatcaacattcccccaacattactccattactaaagacagaaaaaaataaaaacataaaatatacaaacatgtggcaacctgttcttcctaccaaatataaacttgtgtatgatccaagtattttatctgtgttgtctctctaaacccaaataaatgtgtaaatgtggacacat

SEQ ID NO: 443804 - DNA, 533 bp, Homo sapiens
  misc_feature (11)..(11): n is a, c, g, or t
aacatacttcncaatttcttcaggatttaaaatcttgagggattgatctctgccctcatcgtgggtttcgactttgatggcactcctaggctctatcagactgacccctcgggcacataccatgcctggaaggccaatgccataggccggggtgccaagtcagtgcgtgagttcctggagaagaactatactgacgaagccattgaaacagatgatctgaccattaagctggtgatcaaggcactcctggaagtggttcagtcaggtggcaaaaacattgaacttgctgtcatgaggcgagatcaatccctcaagattttaaatcctgaagaaattgagaagtatgttgctgaaattgaaaaagaaaaagaagaaaacgaaaagaagaaacaaaagaaagcatcatgatgaataaaatgtctttgcttgtaatttttaaattcatatcaatcatggatgagtctcgatgtgtaggcctttccattccatttattcacactgagtgtcctacaataaacttccgtatttttaaa

SEQ ID NO: 443805 - DNA, 1336 bp, Homo sapiens
  misc_feature (1112)..(1112): n is a, c, g, or t
  misc_feature (1120)..(1120): n is a, c, g, or t
gtcgccgcctgacgccgcccgtcgccggcagcgcaggacacggcgccgagggtggggcgcgggcgtagtggcgccgggagtcgcgggtgcgcgcaggccgtgagtgtgcgcttttgagagtcgcggcggaaggagcccggccgccgcccgccggcatgagctacgaccgcgccatcaccgtcttctcgcccgacggccacctcttccaagtggagtacgcgcaggaggccgtcaagaagggctcgaccgcggttggtgttcgaggaagagacattgttgttcttggtgtggagaagaagtcagtggccaaactgcaggatgaaagaacagtgcggaagatctgtgctttggatgacaacgtctgcatggcctttgcaggcctcaccgccgatgcaaggatagtcatcaacagggcccgggtggagtgccagagccaccggctgactgtggaggacccggtcactgtggagtacatcacccgctacatcgccagtctgaagcagcgttatacgcagagcaatgggcgcaggccgtttggcatctctgccctcatcgtgggtttcgactttgatggcactcctaggctctatcagactgacccctcgggcacataccatgcctggaaggccaatgccataggccggggtgccaagtcagtgcgtgagttcctggagaagaactatactgacgaagccattgaaacagatgatctgaccattaagctggtgatcaaggcactcctggaagtggttcagtcaggtggcaaaaacattgaacttgctgtcatgaggcgagatcaatccctcaagattttaaatcctgaagaaattgagaagtatgttgctgaaattgaaaaagaaaaagaagaaaacgaaaagaagaaacaaaagaaagcatcatgatgaataaaatgtctttgcttgtaatttttaaattcatatcaatcatggatgagtctcgatgtgtaggcctttccattccatttattcacactgagtgtcctacaataaacttccgtatttttaaaaaaaaaaaaaaaaaaaaaaaatttgtggggggcttgggccccggaaaaagtttttaaaccaattcggtggggggcgggggccccntgggtaangttgaacatggtgtcatatagctgtggttatctagaaggaagaatcggggtcctagaagtaagtgtcgtgggttgtttcacccaattaaaaaaaaggcgggggggaacccgagtgtttttggaaaaaatcccgaaatagagatcggagaggaaaaaagggcatctactacacaaggggattcaaggagacacgcatattcaaaataagcgcgtgtg

SEQ ID NO: 443806 - DNA, 1370 bp, Homo sapiens
  misc_feature (1129)..(1129): n is a, c, g, or t
gtcgccgcctgacgccgcccgtcgccggcagcgcaggacacggcgccgagggtggggcgcgggcgtagtggcgccgggagtcgcgggtgcgcgcaggccgtgagtgtgcgcttttgagagtcgcggcggaaggagcccggccgccgcccgccggcatgagctacgaccgcgccatcaccgtcttctcgcccgacggccacctcttccaagtggagtacgcgcaggaggccgtcaagaagggctcgaccgcggttggtgttcgaggaagagacattgttgttcttggtgtggagaagaagtcagtggccaaactgcaggatgaaagaacagtgcggaagatctgtgctttggatgacaacgtctgcatggcctttgcaggcctcaccgccgatgcaaggatagtcatcaacagggcccgggtggagtgccagagccaccggctgactgtggaggacccggtcactgtggagtacatcacccgctacatcgccagtctgaagcagcgttatacgcagagcaatgggcgcaggccgtttggcatctctgccctcatcgtgggtttcgactttgatggcactcctaggctctatcagactgacccctcgggcacataccatgcctggaaggccaatgccataggccggggtgccaagtcagtgcgtgagttcctggagaagaactatactgacgaagccattgaaacagatgatctgaccattaagctggtgatcaaggcactcctggaagtggttcagtcaggtggcaaaaacattgaacttgctgtcatgaggcgagatcaatccctcaagattttaaatcctgaagaaattgagaagtatgttgctgaaattgaaaaagaaaaagaagaaaacgaaaagaagaaacaaaagaaagcatcatgatgaataaaatgtctttgcttgtaatttttaaattcatatcaatcatggatgagtctcgatgtgtaggcctttccattccatttattcacactgagtgtcctacaataaacttccgtatttttaaaaaaaaaaaaaaaaaaaaaaaaaaaaaaaaaaaaaaaaaaaaaaaaaaaaaaaaaaaaaaaaaaaaaaaaaaaaccaaaaaaaccaaaaaaaactacacacancaaaacttaaacataacgcatcaccccactaatctaatctatttcgcctattgcccatttttttctaaattcccacaattcagtgccacttggcccaaattcgcgttaattgggcatttccccttataagggccttattcacattccgggtaaccggtttaccctagtgggcttaaataaaccgggtggtcccaattaaatttcttaacattgttccccttgggcttccttgggctttccc

SEQ ID NO: 443807 - DNA, 1327 bp, Homo sapiens
  misc_feature (1086)..(1086): n is a, c, g, or t
gtcgccgcctgacgccgcccgtcgccggcagcgcaggacacggcgccgagggtggggcgcgggcgtagtggcgccgggagtcgcgggtgcgcgcaggccgtgagtgtgcgcttttgagagtcgcggcggaaggagcccggccgccgcccgccggcatgagctacgaccgcgccatcaccgtcttctcgcccgacggccacctcttccaagtggagtacgcgcaggaggccgtcaagaagggctcgaccgcggttggtgttcgaggaagagacattgttgttcttggtgtggagaagaagtcagtggccaaactgcaggatgaaagaacagtgcggaagatctgtgctttggatgacaacgtctgcatggcctttgcaggcctcaccgccgatgcaaggatagtcatcaacagggcccgggtggagtgccagagccaccggctgactgtggaggacccggtcactgtggagtacatcacccgctacatcgccagtctgaagcagcgttatacgcagagcaatgggcgcaggccgtttggcatctctgccctcatcgtgggtttcgactttgatggcactcctaggctctatcagactgacccctcgggcacataccatgcctggaaggccaatgccataggccggggtgccaagtcagtgcgtgagttcctggagaagaactatactgacgaagccattgaaacagatgatctgaccattaagctggtgatcaaggcactcctggaagtggttcagtcaggtggcaaaaacattgaacttgctgtcatgaggcgagatcaatccctcaagattttaaatcctgaagaaattgagaagtatgttgctgaaattgaaaaagaaaaagaagaaaacgaaaagaagaaacaaaagaaagcatcatgatgaataaaatgtctttgcttgtaatttttaaattcatatcaatcatggatgagtctcgatgtgtaggcctttccattccatttattcacactgagtgtcctacaataaacttccgtatttttaaaaaaaaaaaaaaaaaaaaaaaaaaaaaaaaaccaaaaaaaccaaaaaaaactacacacancaaaacttaaacataacgcatcaccccactaatctaatctatttcgcctattgcccatttttttctaaattcccacaattcagtgccacttggcccaaattcgcgttaattgggcatttccccttataagggccttattcacattccgggtaaccggtttaccctagtgggcttaaataaaccgggtggtcccaattaaatttcttaacattgttccccttgggcttccttgggctttccc

SEQ ID NO: 443808 - DNA, 1312 bp, Homo sapiens
gtcgccgcctgacgccgcccgtcgccggcagcgcaggacacggcgccgagggtggggcgcgggcgtagtggcgccgggagtcgcgggtgcgcgcaggccgtgagtgtgcgcttttgagagtcgcggcggaaggagcccggccgccgcccgccggcatgagctacgaccgcgccatcaccgtcttctcgcccgacggccacctcttccaagtggagtacgcgcaggaggccgtcaagaagggctcgaccgcggttggtgttcgaggaagagacattgttgttcttggtgtggagaagaagtcagtggccaaactgcaggatgaaagaacagtgcggaagatctgtgctttggatgacaacgtctgcatggcctttgcaggcctcaccgccgatgcaaggatagtcatcaacagggcccgggtggagtgccagagccaccggctgactgtggaggacccggtcactgtggagtacatcacccgctacatcgccagtctgaagcagcgttatacgcagagcaatgggcgcaggccgtttggcatctctgccctcatcgtgggtttcgactttgatggcactcctaggctctatcagactgacccctcgggcacataccatgcctggaaggccaatgccataggccggggtgccaagtcagtgcgtgagttcctggagaagaactatactgacgaagccattgaaacagatgatctgaccattaagctggtgatcaaggcactcctggaagtggttcagtcaggtggcaaaaacattgaacttgctgtcatgaggcgagatcaatccctcaagattttaaatcctgaagaaattgagaagtatgttgctgaaattgaaaaagaaaaagaagaaaacgaaaagaagaaacaaaagaaagcatcatgatgaataaaatgtctttgcttgtaatttttaaattcatatcaatcatggatgagtctcgatgtgtaggcctttccattccatttattcacactgagtgtcctacaataaacttccgtatttttaaaaaaaaaaaaaaaaaaaaaaaaaaaaaaaattgggggggggccggggccccggaagaggttttatcaaaaccactcccgtgggcggccgcgggccccactatacggtacactgaccctggggccacacaccggtgtccccgagggagacccgggcgaaagaacagtggggcggtggtttccccacccaaaaaacaccccgcggggggcaaccgaggcggttttgaacaaatccagaaggggtccgagcgcacaagggggctcatcaccgggccagggaagcaataa

SEQ ID NO: 443809 - DNA, 1117 bp, Homo sapiens
  misc_feature (889)..(889): n is a, c, g, or t
  misc_feature (896)..(896): n is a, c, g, or t
gtcgccgcctgacgccgcccgtcgccggcagcgcaggacacggcgccgagggtggggcgcgggcgtagtggcgccgggagtcgcgggtgcgcgcaggccgtgagtgtgcgcttttgagagtcgcggcggaaggagcccggccgccgcccgccggcatgagctacgaccgcgccatcaccgtcttctcgcccgacggccacctcttccaagtggagtacgcgcaggaggccgtcaagaagggctcgaccgcggttggtgttcgaggaagagacattgttgttcttggtgtggagaagaagtcagtggccaaactgcaggatgaaagaacagtgcggaagatctgtgctttggatgacaacgtctgcatggcctttgcaggcctcaccgccgatgcaaggatagtcatcaacagggcccgggtggagtgccagagccaccggctgactgtggaggacccggtcactgtggagtacatcacccgctacatcgccagtctgaagcagcgttatacgcagagcaatgggcgcaggccgtttggcatctctgccctcatcgtgggtttcgactttgatggcactcctaggctctatcagactgacccctcgggcacataccatgcctggaaggccaatgccataggccggggtgccaagtcagtgcgtgagttcctggagaagaactatactgacgaagccattgaaacagatgatctgaccattaagctggtgatcaaggcactcctggaagtggttcagtcaggtggcaaaaacattgaacttgctgtcatgaggcgagatcaatccctcaagattttaaatcctgaagaaattgagaagtatgttgctgaaattgaaaaagaaaaagaagaaaacgaaaagacactgttgtnggcgccnccgtgggcccctctcggaaagaacgcgttctcttatagacaaccacattcggtgtgtgcggcgcgcgcggggcgcccccagagagtgaaggcacagaggcgcacacatgttgcggctcaaaagacgcgtgtgtgtccctctatagggaagacacccggggggggcacagggacaaaagggcgcgggggcgaaattttctctcacaccaatgtataagaaaa

SEQ ID NO: 443810 - DNA, 948 bp, Homo sapiens
  misc_feature (53)..(53): n is a, c, g, or t
ggcgaccaactaaggctaggtacgagccgggtgttgaatcggccgaggcggcngagcccggccgccgcccgccggcatgagctacgaccgcgccatcaccgtcttctcgcccgacggccacctcttccaagtggagtacgcgcaggaggccgtcaagaagggctcgaccgcggttggtgttcgaggaagagacattgttgttcttggtgtggagaagaagtcagtggccaaactgcaggatgaaagaacagtgcggaagatctgtgctttggatgacaacgtctgcatggcctttgcaggcctcaccgccgatgcaaggatagtcatcaacagggcccgggtggagtgccagagccaccggctgactgtggaggacccggtcactgtggagtacatcacccgctacatcgccagtctgaagcagcgttatacgcagagcaatgggcgcaggccgtttggcatctctgccctcatcgtgggtttcgactttgatggcactcctaggctctatcagactgacccctcgggcacataccatgcctggaaggccaatgccataggccggggtgccaagtcagtgcgtgagttcctggagaagaactatactgacgaagccattgaaacagatgatctgaccattaagctggtgatcaaggcactcctggaagtggttcagtcaggtggcaaaaacattgaacttgctgtcatgaggcgagatcaatccctcaagattttaaatcctgaagaaattgagaagtatgttgctgaaattgaaaaagaaaaagaagaaaacgaaaagaagaaacaaaagaaagcatcatgatgaataaaatgtctttgcttgtaatttttaaattcatatcaatcatggatgagtctcgatgtgtaggcctttccattccatttattcacactgagtgtcctacaataaacttccgtatttttaaa

SEQ ID NO: 443811 - DNA, 898 bp, Homo sapiens
ccgcccgggtcaggactggtttggacgcggccgtttcgttttgacgagggctcgtgtacattgaccttagtgacattgtttgaaacttaaattcgtaccatcaagacgtgtcagtttaattggttggtgttcgaggaagagacattgttgttcttggtgtggagaagaagtcagtggccaaactgcaggatgaaagaacagtgcggaagatctgtgctttggatgacaacgtctgcatggcctttgcaggcctcaccgccgatgcaaggatagtcatcaacagggcccgggtggagtgccagagccaccggctgactgtggaggacccggtcactgtggagtacatcacccgctacatcgccagtctgaagcagcgttatacgcagagcaatgggcgcaggccgtttggcatctctgccctcatcgtgggtttcgactttgatggcactcctaggctctatcagactgacccctcgggcacataccatgcctggaaggccaatgccataggccggggtgccaagtcagtgcgtgagttcctggagaagaactatactgacgaagccattgaaacagatgatctgaccattaagctggtgatcaaggcactcctggaagtggttcagtcaggtggcaaaaacattgaacttgctgtcatgaggcgagatcaatccctcaagattttaaatcctgaagaaattgagaagtatgttgctgaaattgaaaaagaaaaagaagaaaacgaaaagaagaaacaaaagaaagcatcatgatgaataaaatgtctttgcttgtaatttttaaattcatatcaatcatggatgagtctcgatgtgtaggcctttccattccatttattcacactgagtgtcctacaataaacttccgtatttttaaa

SEQ ID NO: 443812 - DNA, 1441 bp, Homo sapiens
gtcgccgcctgacgccgcccgtcgccggcagcgcaggacacggcgccgagggtggggcgcgggcgtagtggcgccgggagtcgcgggtgcgcgcaggccgtgagtgtgcgcttttgagagtcgcggcggaaggagcccggccgccgcccgccggcatgagctacgaccgcgccatcaccgtcttctcgcccgacggccacctcttccaagtggagtacgcgcaggaggccgtcaagaagggctcgaccgcggttggtgttcgaggaagagacattgttgttcttggtgtggagaagaagtcagtggccaaactgcaggatgaaagaacagtgcggaagatctgtgctttggatgacaacgtctgcatggcctttgcaggcctcaccgccgatgcaaggatagtcatcaacagggcccgggtggagtgccagagccaccggctgactgtggaggacccggtcactgtggagtacatcacccgctacatcgccagtctgaagcagcgttatacgcagagcaatgggcgcaggccgtttggcatctctgccctcatcgtgggtttcgactttgatggcactcctaggctctatcagactgacccctcgggcacataccatgcctggaaggccaatgccataggccggggtgccaagtcagtgcgtgagttcctggagaagaactatactgacgaagccattgaaacagatgatctgaccattaagctggtgatcaaggcactcctggaagtggttcagtcaggtggcaaaaacattgaacttgctgtcatgaggcgagatcaatccctcaaggtaatcaccaagtttgtctgctttctttacctgtcagttttctcccatgatcagggctgagcagtaccagttccgaaggaaacatcatagggccattctgtggttttaacattaggaaaatgtctttctgaggctccccatacgtcaaagagaagattcccatcttcctctgattagatggtccacgcgtgttctctgggcatgctgagcggctgccagtcagatctgctgctgctgctactgctgcttaatacttgtctaggtcaggccagcatcctcttgtttttcttgaggttcctctccaaagaggctgtatgagcagcagtgccaaagcctggccgccctccccagaagagggcgctggttccttggcaccttgtgtggcttaggtaaccatgaagtttttttctatagattttaaatcctgaagaaattgagaagtatgttgctgaaattgaaaaagaaaaagaagaaaacgaaaagaagaaacaaaagaaagcatcatgatgaataaaatgtctttgcttgtaatttttaaattcatatcaatcatggatgagtctcgatgtgtaggcctttccattccatttattcacactgagtgtcctacaataaacttccgtatttttaaa

SEQ ID NO: 443813 - DNA, 1610 bp, Homo sapiens
gtcgccgcctgacgccgcccgtcgccggcagcgcaggacacggcgccgagggtggggcgcgggcgtagtggcgccgggagtcgcgggtgcgcgcaggccgtgagtgtgcgcttttgagagtcgcggcggaaggagcccggccgccgcccgccggcatgagctacgaccgcgccatcaccgtcttctcgcccgacggccacctcttccaagtggagtacgcgcaggaggccgtcaagaagggctcgaccgcggttggtgttcgaggaagagacattgttgttcttggtgtggagaagaagtcagtggccaaactgcaggatgaaagaacagtgcggaagatctgtgctttggatgacaacgtctgcatggcctttgcaggcctcaccgccgatgcaaggatagtcatcaacagggcccgggtggagtgccagagccaccggctgactgtggaggacccggtcactgtggagtacatcacccgctacatcgccagtctgaagcaggtgggtgcctgcccgcttgcatgctcacctctggcagcagggcagtcacggctccgccatggagggtcctgccatgtcacttcaggtgaatcagaaaactgatttattctggggcgtgatcctaatcttgacttgcacaagtgtaacttgacctagctcaccaatttcagtaacattgttctgttctcagttcctggcatgggatattccaaattcctgtgtctggagggaaatgatagcttttgtcttgccatcctgagtgaccagtcacaaagcagttgaagggggctggaagccaccctatgaggacacgccattagtatgtaagcagaatgtgtgtctacctgtcaaagtaatttccagtaacctgagttcacaattctggtcctaggtgagtttttctaggagtgaaaatgcagaaaaggatgttgaaagctattggctaatgtatcatttgaactgctgataacctgagaaggggctcaggcatggtttaaaatgttcgtatcttcactaagtacggttctttcctcacatgcagtttcttaattggatggcactgacctgtttcttttcttgctagcgttatacgcagagcaatgggcgcaggccgtttggcatctctgccctcatcgtgggtttcgactttgatggcactcctaggctctatcagactgacccctcgggcacataccatgcctggaaggccaatgccataggccggggtgccaagtcagtgcgtgagttcctggagaagaactatactgacgaagccattgaaacagatgatctgaccattaagctggtgatcaaggcactcctggaagtggttcagtcaggtggcaaaaacattgaacttgctgtcatgaggcgagatcaatccctcaagattttaaatcctgaagaaattgagaagtatgttgctgaaattgaaaaagaaaaagaagaaaacgaaaagaagaaacaaaagaaagcatcatgatgaataaaatgtctttgcttgtaatttttaaattcatatcaatcatggatgagtctcgatgtgtaggcctttccattccatttattcacactgagtgtcctacaataaacttccgtatttttaaa

SEQ ID NO: 443814 - DNA, 1112 bp, Homo sapiens
gtcgccgcctgacgccgcccgtcgccggcagcgcaggacacggcgccgagggtggggcgcgggcgtagtggcgccgggagtcgcgggtgcgcgcaggccgtgagtgtgcgcttttgagagtcgcggcggaaggagcccggccgccgcccgccggcatgagctacgaccgcgccatcaccgtcttctcgcccgacggccacctcttccaagtggagtacgcgcaggaggccgtcaagaagggctcgaccgcggttggtgttcgaggaagagacattgttgttcttggtgtggagaagaagtcagtggccaaactgcaggatgaaagaacagtgcggaagatctgtgctttggatgacaacgtctgcatggcctttgcaggcctcaccgccgatgcaaggatagtcatcaacagggcccgggtggagtgccagagccaccggctgactgtggaggacccggtcactgtggagtacatcacccgctacatcgccagtctgaagcaggtgggtgcctgcccgcttgcatgctcacctctggcagcagggcagtcacggctccgccatggagggtcctgccatgtcacttcagcgttatacgcagagcaatgggcgcaggccgtttggcatctctgccctcatcgtgggtttcgactttgatggcactcctaggctctatcagactgacccctcgggcacataccatgcctggaaggccaatgccataggccggggtgccaagtcagtgcgtgagttcctggagaagaactatactgacgaagccattgaaacagatgatctgaccattaagctggtgatcaaggcactcctggaagtggttcagtcaggtggcaaaaacattgaacttgctgtcatgaggcgagatcaatccctcaagattttaaatcctgaagaaattgagaagtatgttgctgaaattgaaaaagaaaaagaagaaaacgaaaagaagaaacaaaagaaagcatcatgatgaataaaatgtctttgcttgtaatttttaaattcatatcaatcatggatgagtctcgatgtgtaggcctttccattccatttattcacactgagtgtcctacaataaacttccgtatttttaaa

SEQ ID NO: 443815 - DNA, 1012 bp, Homo sapiens
gtcgccgcctgacgccgcccgtcgccggcagcgcaggacacggcgccgagggtggggcgcgggcgtagtggcgccgggagtcgcgggtgcgcgcaggccgtgagtgtgcgcttttgagagtcgcggcggaaggagcccggccgccgcccgccggcatgagctacgaccgcgccatcaccgtcttctcgcccgacggccacctcttccaagtggagtacgcgcaggaggccgtcaagaagggctcgaccgcggttggtgttcgaggaagagacattgttgttcttggtgtggagaagaagtcagtggccaaactgcaggatgaaagaacagtgcggaagatctgtgctttggatgacaacgtctgcatggcctttgcaggcctcaccgccgatgcaaggatagtcatcaacagggcccgggtggagtgccagagccaccggctgactgtggaggacccggtcactgtggagtacatcacccgctacatcgccagtctgaagcagcgttatacgcagagcaatgggcgcaggccgtttggcatctctgccctcatcgtgggtttcgactttgatggcactcctaggctctatcagactgacccctcgggcacataccatgcctggaaggccaatgccataggccggggtgccaagtcagtgcgtgagttcctggagaagaactatactgacgaagccattgaaacagatgatctgaccattaagctggtgatcaaggcactcctggaaattttaattctgaagaattgagaatgatgttgtaaaaaaagaaaaaaaagaaaactgcgggcttctattgcgggggggcgacaaagtgttggaatggcttgtcttactgtgttcttgacgccttttttcaaagggaatgcgggtcccaagggggttaaatcgaaaacctgactgtgtttctgtcaccagcgcgaggtcaaaaaacgagacacgcagcgatgagaatggtaactggacagatgaagtgatgttcaggttgtgtcaca

SEQ ID NO: 443816 - DNA, 981 bp, Homo sapiens
gtcgccgcctgacgccgcccgtcgccggcagcgcaggacacggcgccgagggtggggcgcgggcgtagtggcgccgggagtcgcgggtgcgcgcaggccgtgagtgtgcgcttttgagagtcgcggcggaaggagcccggccgccgcccgccggcatgagctacgaccgcgccatcaccgtcttctcgcccgacggccacctcttccaagtggagtacgcgcaggaggccgtcaagaagggctcgaccgcggttggtgttcgaggaagagacattgttgttcttggtgtggagaagaagtcagtggccaaactgcaggatgaaagaacagtgcggaagatctgtgctttggatgacaacgtctgcatggcctttgcaggcctcaccgccgatgcaaggatagtcatcaacagggcccgggtggagtgccagagccaccggctgactgtggaggacccggtcactgtggagtacatcacccgctacatcgccagtctgaagcagcgttatacgcagagcaatgggcgcaggccgtttggcatctctgccctcatccctcgggcacataccatgcctggaaggccaatgccataggccggggtgccaagtcagtgcgtgagttcctggagaagaactatactgacgaagccattgaaacagatgatctgaccattaagctggtgatcaaggcactcctggaagtggttcagtcaggtggcaaaaacattgaacttgctgtcatgaggcgagatcaatccctcaagattttaaatcctgaagaaattgagaagtatgttgctgaaattgaaaaagaaaaagaagaaaacgaaaagaagaaacaaaagaaagcatcatgatgaataaaatgtctttgcttgtaatttttaaattcatatcaatcatggatgagtctcgatgtgtaggcctttccattccatttattcacactgagtgtcctacaataaacttccgtatttttaaa

SEQ ID NO: 443817 - DNA, 842 bp, Homo sapiens
  misc_feature (11)..(11): n is a, c, g, or t
  misc_feature (618)..(618): n is a, c, g, or t
  misc_feature (626)..(626): n is a, c, g, or t
aacatacttcncaatttcttcaggatttaaaatcttgagggattgatctctgccctcatcgtgggtttcgactttgatggcactcctaggctctatcagactgacccctcgggcacataccatgcctggaaggccaatgccataggccggggtgccaagtcagtgcgtgagttcctggagaagaactatactgacgaagccattgaaacagatgatctgaccattaagctggtgatcaaggcactcctggaagtggttcagtcaggtggcaaaaacattgaacttgctgtcatgaggcgagatcaatccctcaagattttaaatcctgaagaaattgagaagtatgttgctgaaattgaaaaagaaaaagaagaaaacgaaaagaagaaacaaaagaaagcatcatgatgaataaaatgtctttgcttgtaatttttaaattcatatcaatcatggatgagtctcgatgtgtaggcctttccattccatttattcacactgagtgtcctacaataaacttccgtatttttaaaaaaaaaaaaaaaaaaaaaaaatttgtggggggcttgggccccggaaaaagtttttaaaccaattcggtggggggcgggggccccntgggtaangttgaacatggtgtcatatagctgtggttatctagaaggaagaatcggggtcctagaagtaagtgtcgtgggttgtttcacccaattaaaaaaaaggcgggggggaacccgagtgtttttggaaaaaatcccgaaatagagatcggagaggaaaaaagggcatctactacacaaggggattcaaggagacacgcatattcaaaataagcgcgtgtg

SEQ ID NO: 443818 - DNA, 1694 bp, Homo sapiens
gtcgccgcctgacgccgcccgtcgccggcagcgcaggacacggcgccgagggtggggcgcgggcgtagtggcgccgggagtcgcgggtgcgcgcaggccgtgagtgtgcgcttttgagagtcgcggcggaaggagcccggccgccgcccgccggcatgagctacgaccgcgccatcaccgtcttctcgcccgacggccacctcttccaagtggagtacgcgcaggaggccgtcaagaagggctcgaccgcggttggtgttcgaggaagagacattgttgttcttggtgtggagaagaagtcagtggccaaactgcaggatgaaagaacagtgcggaagatctgtgctttggatgacaacgtctgcatggcctttgcaggcctcaccgccgatgcaaggatagtcatcaacagggcccgggtggagtgccagagccaccggctgactgtggaggacccggtcactgtggagtacatcacccgctacatcgccagtctgaagcaggtgggtgcctgcccgcttgcatgctcacctctggcagcagggcagtcacggctccgccatggagggtcctgccatgtcacttcaggtgaatcagaaaactgatttattctggggcgtgatcctaatcttgacttgcacaagtgtaacttgacctagctcaccaatttcagtaacattgttctgttctcagttcctggcatgggatattccaaattcctgtgtctggagggaaatgatagcttttgtcttgccatcctgagtgaccagtcacaaagcagttgaagggggctggaagccaccctatgaggacacgccattagtatgtaagcagaatgtgtgtctacctgtcaaagtaatttccagtaacctgagttcacaattctggtcctaggtgagtttttctaggagtgaaaatgcagaaaaggatgttgaaagctattggctaatgtatcatttgaactgctgataacctgagaaggggctcaggcatggtttaaaatgttcgtatcttcactaagtacggttctttcctcacatgcagtttcttaattggatggcactgacctgtttcttttcttgctagcgttatacgcagagcaatgggcgcaggccgtttggcatctctgccctcatcgtgggtttcgactttgatggcactcctaggctctatcagactgacccctcgggcacataccatgcctggaaggccaatgccataggccggggtgccaagtcagtgcgtgagttcctggagaagaactatactgacgaagccattgaaacagatgatctgaccattaagctggtgatcaaggcactcctggaagtggttcagtcaggtggcaaaaacattgaacttgctgtcatgaggcgagatcaatccctcaagattttaaatcctgaagaaattgagaagtatgttgctgaaattgaaaaagaaaaagaagaaaacgaaaagattgggggcttttattttgggggggggaaaaaggagggtatgagaatgggcgccaaggggtcttgcgtggttcccgtggacccacgtttccttggtccaacggtgggtaagatcaggccgggtctcccatatagggaggtcggaataaattccgagataggcaggtaacctggttatgttcgtgcggcacaagcagggaaaacaatagaaggagggaaagggaagaacagagt

SEQ ID NO: 443819 - DNA, 1810 bp, Homo sapiens
gcctcttgatagcgcagtaaaacatacaatcgtataaccccattctcggtaagaatcagcatcaactctaaagagctctttgcaaaaggaagccacgaggcagggcctgtgtccacagctgctgtccagcactccagcttgcctcctgccactgccactggctgggcggcccatgtagggcagctgtgttccagggctggccctgggttgtcatgccctatgccacgtgagaacatacgtgtctgttttaggccaatgccataggccggggtgccaagtcagtgcgtgagttcctggagaagaactatactgacgaagccattgaaacagatgatctgaccattaagctggtgatcaaggcactcctggaagtaagtttgcatttggaatccaggcaaggtggtgaagataccacgttttggtggtgagtggtaggtagatgagcaggaaggaaggtggcaaggatccagcagtaatgcttaatgactgctgtgttccaggcactgctctggtctatggtgtatcctaactgctgtgttccttgaaatagccatgcaaggtgtgatcattagtgtctttatccagccggggcagctgagggttgtgcagggacacacagcatgagaaccagaggcaggatgtgaacccagctgtccagctgtggaatctgttctcgagccatcactaggccttccagaggcttgaactgttgctaaagtcaggggattagagaactggagatatggttgggctttgtcaagaccttgaagtgctagcaggtaaaaccagagagggactagctggaaggccaggcgggagcgtaggcatcaggattcctggttgtaaccactgtgtcaagaggagggcctggagcagcgctactgtgcaggagagaggagtcccagtgctgggaggcggaggggtgtgcaggcatcccaaacagacttcacaaatggccatgagtttaggacaaagacacaggttttgggggctgggacctctgttcctgggacggtgctgggtttgggtacacacctatttaaggtactcctgagagctgcttttgtcttgaatagggaaaggtggctaatgctcctgtcttctgtcccttcaaggtggttcagtcaggtggcaaaaacattgaacttgctgtcatgaggcgagatcaatccctcaaggtaatcaccaagtttgtctgctttctttacctgtcagttttctcccatgatcagggctgagcagtaccagttccgaaggaaacatcatagggccattctgtggttttaacattaggaaaatgtctttctgaggctccccatacgtcaaagagaagattcccatcttcctctgattagatggtccacgcgtgttctctgggcatgctgagcggctgccagtcagatctgctgctgctgctactgctgcttaatacttgtctaggtcaggccagcatcctcttgtttttcttgaggttcctctccaaagaggctgtatgagcagcagtgccaaagcctggccgccctccccagaagagggcgctggttccttggcaccttgtgtggcttaggtaaccatgaagtttttttctatagattttaaatcctgaagaaattgagaagtatgttgctgaaattgaaaaagaaaaagaagaaaacgaaaagaagaaacaaaagaaagcatcatgatgaataaaatgtctttgcttgtaatttttaaattcatatcaatcatggatgagtctcgatgtgtaggcctttccattccatttattcacactgagtgtcctacaataaacttccgtatttttaaa

SEQ ID NO: 443820 - DNA, 512 bp, Homo sapiens
  misc_feature (27)..(27): n is a, c, g, or t
  misc_feature (86)..(86): n is a, c, g, or t
  misc_feature (102)..(102): n is a, c, g, or t
agcttcccccatagaaggattccatgngcagatcaggacacttagcaaatgtaaaaataaaatctaactctcatttgacaagcagngaaagaaaagtaaatnccagataagcttttgatttttgtattgtttgcatccccttgccctcaataaataaagttcttttttagttccaaaaaaaaaaaaaaaaaaaaaaaaaaaaaaaaaatggtgatcaaggcactcctggaagtggttcagtcaggtggcaaaaacattgaacttgctgtcatgaggcgagatcaatccctcaagattttaaatcctgaagaaattgagaagtatgttgctgaaattgaaaaagaaaaagaagaaaacgaaaagaagaaacaaaagaaagcatcatgatgaataaaatgtctttgcttgtaatttttaaattcatatcaatcatggatgagtctcgatgtgtaggcctttccattccatttattcacactgagtgtcctacaataaacttccgtatttttaaa

SEQ ID NO: 443821 - DNA, 458 bp, Homo sapiens
gtaggcctttccattccatttattcacactgagtgtcctacaataaacttccgtatttttaaactgtttttttttttaagagaatgtgtatctttaggtgcaatcacagcagtcctctcatctctcacccttctttttcaaccctgagccaccgtaattgagctttcctttctgttccttgtggctaagacagtaagccagtgtgagacacaggttcctcccttgggaagtcagagctgctgccctgggtcctgcagagaaacctggccttcagcagacctgtttctctgttgtagacacagaatgacttccgtttgcttttagaccttcattctagtcccctaatgaatgtataatgtcaaggacacaaacacaagtagccctgggttcattctgtagagcagcagctttgttcaaagcagctttgcatgtctgactttcatagaccacatcttgac

SEQ ID NO: 443822 - DNA, 1027 bp, Homo sapiens
gtcgccgcctgacgccgcccgtcgccggcagcgcaggacacggcgccgagggtggggcgcgggcgtagtggcgccgggagtcgcgggtgcgcgcaggccgtgagtgtgcgcttttgagagtcgcggcggaaggagcccggccgccgcccgccggcatgagctacgaccgcgccatcaccgtcttctcgcccgacggccacctcttccaagtggagtacgcgcaggaggccgtcaagaagggctcgaccgcggttggtgttcgaggaagagacattgttgttcttggtgtggagaagaagtcagtggccaaactgcaggatgaaagaacagtgcggaagatctgtgctttggatgacaacgtctgcatggcctttgcaggcctcaccgccgatgcaaggatagtcatcaacagggcccgggtggagtgccagagccaccggctgactgtggaggacccggtcactgtggagtacatcacccgctacatcgccagtctgaagcagcgttatacgcagagcaatgggcgcaggccgtttggcatctctgccctcatcgtgggtttcgactttgatggcactcctaggctctatcagactgacccctcgggcacataccatgcctggaaggccaatgccataggccggggtgccaagtcagtgcgtgagttcctggagaagaactatactgacgaagccattgaaacagatgatctgaccattaagctggtgatcaaggcactcctggaagtggttcagtcaggtggcaaaaacattgaacttgctgtcatgaggcgagatcaatccctcaagattttaaatcctgaagaaattgagaagtatgttgctgaaattgaaaaagaaaaagaagaaaacgaaaagaagaaacaaaagaaagcatcatgatgaataaaatgtctttgcttgtaatttttaaattcatatcaatcatggatgagtctcgatgtgtaggcctttccattccatttattcacactgagtgtcctacaataaacttccgtatttttaaa

SEQ ID NO: 443823 - DNA, 1293 bp, Homo sapiens
gtcgccgcctgacgccgcccgtcgccggcagcgcaggacacggcgccgagggtggggcgcgggcgtagtggcgccgggagtcgcgggtgcgcgcaggccgtgagtgtgcgcttttgagagtcgcggcggaaggagcccggccgccgcccgccggcatgagctacgaccgcgccatcaccgtcttctcgcccgacggccacctcttccaagtggagtacgcgcaggaggccgtcaagaagggctcgaccgcggttggtgttcgaggaagagacattgttgttcttggtgtggagaagaagtcagtggccaaactgcaggatgaaagaacagtgcggaagatctgtgctttggatgacaacgtctgcatggcctttgcaggcctcaccgccgatgcaaggatagtcatcaacagggcccgggtggagtgccagagccaccggctgactgtggaggacccggtcactgtggagtacatcacccgctacatcgccagtctgaagcagcgttatacgcagagcaatgggcgcaggccgtttggcatctctgccctcatcgtgggtttcgactttgatggcactcctaggctctatcagactgacccctcgggcacataccatgcctggaaggccaatgccataggccggggtgccaagtcagtgcgtgagttcctggagaagaactatactgacgaagccattgaaacagatgatctgaccattaagctggtgatcaaggcactcctggaagtggttcagtcaggtggcaaaaacattgaacttgctgtcatgaggcgagatcaatccctcaagattttaaatcctgaagaaattgagaagtatgttgctgaaattgaaaaagaaaaagaagaaaacgaaaagaagaaacaaaagaaagcatcatgatgaataaaatgtctttgcttgtaatttttaaattcatatcaatcatggatgagtctcgatgtgtaggcctttccattccatttattcacactgagtgtcctacaataaacttccgtatttttaaaaaaaaaaaaaaaaaaaaaacaaaaaaagaaaatggataaacaataaaaaggataacctttacttaaagcataacatatttagtataattgcaaactttcatttatcaagcgcaaaaactctgtatactcctttttttattaaaaaaactatcaagtttaaatggggcccctcttttaccacattctttttttaccccttagcactttttttactggggccccatattagcctcttttgtgcaatattccccttagggggggttttc

SEQ ID NO: 443824 - DNA, 1351 bp, Homo sapiens
  misc_feature (1110)..(1110): n is a, c, g, or t
gtcgccgcctgacgccgcccgtcgccggcagcgcaggacacggcgccgagggtggggcgcgggcgtagtggcgccgggagtcgcgggtgcgcgcaggccgtgagtgtgcgcttttgagagtcgcggcggaaggagcccggccgccgcccgccggcatgagctacgaccgcgccatcaccgtcttctcgcccgacggccacctcttccaagtggagtacgcgcaggaggccgtcaagaagggctcgaccgcggttggtgttcgaggaagagacattgttgttcttggtgtggagaagaagtcagtggccaaactgcaggatgaaagaacagtgcggaagatctgtgctttggatgacaacgtctgcatggcctttgcaggcctcaccgccgatgcaaggatagtcatcaacagggcccgggtggagtgccagagccaccggctgactgtggaggacccggtcactgtggagtacatcacccgctacatcgccagtctgaagcagcgttatacgcagagcaatgggcgcaggccgtttggcatctctgccctcatcgtgggtttcgactttgatggcactcctaggctctatcagactgacccctcgggcacataccatgcctggaaggccaatgccataggccggggtgccaagtcagtgcgtgagttcctggagaagaactatactgacgaagccattgaaacagatgatctgaccattaagctggtgatcaaggcactcctggaagtggttcagtcaggtggcaaaaacattgaacttgctgtcatgaggcgagatcaatccctcaagattttaaatcctgaagaaattgagaagtatgttgctgaaattgaaaaagaaaaagaagaaaacgaaaagaagaaacaaaagaaagcatcatgatgaataaaatgtctttgcttgtaatttttaaattcatatcaatcatggatgagtctcgatgtgtaggcctttccattccatttattcacactgagtgtcctacaataaacttccgtatttttaaaaaaaaaaaaaaaaaaaaaaaaaaaaaaaaaaaaaaaaaaaaaaaaaaaaaaaaaccaaaaaaaccaaaaaaaactacacacancaaaacttaaacataacgcatcaccccactaatctaatctatttcgcctattgcccatttttttctaaattcccacaattcagtgccacttggcccaaattcgcgttaattgggcatttccccttataagggccttattcacattccgggtaaccggtttaccctagtgggcttaaataaaccgggtggtcccaattaaatttcttaacattgttccccttgggcttccttgggctttccc

SEQ ID NO: 443825 - DNA, 1301 bp, Homo sapiens
  misc_feature (1077)..(1077): n is a, c, g, or t
  misc_feature (1085)..(1085): n is a, c, g, or t
gtcgccgcctgacgccgcccgtcgccggcagcgcaggacacggcgccgagggtggggcgcgggcgtagtggcgccgggagtcgcgggtgcgcgcaggccgtgagtgtgcgcttttgagagtcgcggcggaaggagcccggccgccgcccgccggcatgagctacgaccgcgccatcaccgtcttctcgcccgacggccacctcttccaagtggagtacgcgcaggaggccgtcaagaagggctcgaccgcggttggtgttcgaggaagagacattgttgttcttggtgtggagaagaagtcagtggccaaactgcaggatgaaagaacagtgcggaagatctgtgctttggatgacaacgtctgcatggcctttgcaggcctcaccgccgatgcaaggatagtcatcaacagggcccgggtggagtgccagagccaccggctgactgtggaggacccggtcactgtggagtacatcacccgctacatcgccagtctgaagcagcgttatacgcagagcaatgggcgcaggccgtttggcatctctgccctcatcgtgggtttcgactttgatggcactcctaggctctatcagactgacccctcgggcacataccatgcctggaaggccaatgccataggccggggtgccaagtcagtgcgtgagttcctggagaagaactatactgacgaagccattgaaacagatgatctgaccattaagctggtgatcaaggcactcctggaagtggttcagtcaggtggcaaaaacattgaacttgctgtcatgaggcgagatcaatccctcaagattttaaatcctgaagaaattgagaagtatgttgctgaaattgaaaaagaaaaagaagaaaacgaaaagaagaaacaaaagaaagcatcatgatgaataaaatgtctttgcttgtaatttttaaattcatatcaatcatggatgagtctcgatgtgtaggcctttccattccaaaaaaaaaaaaaaaaaaaaaaaaaaaaaaaatttgtggggggcttgggccccggaaaaagtttttaaaccaattcggtggggggcgggggccccntgggtaangttgaacatggtgtcatatagctgtggttatctagaaggaagaatcggggtcctagaagtaagtgtcgtgggttgtttcacccaattaaaaaaaaggcgggggggaacccgagtgtttttggaaaaaatcccgaaatagagatcggagaggaaaaaagggcatctactacacaaggggattcaaggagacacgcatattcaaaataagcgcgtgtg

SEQ ID NO: 443826 - DNA, 1394 bp, Homo sapiens
  misc_feature (1342)..(1342): n is a, c, g, or t
gtcgccgcctgacgccgcccgtcgccggcagcgcaggacacggcgccgagggtggggcgcgggcgtagtggcgccgggagtcgcgggtgcgcgcaggccgtgagtgtgcgcttttgagagtcgcggcggaaggagcccggccgccgcccgccggcatgagctacgaccgcgccatcaccgtcttctcgcccgacggccacctcttccaagtggagtacgcgcaggaggccgtcaagaagggctcgaccgcggttggtgttcgaggaagagacattgttgttcttggtgtggagaagaagtcagtggccaaactgcaggatgaaagaacagtgcggaagatctgtgctttggatgacaacgtctgcatggcctttgcaggcctcaccgccgatgcaaggatagtcatcaacagggcccgggtggagtgccagagccaccggctgactgtggaggacccggtcactgtggagtacatcacccgctacatcgccagtctgaagcagcgttatacgcagagcaatgggcgcaggccgtttggcatctctgccctcatcgtgggtttcgactttgatggcactcctaggctctatcagactgacccctcgggcacataccatgcctggaaggccaatgccataggccggggtgccaagtcagtgcgtgagttcctggagaagaactatactgacgaagccattgaaacagatgatctgaccattaagctggtgatcaaggcactcctggaagtggttcagtcaggtggcaaaaacattgaacttgctgtcatgaggcgagatcaatccctcaagattttaaatcctgaagaaattgagaagtatgttgctgaaattgaaaaagaaaaagaagaaaacgaaaagacccttttgtgcggcgcgcgcgcacttgggccctcggaaaaggtttctataaaaccacttccgcgttgggcgcggccggggggcgccccatgaggttaaacagtggcgaccactgtggcgccataagcgcgggtgccccaagagggagagcagacctccccgggggcgcacaaagcagacatcagagggcgcgtggggcgattctctctccacagcatatataaaaaaagagcgcgcccgcagaggggagggaaaacaccccgcgaagacgcggcgttgttctctgatgagagaacaaaaatctctcgccgagagcagtaccgaagagatatctccagaggagacggggccataccaaaactaacaggcggggggagaacctattataatcttacacgcagcaggggggcgaggtcctcccaacagcgcgagaagcctgcccggaaaatatttatctcaccaantattttaaggcgcccccgcgacagaggctcggtggggtgggagtgaggggca

SEQ ID NO: 443827 - DNA, 956 bp, Homo sapiens
  misc_feature (48)..(48): n is a, c, g, or t
agagagagagagagagagagagagagagagagagagagagagagaganactcgtgccgaatgagcccggccgccgcccgccggcatgagctacgaccgcgccatcaccgtcttctcgcccgacggccacctcttccaagtggagtacgcgcaggaggccgtcaagaagggctcgaccgcggttggtgttcgaggaagagacattgttgttcttggtgtggagaagaagtcagtggccaaactgcaggatgaaagaacagtgcggaagatctgtgctttggatgacaacgtctgcatggcctttgcaggcctcaccgccgatgcaaggatagtcatcaacagggcccgggtggagtgccagagccaccggctgactgtggaggacccggtcactgtggagtacatcacccgctacatcgccagtctgaagcagcgttatacgcagagcaatgggcgcaggccgtttggcatctctgccctcatcgtgggtttcgactttgatggcactcctaggctctatcagactgacccctcgggcacataccatgcctggaaggccaatgccataggccggggtgccaagtcagtgcgtgagttcctggagaagaactatactgacgaagccattgaaacagatgatctgaccattaagctggtgatcaaggcactcctggaagtggttcagtcaggtggcaaaaacattgaacttgctgtcatgaggcgagatcaatccctcaagattttaaatcctgaagaaattgagaagtatgttgctgaaattgaaaaagaaaaagaagaaaacgaaaagaagaaacaaaagaaagcatcatgatgaataaaatgtctttgcttgtaatttttaaattcatatcaatcatggatgagtctcgatgtgtaggcctttccattccatttattcacactgagtgtcctacaataaacttccgtatttttaaa

SEQ ID NO: 443828 - DNA, 1174 bp, Homo sapiens
gtcgccgcctgacgccgcccgtcgccggcagcgcaggacacggcgccgagggtggggcgcgggcgtagtggcgccgggagtcgcgggtgcgcgcaggccgtgagtgtgcgcttttgagagtcgcggcggaaggagcccggccgccgcccgccggcatgagctacgaccgcgccatcaccgtcttctcgcccgacggccacctcttccaagtggagtacgcgcaggaggccgtcaagaagggctcgaccgcggttggtgttcgaggaagagacattgttgttcttggtgtggagaagaagtcagtggccaaactgcaggatgaaagaacagtgcggaagatctgtgctttggatgacaacgtctgcatggcctttgcaggcctcaccgccgatgcaaggatagtcatcaacagggcccgggtggagtgccagagccaccggctgactgtggaggacccggtcactgtggagtacatcacccgctacatcgccagtctgaagcagcgttatacgcagagcaatgggcgcaggccgtttggcatctctgccctcatcgtgggtttcgactttgatggcactcctaggctctatcagactgacccctcgggcacataccatgcctggaaggccaatgccataggccggggtgccaagtcagtgcgtgagttcctggagaagaactatactgacgaagccattgaaacagatgatctgaccattaagctggtgatcaaggcactcctggaagtggttcagtcaggtggcaaaaacattgaacttgctgtcatgaggcgagatcaatccctcaaggaaaatgtctttctgaggctccccatacgtcaaagagaagattcccatcttcctctgattagatggtccacgcgtgttctctgggcatgctgagcggctgccagtcagatctgctgctgctgctactgctgcttaatacttgtctagattttaaatcctgaagaaattgagaagtatgttgctgaaattgaaaaagaaaaagaagaaaacgaaaagaagaaacaaaagaaagcatcatgatgaataaaatgtctttgcttgtaatttttaaattcatatcaatcatggatgagtctcgatgtgtaggcctttccattccatttattcacactgagtgtcctacaataaacttccgtatttttaaa

SEQ ID NO: 443829 - DNA, 964 bp, Homo sapiens
gtcgccgcctgacgccgcccgtcgccggcagcgcaggacacggcgccgagggtggggcgcgggcgtagtggcgccgggagtcgcgggtgcgcgcaggccgtgagtgtgcgcttttgagagtcgcggcggaaggagcccggccgccgcccgccggcatgagctacgaccgcgccatcaccgtcttctcgcccgacggccacctcttccaagtggagtacgcgcaggaggccgtcaagaagggctcgaccgcggttggtgttcgaggaagagacattgttgttcttggtgtggagaagaagtcagtggccaaactgcaggatgaaagaacagtgcggaagatctgtgctttggatgacaacgtctgcatggcctttgcaggcctcaccgccgatgcaaggatagtcatcaacagggcccgggtggagtgccagagccaccggctgactgtggaggacccggtcactgtggagtacatcacccgctacatcgccagtctgaagcagcgttatacgcagagcaatgggcgcaggccgtttggcatctctgccctcatcgtgggtttcgactttgatggcactcctaggctctatcagactgacccctcgggcacataccatgcctggaaggccaatgccataggccggggtgccaagtcagtgcgtgagttcctggagaagaactatactgacgaagccattgaaacagatgatctgaccattaagctggtgatcaaggcactcctggaaattttaaatcctgaagaaattgagaagtatgttgctgaaattgaaaaagaaaaagaagaaaacgaaaagaagaaacaaaagaaagcatcatgatgaataaaatgtctttgcttgtaatttttaaattcatatcaatcatggatgagtctcgatgtgtaggcctttccattccatttattcacactgagtgtcctacaataaacttccgtatttttaaa

SEQ ID NO: 443830 - DNA, 2185 bp, Homo sapiens
gtcgccgcctgacgccgcccgtcgccggcagcgcaggacacggcgccgagggtggggcgcgggcgtagtggcgccgggagtcgcgggtgcgcgcaggccgtgagtgtgcgcttttgagagtcgcggcggaaggagcccggccgccgcccgccggcatgagctacgaccgcgccatcaccgtcttctcgcccgacggccacctcttccaagtggagtacgcgcaggaggccgtcaagaagggctcgaccgcggttggtgttcgaggaagagacattgttgttcttggtgtggagaagaagtcagtggccaaactgcaggatgaaagaacagtgcggaagatctgtgctttggatgacaacgtctgcatggcctttgcaggcctcaccgccgatgcaaggatagtcatcaacagggcccgggtggagtgccagagccaccggctgactgtggaggacccggtcactgtggagtacatcacccgctacatcgccagtctgaagcagcgttatacgcagagcaatgggcgcaggccgtttggcatctctgccctcatcgtgggtttcgactttgatggcactcctaggctctatcagactgacccctcgggcacataccatgcctggaaggccaatgccataggccggggtgccaagtcagtgcgtgagttcctggagaagaactatactgacgaagccattgaaacagatgatctgaccattaagctggtgatcaaggcactcctggaagtaagtttgcatttggaatccaggcaaggtggtgaagataccacgttttggtggtgagtggtaggtagatgagcaggaaggaaggtggcaaggatccagcagtaatgcttaatgactgctgtgttccaggcactgctctggtctatggtgtatcctaactgctgtgttccttgaaatagccatgcaaggtgtgatcattagtgtctttatccagccggggcagctgagggttgtgcagggacacacagcatgagaaccagaggcaggatgtgaacccagctgtccagctgtggaatctgttctcgagccatcactaggccttccagaggcttgaactgttgctaaagtcaggggattagagaactggagatatggttgggctttgtcaagaccttgaagtgctagcaggtaaaaccagagagggactagctggaaggccaggcgggagcgtaggcatcaggattcctggttgtaaccactgtgtcaagaggagggcctggagcagcgctactgtgcaggagagaggagtcccagtgctgggaggcggaggggtgtgcaggcatcccaaacagacttcacaaatggccatgagtttaggacaaagacacaggttttgggggctgggacctctgttcctgggacggtgctgggtttgggtacacacctatttaaggtactcctgagagctgcttttgtcttgaatagggaaaggtggctaatgctcctgtcttctgtcccttcaaggtggttcagtcaggtggcaaaaacattgaacttgctgtcatgaggcgagatcaatccctcaaggtaatcaccaagtttgtctgctttctttacctgtcagttttctcccatgatcagggctgagcagtaccagttccgaaggaaacatcatagggccattctgtggttttaacattaggaaaatgtctttctgaggctccccatacgtcaaagagaagattcccatcttcctctgattagatggtccacgcgtgttctctgggcatgctgagcggctgccagtcagatctgctgctgctgctactgctgcttaatacttgtctaggtcaggccagcatcctcttgtttttcttgaggttcctctccaaagaggctgtatgagcagcagtgccaaagcctggccgccctccccagaagagggcgctggttccttggcaccttgtgtggcttaggtaaccatgaagtttttttctatagattttaaatcctgaagaaattgagaagtatgttgctgaaattgaaaaagaaaaagaagaaaacgaaaagaagaaacaaaagaaagcatcatgatgaataaaatgtctttgcttgtaatttttaaattcatatcaatcatggatgagtctcgatgtgtaggcctttccattccatttattcacactgagtgtcctacaataaacttccgtatttttaaa

SEQ ID NO: 443831 - DNA, 597 bp, Homo sapiens
gcactcctaggctctatcagagtcgaaacccacgatgagggcagagatgccaaacggcctgcgcccattgctctgcgtataacgctgcttcagactggcgatgtagcgggtgatgtactccacagtgggtttcgactttgatggcactcctaggctctatcagactgacccctcgggcacataccatgcctggaaggccaatgccataggccggggtgccaagtcagtgcgtgagttcctggagaagaactatactgacgaagccattgaaacagatgatctgaccattaagctggtgatcaaggcactcctggaagtggttcagtcaggtggcaaaaacattgaacttgctgtcatgaggcgagatcaatccctcaagattttaaatcctgaagaaattgagaagtatgttgctgaaattgaaaaagaaaaagaagaaaacgaaaagaagaaacaaaagaaagcatcatgatgaataaaatgtctttgcttgtaatttttaaattcatatcaatcatggatgagtctcgatgtgtaggcctttccattccatttattcacactgagtgtcctacaataaacttccgtatttttaaa

SEQ ID NO: 443832 - DNA, 455 bp, Homo sapiens
agttctgacggagactctcgacttcccctcgaggcacataccatgccttggaaggccaatgccataggccggggtgccaagtcagtgcgtgagttcctggagaagaactatactgacgaagccattgaaacagatgatctgaccattaagctggtgatcaaggcactcctggaagtggttcagtcaggtggcaaaaacattgaacttgctgtcatgaggcgagatcaatccctcaagattttaaatcctgaagaaattgagaagtatgttgctgaaattgaaaaagaaaaagaagaaaacgaaaagaagaaacaaaagaaagcatcatgatgaataaaatgtctttgcttgtaatttttaaattcatatcaatcatggatgagtctcgatgtgtaggcctttccattccatttattcacactgagtgtcctacaataaacttccgtatttttaaa

SEQ ID NO: 443833 - DNA, 447 bp, Homo sapiens
taacttgctgaaggtcatacagctcttaactggtgtatctgggacttgaataatctgggttagtagcagattgaaattatttggcatatggactagtcagggttctccaggaacacaaaacctgtaggatggtgatattgagagatttgttccaaggagttggctcctgtgatgatggaggctgacaagtccctagatctgcagttggcaggctggagatccaggagagctgatggtggaagatggtgtaatttccagtcctagcctgaggcctgagaactggaactggtggaatagttcttgtctgaaggcctccaagctcgagacccaggaagagccaatatttcagatagagttggaaggtgggaaaaagccatcatcccccaaaggcagtgaggcaggagggattctccctcacttgggggtggatcagactcttgttctata

SEQ ID NO: 443834 - DNA, 382 bp, Homo sapiens
agacgcacatgtacacacacatgtgcacacacacgcacacctatacaccttctcttggagctgtacatcaggtaacataggggcttttttccctctcactcacccctacctaatagtccccgtctcatttcatcaaatacaaatacaaatcctcatgggaaaaataaatgtattcagtgagctcatggaagggaggagagagcagaataaatcttggtctagttagcaagtatttccacacagaggctcccatcaggtcagctgaaaagtccagttagatgaactccaaggaaaatcgcttggacccaggaggcagaggttgtagggagcagagatcgcaccattgcactccagcctgggcaacagagcaagactccatctg

SEQ ID NO: 443835 - DNA, 4345 bp, Homo sapiens
  misc_feature (1562)..(1562): n is a, c, g, or t
  misc_feature (1667)..(1667): n is a, c, g, or t
  misc_feature (2071)..(2071): n is a, c, g, or t
  misc_feature (3399)..(3399): n is a, c, g, or t
  misc_feature (4345)..(4345): n is a, c, g, or t
agacgcacatgtacacacacatgtgcacacacacgcacacctatacaccttctcttggagctgtacatcaggtaacataggggcttttttccctctcactcacccctacctaatagtccccgtctcatttcatcaaatacaaatacaaatcctcatgggaaaaataaatgtattcagtgagctcatggaagggaggagagagcagaataaatcttggtctagttagcaagtatttccacacagaggctcccatcaggtcagctgaaaagtccagttagatgaactccaaggaacgctgaagacccacaaggaactgtccaggaactcactgaaagcaccttaaacagattgtaacaggaatgatgattgcagatacactgttgaacttaaaaatgggatagaggaactgcagacaacacaggtgttttaaaccgtaggctcggtagagaaagcagcgagtctccgcagatggccggcactgagagccagcaagaagcggaggagatgggccttcagcagggggttgcggggggagctttaaactgagccctgtaaacatggcagaactgctcagtgggagactctcagcacagacggtcatggggaagtgagtgcagttcatttgtaatcttgttgtcgagttctgggttttttttgtttgtttcgtaactttaaaggtatgcactttatatagatttatttatttgctgggaccgttactcagagttcctagaaatgtacacagcttttttaccagggttactcctcagaatcacttgtcacttctttaaatgaatgaatgaatgtgccaggccctatgcctggaggttgggagcttcatctacatcacattctaacaggtgaccactggggtaagcactgtgtgactgcaaagccagggtgtgtttccatcaacacccagatgaccgtgcctatgtgcccctgttgtcctccctccaggactgcctcctcaccccacccctttctgcagctcctcatctaaacatctcgcctggtgaggtcacggcttagcctgttggccagtggccccaccaccatccttccccctgtgcagattggaggaggccaggtctctccccttagctcctatgtccccttcaccccccatggcacagatgagacattcacagagtttgcagatgatggaagagaagactccaggttgccaggtgtgtccactctcaggaacccccagcccaagcctcactgctcgtgttcccagccaaccccagcacgggggatacgccggtgctgtttccctgctcagatacaaccagttaccagaaacgacctcacccctccaaccactttccaaggtgccaggacagagaagcccttcactggcccacccagggcagttgacagagggatgccctccttggaggggagcctcacctctacccacagggccgcggccttgtcctggattctcaccggggcagtcacgtcaggatggagaggtcccatgtcagccagttctttggtgggggtcatgtagtctgaaatgacctgccgatggtccaggctgagccagggaagcngagcctgggtgcctttttggtgcctactctgacttgagttggattcatgccacagacccaccttcttgagcaacaacacatatagccaccaacacaagagccagncacacactgagcagagaaagtccctgtcgcctcaccacccaaaaactccagctttgcagagaccaaggttcttctctacctttgcagaagcctctgtgaccaaacccggagcttgcccttctgaggcctctagcatttctccaggtgtttttcagaggacttggtttaaatttgttcaccccaaatgtggtctttcccggatcatgaaaggatctgccgcaaaggtgaatctgagtctcctcagagtcatatgagactgaaactgcttataacatttccgtgacctaataagtcttccaaaaatgtagggtattaagagtttagtgacattaaaaagtttagtcgaaaatatcgtgattcaggtatatttagacatttgattcatgccaaattgccactgttancagaaaacacaccccaagcacattaatgcctagatatttcaaacccttttctgcccacacattcttaaaaataatatactgagaaatctatatacaggtttttttttaattagcttggaaaagagcagttgtattctgtttgaacagctgctaatgtcaattcctgtgggaagaaagaccaaagaacatggagttacaccaagaattttaaaacaaagacgctgtccctttcctgagcaccgtgcagccaagactgagagatcagtctgagacctgtgattaaggagtgttttctacatagcgtataattatggagccacacaagtgggccattactctgttgagtgcttcatgtttgaggtattttcgtgttccaacttacattaaagtgtttataaaacaggaaaaatccacgagcaggtattgacactatccatattagatcatcacaaaattatatatatagcagagtcataaacaatgagaaacggtcttcccacacttgctttaaatggccatgacctagtgtttagggaaagcagtaaaatcagcgaggagctcgtgggaaaaatgagacgggccctgagggggtgactcatgggccaagcagggccacacaggtaccaggccgccacgtcctctcctgcctctcactctctggagactggacttcctttactgcctcctttctgacatttcctagacatcagactttgctacttagtacacaaacggggttcccttttaaatttgttcactctagttagcatttgcagaagctgtgaagaattacagagagatgatgtgttgggtaagagatggtttaaaagtccagcttgctgtttttcattaagtgtcttgaaaatgagtaagtggcgttcctggaggggaacaatcatataattccgcagggtgggtctaaacttgttttctgatagtgtttagcagctcatggctctgagggcacctgataacacagcagccaggcgctgatgagaagtgtgtgccagacagacccgagtgtggcttggctcttgccttatgttcctttctctgttcagagaagcgtgagatgagattttgtgattatattgtactccttgggctgactttcccatgcacagaatgttttacacatcctgatagctgagctgaaaatgcaaagagaagggaaaatgccttaaattgttctggctaatttagaagcagcaggccttggaagtctttgtcctgtgtccctgaacaaatcttatgggagctctggtacctatgccagaaaatgcacataggcacaacacttttacatacacgttcacacaccccacccntatggagaacttttttctaaataagagaaagaaaaattttaagacttacaagttatgtttaggtattttacatggttcagaaaacaagacatgaagcggtataaactgagaagtcttgttcccacaaccccacgtgccaggtacacataaccatttttattcacctctagcttgtgcttccaatgtttgttaggcatatgtaaataagtgaatagataagcatttctccctccttttgctgacatgagtggtggcatgttttgcccctggcttttatcccttgaccccattccagtacctagagacctgcttcatttttttagatgtgtaatacttcatgtgtgcgtgtgccttagtgattaactcgtgcactgtgcagggacatcgggctgggatcagtttgttcactgatatatacagcgctgcgggagataccctcacatgtgtatcatttggtccatgtgcaggtgtgtctggaagatagaattctaggcgtagaattgataggttaaatgtatttatagggaaaaaatcaatataaaactttgcgtgtaatgatatttgcgtgcttttttttttaatttttttacccaagaaaaaaaataataaagcagaaaaaagaagaaacaaatgtgtggggggggagacggacctccggggaaaaggctctctatcacacacaactctcgttgggagccccgggcgccccaggagggggcaatgacacacaggttggagcctgaagcggtgaccccgaagagagatccgtgcggcccagaaccacacgcggggagagatcacccacgaaagtaaaaaagagccccgcggggggcacacacagcgtgctgtgggtggaacaaccctgagaagcaggctgagagaggcaaacggggagctcgttccaagggaggccaaggagccggtttaaaccaggcgcggcgagggn

SEQ ID NO: 443836 - DNA, 948 bp, Homo sapiens
  misc_feature (9)..(9): n is a, c, g, or t
  misc_feature (11)..(11): n is a, c, g, or t
  misc_feature (16)..(16): n is a, c, g, or t
  misc_feature (23)..(23): n is a, c, g, or t
  misc_feature (25)..(25): n is a, c, g, or t
  misc_feature (948)..(948): n is a, c, g, or t
cctcgacantntcggncagagtngngaggaaagaaaaattttaagacttacaagttatgtttaggtattttacatggttcagaaaacaagacatgaagcggtataaactgagaagtcttgttcccacaaccccacgtgccaggtacacataaccatttttattcacctctagcttgtgcttccaatgtttgttaggcatatgtaaataagtgaatagataagcatttctccctccttttgctgacatgagtggtggcatgttttgcccctggcttttatcccttgaccccattccagtacctagagacctgcttcatttttttagatgtgtaatacttcatgtgtgcgtgtgccttagtgattaactcgtgcactgtgcagggacatcgggctgggatcagtttgttcactgatatatacagcgctgcgggagataccctcacatgtgtatcatttggtccatgtgcaggtgtgtctggaagatagaattctaggcgtagaattgataggttaaatgtatttatagggaaaaaatcaatataaaactttgcgtgtaatgatatttgcgtgcttttttttttaatttttttacccaagaaaaaaaataataaagcagaaaaaagaagaaacaaatgtgtggggggggagacggacctccggggaaaaggctctctatcacacacaactctcgttgggagccccgggcgccccaggagggggcaatgacacacaggttggagcctgaagcggtgaccccgaagagagatccgtgcggcccagaaccacacgcggggagagatcacccacgaaagtaaaaaagagccccgcggggggcacacacagcgtgctgtgggtggaacaaccctgagaagcaggctgagagaggcaaacggggagctcgttccaagggaggccaaggagccggtttaaaccaggcgcggcgagggn

SEQ ID NO: 443837 - DNA, 270 bp, Homo sapiens
  misc_feature (42)..(42): n is a, c, g, or t
ggatccgcccccctcggcctcccaaagtgctgggattacagntgtgagctaccacacccggctttttttttattctgtgtagagaaagggtttcaccatgttgcccatgttggtcttgaactcctggccccatgtgatccacccacctcggcctcccaaagtgctgggattacaggcattgagccaccgtgcccagccagctcacacctgaagctcttaagtggaaagcctctttgcttctctgctcttgtcttcctcttccttggttta

SEQ ID NO: 443838 - DNA, 2060 bp, Homo sapiens
tcctttaaacccccctgcatcgtagagagcgggctggattctctgtggtgctgatggaggagggggagcaggttgaaacaatcgagtgggcgcgccaggactccccagctcctggcggggaagggagggggagcccctgttctgcgcagggaggcggcggggctggggggcccccggaacgaggaagaggcaggggtgaccgctagaataggaaagtgctcacccccgggaggcaaaatttcgttcagatcgcacattaattggagatatctgattaattccagcttctgatgactataaatggcgattctctaccaaggtgtctatattaaaaaaaaaatcattccgtgtcatcccccacgtcaggcctgctcgtgggcgtgaggctgtacttcctccgcccccttctaatggagtgaaccattcccagctctcccccccccctcagcctctctctctctctctctttctctctctctctctctttctgtctcttcctcgctccctctctttctctcctccctctgccttcccagtgcataaagtctctgtcgctcccggaacttgttggcaatgcctattttttggctttcccccgcgttctctaaactaactatttaaaggtctgcggtcgcaaatggtttgactaaacgtaggatgggacttaagttgaacggcagatatatttcactgatcctcgcggtgcaaatagcgtatctggtgcaggccgtgagagcagcgggcaagtgcgatgcggtcttcaagggcttttcggactgtttgctcaagctgggcgacagcatggccaactacccgcagggcctggacgacaagacgaacatcaagaccgtgtgcacatactgggaggatttccacagctgcacggtcacagcccttacggattgccaggaaggggcgaaagatatgtgggataaactgagaaaagaatccaaaaacctcaacatccaaggcagcttattcgaactctgcggcagcggcaacggggcggcggggtccctgctcccggcgttcccggtgctcctggtgtctctctcggcagctttagcgacctggctttccttctgagcgtggggccagctccccccgcgcgcccacccacactcactccatgctcccggaaatcgagaggaagatccattagttctttggggacgttgtgattctctgtgatgctgaaaacactcatataggattgtgggaaatcctgattctcttttttatttcgtttgatttcttgtgttttatttgccaaatgttaccaatcagtgagcaagcaagcacagccaaaatcggacctcagctttagtccgtcttcacacacaaataagaaaacggcaaacccaccccattttttaattttattattattaattttttttgttggcaaaagaatctcaggaacggccctgggccacctactatattaatcatgctagtaacatgaaaaatgatgggctcctcctaataggaaggcgaggagaggagaaggccaggggaatgaattcaagagagatgtccacggacgaaacatacggtgaataattcacgctcacgtcgttcttccacagtatcttgttttgatcatttccactgcacatttctcctcaagaaaagcgaaaggacagactgttggctttgtgtttggaggataggagggagagagggaaggggctgaggaaatctctggggtaagagtaaaggcttccagaagacatgctgctatggtcactgaggggttagctttatctgctgttgttgatgcatccgtccaagttcactgcctttattttccctcctccctcttgttttagctgttacacacacagtaatacctgaatatccaacggtatagatcacaagggggggatgttaaatgttaatctaaaatatagctaaaaaaagattttgacataaaagagccttgattttaaaaaaaaaagagagagagatgtaatttaaaaagtttattataaattaaattcagcaaaaaaagatttgctacaaagtatagagaagtataaaataaaagttattgtttg

SEQ ID NO: 443839 - DNA, 882 bp, Homo sapiens
ttatagaggaagatgtgtggagtgtatttccattttgaacgagctctatcagaacaaagattcgtttattcttaagattttacgtcagtgttcgatttgttagtattgtagtcgcaagggtatttaatgttcgctgtaaggtgaactcggaggtttgagaaggtttacgtatctgccccagcggaggtcgaagttaacctcggtcccttccccagtgcttcccgttccggattaaaaagcgcaaggcccgcctcgctcttcctgcagcaatttgcaaacgggtacgctctcggaagctgctacgggttcggtcaccttcctcttcggcgtctggcccggcgctcgcggacaggcgcccgcgttgggggccgggggattgaggtgtccggtcctcccgggacacattcacacacaagcgcagccgccagaaagctgccgaggaccaggccggcgcccagggtcgtgggcgccagtgcggatttcgattctgagattcaccctttcttccccgccctaacgctgtgcttctctggcgccctcccggcgcccgggctgctttgggccgctaggcactcagcttccagccgggttcgtcggcctcagggcggaaagagatggccacagccgcgcgcccgcagcctggtacctgtccttccagtcccgcgcctcggggtttggccgtccagaggccgggggcttgggggcttggggcttggaccttcgtgcggcctgtgtttcctcctcctcctcctcctcccgccgctcagcttttatccctgcctgctctctgcagggagtcctgagctggggccaggagccccgggccgcggcgagctcactttcagcagcagggctggcacctggagaagaacagcctctccc

SEQ ID NO: 443840 - DNA, 1990 bp, Homo sapiens
aacaagtattagagtcgactccgggtggtatttcgtcacaggcttgccgttgcatgagttcctttggcctcccggaacttgttggcaatgcctattttttggctttcccccgcgttctctaaactaactatttaaaggtctgcggtcgcaaatggtttgactaaacgtaggatgggacttaagttgaacggcagatatatttcactgatcctcgcggtgcaaatagcgtatctggtgcaggccgtgagagcagcgggcaagtgcgatgcggtcttcaagggcttttcggactgtttgctcaagctgggcgacagcatggccaactacccgcagggcctggacgacaagacgaacatcaagaccgtgtgcacatactgggaggatttccacagctgcacggtcacagcccttacggattgccaggaaggggcgaaagatatgtgggataaactgagaaaagaatccaaaaacctcaacatccaaggcagcttattcgaactctgcggcagcggcaacggggcggcggggtccctgctcccggcgttcccggtgctcctggtgtctctctcggcagctttagcgacctggctttccttctgagcgtggggccagctccccccgcgcgcccacccacactcactccatgctcccggaaatcgagaggaagatccattagttctttggggacgttgtgattctctgtgatgctgaaaacactcatataggattgtgggaaatcctgattctcttttttatttcgtttgatttcttgtgttttatttgccaaatgttaccaatcagtgagcaagcaagcacagccaaaatcggacctcagctttagtccgtcttcacacacaaataagaaaacggcaaacccaccccattttttaattttattattattaattttttttgttggcaaaagaatctcaggaacggccctgggccacctactatattaatcatgctagtaacatgaaaaatgatgggctcctcctaataggaaggcgaggagaggagaaggccaggggaatgaattcaagagagatgtccacggacgaaacatacggtgaataattcacgctcacgtcgttcttccacagtatcttgttttgatcatttccactgcacatttctcctcaagaaaagcgaaaggacagactgttggctttgtgtttggaggataggagggagagagggaaggggctgaggaaatctctggggtaagagtaaaggcttccagaagacatgctgctatggtcactgaggggttagctttatctgctgttgttgatgcatccgtccaagttcactgcctttattttccctcctccctcttgttttagctgttacacacacagtaatacctgaatatccaacggtatagatcacaagggggggatgttaaatgttaatctaaaatatagctaaaaaaagattttgacataaaagagccttgattttaaaaaaaaaagagagagagatgtaatttaaaaagtttattataaattaaattcagcaaaaaaagatttgctacaaagtatagagaagtataaaataaaagttattgtttgaaatgggggtgtcgtttgtttcctaccccaacctgctttcttgacccagttctcagggaacctgaagggacacaggatgccggtgataagctcacctcttcaggaagccgcttcaagcagacctgccaccttcaagcagaccctcctcacttaagccacttggccacttccccgaaaccgtgcttccttaaaaaagagaaaatgaaagttgtttttaaattaattacaaagcagagattctttctgtttgagatttagaggaactgggcttgctcgcacaggcagacaatgccagtggccggccgtctgcccccgcctcaggcgggccggagccctaaccacgatcctcgcaggctcggcctaaccacgattcgcctcttcctgtgcggtggccagaggcagcttgcgaaggaacc

SEQ ID NO: 443841 - DNA, 1902 bp, Homo sapiens
cgcacgctgcagccgagaccccttctgtcacctcaaaatggaagatcgcattgcgagagctgtgacagggcttgctggggaagtgttgggagacgaaggagggagcgaggagaaagagaaataaaagggatgagggagcgtatctggtgcaggccgtgagagcagcgggcaagtgcgatgcggtcttcaagggcttttcggactgtttgctcaagctgggcgacagcatggccaactacccgcagggcctggacgacaagacgaacatcaagaccgtgtgcacatactgggaggatttccacagctgcacggtcacagcccttacggattgccaggaaggggcgaaagatatgtgggataaactgagaaaagaatccaaaaacctcaacatccaaggcagcttattcgaactctgcggcagcggcaacggggcggcggggtccctgctcccggcgttcccggtgctcctggtgtctctctcggcagctttagcgacctggctttccttctgagcgtggggccagctccccccgcgcgcccacccacactcactccatgctcccggaaatcgagaggaagatccattagttctttggggacgttgtgattctctgtgatgctgaaaacactcatataggattgtgggaaatcctgattctcttttttatttcgtttgatttcttgtgttttatttgccaaatgttaccaatcagtgagcaagcaagcacagccaaaatcggacctcagctttagtccgtcttcacacacaaataagaaaacggcaaacccaccccattttttaattttattattattaattttttttgttggcaaaagaatctcaggaacggccctgggccacctactatattaatcatgctagtaacatgaaaaatgatgggctcctcctaataggaaggcgaggagaggagaaggccaggggaatgaattcaagagagatgtccacggacgaaacatacggtgaataattcacgctcacgtcgttcttccacagtatcttgttttgatcatttccactgcacatttctcctcaagaaaagcgaaaggacagactgttggctttgtgtttggaggataggagggagagagggaaggggctgaggaaatctctggggtaagagtaaaggcttccagaagacatgctgctatggtcactgaggggttagctttatctgctgttgttgatgcatccgtccaagttcactgcctttattttccctcctccctcttgttttagctgttacacacacagtaatacctgaatatccaacggtatagatcacaagggggggatgttaaatgttaatctaaaatatagctaaaaaaagattttgacataaaagagccttgattttaaaaaaaaaagagagagagatgtaatttaaaaagtttattataaattaaattcagcaaaaaaagatttgctacaaagtatagagaagtataaaataaaagttattgtttgaaatgggggtgtcgtttgtttcctaccccaacctgctttcttgacccagttctcagggaacctgaagggacacaggatgccggtgataagctcacctcttcaggaagccgcttcaagcagacctgccaccttcaagcagaccctcctcacttaagccacttggccacttccccgaaaccgtgcttccttaaaaaagagaaaatgaaagttgtttttaaattaattacaaagcagagattctttctgtttgagatttagaggaactgggcttgctcgcacaggcagacaatgccagtggccggccgtctgcccccgcctcaggcgggccggagccctaaccacgatcctcgcaggctcggcctaaccacgattcgcctcttcctgtgcggtggccagaggcagcttgcgaaggaacc

SEQ ID NO: 443842 - DNA, 1510 bp, Homo sapiens
actacatacttccggagactacatacttcggactacatacttccggactacatacttccgactacatacttctgactacatacttccgactacatacatctgactacatacttccgactacatacttctgactacatacttccgactacatacttctcactccatgctcccggaaatcgagaggaagatccattagttctttggggacgttgtgattctctgtgatgctgaaaacactcatataggattgtgggaaatcctgattctcttttttatttcgtttgatttcttgtgttttatttgccaaatgttaccaatcagtgagcaagcaagcacagccaaaatcggacctcagctttagtccgtcttcacacacaaataagaaaacggcaaacccaccccattttttaattttattattattaattttttttgttggcaaaagaatctcaggaacggccctgggccacctactatattaatcatgctagtaacatgaaaaatgatgggctcctcctaataggaaggcgaggagaggagaaggccaggggaatgaattcaagagagatgtccacggacgaaacatacggtgaataattcacgctcacgtcgttcttccacagtatcttgttttgatcatttccactgcacatttctcctcaagaaaagcgaaaggacagactgttggctttgtgtttggaggataggagggagagagggaaggggctgaggaaatctctggggtaagagtaaaggcttccagaagacatgctgctatggtcactgaggggttagctttatctgctgttgttgatgcatccgtccaagttcactgcctttattttccctcctccctcttgttttagctgttacacacacagtaatacctgaatatccaacggtatagatcacaagggggggatgttaaatgttaatctaaaatatagctaaaaaaagattttgacataaaagagccttgattttaaaaaaaaaagagagagagatgtaatttaaaaagtttattataaattaaattcagcaaaaaaagatttgctacaaagtatagagaagtataaaataaaagttattgtttgaaatgggggtgtcgtttgtttcctaccccaacctgctttcttgacccagttctcagggaacctgaagggacacaggatgccggtgataagctcacctcttcaggaagccgcttcaagcagacctgccaccttcaagcagaccctcctcacttaagccacttggccacttccccgaaaccgtgcttccttaaaaaagagaaaatgaaagttgtttttaaattaattacaaagcagagattctttctgtttgagatttagaggaactgggcttgctcgcacaggcagacaatgccagtggccggccgtctgcccccgcctcaggcgggccggagccctaaccacgatcctcgcaggctcggcctaaccacgattcgcctcttcctgtgcggtggccagaggcagcttgcgaaggaacc

SEQ ID NO: 443843 - DNA, 1279 bp, Homo sapiens
  misc_feature (1205)..(1205): n is a, c, g, or t
  misc_feature (1268)..(1268): n is a, c, g, or t
  misc_feature (1273)..(1273): n is a, c, g, or t
tcctttaaacccccctgcatcgtagagagcgggctggattctctgtggtgctgatggaggagggggagcaggttgaaacaatcgagtgggcgcgccaggactccccagctcctggcggggaagggagggggagcccctgttctgcgcagggaggcggcggggctggggggcccccggaacgaggaagaggcaggggtgaccgctagaataggaaagtgctcacccccgggaggcaaaatttcgttcagatcgcacattaattggagatatctgattaattccagcttctgatgactataaatggcgattctctaccaaggtgtctatattaaaaaaaaaatcattccgtgtcatcccccacgtcaggcctgctcgtgggcgtgaggctgtacttcctccgcccccttctaatggagtgaaccattcccagctctcccccccccctcagcctctctctctctctctctttctctctctctctctctttctgtctcttcctcgctccctctctttctctcctccctctgccttcccagtgcataaagtctctgtcgctcccggaacttgttggcaatgcctattttttggctttcccccgcgttctctaaactaactatttaaaggtctgcggtcgcaaatggtttgactaaacgtaggatgggacttaagttgaacggcagatatatttcactgatcctcgcggtgcaaatagcgtatctggtgcaggccgtgagagcagcgggcaagtgcgatgcggtcttcaagggcttttcggactgtttgctcaagctgggcgacagcatggccaactacccgcagggcctggacgacaagacgaacatcaagaccgtgtgcacatactgggaggatttccacagctgcacggtcacagcccttacggattgccaggaaggggcgaaagatatgtgggataaactgagaaaagaatccaaaaacctcaacatccaaggcagcttattcgaactctgcggcagcggcaacggggcggcggggtccctgctcccggcgttcccggtgctcctggtgtctctctcggcagctttagcgacctggctttccttctgagcgtggggccagctccccccgcgcgcccacccacactcactccatgctcccggaaatcgagaggaagatccattagttctttggggacgttgtgattctctgtattcaaaattaacagntcatgctgaaaaccactcaaacgattatattttttacattataagaagtaaaatatattattnaaaantaatga

SEQ ID NO: 443844 - DNA, 1250 bp, Homo sapiens
tcctttaaacccccctgcatcgtagagagcgggctggattctctgtggtgctgatggaggagggggagcaggttgaaacaatcgagtgggcgcgccaggactccccagctcctggcggggaagggagggggagcccctgttctgcgcagggaggcggcggggctggggggcccccggaacgaggaagaggcaggggtgaccgctagaataggaaagtgctcacccccgggaggcaaaatttcgttcagatcgcacattaattggagatatctgattaattccagcttctgatgactataaatggcgattctctaccaaggtgtctatattaaaaaaaaaatcattccgtgtcatcccccacgtcaggcctgctcgtgggcgtgaggctgtacttcctccgcccccttctaatggagtgaaccattcccagctctcccccccccctcagcctctctctctctctctctttctctctctctctctctttctgtctcttcctcgctccctctctttctctcctccctctgccttcccagtgcataaagtctctgtcgctcccggaacttgttggcaatgcctattttttggctttcccccgcgttctctaaactaactatttaaaggtctgcggtcgcaaatggtttgactaaacgtaggatgggacttaagttgaacggcagatatatttcactgatcctcgcggtgcaaatagcgtatctggtgcaggccgtgagagcagcgggcaagtgcgatgcggtcttcaagggcttttcggactgtttgctcaagctgggcgacagcatggccaactacccgcagggcctggacgacaagacgaacatcaagaccgtgtgcacgtaagtgtcctctctggccggctggacttcggttttgggggcgctactgaggtcggagagtgccgagcctccccgcctgcgctcagcgttcagcgccagcgcgaatccgcatcggctcactcttgccttctggctccaacccccaggcctaggaccaggcccccgggttagaacctgcgcttcccaaggggatcccacagcccggggtgggatatggaggaggatccttcaatatagacccagtcccagctctacgcggcctctcaggcttgcacagaggtgcgcatgctcgacatgctgggagccagggcaaggggcatgaaggattgctacgctcttgcgtgaacgagtgacctgccaggtgttctctgaagaacagttagtttggatttg

SEQ ID NO: 443845 - DNA, 1209 bp, Homo sapiens
  misc_feature (1135)..(1135): n is a, c, g, or t
  misc_feature (1198)..(1198): n is a, c, g, or t
  misc_feature (1203)..(1203): n is a, c, g, or t
ttatagaggaagatgtgtggagtgtatttccattttgaacgagctctatcagaacaaagattcgtttattcttaagattttacgtcagtgttcgatttgttagtattgtagtcgcaagggtatttaatgttcgctgtaaggtgaactcggaggtttgagaaggtttacgtatctgccccagcggaggtcgaagttaacctcggtcccttccccagtgcttcccgttccggattaaaaagcgcaaggcccgcctcgctcttcctgcagcaatttgcaaacgggtacgctctcggaagctgctacgggttcggtcaccttcctcttcggcgtctggcccggcgctcgcggacaggcgcccgcgttgggggccgggggattgaggtgtccggtcctcccgggacacattcacacacaagcgcagccgccagaaagctgccgaggaccaggccggcgcccagggtcgtgggcgccagtgcggatttcgattctgagattcaccctttcttccccgccctaacgctgtgcttctctggcgccctcccggcgcccgggctgctttgggccgctaggcactcagcttccagccgggttcgtcggcctcagggcggaaagagatggccacagccgcgcgcccgcagcctgcgtatctggtgcaggccgtgagagcagcgggcaagtgcgatgcggtcttcaagggcttttcggactgtttgctcaagctgggcgacagcatggccaactacccgcagggcctggacgacaagacgaacatcaagaccgtgtgcacatactgggaggatttccacagctgcacggtcacagcccttacggattgccaggaaggggcgaaagatatgtgggataaactgagaaaagaatccaaaaacctcaacatccaaggcagcttattcgaactctgcggcagcggcaacggggcggcggggtccctgctcccggcgttcccggtgctcctggtgtctctctcggcagctttagcgacctggctttccttctgagcgtggggccagctccccccgcgcgcccacccacactcactccatgctcccggaaatcgagaggaagatccattagttctttggggacgttgtgattctctgtattcaaaattaacagntcatgctgaaaaccactcaaacgattatattttttacattataagaagtaaaatatattattnaaaantaatga

SEQ ID NO: 443846 - DNA, 2476 bp, Homo sapiens
tcctttaaacccccctgcatcgtagagagcgggctggattctctgtggtgctgatggaggagggggagcaggttgaaacaatcgagtgggcgcgccaggactccccagctcctggcggggaagggagggggagcccctgttctgcgcagggaggcggcggggctggggggcccccggaacgaggaagaggcaggggtgaccgctagaataggaaagtgctcacccccgggaggcaaaatttcgttcagatcgcacattaattggagatatctgattaattccagcttctgatgactataaatggcgattctctaccaaggtgtctatattaaaaaaaaaatcattccgtgtcatcccccacgtcaggcctgctcgtgggcgtgaggctgtacttcctccgcccccttctaatggagtgaaccattcccagctctcccccccccctcagcctctctctctctctctctttctctctctctctctctttctgtctcttcctcgctccctctctttctctcctccctctgccttcccagtgcataaagtctctgtcgctcccggaacttgttggcaatgcctattttttggctttcccccgcgttctctaaactaactatttaaaggtctgcggtcgcaaatggtttgactaaacgtaggatgggacttaagttgaacggcagatatatttcactgatcctcgcggtgcaaatagcgtatctggtgcaggccgtgagagcagcgggcaagtgcgatgcggtcttcaagggcttttcggactgtttgctcaagctgggcgacagcatggccaactacccgcagggcctggacgacaagacgaacatcaagaccgtgtgcacatactgggaggatttccacagctgcacggtcacagcccttacggattgccaggaaggggcgaaagatatgtgggataaactgagaaaagaatccaaaaacctcaacatccaaggcagcttattcgaactctgcggcagcggcaacggggcggcggggtccctgctcccggcgttcccggtgctcctggtgtctctctcggcagctttagcgacctggctttccttctgagcgtggggccagctccccccgcgcgcccacccacactcactccatgctcccggaaatcgagaggaagatccattagttctttggggacgttgtgattctctgtgatgctgaaaacactcatataggattgtgggaaatcctgattctcttttttatttcgtttgatttcttgtgttttatttgccaaatgttaccaatcagtgagcaagcaagcacagccaaaatcggacctcagctttagtccgtcttcacacacaaataagaaaacggcaaacccaccccattttttaattttattattattaattttttttgttggcaaaagaatctcaggaacggccctgggccacctactatattaatcatgctagtaacatgaaaaatgatgggctcctcctaataggaaggcgaggagaggagaaggccaggggaatgaattcaagagagatgtccacggacgaaacatacggtgaataattcacgctcacgtcgttcttccacagtatcttgttttgatcatttccactgcacatttctcctcaagaaaagcgaaaggacagactgttggctttgtgtttggaggataggagggagagagggaaggggctgaggaaatctctggggtaagagtaaaggcttccagaagacatgctgctatggtcactgaggggttagctttatctgctgttgttgatgcatccgtccaagttcactgcctttattttccctcctccctcttgttttagctgttacacacacagtaatacctgaatatccaacggtatagatcacaagggggggatgttaaatgttaatctaaaatatagctaaaaaaagattttgacataaaagagccttgattttaaaaaaaaaagagagagagatgtaatttaaaaagtttattataaattaaattcagcaaaaaaagatttgctacaaagtatagagaagtataaaataaaagttattgtttgaaatgggggtgtcgtttgtttcctaccccaacctgctttcttgacccagttctcagggaacctgaagggacacaggatgccggtgataagctcacctcttcaggaagccgcttcaagcagacctgccaccttcaagcagaccctcctcacttaagccacttggccacttccccgaaaccgtgcttccttaaaaaagagaaaatgaaagttgtttttaaattaattacaaagcagagattctttctgtttgagatttagaggaactgggcttgctcgcacaggcagacaatgccagtggccggccgtctgcccccgcctcaggcgggccggagccctaaccacgatcctcgcaggctcggcctaaccacgattcgcctcttcctgtgcggtggccagaggcagcttgcgaaggaacc

SEQ ID NO: 443847 - DNA, 2406 bp, Homo sapiens
ttatagaggaagatgtgtggagtgtatttccattttgaacgagctctatcagaacaaagattcgtttattcttaagattttacgtcagtgttcgatttgttagtattgtagtcgcaagggtatttaatgttcgctgtaaggtgaactcggaggtttgagaaggtttacgtatctgccccagcggaggtcgaagttaacctcggtcccttccccagtgcttcccgttccggattaaaaagcgcaaggcccgcctcgctcttcctgcagcaatttgcaaacgggtacgctctcggaagctgctacgggttcggtcaccttcctcttcggcgtctggcccggcgctcgcggacaggcgcccgcgttgggggccgggggattgaggtgtccggtcctcccgggacacattcacacacaagcgcagccgccagaaagctgccgaggaccaggccggcgcccagggtcgtgggcgccagtgcggatttcgattctgagattcaccctttcttccccgccctaacgctgtgcttctctggcgccctcccggcgcccgggctgctttgggccgctaggcactcagcttccagccgggttcgtcggcctcagggcggaaagagatggccacagccgcgcgcccgcagcctgcgtatctggtgcaggccgtgagagcagcgggcaagtgcgatgcggtcttcaagggcttttcggactgtttgctcaagctgggcgacagcatggccaactacccgcagggcctggacgacaagacgaacatcaagaccgtgtgcacatactgggaggatttccacagctgcacggtcacagcccttacggattgccaggaaggggcgaaagatatgtgggataaactgagaaaagaatccaaaaacctcaacatccaaggcagcttattcgaactctgcggcagcggcaacggggcggcggggtccctgctcccggcgttcccggtgctcctggtgtctctctcggcagctttagcgacctggctttccttctgagcgtggggccagctccccccgcgcgcccacccacactcactccatgctcccggaaatcgagaggaagatccattagttctttggggacgttgtgattctctgtgatgctgaaaacactcatataggattgtgggaaatcctgattctcttttttatttcgtttgatttcttgtgttttatttgccaaatgttaccaatcagtgagcaagcaagcacagccaaaatcggacctcagctttagtccgtcttcacacacaaataagaaaacggcaaacccaccccattttttaattttattattattaattttttttgttggcaaaagaatctcaggaacggccctgggccacctactatattaatcatgctagtaacatgaaaaatgatgggctcctcctaataggaaggcgaggagaggagaaggccaggggaatgaattcaagagagatgtccacggacgaaacatacggtgaataattcacgctcacgtcgttcttccacagtatcttgttttgatcatttccactgcacatttctcctcaagaaaagcgaaaggacagactgttggctttgtgtttggaggataggagggagagagggaaggggctgaggaaatctctggggtaagagtaaaggcttccagaagacatgctgctatggtcactgaggggttagctttatctgctgttgttgatgcatccgtccaagttcactgcctttattttccctcctccctcttgttttagctgttacacacacagtaatacctgaatatccaacggtatagatcacaagggggggatgttaaatgttaatctaaaatatagctaaaaaaagattttgacataaaagagccttgattttaaaaaaaaaagagagagagatgtaatttaaaaagtttattataaattaaattcagcaaaaaaagatttgctacaaagtatagagaagtataaaataaaagttattgtttgaaatgggggtgtcgtttgtttcctaccccaacctgctttcttgacccagttctcagggaacctgaagggacacaggatgccggtgataagctcacctcttcaggaagccgcttcaagcagacctgccaccttcaagcagaccctcctcacttaagccacttggccacttccccgaaaccgtgcttccttaaaaaagagaaaatgaaagttgtttttaaattaattacaaagcagagattctttctgtttgagatttagaggaactgggcttgctcgcacaggcagacaatgccagtggccggccgtctgcccccgcctcaggcgggccggagccctaaccacgatcctcgcaggctcggcctaaccacgattcgcctcttcctgtgcggtggccagaggcagcttgcgaaggaacc

SEQ ID NO: 443848 - DNA, 952 bp, Homo sapiens
agcggagttggcgcgggccgcgggcgaggcggggccgcgcgcggggtcccctcctcctgccggtcaggtcccctcaggagcgccgggcgcagtctgcgcctcccgctccccgcctccggccgggtccgggacgccgcggctgtggggtcggcccgctaaggacaaggtcgggagactgggtggcgatgcccgagtgcgactggaggcagccgagcggaggcgacggcggttgggatctgtccctcctgaccggggagcgggactcggacgggcgccggttaacagaaccttctggatatttaacagatggcccaattaactataaatataaaactaaatgtacttggctcattgaaggctatccaaatgcagtgttaagattaagattcaatcattttgctacagaatgtagctgggatcatatgtatgtttatgatggagattcaatatatgcacctttaatagctgtacttagtggtttgatagtccctgaaataaggggcaatgaaactgtgcctgaagttgttactacatctggctatgcactgttacatttttttagtgatgctgcgtataatctaactggtttcaacattttctattcaatcaattcttgtcctaacaattgctctggtcatgggaagtgtacaactagtgtctctgttccaagtcaagtatattgtgaatgtgataaatactggaagggtgaagcttgtgatattccttactgtaaagccaattgcggcagtccagatcacggttactgtgacctgactggagaaaaattatgtgtctgcaatgatagttggcaaggtcctgattgttctttgaatgttccctctactgagtcttactggattctgccaaacgttaaacccttcagtccttctgtaggtcgggcttcacataaagcagttttacacgggaaatttatgtgggtgattggtggata

SEQ ID NO: 443849 - DNA, 797 bp, Homo sapiens
gatcacggttactgtgacctgactggagaaaaattatgtgtctgcaatgatatttcggcaggtcctgacactccggtgaaagtcacctccacggagtcgtactggattccgccacacgttaaacccttcagtccttctgtaggtcgggcttcacataaagcagttttacacgggaaatttatgtgggtgattggtggatatacttttaactacagttcttttcaaatggtcctaaagttaacagaaccttctggatatttaacagatggcccaattaactataaatataaaactaaatgtacttggctcattgaaggctatccaaatgcagtgttaagattaagattcaatcattttgctacagaatgtagctgggatcatatgtatgtttatgatggagattcaatatatgcacctttaatagctgtacttagtggtttgatagtccctgaaataaggggcaatgaaactgtgcctgaagttgttactacatctggctatgcactgttacatttttttagtgatgctgcgtataatctaactggtttcaacattttctattcaatcaattcttgtcctaacaattgctctggtcatgggaagtgtacaactagtgtctctgttccaagtcaagtatattgtgaatgtgataaatactggaagggtgaagcttgtgatattccttactgtaaagccaattgcggcagtccagatcacggttactgtgacctgactggagaaaaattatgtgtctgcaatgatagttggcaaggtaagcatgtgtggtgtgatggctt

SEQ ID NO: 443850 - DNA, 324 bp, Homo sapiens
ctgctatatgtcttaaagttattttaaggtaattattttcattattttattttctcttccaggttaacagaaccttctggatatttaacagatggcccaattaactataaatataaaactaaatgtacttggctcattgaaggctagtaagtatacagtctgagtcaaattaatgtattttattcttaaatgataaaggtgatcatattaatgtcagagcattagagtataattactttatcatttagtttgtttattattagataatatttacaacttctagacatcacatttaatgtaaattacactacctcttcacttgtg

SEQ ID NO: 443851 - DNA, 1033 bp, Homo sapiens
agcggagttggcgcgggccgcgggcgaggcggggccgcgcgcggggtcccctcctcctgccggtcaggtcccctcaggagcgccgggcgcagtctgcgcctcccgctccccgcctccggccgggtccgggacgccgcggctgtggggtcggcccgctaaggacaaggtcgggagactgggtggcgatgcccgagtgcgactggaggcagccgagcggaggcgacggcggttgggatctgtccctcctgaccggggagcgggactcggacgggcgccgggatttcgccagggaataaaaatgttcttcaaatgtttcttgaggatagaagattgatagttgggggaagaaatgcagaagcaaatatagtatcaaaagtggtacttcagttctcttagcattgattccagtcttctgttttcatttgaaaagaataaagcactcagaataacaagccattccttccttacacaggttaacagaaccttctggatatttaacagatggcccaattaactataaatataaaactaaatgtacttggctcattgaaggctatccaaatgcagtgttaagattaagattcaatcattttgctacagaatgtagctgggatcatatgtatgtttatgatggagattcaatatatgcacctttaatagctgtacttagtggtttgatagtccctgaaataaggggcaatgaaactgtgcctgaagttgttactacatctggctatgcactgttacatttttttagtgatgctgcgtataatctaactggtttcaacattttctattcaatcaattcttgtcctaacaattgctctggtcatgggaagtgtacaactagtgtctctgttccaagtcaagtatattgtgaatgtgataaatactggaagggtgaagcttgtgatattccttactgtaaagccaattgcggcagtccagatcacggttactgtgacctgactggagaaaaattatgtgtctgcaatgatagttggcaaggtaagcatgtgtggtgtgatggctt

SEQ ID NO: 443852 - DNA, 682 bp, Homo sapiens
agcggagttggcgcgggccgcgggcgaggcggggccgcgcgcggggtcccctcctcctgccggtcaggtcccctcaggagcgccgggcgcagtctgcgcctcccgctccccgcctccggccgggtccgggacgccgcggctgtggggtcggcccgctaaggacaaggtcgggagactgggtggcgatgcccgagtgcgactggaggcagccgagcggaggcgacggcggttgggatctgtccctcctgaccggggagcgggactcggacgggcgccggtgaggaggaggagaagcggcggcggagaggttttctgcggccggaattcccttcaacagcatccctgtcggcgcccgcgagcgcagtctcgccgggcaggggcgccggggaagatggagactgggggccgggcccgcactggtaccccgcagccagcggccccgggggtgtggagggctcggccggcgggcggcggcggcgggggcgcctcctcctggctgctggacgggaacagctggctgctgtgctatggcttcctctacctggcgctctacgcgcaggtgtcccagtccaagccgtgcgagaggaccggctcctgcttctcgggccgctgtgtcaactccacctgcctctgcgacccgggctgggtgggggaccagtgccagcactgccagggcaggttc

SEQ ID NO: 443853 - DNA, 2437 bp, Homo sapiens
acgccgcacacgcagccccgcccctgcagagatcagcgctgggacggaacccgggttcctctcgaaccgggattgtgacgcttttggcctggctggccgctgttttctgtcccactttttactcgggcctgcgtccgctgccgccgtccctcagtttgcccccggaggaggcagggcggccgtgccttctgccgtgcgcccgcgtggctgccaccgcccctccgaatcctccggggccgcagaggggttcgctacggagggaggtgggggccttcgggaggaggaggcggaggaggcggaggaggagggaaggaagatggcggccgtggaactagagtggatcccagagactctctataacaccgccatctccgctgtcgtggacaactacatccgctcccgccgagacatccgctccttgcccgagaacatccagtttgatgtttactacaagctttaccaacagggacgcttatgtcaactgggcagtgaattttgtgaattggaagtttttgctaaagtactgagagctttggataaaagacatttgcttcatcattgttttcaggctttgatggatcatggtgttaaagttgcttcagtcttggcctactcattcagtaggcggtgctcttatatagcagaatcagatgctgcagtaaaggaaaaagccattcaggttggctttgttttaggtggctttctttcagatgcaggctggtacagtgatgctgagaaagtttttctgtcctgccttcagttgtgtactctacacgatgagatgcttcattggtttcgtgcagtagaatgttgtgtgaggttgcttcatgtgcgaaatggaaactgcaaatatcatttgggtgaagaaacatttaaattagctcagacatatatggataaactatcaaaacatggccagcaagcaaataaagctgcactctatggagaactgtgtgcactcctatttgcaaaaagtcactatgatgaggcatacaaatggtgcatcgaggcaatgaaagaaattacagcaggcttaccagtgaaagttgtggtggatgtcttaagacaagcttctaaggcttgtgtagtaaaacgtgaatttaagaaggcagaacagttaattaaacatgcagtgtatttggcacgggatcattttggatccaaacacccaaaatattctgatacactgctagattatgggttctacttactcaatgtagataatatctgtcagtctgttgcaatttatcaggcagcccttgacattagacagtcagtgtttggtggcaaaaatatccacgtagcaacagctcatgaagatttggcctactcttcttatgtccaccagtatagctctgggaaatttgacaatgcactatttcatgcagaaagagctattggtatcattacccacatcctacctgaagatcatcttcttttggcttcttcaaagagggtgaaagcacttattttagaggagattgcaattgattgtcataataaggaaactgaacagaggctgcttcaagaagctcatgatttgcacctgtcttcactccaactagctaaaaaagcttttggggaatttaatgtacagactgcaaaacactatggaaaccttggaagactttatcagtcaatgagaaaatttaaggaagctgaagaaatgcacatcaaagcaattcagattaaagaacaacttcttggtcaagaagattatgaagtagccctttcagtgggacatctggcttctttatataattatgacatgaatcagtatgaaaatgctgagaaactttatttgcgatctatagcaattgggaagaaactttttggtgagggctacagtggactagaatatgattatcgaggtctcattaaactttacaactccattggaaattacgagaaagtgtttgaatatcacaatgttctgtctaactggaaccggttgcgagatcggcaatattcagtgacagatgctcttgaagatgtcagcaccagcccccagtccactgaagaagtggtgcagtccttcctgatttctcagaatgtcgagggaccgagctgctgagggaggacctcagttaaccaattaccttttcccggattccagggaattcatactgtgaaatcaaaaccatgttgttttggggggctggaatttgcattgaaacactggtccagtccattgaagaccctattttgggtgatccctatcttgcagaatgtctgtaggaataagcatatattcagttatattcagcatgtaccgcatgtgtaagtagtctggcccacattttcaacctagtagaacaaacaacaggaaatcttttttttgttgtttttaaaaaattcattttgcagaaagcctgaaagaaaaaaaatacccctaaataaaactatttaagagtttaaaagagttgcattcttatta

SEQ ID NO: 443854 - DNA, 3557 bp, Homo sapiens
gaaacttcatggagaagtactgccggctcttggacttttcttccagaagtggcacatttcacttctcatattttaattgtggaaagaaatcacatggccacacttgtctttgtttgtttgtttgtctgtttgtttgagacagcgtctcactccatcaccaaggtctggagtgcagtggcatgatcacggctcactgcagcctccacctcagctctaccaagtagctggaactacaggtgcacatcaccacgcccagctaatttttttgatttttgatagagacaaagtctcactatgttataacccaggctggtttcaaacttctgagcttggcgatcctcccatctcagcctcccaaagtgctgggattacaggcatgagccactgtgcccggccacaagatttatatttctatatgcaaattatatttagagtttttagaaaatgcctagctataatcatggatcaaaataacaactgagagctgtgcacagtggcacatccctgtagccaggagttcaagtccagcctgggcaacataaaaccttgtctcttaagaaaagaattaataggaaaacttgaaattctatgcatttaaaaattattaaatgaaaataacaaaagattgttgtcagccactccaggactgggatataaggaccttagaaaatgctgtggtaaattctgcccccattgttttattttaataatagcggaaaatgggggtataccagctttgtaaggtaactttgttttgacagatttgtactaggactgactgtcaaaattttaaactttataattttcccagcttatatacagatctgtttataatagaatttttaagtacttggaaggaaagaaattacaaatagaacctttgtatttatgtttggagggttttttttcttattaactcttatagccagaatatataaactacacgtattttagcacactaatgaactgtttgagagttaaccatttttcactttatctttaggcttgtgtagtaaaacgtgaatttaagaaggcagaacagttaattaaacatgcagtgtatttggcacggtaggtgattattattaaaaatatccttttaaattgtctctatactttatatcctaataattttgtgtctttttatagggatcattttggatccaaacacccaaaatattctgatacactgctagattatgggttctacttactcaatgtagataatatctgtcagtctgttgcaatttatcaggtatgttaatggttaccctttttttctttcaacctgtattgacttgctgacctgtatttgtttgtggtgtataaaccactctaaaaatgactttttgacaactaccccgcccaccaatataggttgcatcattattttattaagtattacctagaaggtgtaaaagttaatgctttgggaattaaagaaaatcattcaggaaaggaattattgggttgtgagctcatatgtgggagtagttttccattttttatttacccatgtaatggcttgtctttgttgttgatttagcaaatgtcactaaaactgcctttgtagtaacaaagatggctgataattattttaggtctttcttactcattctcaggtaaatgatgtattatgccattgctgtagacaaggcatacttgacttcaaggttcacttttttttttgagacacagttttgatctgtcgcccaggctggagtgcaatggcgcaatctcagctcactgcaacctctgcctcccaagttcaagcaattctcgtgcctcggcctcctgagtatctgggattacaggcccgtgccacaatgcccggctaatttttgtatttttagtagagaggcggtttcagcatgttgcccaggctagtcttgaactactgacctcaggtgatccacccacctttgcctcccagaagtactaggattacaggtgtgagccaccgcgcctggcctaaggttcacttttgaagaaggaaacagagcaaaacattcccaatgtcttgattctcaagacataggaatgattattattattattattattaagccgtggccttttaagtcaaactcgtatcttcagaaattcaggacttctaggtgactttcatgttctgtaatttaaatacagcaggactttctgggcttcaaaattttatggtgttaggcatatagatatatatttaaattactaggatgtttaatttaactaggtggtattttctacagtattgacaaatatttttatgattctttcaggcagcccttgacattagacagtcagtgtttggtggcaaaaatatccacgtagcaacagctcatgaagatttggcctactcttcttatgtccaccagtatagctctgggaaatttgacaatgcactgtaagttccacattccttttctctgaaggaggaaatactgtttttgttttattttgttttttcccattagggaactattattacattaataatagtacttgatatactttatggattgaacttgtcttcctggagctttatcagaatgcctaaaatgttcttgaagtcatttaaaatcataccagttttcaggtgcagaggctcccgcctgtaatcccagcactttgggaggctgaggtggaaagattgcttgagcccaagagtttgagaccctgtctactcaaaaaatttttaaaactagatggacgttttggtgcatgcctgtggtcccagcttctctggaggctgaggcaggagaatcgcttgagcccaagaggtcaaggatgcagcgaagcatattcacaccactgcattccagcctgggcaacagagtgagaccctgtttccaaaaataaataaagtcatactaatttataggttattcatttagcctttatgtgatttactattgagacttgtatattttcatgcagaatataacttatgttttgagtatttccttcaataatttttgagtaatacagtagcaaacttaataacctaaaaacttcttggtgataacacatagaaatactgaataacaattgtctttttaaatatataactgagcttgcaagagtgagggggaaatcccccaagggccaataatggacactaaaatttaaaggattaagtatggcctgtggtataactgctctggggtgatgggaaagtttacagatttctgtaaccttggtttaagaaacagcctataggaggctgggagttagaactgaaaccctcacatgaagcaaagtcaagactgcaacccggccgggcgtggtggctcacgcctgtaatctcagcactttggcgggccaaggcaggtggatcacctgaggtcaggagttcaagacaagcctggccaagacgatgaaatgccatctctactaaaaatacaaaaattagccgggcatggtggtgggcacttgtaatcccagctattcgggaggctgaggcagacaattgcttgaacccaagaggtggaggttgcagtgagccgagatcacgccactgctctccagcctaggcaacagagtgagactctgtctccaaa

SEQ ID NO: 443855 - DNA, 555 bp, Homo sapiens
ccctcacggattacctcaactcttaacttcccgatcttgatcttgatggcaaccaaggtaacacaatatgaaatttttacttttaaaagtcgacattaataagagttaaaaaactaaacatgcgaccaggtgtggtggctcacacctgtaatcccagcactttgggaggccaaggtgggtggatcacctgaggtcaggagttgaagaccagcctggccaacatgctgaaatcttgtctctactaaaaatacaaaaattagctgggcgtggtagctcatgcctgtaatcccagctactcgggaggctgaggcaggagaatcacttgaacccgggaggcggaggttgcaagtgatgctgagaaagtttttctgtcctgccttcagttgtgtactctacacgatgagatgcttcattggtttcgtgcagtagaatgttgtgtgaggtaagttggaacatatcctgtaattacgtgctataacagtatttagtggcttttatagttttagctcttataagtatatgccaacatttgagtaaatctctgagatgatattt

SEQ ID NO: 443856 - DNA, 7625 bp, Homo sapiens
acgccgcacacgcagccccgcccctgcagagatcagcgctgggacggaacccgggttcctctcgaaccgggattgtgacgcttttggcctggctggccgctgttttctgtcccactttttactcgggcctgcgtccgctgccgccgtccctcagtttgcccccggaggaggcagggcggccgtgccttctgccgtgcgcccgcgtggctgccaccgcccctccgaatcctccggggccgcagaggggttcgctacggagggaggtgggggccttcgggaggaggaggcggaggaggcggaggaggagggaaggaagatggcggccgtggaactagagtggatcccagagactctctataacaccgccatctccgctgtcgtggacaactacatccgctcccgccgagacatccgctccttgcccgagaacatccagtttgatgtttactacaagctttaccaacagggacgcttatgtcaactgggcagtgaattttgtgaattggaagtttttgctaaagtactgagagctttggataaaagacatttgcttcatcattgttttcaggctttgatggatcatggtgttaaagttgcttcagtcttggcctactcattcagtaggcggtgctcttatatagcagaatcagatgctgcagtaaaggaaaaagccattcaggttggctttgttttaggtggctttctttcagatgcaggctggtacagtgatgctgagaaagtttttctgtcctgccttcagttgtgtactctacacgatgagatgcttcattggtttcgtgcagtagaatgttgtgtgaggttgcttcatgtgcgaaatggaaactgcaaatatcatttgggtgaagaaacatttaaattagctcagacatatatggataaactatcaaaacatggccagcaagcaaataaagctgcactctatggagaactgtgtgcactcctatttgcaaaaagtcactatgatgaggcatacaaatggtgcatcgaggcaatgaaagaaattacagcaggcttaccagtgaaagttgtggtggatgtcttaagacaagcttctaaggcttgtgtagtaaaacgtgaatttaagaaggcagaacagttaattaaacatgcagtgtatttggcacggtaggtgattattattaaaaatatccttttaaattgtctctatactttatatcctaataattttgtgtctttttatagggatcattttggatccaaacacccaaaatattctgatacactgctagattatgggttctacttactcaatgtagataatatctgtcagtctgttgcaatttatcaggtatgttaatggttaccctttttttctttcaacctgtattgacttgctgacctgtatttgtttgtggtgtataaaccactctaaaaatgactttttgacaactaccccgcccaccaatataggttgcatcattattttattaagtattacctagaaggtgtaaaagttaatgctttgggaattaaagaaaatcattcaggaaaggaattattgggttgtgagctcatatgtgggagtagttttccattttttatttacccatgtaatggcttgtctttgttgttgatttagcaaatgtcactaaaactgcctttgtagtaacaaagatggctgataattattttaggtctttcttactcattctcaggtaaatgatgtattatgccattgctgtagacaaggcatacttgacttcaaggttcacttttttttttgagacacagttttgatctgtcgcccaggctggagtgcaatggcgcaatctcagctcactgcaacctctgcctcccaagttcaagcaattctcgtgcctcggcctcctgagtatctgggattacaggcccgtgccacaatgcccggctaatttttgtatttttagtagagaggcggtttcagcatgttgcccaggctagtcttgaactactgacctcaggtgatccacccacctttgcctcccagaagtactaggattacaggtgtgagccaccgcgcctggcctaaggttcacttttgaagaaggaaacagagcaaaacattcccaatgtcttgattctcaagacataggaatgattattattattattattattaagccgtggccttttaagtcaaactcgtatcttcagaaattcaggacttctaggtgactttcatgttctgtaatttaaatacagcaggactttctgggcttcaaaattttatggtgttaggcatatagatatatatttaaattactaggatgtttaatttaactaggtggtattttctacagtattgacaaatatttttatgattctttcaggcagcccttgacattagacagtcagtgtttggtggcaaaaatatccacgtagcaacagctcatgaagatttggcctactcttcttatgtccaccagtatagctctgggaaatttgacaatgcactatttcatgcagaaagagctattggtatcattacccacatcctacctgaagatcatcttcttttggcttcttcaaagagggtgaaagcacttattttagaggagattgcaattgattgtcataataaggaaactgaacagaggctgcttcaagaagctcatgatttgcacctgtcttcactccaactagctaaaaaagcttttggggaatttaatgtacagactgcaaaacactatggaaaccttggaagactttatcagtcaatgagaaaatttaaggaagctgaagaaatgcacatcaaagcaattcagattaaagaacaacttcttggtcaagaagattatgaagtagccctttcagtgggacatctggcttctttatataattatgacatgaatcagtatgaaaatgctgagaaactttatttgcgatctatagcaattgggaagaaactttttggtgagggctacagtggactagaatatgattatcgaggtctcattaaactttacaactccattggaaattacgagaaagtgtttgaatatcacaatgttctgtctaactggaaccggttgcgagatcggcaatattcagtgacagatgctcttgaagatgtcagcaccagcccccagtccactgaagaagtggtgcagtccttcctgatttctcagaatgtcgagggaccgagctgctgagggaggacctcagttaaccaattaccttttcccggattccagggaattcatactgtgaaatcaaaaccatgttgttttggggggctggaatttgcattgaaacactggtccagtccattgaagaccctattttgggtgatccctatcttgcagaatgtctgtaggaataagcatatattcagttatattcagcatgtaccgcatgtgtaagtagtctggcccacattttcaacctagtagaacaaacaacaggaaatcttttttttgttgtttttaaaaaattcattttgcagaaagcctgaaagaaaaaaaatacccctaaataaaactatttaagagtttaaaagagttgcattcttattatgtaaggatgattttaacaactttttaatatgtaattcttccatgtggaggtattcaatactgtagtgtaaagaaattttatgcggaaaatctttatatgcagtatagaaaagttaacacaagtactaataaaagagggacatcccgacttacgtttttctaccttgcccagataagtggatacaaccactctatattacaaggaaaggactgtcagattcatctgaactggaccagtgttgatctgtaatgtaatagaaaatctgatagaccagcacttctgacttttttttttttggtacaacaatgcaagatgctctgatagcatttgctaacaggaccaggaggatctaaaaaggaccagcctaatgtagaaggtggttatttggaccagaggctttagattattattttagatcctacatatacttttatcagtagaatgatttcatttagatgtataatgaaaaaggataatgcaaaaattatgtaatagataccaaattagggaagtttggcaatttcaatggcatatttttagtcaaggtacacagatggcagtgccataagcaagtctataaatatcggctgcagccatccccctcattttaaatgttgccctaataatcaatgcagttaacaagtatattggctgtgtgtcatgaaatagttcatgttcagatggaaatgttaggttactgtatggtttatggagattaatgaaaatgaatgcccaaaaataagtcttagaaaatcctccatttttatggtaaatagtaatacaactaggtcatttcatttgaaatctaggagtcaaatggaaagatcccctaataatacacctatttcactaacttgtctttctgtttattgggttttgatttgattttttgtaagccagtcaggttatttaatgatgaggtaataatcaaatttaagaatttgtgacatgtagcaattcaagaaacaaaaaggtattttgctgttacctcaattcttactgtagtagcccatctgatgcttctatagttaagaatctgggttccccccctattttcaggggttcatgacttggctgttaaagatgttgctcctagctaatgcttggagtagtctgtgggtgaatggatgtgtgttgaattttagttttcttttaacatgcatgttgggtgagaggggaaaaaaatctaagctgtctgccacattgagtacagaaaagttgtagatttcaaattttattaatattttaagcacttttttgaacttcccaaccttgtttgaagctgttatttgcagtcctattagttttgagccattgcatttaagttccctaggagggggttggttgggggatgtactgaaagagatgaagcaaacccacaccctaagatggtaactgtgtgatttagaaacctgagtttactcctcaaatcgaattattttctttttaaattttggaaagagtaaattgacgtacttgcagtttatgaagctgccccccacccctcagttaattgcagtctaatgtcaagaggcacttctttattaattaccaaatagtctttgtgaccaaggactaacatttttaagttactcagctctatcctcatgggcctatatatttaatacctccaaagatattttcaggataggctttgtatacttttattggttatttagaatccagtggtatgtttgtggtataggaatgtcatggtaaattgtttttcaataaatattttgaaacatgtttccatatgaagtttttttttcaatctgtattttttggttttgtgcacatacagcatttcctaggataaaaataaacaaatgacttacagcctcatcctccctaactccatttgaactcaacttagctcacactcagtgataaaacaacatggtatgtagaagcctaggatcacagggtgataatgtcaattggcagccagttgtgtttttttgaaacatcattattggcagtttctccttatcaccactgctttaatgtagtttttttgtaaatccatatactttaatgcatacactctagcttaagaaaacattgccattttggttagggatatgacttaatgtgctattatttctggttctaatgaagaataataccctatgactttaagtgtaagattcatcctttaagtagggatgtttaggataagttagatgtgtgccactatgatttattgggtttcttaaaaatcttgaagaaaataataaaatttatctcacaataagttaacttgcgcaaactttttacatatggtgaggtgcgtaaggaagccctggccaacttaaagatttttctggaggttcagcaaagttatgttaaattaggggcctttggtctcatccttctctgactcttctacccagtcttttcctaaagttcggtgctactccagttgggtgcatcagggagctccgtcagcactcgcatgtgtcgctcaggtggccactcatgcctgcattccatttaatagagtcaattggaatttttagagcataatctttatggatcctcaaagctgactttgccaaagggattgagacccttactaccatcaaatctctgtctctgcttggttaaaaattggctcactattgctttgtagtaacccctgcccaggtattttttcacttgtgaaaataatttgagaaagacctttgttcctagcctgttgggaaaagtttataattttatgaaaattaagtacagaggctgcgatcttagaaataatgaaggtgccatttggctgctccttaatagtgcagacagaaaactgcagtgaacacatgccaaaacatgattgaagcctttggctgaaactttatacatagaaataatgatttgctcataacaggtatcattaactgccactttttatgttttccctagaatttgtagccttgctgcttgcttttcttctgggtggcaaagttactactggaaaaacactataagtacaaagtttttggggttttatctttgctttagaagtggatgtgtacttcacctcttggctgtggaggaacttagttgccaggaaattttttttttttttttcaaacggagtttcgctcttgtggcccaggctgggagggcaatggcaccgtcttgggctcactgcaacctccgcctcccggggttccagcgattctcctgcctcagccttccgagtagctgggattacaggctcctgccaccacgcctggctaggaaattttttgtggttaatatgacatttggattaatctccagcttcaacagtacttcttttgtccataaatctcaggaatgttttaggcagaaaactggttttaccctgttgataatcagaaggagtgtgctttaggatttattgcataatactattctttaattgcaatcctaggtatctatagcatgagtggccttagtgagtttgttgaagtgcacatgtttttcaagagtaaaatttaagattaaaaatatatcctatatatagatatctagaaaacttggtttgtggtgcacagttaagtgttggatcactaaataaccattgcaggtaccgtttgtgtaacattactcatttctgtatattccttttatgggaagatattttgccatggtaactaaaacttttcagttctacttttatgatgtgaatgaatgctacgttttattaaatattaccaggtcagtactatttttatactttattaagcaacaggggattttagtttaataggctcaaaataaaaagttcttaatggaacagttaaaaacaaaacactaacaatctttacgtgaaaatccccactaatagtgccacaataatttctatagaaatatctaaggtcattaaatagatttttgaagacggttcttcattgtgtcaggatgacctttcatatcattctcaccaacttgtagtgcccaccgttatttgtaactattaaaccatactaagtatgtttgtaaccagcattgtgatatattctgtacttgtattgctaaaaatgaattattgacctaataaatatagtgttcctgcattcatagtgaaaaaaaatccaatttgg

SEQ ID NO: 443857 - DNA, 6472 bp, Homo sapiens
acgccgcacacgcagccccgcccctgcagagatcagcgctgggacggaacccgggttcctctcgaaccgggattgtgacgcttttggcctggctggccgctgttttctgtcccactttttactcgggcctgcgtccgctgccgccgtccctcagtttgcccccggaggaggcagggcggccgtgccttctgccgtgcgcccgcgtggctgccaccgcccctccgaatcctccggggccgcagaggggttcgctacggagggaggtgggggccttcgggaggaggaggcggaggaggcggaggaggagggaaggaagatggcggccgtggaactagagtggatcccagagactctctataacaccgccatctccgctgtcgtggacaactacatccgctcccgccgagacatccgctccttgcccgagaacatccagtttgatgtttactacaagctttaccaacagggacgcttatgtcaactgggcagtgaattttgtgaattggaagtttttgctaaagtactgagagctttggataaaagacatttgcttcatcattgttttcaggctttgatggatcatggtgttaaagttgcttcagtcttggcctactcattcagtaggcggtgctcttatatagcagaatcagatgctgcagtaaaggaaaaagccattcaggttggctttgttttaggtggctttctttcagatgcaggctggtacagtgatgctgagaaagtttttctgtcctgccttcagttgtgtactctacacgatgagatgcttcattggtttcgtgcagtagaatgttgtgtgaggttgcttcatgtgcgaaatggaaactgcaaatatcatttgggtgaagaaacatttaaattagctcagacatatatggataaactatcaaaacatggccagcaagcaaataaagctgcactctatggagaactgtgtgcactcctatttgcaaaaagtcactatgatgaggcatacaaatggtgcatcgaggcaatgaaagaaattacagcaggcttaccagtgaaagttgtggtggatgtcttaagacaagcttctaaggcttgtgtagtaaaacgtgaatttaagaaggcagaacagttaattaaacatgcagtgtatttggcacgggatcattttggatccaaacacccaaaatattctgatacactgctagattatgggttctacttactcaatgtagataatatctgtcagtctgttgcaatttatcaggcagcccttgacattagacagtcagtgtttggtggcaaaaatatccacgtagcaacagctcatgaagatttggcctactcttcttatgtccaccagtatagctctgggaaatttgacaatgcactatttcatgcagaaagagctattggtatcattacccacatcctacctgaagatcatcttcttttggcttcttcaaagagggtgaaagcacttattttagaggagattgcaattgattgtcataataaggaaactgaacagaggctgcttcaagaagctcatgatttgcacctgtcttcactccaactagctaaaaaagcttttggggaatttaatgtacagactgcaaaacactatggaaaccttggaagactttatcagtcaatgagaaaatttaaggaagctgaagaaatgcacatcaaagcaattcagattaaagaacaacttcttggtcaagaagattatgaagtagccctttcagtgggacatctggcttctttatataattatgacatgaatcagtatgaaaatgctgagaaactttatttgcgatctatagcaattgggaagaaactttttggtgagggctacagtggactagaatatgattatcgaggtctcattaaactttacaactccattggaaattacgagaaagtgtttgaatatcacaatgttctgtctaactggaaccggttgcgagatcggcaatattcagtgacagatgctcttgaagatgtcagcaccagcccccagtccactgaagaagtggtgcagtccttcctgatttctcagaatgtcgagggaccgagctgctgagggaggacctcagttaaccaattaccttttcccggattccagggaattcatactgtgaaatcaaaaccatgttgttttggggggctggaatttgcattgaaacactggtccagtccattgaagaccctattttgggtgatccctatcttgcagaatgtctgtaggaataagcatatattcagttatattcagcatgtaccgcatgtgtaagtagtctggcccacattttcaacctagtagaacaaacaacaggaaatcttttttttgttgtttttaaaaaattcattttgcagaaagcctgaaagaaaaaaaatacccctaaataaaactatttaagagtttaaaagagttgcattcttattatgtaaggatgattttaacaactttttaatatgtaattcttccatgtggaggtattcaatactgtagtgtaaagaaattttatgcggaaaatctttatatgcagtatagacttgcccagataagtggatacaaccactctatattacaaggaaaggactgtcagattcatctgaactggaccagtgttgatctgtaatgtaatagaaaatctgatagaccagcacttctgacttttttttttttggtacaacaatgcaagatgctctgatagcatttgctaacaggaccaggaggatctaaaaaggaccagcctaatgtagaaggtggttatttggaccagaggctttagattattattttagatcctacatatacttttatcagtagaatgatttcatttagatgtataatgaaaaaggataatgcaaaaattatgtaatagataccaaattagggaagtttggcaatttcaatggcatatttttagtcaaggtacacagatggcagtgccataagcaagtctataaatatcggctgcagccatccccctcattttaaatgttgccctaataatcaatgcagttaacaagtatattggctgtgtgtcatgaaatagttcatgttcagatggaaatgttaggttactgtatggtttatggagattaatgaaaatgaatgcccaaaaataagtcttagaaaatcctccatttttatggtaaatagtaatacaactaggtcatttcatttgaaatctaggagtcaaatggaaagatcccctaataatacacctatttcactaacttgtctttctgtttattgggttttgatttgattttttgtaagccagtcaggttatttaatgatgaggtaataatcaaatttaagaatttgtgacatgtagcaattcaagaaacaaaaaggtattttgctgttacctcaattcttactgtagtagcccatctgatgcttctatagttaagaatctgggttccccccctattttcaggggttcatgacttggctgttaaagatgttgctcctagctaatgcttggagtagtctgtgggtgaatggatgtgtgttgaattttagttttcttttaacatgcatgttgggtgagaggggaaaaaaatctaagctgtctgccacattgagtacagaaaagttgtagatttcaaattttattaatattttaagcacttttttgaacttcccaaccttgtttgaagctgttatttgcagtcctattagttttgagccattgcatttaagttccctaggagggggttggttgggggatgtactgaaagagatgaagcaaacccacaccctaagatggtaactgtgtgatttagaaacctgagtttactcctcaaatcgaattattttctttttaaattttggaaagagtaaattgacgtacttgcagtttatgaagctgccccccacccctcagttaattgcagtctaatgtcaagaggcacttctttattaattaccaaatagtctttgtgaccaaggactaacatttttaagttactcagctctatcctcatgggcctatatatttaatacctccaaagatattttcaggataggctttgtatacttttattggttatttagaatccagtggtatgtttgtggtataggaatgtcatggtaaattgtttttcaataaatattttgaaacatgtttccatatgaagtttttttttcaatctgtattttttggttttgtgcacatacagcatttcctaggataaaaataaacaaatgacttacagcctcatcctccctaactccatttgaactcaacttagctcacactcagtgataaaacaacatggtatgtagaagcctaggatcacagggtgataatgtcaattggcagccagttgtgtttttttgaaacatcattattggcagtttctccttatcaccactgctttaatgtagtttttttgtaaatccatatactttaatgcatacactctagcttaagaaaacattgccattttggttagggatatgacttaatgtgctattatttctggttctaatgaagaataataccctatgactttaagtgtaagattcatcctttaagtagggatgtttaggataagttagatgtgtgccactatgatttattgggtttcttaaaaatcttgaagaaaataataaaatttatctcacaataagttaacttgcgcaaactttttacatatggtgaggtgcgtaaggaagccctggccaacttaaagatttttctggaggttcagcaaagttatgttaaattaggggcctttggtctcatccttctctgactcttctacccagtcttttcctaaagttcggtgctactccagttgggtgcatcagggagctccgtcagcactcgcatgtgtcgctcaggtggccactcatgcctgcattccatttaatagagtcaattggaatttttagagcataatctttatggatcctcaaagctgactttgccaaagggattgagacccttactaccatcaaatctctgtctctgcttggttaaaaattggctcactattgctttgtagtaacccctgcccaggtattttttcacttgtgaaaataatttgagaaagacctttgttcctagcctgttgggaaaagtttataattttatgaaaattaagtacagaggctgcgatcttagaaataatgaaggtgccatttggctgctccttaatagtgcagacagaaaactgcagtgaacacatgccaaaacatgattgaagcctttggctgaaactttatacatagaaataatgatttgctcataacaggtatcattaactgccactttttatgttttccctagaatttgtagccttgctgcttgcttttcttctgggtggcaaagttactactggaaaaacactataagtacaaagtttttggggttttatctttgctttagaagtggatgtgtacttcacctcttggctgtggaggaacttagttgccaggaaattttttttttttttttcaaacggagtttcgctcttgtggcccaggctgggagggcaatggcaccgtcttgggctcactgcaacctccgcctcccggggttccagcgattctcctgcctcagccttccgagtagctgggattacaggctcctgccaccacgcctggctaggaaattttttgtggttaatatgacatttggattaatctccagcttcaacagtacttcttttgtccataaatctcaggaatgttttaggcagaaaactggttttaccctgttgataatcagaaggagtgtgctttaggatttattgcataatactattctttaattgcaatcctaggtatctatagcatgagtggccttagtgagtttgttgaagtgcacatgtttttcaagagtaaaatttaagattaaaaatatatcctatatatagatatctagaaaacttggtttgtggtgcacagttaagtgttggatcactaaataaccattgcaggtaccgtttgtgtaacattactcatttctgtatattccttttatgggaagatattttgccatggtaactaaaacttttcagttctacttttatgatgtgaatgaatgctacgttttattaaatattaccaggtcagtactatttttatactttattaagcaacaggggattttagtttaataggctcaaaataaaaagttcttaatggaacagttaaaaacaaaacactaacaatctttacgtgaaaatccccactaatagtgccacaataatttctatagaaatatctaaggtcattaaatagatttttgaagacggttcttcattgtgtcaggatgacctttcatatcattctcaccaacttgtagtgcccaccgttatttgtaactattaaaccatactaagtatgtttgtaaccagcattgtgatatattctgtacttgtattgctaaaaatgaattattgacctaataaatatagtgttcctgcattcatagtgaaaaaaaatccaatttgg

SEQ ID NO: 443858 - DNA, 6472 bp, Homo sapiens
acgccgcacacgcagccccgcccctgcagagatcagcgctgggacggaacccgggttcctctcgaaccgggattgtgacgcttttggcctggctggccgctgttttctgtcccactttttactcgggcctgcgtccgctgccgccgtccctcagtttgcccccggaggaggcagggcggccgtgccttctgccgtgcgcccgcgtggctgccaccgcccctccgaatcctccggggccgcagaggggttcgctacggagggaggtgggggccttcgggaggaggaggcggaggaggcggaggaggagggaaggaagatggcggccgtggaactagagtggatcccagagactctctataacaccgccatctccgctgtcgtggacaactacatccgctcccgccgagacatccgctccttgcccgagaacatccagtttgatgtttactacaagctttaccaacagggacgcttatgtcaactgggcagtgaattttgtgaattggaagtttttgctaaagtactgagagctttggataaaagacatttgcttcatcattgttttcaggctttgatggatcatggtgttaaagttgcttcagtcttggcctactcattcagtaggcggtgctcttatatagcagaatcagatgctgcagtaaaggaaaaagccattcaggttggctttgttttaggtggctttctttcagatgcaggctggtacagtgatgctgagaaagtttttctgtcctgccttcagttgtgtactctacacgatgagatgcttcattggtttcgtgcagtagaatgttgtgtgaggttgcttcatgtgcgaaatggaaactgcaaatatcatttgggtgaagaaacatttaaattagctcagacatatatggataaactatcaaaacatggccagcaagcaaataaagctgcactctatggagaactgtgtgcactcctatttgcaaaaagtcactatgatgaggcatacaaatggtgcatcgaggcaatgaaagaaattacagcaggcttaccagtgaaagttgtggtggatgtcttaagacaagcttctaaggcttgtgtagtaaaacgtgaatttaagaaggcagaacagttaattaaacatgcagtgtatttggcacgggatcattttggatccaaacacccaaaatattctgatacactgctagattatgggttctacttactcaatgtagataatatctgtcagtctgttgcaatttatcaggcagcccttgacattagacagtcagtgtttggtggcaaaaatatccacgtagcaacagctcatgaagatttggcctactcttcttatgtccaccagtatagctctgggaaatttgacaatgcactatttcatgcagaaagagctattggtatcattacccacatcctacctgaagatcatcttcttttggcttcttcaaagagggtgaaagcacttattttagaggagattgcaattgattgtcataataaggaaactgaacagaggctgcttcaagaagctcatgatttgcacctgtcttcactccaactagctaaaaaagcttttggggaatttaatgtacagactgcaaaacactatggaaaccttggaagactttatcagtcaatgagaaaatttaaggaagctgaagaaatgcacatcaaagcaattcagattaaagaacaacttcttggtcaagaagattatgaagtagccctttcagtgggacatctggcttctttatataattatgacatgaatcagtatgaaaatgctgagaaactttatttgcgatctatagcaattgggaagaaactttttggtgagggctacagtggactagaatatgattatcgaggtctcattaaactttacaactccattggaaattacgagaaagtgtttgaatatcacaatgttctgtctaactggaaccggttgcgagatcggcaatattcagtgacagatgctcttgaagatgtcagcaccagcccccagtccactgaagaagtggtgcagtccttcctgatttctcagaatgtcgagggaccgagctgctgagggaggacctcagttaaccaattaccttttcccggattccagggaattcatactgtgaaatcaaaaccatgttgttttggggggctggaatttgcattgaaacactggtccagtccattgaagaccctattttgggtgatccctatcttgcagaatgtctgtaggaataagcatatattcagttatattcagcatgtaccgcatgtgtaagtagtctggcccacattttcaacctagtagaacaaacaacaggaaatcttttttttgttgtttttaaaaaattcattttgcagaaagcctgaaagaaaaaaaatacccctaaataaaactatttaagagtttaaaagagttgcattcttattatgtaaggatgattttaacaactttttaatatgtaattcttccatgtggaggtattcaatactgtagtgtaaagaaattttatgcggaaaatctttatatgcagtatagaaaagttaacacaagtactaataaaagagggacatcccgacttacgtttttctaccttgcccagataagtggatacaaccactctatattacaaggaaaggactgtcagattcatctgaactggaccagtgttgatctgtaatgtaatagaaaatctgatagaccagcacttctgacttttttttttttggtacaacaatgcaagatgctctgatagcatttgctaacaggaccaggaggatctaaaaaggaccagcctaatgtagaaggtggttatttggaccagaggctttagattattattttagatcctacatatacttttatcagtagaatgatttcatttagatgtataatgaaaaaggataatgcattttagtcaaggtacacagatggcagtgccataagcaagtctataaatatcggctgcagccatccccctcattttaaatgttgccctaataatcaatgcagttaacaagtatattggctgtgtgtcatgaaatagttcatgttcagatggaaatgttaggttactgtatggtttatggagattaatgaaaatgaatgcccaaaaataagtcttagaaaatcctccatttttatggtaaatagtaatacaactaggtcatttcatttgaaatctaggagtcaaatggaaagatcccctaataatacacctatttcactaacttgtctttctgtttattgggttttgatttgattttttgtaagccagtcaggttatttaatgatgaggtaataatcaaatttaagaatttgtgacatgtagcaattcaagaaacaaaaaggtattttgctgttacctcaattcttactgtagtagcccatctgatgcttctatagttaagaatctgggttccccccctattttcaggggttcatgacttggctgttaaagatgttgctcctagctaatgcttggagtagtctgtgggtgaatggatgtgtgttgaattttagttttcttttaacatgcatgttgggtgagaggggaaaaaaatctaagctgtctgccacattgagtacagaaaagttgtagatttcaaattttattaatattttaagcacttttttgaacttcccaaccttgtttgaagctgttatttgcagtcctattagttttgagccattgcatttaagttccctaggagggggttggttgggggatgtactgaaagagatgaagcaaacccacaccctaagatggtaactgtgtgatttagaaacctgagtttactcctcaaatcgaattattttctttttaaattttggaaagagtaaattgacgtacttgcagtttatgaagctgccccccacccctcagttaattgcagtctaatgtcaagaggcacttctttattaattaccaaatagtctttgtgaccaaggactaacatttttaagttactcagctctatcctcatgggcctatatatttaatacctccaaagatattttcaggataggctttgtatacttttattggttatttagaatccagtggtatgtttgtggtataggaatgtcatggtaaattgtttttcaataaatattttgaaacatgtttccatatgaagtttttttttcaatctgtattttttggttttgtgcacatacagcatttcctaggataaaaataaacaaatgacttacagcctcatcctccctaactccatttgaactcaacttagctcacactcagtgataaaacaacatggtatgtagaagcctaggatcacagggtgataatgtcaattggcagccagttgtgtttttttgaaacatcattattggcagtttctccttatcaccactgctttaatgtagtttttttgtaaatccatatactttaatgcatacactctagcttaagaaaacattgccattttggttagggatatgacttaatgtgctattatttctggttctaatgaagaataataccctatgactttaagtgtaagattcatcctttaagtagggatgtttaggataagttagatgtgtgccactatgatttattgggtttcttaaaaatcttgaagaaaataataaaatttatctcacaataagttaacttgcgcaaactttttacatatggtgaggtgcgtaaggaagccctggccaacttaaagatttttctggaggttcagcaaagttatgttaaattaggggcctttggtctcatccttctctgactcttctacccagtcttttcctaaagttcggtgctactccagttgggtgcatcagggagctccgtcagcactcgcatgtgtcgctcaggtggccactcatgcctgcattccatttaatagagtcaattggaatttttagagcataatctttatggatcctcaaagctgactttgccaaagggattgagacccttactaccatcaaatctctgtctctgcttggttaaaaattggctcactattgctttgtagtaacccctgcccaggtattttttcacttgtgaaaataatttgagaaagacctttgttcctagcctgttgggaaaagtttataattttatgaaaattaagtacagaggctgcgatcttagaaataatgaaggtgccatttggctgctccttaatagtgcagacagaaaactgcagtgaacacatgccaaaacatgattgaagcctttggctgaaactttatacatagaaataatgatttgctcataacaggtatcattaactgccactttttatgttttccctagaatttgtagccttgctgcttgcttttcttctgggtggcaaagttactactggaaaaacactataagtacaaagtttttggggttttatctttgctttagaagtggatgtgtacttcacctcttggctgtggaggaacttagttgccaggaaattttttttttttttttcaaacggagtttcgctcttgtggcccaggctgggagggcaatggcaccgtcttgggctcactgcaacctccgcctcccggggttccagcgattctcctgcctcagccttccgagtagctgggattacaggctcctgccaccacgcctggctaggaaattttttgtggttaatatgacatttggattaatctccagcttcaacagtacttcttttgtccataaatctcaggaatgttttaggcagaaaactggttttaccctgttgataatcagaaggagtgtgctttaggatttattgcataatactattctttaattgcaatcctaggtatctatagcatgagtggccttagtgagtttgttgaagtgcacatgtttttcaagagtaaaatttaagattaaaaatatatcctatatatagatatctagaaaacttggtttgtggtgcacagttaagtgttggatcactaaataaccattgcaggtaccgtttgtgtaacattactcatttctgtatattccttttatgggaagatattttgccatggtaactaaaacttttcagttctacttttatgatgtgaatgaatgctacgttttattaaatattaccaggtcagtactatttttatactttattaagcaacaggggattttagtttaataggctcaaaataaaaagttcttaatggaacagttaaaaacaaaacactaacaatctttacgtgaaaatccccactaatagtgccacaataatttctatagaaatatctaaggtcattaaatagatttttgaagacggttcttcattgtgtcaggatgacctttcatatcattctcaccaacttgtagtgcccaccgttatttgtaactattaaaccatactaagtatgtttgtaaccagcattgtgatatattctgtacttgtattgctaaaaatgaattattgacctaataaatatagtgttcctgcattcatagtgaaaaaaaatccaatttgg

SEQ ID NO: 443859 - DNA, 5730 bp, Homo sapiens
acgccgcacacgcagccccgcccctgcagagatcagcgctgggacggaacccgggttcctctcgaaccgggattgtgacgcttttggcctggctggccgctgttttctgtcccactttttactcgggcaaataaagctgcactctatggagaactgtgtgcactcctatttgcaaaaagtcactatgatgaggcatacaaatggtgcatcgaggcaatgaaagaaattacagcaggcttaccagtgaaagttgtggtggatgtcttaagacaagcttctaaggcttgtgtagtaaaacgtgaatttaagaaggcagaacagttaattaaacatgcagtgtatttggcacgggatcattttggatccaaacacccaaaatattctgatacactgctagattatgggttctacttactcaatgtagataatatctgtcagtctgttgcaatttatcaggcagcccttgacattagacagtcagtgtttggtggcaaaaatatccacgtagcaacagctcatgaagatttggcctactcttcttatgtccaccagtatagctctgggaaatttgacaatgcactatttcatgcagaaagagctattggtatcattacccacatcctacctgaagatcatcttcttttggcttcttcaaagagggtgaaagcacttattttagaggagattgcaattgattgtcataataaggaaactgaacagaggctgcttcaagaagctcatgatttgcacctgtcttcactccaactagctaaaaaagcttttggggaatttaatgtacagactgcaaaacactatggaaaccttggaagactttatcagtcaatgagaaaatttaaggaagctgaagaaatgcacatcaaagcaattcagattaaagaacaacttcttggtcaagaagattatgaagtagccctttcagtgggacatctggcttctttatataattatgacatgaatcagtatgaaaatgctgagaaactttatttgcgatctatagcaattgggaagaaactttttggtgagggctacagtggactagaatatgattatcgaggtctcattaaactttacaactccattggaaattacgagaaagtgtttgaatatcacaatgttctgtctaactggaaccggttgcgagatcggcaatattcagtgacagatgctcttgaagatgtcagcaccagcccccagtccactgaagaagtggtgcagtccttcctgatttctcagaatgtcgagggaccgagctgctgagggaggacctcagttaaccaattaccttttcccggattccagggaattcatactgtgaaatcaaaaccatgttgttttggggggctggaatttgcattgaaacactggtccagtccattgaagaccctattttgggtgatccctatcttgcagaatgtctgtaggaataagcatatattcagttatattcagcatgtaccgcatgtgtaagtagtctggcccacattttcaacctagtagaacaaacaacaggaaatcttttttttgttgtttttaaaaaattcattttgcagaaagcctgaaagaaaaaaaatacccctaaataaaactatttaagagtttaaaagagttgcattcttattatgtaaggatgattttaacaactttttaatatgtaattcttccatgtggaggtattcaatactgtagtgtaaagaaattttatgcggaaaatctttatatgcagtatagaaaagttaacacaagtactaataaaagagggacatcccgacttacgtttttctaccttgcccagataagtggatacaaccactctatattacaaggaaaggactgtcagattcatctgaactggaccagtgttgatctgtaatgtaatagaaaatctgatagaccagcacttctgacttttttttttttggtacaacaatgcaagatgctctgatagcatttgctaacaggaccaggaggatctaaaaaggaccagcctaatgtagaaggtggttatttggaccagaggctttagattattattttagatcctacatatacttttatcagtagaatgatttcatttagatgtataatgaaaaaggataatgcaaaaattatgtaatagataccaaattagggaagtttggcaatttcaatggcatatttttagtcaaggtacacagatggcagtgccataagcaagtctataaatatcggctgcagccatccccctcattttaaatgttgccctaataatcaatgcagttaacaagtatattggctgtgtgtcatgaaatagttcatgttcagatggaaatgttaggttactgtatggtttatggagattaatgaaaatgaatgcccaaaaataagtcttagaaaatcctccatttttatggtaaatagtaatacaactaggtcatttcatttgaaatctaggagtcaaatggaaagatcccctaataatacacctatttcactaacttgtctttctgtttattgggttttgatttgattttttgtaagccagtcaggttatttaatgatgaggtaataatcaaatttaagaatttgtgacatgtagcaattcaagaaacaaaaaggtattttgctgttacctcaattcttactgtagtagcccatctgatgcttctatagttaagaatctgggttccccccctattttcaggggttcatgacttggctgttaaagatgttgctcctagctaatgcttggagtagtctgtgggtgaatggatgtgtgttgaattttagttttcttttaacatgcatgttgggtgagaggggaaaaaaatctaagctgtctgccacattgagtacagaaaagttgtagatttcaaattttattaatattttaagcacttttttgaacttcccaaccttgtttgaagctgttatttgcagtcctattagttttgagccattgcatttaagttccctaggagggggttggttgggggatgtactgaaagagatgaagcaaacccacaccctaagatggtaactgtgtgatttagaaacctgagtttactcctcaaatcgaattattttctttttaaattttggaaagagtaaattgacgtacttgcagtttatgaagctgccccccacccctcagttaattgcagtctaatgtcaagaggcacttctttattaattaccaaatagtctttgtgaccaaggactaacatttttaagttactcagctctatcctcatgggcctatatatttaatacctccaaagatattttcaggataggctttgtatacttttattggttatttagaatccagtggtatgtttgtggtataggaatgtcatggtaaattgtttttcaataaatattttgaaacatgtttccatatgaagtttttttttcaatctgtattttttggttttgtgcacatacagcatttcctaggataaaaataaacaaatgacttacagcctcatcctccctaactccatttgaactcaacttagctcacactcagtgataaaacaacatggtatgtagaagcctaggatcacagggtgataatgtcaattggcagccagttgtgtttttttgaaacatcattattggcagtttctccttatcaccactgctttaatgtagtttttttgtaaatccatatactttaatgcatacactctagcttaagaaaacattgccattttggttagggatatgacttaatgtgctattatttctggttctaatgaagaataataccctatgactttaagtgtaagattcatcctttaagtagggatgtttaggataagttagatgtgtgccactatgatttattgggtttcttaaaaatcttgaagaaaataataaaatttatctcacaataagttaacttgcgcaaactttttacatatggtgaggtgcgtaaggaagccctggccaacttaaagatttttctggaggttcagcaaagttatgttaaattaggggcctttggtctcatccttctctgactcttctacccagtcttttcctaaagttcggtgctactccagttgggtgcatcagggagctccgtcagcactcgcatgtgtcgctcaggtggccactcatgcctgcattccatttaatagagtcaattggaatttttagagcataatctttatggatcctcaaagctgactttgccaaagggattgagacccttactaccatcaaatctctgtctctgcttggttaaaaattggctcactattgctttgtagtaacccctgcccaggtattttttcacttgtgaaaataatttgagaaagacctttgttcctagcctgttgggaaaagtttataattttatgaaaattaagtacagaggctgcgatcttagaaataatgaaggtgccatttggctgctccttaatagtgcagacagaaaactgcagtgaacacatgccaaaacatgattgaagcctttggctgaaactttatacatagaaataatgatttgctcataacaggtatcattaactgccactttttatgttttccctagaatttgtagccttgctgcttgcttttcttctgggtggcaaagttactactggaaaaacactataagtacaaagtttttggggttttatctttgctttagaagtggatgtgtacttcacctcttggctgtggaggaacttagttgccaggaaattttttttttttttttcaaacggagtttcgctcttgtggcccaggctgggagggcaatggcaccgtcttgggctcactgcaacctccgcctcccggggttccagcgattctcctgcctcagccttccgagtagctgggattacaggctcctgccaccacgcctggctaggaaattttttgtggttaatatgacatttggattaatctccagcttcaacagtacttcttttgtccataaatctcaggaatgttttaggcagaaaactggttttaccctgttgataatcagaaggagtgtgctttaggatttattgcataatactattctttaattgcaatcctaggtatctatagcatgagtggccttagtgagtttgttgaagtgcacatgtttttcaagagtaaaatttaagattaaaaatatatcctatatatagatatctagaaaacttggtttgtggtgcacagttaagtgttggatcactaaataaccattgcaggtaccgtttgtgtaacattactcatttctgtatattccttttatgggaagatattttgccatggtaactaaaacttttcagttctacttttatgatgtgaatgaatgctacgttttattaaatattaccaggtcagtactatttttatactttattaagcaacaggggattttagtttaataggctcaaaataaaaagttcttaatggaacagttaaaaacaaaacactaacaatctttacgtgaaaatccccactaatagtgccacaataatttctatagaaatatctaaggtcattaaatagatttttgaagacggttcttcattgtgtcaggatgacctttcatatcattctcaccaacttgtagtgcccaccgttatttgtaactattaaaccatactaagtatgtttgtaaccagcattgtgatatattctgtacttgtattgctaaaaatgaattattgacctaataaatatagtgttcctgcattcatagtgaaaaaaaatccaatttgg

SEQ ID NO: 443860 - DNA, 2741 bp, Homo sapiens
  misc_feature (28)..(28): n is a, c, g, or t
  misc_feature (92)..(92): n is a, c, g, or t
ccggaatttaaatacgacctcacctatngggaatttgggcccctcgaggcccaagaattcgggcaccgaggcctcgcctcgaagcgaaaagnccctaatagtagaagaacccctcccataaaccccggagtgacctatatggatgccccccccacccctcagttaattgcagtctaatgtcaagaggcacttctttattaattaccaaatagtctttgtgaccaaggactaacatttttaagttactcagctctatcctcatgggcctatatatttaatacctccaaagatattttcaggataggctttgtatacttttattggttatttagaatccagtggtatgtttgtggtataggaatgtcatggtaaattgtttttcaataaatattttgaaacatgtttccatatgaagtttttttttcaatctgtattttttggttttgtgcacatacagcatttcctaggataaaaataaacaaatgacttacagcctcatcctccctaactccatttgaactcaacttagctcacactcagtgataaaacaacatggtatgtagaagcctaggatcacagggtgataatgtcaattggcagccagttgtgtttttttgaaacatcattattggcagtttctccttatcaccactgctttaatgtagtttttttgtaaatccatatactttaatgcatacactctagcttaagaaaacattgccattttggttagggatatgacttaatgtgctattatttctggttctaatgaagaataataccctatgactttaagtgtaagattcatcctttaagtagggatgtttaggataagttagatgtgtgccactatgatttattgggtttcttaaaaatcttgaagaaaataataaaatttatctcacaataagttaacttgcgcaaactttttacatatggtgaggtgcgtaaggaagccctggccaacttaaagatttttctggaggttcagcaaagttatgttaaattaggggcctttggtctcatccttctctgactcttctacccagtcttttcctaaagttcggtgctactccagttgggtgcatcagggagctccgtcagcactcgcatgtgtcgctcaggtggccactcatgcctgcattccatttaatagagtcaattggaatttttagagcataatctttatggatcctcaaagctgactttgccaaagggattgagacccttactaccatcaaatctctgtctctgcttggttaaaaattggctcactattgctttgtagtaacccctgcccaggtattttttcacttgtgaaaataatttgagaaagacctttgttcctagcctgttgggaaaagtttataattttatgaaaattaagtacagaggctgcgatcttagaaataatgaaggtgccatttggctgctccttaatagtgcagacagaaaactgcagtgaacacatgccaaaacatgattgaagcctttggctgaaactttatacatagaaataatgatttgctcataacaggtatcattaactgccactttttatgttttccctagaatttgtagccttgctgcttgcttttcttctgggtggcaaagttactactggaaaaacactataagtacaaagtttttggggttttatctttgctttagaagtggatgtgtacttcacctcttggctgtggaggaacttagttgccaggaaattttttttttttttttcaaacggagtttcgctcttgtggcccaggctgggagggcaatggcaccgtcttgggctcactgcaacctccgcctcccggggttccagcgattctcctgcctcagccttccgagtagctgggattacaggctcctgccaccacgcctggctaggaaattttttgtggttaatatgacatttggattaatctccagcttcaacagtacttcttttgtccataaatctcaggaatgttttaggcagaaaactggttttaccctgttgataatcagaaggagtgtgctttaggatttattgcataatactattctttaattgcaatcctaggtatctatagcatgagtggccttagtgagtttgttgaagtgcacatgtttttcaagagtaaaatttaagattaaaaatatatcctatatatagatatctagaaaacttggtttgtggtgcacagttaagtgttggatcactaaataaccattgcaggtaccgtttgtgtaacattactcatttctgtatattccttttatgggaagatattttgccatggtaactaaaacttttcagttctacttttatgatgtgaatgaatgctacgttttattaaatattaccaggtcagtactatttttatactttattaagcaacaggggattttagtttaataggctcaaaataaaaagttcttaatggaacagttaaaaacaaaacactaacaatctttacgtgaaaatccccactaatagtgccacaataatttctatagaaatatctaaggtcattaaatagatttttgaagacggttcttcattgtgtcaggatgacctttcatatcattctcaccaacttgtagtgcccaccgttatttgtaactattaaaccatactaagtatgtttgtaaccagcattgtgatatattctgtacttgtattgctaaaaatgaattattgacctaataaatatagtgttcctgcattcatagtgaaaaaaaatccaatttgg

SEQ ID NO: 443861 - DNA, 733 bp, Homo sapiens
  misc_feature (710)..(710): n is a, c, g, or t
acgccgcacacgcagccccgcccctgcagagatcagcgctgggacggaacccgggttcctctcgaaccgggattgtgacgcttttggcctggctggccgctgttttctgtcccactttttactcgggcctgcgtccgctgccgccgtccctcagtttgcccccggaggaggcagggcggccgtgccttctgccgtgcgcccgcgtggctgccaccgcccctccgaatcctccggggccgcagaggggttcgctacggagggaggtgggggccttcgggaggaggaggcggaggaggcggaggaggagggaaggaagatggcggccgtggaactagagtggatcccagagactctctataacaccgccatctccgctgtcgtggacaactacatccgctcccgccgagacatccgctccttgcccgagaacatccagtttgatgtttactacaagctttaccaacagggacgcttatgtcaactgggcagtgaattttgtgaattggaagtttttgctaaagtactgagagctttggataaaagacatttgcttcatcattgttttcaggctttgatggatcatggtgttaaagttgcttcagtcttggcctactcattcagtaggcggtgctcttatatagcagaatcagatgctgcagtaaaggaaaaagccattcaggttggctttgttttagtggcttctttctgcngctggttgtgcggtttttctgtc

SEQ ID NO: 443862 - DNA, 6526 bp, Homo sapiens
acgccgcacacgcagccccgcccctgcagagatcagcgctgggacggaacccgggttcctctcgaaccgggattgtgacgcttttggcctggctggccgctgttttctgtcccactttttactcgggcctgcgtccgctgccgccgtccctcagtttgcccccggaggaggcagggcggccgtgccttctgccgtgcgcccgcgtggctgccaccgcccctccgaatcctccggggccgcagaggggttcgctacggagggaggtgggggccttcgggaggaggaggcggaggaggcggaggaggagggaaggaagatggcggccgtggaactagagtggatcccagagactctctataacaccgccatctccgctgtcgtggacaactacatccgctcccgccgagacatccgctccttgcccgagaacatccagtttgatgtttactacaagctttaccaacagggacgcttatgtcaactgggcagtgaattttgtgaattggaagtttttgctaaagtactgagagctttggataaaagacatttgcttcatcattgttttcaggctttgatggatcatggtgttaaagttgcttcagtcttggcctactcattcagtaggcggtgctcttatatagcagaatcagatgctgcagtaaaggaaaaagccattcaggttggctttgttttaggtggctttctttcagatgcaggctggtacagtgatgctgagaaagtttttctgtcctgccttcagttgtgtactctacacgatgagatgcttcattggtttcgtgcagtagaatgttgtgtgaggttgcttcatgtgcgaaatggaaactgcaaatatcatttgggtgaagaaacatttaaattagctcagacatatatggataaactatcaaaacatggccagcaagcaaataaagctgcactctatggagaactgtgtgcactcctatttgcaaaaagtcactatgatgaggcatacaaatggtgcatcgaggcaatgaaagaaattacagcaggcttaccagtgaaagttgtggtggatgtcttaagacaagcttctaaggcttgtgtagtaaaacgtgaatttaagaaggcagaacagttaattaaacatgcagtgtatttggcacgggatcattttggatccaaacacccaaaatattctgatacactgctagattatgggttctacttactcaatgtagataatatctgtcagtctgttgcaatttatcaggcagcccttgacattagacagtcagtgtttggtggcaaaaatatccacgtagcaacagctcatgaagatttggcctactcttcttatgtccaccagtatagctctgggaaatttgacaatgcactatttcatgcagaaagagctattggtatcattacccacatcctacctgaagatcatcttcttttggcttcttcaaagagggtgaaagcacttattttagaggagattgcaattgattgtcataataaggaaactgaacagaggctgcttcaagaagctcatgatttgcacctgtcttcactccaactagctaaaaaagcttttggggaatttaatgtacagactgcaaaacactatggaaaccttggaagactttatcagtcaatgagaaaatttaaggaagctgaagaaatgcacatcaaagcaattcagattaaagaacaacttcttggtcaagaagattatgaagtagccctttcagtgggacatctggcttctttatataattatgacatgaatcagtatgaaaatgctgagaaactttatttgcgatctatagcaattgggaagaaactttttggtgagggctacagtggactagaatatgattatcgaggtctcattaaactttacaactccattggaaattacgagaaagtgtttgaatatcacaatgttctgtctaactggaaccggttgcgagatcggcaatattcagtgacagatgctcttgaagatgtcagcaccagcccccagtccactgaagaagtggtgcagtccttcctgatttctcagaatgtcgagggaccgagctgctgagggaggacctcagttaaccaattaccttttcccggattccagggaattcatactgtgaaatcaaaaccatgttgttttggggggctggaatttgcattgaaacactggtccagtccattgaagaccctattttgggtgatccctatcttgcagaatgtctgtaggaataagcatatattcagttatattcagcatgtaccgcatgtgtaagtagtctggcccacattttcaacctagtagaacaaacaacaggaaatcttttttttgttgtttttaaaaaattcattttgcagaaagcctgaaagaaaaaaaatacccctaaataaaactatttaagagtttaaaagagttgcattcttattatgtaaggatgattttaacaactttttaatatgtaattcttccatgtggaggtattcaatactgtagtgtaaagaaattttatgcggaaaatctttatatgcagtatagaaaagttaacacaagtactaataaaagagggacatcccgacttacgtttttctaccttgcccagataagtggatacaaccactctatattacaaggaaaggactgtcagattcatctgaactggaccagtgttgatctgtaatgtaatagaaaatctgatagaccagcacttctgacttttttttttttggtacaacaatgcaagatgctctgatagcatttgctaacaggaccaggaggatctaaaaaggaccagcctaatgtagaaggtggttatttggaccagaggctttagattattattttagatcctacatatacttttatcagtagaatgatttcatttagatgtataatgaaaaaggataatgcaaaaattatgtaatagataccaaattagggaagtttggcaatttcaatggcatatttttagtcaaggtacacagatggcagtgccataagcaagtctataaatatcggctgcagccatccccctcattttaaatgttgccctaataatcaatgcagttaacaagtatattggctgtgtgtcatgaaatagttcatgttcagatggaaatgttaggttactgtatggtttatggagattaatgaaaatgaatgcccaaaaataagtcttagaaaatcctccatttttatggtaaatagtaatacaactaggtcatttcatttgaaatctaggagtcaaatggaaagatcccctaataatacacctatttcactaacttgtctttctgtttattgggttttgatttgattttttgtaagccagtcaggttatttaatgatgaggtaataatcaaatttaagaatttgtgacatgtagcaattcaagaaacaaaaaggtattttgctgttacctcaattcttactgtagtagcccatctgatgcttctatagttaagaatctgggttccccccctattttcaggggttcatgacttggctgttaaagatgttgctcctagctaatgcttggagtagtctgtgggtgaatggatgtgtgttgaattttagttttcttttaacatgcatgttgggtgagaggggaaaaaaatctaagctgtctgccacattgagtacagaaaagttgtagatttcaaattttattaatattttaagcacttttttgaacttcccaaccttgtttgaagctgttatttgcagtcctattagttttgagccattgcatttaagttccctaggagggggttggttgggggatgtactgaaagagatgaagcaaacccacaccctaagatggtaactgtgtgatttagaaacctgagtttactcctcaaatcgaattattttctttttaaattttggaaagagtaaattgacgtacttgcagtttatgaagctgccccccacccctcagttaattgcagtctaatgtcaagaggcacttctttattaattaccaaatagtctttgtgaccaaggactaacatttttaagttactcagctctatcctcatgggcctatatatttaatacctccaaagatattttcaggataggctttgtatacttttattggttatttagaatccagtggtatgtttgtggtataggaatgtcatggtaaattgtttttcaataaatattttgaaacatgtttccatatgaagtttttttttcaatctgtattttttggttttgtgcacatacagcatttcctaggataaaaataaacaaatgacttacagcctcatcctccctaactccatttgaactcaacttagctcacactcagtgataaaacaacatggtatgtagaagcctaggatcacagggtgataatgtcaattggcagccagttgtgtttttttgaaacatcattattggcagtttctccttatcaccactgctttaatgtagtttttttgtaaatccatatactttaatgcatacactctagcttaagaaaacattgccattttggttagggatatgacttaatgtgctattatttctggttctaatgaagaataataccctatgactttaagtgtaagattcatcctttaagtagggatgtttaggataagttagatgtgtgccactatgatttattgggtttcttaaaaatcttgaagaaaataataaaatttatctcacaataagttaacttgcgcaaactttttacatatggtgaggtgcgtaaggaagccctggccaacttaaagatttttctggaggttcagcaaagttatgttaaattaggggcctttggtctcatccttctctgactcttctacccagtcttttcctaaagttcggtgctactccagttgggtgcatcagggagctccgtcagcactcgcatgtgtcgctcaggtggccactcatgcctgcattccatttaatagagtcaattggaatttttagagcataatctttatggatcctcaaagctgactttgccaaagggattgagacccttactaccatcaaatctctgtctctgcttggttaaaaattggctcactattgctttgtagtaacccctgcccaggtattttttcacttgtgaaaataatttgagaaagacctttgttcctagcctgttgggaaaagtttataattttatgaaaattaagtacagaggctgcgatcttagaaataatgaaggtgccatttggctgctccttaatagtgcagacagaaaactgcagtgaacacatgccaaaacatgattgaagcctttggctgaaactttatacatagaaataatgatttgctcataacaggtatcattaactgccactttttatgttttccctagaatttgtagccttgctgcttgcttttcttctgggtggcaaagttactactggaaaaacactataagtacaaagtttttggggttttatctttgctttagaagtggatgtgtacttcacctcttggctgtggaggaacttagttgccaggaaattttttttttttttttcaaacggagtttcgctcttgtggcccaggctgggagggcaatggcaccgtcttgggctcactgcaacctccgcctcccggggttccagcgattctcctgcctcagccttccgagtagctgggattacaggctcctgccaccacgcctggctaggaaattttttgtggttaatatgacatttggattaatctccagcttcaacagtacttcttttgtccataaatctcaggaatgttttaggcagaaaactggttttaccctgttgataatcagaaggagtgtgctttaggatttattgcataatactattctttaattgcaatcctaggtatctatagcatgagtggccttagtgagtttgttgaagtgcacatgtttttcaagagtaaaatttaagattaaaaatatatcctatatatagatatctagaaaacttggtttgtggtgcacagttaagtgttggatcactaaataaccattgcaggtaccgtttgtgtaacattactcatttctgtatattccttttatgggaagatattttgccatggtaactaaaacttttcagttctacttttatgatgtgaatgaatgctacgttttattaaatattaccaggtcagtactatttttatactttattaagcaacaggggattttagtttaataggctcaaaataaaaagttcttaatggaacagttaaaaacaaaacactaacaatctttacgtgaaaatccccactaatagtgccacaataatttctatagaaatatctaaggtcattaaatagatttttgaagacggttcttcattgtgtcaggatgacctttcatatcattctcaccaacttgtagtgcccaccgttatttgtaactattaaaccatactaagtatgtttgtaaccagcattgtgatatattctgtacttgtattgctaaaaatgaattattgacctaataaatatagtgttcctgcattcatagtgaaaaaaaatccaatttgg

SEQ ID NO: 443863 - DNA, 874 bp, Homo sapiens
acgccgcacacgcagccccgcccctgcagagatcagcgctgggacggaacccgggttcctctcgaaccgggattgtgacgcttttggcctggctggccgctgttttctgtcccactttttactcgggcctgcgtccgctgccgccgtccctcagtttgcccccggaggaggcagggcggccgtgccttctgccgtgcgcccgcgtggctgccaccgcccctccgaatcctccggggccgcagaggggttcgctacggagggaggtgggggccttcgggaggaggaggcggaggaggcggaggaggagggaaggaagatggcggccgtggaactagagtggatcccagagactctctataacaacggcaattcttcggtggtctgtgggcacaatatactctcgcgtctcgcgcgcagagatatgcgcctttgttgcgcccgagaatcactcgcagtgttggattgtcttactacaatgctttaccaacagggacgcttatgtcaactgggcagtgaattttgtgaattggaagtttttgctaaagtactgagagctttggataaaagacatttgcttcatcattgttttcaggctttgatggatcatggtgttaaagttgcttcagtcttggcctactcattcagtaggcggtgctcttatatagcagaatcagatgctgcagtaaaggaaaaagccattcaggttggctttgttttaggtaagtaatggtggaacagaagtattttgtcctgtgatggactcagaattaaatctgctaacaaagaattcttccagggctttcccaaagtctacgtaagaaggttatgagaagaacatcagaaccacttaaccccatgccaaagcattatacta

SEQ ID NO: 443864 - DNA, 6468 bp, Homo sapiens
acgccgcacacgcagccccgcccctgcagagatcagcgctgggacggaacccgggttcctctcgaaccgggattgtgacgcttttggcctggctggccgctgttttctgtcccactttttactcgggcctgcgtccgctgccgccgtccctcagtttgcccccggaggaggcagggcggccgtgccttctgccgtgcgcccgcgtggctgccaccgcccctccgaatcctccggggccgcagaggggttcgctacggagggaggtgggggccttcgggaggaggaggcggaggaggcggaggaggagggaaggaagatggcggccgtggaactagagtggatcccagagactctctataacaccgccatctccgctgtcgtggacaactacatccgctcccgccgagacatccgctccttgcccgagaacatccagtttgatgtttactacaagctttaccaacagggacgcttatgtcaactgggcagtgaattttgtgaattggaagtttttgctaaagtactgagagctttggataaaagacatttgcttcatcattgttttcaggctttgatggatcatggtgttaaagttgcttcagtcttggcctactcattcagtaggcggtgctcttatatagcagaatcagatgctgcagtaaaggaaaaagccattcaggttggctttgttttaggtggctttctttcagatgcaggctggtacagtgatgctgagaaagtttttctgtcctgccttcagttgtgtactctacacgatgagatgcttcattggtttcgtgcagtagaatgttgtgtgaggttgcttcatgtgcgaaatggaaactgcaaatatcatttgggtgaagaaacatttaaattagctcagacatatatggataaactatcaaaacatggccagcaagcaaataaagctgcactctatggagaactgtgtgcactcctatttgcaaaaagtcactatgatgaggcatacaaatggtgcatcgaggcaatgaaagaaattacagcaggcttaccagtgaaagttgtggtggatgtcttaagacaagcttctaaggcttgtgtagtaaaacgtgaatttaagaaggcagaacagttaattaaacatgcagtgtatttggcacgggatcattttggatccaaacacccaaaatattctgatacactgctagattatgggttctacttactcaatgtagataatatctgtcagtctgttgcaatttatcaggcagcccttgacattagacagtcagtgtttggtggcaaaaatatccacgtagcaacagctcatgaagatttggcctactcttcttatgtccaccagtatagctctgggaaatttgacaatgcactatttcatgcagaaagagctattggtatcattacccacatcctacctgaagatcatcttcttttggcttcttcaaagagggtgaaagcacttattttagaggagattgcaattgattgtcataataaggaaactgaacagaggctgcttcaagaagctcatgatttgcacctgtcttcactccaactagctaaaaaagcttttggggaatttaatgtacagactgcaaaacactatggaaaccttggaagactttatcagtcaatgagaaaatttaaggaagctgaagaaatgcacatcaaagcaattcagattaaagaacaacttcttggtcaagaagattatgaagtagccctttcagtgggacatctggcttctttatataattatgacatgaatcagtatgaaaatgctgagaaactttatttgcgatctatagcaattgggaagaaactttttggtgagggctacagtggactagaatatgattatcgaggtctcattaaactttacaactccattggaaattacgagaaagtgtttgaatatcacaatgttctgtctaactggaaccggttgcgagatcggcaatattcagtgacagatgctcttgaagatgtcagcaccagcccccagtccactgaagaagtggtgcagtccttcctgatttctcagaatgtcgagggaccgagctgctgagggaggacctcagttaaccaattaccttttcccggattccagggaattcatactgtgaaatcaaaaccatgttgttttggggggctggaatttgcattgaaacactggtccagtccattgaagaccctattttgggtgatccctatcttgcagaatgtctgtaggaataagcatatattcagttatattcagcatgtaccgcatgtgtaagtagtctggcccacattttcaacctagtagaacaaacaacaggaaatcttttttttgttgtttttaaaaaattcattttgcagaaagcctgaaagtgtaaggatgattttaacaactttttaatatgtaattcttccatgtggaggtattcaatactgtagtgtaaagaaattttatgcggaaaatctttatatgcagtatagaaaagttaacacaagtactaataaaagagggacatcccgacttacgtttttctaccttgcccagataagtggatacaaccactctatattacaaggaaaggactgtcagattcatctgaactggaccagtgttgatctgtaatgtaatagaaaatctgatagaccagcacttctgacttttttttttttggtacaacaatgcaagatgctctgatagcatttgctaacaggaccaggaggatctaaaaaggaccagcctaatgtagaaggtggttatttggaccagaggctttagattattattttagatcctacatatacttttatcagtagaatgatttcatttagatgtataatgaaaaaggataatgcaaaaattatgtaatagataccaaattagggaagtttggcaatttcaatggcatatttttagtcaaggtacacagatggcagtgccataagcaagtctataaatatcggctgcagccatccccctcattttaaatgttgccctaataatcaatgcagttaacaagtatattggctgtgtgtcatgaaatagttcatgttcagatggaaatgttaggttactgtatggtttatggagattaatgaaaatgaatgcccaaaaataagtcttagaaaatcctccatttttatggtaaatagtaatacaactaggtcatttcatttgaaatctaggagtcaaatggaaagatcccctaataatacacctatttcactaacttgtctttctgtttattgggttttgatttgattttttgtaagccagtcaggttatttaatgatgaggtaataatcaaatttaagaatttgtgacatgtagcaattcaagaaacaaaaaggtattttgctgttacctcaattcttactgtagtagcccatctgatgcttctatagttaagaatctgggttccccccctattttcaggggttcatgacttggctgttaaagatgttgctcctagctaatgcttggagtagtctgtgggtgaatggatgtgtgttgaattttagttttcttttaacatgcatgttgggtgagaggggaaaaaaatctaagctgtctgccacattgagtacagaaaagttgtagatttcaaattttattaatattttaagcacttttttgaacttcccaaccttgtttgaagctgttatttgcagtcctattagttttgagccattgcatttaagttccctaggagggggttggttgggggatgtactgaaagagatgaagcaaacccacaccctaagatggtaactgtgtgatttagaaacctgagtttactcctcaaatcgaattattttctttttaaattttggaaagagtaaattgacgtacttgcagtttatgaagctgccccccacccctcagttaattgcagtctaatgtcaagaggcacttctttattaattaccaaatagtctttgtgaccaaggactaacatttttaagttactcagctctatcctcatgggcctatatatttaatacctccaaagatattttcaggataggctttgtatacttttattggttatttagaatccagtggtatgtttgtggtataggaatgtcatggtaaattgtttttcaataaatattttgaaacatgtttccatatgaagtttttttttcaatctgtattttttggttttgtgcacatacagcatttcctaggataaaaataaacaaatgacttacagcctcatcctccctaactccatttgaactcaacttagctcacactcagtgataaaacaacatggtatgtagaagcctaggatcacagggtgataatgtcaattggcagccagttgtgtttttttgaaacatcattattggcagtttctccttatcaccactgctttaatgtagtttttttgtaaatccatatactttaatgcatacactctagcttaagaaaacattgccattttggttagggatatgacttaatgtgctattatttctggttctaatgaagaataataccctatgactttaagtgtaagattcatcctttaagtagggatgtttaggataagttagatgtgtgccactatgatttattgggtttcttaaaaatcttgaagaaaataataaaatttatctcacaataagttaacttgcgcaaactttttacatatggtgaggtgcgtaaggaagccctggccaacttaaagatttttctggaggttcagcaaagttatgttaaattaggggcctttggtctcatccttctctgactcttctacccagtcttttcctaaagttcggtgctactccagttgggtgcatcagggagctccgtcagcactcgcatgtgtcgctcaggtggccactcatgcctgcattccatttaatagagtcaattggaatttttagagcataatctttatggatcctcaaagctgactttgccaaagggattgagacccttactaccatcaaatctctgtctctgcttggttaaaaattggctcactattgctttgtagtaacccctgcccaggtattttttcacttgtgaaaataatttgagaaagacctttgttcctagcctgttgggaaaagtttataattttatgaaaattaagtacagaggctgcgatcttagaaataatgaaggtgccatttggctgctccttaatagtgcagacagaaaactgcagtgaacacatgccaaaacatgattgaagcctttggctgaaactttatacatagaaataatgatttgctcataacaggtatcattaactgccactttttatgttttccctagaatttgtagccttgctgcttgcttttcttctgggtggcaaagttactactggaaaaacactataagtacaaagtttttggggttttatctttgctttagaagtggatgtgtacttcacctcttggctgtggaggaacttagttgccaggaaattttttttttttttttcaaacggagtttcgctcttgtggcccaggctgggagggcaatggcaccgtcttgggctcactgcaacctccgcctcccggggttccagcgattctcctgcctcagccttccgagtagctgggattacaggctcctgccaccacgcctggctaggaaattttttgtggttaatatgacatttggattaatctccagcttcaacagtacttcttttgtccataaatctcaggaatgttttaggcagaaaactggttttaccctgttgataatcagaaggagtgtgctttaggatttattgcataatactattctttaattgcaatcctaggtatctatagcatgagtggccttagtgagtttgttgaagtgcacatgtttttcaagagtaaaatttaagattaaaaatatatcctatatatagatatctagaaaacttggtttgtggtgcacagttaagtgttggatcactaaataaccattgcaggtaccgtttgtgtaacattactcatttctgtatattccttttatgggaagatattttgccatggtaactaaaacttttcagttctacttttatgatgtgaatgaatgctacgttttattaaatattaccaggtcagtactatttttatactttattaagcaacaggggattttagtttaataggctcaaaataaaaagttcttaatggaacagttaaaaacaaaacactaacaatctttacgtgaaaatccccactaatagtgccacaataatttctatagaaatatctaaggtcattaaatagatttttgaagacggttcttcattgtgtcaggatgacctttcatatcattctcaccaacttgtagtgcccaccgttatttgtaactattaaaccatactaagtatgtttgtaaccagcattgtgatatattctgtacttgtattgctaaaaatgaattattgacctaataaatatagtgttcctgcattcatagtgaaaaaaaatccaatttgg

SEQ ID NO: 443865 - DNA, 6529 bp, Homo sapiens
gaaacttcatggagaagtactgccggctcttggacttttcttccagaagtggcacatttcacttctcatattttaattgtggaaagaaatcacatggccacacttgtctttgtttgtttgtttgtctgtttgtttgagacagcgtctcactccatcaccaaggtctggagtgcagtggcatgatcacggctcactgcagcctccacctcagctctaccaagtagctggaactacaggtgcacatcaccacgcccagctaatttttttgatttttgatagagacaaagtctcactatgttataacccaggctggtttcaaacttctgagcttggcgatcctcccatctcagcctcccaaagtgctgggattacaggcatgagccactgtgcccggccacaagatttatatttctatatgcaaattatatttagagtttttagaaaatgcctagctataatcatggatcaaaataacaactgagagctgtgcacagtggcacatccctgtagccaggagttcaagtccagcctgggcaacataaaaccttgtctcttaagaaaagaattaataggaaaacttgaaattctatgcatttaaaaattattaaatgaaaataacaaaagattgttgtcagccactccaggactgggatataaggaccttagaaaatgctgtggtaaattctgcccccattgttttattttaataatagcggaaaatgggggtataccagctttgtaaggtaactttgttttgacagatttgtactaggactgactgtcaaaattttaaactttataattttcccagcttatatacagatctgtttataatagaatttttaagtacttggaaggaaagaaattacaaatagaacctttgtatttatgtttggagggttttttttcttattaactcttatagccagaatatataaactacacgtattttagcacactaatgaactgtttgagagttaaccatttttcactttatctttaggcttgtgtagtaaaacgtgaatttaagaaggcagaacagttaattaaacatgcagtgtatttggcacggtaggtgattattattaaaaatatccttttaaattgtctctatactttatatcctaataattttgtgtctttttatagggatcattttggatccaaacacccaaaatattctgatacactgctagattatgggttctacttactcaatgtagataatatctgtcagtctgttgcaatttatcaggcagcccttgacattagacagtcagtgtttggtggcaaaaatatccacgtagcaacagctcatgaagatttggcctactcttcttatgtccaccagtatagctctgggaaatttgacaatgcactatttcatgcagaaagagctattggtatcattacccacatcctacctgaagatcatcttcttttggcttcttcaaagagggtgaaagcacttattttagaggagattgcaattgattgtcataataaggaaactgaacagaggctgcttcaagaagctcatgatttgcacctgtcttcactccaactagctaaaaaagcttttggggaatttaatgtacagactgcaaaacactatggaaaccttggaagactttatcagtcaatgagaaaatttaaggaagctgaagaaatgcacatcaaagcaattcagattaaagaacaacttcttggtcaagaagattatgaagtagccctttcagtgggacatctggcttctttatataattatgacatgaatcagtatgaaaatgctgagaaactttatttgcgatctatagcaattgggaagaaactttttggtgagggctacagtggactagaatatgattatcgaggtctcattaaactttacaactccattggaaattacgagaaagtgtttgaatatcacaatgttctgtctaactggaaccggttgcgagatcggcaatattcagtgacagatgctcttgaagatgtcagcaccagcccccagtccactgaagaagtggtgcagtccttcctgatttctcagaatgtcgagggaccgagctgctgagggaggacctcagttaaccaattaccttttcccggattccagggaattcatactgtgaaatcaaaaccatgttgttttggggggctggaatttgcattgaaacactggtccagtccattgaagaccctattttgggtgatccctatcttgcagaatgtctgtaggaataagcatatattcagttatattcagcatgtaccgcatgtgtaagtagtctggcccacattttcaacctagtagaacaaacaacaggaaatcttttttttgttgtttttaaaaaattcattttgcagaaagcctgaaagaaaaaaaatacccctaaataaaactatttaagagtttaaaagagttgcattcttattatgtaaggatgattttaacaactttttaatatgtaattcttccatgtggaggtattcaatactgtagtgtaaagaaattttatgcggaaaatctttatatgcagtatagaaaagttaacacaagtactaataaaagagggacatcccgacttacgtttttctaccttgcccagataagtggatacaaccactctatattacaaggaaaggactgtcagattcatctgaactggaccagtgttgatctgtaatgtaatagaaaatctgatagaccagcacttctgacttttttttttttggtacaacaatgcaagatgctctgatagcatttgctaacaggaccaggaggatctaaaaaggaccagcctaatgtagaaggtggttatttggaccagaggctttagattattattttagatcctacatatacttttatcagtagaatgatttcatttagatgtataatgaaaaaggataatgcaaaaattatgtaatagataccaaattagggaagtttggcaatttcaatggcatatttttagtcaaggtacacagatggcagtgccataagcaagtctataaatatcggctgcagccatccccctcattttaaatgttgccctaataatcaatgcagttaacaagtatattggctgtgtgtcatgaaatagttcatgttcagatggaaatgttaggttactgtatggtttatggagattaatgaaaatgaatgcccaaaaataagtcttagaaaatcctccatttttatggtaaatagtaatacaactaggtcatttcatttgaaatctaggagtcaaatggaaagatcccctaataatacacctatttcactaacttgtctttctgtttattgggttttgatttgattttttgtaagccagtcaggttatttaatgatgaggtaataatcaaatttaagaatttgtgacatgtagcaattcaagaaacaaaaaggtattttgctgttacctcaattcttactgtagtagcccatctgatgcttctatagttaagaatctgggttccccccctattttcaggggttcatgacttggctgttaaagatgttgctcctagctaatgcttggagtagtctgtgggtgaatggatgtgtgttgaattttagttttcttttaacatgcatgttgggtgagaggggaaaaaaatctaagctgtctgccacattgagtacagaaaagttgtagatttcaaattttattaatattttaagcacttttttgaacttcccaaccttgtttgaagctgttatttgcagtcctattagttttgagccattgcatttaagttccctaggagggggttggttgggggatgtactgaaagagatgaagcaaacccacaccctaagatggtaactgtgtgatttagaaacctgagtttactcctcaaatcgaattattttctttttaaattttggaaagagtaaattgacgtacttgcagtttatgaagctgccccccacccctcagttaattgcagtctaatgtcaagaggcacttctttattaattaccaaatagtctttgtgaccaaggactaacatttttaagttactcagctctatcctcatgggcctatatatttaatacctccaaagatattttcaggataggctttgtatacttttattggttatttagaatccagtggtatgtttgtggtataggaatgtcatggtaaattgtttttcaataaatattttgaaacatgtttccatatgaagtttttttttcaatctgtattttttggttttgtgcacatacagcatttcctaggataaaaataaacaaatgacttacagcctcatcctccctaactccatttgaactcaacttagctcacactcagtgataaaacaacatggtatgtagaagcctaggatcacagggtgataatgtcaattggcagccagttgtgtttttttgaaacatcattattggcagtttctccttatcaccactgctttaatgtagtttttttgtaaatccatatactttaatgcatacactctagcttaagaaaacattgccattttggttagggatatgacttaatgtgctattatttctggttctaatgaagaataataccctatgactttaagtgtaagattcatcctttaagtagggatgtttaggataagttagatgtgtgccactatgatttattgggtttcttaaaaatcttgaagaaaataataaaatttatctcacaataagttaacttgcgcaaactttttacatatggtgaggtgcgtaaggaagccctggccaacttaaagatttttctggaggttcagcaaagttatgttaaattaggggcctttggtctcatccttctctgactcttctacccagtcttttcctaaagttcggtgctactccagttgggtgcatcagggagctccgtcagcactcgcatgtgtcgctcaggtggccactcatgcctgcattccatttaatagagtcaattggaatttttagagcataatctttatggatcctcaaagctgactttgccaaagggattgagacccttactaccatcaaatctctgtctctgcttggttaaaaattggctcactattgctttgtagtaacccctgcccaggtattttttcacttgtgaaaataatttgagaaagacctttgttcctagcctgttgggaaaagtttataattttatgaaaattaagtacagaggctgcgatcttagaaataatgaaggtgccatttggctgctccttaatagtgcagacagaaaactgcagtgaacacatgccaaaacatgattgaagcctttggctgaaactttatacatagaaataatgatttgctcataacaggtatcattaactgccactttttatgttttccctagaatttgtagccttgctgcttgcttttcttctgggtggcaaagttactactggaaaaacactataagtacaaagtttttggggttttatctttgctttagaagtggatgtgtacttcacctcttggctgtggaggaacttagttgccaggaaattttttttttttttttcaaacggagtttcgctcttgtggcccaggctgggagggcaatggcaccgtcttgggctcactgcaacctccgcctcccggggttccagcgattctcctgcctcagccttccgagtagctgggattacaggctcctgccaccacgcctggctaggaaattttttgtggttaatatgacatttggattaatctccagcttcaacagtacttcttttgtccataaatctcaggaatgttttaggcagaaaactggttttaccctgttgataatcagaaggagtgtgctttaggatttattgcataatactattctttaattgcaatcctaggtatctatagcatgagtggccttagtgagtttgttgaagtgcacatgtttttcaagagtaaaatttaagattaaaaatatatcctatatatagatatctagaaaacttggtttgtggtgcacagttaagtgttggatcactaaataaccattgcaggtaccgtttgtgtaacattactcatttctgtatattccttttatgggaagatattttgccatggtaactaaaacttttcagttctacttttatgatgtgaatgaatgctacgttttattaaatattaccaggtcagtactatttttatactttattaagcaacaggggattttagtttaataggctcaaaataaaaagttcttaatggaacagttaaaaacaaaacactaacaatctttacgtgaaaatccccactaatagtgccacaataatttctatagaaatatctaaggtcattaaatagatttttgaagacggttcttcattgtgtcaggatgacctttcatatcattctcaccaacttgtagtgcccaccgttatttgtaactattaaaccatactaagtatgtttgtaaccagcattgtgatatattctgtacttgtattgctaaaaatgaattattgacctaataaatatagtgttcctgcattcatagtgaaaaaaaatccaatttgg

SEQ ID NO: 443866 - DNA, 1437 bp, Homo sapiens
  misc_feature (1129)..(1129): n is a, c, g, or t
acgccgcacacgcagccccgcccctgcagagatcagcgctgggacggaacccgggttcctctcgaaccgggattgtgacgcttttggcctggctggccgctgttttctgtcccactttttactcgggcctgcgtccgctgccgccgtccctcagtttgcccccggaggaggcagggcggccgtgccttctgccgtgcgcccgcgtggctgccaccgcccctccgaatcctccggggccgcagaggggttcgctacggagggaggtgggggccttcgggaggaggaggcggaggaggcggaggaggagggaaggaagatggcggccgtggaactagagtggatcccagagactctctataacaccgccatctccgctgtcgtggacaactacatccgctcccgccgagacatccgctccttgcccgagaacatccagtttgatgtttactacaagctttaccaacagggacgcttatgtcaactgggcagtgaattttgtgaattggaagtttttgctaaagtactgagagctttggataaaagacatttgcttcatcattgttttcaggctttgatggatcatggtgttaaagttgcttcagtcttggcctactcattcagtaggcggtgctcttatatagcagaatcagatgctgcagtaaaggaaaaagccattcaggttggctttgttttaggtggctttctttcagatgcaggctggtacagtgatgctgagaaagtttttctgtcctgccttcagttgtgtactctacacgatgagatgcttcattggtttcgtgcagtagaatgttgtgtgaggttgcttcatgtgcgaaatggaaactgcaaatatcatttgggtgaagaaacatttaaattagctcagacatatatggataaactatcaaaacatggccagcaagcaaataaagctgcactctatggagaactgtgtgcactcctatttgcaaaaagtcactatgatgaggcatacaaatggtgcatcgaggcaatgaaagaaattacagcaggcttaccagtgaaagttgtggtggatgtcttaagacaagcttctaaggcttgtgtagtaaaacgtgaatttaagaaggcagagaaaaagaaacgaggnccaaagccttcaacacagaaacgtaaaatggatggcgcccctgatggtcgaggaagaaaaaagaagctgaaactatgaatatgtttttgtttcataatcactaactttaaaccagtagttctttaatttacgggtcttcataaaatgtactgtacaatgctcaattgttatgtcatttaaagacatcaggttcatctgtttactgagctagaaacatagtatgtagtttcacttttttaaatgcaacagctgtgctgaaatttttttatcattaacacttgaagtaataaaataggcttcttttttta

SEQ ID NO: 443867 - DNA, 3529 bp, Homo sapiens
  misc_feature (2)..(3): n is a, c, g, or t
  misc_feature (5)..(5): n is a, c, g, or t
  misc_feature (8)..(9): n is a, c, g, or t
gnnanganncagaattgttgggcttcatcttggctctgtgctgcctggaggggagacctaggataggctcctgatctgcaaaatggggataatcccagctgccacttaagtgagacaagtgcctgactgacagaagttcttgcccccggggagctggtgtggacagaggagggagcctagacatggaggagaaggactacagtgaggccgatggcctttcggagaggaccacgcccagcaaggcccagaaatcgccccagaagattgccaagaaatacaagagtgccatctgccgggtcactctgcttgatgcctcggagtatgagtgtgaggtggagaaacatggccggggccaggtgctgtttgacctggtctgtgaacacctcaacctcctagagaaggactacttcggcctgaccttctgtgatgctgacagccagaagaactggctggacccctccaaggagatcaagaagcagatccggagtagcccctggaattttgccttcacagtcaagttctacccgcctgatcctgcccagctgacagaagacatcacaagatactacctgtgcctgcagctgcgggcagacatcatcacgggccggctgccatgctcctttgtcacgcatgccctactgggctcctacgctgtgcaggctgagctgggtgactatgatgctgaggagcatgtgggcaactatgtcagcgagctccgcttcgcccctaaccagacccgggagctggaggagaggatcatggagctgcataagacatatagggggatgaccccgggagaagcagaaatccacttcttagagaatgccaagaagctttccatgtacggagtagacctgcaccatgccaaggactctgagggcatcgacatcatgttaggcgtttgtgccaatggcctgctcatctaccgggaccggctgagaatcaaccgctttgcctggcccaagatcctcaagatctcctacaagaggagtaacttctatatcaagatccggcctggggagtatgagcaatttgagagcacaattggctttaagctcccaaaccaccggtcagccaagagactgtggaaggtctgcatcgagcatcatacattcttccggctggtgtcccctgagcccccacccaagggcttcctggtgatgggctccaagttccggtacagtgggaggacccaggcacagactcgccaggccagcgccctcattgaccggcctgcacccttctttgagcgttcttccagcaaacggtacaccatgtcccgcagccttgatggagcagagttctcccgcccagcctcggtcagcgagaaccatgatgcagggcctgacggtgacaagcgggatgaggatggcgagtctggggggcaacggtcagaggctgaggagggagaggtcaggactccaaccaagatcaaggagctaaagttcttagacaagccagaagatgtcttgctgaagcaccaggccagcatcaatgagctcaaaaggaccctgaaggagcccaacagcaaactcatccaccgggatcgagactgggaacgggagcgcaggctgccctcctcccccgcctccccctcccccaagggcacccctgagaaagccaatgagagagcagggctgagggagggctccgaggagaaagtcaaaccaccacgtccccgggccccagagagtgacacaggcgatgaggaccaggaccaggagagggacacggtgttcctgaaggacaaccacctggccattgagcgcaagtgctccagcatcacggtcagctctacgtctagcctggaggctgaggtggacttcacggtcattggtgactaccatggcagcgccttcgaagacttctcccgcagcctgcctgagctcgaccgggacaaaagcgactcggacactgagggcctgctgttctcccgggatctcaacaagggggcccccagccaggatgatgagtctgggggcattgaggacagcccggatcgaggggcctgctccaccccggatatgccccagtttgagcccgtgaaaacagaaaccatgactgtcagcagtctggccattagaaagaagattgagccggaggccgtactgcagaccagagtctccgctatggataacacccaggagaacagtctcaagtccgggaagggggcagctgccatgatcccaggcccacagacggtggccacggaaatccgttctctttctccgatcatcgggaaagatgtcctcaccagcacctacggcgccactgcggaaaccctctcaacctccaccaccacccatgtcaccaaaactgtgaaaggagggttttctgagacaaggatcgagaagcgaatcatcattactggggatgaagatgtcgatcaagaccaggccctggctttggccatcaaggaggccaaactgcagcatcctgatatgctggtaaccaaagctgtcgtatacagagaaacagacccatccccagaggagagggacaagaagccacaggaatcctgacctctgtgaagagatcctggcatttctggtccaacccaagccagagaaccattaagaaggggccttcattctggattctccgacgcaacactgacgtcccagctgcgacgtactgtcactgatgagagactgggaagggaaaagcatatatatatagatatatagagatatagatatatatacaggaaacaccgcatccttgcactgctgctggggctggcagagcagttggctgacagcaacaaccgacatctgaacacctacatttcctttgcagacaaattgaagaactggtgggatttttttcaagaaaaaaaattatataataactataatcccttgctcacccctttcccccgccaaataagaaacgcaagccagaccacgatgattgtagaagtccctcccgccctggttctgcacgttacagttagcagacgagcaattccatttgttcttctccagcatctctaaggcccacttgaatgcaaaggaaaacacttgcacagcaaagcaagagaagtcacagcagcaagacacgcacagtcaaccattttccgagaaaaaaagaaaattccccacttggaaagaaagaggaggaacactggattcttactttctggatcttgacactgggctgcaaaacctaccttcctctctcccgcctcccctcaccctcaactctcaatgtcttgctgtcattttctgtctcggctccctcctcccccttcccccttcccccaccccacacccttcaccctctgtgtcctggtccttctgagggccactgcagatgactctcctttgaaatgagaaaaagaaaagaaagcaagaacagaaaacgaagccacaggaagggaagtagacattgtatgcttatggtttctcattatgaaggtgcagcttgtaggaggtttgtacggatgtgctttgaagttatgtatattacatataacaggaaaaaatattaaaataaacagtgctggtaagtatgaagctgacattct

SEQ ID NO: 443868 - DNA, 310 bp, Homo sapiens
gcggccgcccccggggagcccggcgggcgccggcgcgccccccccaccccacacccttcaccctctgtgtcctggtccttctgagggccactgcagatgactctcctttgaaatgagaaaaagaaaagaaagcaagaacagaaaacgaagccacaggaagggaagtagacattgtatgcttatggtttctcattatgaaggtgcagcttgtaggaggtttgtacggatgtgctttgaagttatgtatattacatataacaggaaaaaatattaaaataaacagtgctggtaagtatgaagctgacattct

SEQ ID NO: 443869 - DNA, 443 bp, Homo sapiens
atccgttctcttttaacgattatttgaaaagatgtcctttcatgtacttttggtgtcattgtgttaaccctctcaacctccaccaccacccatgtcaccaaaactgtgaaaggagggttttctgagagcctagacatggaggagaaggactacagtgaggccgatggcctttcggagaggaccacacccttcaccctctgtgtcctggtccttctgagggccactgcagatgactctcctttgaaatgagaaaaagaaaagaaagcaagaacagaaaacgaagccacaggaagggaagtagacattgtatgcttatggtttctcattatgaaggtgcagcttgtaggaggtttgtacggatgtgctttgaagttatgtatattacatataacaggaaaaaatattaaaataaacagtgctggtaagtatgaagctgacattct

SEQ ID NO: 443870 - DNA, 412 bp, Homo sapiens
tcctgggctcaggtgatctcccgcctgagcctcctgagtatctgggactacagatgcgtgcccccaagcctggctaattttgtctcatgtcttctaaaaattattttgtgaagcccccttccaaaaaaccttagtacctcccccccccccccacacccttcaccctctgtgtcctggtccttctgagggccactgcagatgactctcctttgaaatgagaaaaagaaaagaaagcaagaacagaaaacgaagccacaggaagggaagtagacattgtatgcttatggtttctcattatgaaggtgcagcttgtaggaggtttgtacggatgtgctttgaagttatgtatattacatataacaggaaaaaatattaaaataaacagtgctggtaagtatgaagctgacattct

SEQ ID NO: 443871 - DNA, 464 bp, Homo sapiens
gaatctcagactccaggatttgagaatttgatgggtctagttttctgaagattctagtattcttgaattcttaatggctgaaagcatcttggcttcgaaacgtcaccttcacagagccctttaccccaccccgccctcacccctccagagcccactgtccttacctgacaccctgggtggggggtggttatattctgcagatcatcgggaaagatgtcctcaccagcacctacggcgccggccactgcagatgactctcctttgaaatgagaaaaagaaaagaaagcaagaacagaaaacgaagccacaggaagggaagtagacattgtatgcttatggtttctcattatgaaggtgcagcttgtaggaggtttgtacggatgtgctttgaagttatgtatattacatataacaggaaaaaatattaaaataaacagtgctggtaagtatgaagctgacattct

SEQ ID NO: 443872 - DNA, 339 bp, Homo sapiens
cgagtgggtccctgcttgctgatccccctctgctggaaggtggacagcgaggccaggatggagccgccgttccccacggtagttcttgcgctccggcggagccatgatcttcatcttcattactggtggatgatagatatcgatcaagaccaggccctggctttggccatcaaggaggccaaactgcagcatcctgatatgctggtaaccaaagctgtcgtatacagagaaacagacccatccccagaggagagggacaagaagccacaggaatcctgacctctgtgaagagatcctgacatcttaatctgggcccagcctgctggtccggctcacttt

SEQ ID NO: 443873 - DNA, 5970 bp, Homo sapiens
agcggagtcggcatccatcagcgggcgggggtgtcgccgaacaggctgctccgcagagcccgccgcgaccccgcgccgccccgccccgcggcctgcctgccagaggagccgagggggccgcccctcgcccaacctgcccgacatggggaaccccgggcccagagcctagacatggaggagaaggactacagtgaggccgatggcctttcggagaggaccacgcccagcaaggcccagaaatcgccccagaagattgccaagaaatacaagagtgccatctgccgggtcactctgcttgatgcctcggagtatgagtgtgaggtggagaaacatggccggggccaggtgctgtttgacctggtctgtgaacacctcaacctcctagagaaggactacttcggcctgaccttctgtgatgctgacagccagaagaactggctggacccctccaaggagatcaagaagcagatccggagtagcccctggaattttgccttcacagtcaagttctacccgcctgatcctgcccagctgacagaagacatcacaagatactacctgtgcctgcagctgcgggcagacatcatcacgggccggctgccatgctcctttgtcacgcatgccctactgggctcctacgctgtgcaggctgagctgggtgactatgatgctgaggagcatgtgggcaactatgtcagcgagctccgcttcgcccctaaccagacccgggagctggaggagaggatcatggagctgcataagacatatagggggatgaccccgggagaagcagaaatccacttcttagagaatgccaagaagctttccatgtacggagtagacctgcaccatgccaaggactctgagggcatcgacatcatgttaggcgtttgtgccaatggcctgctcatctaccgggaccggctgagaatcaaccgctttgcctggcccaagatcctcaagatctcctacaagaggagtaacttctatatcaagatccggcctggggagtatgagcaatttgagagcacaattggctttaagctcccaaaccaccggtcagccaagagactgtggaaggtctgcatcgagcatcatacattcttccggctggtgtcccctgagcccccacccaagggcttcctggtgatgggctccaagttccggtacagtgggaggacccaggcacagactcgccaggccagcgccctcattgaccggcctgcacccttctttgagcgttcttccagcaaacggtacaccatgtcccgcagccttgatggagcagagttctcccgcccagcctcggtcagcgagaaccatgatgcagggcctgacggtgacaagcgggatgaggatggcgagtctggggggcaacggtcagaggctgaggagggagaggtcaggactccaaccaagatcaaggagctaaagttcttagacaagccagaagatgtcttgctgaagcaccaggccagcatcaatgagctcaaaaggaccctgaaggagcccaacagcaaactcatccaccgggatcgagactgggaacgggagcgcaggctgccctcctcccccgcctccccctcccccaagggcacccctgagaaagccaatgagagagcagggctgagggagggctccgaggagaaagtcaaaccaccacgtccccgggccccagagagtgacacaggcgatgaggaccaggaccaggagagggacacggtgttcctgaaggacaaccacctggccattgagcgcaagtgctccagcatcacggtcagctctacgtctagcctggaggctgaggtggacttcacggtcattggtgactaccatggcagcgccttcgaagacttctcccgcagcctgcctgagctcgaccgggacaaaagcgactcggacactgagggcctgctgttctcccgggatctcaacaagggggcccccagccaggatgatgagtctgggggcattgaggacagcccggatcgaggggcctgctccaccccggatatgccccagtttgagcccgtgaaaacagaaaccatgactgtcagcagtctggccattagaaagaagattgagccggaggccgtactgcagaccagagtctccgctatggataacacccaggagaacagtctcaagtccgggaagggggcagctgccatgatcccaggcccacagacggtggccacggaaatccgttctctttctccgatcatcgggaaagatgtcctcaccagcacctacggcgccactgcggaaaccctctcaacctccaccaccacccatgtcaccaaaactgtgaaaggagggttttctgagacaaggatcgagaagcgaatcatcattactggggatgaagatgtcgatcaagaccaggccctggctttggccatcaaggaggccaaactgcagcatcctgatatgctggtaaccaaagctgtcgtatacagagaaacagacccatccccagaggagagggacaagaagccacaggaatcctgacctctgtgaagagatcctggcatttctggtccaacccaagccagagaaccattaagaaggggccttcattctggattctccgacgcaacactgacgtcccagctgcgacgtactgtcactgatgagagactgggaagggaaaagcatatatatatagatatatagagatatagatatatatacaggaaacaccgcatccttgcactgctgctggggctggcagagcagttggctgacagcaacaaccgacatctgaacacctacatttcctttgcagacaaattgaagaactggtgggatttttttcaagaaaaaaaattatataataactataatcccttgctcacccctttcccccgccaaataagaaacgcaagccagaccacgatgattgtagaagtccctcccgccctggttctgcacgttacagttagcagacgagcaattccatttgttcttctccagcatctctaaggcccacttgaatgcaaaggaaaacacttgcacagcaaagcaagagaagtcacagcagcaagacacgcacagtcaaccattttccgagaaaaaaagaaaattccccacttggaaagaaagaggaggaacactggattcttactttctggatcttgacactgggctgcaaaacctaccttcctctctcccgcctcccctcaccctcaactctcaatgtcttgctgtcattttctgtctcggctccctcctcccccttcccccttcccccaccccacacccttcaccctctgtgtcctggtccttctgagggccactgcagatgactctcctttgaaatgagaaaaagaaaagaaagcaagaacagaaaacgaagccacaggaagggaagtagacattgtatgcttatggtttctcattatgaaggtgcagcttgtaggaggtttgtacggatgtgctttgaagttatgtatattacatataacaggaaaaaatattaaaataaacagtgctggtaagtatgaagctgacattctaaaattataattatctgactgtgattgatgtatcctgaggttcctagatctcactgaactggcccagctaaggagacctggactctgggtgtgggttggctcacagtaggggctgacgggttcagtgtagtaatactgtgtgtggtgtttgtaattggttgattggtggggaggggtggggggccctaatggagaggtgtgggtttggcaagaaagaagcaacacagatgtcgtccccaaaatgccagttcaagacaccttctccctgcccccctggtagtaacagtcagggcctggtctgtgctcaggtactgggtcccagtctgggactctgctgctgaagttgccacagtagaggtccctggcttagtccttatctccctacggggcttgccttggttttcagtcttctctctctttctctcttttttttttttttgccacattctgcccttccctgaccccattgtaataaccaactccatatccaaagggaggtggtgctctcagccattgtagaagatggtggctttaacctgactgtctaaaaattcccagctaagccttttcctctactctcttccttgttctgaatcatttcttcttctcaggccaaagtagccatggtaaggaggcttcatggggcagaccctgaaagatcaaaactgcatttgcaaagccctcccctgtcccaggacaaagctgagactgacgggtgatgttgctcataggctccagctctgcataagaccttggcttggagacctccctctcagtcaacagctgaactctgagcttgtgcccagaaattaccccaagaccacaggaacccttcaagaagctcccatcacaagcttggcattgctctctgccacacgtgggcttcctcaggcttgtctgccacaagctacttctctgagctcagaaagtgccccttgatgagggaaaatgtcccactgcactgcgaatttctcagttccattttacctcccagtcctccttctaaaccagttaataaattcattccacaagtatttactgattacctgcttgtgccagggactattctcaggctgaagaaggtgggaggggagggcggaacctgaggagccacctgagccagctttatatttcaaccatggctggcccatctgagagcatctccccactctcgccaacctatcggggcatagcccagggatgcccccaggcggcccaggttagatgcgtccctttggcttgtcagtgatgacatacaccttagctgcttagctggtgctggcctgaggcagggcaggaaatcagaatagcatttgcttctctgggcaaatgggaagttcagcggggcagcagaatcagtggcattccccctggtgcaggccggtgggtccactccaactccccctgagtgtagcagcacactttccatacaccaggttctttctacaatcctggtggaaaagccacagaaccttcttcctgcccttcttgagagttccccctctttctgggtcaagagctggagtggtggctccatcctctctgggccacttcggtctaggaactcatctttgcaggaaccaggagtcctgagcacactgaacacacctcagagggaggatccttgttgtggattttgcacctggctttggggcaggggtgaagtgaccaggcttagcttgtggagtttatgggccaccagggtttggggaaatcaccatcccgcggatgctgtgacctcccttctacggagatgcaggcagtgccacgagggaggaggggacctgcaaagctagaatctagggcactgtttcctccccatccttctctttgtagagaatagagacgtttgtcttgtctgtcttcaacctacttttccttttctcttttttgtttctcatcctctctgtgccacctctccacccaggaggccatgtagcatagtggaaaaagtccctgagggcggttaggagttctgggtgaccatcctggctcagctcctaactcaccatgtgacatcaggctatccccattccccctcttgggcctcagtttcccgacttgcaaaataagcagaaagaaccagatgctctccagggtctttttctactttgctatctcatgggtcttcattttctcttattttgttttctctggatcttttccatctgagggtacaggaagtaccaggacctgtttcagtttttgaatcctgcaagcacattccaagactggcctgaaactgcatgagcaacatcactcgaaataattttttttttcaaaagcaccttaacaaccaattgcgatgctgtcctgttcctttttactcacacccttctctcctttctcgtccccatgctcccccacctcagtgctccgtgctgtatgcgtgtgctctctgttcttgtatactcaatataagtgaaataaatgtgtttgatgctgaaccata

SEQ ID NO: 443874 - DNA, 6124 bp, Homo sapiens
ccgcccgctgctgcttggggggccgggatcgccgccgcctcctccgggggagccggccggggcggggcggagcggcgagagggggtgtggggggcgggcgaggagggggctgagcgccgtgggagggagagcaggagcgagcgcgcgagagagcggggcatttctgcgcagctctagcgcgcctcggagcccgccggggcagccgccggacaccaggaccgcgagccagacagctcccggaagccgcgccgccgccgccaggtgcctgactgacagaagttcttgcccccggggagctggtgtggacagaggagggagcctagacatggaggagaaggactacagtgaggccgatggcctttcggagaggaccacgcccagcaaggcccagaaatcgccccagaagattgccaagaaatacaagagtgccatctgccgggtcactctgcttgatgcctcggagtatgagtgtgaggtggagaaacatggccggggccaggtgctgtttgacctggtctgtgaacacctcaacctcctagagaaggactacttcggcctgaccttctgtgatgctgacagccagaagaactggctggacccctccaaggagatcaagaagcagatccggagtagcccctggaattttgccttcacagtcaagttctacccgcctgatcctgcccagctgacagaagacatcacaagatactacctgtgcctgcagctgcgggcagacatcatcacgggccggctgccatgctcctttgtcacgcatgccctactgggctcctacgctgtgcaggctgagctgggtgactatgatgctgaggagcatgtgggcaactatgtcagcgagctccgcttcgcccctaaccagacccgggagctggaggagaggatcatggagctgcataagacatatagggggatgaccccgggagaagcagaaatccacttcttagagaatgccaagaagctttccatgtacggagtagacctgcaccatgccaaggactctgagggcatcgacatcatgttaggcgtttgtgccaatggcctgctcatctaccgggaccggctgagaatcaaccgctttgcctggcccaagatcctcaagatctcctacaagaggagtaacttctatatcaagatccggcctggggagtatgagcaatttgagagcacaattggctttaagctcccaaaccaccggtcagccaagagactgtggaaggtctgcatcgagcatcatacattcttccggctggtgtcccctgagcccccacccaagggcttcctggtgatgggctccaagttccggtacagtgggaggacccaggcacagactcgccaggccagcgccctcattgaccggcctgcacccttctttgagcgttcttccagcaaacggtacaccatgtcccgcagccttgatggagcagagttctcccgcccagcctcggtcagcgagaaccatgatgcagggcctgacggtgacaagcgggatgaggatggcgagtctggggggcaacggtcagaggctgaggagggagaggtcaggactccaaccaagatcaaggagctaaagttcttagacaagccagaagatgtcttgctgaagcaccaggccagcatcaatgagctcaaaaggaccctgaaggagcccaacagcaaactcatccaccgggatcgagactgggaacgggagcgcaggctgccctcctcccccgcctccccctcccccaagggcacccctgagaaagccaatgagagagcagggctgagggagggctccgaggagaaagtcaaaccaccacgtccccgggccccagagagtgacacaggcgatgaggaccaggaccaggagagggacacggtgttcctgaaggacaaccacctggccattgagcgcaagtgctccagcatcacggtcagctctacgtctagcctggaggctgaggtggacttcacggtcattggtgactaccatggcagcgccttcgaagacttctcccgcagcctgcctgagctcgaccgggacaaaagcgactcggacactgagggcctgctgttctcccgggatctcaacaagggggcccccagccaggatgatgagtctgggggcattgaggacagcccggatcgaggggcctgctccaccccggatatgccccagtttgagcccgtgaaaacagaaaccatgactgtcagcagtctggccattagaaagaagattgagccggaggccgtactgcagaccagagtctccgctatggataacacccaggagaacagtctcaagtccgggaagggggcagctgccatgatcccaggcccacagacggtggccacggaaatccgttctctttctccgatcatcgggaaagatgtcctcaccagcacctacggcgccactgcggaaaccctctcaacctccaccaccacccatgtcaccaaaactgtgaaaggagggttttctgagacaaggatcgagaagcgaatcatcattactggggatgaagatgtcgatcaagaccaggccctggctttggccatcaaggaggccaaactgcagcatcctgatatgctggtaaccaaagctgtcgtatacagagaaacagacccatccccagaggagagggacaagaagccacaggaatcctgacctctgtgaagagatcctggcatttctggtccaacccaagccagagaaccattaagaaggggccttcattctggattctccgacgcaacactgacgtcccagctgcgacgtactgtcactgatgagagactgggaagggaaaagcatatatatatagatatatagagatatagatatatatacaggaaacaccgcatccttgcactgctgctggggctggcagagcagttggctgacagcaacaaccgacatctgaacacctacatttcctttgcagacaaattgaagaactggtgggatttttttcaagaaaaaaaattatataataactataatcccttgctcacccctttcccccgccaaataagaaacgcaagccagaccacgatgattgtagaagtccctcccgccctggttctgcacgttacagttagcagacgagcaattccatttgttcttctccagcatctctaaggcccacttgaatgcaaaggaaaacacttgcacagcaaagcaagagaagtcacagcagcaagacacgcacagtcaaccattttccgagaaaaaaagaaaattccccacttggaaagaaagaggaggaacactggattcttactttctggatcttgacactgggctgcaaaacctaccttcctctctcccgcctcccctcaccctcaactctcaatgtcttgctgtcattttctgtctcggctccctcctcccccttcccccttcccccaccccacacccttcaccctctgtgtcctggtccttctgagggccactgcagatgactctcctttgaaatgagaaaaagaaaagaaagcaagaacagaaaacgaagccacaggaagggaagtagacattgtatgcttatggtttctcattatgaaggtgcagcttgtaggaggtttgtacggatgtgctttgaagttatgtatattacatataacaggaaaaaatattaaaataaacagtgctggtaagtatgaagctgacattctaaaattataattatctgactgtgattgatgtatcctgaggttcctagatctcactgaactggcccagctaaggagacctggactctgggtgtgggttggctcacagtaggggctgacgggttcagtgtagtaatactgtgtgtggtgtttgtaattggttgattggtggggaggggtggggggccctaatggagaggtgtgggtttggcaagaaagaagcaacacagatgtcgtccccaaaatgccagttcaagacaccttctccctgcccccctggtagtaacagtcagggcctggtctgtgctcaggtactgggtcccagtctgggactctgctgctgaagttgccacagtagaggtccctggcttagtccttatctccctacggggcttgccttggttttcagtcttctctctctttctctcttttttttttttttgccacattctgcccttccctgaccccattgtaataaccaactccatatccaaagggaggtggtgctctcagccattgtagaagatggtggctttaacctgactgtctaaaaattcccagctaagccttttcctctactctcttccttgttctgaatcatttcttcttctcaggccaaagtagccatggtaaggaggcttcatggggcagaccctgaaagatcaaaactgcatttgcaaagccctcccctgtcccaggacaaagctgagactgacgggtgatgttgctcataggctccagctctgcataagaccttggcttggagacctccctctcagtcaacagctgaactctgagcttgtgcccagaaattaccccaagaccacaggaacccttcaagaagctcccatcacaagcttggcattgctctctgccacacgtgggcttcctcaggcttgtctgccacaagctacttctctgagctcagaaagtgccccttgatgagggaaaatgtcccactgcactgcgaatttctcagttccattttacctcccagtcctccttctaaaccagttaataaattcattccacaagtatttactgattacctgcttgtgccagggactattctcaggctgaagaaggtgggaggggagggcggaacctgaggagccacctgagccagctttatatttcaaccatggctggcccatctgagagcatctccccactctcgccaacctatcggggcatagcccagggatgcccccaggcggcccaggttagatgcgtccctttggcttgtcagtgatgacatacaccttagctgcttagctggtgctggcctgaggcagggcaggaaatcagaatagcatttgcttctctgggcaaatgggaagttcagcggggcagcagaatcagtggcattccccctggtgcaggccggtgggtccactccaactccccctgagtgtagcagcacactttccatacaccaggttctttctacaatcctggtggaaaagccacagaaccttcttcctgcccttcttgagagttccccctctttctgggtcaagagctggagtggtggctccatcctctctgggccacttcggtctaggaactcatctttgcaggaaccaggagtcctgagcacactgaacacacctcagagggaggatccttgttgtggattttgcacctggctttggggcaggggtgaagtgaccaggcttagcttgtggagtttatgggccaccagggtttggggaaatcaccatcccgcggatgctgtgacctcccttctacggagatgcaggcagtgccacgagggaggaggggacctgcaaagctagaatctagggcactgtttcctccccatccttctctttgtagagaatagagacgtttgtcttgtctgtcttcaacctacttttccttttctcttttttgtttctcatcctctctgtgccacctctccacccaggaggccatgtagcatagtggaaaaagtccctgagggcggttaggagttctgggtgaccatcctggctcagctcctaactcaccatgtgacatcaggctatccccattccccctcttgggcctcagtttcccgacttgcaaaataagcagaaagaaccagatgctctccagggtctttttctactttgctatctcatgggtcttcattttctcttattttgttttctctggatcttttccatctgagggtacaggaagtaccaggacctgtttcagtttttgaatcctgcaagcacattccaagactggcctgaaactgcatgagcaacatcactcgaaataattttttttttcaaaagcaccttaacaaccaattgcgatgctgtcctgttcctttttactcacacccttctctcctttctcgtccccatgctcccccacctcagtgctccgtgctgtatgcgtgtgctctctgttcttgtatactcaatataagtgaaataaatgtgtttgatgctgaaccata

SEQ ID NO: 443875 - DNA, 5981 bp, Homo sapiens
  misc_feature (2)..(3): n is a, c, g, or t
  misc_feature (5)..(5): n is a, c, g, or t
  misc_feature (8)..(9): n is a, c, g, or t
gnnanganncagaattgttgggcttcatcttggctctgtgctgcctggaggggagacctaggataggctcctgatctgcaaaatggggataatcccagctgccacttaagtgagacaagtgcctgactgacagaagttcttgcccccggggagctggtgtggacagaggagggagcctagacatggaggagaaggactacagtgaggccgatggcctttcggagaggaccacgcccagcaaggcccagaaatcgccccagaagattgccaagaaatacaagagtgccatctgccgggtcactctgcttgatgcctcggagtatgagtgtgaggtggagaaacatggccggggccaggtgctgtttgacctggtctgtgaacacctcaacctcctagagaaggactacttcggcctgaccttctgtgatgctgacagccagaagaactggctggacccctccaaggagatcaagaagcagatccggagtagcccctggaattttgccttcacagtcaagttctacccgcctgatcctgcccagctgacagaagacatcacaagatactacctgtgcctgcagctgcgggcagacatcatcacgggccggctgccatgctcctttgtcacgcatgccctactgggctcctacgctgtgcaggctgagctgggtgactatgatgctgaggagcatgtgggcaactatgtcagcgagctccgcttcgcccctaaccagacccgggagctggaggagaggatcatggagctgcataagacatatagggggatgaccccgggagaagcagaaatccacttcttagagaatgccaagaagctttccatgtacggagtagacctgcaccatgccaaggactctgagggcatcgacatcatgttaggcgtttgtgccaatggcctgctcatctaccgggaccggctgagaatcaaccgctttgcctggcccaagatcctcaagatctcctacaagaggagtaacttctatatcaagatccggcctggggagtatgagcaatttgagagcacaattggctttaagctcccaaaccaccggtcagccaagagactgtggaaggtctgcatcgagcatcatacattcttccggctggtgtcccctgagcccccacccaagggcttcctggtgatgggctccaagttccggtacagtgggaggacccaggcacagactcgccaggccagcgccctcattgaccggcctgcacccttctttgagcgttcttccagcaaacggtacaccatgtcccgcagccttgatggagcagagttctcccgcccagcctcggtcagcgagaaccatgatgcagggcctgacggtgacaagcgggatgaggatggcgagtctggggggcaacggtcagaggctgaggagggagaggtcaggactccaaccaagatcaaggagctaaagttcttagacaagccagaagatgtcttgctgaagcaccaggccagcatcaatgagctcaaaaggaccctgaaggagcccaacagcaaactcatccaccgggatcgagactgggaacgggagcgcaggctgccctcctcccccgcctccccctcccccaagggcacccctgagaaagccaatgagagagcagggctgagggagggctccgaggagaaagtcaaaccaccacgtccccgggccccagagagtgacacaggcgatgaggaccaggaccaggagagggacacggtgttcctgaaggacaaccacctggccattgagcgcaagtgctccagcatcacggtcagctctacgtctagcctggaggctgaggtggacttcacggtcattggtgactaccatggcagcgccttcgaagacttctcccgcagcctgcctgagctcgaccgggacaaaagcgactcggacactgagggcctgctgttctcccgggatctcaacaagggggcccccagccaggatgatgagtctgggggcattgaggacagcccggatcgaggggcctgctccaccccggatatgccccagtttgagcccgtgaaaacagaaaccatgactgtcagcagtctggccattagaaagaagattgagccggaggccgtactgcagaccagagtctccgctatggataacacccaggagaacagtctcaagtccgggaagggggcagctgccatgatcccaggcccacagacggtggccacggaaatccgttctctttctccgatcatcgggaaagatgtcctcaccagcacctacggcgccactgcggaaaccctctcaacctccaccaccacccatgtcaccaaaactgtgaaaggagggttttctgagacaaggatcgagaagcgaatcatcattactggggatgaagatgtcgatcaagaccaggccctggctttggccatcaaggaggccaaactgcagcatcctgatatgctggtaaccaaagctgtcgtatacagagaaacagacccatccccagaggagagggacaagaagccacaggaatcctgacctctgtgaagagatcctggcatttctggtccaacccaagccagagaaccattaagaaggggccttcattctggattctccgacgcaacactgacgtcccagctgcgacgtactgtcactgatgagagactgggaagggaaaagcatatatatatagatatatagagatatagatatatatacaggaaacaccgcatccttgcactgctgctggggctggcagagcagttggctgacagcaacaaccgacatctgaacacctacatttcctttgcagacaaattgaagaactggtgggatttttttcaagaaaaaaaattatataataactataatcccttgctcacccctttcccccgccaaataagaaacgcaagccagaccacgatgattgtagaagtccctcccgccctggttctgcacgttacagttagcagacgagcaattccatttgttcttctccagcatctctaaggcccacttgaatgcaaaggaaaacacttgcacagcaaagcaagagaagtcacagcagcaagacacgcacagtcaaccattttccgagaaaaaaagaaaattccccacttggaaagaaagaggaggaacactggattcttactttctggatcttgacactgggctgcaaaacctaccttcctctctcccgcctcccctcaccctcaactctcaatgtcttgctgtcattttctgtctcggctccctcctcccccttcccccttcccccaccccacacccttcaccctctgtgtcctggtccttctgagggccactgcagatgactctcctttgaaatgagaaaaagaaaagaaagcaagaacagaaaacgaagccacaggaagggaagtagacattgtatgcttatggtttctcattatgaaggtgcagcttgtaggaggtttgtacggatgtgctttgaagttatgtatattacatataacaggaaaaaatattaaaataaacagtgctggtaagtatgaagctgacattctaaaattataattatctgactgtgattgatgtatcctgaggttcctagatctcactgaactggcccagctaaggagacctggactctgggtgtgggttggctcacagtaggggctgacgggttcagtgtagtaatactgtgtgtggtgtttgtaattggttgattggtggggaggggtggggggccctaatggagaggtgtgggtttggcaagaaagaagcaacacagatgtcgtccccaaaatgccagttcaagacaccttctccctgcccccctggtagtaacagtcagggcctggtctgtgctcaggtactgggtcccagtctgggactctgctgctgaagttgccacagtagaggtccctggcttagtccttatctccctacggggcttgccttggttttcagtcttctctctctttctctcttttttttttttttgccacattctgcccttccctgaccccattgtaataaccaactccatatccaaagggaggtggtgctctcagccattgtagaagatggtggctttaacctgactgtctaaaaattcccagctaagccttttcctctactctcttccttgttctgaatcatttcttcttctcaggccaaagtagccatggtaaggaggcttcatggggcagaccctgaaagatcaaaactgcatttgcaaagccctcccctgtcccaggacaaagctgagactgacgggtgatgttgctcataggctccagctctgcataagaccttggcttggagacctccctctcagtcaacagctgaactctgagcttgtgcccagaaattaccccaagaccacaggaacccttcaagaagctcccatcacaagcttggcattgctctctgccacacgtgggcttcctcaggcttgtctgccacaagctacttctctgagctcagaaagtgccccttgatgagggaaaatgtcccactgcactgcgaatttctcagttccattttacctcccagtcctccttctaaaccagttaataaattcattccacaagtatttactgattacctgcttgtgccagggactattctcaggctgaagaaggtgggaggggagggcggaacctgaggagccacctgagccagctttatatttcaaccatggctggcccatctgagagcatctccccactctcgccaacctatcggggcatagcccagggatgcccccaggcggcccaggttagatgcgtccctttggcttgtcagtgatgacatacaccttagctgcttagctggtgctggcctgaggcagggcaggaaatcagaatagcatttgcttctctgggcaaatgggaagttcagcggggcagcagaatcagtggcattccccctggtgcaggccggtgggtccactccaactccccctgagtgtagcagcacactttccatacaccaggttctttctacaatcctggtggaaaagccacagaaccttcttcctgcccttcttgagagttccccctctttctgggtcaagagctggagtggtggctccatcctctctgggccacttcggtctaggaactcatctttgcaggaaccaggagtcctgagcacactgaacacacctcagagggaggatccttgttgtggattttgcacctggctttggggcaggggtgaagtgaccaggcttagcttgtggagtttatgggccaccagggtttggggaaatcaccatcccgcggatgctgtgacctcccttctacggagatgcaggcagtgccacgagggaggaggggacctgcaaagctagaatctagggcactgtttcctccccatccttctctttgtagagaatagagacgtttgtcttgtctgtcttcaacctacttttccttttctcttttttgtttctcatcctctctgtgccacctctccacccaggaggccatgtagcatagtggaaaaagtccctgagggcggttaggagttctgggtgaccatcctggctcagctcctaactcaccatgtgacatcaggctatccccattccccctcttgggcctcagtttcccgacttgcaaaataagcagaaagaaccagatgctctccagggtctttttctactttgctatctcatgggtcttcattttctcttattttgttttctctggatcttttccatctgagggtacaggaagtaccaggacctgtttcagtttttgaatcctgcaagcacattccaagactggcctgaaactgcatgagcaacatcactcgaaataattttttttttcaaaagcaccttaacaaccaattgcgatgctgtcctgttcctttttactcacacccttctctcctttctcgtccccatgctcccccacctcagtgctccgtgctgtatgcgtgtgctctctgttcttgtatactcaatataagtgaaataaatgtgtttgatgctgaaccata

SEQ ID NO: 443876 - DNA, 6260 bp, Homo sapiens
ccgcccgctgctgcttggggggccgggatcgccgccgcctcctccgggggagccggccggggcggggcggagcggcgagagggggtgtggggggcgggcgaggagggggctgagcgccgtgggagggagagcaggagcgagcgcgcgagagagcggggcatttctgcgcagctctagcgcgcctcggagcccgccggggcagccgccggacaccaggaccgcgagccagacagctcccggaagccgcgccgccgccgccaggcgtgctggtcaccatgacaacagagacaggccccgactctgaggtgaagaaagctcaggaggaggccccgcagcagcccgaggctgctgccgctgtgaccacccctgtgacccctgcaggccacggccacccagaggccaactccaatgagaagcatccatcccagcaggacacgcggcctgctgaacagagcctagacatggaggagaaggactacagtgaggccgatggcctttcggagaggaccacgcccagcaaggcccagaaatcgccccagaagattgccaagaaatacaagagtgccatctgccgggtcactctgcttgatgcctcggagtatgagtgtgaggtggagaaacatggccggggccaggtgctgtttgacctggtctgtgaacacctcaacctcctagagaaggactacttcggcctgaccttctgtgatgctgacagccagaagaactggctggacccctccaaggagatcaagaagcagatccggagtagcccctggaattttgccttcacagtcaagttctacccgcctgatcctgcccagctgacagaagacatcacaagatactacctgtgcctgcagctgcgggcagacatcatcacgggccggctgccatgctcctttgtcacgcatgccctactgggctcctacgctgtgcaggctgagctgggtgactatgatgctgaggagcatgtgggcaactatgtcagcgagctccgcttcgcccctaaccagacccgggagctggaggagaggatcatggagctgcataagacatatagggggatgaccccgggagaagcagaaatccacttcttagagaatgccaagaagctttccatgtacggagtagacctgcaccatgccaaggactctgagggcatcgacatcatgttaggcgtttgtgccaatggcctgctcatctaccgggaccggctgagaatcaaccgctttgcctggcccaagatcctcaagatctcctacaagaggagtaacttctatatcaagatccggcctggggagtatgagcaatttgagagcacaattggctttaagctcccaaaccaccggtcagccaagagactgtggaaggtctgcatcgagcatcatacattcttccggctggtgtcccctgagcccccacccaagggcttcctggtgatgggctccaagttccggtacagtgggaggacccaggcacagactcgccaggccagcgccctcattgaccggcctgcacccttctttgagcgttcttccagcaaacggtacaccatgtcccgcagccttgatggagcagagttctcccgcccagcctcggtcagcgagaaccatgatgcagggcctgacggtgacaagcgggatgaggatggcgagtctggggggcaacggtcagaggctgaggagggagaggtcaggactccaaccaagatcaaggagctaaagttcttagacaagccagaagatgtcttgctgaagcaccaggccagcatcaatgagctcaaaaggaccctgaaggagcccaacagcaaactcatccaccgggatcgagactgggaacgggagcgcaggctgccctcctcccccgcctccccctcccccaagggcacccctgagaaagccaatgagagagcagggctgagggagggctccgaggagaaagtcaaaccaccacgtccccgggccccagagagtgacacaggcgatgaggaccaggaccaggagagggacacggtgttcctgaaggacaaccacctggccattgagcgcaagtgctccagcatcacggtcagctctacgtctagcctggaggctgaggtggacttcacggtcattggtgactaccatggcagcgccttcgaagacttctcccgcagcctgcctgagctcgaccgggacaaaagcgactcggacactgagggcctgctgttctcccgggatctcaacaagggggcccccagccaggatgatgagtctgggggcattgaggacagcccggatcgaggggcctgctccaccccggatatgccccagtttgagcccgtgaaaacagaaaccatgactgtcagcagtctggccattagaaagaagattgagccggaggccgtactgcagaccagagtctccgctatggataacacccaggagaacagtctcaagtccgggaagggggcagctgccatgatcccaggcccacagacggtggccacggaaatccgttctctttctccgatcatcgggaaagatgtcctcaccagcacctacggcgccactgcggaaaccctctcaacctccaccaccacccatgtcaccaaaactgtgaaaggagggttttctgagacaaggatcgagaagcgaatcatcattactggggatgaagatgtcgatcaagaccaggccctggctttggccatcaaggaggccaaactgcagcatcctgatatgctggtaaccaaagctgtcgtatacagagaaacagacccatccccagaggagagggacaagaagccacaggaatcctgacctctgtgaagagatcctggcatttctggtccaacccaagccagagaaccattaagaaggggccttcattctggattctccgacgcaacactgacgtcccagctgcgacgtactgtcactgatgagagactgggaagggaaaagcatatatatatagatatatagagatatagatatatatacaggaaacaccgcatccttgcactgctgctggggctggcagagcagttggctgacagcaacaaccgacatctgaacacctacatttcctttgcagacaaattgaagaactggtgggatttttttcaagaaaaaaaattatataataactataatcccttgctcacccctttcccccgccaaataagaaacgcaagccagaccacgatgattgtagaagtccctcccgccctggttctgcacgttacagttagcagacgagcaattccatttgttcttctccagcatctctaaggcccacttgaatgcaaaggaaaacacttgcacagcaaagcaagagaagtcacagcagcaagacacgcacagtcaaccattttccgagaaaaaaagaaaattccccacttggaaagaaagaggaggaacactggattcttactttctggatcttgacactgggctgcaaaacctaccttcctctctcccgcctcccctcaccctcaactctcaatgtcttgctgtcattttctgtctcggctccctcctcccccttcccccttcccccaccccacacccttcaccctctgtgtcctggtccttctgagggccactgcagatgactctcctttgaaatgagaaaaagaaaagaaagcaagaacagaaaacgaagccacaggaagggaagtagacattgtatgcttatggtttctcattatgaaggtgcagcttgtaggaggtttgtacggatgtgctttgaagttatgtatattacatataacaggaaaaaatattaaaataaacagtgctggtaagtatgaagctgacattctaaaattataattatctgactgtgattgatgtatcctgaggttcctagatctcactgaactggcccagctaaggagacctggactctgggtgtgggttggctcacagtaggggctgacgggttcagtgtagtaatactgtgtgtggtgtttgtaattggttgattggtggggaggggtggggggccctaatggagaggtgtgggtttggcaagaaagaagcaacacagatgtcgtccccaaaatgccagttcaagacaccttctccctgcccccctggtagtaacagtcagggcctggtctgtgctcaggtactgggtcccagtctgggactctgctgctgaagttgccacagtagaggtccctggcttagtccttatctccctacggggcttgccttggttttcagtcttctctctctttctctcttttttttttttttgccacattctgcccttccctgaccccattgtaataaccaactccatatccaaagggaggtggtgctctcagccattgtagaagatggtggctttaacctgactgtctaaaaattcccagctaagccttttcctctactctcttccttgttctgaatcatttcttcttctcaggccaaagtagccatggtaaggaggcttcatggggcagaccctgaaagatcaaaactgcatttgcaaagccctcccctgtcccaggacaaagctgagactgacgggtgatgttgctcataggctccagctctgcataagaccttggcttggagacctccctctcagtcaacagctgaactctgagcttgtgcccagaaattaccccaagaccacaggaacccttcaagaagctcccatcacaagcttggcattgctctctgccacacgtgggcttcctcaggcttgtctgccacaagctacttctctgagctcagaaagtgccccttgatgagggaaaatgtcccactgcactgcgaatttctcagttccattttacctcccagtcctccttctaaaccagttaataaattcattccacaagtatttactgattacctgcttgtgccagggactattctcaggctgaagaaggtgggaggggagggcggaacctgaggagccacctgagccagctttatatttcaaccatggctggcccatctgagagcatctccccactctcgccaacctatcggggcatagcccagggatgcccccaggcggcccaggttagatgcgtccctttggcttgtcagtgatgacatacaccttagctgcttagctggtgctggcctgaggcagggcaggaaatcagaatagcatttgcttctctgggcaaatgggaagttcagcggggcagcagaatcagtggcattccccctggtgcaggccggtgggtccactccaactccccctgagtgtagcagcacactttccatacaccaggttctttctacaatcctggtggaaaagccacagaaccttcttcctgcccttcttgagagttccccctctttctgggtcaagagctggagtggtggctccatcctctctgggccacttcggtctaggaactcatctttgcaggaaccaggagtcctgagcacactgaacacacctcagagggaggatccttgttgtggattttgcacctggctttggggcaggggtgaagtgaccaggcttagcttgtggagtttatgggccaccagggtttggggaaatcaccatcccgcggatgctgtgacctcccttctacggagatgcaggcagtgccacgagggaggaggggacctgcaaagctagaatctagggcactgtttcctccccatccttctctttgtagagaatagagacgtttgtcttgtctgtcttcaacctacttttccttttctcttttttgtttctcatcctctctgtgccacctctccacccaggaggccatgtagcatagtggaaaaagtccctgagggcggttaggagttctgggtgaccatcctggctcagctcctaactcaccatgtgacatcaggctatccccattccccctcttgggcctcagtttcccgacttgcaaaataagcagaaagaaccagatgctctccagggtctttttctactttgctatctcatgggtcttcattttctcttattttgttttctctggatcttttccatctgagggtacaggaagtaccaggacctgtttcagtttttgaatcctgcaagcacattccaagactggcctgaaactgcatgagcaacatcactcgaaataattttttttttcaaaagcaccttaacaaccaattgcgatgctgtcctgttcctttttactcacacccttctctcctttctcgtccccatgctcccccacctcagtgctccgtgctgtatgcgtgtgctctctgttcttgtatactcaatataagtgaaataaatgtgtttgatgctgaaccata

SEQ ID NO: 443877 - DNA, 5916 bp, Homo sapiens
gggtcgacccacgcgtccgctttcagatgctatcttgggctcgctgaacacgggtgcctgactgacagaagttcttgcccccggggagctggtgtggacagaggagggagcctagacatggaggagaaggactacagtgaggccgatggcctttcggagaggaccacgcccagcaaggcccagaaatcgccccagaagattgccaagaaatacaagagtgccatctgccgggtcactctgcttgatgcctcggagtatgagtgtgaggtggagaaacatggccggggccaggtgctgtttgacctggtctgtgaacacctcaacctcctagagaaggactacttcggcctgaccttctgtgatgctgacagccagaagaactggctggacccctccaaggagatcaagaagcagatccggagtagcccctggaattttgccttcacagtcaagttctacccgcctgatcctgcccagctgacagaagacatcacaagatactacctgtgcctgcagctgcgggcagacatcatcacgggccggctgccatgctcctttgtcacgcatgccctactgggctcctacgctgtgcaggctgagctgggtgactatgatgctgaggagcatgtgggcaactatgtcagcgagctccgcttcgcccctaaccagacccgggagctggaggagaggatcatggagctgcataagacatatagggggatgaccccgggagaagcagaaatccacttcttagagaatgccaagaagctttccatgtacggagtagacctgcaccatgccaaggactctgagggcatcgacatcatgttaggcgtttgtgccaatggcctgctcatctaccgggaccggctgagaatcaaccgctttgcctggcccaagatcctcaagatctcctacaagaggagtaacttctatatcaagatccggcctggggagtatgagcaatttgagagcacaattggctttaagctcccaaaccaccggtcagccaagagactgtggaaggtctgcatcgagcatcatacattcttccggctggtgtcccctgagcccccacccaagggcttcctggtgatgggctccaagttccggtacagtgggaggacccaggcacagactcgccaggccagcgccctcattgaccggcctgcacccttctttgagcgttcttccagcaaacggtacaccatgtcccgcagccttgatggagcagagttctcccgcccagcctcggtcagcgagaaccatgatgcagggcctgacggtgacaagcgggatgaggatggcgagtctggggggcaacggtcagaggctgaggagggagaggtcaggactccaaccaagatcaaggagctaaagttcttagacaagccagaagatgtcttgctgaagcaccaggccagcatcaatgagctcaaaaggaccctgaaggagcccaacagcaaactcatccaccgggatcgagactgggaacgggagcgcaggctgccctcctcccccgcctccccctcccccaagggcacccctgagaaagccaatgagagagcagggctgagggagggctccgaggagaaagtcaaaccaccacgtccccgggccccagagagtgacacaggcgatgaggaccaggaccaggagagggacacggtgttcctgaaggacaaccacctggccattgagcgcaagtgctccagcatcacggtcagctctacgtctagcctggaggctgaggtggacttcacggtcattggtgactaccatggcagcgccttcgaagacttctcccgcagcctgcctgagctcgaccgggacaaaagcgactcggacactgagggcctgctgttctcccgggatctcaacaagggggcccccagccaggatgatgagtctgggggcattgaggacagcccggatcgaggggcctgctccaccccggatatgccccagtttgagcccgtgaaaacagaaaccatgactgtcagcagtctggccattagaaagaagattgagccggaggccgtactgcagaccagagtctccgctatggataacacccaggagaacagtctcaagtccgggaagggggcagctgccatgatcccaggcccacagacggtggccacggaaatccgttctctttctccgatcatcgggaaagatgtcctcaccagcacctacggcgccactgcggaaaccctctcaacctccaccaccacccatgtcaccaaaactgtgaaaggagggttttctgagacaaggatcgagaagcgaatcatcattactggggatgaagatgtcgatcaagaccaggccctggctttggccatcaaggaggccaaactgcagcatcctgatatgctggtaaccaaagctgtcgtatacagagaaacagacccatccccagaggagagggacaagaagccacaggaatcctgacctctgtgaagagatcctggcatttctggtccaacccaagccagagaaccattaagaaggggccttcattctggattctccgacgcaacactgacgtcccagctgcgacgtactgtcactgatgagagactgggaagggaaaagcatatatatatagatatatagagatatagatatatatacaggaaacaccgcatccttgcactgctgctggggctggcagagcagttggctgacagcaacaaccgacatctgaacacctacatttcctttgcagacaaattgaagaactggtgggatttttttcaagaaaaaaaattatataataactataatcccttgctcacccctttcccccgccaaataagaaacgcaagccagaccacgatgattgtagaagtccctcccgccctggttctgcacgttacagttagcagacgagcaattccatttgttcttctccagcatctctaaggcccacttgaatgcaaaggaaaacacttgcacagcaaagcaagagaagtcacagcagcaagacacgcacagtcaaccattttccgagaaaaaaagaaaattccccacttggaaagaaagaggaggaacactggattcttactttctggatcttgacactgggctgcaaaacctaccttcctctctcccgcctcccctcaccctcaactctcaatgtcttgctgtcattttctgtctcggctccctcctcccccttcccccttcccccaccccacacccttcaccctctgtgtcctggtccttctgagggccactgcagatgactctcctttgaaatgagaaaaagaaaagaaagcaagaacagaaaacgaagccacaggaagggaagtagacattgtatgcttatggtttctcattatgaaggtgcagcttgtaggaggtttgtacggatgtgctttgaagttatgtatattacatataacaggaaaaaatattaaaataaacagtgctggtaagtatgaagctgacattctaaaattataattatctgactgtgattgatgtatcctgaggttcctagatctcactgaactggcccagctaaggagacctggactctgggtgtgggttggctcacagtaggggctgacgggttcagtgtagtaatactgtgtgtggtgtttgtaattggttgattggtggggaggggtggggggccctaatggagaggtgtgggtttggcaagaaagaagcaacacagatgtcgtccccaaaatgccagttcaagacaccttctccctgcccccctggtagtaacagtcagggcctggtctgtgctcaggtactgggtcccagtctgggactctgctgctgaagttgccacagtagaggtccctggcttagtccttatctccctacggggcttgccttggttttcagtcttctctctctttctctcttttttttttttttgccacattctgcccttccctgaccccattgtaataaccaactccatatccaaagggaggtggtgctctcagccattgtagaagatggtggctttaacctgactgtctaaaaattcccagctaagccttttcctctactctcttccttgttctgaatcatttcttcttctcaggccaaagtagccatggtaaggaggcttcatggggcagaccctgaaagatcaaaactgcatttgcaaagccctcccctgtcccaggacaaagctgagactgacgggtgatgttgctcataggctccagctctgcataagaccttggcttggagacctccctctcagtcaacagctgaactctgagcttgtgcccagaaattaccccaagaccacaggaacccttcaagaagctcccatcacaagcttggcattgctctctgccacacgtgggcttcctcaggcttgtctgccacaagctacttctctgagctcagaaagtgccccttgatgagggaaaatgtcccactgcactgcgaatttctcagttccattttacctcccagtcctccttctaaaccagttaataaattcattccacaagtatttactgattacctgcttgtgccagggactattctcaggctgaagaaggtgggaggggagggcggaacctgaggagccacctgagccagctttatatttcaaccatggctggcccatctgagagcatctccccactctcgccaacctatcggggcatagcccagggatgcccccaggcggcccaggttagatgcgtccctttggcttgtcagtgatgacatacaccttagctgcttagctggtgctggcctgaggcagggcaggaaatcagaatagcatttgcttctctgggcaaatgggaagttcagcggggcagcagaatcagtggcattccccctggtgcaggccggtgggtccactccaactccccctgagtgtagcagcacactttccatacaccaggttctttctacaatcctggtggaaaagccacagaaccttcttcctgcccttcttgagagttccccctctttctgggtcaagagctggagtggtggctccatcctctctgggccacttcggtctaggaactcatctttgcaggaaccaggagtcctgagcacactgaacacacctcagagggaggatccttgttgtggattttgcacctggctttggggcaggggtgaagtgaccaggcttagcttgtggagtttatgggccaccagggtttggggaaatcaccatcccgcggatgctgtgacctcccttctacggagatgcaggcagtgccacgagggaggaggggacctgcaaagctagaatctagggcactgtttcctccccatccttctctttgtagagaatagagacgtttgtcttgtctgtcttcaacctacttttccttttctcttttttgtttctcatcctctctgtgccacctctccacccaggaggccatgtagcatagtggaaaaagtccctgagggcggttaggagttctgggtgaccatcctggctcagctcctaactcaccatgtgacatcaggctatccccattccccctcttgggcctcagtttcccgacttgcaaaataagcagaaagaaccagatgctctccagggtctttttctactttgctatctcatgggtcttcattttctcttattttgttttctctggatcttttccatctgagggtacaggaagtaccaggacctgtttcagtttttgaatcctgcaagcacattccaagactggcctgaaactgcatgagcaacatcactcgaaataattttttttttcaaaagcaccttaacaaccaattgcgatgctgtcctgttcctttttactcacacccttctctcctttctcgtccccatgctcccccacctcagtgctccgtgctgtatgcgtgtgctctctgttcttgtatactcaatataagtgaaataaatgtgtttgatgctgaaccata

SEQ ID NO: 443878 - DNA, 5917 bp, Homo sapiens
agcggagtcggcatccatcagcgggcgggggtgtcgccgaacaggctgctccgcagagcccgccgcgaccccgcgccgccccgccccgcggcctgcctgccagaggagccgagggggccgcccctcgcccaacctgcccgacatggggaaccccgggcccagagcctagacatggaggagaaggactacagtgaggccgatggcctttcggagaggaccacgcccagcaaggcccagaaatcgccccagaagattgccaagaaatacaagagtgccatctgccgggtcactctgcttgatgcctcggagtatgagtgtgaggtggagaaacatggccggggccaggtgctgtttgacctggtctgtgaacacctcaacctcctagagaaggactacttcggcctgaccttctgtgatgctgacagccagaagaactggctggacccctccaaggagatcaagaagcagatccggagtagcccctggaattttgccttcacagtcaagttctacccgcctgatcctgcccagctgacagaagacatcacaagatactacctgtgcctgcagctgcgggcagacatcatcacgggccggctgccatgctcctttgtcacgcatgccctactgggctcctacgctgtgcaggctgagctgggtgactatgatgctgaggagcatgtgggcaactatgtcagcgagctccgcttcgcccctaaccagacccgggagctggaggagaggatcatggagctgcataagacatatagggggatgaccccgggagaagcagaaatccacttcttagagaatgccaagaagctttccatgtacggagtagacctgcaccatgccaaggactctgagggcatcgacatcatgttaggcgtttgtgccaatggcctgctcatctaccgggaccggctgagaatcaaccgctttgcctggcccaagatcctcaagatctcctacaagaggagtaacttctatatcaagatccggcctggggagtatgagcaatttgagagcacaattggctttaagctcccaaaccaccggtcagccaagagactgtggaaggtctgcatcgagcatcatacattcttccggctggtgtcccctgagcccccacccaagggcttcctggtgatgggctccaagttccggtacagtgggaggacccaggcacagactcgccaggccagcgccctcattgaccggcctgcacccttctttgagcgttcttccagcaaacggtacaccatgtcccgcagccttgatggagcagagttctcccgcccagcctcggtcagcgagaaccatgatgcagggcctgacggtgacaagcgggatgaggatggcgagtctggggggcaacggtcagaggctgaggagggagaggtcaggactccaaccaagatcaaggagctaaagttcttagacaagccagaagatgtcttgctgaagcaccaggccagcatcaatgagctcaaaaggaccctgaaggagcccaacagcaaactcatccaccgggatcgagactgggaacgggagcgcaggctgccctcctcccccgcctccccctcccccaagggcacccctgagaaagccaatgagagagcagggctgagggagggctccgaggagaaagtcaaaccaccacgtccccgggccccagagagtgacacaggcgatgaggaccaggaccaggagagggacacggtgttcctgaaggacaaccacctggccattgagcgcaagtgctccagcatcacggtcagctctacgtctagcctggaggctgaggtggacttcacggtcattggtgactaccatggcagcgccttcgaagacttctcccgcagcctgcctgagctcgaccgggacaaaagcgactcggacactgagggcctgctgttctcccgggatctcaacaagggggcccccagccaggatgatgagtctgggggcattgaggacagcccggatcgaggggcctgctccaccccggatatgccccagtttgagcccgtgaaaacagaaaccatgactgtcagcagtctggccattagaaagaagattgagccggaggccgtactgcagaccagagtctccgctatggataacacccaggagaacagtctcaagtccgggaagggggcagctgccatgatcccaggcccacagacggtggccacggaaatccgttctctttctccgatcatcgggaaagatgtcctcaccagcacctacggcgccactgcggaaaccctctcaacctccaccaccacccatgtcaccaaaactgtgaaaggagggttttctgagacaaggatcgagaagcgaatcatcattactggggatgaagatgtcgatcaagaccaggccctggctttggccatcaaggaggccaaactgcagcatcctgatatgctggtaaccaaagctgtcgtatacagagaaacagacccatccccagaggagagggacaagaagccacaggaatcctgacctctgtgaagagatcctggcatttctggtccaacccaagccagagaaccattaagaaggggccttcattctggattctccgacgcaacactgacgtcccagctgcgacgtactgtcactgatgagagactgggaagggaaaagcatatatatatagatatatagagatatagatatatatacaggaaacaccgcatccttgcactgctgctggggctggcagagcagttggctgacagcaacaaccgacatctgaacacctacatttcctttgcagacaaattgaagaactggtgggatttttttcaagaaaaaaaattatataataactataatcccttgctcacccctttcccccgccaaataagaaacgcaagccagaccacgatgattgtagaagtccctcccgccctggttctgcacgttacagttagcagacgagcaattccatttgttcttctccagcatctctaaggcccacttgaatgcaaaggaaaacacttgcacagcaaagcaagagaagtcacagcagcaagacacgcacagtcaaccattttccgagaaaaaaagaaaattccccacttggaaagaaagaggaggaacactggattcttactttctggatcttgacactgggctgcaaaacctaccttcctctctcccgcctcccctcaccctcaactctcaatgtcttgctgtcattttctgtctcggctccctcctcccccttcccccttcccccaccccacacccttcaccctctgtgtcctggtccttctgagggccactgcagatgactctcctttgaaatgagaaaaagaaaagaaagcaagaacagaaaacgaagccacaggaagggaagtagacattgtatgcttatggtttctcattatgaaggtgcagcttgtaggaggtttgtacggatgtgctttgaagttatgtatattacatataacaggaaaaaatattaaaataaacagtgctggtaagtatgaagctgacattctaaaattataattatctgactgtgattgatgtatcctgaggttcctagatctcactgaactggcccagctaaggagacctggactctgggtgtgggttggctcacagtaggggctgacgggttcagtgtagtaatactgtgtgtggtgtttgtaattggttgattggtggggaggggtggggggccctaatggagaggtgtgggtttggcaagaaagaagcaacacagatgtcgtccccaaaatgccagttcaagacaccttctccctgcccccctggtagtaacagtcagggcctggtctgtgctcaggtactgggtcccagtctgggactctgctgctgaagttgccacagtagaggtccctggcttagtccttatctccctacggggcttgccttggttttcagtcttctctctctttctctcttttttttttttttgccacattctgcccttccctgaccccattgtaataaccaactccatatccaaagggaggtggtgctctcagccattgtagaagatggtggctttaacctgactgtctaaaaattcccagctaagccttttcctctactctcttccttgttctgaatcatttcttcttctcaggccaaagtagccatggtaaggaggcttcatggggcagaccctgaaagatcaaaactgcatttgcaaagccctcccctgtcccaggacaaagctgagactgacgggtgatgttgctcataggctccagctctgcataagaccttggcttggagacctccctctcagtcaacagctgaactctgagcttgtgcccagaaattaccccaagaccacaggaacccttcaagaagctcccatcacaagcttggcattgctctctgccacacgtgggcttcctcaggcttgtctgccacaagctacttctctgagctcagaaagtgccccttgatgagggaaaatgtcccactgcactgcgaatttctcagttccattttacctcccagtcctccttctaaaccagttaataaattcattccacaagtatttactgattacctgcttgtgccagggactattctcaggctgaagaaggtgggaggggagggcggaacctgaggagccacctgagccagctttatatttcaaccatggctggcccatctgagagcatctccccactctcgccaacctatcggggcatagcccagggatgcccccaggcggcccaggttagatgcgtccctttggcttgtcagtgatgacatacaccttagctgcttagctggtgctggcctgaggcagggcaggaaatcagaatagcatttgcttctctgggcaaatgggaagttcagcggggcagcagaatcagtggcattccccctggtgcaggccggtgggtccactccaactccccctgagtgtagcagcacactttccatacaccaggttctttctacaatcctggtggaaaagccacagaaccttcttcctgcccttcttgagagttccccctctttctgggtcaagagctggagtggtggctccatcctctctgggccacttcggtctaggaactcatctttgcaggaaccaggagtcctgagcacactgaacacacctcagagggaggatccttgttgtggattttgcacctggctttggggcaggggtgaagtgaccaggcttagcttgtggagtttatgggccaccagggtttggggaaatcaccatcccgcggatgctgtgacctcccttctacggagatgcaggcagtgccacgagggaggaggggacctgcaaagctagaatctagggcactgtttcctccccatccttctctttgtagagaatagagacgtttgtcttgtctgtcttcaacctacttttccttttctcttttttgtttctcatcctctctgtgccacctctccacccaggaggccatgtagcatagtggaaaaatcaccatgtgacatcaggctatccccattccccctcttgggcctcagtttcccgacttgcaaaataagcagaaagaaccagatgctctccagggtctttttctactttgctatctcatgggtcttcattttctcttattttgttttctctggatcttttccatctgagggtacaggaagtaccaggacctgtttcagtttttgaatcctgcaagcacattccaagactggcctgaaactgcatgagcaacatcactcgaaataattttttttttcaaaagcaccttaacaaccaattgcgatgctgtcctgttcctttttactcacacccttctctcctttctcgtccccatgctcccccacctcagtgctccgtgctgtatgcgtgtgctctctgttcttgtatactcaatataagtgaaataaatgtgtttgatgctgaaccata

SEQ ID NO: 443879 - DNA, 5717 bp, Homo sapiens
agcggagtcggcatccatcagcgggcgggggtgtcgccgaacaggctgctccgcagagcccgccgcgaccccgcgccgccccgccccgcggcctgcctgccagaggagccgagggggccgcccctcgcccaacctgcccgacatggggaaccccgggcccagagcctagacatggaggagaaggactacagtgaggccgatggcctttcggagaggaccacgcccagcaaggcccagaaatcgccccagaagattgccaagaaatacaagagtgccatctgccgggtcactctgcttgatgcctcggagtatgagtgtgaggtggagaaacatggccggggccaggtgctgtttgacctggtctgtgaacacctcaacctcctagagaaggactacttcggcctgaccttctgtgatgctgacagccagaagaactggctggacccctccaaggagatcaagaagcagatccggagtagcccctggaattttgccttcacagtcaagttctacccgcctgatcctgcccagctgacagaagacatcacaagatactacctgtgcctgcagctgcgggcagacatcatcacgggccggctgccatgctcctttgtcacgcatgccctactgggctcctacgctgtgcaggctgagctgggtgactatgatgctgaggagcatgtgggcaactatgtcagcgagctccgcttcgcccctaaccagacccgggagctggaggagaggatcatggagctgcataagacatatagggggatgaccccgggagaagcagaaatccacttcttagagaatgccaagaagctttccatgtacggagtagacctgcaccatgccaaggactctgagggcatcgacatcatgttaggcgtttgtgccaatggcctgctcatctaccgggaccggctgagaatcaaccgctttgcctggcccaagatcctcaagatctcctacaagaggagtaacttctatatcaagatccggcctggggagtatgagcaatttgagagcacaattggctttaagctcccaaaccaccggtcagccaagagactgtggaaggtctgcatcgagcatcatacattcttccggctggtgtcccctgagcccccacccaagggcttcctggtgatgggctccaagttccggtacagtgggaggacccaggcacagactcgccaggccagcgccctcattgaccggcctgcacccttctttgagcgttcttccagcaaacggtacaccatgtcccgcagccttgatggagcagagttctcccgcccagcctcggtcagcgagaaccatgatgcagggcctgacggtgacaagcgggatgaggatggcgagtctggggggcaacggtcagaggctgaggagggagaggtcaggactccaaccaagatcaaggagctaaagttcttagacaagccagaagatgtcttgctgaagcaccaggccagcatcaatgagctcaaaaggaccctgaaggagcccaacagcaaactcatccaccgggatcgagactgggaacgggagcgcaggctgccctcctcccccgcctccccctcccccaagggcacccctgagaaagccaatgagagagcagggctgagggagggctccgaggagaaagtcaaaccaccacgtccccgggccccagagagtgacacaggcgatgaggaccaggaccaggagagggacacggtgttcctgaaggacaaccacctggccattgagcgcaagtgctccagcatcacggtcagctctacgtctagcctggaggctgaggtggacttcacggtcattggtgactaccatggcagcgccttcgaagacttctcccgcagcctgcctgagctcgaccgggacaaaagcgactcggacactgagggcctgctgttctcccgggatctcaacaagggggcccccagccaggatgatgagtctgggggcattgaggacagcccggatcgaggggcctgctccaccccggatatgccccagtttgagcccgtgaaaacagaaaccatgactgtcagcagtctggccattagaaagaagattgagccggaggccgtactgcagaccagagtctccgctatggataacacccaggagaacagtctcaagtccgggaagggggcagctgccatgatcccaggcccacagacggtggccacggaaatccgttctctttctccgatcatcgggaaagatgtcctcaccagcacctacggcgccactgcggaaaccctctcaacctccaccaccacccatgtcaccaaaactgtgaaaggagggttttctgagacaaggatcgagaagcgaatcatcattactggggatgaagatgtcgatcaagaccaggccctggctttggccatcaaggaggccaaactgcagcatcctgatatgctggtaaccaaagctgtcgtatacagagaaacagacccatccccagaggagagggacaagaagccacaggaatcctgacctctgtgaagagatcctggcatttctggtccaacccaagccagagaaccattaagaaggggccttcattctggattctccgacgcaacactgacgtcccagctgcgacgtactgtcactgatgagagactgggaagggaaaagcatatatatatagatatatagagatatagatatatatacaggaaacaccgcatccttgcactgctgctggggctggcagagcagttggctgacagcaacaaccgacatctgaacacctacatttcctttgcagacaaattgaagaactggtgggatttttttcaagaaaaaaaattatataataactataatcccttgctcacccctttcccccgccaaataagaaacgcaagccagaccacgatgattgtagaagtccctcccgccctggttctgcacgttacagttagcagacgagcaattccatttgttcttctccagcatctctaaggcccacttgaatgcaaaggaaaacacttgcacagcaaagcaagagaagtcacagcagcaagacacgcacagtcaaccattttccgagaaaaaaagaaaattccccacttggaaagaaagaggaggaacactggattcttactttctggatcttgacactgggctgcaaaacctaccttcctctctcccgcctcccctcaccctcaactctcaatgtcttgctgtcattttctgtctcggctccctcctcccccttcccccttcccccaccccacacccttcaccctctgtgtcctggtccttctgagggccactgcagatgactctcctttgaaatgagaaaaagaaaagaaagcaagaacagaaaacgaagccacaggaagggaagtagacattgtatgcttatggtttctcattatgaaggtgcagcttgtaggaggtttgtacggatgtgctttgaagttatgtatattacatataacaggaaaaaatattaaaataaacagtgctggtaagtatgaagctgacattctaaaattataattatctgactgtgattgatgtatcctgaggttcctagatctcactgaactggcccagctaaggagacctggactctgggtgtgggttggctcacagtaggggctgacgggttcagtgtagtaatactgtgtgtggtgtttgtaattggttgattggtggggaggggtggggggccctaatggagaggtgtgggtttggcaagaaagaagcaacacagatgtcgtccccaaaatgccagttcaagacaccttctccctgcccccctggtagtaacagtcagggcctggtctgtgctcaggtactgggtcccagtctgggactctgctgctgaagttgccacagtagaggtccctggcttagtccttatctccctacggggcttgccttggttttcagtcttctctctctttctctcttttttttttttttgccacattctgcccttccctgaccccattgtaataaccaactccatatccaaagggaggtggtgctctcagccattgtagaagatggtggctttaacctgactgtctaaaaattcccagctaagccttttcctctactctcttccttgttctgaatcatttcttcttctcaggccaaagtagccatggtaaggaggcttcatggggcagaccctgaaagatcaaaactgcatttgcaaagccctcccctgtcccaggacaaagctgagactgacgggtgatgttgctcataggctccagctctgcataagaccttggcttggagacctccctctcagtcaacagctgaactctgagcttgtgcccagaaattaccccaagaccacaggaacccttcaagaagctcccatcacaagcttggcattgctctctgccacacgtgggcttcctcaggcttgtctgccacaagctacttctctgagctcagaaagtgccccttgatgagggaaaatgtcccactgcactgcgaatttctcagttccattttacctcccagtcctccttctaaaccagttaataaattcattccacaagtatttactgattacctgcttgtgccagggactattctcaggctgaagaaggtgggaggggagggcggaacctgaggagccacctgagccagctttatatttcaaccatggctggcccatctgagagcatctccccactctcgccaacctatcggggcatagcccagggatgcccccaggcggcccaggttagatgcgtccctttggcttgtcagtgatgacatacaccttagctgcttagctggtgctggcctgaggcagggcaggaaatcagaatagcatttgcttctctgggcaaatgggaagttcagcggggcagcagaatcagtggcattccccctggtgcaggccggtgggtccactccaactccccctgagtgtagcagcacactttccatacaccaggttctttctacaatcctggtggaaaagccacagaaccttcttcctgcccttcttgagagttccccctctttctgggtcaagagctggagtggtggctccatcctctctgggccacttcggtctaggaactcatctttgcaggaaccaggagtcctgagcacactgaacacacctcagagggaggatccttgttgtggattttgcacctggctttggggcaggggtgaagtgaccaggcttagcttgtggagtttatgggccaccagggtttggggaaatcaccatcccgcggatgctgtgacctcccttctacggagatgcaggcagtgccacgagggaggaggggacctgcaaagctagaatctagggcactgtttcctccccatccttctctttgtagagaatagagacgtttgtcttgtctgtcttcaacctacttttccttttctcttattttgttttctctggatcttttccatctgagggtacaggaagtaccaggacctgtttcagtttttgaatcctgcaagcacattccaagactggcctgaaactgcatgagcaacatcactcgaaataattttttttttcaaaagcaccttaacaaccaattgcgatgctgtcctgttcctttttactcacacccttctctcctttctcgtccccatgctcccccacctcagtgctccgtgctgtatgcgtgtgctctctgttcttgtatactcaatataagtgaaataaatgtgtttgatgctgaaccata

SEQ ID NO: 443880 - DNA, 2959 bp, Homo sapiens
  misc_feature (17)..(18): n is a, c, g, or t
  misc_feature (20)..(22): n is a, c, g, or t
gtaattggttgattggnngnnnggggtggggggccctaatggagaggtgtgggtttggcaagaaaaaaagaaaattccccacttggaaagaaagaggaggaacactggattcttactttctggatcttgacactgggctgcaaaacctaccttcctctctcccgcctcccctcaccctcaactctcaatgtcttgctgtcattttctgtctcggctccctcctcccccttcccccttcccccaccccacacccttcaccctctgtgtcctggtccttctgagggccactgcagatgactctcctttgaaatgagaaaaagaaaagaaagcaagaacagaaaacgaagccacaggaagggaagtagacattgtatgcttatggtttctcattatgaaggtgcagcttgtaggaggtttgtacggatgtgctttgaagttatgtatattacatataacaggaaaaaatattaaaataaacagtgctggtaagtatgaagctgacattctaaaattataattatctgactgtgattgatgtatcctgaggttcctagatctcactgaactggcccagctaaggagacctggactctgggtgtgggttggctcacagtaggggctgacgggttcagtgtagtaatactgtgtgtggtgtttgtaattggttgattggtggggaggggtggggggccctaatggagaggtgtgggtttggcaagaaagaagcaacacagatgtcgtccccaaaatgccagttcaagacaccttctccctgcccccctggtagtaacagtcagggcctggtctgtgctcaggtactgggtcccagtctgggactctgctgctgaagttgccacagtagaggtccctggcttagtccttatctccctacggggcttgccttggttttcagtcttctctctctttctctcttttttttttttttgccacattctgcccttccctgaccccattgtaataaccaactccatatccaaagggaggtggtgctctcagccattgtagaagatggtggctttaacctgactgtctaaaaattcccagctaagccttttcctctactctcttccttgttctgaatcatttcttcttctcaggccaaagtagccatggtaaggaggcttcatggggcagaccctgaaagatcaaaactgcatttgcaaagccctcccctgtcccaggacaaagctgagactgacgggtgatgttgctcataggctccagctctgcataagaccttggcttggagacctccctctcagtcaacagctgaactctgagcttgtgcccagaaattaccccaagaccacaggaacccttcaagaagctcccatcacaagcttggcattgctctctgccacacgtgggcttcctcaggcttgtctgccacaagctacttctctgagctcagaaagtgccccttgatgagggaaaatgtcccactgcactgcgaatttctcagttccattttacctcccagtcctccttctaaaccagttaataaattcattccacaagtatttactgattacctgcttgtgccagggactattctcaggctgaagaaggtgggaggggagggcggaacctgaggagccacctgagccagctttatatttcaaccatggctggcccatctgagagcatctccccactctcgccaacctatcggggcatagcccagggatgcccccaggcggcccaggttagatgcgtccctttggcttgtcagtgatgacatacaccttagctgcttagctggtgctggcctgaggcagggcaggaaatcagaatagcatttgcttctctgggcaaatgggaagttcagcggggcagcagaatcagtggcattccccctggtgcaggccggtgggtccactccaactccccctgagtgtagcagcacactttccatacaccaggttctttctacaatcctggtggaaaagccacagaaccttcttcctgcccttcttgagagttccccctctttctgggtcaagagctggagtggtggctccatcctctctgggccacttcggtctaggaactcatctttgcaggaaccaggagtcctgagcacactgaacacacctcagagggaggatccttgttgtggattttgcacctggctttggggcaggggtgaagtgaccaggcttagcttgtggagtttatgggccaccagggtttggggaaatcaccatcccgcggatgctgtgacctcccttctacggagatgcaggcagtgccacgagggaggaggggacctgcaaagctagaatctagggcactgtttcctccccatccttctctttgtagagaatagagacgtttgtcttgtctgtcttcaacctacttttccttttctcttttttgtttctcatcctctctgtgccacctctccacccaggaggccatgtagcatagtggaaaaagtccctgagggcggttaggagttctgggtgaccatcctggctcagctcctaactcaccatgtgacatcaggctatccccattccccctcttgggcctcagtttcccgacttgcaaaataagcagaaagaaccagatgctctccagggtctttttctactttgctatctcatgggtcttcattttctcttattttgttttctctggatcttttccatctgagggtacaggaagtaccaggacctgtttcagtttttgaatcctgcaagcacattccaagactggcctgaaactgcatgagcaacatcactcgaaataattttttttttcaaaagcaccttaacaaccaattgcgatgctgtcctgttcctttttactcacacccttctctcctttctcgtccccatgctcccccacctcagtgctccgtgctgtatgcgtgtgctctctgttcttgtatactcaatataagtgaaataaatgtgtttgatgctgaaccata

SEQ ID NO: 443881 - DNA, 4770 bp, Homo sapiens
agcggagtcggcatccatcagcgggcgggggtgtcgccgaacaggctgctccgcagagcccgccgcgaccccgcgccgccccgccccgcggcctgcctgccagaggagccgagggggccgcccctcgcccaacctgcccgacatggggaaccccgggcccagagcctagacatggaggagaaggactacagtgaggccgatggcctttcggagaggaccacgcccagcaaggcccagaaatcgccccagaagattgccaagaaatacaagagtgccatctgccgggtcactctgcttgatgcctcggagtatgagtgtgaggtggagaaacatggccggggccaggtgctgtttgacctggtctgtgaacacctcaacctcctagagaaggactacttcggcctgaccttctgtgatgctgacagccagaagaactggctggacccctccaaggagatcaagaagcagatccggagtagcccctggaattttgccttcacagtcaagttctacccgcctgatcctgcccagctgacagaagacatcacaagatactacctgtgcctgcagctgcgggcagacatcatcacgggccggctgccatgctcctttgtcacgcatgccctactgggctcctacgctgtgcaggctgagctgggtgactatgatgctgaggagcatgtgggcaactatgtcagcgagctccgcttcgcccctaaccagacccgggagctggaggagaggatcatggagctgcataagacatatagggggatgaccccgggagaagcagaaatccacttcttagagaatgccaagaagctttccatgtacggagtagacctgcaccatgccaaggactctgagggcatcgacatcatgttaggcgtttgtgccaatggcctgctcatctaccgggaccggctgagaatcaaccgctttgcctggcccaagatcctcaagatctcctacaagaggagtaacttctatatcaagatccggcctggggagtatgagcaatttgagagcacaattggctttaagctcccaaaccaccggtcagccaagagactgtggaaggtctgcatcgagcatcatacattcttccggctggtgtcccctgagcccccacccaagggcttcctggtgatgggctccaagttccggtacagtgggaggacccaggcacagactcgccaggccagcgccctcattgaccggcctgcacccttctttgagcgttcttccagcaaacggtacaccatgtcccgcagccttgatggagcagagttctcccgcccagcctcggtcagcgagaaccatgatgcagggcctgacggtgacaagcgggatgaggatggcgagtctggggggcaacggtcagaggctgaggagggagaggtcaggactccaaccaagatcaaggagctaaagttcttagacaagccagaagatgtcttgctgaagcaccaggccagcatcaatgagctcaaaaggaccctgaaggagcccaacagcaaactcatccaccgggatcgagactgggaacgggagcgcaggctgccctcctcccccgcctccccctcccccaagggcacccctgagaaagccaatgagagagcagggctgagggagggctccgaggagaaagtcaaaccaccacgtccccgggccccagagagtgacacaggcgatgaggaccaggaccaggagagggacacggtgttcctgaaggacaaccacctggccattgagcgcaagtgctccagcatcacggtcagctctacgtctagcctggaggctgaggtggacttcacggtcattggtgactaccatggcagcgccttcgaagacttctcccgcagcctgcctgagctcgaccgggacaaaagcgactcggacactgagggcctgctgttctcccgggatctcaacaagggggcccccagccaggatgatgagtctgggggcattgaggacagcccggatcgaggggcctgctccaccccggatatgccccagtttgagcccgtgaaaacagaaaccatgactgtcagcagtctggccattagaaagaagattgagccggaggccgtactgcagaccagagtctccgctatggataacacccaggagaacagtctcaagtccgggaagggggcagctgccatgatcccaggcccacagacggtggccacggaaatccgttctctttctccgatcatcgggaaagatgtcctcaccagcacctacggcgccactgcggaaaccctctcaacctccaccaccacccatgtcaccaaaactgtgaaaggagggttttctgagacaaggatcgagaagcgaatcatcattactggggatgaagatgtcgatcaagaccaggccctggctttggccatcaaggaggccaaactgcagcatcctgatatgctggtaaccaaagctgtcgtatacagagaaacagacccatccccagaggagagggacaagaagccacaggaatcctgacctctgtgaagagatcctggcatttctggtccaacccaagccagagaaccattaagaaggggccttcattctggattctccgacgcaacactgacgtcccagctgcgacgtactgtcactgatgagagactgggaagggaaaagcatatatatatagatatatagagatatagatatatatacaggaaacaccgcatccttgcactgctgctggggctggcagagcagttggctgacagcaacaaccgacatctgaacacctacatttcctttgcagacaaattgaagaactggtgggatttttttcaagaaaaaaaattatataataactataatcccttgctcacccctttcccccgccaaataagaaacgcaagccagaccacgatgattgtagaagtccctcccgccctggttctgcacgttacagttagcagacgagcaattccatttgttcttctccagcatctctaaggcccacttgaatgcaaaggaaaacacttgcacagcaaagcaagagaagtcacagcagcaagacacgcacagtcaaccattttccgagaaaaaaagaaaattccccacttggaaagaaagaggaggaacactggattcttactttctggatcttgacactgggctgcaaaacctaccttcctctctcccgcctcccctcaccctcaactctcaatgtcttgctgtcattttctgtctcggctccctcctcccccttcccccttcccccaccccacacccttcaccctctgtgtcctggtccttctgagggccactgcagatgactctcctttgaaatgagaaaaagaaaagaaagcaagaacagaaaacgaagccacaggaagggaagtagacattgtatgcttatggtttctcattatgaaggtgcagcttgtaggaggtttgtacggatgtgctttgaagttatgtatattacatataacaggaaaaaatattaaaataaacagtgctggtaagtatgaagctgacattctaaaattataattatctgactgtgattgatgtatcctgaggttcctagatctcactgaactggcccagctaaggagacctggactctgggtgtgggttggctcacagtaggggctgacgggttcagtgtagtaatactgtgtgtggtgtttgtaattggttgattggtggggaggggtggggggccctaatggagaggtgtgggtttggcaagaaagaagcaacacagatgtcgtccccaaaatgccagttcaagacaccttctccctgcccccctggtagtaacagtcagggcctggtctgtgctcaggtactgggtcccagtctgggactctgctgctgaagttgccacagtagaggtccctggcttagtccttatctccctacggggcttgccttggttttcagtcttctctctctttctctcttttttttttttttgccacattctgcccttccctgaccccattgtaataaccaactccatatccaaagggaggtggtgctctcagccattgtagaagatggtggctttaacctgactgtctaaaaattcccagctaagccttttcctctactctcttccttgttctgaatcatttcttcttctcaggccaaagtagccatggtaaggaggcttcatggggcagaccctgaaagatcaaaactgcatttgcaaagccctcccctgtcccaggacaaagctgagactgacgggtgatgttgctcataggctccagctctgcataagaccttggcttggagacctccctctcagtcaacagctgaactctgagcttgtgcccagaaattaccccaagaccacaggaacccttcaagaagctcccatcacaagcttggcattgctctctgccacacgtgggcttcctcaggcttgtctgccacaagctacttctctgagctcagaaagtgccccttgatgagggaaaatgtcccactgcactgcgaatttctcagttccattttacctcccagtcctccttctaaaccagttaataaattcattccacaagtatttactgattacctgcttgtgccagggactattctcaggctgaagaaggtgggaggggagggcccctatgtcttgtacaaaacgaactattacaaatcggacttaaggcattcctggacatgaacgccgcctcttcccccagaatgtcgaactagaccttttacggcgagcttggctaacaaccagatatattggtgcgaacgaatactcagtgtttt

SEQ ID NO: 443882 - DNA, 1319 bp, Homo sapiens
agcggagtcggcatccatcagcgggcgggggtgtcgccgaacaggctgctccgcagagcccgccgcgaccccgcgccgccccgccccgcggcctgcctgccagaggagccgagggggccgcccctcgcccaacctgcccgacatggggaaccccgggcccagagcctagacatggaggagaaggactacagtgaggccgatggcctttcggagaggaccacgcccagcaaggcccagaaatcgccccagaagattgccaagaaatacaagagtgccatctgccgggtcactctgcttgatgcctcggagtatgagtgtgaggtggagaaacatggccggggccaggtgctgtttgacctggtctgtgaacacctcaacctcctagagaaggactacttcggcctgaccttctgtgatgctgacagccagaagaactggctggacccctccaaggagatcaagaagcagatccggagtagcccctggaattttgccttcacagtcaagttctacccgcctgatcctgcccagctgacagaagacatcacaagatactacctgtgcctgcagctgcgggcagacatcatcacgggccggctgccatgctcctttgtcacgcatgccctactgggctcctacgctgtgcaggctgagctgggtgactatgatgctgaggagcatgtgggcaactatgtcagcgagctccgcttcgcccctaaccagacccgggagctggaggagaggatcatggagctgcataagacatatagggggatgaccccgggagaagcagaaatccacttcttagagaatgccaagaagctttccatgtacggagtagacctgcaccatgccaaggactctgagggcatcgacatcatgttaggcgtttgtgccaatggcctgctcatctaccgggaccggctgagaatcaaccgctttgcctggcccaagatcctcaagatctcctacaagaggagtaacttctatatcaagatccggcctggggagtatgagcaatttgagagcacaattggctttaagctcccaaaccaccggtcagccaagagactgtggaaggtctgcatcgagcatcatacattcttccggctggtgtcccctgagcccccacccaagggcttcctggtgatgggctccaagttccggtacagtgggaggacccaggcacagactcgccaggccagcgccctcattgaccggcctgcatcatggttctcgctgaccgaggctgggcgggagaacataagctccatcaaggctgcgggacatggtgtaccgtttgctggaagaacgctctt

SEQ ID NO: 443883 - DNA, 416 bp, Homo sapiens
ctggcctccacttggtcgagtgtgcgtgctctgggctccttgctggaccaagcccatcgtggtatctctaatccatctgctctactgaccctgctgctttctttccctcctaccacatcccactagccggagcaggaaaccacgccgagacacaagcaggaggtactgcatgggacctgtccctccctacccagccgttcccatccctagctcatttgtcaccatcccacagtccatcccaggctcacttccctggcaccatctcagcttcaacttcatctctgctccccagccatccccctctgcagccgtccttgctccccactccgccacccgctaagcttctctctccagctcccttcttagactctcctggccaatcggccatctctccctcctccctcagccctcccacc

SEQ ID NO: 443884 - DNA, 6281 bp, Homo sapiens
agcggagtcggcatccatcagcgggcgggggtgtcgccgaacaggctgctccgcagagcccgccgcgaccccgcgccgccccgccccgcggcctgcctgccagaggagccgagggggccgcccctcgcccaacctgcccgacatggggaaccccgggcccaggcgtgctggtcaccatgacaacagagacaggccccgactctgaggtgaagaaagctcaggaggaggccccgcagcagcccgaggctgctgccgctgtgaccacccctgtgacccctgcaggccacggccacccagaggccaactccaatgagaagcatccatcccagcaggacacgcggcctgctgaacagagcctagacatggaggagaaggactacagtgaggccgatggcctttcggagaggaccacgcccagcaaggcccagaaatcgccccagaagattgccaagaaatacaagagtgccatctgccgggtcactctgcttgatgcctcggagtatgagtgtgaggtggagaaacatggccggggccaggtgctgtttgacctggtctgtgaacacctcaacctcctagagaaggactacttcggcctgaccttctgtgatgctgacagccagaagaactggctggacccctccaaggagatcaagaagcagatccggagtagcccctggaattttgccttcacagtcaagttctacccgcctgatcctgcccagctgacagaagacatcacaagatactacctgtgcctgcagctgcgggcagacatcatcacgggccggctgccatgctcctttgtcacgcatgccctactgggctcctacgctgtgcaggctgagctgggtgactatgatgctgaggagcatgtgggcaactatgtcagcgagctccgcttcgcccctaaccagacccgggagctggaggagaggatcatggagctgcataagacatatagggggatgaccccgggagaagcagaaatccacttcttagagaatgccaagaagctttccatgtacggagtagacctgcaccatgccaaggactctgagggcatcgacatcatgttaggcgtttgtgccaatggcctgctcatctaccgggaccggctgagaatcaaccgctttgcctggcccaagatcctcaagatctcctacaagaggagtaacttctatatcaagatccggcctggggagtatgagcaatttgagagcacaattggctttaagctcccaaaccaccggtcagccaagagactgtggaaggtctgcatcgagcatcatacattcttccggctggtgtcccctgagcccccacccaagggcttcctggtgatgggctccaagttccggtacagtgggaggacccaggcacagactcgccaggccagcgccctcattgaccggcctgcacccttctttgagcgttcttccagcaaacggtacaccatgtcccgcagccttgatggagcagagttctcccgcccagcctcggtcagcgagaaccatgatgcagggcctgacggtgacaagcgggatgaggatggcgagtctggggggcaacggtcagaggctgaggagggagaggtcaggactccaaccaagatcaaggagctaaagccggagcaggaaaccacgccgagacacaagcaggagttcttagacaagccagaagatgtcttgctgaagcaccaggccagcatcaatgagctcaaaaggaccctgaaggagcccaacagcaaactcatccaccgggatcgagactgggaacgggagcgcaggctgccctcctcccccgcctccccctcccccaagggcacccctgagaaagccaatgagagagcagggctgagggagggctccgaggagaaagtcaaaccaccacgtccccgggccccagagagtgacacaggcgatgaggaccaggaccaggagagggacacggtgttcctgaaggacaaccacctggccattgagcgcaagtgctccagcatcacggtcagctctacgtctagcctggaggctgaggtggacttcacggtcattggtgactaccatggcagcgccttcgaagacttctcccgcagcctgcctgagctcgaccgggacaaaagcgactcggacactgagggcctgctgttctcccgggatctcaacaagggggcccccagccaggatgatgagtctgggggcattgaggacagcccggatcgaggggcctgctccaccccggatatgccccagtttgagcccgtgaaaacagaaaccatgactgtcagcagtctggccattagaaagaagattgagccggaggccgtactgcagaccagagtctccgctatggataacacccagcaggttgatgggagtgcctcagtggggagggagttcatagcaaccactccctccatcaccacggagaccatatcgaccaccatggagaacagtctcaagtccgggaagggggcagctgccatgatcccaggcccacagacggtggccacggaaatccgttctctttctccgatcatcgggaaagatgtcctcaccagcacctacggcgccactgcggaaaccctctcaacctccaccaccacccatgtcaccaaaactgtgaaaggagggttttctgagacaaggatcgagaagcgaatcatcattactggggatgaagatgtcgatcaagaccaggccctggctttggccatcaaggaggccaaactgcagcatcctgatatgctggtaaccaaagctgtcgtatacagagaaacagacccatccccagaggagagggacaagaagccacaggaatcctgacctctgtgaagagatcctggcatttctggtccaacccaagccagagaaccattaagaaggggccttcattctggattctccgacgcaacactgacgtcccagctgcgacgtactgtcactgatgagagactgggaagggaaaagcatatatatatagatatatagagatatagatatatatacaggaaacaccgcatccttgcactgctgctggggctggcagagcagttggctgacagcaacaaccgacatctgaacacctacatttcctttgcagacaaattgaagaactggtgggatttttttcaagaaaaaaaattatataataactataatcccttgctcacccctttcccccgccaaataagaaacgcaagccagaccacgatgattgtagaagtccctcccgccctggttctgcacgttacagttagcagacgagcaattccatttgttcttctccagcatctctaaggcccacttgaatgcaaaggaaaacacttgcacagcaaagcaagagaagtcacagcagcaagacacgcacagtcaaccattttccgagaaaaaaagaaaattccccacttggaaagaaagaggaggaacactggattcttactttctggatcttgacactgggctgcaaaacctaccttcctctctcccgcctcccctcaccctcaactctcaatgtcttgctgtcattttctgtctcggctccctcctcccccttcccccttcccccaccccacacccttcaccctctgtgtcctggtccttctgagggccactgcagatgactctcctttgaaatgagaaaaagaaaagaaagcaagaacagaaaacgaagccacaggaagggaagtagacattgtatgcttatggtttctcattatgaaggtgcagcttgtaggaggtttgtacggatgtgctttgaagttatgtatattacatataacaggaaaaaatattaaaataaacagtgctggtaagtatgaagctgacattctaaaattataattatctgactgtgattgatgtatcctgaggttcctagatctcactgaactggcccagctaaggagacctggactctgggtgtgggttggctcacagtaggggctgacgggttcagtgtagtaatactgtgtgtggtgtttgtaattggttgattggtggggaggggtggggggccctaatggagaggtgtgggtttggcaagaaagaagcaacacagatgtcgtccccaaaatgccagttcaagacaccttctccctgcccccctggtagtaacagtcagggcctggtctgtgctcaggtactgggtcccagtctgggactctgctgctgaagttgccacagtagaggtccctggcttagtccttatctccctacggggcttgccttggttttcagtcttctctctctttctctcttttttttttttttgccacattctgcccttccctgaccccattgtaataaccaactccatatccaaagggaggtggtgctctcagccattgtagaagatggtggctttaacctgactgtctaaaaattcccagctaagccttttcctctactctcttccttgttctgaatcatttcttcttctcaggccaaagtagccatggtaaggaggcttcatggggcagaccctgaaagatcaaaactgcatttgcaaagccctcccctgtcccaggacaaagctgagactgacgggtgatgttgctcataggctccagctctgcataagaccttggcttggagacctccctctcagtcaacagctgaactctgagcttgtgcccagaaattaccccaagaccacaggaacccttcaagaagctcccatcacaagcttggcattgctctctgccacacgtgggcttcctcaggcttgtctgccacaagctacttctctgagctcagaaagtgccccttgatgagggaaaatgtcccactgcactgcgaatttctcagttccattttacctcccagtcctccttctaaaccagttaataaattcattccacaagtatttactgattacctgcttgtgccagggactattctcaggctgaagaaggtgggaggggagggcggaacctgaggagccacctgagccagctttatatttcaaccatggctggcccatctgagagcatctccccactctcgccaacctatcggggcatagcccagggatgcccccaggcggcccaggttagatgcgtccctttggcttgtcagtgatgacatacaccttagctgcttagctggtgctggcctgaggcagggcaggaaatcagaatagcatttgcttctctgggcaaatgggaagttcagcggggcagcagaatcagtggcattccccctggtgcaggccggtgggtccactccaactccccctgagtgtagcagcacactttccatacaccaggttctttctacaatcctggtggaaaagccacagaaccttcttcctgcccttcttgagagttccccctctttctgggtcaagagctggagtggtggctccatcctctctgggccacttcggtctaggaactcatctttgcaggaaccaggagtcctgagcacactgaacacacctcagagggaggatccttgttgtggattttgcacctggctttggggcaggggtgaagtgaccaggcttagcttgtggagtttatgggccaccagggtttggggaaatcaccatcccgcggatgctgtgacctcccttctacggagatgcaggcagtgccacgagggaggaggggacctgcaaagctagaatctagggcactgtttcctccccatccttctctttgtagagaatagagacgtttgtcttgtctgtcttcaacctacttttccttttctcttttttgtttctcatcctctctgtgccacctctccacccaggaggccatgtagcatagtggaaaaagtccctgagggcggttaggagttctgggtgaccatcctggctcagctcctaactcaccatgtgacatcaggctatccccattccccctcttgggcctcagtttcccgacttgcaaaataagcagaaagaaccagatgctctccagggtctttttctactttgctatctcatgggtcttcattttctcttattttgttttctctggatcttttccatctgagggtacaggaagtaccaggacctgtttcagtttttgaatcctgcaagcacattccaagactggcctgaaactgcatgagcaacatcactcgaaataattttttttttcaaaagcaccttaacaaccaattgcgatgctgtcctgttcctttttactcacacccttctctcctttctcgtccccatgctcccccacctcagtgctccgtgctgtatgcgtgtgctctctgttcttgtatactcaatataagtgaaataaatgtgtttgatgctgaaccata

SEQ ID NO: 443885 - DNA, 283 bp, Homo sapiens
gttcagcaggtttctttccgtctaccttgtgagcacagggccttgaacatgctcccactgacagcgagagcagggaactccattctcacatcccatctgcccagtgtggctctgcccacttggcctctagttcccttctctgccttcctgggacagcaccctgcttcacacctgtaccttcttctgactacctcactgccctgctggtggcccacccagctgccctggcctccacttggtcgagtgtgcgtgctctgggctccttgctggaccaagcccatcg

SEQ ID NO: 443886 - DNA, 5941 bp, Homo sapiens
agcggagtcggcatccatcagcgggcgggggtgtcgccgaacaggctgctccgcagagcccgccgcgaccccgcgccgccccgccccgcggcctgcctgccagaggagccgagggggccgcccctcgcccaacctgcccgacatggggaaccccgggcccagagcctagacatggaggagaaggactacagtgaggccgatggcctttcggagaggaccacgcccagcaaggcccagaaatcgccccagaagattgccaagaaatacaagagtgccatctgccgggtcactctgcttgatgcctcggagtatgagtgtgaggtggagaaacatggccggggccaggtgctgtttgacctggtctgtgaacacctcaacctcctagagaaggactacttcggcctgaccttctgtgatgctgacagccagaagaactggctggacccctccaaggagatcaagaagcagatccggagtagcccctggaattttgccttcacagtcaagttctacccgcctgatcctgcccagctgacagaagacatcacaagatactacctgtgcctgcagctgcgggcagacatcatcacgggccggctgccatgctcctttgtcacgcatgccctactgggctcctacgctgtgcaggctgagctgggtgactatgatgctgaggagcatgtgggcaactatgtcagcgagctccgcttcgcccctaaccagacccgggagctggaggagaggatcatggagctgcataagacatatagggggatgaccccgggagaagcagaaatccacttcttagagaatgccaagaagctttccatgtacggagtagacctgcaccatgccaaggactctgagggcatcgacatcatgttaggcgtttgtgccaatggcctgctcatctaccgggaccggctgagaatcaaccgctttgcctggcccaagatcctcaagatctcctacaagaggagtaacttctatatcaagatccggcctggggagtatgagcaatttgagagcacaattggctttaagctcccaaaccaccggtcagccaagagactgtggaaggtctgcatcgagcatcatacattcttccggctggtgtcccctgagcccccacccaagggcttcctggtgatgggctccaagttccggtacagtgggaggacccaggcacagactcgccaggccagcgccctcattgaccggcctgcacccttctttgagcgttcttccagcaaacggtacaccatgtcccgcagccttgatggagcagagttctcccgcccagcctcggtcagcgagaaccatgatgcagggcctgacggtgacaagcgggatgaggatggcgagtctggggggcaacggtcagaggctgaggagggagaggtcaggactccaaccaagatcaaggagctaaagttcttagacaagccagaagatgtcttgctgaagcaccaggccagcatcaatgagctcaaaaggaccctgaaggagcccaacagcaaactcatccaccgggatcgagactgggaacgggagcgcaggctgccctcctcccccgcctccccctcccccaagggcacccctgagaaagccaatgagagagcagggctgagggagggctccgaggagaaagtcaaaccaccacgtccccgggccccagagagtgacacaggcgatgaggaccaggaccaggagagggacacggtgttcctgaaggacaaccacctggccattgagcgcaagtgctccagcatcacggtcagctctacgtctagcctggaggctgaggtggacttcacggtcattggtgactaccatggcagcgccttcgaagacttctcccgcagcctgcctgagctcgaccgggacaaaagcgactcggacactgagggcctgctgttctcccgggatctcaacaagggggcccccagccaggatgatgagtctgggggcattgaggacagcccggatcgaggggcctgctccaccccggatatgccccagtttgagcccgtgaaaacagaaaccatgactgtcagcagtctggccattagaaagaagattgagccggaggccgtactgcagaccagagtctccgctatggataacacccaggagaacagtctcaagtccgggaagggggcagctgccatgatcccaggcccacagacggtggccacggaaatccgttctctttctccgatcatcgggaaagatgtcctcaccagcacctacggcgccactgcggaaaccctctcaacctccaccaccacccatgtcaccaaaactgtgaaaggagggttttctgagacaaggatcgagaagcgaatcatcattactggggatgaagatgtcgatcaagaccaggccctggctttggccatcaaggaggccaaactgcagcatcctgatatgctggtaaccaaagctgtcgtatacagagaaacagacccatccccagaggagagggacaagaagccacaggaatcctgacctctgtgaagagatcctggcatttctggtccaacccaagccagagaaccattaagaaggggccttcattctggattctccgacgcaacactgacgtcccagctgcgacgtactgtcactgatgagagactgggaagggaaaagcatatatatatagatatatagagatatagatatatatacaggaaacaccgcatccttgcactgctgctggggctggcagagcagttggctgacagcaacaaccgacatctgaacacctacatttcctttgcagacaaattgaagaactggtgggatttttttcaagaaaaaaaattatataataactataatcccttgctcacccctttcccccgccaaataagaaacgcaagccagaccacgatgattgtagaagtccctcccgccctggttctgcacgttacagttagcagacgagcaattccatttgttcttctccagcatctctaaggcccacttgaatgcaaaggaaaacacttgcacagcaaagcaagagaagtcacagcagcaagacacgcacagtcaaccattttccgagaaaaaaagaaaattccccatcttactttctggatcttgacactgggctgcaaaacctaccttcctctctcccgcctcccctcaccctcaactctcaatgtcttgctgtcattttctgtctcggctccctcctcccccttcccccttcccccaccccacacccttcaccctctgtgtcctggtccttctgagggccactgcagatgactctcctttgaaatgagaaaaagaaaagaaagcaagaacagaaaacgaagccacaggaagggaagtagacattgtatgcttatggtttctcattatgaaggtgcagcttgtaggaggtttgtacggatgtgctttgaagttatgtatattacatataacaggaaaaaatattaaaataaacagtgctggtaagtatgaagctgacattctaaaattataattatctgactgtgattgatgtatcctgaggttcctagatctcactgaactggcccagctaaggagacctggactctgggtgtgggttggctcacagtaggggctgacgggttcagtgtagtaatactgtgtgtggtgtttgtaattggttgattggtggggaggggtggggggccctaatggagaggtgtgggtttggcaagaaagaagcaacacagatgtcgtccccaaaatgccagttcaagacaccttctccctgcccccctggtagtaacagtcagggcctggtctgtgctcaggtactgggtcccagtctgggactctgctgctgaagttgccacagtagaggtccctggcttagtccttatctccctacggggcttgccttggttttcagtcttctctctctttctctcttttttttttttttgccacattctgcccttccctgaccccattgtaataaccaactccatatccaaagggaggtggtgctctcagccattgtagaagatggtggctttaacctgactgtctaaaaattcccagctaagccttttcctctactctcttccttgttctgaatcatttcttcttctcaggccaaagtagccatggtaaggaggcttcatggggcagaccctgaaagatcaaaactgcatttgcaaagccctcccctgtcccaggacaaagctgagactgacgggtgatgttgctcataggctccagctctgcataagaccttggcttggagacctccctctcagtcaacagctgaactctgagcttgtgcccagaaattaccccaagaccacaggaacccttcaagaagctcccatcacaagcttggcattgctctctgccacacgtgggcttcctcaggcttgtctgccacaagctacttctctgagctcagaaagtgccccttgatgagggaaaatgtcccactgcactgcgaatttctcagttccattttacctcccagtcctccttctaaaccagttaataaattcattccacaagtatttactgattacctgcttgtgccagggactattctcaggctgaagaaggtgggaggggagggcggaacctgaggagccacctgagccagctttatatttcaaccatggctggcccatctgagagcatctccccactctcgccaacctatcggggcatagcccagggatgcccccaggcggcccaggttagatgcgtccctttggcttgtcagtgatgacatacaccttagctgcttagctggtgctggcctgaggcagggcaggaaatcagaatagcatttgcttctctgggcaaatgggaagttcagcggggcagcagaatcagtggcattccccctggtgcaggccggtgggtccactccaactccccctgagtgtagcagcacactttccatacaccaggttctttctacaatcctggtggaaaagccacagaaccttcttcctgcccttcttgagagttccccctctttctgggtcaagagctggagtggtggctccatcctctctgggccacttcggtctaggaactcatctttgcaggaaccaggagtcctgagcacactgaacacacctcagagggaggatccttgttgtggattttgcacctggctttggggcaggggtgaagtgaccaggcttagcttgtggagtttatgggccaccagggtttggggaaatcaccatcccgcggatgctgtgacctcccttctacggagatgcaggcagtgccacgagggaggaggggacctgcaaagctagaatctagggcactgtttcctccccatccttctctttgtagagaatagagacgtttgtcttgtctgtcttcaacctacttttccttttctcttttttgtttctcatcctctctgtgccacctctccacccaggaggccatgtagcatagtggaaaaagtccctgagggcggttaggagttctgggtgaccatcctggctcagctcctaactcaccatgtgacatcaggctatccccattccccctcttgggcctcagtttcccgacttgcaaaataagcagaaagaaccagatgctctccagggtctttttctactttgctatctcatgggtcttcattttctcttattttgttttctctggatcttttccatctgagggtacaggaagtaccaggacctgtttcagtttttgaatcctgcaagcacattccaagactggcctgaaactgcatgagcaacatcactcgaaataattttttttttcaaaagcaccttaacaaccaattgcgatgctgtcctgttcctttttactcacacccttctctcctttctcgtccccatgctcccccacctcagtgctccgtgctgtatgcgtgtgctctctgttcttgtatactcaatataagtgaaataaatgtgtttgatgctgaaccata

SEQ ID NO: 443887 - DNA, 6367 bp, Homo sapiens
ccgcccgctgctgcttggggggccgggatcgccgccgcctcctccgggggagccggccggggcggggcggagcggcgagagggggtgtggggggcgggcgaggagggggctgagcgccgtgggagggagagcaggagcgagcgcgcgagagagcggggcatttctgcgcagctctagcgcgcctcggagcccgccggggcagccgccggacaccaggaccgcgagccagacagctcccggaagccgcgccgccgccgccagccacagcacagccggacagaggaggtggattaggagttcccgggagggagcctgctcagcctttccctgacatttgggcaaatgtgtggggagatgcggagctcaaggcgtgctggtcaccatgacaacagagacaggccccgactctgaggtgaagaaagctcaggaggaggccccgcagcagcccgaggctgctgccgctgtgaccacccctgtgacccctgcaggccacggccacccagaggccaactccaatgagaagcatccatcccagcaggacacgcggcctgctgaacagagcctagacatggaggagaaggactacagtgaggccgatggcctttcggagaggaccacgcccagcaaggcccagaaatcgccccagaagattgccaagaaatacaagagtgccatctgccgggtcactctgcttgatgcctcggagtatgagtgtgaggtggagaaacatggccggggccaggtgctgtttgacctggtctgtgaacacctcaacctcctagagaaggactacttcggcctgaccttctgtgatgctgacagccagaagaactggctggacccctccaaggagatcaagaagcagatccggagtagcccctggaattttgccttcacagtcaagttctacccgcctgatcctgcccagctgacagaagacatcacaagatactacctgtgcctgcagctgcgggcagacatcatcacgggccggctgccatgctcctttgtcacgcatgccctactgggctcctacgctgtgcaggctgagctgggtgactatgatgctgaggagcatgtgggcaactatgtcagcgagctccgcttcgcccctaaccagacccgggagctggaggagaggatcatggagctgcataagacatatagggggatgaccccgggagaagcagaaatccacttcttagagaatgccaagaagctttccatgtacggagtagacctgcaccatgccaaggactctgagggcatcgacatcatgttaggcgtttgtgccaatggcctgctcatctaccgggaccggctgagaatcaaccgctttgcctggcccaagatcctcaagatctcctacaagaggagtaacttctatatcaagatccggcctggggagtatgagcaatttgagagcacaattggctttaagctcccaaaccaccggtcagccaagagactgtggaaggtctgcatcgagcatcatacattcttccggctggtgtcccctgagcccccacccaagggcttcctggtgatgggctccaagttccggtacagtgggaggacccaggcacagactcgccaggccagcgccctcattgaccggcctgcacccttctttgagcgttcttccagcaaacggtacaccatgtcccgcagccttgatggagcagagttctcccgcccagcctcggtcagcgagaaccatgatgcagggcctgacggtgacaagcgggatgaggatggcgagtctggggggcaacggtcagaggctgaggagggagaggtcaggactccaaccaagatcaaggagctaaagttcttagacaagccagaagatgtcttgctgaagcaccaggccagcatcaatgagctcaaaaggaccctgaaggagcccaacagcaaactcatccaccgggatcgagactgggaacgggagcgcaggctgccctcctcccccgcctccccctcccccaagggcacccctgagaaagccaatgagagagcagggctgagggagggctccgaggagaaagtcaaaccaccacgtccccgggccccagagagtgacacaggcgatgaggaccaggaccaggagagggacacggtgttcctgaaggacaaccacctggccattgagcgcaagtgctccagcatcacggtcagctctacgtctagcctggaggctgaggtggacttcacggtcattggtgactaccatggcagcgccttcgaagacttctcccgcagcctgcctgagctcgaccgggacaaaagcgactcggacactgagggcctgctgttctcccgggatctcaacaagggggcccccagccaggatgatgagtctgggggcattgaggacagcccggatcgaggggcctgctccaccccggatatgccccagtttgagcccgtgaaaacagaaaccatgactgtcagcagtctggccattagaaagaagattgagccggaggccgtactgcagaccagagtctccgctatggataacacccaggagaacagtctcaagtccgggaagggggcagctgccatgatcccaggcccacagacggtggccacggaaatccgttctctttctccgatcatcgggaaagatgtcctcaccagcacctacggcgccactgcggaaaccctctcaacctccaccaccacccatgtcaccaaaactgtgaaaggagggttttctgagacaaggatcgagaagcgaatcatcattactggggatgaagatgtcgatcaagaccaggccctggctttggccatcaaggaggccaaactgcagcatcctgatatgctggtaaccaaagctgtcgtatacagagaaacagacccatccccagaggagagggacaagaagccacaggaatcctgacctctgtgaagagatcctggcatttctggtccaacccaagccagagaaccattaagaaggggccttcattctggattctccgacgcaacactgacgtcccagctgcgacgtactgtcactgatgagagactgggaagggaaaagcatatatatatagatatatagagatatagatatatatacaggaaacaccgcatccttgcactgctgctggggctggcagagcagttggctgacagcaacaaccgacatctgaacacctacatttcctttgcagacaaattgaagaactggtgggatttttttcaagaaaaaaaattatataataactataatcccttgctcacccctttcccccgccaaataagaaacgcaagccagaccacgatgattgtagaagtccctcccgccctggttctgcacgttacagttagcagacgagcaattccatttgttcttctccagcatctctaaggcccacttgaatgcaaaggaaaacacttgcacagcaaagcaagagaagtcacagcagcaagacacgcacagtcaaccattttccgagaaaaaaagaaaattccccacttggaaagaaagaggaggaacactggattcttactttctggatcttgacactgggctgcaaaacctaccttcctctctcccgcctcccctcaccctcaactctcaatgtcttgctgtcattttctgtctcggctccctcctcccccttcccccttcccccaccccacacccttcaccctctgtgtcctggtccttctgagggccactgcagatgactctcctttgaaatgagaaaaagaaaagaaagcaagaacagaaaacgaagccacaggaagggaagtagacattgtatgcttatggtttctcattatgaaggtgcagcttgtaggaggtttgtacggatgtgctttgaagttatgtatattacatataacaggaaaaaatattaaaataaacagtgctggtaagtatgaagctgacattctaaaattataattatctgactgtgattgatgtatcctgaggttcctagatctcactgaactggcccagctaaggagacctggactctgggtgtgggttggctcacagtaggggctgacgggttcagtgtagtaatactgtgtgtggtgtttgtaattggttgattggtggggaggggtggggggccctaatggagaggtgtgggtttggcaagaaagaagcaacacagatgtcgtccccaaaatgccagttcaagacaccttctccctgcccccctggtagtaacagtcagggcctggtctgtgctcaggtactgggtcccagtctgggactctgctgctgaagttgccacagtagaggtccctggcttagtccttatctccctacggggcttgccttggttttcagtcttctctctctttctctcttttttttttttttgccacattctgcccttccctgaccccattgtaataaccaactccatatccaaagggaggtggtgctctcagccattgtagaagatggtggctttaacctgactgtctaaaaattcccagctaagccttttcctctactctcttccttgttctgaatcatttcttcttctcaggccaaagtagccatggtaaggaggcttcatggggcagaccctgaaagatcaaaactgcatttgcaaagccctcccctgtcccaggacaaagctgagactgacgggtgatgttgctcataggctccagctctgcataagaccttggcttggagacctccctctcagtcaacagctgaactctgagcttgtgcccagaaattaccccaagaccacaggaacccttcaagaagctcccatcacaagcttggcattgctctctgccacacgtgggcttcctcaggcttgtctgccacaagctacttctctgagctcagaaagtgccccttgatgagggaaaatgtcccactgcactgcgaatttctcagttccattttacctcccagtcctccttctaaaccagttaataaattcattccacaagtatttactgattacctgcttgtgccagggactattctcaggctgaagaaggtgggaggggagggcggaacctgaggagccacctgagccagctttatatttcaaccatggctggcccatctgagagcatctccccactctcgccaacctatcggggcatagcccagggatgcccccaggcggcccaggttagatgcgtccctttggcttgtcagtgatgacatacaccttagctgcttagctggtgctggcctgaggcagggcaggaaatcagaatagcatttgcttctctgggcaaatgggaagttcagcggggcagcagaatcagtggcattccccctggtgcaggccggtgggtccactccaactccccctgagtgtagcagcacactttccatacaccaggttctttctacaatcctggtggaaaagccacagaaccttcttcctgcccttcttgagagttccccctctttctgggtcaagagctggagtggtggctccatcctctctgggccacttcggtctaggaactcatctttgcaggaaccaggagtcctgagcacactgaacacacctcagagggaggatccttgttgtggattttgcacctggctttggggcaggggtgaagtgaccaggcttagcttgtggagtttatgggccaccagggtttggggaaatcaccatcccgcggatgctgtgacctcccttctacggagatgcaggcagtgccacgagggaggaggggacctgcaaagctagaatctagggcactgtttcctccccatccttctctttgtagagaatagagacgtttgtcttgtctgtcttcaacctacttttccttttctcttttttgtttctcatcctctctgtgccacctctccacccaggaggccatgtagcatagtggaaaaagtccctgagggcggttaggagttctgggtgaccatcctggctcagctcctaactcaccatgtgacatcaggctatccccattccccctcttgggcctcagtttcccgacttgcaaaataagcagaaagaaccagatgctctccagggtctttttctactttgctatctcatgggtcttcattttctcttattttgttttctctggatcttttccatctgagggtacaggaagtaccaggacctgtttcagtttttgaatcctgcaagcacattccaagactggcctgaaactgcatgagcaacatcactcgaaataattttttttttcaaaagcaccttaacaaccaattgcgatgctgtcctgttcctttttactcacacccttctctcctttctcgtccccatgctcccccacctcagtgctccgtgctgtatgcgtgtgctctctgttcttgtatactcaatataagtgaaataaatgtgtttgatgctgaaccata

SEQ ID NO: 443888 - DNA, 6268 bp, Homo sapiens
tctcctgctggcttctgagagctgacggaacaggttccagcaaggcagaccctgacacagaagccagacctgtccagcagggaccccatacactgggaggcttcctgggaaactggaaggcagaagccacgcagacttctagtcctggttccactgcttactcggctgctgttcgtacctgcctcatggttttcttggggaggatcaatgaggtagaacctgcaaagggcttagcagagagcctagcacctactgagcgctcagtaaaggcgtgctggtcaccatgacaacagagacaggccccgactctgaggtgaagaaagctcaggaggaggccccgcagcagcccgaggctgctgccgctgtgaccacccctgtgacccctgcaggccacggccacccagaggccaactccaatgagaagcatccatcccagcaggacacgcggcctgctgaacagagcctagacatggaggagaaggactacagtgaggccgatggcctttcggagaggaccacgcccagcaaggcccagaaatcgccccagaagattgccaagaaatacaagagtgccatctgccgggtcactctgcttgatgcctcggagtatgagtgtgaggtggagaaacatggccggggccaggtgctgtttgacctggtctgtgaacacctcaacctcctagagaaggactacttcggcctgaccttctgtgatgctgacagccagaagaactggctggacccctccaaggagatcaagaagcagatccggagtagcccctggaattttgccttcacagtcaagttctacccgcctgatcctgcccagctgacagaagacatcacaagatactacctgtgcctgcagctgcgggcagacatcatcacgggccggctgccatgctcctttgtcacgcatgccctactgggctcctacgctgtgcaggctgagctgggtgactatgatgctgaggagcatgtgggcaactatgtcagcgagctccgcttcgcccctaaccagacccgggagctggaggagaggatcatggagctgcataagacatatagggggatgaccccgggagaagcagaaatccacttcttagagaatgccaagaagctttccatgtacggagtagacctgcaccatgccaaggactctgagggcatcgacatcatgttaggcgtttgtgccaatggcctgctcatctaccgggaccggctgagaatcaaccgctttgcctggcccaagatcctcaagatctcctacaagaggagtaacttctatatcaagatccggcctggggagtatgagcaatttgagagcacaattggctttaagctcccaaaccaccggtcagccaagagactgtggaaggtctgcatcgagcatcatacattcttccggctggtgtcccctgagcccccacccaagggcttcctggtgatgggctccaagttccggtacagtgggaggacccaggcacagactcgccaggccagcgccctcattgaccggcctgcacccttctttgagcgttcttccagcaaacggtacaccatgtcccgcagccttgatggagcagagttctcccgcccagcctcggtcagcgagaaccatgatgcagggcctgacggtgacaagcgggatgaggatggcgagtctggggggcaacggtcagaggctgaggagggagaggtcaggactccaaccaagatcaaggagctaaagttcttagacaagccagaagatgtcttgctgaagcaccaggccagcatcaatgagctcaaaaggaccctgaaggagcccaacagcaaactcatccaccgggatcgagactgggaacgggagcgcaggctgccctcctcccccgcctccccctcccccaagggcacccctgagaaagccaatgagagagcagggctgagggagggctccgaggagaaagtcaaaccaccacgtccccgggccccagagagtgacacaggcgatgaggaccaggaccaggagagggacacggtgttcctgaaggacaaccacctggccattgagcgcaagtgctccagcatcacggtcagctctacgtctagcctggaggctgaggtggacttcacggtcattggtgactaccatggcagcgccttcgaagacttctcccgcagcctgcctgagctcgaccgggacaaaagcgactcggacactgagggcctgctgttctcccgggatctcaacaagggggcccccagccaggatgatgagtctgggggcattgaggacagcccggatcgaggggcctgctccaccccggatatgccccagtttgagcccgtgaaaacagaaaccatgactgtcagcagtctggccattagaaagaagattgagccggaggccgtactgcagaccagagtctccgctatggataacacccaggagaacagtctcaagtccgggaagggggcagctgccatgatcccaggcccacagacggtggccacggaaatccgttctctttctccgatcatcgggaaagatgtcctcaccagcacctacggcgccactgcggaaaccctctcaacctccaccaccacccatgtcaccaaaactgtgaaaggagggttttctgagacaaggatcgagaagcgaatcatcattactggggatgaagatgtcgatcaagaccaggccctggctttggccatcaaggaggccaaactgcagcatcctgatatgctggtaaccaaagctgtcgtatacagagaaacagacccatccccagaggagagggacaagaagccacaggaatcctgacctctgtgaagagatcctggcatttctggtccaacccaagccagagaaccattaagaaggggccttcattctggattctccgacgcaacactgacgtcccagctgcgacgtactgtcactgatgagagactgggaagggaaaagcatatatatatagatatatagagatatagatatatatacaggaaacaccgcatccttgcactgctgctggggctggcagagcagttggctgacagcaacaaccgacatctgaacacctacatttcctttgcagacaaattgaagaactggtgggatttttttcaagaaaaaaaattatataataactataatcccttgctcacccctttcccccgccaaataagaaacgcaagccagaccacgatgattgtagaagtccctcccgccctggttctgcacgttacagttagcagacgagcaattccatttgttcttctccagcatctctaaggcccacttgaatgcaaaggaaaacacttgcacagcaaagcaagagaagtcacagcagcaagacacgcacagtcaaccattttccgagaaaaaaagaaaattccccacttggaaagaaagaggaggaacactggattcttactttctggatcttgacactgggctgcaaaacctaccttcctctctcccgcctcccctcaccctcaactctcaatgtcttgctgtcattttctgtctcggctccctcctcccccttcccccttcccccaccccacacccttcaccctctgtgtcctggtccttctgagggccactgcagatgactctcctttgaaatgagaaaaagaaaagaaagcaagaacagaaaacgaagccacaggaagggaagtagacattgtatgcttatggtttctcattatgaaggtgcagcttgtaggaggtttgtacggatgtgctttgaagttatgtatattacatataacaggaaaaaatattaaaataaacagtgctggtaagtatgaagctgacattctaaaattataattatctgactgtgattgatgtatcctgaggttcctagatctcactgaactggcccagctaaggagacctggactctgggtgtgggttggctcacagtaggggctgacgggttcagtgtagtaatactgtgtgtggtgtttgtaattggttgattggtggggaggggtggggggccctaatggagaggtgtgggtttggcaagaaagaagcaacacagatgtcgtccccaaaatgccagttcaagacaccttctccctgcccccctggtagtaacagtcagggcctggtctgtgctcaggtactgggtcccagtctgggactctgctgctgaagttgccacagtagaggtccctggcttagtccttatctccctacggggcttgccttggttttcagtcttctctctctttctctcttttttttttttttgccacattctgcccttccctgaccccattgtaataaccaactccatatccaaagggaggtggtgctctcagccattgtagaagatggtggctttaacctgactgtctaaaaattcccagctaagccttttcctctactctcttccttgttctgaatcatttcttcttctcaggccaaagtagccatggtaaggaggcttcatggggcagaccctgaaagatcaaaactgcatttgcaaagccctcccctgtcccaggacaaagctgagactgacgggtgatgttgctcataggctccagctctgcataagaccttggcttggagacctccctctcagtcaacagctgaactctgagcttgtgcccagaaattaccccaagaccacaggaacccttcaagaagctcccatcacaagcttggcattgctctctgccacacgtgggcttcctcaggcttgtctgccacaagctacttctctgagctcagaaagtgccccttgatgagggaaaatgtcccactgcactgcgaatttctcagttccattttacctcccagtcctccttctaaaccagttaataaattcattccacaagtatttactgattacctgcttgtgccagggactattctcaggctgaagaaggtgggaggggagggcggaacctgaggagccacctgagccagctttatatttcaaccatggctggcccatctgagagcatctccccactctcgccaacctatcggggcatagcccagggatgcccccaggcggcccaggttagatgcgtccctttggcttgtcagtgatgacatacaccttagctgcttagctggtgctggcctgaggcagggcaggaaatcagaatagcatttgcttctctgggcaaatgggaagttcagcggggcagcagaatcagtggcattccccctggtgcaggccggtgggtccactccaactccccctgagtgtagcagcacactttccatacaccaggttctttctacaatcctggtggaaaagccacagaaccttcttcctgcccttcttgagagttccccctctttctgggtcaagagctggagtggtggctccatcctctctgggccacttcggtctaggaactcatctttgcaggaaccaggagtcctgagcacactgaacacacctcagagggaggatccttgttgtggattttgcacctggctttggggcaggggtgaagtgaccaggcttagcttgtggagtttatgggccaccagggtttggggaaatcaccatcccgcggatgctgtgacctcccttctacggagatgcaggcagtgccacgagggaggaggggacctgcaaagctagaatctagggcactgtttcctccccatccttctctttgtagagaatagagacgtttgtcttgtctgtcttcaacctacttttccttttctcttttttgtttctcatcctctctgtgccacctctccacccaggaggccatgtagcatagtggaaaaagtccctgagggcggttaggagttctgggtgaccatcctggctcagctcctaactcaccatgtgacatcaggctatccccattccccctcttgggcctcagtttcccgacttgcaaaataagcagaaagaaccagatgctctccagggtctttttctactttgctatctcatgggtcttcattttctcttattttgttttctctggatcttttccatctgagggtacaggaagtaccaggacctgtttcagtttttgaatcctgcaagcacattccaagactggcctgaaactgcatgagcaacatcactcgaaataattttttttttcaaaagcaccttaacaaccaattgcgatgctgtcctgttcctttttactcacacccttctctcctttctcgtccccatgctcccccacctcagtgctccgtgctgtatgcgtgtgctctctgttcttgtatactcaatataagtgaaataaatgtgtttgatgctgaaccata

SEQ ID NO: 443889 - DNA, 5967 bp, Homo sapiens
agcggagtcggcatccatcagcgggcgggggtgtcgccgaacaggctgctccgcagagcccgccgcgaccccgcgccgccccgccccgcggcctgcctgccagaggagccgagggggccgcccctcgcccaacctgcccgacatggggaaccccgggcccagagcctagacatggaggagaaggactacagtgaggccgatggcctttcggagaggaccacgcccagcaaggcccagaaatcgccccagaagattgccaagaaatacaagagtgccatctgccgggtcactctgcttgatgcctcggagtatgagtgtgaggtggagaaacatggccggggccaggtgctgtttgacctggtctgtgaacacctcaacctcctagagaaggactacttcggcctgaccttctgtgatgctgacagccagaagaactggctggacccctccaaggagatcaagaagcagatccggagtagcccctggaattttgccttcacagtcaagttctacccgcctgatcctgcccagctgacagaagacatcacaagatactacctgtgcctgcagctgcgggcagacatcatcacgggccggctgccatgctcctttgtcacgcatgccctactgggctcctacgctgtgcaggctgagctgggtgactatgatgctgaggagcatgtgggcaactatgtcagcgagctccgcttcgcccctaaccagacccgggagctggaggagaggatcatggagctgcataagacatatagggggatgaccccgggagaagcagaaatccacttcttagagaatgccaagaagctttccatgtacggagtagacctgcaccatgccaaggactctgagggcatcgacatcatgttaggcgtttgtgccaatggcctgctcatctaccgggaccggctgagaatcaaccgctttgcctggcccaagatcctcaagatctcctacaagaggagtaacttctatatcaagatccggcctggggagtatgagcaatttgagagcacaattggctttaagctcccaaaccaccggtcagccaagagactgtggaaggtctgcatcgagcatcatacattcttccggctggtgtcccctgagcccccacccaagggcttcctggtgatgggctccaagttccggtacagtgggaggacccaggcacagactcgccaggccagcgccctcattgaccggcctgcacccttctttgagcgttcttccagcaaacggtacaccatgtcccgcagccttgatggagcagagttctcccgcccagcctcggtcagcgagaaccatgatgcagggcctgacggtgacaagcgggatgaggatggcgagtctggggggcaacggtcagaggctgaggagggagaggtcaggactccaaccaagatcaaggagctaaagttcttagacaagccagaagatgtcttgctgaagcaccaggccagcatcaatgagctcaaaaggaccctgaaggagcccaacagcaaactcatccaccgggatcgagactgggaacgggagcgcaggctgccctcctcccccgcctccccctcccccaagggcacccctgagaaagccaatgagagagcagggctgagggagggctccgaggagaaagtcaaaccaccacgtccccgggccccagagagtgacacaggcgatgaggaccaggaccaggagagggacacggtgttcctgaaggacaaccacctggccattgagcgcaagtgctccagcatcacggtcagctctacgtctagcctggaggctgaggtggacttcacggtcattggtgactaccatggcagcgccttcgaagacttctcccgcagcctgcctgagctcgaccgggacaaaagcgactcggacactgagggcctgctgttctcccgggatctcaacaagggggcccccagccaggatgatgagtctgggggcattgaggacagcccggatcgaggggcctgctccaccccggatatgccccagtttgagcccgtgaaaacagaaaccatgactgtcagcagtctggccattagaaagaagattgagccggaggccgtactgcagaccagagtctccgctatggataacacccagcaggttgatgggagtgcctcagtggggagggagttcatagcaaccactccctccatcaccacggagaccatatcgaccaccatgatcatcgggaaagatgtcctcaccagcacctacggcgccactgcggaaaccctctcaacctccaccaccacccatgtcaccaaaactgtgaaaggagggttttctgagacaaggatcgagaagcgaatcatcattactggggatgaagatgtcgatcaagaccaggccctggctttggccatcaaggaggccaaactgcagcatcctgatatgctggtaaccaaagctgtcgtatacagagaaacagacccatccccagaggagagggacaagaagccacaggaatcctgacctctgtgaagagatcctggcatttctggtccaacccaagccagagaaccattaagaaggggccttcattctggattctccgacgcaacactgacgtcccagctgcgacgtactgtcactgatgagagactgggaagggaaaagcatatatatatagatatatagagatatagatatatatacaggaaacaccgcatccttgcactgctgctggggctggcagagcagttggctgacagcaacaaccgacatctgaacacctacatttcctttgcagacaaattgaagaactggtgggatttttttcaagaaaaaaaattatataataactataatcccttgctcacccctttcccccgccaaataagaaacgcaagccagaccacgatgattgtagaagtccctcccgccctggttctgcacgttacagttagcagacgagcaattccatttgttcttctccagcatctctaaggcccacttgaatgcaaaggaaaacacttgcacagcaaagcaagagaagtcacagcagcaagacacgcacagtcaaccattttccgagaaaaaaagaaaattccccacttggaaagaaagaggaggaacactggattcttactttctggatcttgacactgggctgcaaaacctaccttcctctctcccgcctcccctcaccctcaactctcaatgtcttgctgtcattttctgtctcggctccctcctcccccttcccccttcccccaccccacacccttcaccctctgtgtcctggtccttctgagggccactgcagatgactctcctttgaaatgagaaaaagaaaagaaagcaagaacagaaaacgaagccacaggaagggaagtagacattgtatgcttatggtttctcattatgaaggtgcagcttgtaggaggtttgtacggatgtgctttgaagttatgtatattacatataacaggaaaaaatattaaaataaacagtgctggtaagtatgaagctgacattctaaaattataattatctgactgtgattgatgtatcctgaggttcctagatctcactgaactggcccagctaaggagacctggactctgggtgtgggttggctcacagtaggggctgacgggttcagtgtagtaatactgtgtgtggtgtttgtaattggttgattggtggggaggggtggggggccctaatggagaggtgtgggtttggcaagaaagaagcaacacagatgtcgtccccaaaatgccagttcaagacaccttctccctgcccccctggtagtaacagtcagggcctggtctgtgctcaggtactgggtcccagtctgggactctgctgctgaagttgccacagtagaggtccctggcttagtccttatctccctacggggcttgccttggttttcagtcttctctctctttctctcttttttttttttttgccacattctgcccttccctgaccccattgtaataaccaactccatatccaaagggaggtggtgctctcagccattgtagaagatggtggctttaacctgactgtctaaaaattcccagctaagccttttcctctactctcttccttgttctgaatcatttcttcttctcaggccaaagtagccatggtaaggaggcttcatggggcagaccctgaaagatcaaaactgcatttgcaaagccctcccctgtcccaggacaaagctgagactgacgggtgatgttgctcataggctccagctctgcataagaccttggcttggagacctccctctcagtcaacagctgaactctgagcttgtgcccagaaattaccccaagaccacaggaacccttcaagaagctcccatcacaagcttggcattgctctctgccacacgtgggcttcctcaggcttgtctgccacaagctacttctctgagctcagaaagtgccccttgatgagggaaaatgtcccactgcactgcgaatttctcagttccattttacctcccagtcctccttctaaaccagttaataaattcattccacaagtatttactgattacctgcttgtgccagggactattctcaggctgaagaaggtgggaggggagggcggaacctgaggagccacctgagccagctttatatttcaaccatggctggcccatctgagagcatctccccactctcgccaacctatcggggcatagcccagggatgcccccaggcggcccaggttagatgcgtccctttggcttgtcagtgatgacatacaccttagctgcttagctggtgctggcctgaggcagggcaggaaatcagaatagcatttgcttctctgggcaaatgggaagttcagcggggcagcagaatcagtggcattccccctggtgcaggccggtgggtccactccaactccccctgagtgtagcagcacactttccatacaccaggttctttctacaatcctggtggaaaagccacagaaccttcttcctgcccttcttgagagttccccctctttctgggtcaagagctggagtggtggctccatcctctctgggccacttcggtctaggaactcatctttgcaggaaccaggagtcctgagcacactgaacacacctcagagggaggatccttgttgtggattttgcacctggctttggggcaggggtgaagtgaccaggcttagcttgtggagtttatgggccaccagggtttggggaaatcaccatcccgcggatgctgtgacctcccttctacggagatgcaggcagtgccacgagggaggaggggacctgcaaagctagaatctagggcactgtttcctccccatccttctctttgtagagaatagagacgtttgtcttgtctgtcttcaacctacttttccttttctcttttttgtttctcatcctctctgtgccacctctccacccaggaggccatgtagcatagtggaaaaagtccctgagggcggttaggagttctgggtgaccatcctggctcagctcctaactcaccatgtgacatcaggctatccccattccccctcttgggcctcagtttcccgacttgcaaaataagcagaaagaaccagatgctctccagggtctttttctactttgctatctcatgggtcttcattttctcttattttgttttctctggatcttttccatctgagggtacaggaagtaccaggacctgtttcagtttttgaatcctgcaagcacattccaagactggcctgaaactgcatgagcaacatcactcgaaataattttttttttcaaaagcaccttaacaaccaattgcgatgctgtcctgttcctttttactcacacccttctctcctttctcgtccccatgctcccccacctcagtgctccgtgctgtatgcgtgtgctctctgttcttgtatactcaatataagtgaaataaatgtgtttgatgctgaaccata

SEQ ID NO: 443890 - DNA, 3949 bp, Homo sapiens
ccgcccgctgctgcttggggggccgggatcgccgccgcctcctccgggggagccggccggggcggggcggagcggcgagagggggtgtggggggcgggcgaggagggggctgagcgccgtgggagggagagcaggagcgagcgcgcgagagagcggggcatttctgcgcagctctagcgcgcctcggagcccgccggggcagccgccggacaccaggaccgcgagccagacagctcccactgcggaaaccctctcaacctccaccaccacccatgtcaccaaaactgtgaaaggagggttttctgagacaaggatcgagaagcgaatcatcattactggggatgaagatgtcgatcaagaccaggccctggctttggccatcaaggaggccaaactgcagcatcctgatatgctggtaaccaaagctgtcgtatacagagaaacagacccatccccagaggagagggacaagaagccacaggaatcctgacctctgtgaagagatcctggcatttctggtccaacccaagccagagaaccattaagaaggggccttcattctggattctccgacgcaacactgacgtcccagctgcgacgtactgtcactgatgagagactgggaagggaaaagcatatatatatagatatatagagatatagatatatatacaggaaacaccgcatccttgcactgctgctggggctggcagagcagttggctgacagcaacaaccgacatctgaacacctacatttcctttgcagacaaattgaagaactggtgggatttttttcaagaaaaaaaattatataataactataatcccttgctcacccctttcccccgccaaataagaaacgcaagccagaccacgatgattgtagaagtccctcccgccctggttctgcacgttacagttagcagacgagcaattccatttgttcttctccagcatctctaaggcccacttgaatgcaaaggaaaacacttgcacagcaaagcaagagaagtcacagcagcaagacacgcacagtcaaccattttccgagaaaaaaagaaaattccccacttggaaagaaagaggaggaacactggattcttactttctggatcttgacactgggctgcaaaacctaccttcctctctcccgcctcccctcaccctcaactctcaatgtcttgctgtcattttctgtctcggctccctcctcccccttcccccttcccccaccccacacccttcaccctctgtgtcctggtccttctgagggccactgcagatgactctcctttgaaatgagaaaaagaaaagaaagcaagaacagaaaacgaagccacaggaagggaagtagacattgtatgcttatggtttctcattatgaaggtgcagcttgtaggaggtttgtacggatgtgctttgaagttatgtatattacatataacaggaaaaaatattaaaataaacagtgctggtaagtatgaagctgacattctaaaattataattatctgactgtgattgatgtatcctgaggttcctagatctcactgaactggcccagctaaggagacctggactctgggtgtgggttggctcacagtaggggctgacgggttcagtgtagtaatactgtgtgtggtgtttgtaattggttgattggtggggaggggtggggggccctaatggagaggtgtgggtttggcaagaaagaagcaacacagatgtcgtccccaaaatgccagttcaagacaccttctccctgcccccctggtagtaacagtcagggcctggtctgtgctcaggtactgggtcccagtctgggactctgctgctgaagttgccacagtagaggtccctggcttagtccttatctccctacggggcttgccttggttttcagtcttctctctctttctctcttttttttttttttgccacattctgcccttccctgaccccattgtaataaccaactccatatccaaagggaggtggtgctctcagccattgtagaagatggtggctttaacctgactgtctaaaaattcccagctaagccttttcctctactctcttccttgttctgaatcatttcttcttctcaggccaaagtagccatggtaaggaggcttcatggggcagaccctgaaagatcaaaactgcatttgcaaagccctcccctgtcccaggacaaagctgagactgacgggtgatgttgctcataggctccagctctgcataagaccttggcttggagacctccctctcagtcaacagctgaactctgagcttgtgcccagaaattaccccaagaccacaggaacccttcaagaagctcccatcacaagcttggcattgctctctgccacacgtgggcttcctcaggcttgtctgccacaagctacttctctgagctcagaaagtgccccttgatgagggaaaatgtcccactgcactgcgaatttctcagttccattttacctcccagtcctccttctaaaccagttaataaattcattccacaagtatttactgattacctgcttgtgccagggactattctcaggctgaagaaggtgggaggggagggcggaacctgaggagccacctgagccagctttatatttcaaccatggctggcccatctgagagcatctccccactctcgccaacctatcggggcatagcccagggatgcccccaggcggcccaggttagatgcgtccctttggcttgtcagtgatgacatacaccttagctgcttagctggtgctggcctgaggcagggcaggaaatcagaatagcatttgcttctctgggcaaatgggaagttcagcggggcagcagaatcagtggcattccccctggtgcaggccggtgggtccactccaactccccctgagtgtagcagcacactttccatacaccaggttctttctacaatcctggtggaaaagccacagaaccttcttcctgcccttcttgagagttccccctctttctgggtcaagagctggagtggtggctccatcctctctgggccacttcggtctaggaactcatctttgcaggaaccaggagtcctgagcacactgaacacacctcagagggaggatccttgttgtggattttgcacctggctttggggcaggggtgaagtgaccaggcttagcttgtggagtttatgggccaccagggtttggggaaatcaccatcccgcggatgctgtgacctcccttctacggagatgcaggcagtgccacgagggaggaggggacctgcaaagctagaatctagggcactgtttcctccccatccttctctttgtagagaatagagacgtttgtcttgtctgtcttcaacctacttttccttttctcttttttgtttctcatcctctctgtgccacctctccacccaggaggccatgtagcatagtggaaaaagtccctgagggcggttaggagttctgggtgaccatcctggctcagctcctaactcaccatgtgacatcaggctatccccattccccctcttgggcctcagtttcccgacttgcaaaataagcagaaagaaccagatgctctccagggtctttttctactttgctatctcatgggtcttcattttctcttattttgttttctctggatcttttccatctgagggtacaggaagtaccaggacctgtttcagtttttgaatcctgcaagcacattccaagactggcctgaaactgcatgagcaacatcactcgaaataattttttttttcaaaagcaccttaacaaccaattgcgatgctgtcctgttcctttttactcacacccttctctcctttctcgtccccatgctcccccacctcagtgctccgtgctgtatgcgtgtgctctctgttcttgtatactcaatataagtgaaataaatgtgtttgatgctgaaccata

SEQ ID NO: 443891 - DNA, 2571 bp, Homo sapiens
agcggagtcggcatccatcagcgggcgggggtgtcgccgaacaggctgctccgcagagcccgccgcgaccccgcgccgccccgccccgcggcctgcctgccagaggagccgagggggccgcccctcgcccaacctgcccgacatggggaaccccgggcccagagcctagacatggaggagaaggactacagtgaggccgatggcctttcggagaggaccacgcccagcaaggcccagaaatcgccccagaagattgccaagaaatacaagagtgccatctgccgggtcactctgcttgatgcctcggagtatgagtgtgaggtggagaaacatggccggggccaggtgctgtttgacctggtctgtgaacacctcaacctcctagagaaggactacttcggcctgaccttctgtgatgctgacagccagaagaactggctggacccctccaaggagatcaagaagcagatccggagtagcccctggaattttgccttcacagtcaagttctacccgcctgatcctgcccagctgacagaagacatcacaagatactacctgtgcctgcagctgcgggcagacatcatcacgggccggctgccatgctcctttgtcacgcatgccctactgggctcctacgctgtgcaggctgagctgggtgactatgatgctgaggagcatgtgggcaactatgtcagcgagctccgcttcgcccctaaccagacccgggagctggaggagaggatcatggagctgcataagacatatagggggatgaccccgggagaagcagaaatccacttcttagagaatgccaagaagctttccatgtacggagtagacctgcaccatgccaaggactctgagggcatcgacatcatgttaggcgtttgtgccaatggcctgctcatctaccgggaccggctgagaatcaaccgctttgcctggcccaagatcctcaagatctcctacaagaggagtaacttctatatcaagatccggcctggggagtatgagcaatttgagagcacaattggctttaagctcccaaaccaccggtcagccaagagactgtggaaggtctgcatcgagcatcatacattcttccggctggtgtcccctgagcccccacccaagggcttcctggtgatgggctccaagttccggtacagtgggaggacccaggcacagactcgccaggccagcgccctcattgaccggcctgcacccttctttgagcgttcttccagcaaacggtacaccatgtcccgcagccttgatggagcagagttctcccgcccagcctcggtcagcgagaaccatgatgcagggcctgacggtgacaagcgggatgaggatggcgagtctggggggcaacggtcagaggctgaggagggagaggtcaggactccaaccaagatcaaggagctaaagttcttagacaagccagaagatgtcttgctgaagcaccaggccagcatcaatgagctcaaaaggaccctgaaggagcccaacagcaaactcatccaccgggatcgagactgggaacgggagcgcaggctgccctcctcccccgcctccccctcccccaagggcacccctgagaaagccaatgagagagcagggctgagggagggctccgaggagaaagtcaaaccaccacgtccccgggccccagagagtgacacaggcgatgaggaccaggaccaggagagggacacggtgttcctgaaggacaaccacctggccattgagcgcaagtgctccagcatcacggtcagctctacgtctagcctggaggctgaggtggacttcacggtcattggtgactaccatggcagcgccttcgaagacttctcccgcagcctgcctgagctcgaccgggacaaaagcgactcggacactgagggcctgctgttctcccgggatctcaacaagggggcccccagccaggatgatgagtctgggggcattgaggacagcccggatcgaggggcctgctccaccccggatatgccccagtttgagcccgtgaaaacagaaaccatgactgtcagcagtctggccattagaaagaagattgagccggaggccgtactgcagaccagagtctccgctatggataacacccaggagaacagtctcaagtccgggaagggggcagctgccatgatcccaggcccacagacggtggccacggaaatccgttctctttctccgatcatcgggaaagatgtcctcaccagcacctacggcgccactgcggaaaccctctcaacctccaccaccacccatgtcaccaaaactgtgaaaggagggttttctgagacaaggatcgagaagcgaatcatcattactggggatgaagatgtcgatcaagaccaggccctggctttggccatcaaggaggccaaactgcagcatcctgatatgctggtaaccaaagctgtcgtatacagagaaacagacccatccccagaggagagggacaagaagccacaggaatcctgacctctgtgaagagatcctgacatcttaatctgggcccagcctgctggtccggctcacttt

SEQ ID NO: 443892 - DNA, 1103 bp, Homo sapiens
agcggagtcggcatccatcagcgggcgggggtgtcgccgaacaggctgctccgcagagcccgccgcgaccccgcgccgccccgccccgcggcctgcctgccagaggagccgagggggccgcccctcgcccaacctgcccgacatggggaaccccgggcccagagcctagacatggaggagaaggactacagtgaggccgatggcctttcggagaggaccacgcccagcaaggcccagaaatcgccccagaagattgccaagaaatacaagagtgccatctgccgggtcactctgcttgatgcctcggagtatgagtgtgaggtggagaaacatggccggggccaggtgctgtttgacctggtctgtgaacacctcaacctcctagagaaggactacttcggcctgaccttctgtgatgctgacagccagaagaactggctggacccctccaaggagatcaagaagcagatccggagtagcccctggaattttgccttcacagtcaagttctacccgcctgatcctgcccagctgacagaagacatcacaagatactacctgtgcctgcagctgcgggcagacatcatcacgggccggctgccatgctcctttgtcacgcatgccctactgggctcctacgctgtgcaggctgagctgggtgactatgatgctgaggagcatgtgggcaactatgtcagcgagctccgcttcgcccctaaccagacccgggagctggaggagaggatcatggagctgcataagacatatagggggatgaccccgggagaagcagaaatccacttcttagagaatgccaagaagctttccatgtacggagtagacctgcaccatgccaaggactctgagggcatcgacatcatgttaggcgtttgtgccaatggcctgctcatctaccgggaccggctgagaatcaaccgctttgcctggcccaagatcctcaagatctcctacaagaggagtaacttctatatcaagatccggcctggggagggccaggccatcctgcgcagccagaagcctgtgatggtgaagaggaagcggacccgccccaccaagagctcctgagccccctgcccccagag

SEQ ID NO: 443893 - DNA, 395 bp, Homo sapiens
tcccgagtagctgggactacaggcgcccaccaccacgccggctaattttttgtatttttagtagagacgaggtttcaccgtgttagccaggatggtctccatctcctgccctcgtgatccacccgcctcggcctagacctgctgatccagggtgtgtgtgagttgagggtgggtggaggggtttgcagtgtgggaatgtggccctgcagttgacctgagctgcttcacatggttgtccattctggggcttaaagaactgggaccagaccaagtagaggccttggtgctggttggggtggggcctgcagagtcttagttactgatttcattttcaataaatgtaggtttgttacatgagtttcccaataaaaaaaaaaatgacttcttgtccagtg

SEQ ID NO: 443894 - DNA, 712 bp, Homo sapiens
cggacgcgtgggtcgacccacgcgtccgaggcaagccagtcttctgtcttcctttgctaacttagggttttgagcaggttggggtatggtgcctgtcatacccacctgccaccctgggaacctcactgttctctctttcagcctagacctgctgatccagggtgtgtgtgagttgagggtgggtggaggggtttgcagtgtgggaatgtggccctgcagttgacctgagctgcttcacatggttgtccattctggggcttaaagaactgggaccagaccaagtagaggccttggtgctggttggggtggggcctgcagagtcttagttactgatttcattttcaataaatgtaggtttgttacatgagtttcccaataaaaaaaaaaatgacttcttgtccagtgtccagtgcaagtgactcagtcatcagtgggcacacactgcagggtgcctcagggaatgccagttcttccaaagagcaaagcacttcacattccaaagtgaattcccaccagtcagcttcattctttccttcttctccaggccttcctgtggcagggaatagtgggtttgtccaagattatacaacaagtaaattgggctggggctcaaatttacaccctttcctctgtgccagctccctggtgaagttccctctttctagagtcagtaagcaggattgtcatggatgctgccaggaagtgcctggta

SEQ ID NO: 443895 - DNA, 546 bp, Homo sapiens
gcggccgcctactactactaaattcgcggccgctcgagaatgtggccctgcagttgacctgagctgcttcacatggttgtccattctggggcttaaagaactgggaccagaccaagtagaggccttggtgctggttggggtggggcctgcagagtcttagttactgatttcattttcaataaatgtaggtttgttacatgagtttcccaataaaaaaaaaaatgacttcttgtccagtgtccagtgcaagtgactcagtcatcagtgggcacacactgcagggtgcctcagggaatgccagttcttccaaagagcaaagcacttcacattccaaagtgaattcccaccagtcagcttcattctttccttcttctccaggccttcctgtggcagggaatagtgggtttgtccaagattatacaacaagtaaattgggctggggctcaaatttacaccctttcctctgtgccagctccctggtgaagttccctctttctagagtcagtaagcaggattgtcatggatgctgccaggaagtgcctggta

SEQ ID NO: 443896 - DNA, 1475 bp, Homo sapiens
aaagtcgtaacaaggttggggtaggtgaacctgcggaaggatcattaaggtggagcaagatggctgtggagctgggcgtgctgctcgtccggccccggcccggaaccgggctgggtagagtgatgcggaccctcctgctggtgctgtggctggcgacgcgcggaagcgcgctctactttcacatcggagagacggagaagaagtgctttattgaggagatcccggacgagaccatggtcataggaaactaccggacgcagctgtatgacaagcagcgggaggagtaccagccggccaccccggggcttggcatgtttgtggaggtgaaggacccagaggacaaggtcatcctggcccggcagtatggctccgagggcaggttcactttcacttcccatacccctggtgagcaccagatctgtcttcactccaattccaccaagttctccctctttgctggaggcatgctgagagttcacctggacatccaggtaggtgaacatgccaatgactatgcagaaattgctgctaaagacaagttgagtgagttgcagctacgagtgcgacagctggtggaacaagtggagcagatccagaaagagcagaactaccagcggtggcgagaggagcgcttccggcagaccagtgagagcaccaaccagcgggtgctgtggtggtccattctgcagaccctcatcctcgtggccatcggtgtctggcagatgcggcacctcaagagcttctttgaagccaagaagcttgtgtagctgtcccaggcgtcacaacccatcctcccaggctgggggagaaaggacctcctggaactgacttcttctgtcaggaggactggtttccagccatacctgttctggaagggagaggggctggaggcacccacaggcacaagctgaaggcagcagcttggctaatactgagcaggtagtggggcaaattcctgccctctctctctggcctctgggccgtttggtagtaatcacccaggggctggtaaagcccctcctcttggcacctcagaatcacagtgttactgatcagggatgtgaggctgctgttgggggtggggggaggggaatgggcaggcaagccagtcttctgtcttcctttgctaacttagggttttgagcaggttggggtatggtgcctgtcatacccacctgccaccctgggaacctcactgttctctctttcagcctagacctgctgatccagggtgtgtgtgagttgagggtgggtggaggggtttgcagtgtgggaatgtggccctgcagttgacctgagctgcttcacatggttgtccattctggggcttaaagaactgggaccagaccaagtagaggccttggtgctggttggggtggggcctgcagagtcttagttactgatttcattttcaataaatgtaggtttgttacatgagtttcccaataaaaaaaaaaatgacttcttgtccagtg

SEQ ID NO: 443897 - DNA, 1466 bp, Homo sapiens
  misc_feature (1452)..(1452): n is a, c, g, or t
acgtggcgcggccggctgcggctgcgcaggcaggtggagcaagatggctgtggagctgggcgtgctgctcgtccggccccggcccggaaccgggctgggtagagtgatgcggaccctcctgctggtgctgtggctggcgacgcgcggaagcgcgctctactttcacatcggagagacggagaagaagtgctttattgaggagatcccggacgagaccatggtcataggaaactaccggacgcagctgtatgacaagcagcgggaggagtaccagccggccaccccggggcttggcatgtttgtggaggtgaaggacccagaggacaaggtcatcctggcccggcagtatggctccgagggcaggttcactttcacttcccatacccctggtgagcaccagatctgtcttcactccaattccaccaagttctccctctttgctggaggcatgctgagagttcacctggacatccaggtaggtgaacatgccaatgactatgcagaaattgctgctaaagacaagttgagtgagttgcagctacgagtgcgacagctggtggaacaagtggagcagatccagaaagagcagaactaccagcggtggcgagaggagcgcttccggcagaccagtgagagcaccaaccagcgggtgctgtggtggtccattctgcagaccctcatcctcgtggccatcggtgtctggcagatgcggcacctcaagagcttctttgaagccaagaagcttgtgtagctgtcccaggcgtcacaacccatcctcccaggctgggggagaaaggacctcctggaactgacttcttctgtcaggaggactggtttccagccatacctgttctggaagggagaggggctggaggcacccacaggcacaagctgaaggcagcagcttggctaatactgagcaggtagtggggcaaattcctgccctctctctctggcctctgggccgtttggtagtaatcacccaggggctggtaaagcccctcctcttggcacctcagaatcacagtgttactgatcagggatgtgaggctgctgttgggggtggggggaggggaatgggcaggcaagccagtcttctgtcttcctttgctaacttagggttttgagcaggttggggtatggtgcctgtcatacccacctgccaccctgggaacctcactgttctctctttcagcctagacctgctgatccagggtgtgtgtgagttgagggtgggtggaggggtttgcagtgtgggaatgtggccctgcagttgacctgagctgcttcacatggttgtccattctggggcttaaagaactgggaccagaccaagtagaggccttggtgctggttggggtggggcctgcagagtcttagttactgatttcattttcaataacaaaaaaggaaaggttggccccccggggtttctccccttttaaaaaaaanggatgattttctta

SEQ ID NO: 443898 - DNA, 1319 bp, Homo sapiens
aggagacggcctcgccgtgcccaggcggtcgcggaacccatgccacctcgcgctcctctgacctgggctcgccctgcttccctcaaggaaactaccggacgcagctgtatgacaagcagcgggaggagtaccagccggccaccccggggcttggcatgtttgtggaggtgaaggacccagaggacaaggtcatcctggcccggcagtatggctccgagggcaggttcactttcacttcccatacccctggtgagcaccagatctgtcttcactccaattccaccaagttctccctctttgctggaggcatgctgagagttcacctggacatccaggtaggtgaacatgccaatgactatgcagaaattgctgctaaagacaagttgagtgagttgcagctacgagtgcgacagctggtggaacaagtggagcagatccagaaagagcagaactaccagcggtggcgagaggagcgcttccggcagaccagtgagagcaccaaccagcgggtgctgtggtggtccattctgcagaccctcatcctcgtggccatcggtgtctggcagatgcggcacctcaagagcttctttgaagccaagaagcttgtgtagctgtcccaggcgtcacaacccatcctcccaggctgggggagaaaggacctcctggaactgacttcttctgtcaggaggactggtttccagccatacctgttctggaagggagaggggctggaggcacccacaggcacaagctgaaggcagcagcttggctaatactgagcaggtagtggggcaaattcctgccctctctctctggcctctgggccgtttggtagtaatcacccaggggctggtaaagcccctcctcttggcacctcagaatcacagtgttactgatcagggatgtgaggctgctgttgggggtggggggaggggaatgggcaggcaagccagtcttctgtcttcctttgctaacttagggttttgagcaggttggggtatggtgcctgtcatacccacctgccaccctgggaacctcactgttctctctttcagcctagacctgctgatccagggtgtgtgtgagttgagggtgggtggaggggtttgcagtgtgggaatgtggccctgcagttgacctgagctgcttcacatggttgtccattctggggcttaaagaactgggaccagaccaagtagaggccttggtgctggttggggtggggcctgcagagtcttagttactgatttcattttcaataaatgtaggtttgttacatgagtttcccaataaaaaaaaaaatgacttcttgtccagtg

SEQ ID NO: 443899 - DNA, 1260 bp, Homo sapiens
gtcccccgttcgatggccatggtcataggaaactaccggacgcagctgtatgacaagcagcgggaggagtaccagccggccaccccggggcttggcatgtttgtggaggtgaaggacccagaggacaaggtcatcctggcccggcagtatggctccgagggcaggttcactttcacttcccatacccctggtgagcaccagatctgtcttcactccaattccaccaagttctccctctttgctggaggcatgctgagagttcacctggacatccaggtaggtgaacatgccaatgactatgcagaaattgctgctaaagacaagttgagtgagttgcagctacgagtgcgacagctggtggaacaagtggagcagatccagaaagagcagaactaccagcggtggcgagaggagcgcttccggcagaccagtgagagcaccaaccagcgggtgctgtggtggtccattctgcagaccctcatcctcgtggccatcggtgtctggcagatgcggcacctcaagagcttctttgaagccaagaagcttgtgtagctgtcccaggcgtcacaacccatcctcccaggctgggggagaaaggacctcctggaactgacttcttctgtcaggaggactggtttccagccatacctgttctggaagggagaggggctggaggcacccacaggcacaagctgaaggcagcagcttggctaatactgagcaggtagtggggcaaattcctgccctctctctctggcctctgggccgtttggtagtaatcacccaggggctggtaaagcccctcctcttggcacctcagaatcacagtgttactgatcagggatgtgaggctgctgttgggggtggggggaggggaatgggcaggcaagccagtcttctgtcttcctttgctaacttagggttttgagcaggttggggtatggtgcctgtcatacccacctgccaccctgggaacctcactgttctctctttcagcctagacctgctgatccagggtgtgtgtgagttgagggtgggtggaggggtttgcagtgtgggaatgtggccctgcagttgacctgagctgcttcacatggttgtccattctggggcttaaagaactgggaccagaccaagtagaggccttggtgctggttggggtggggcctgcagagtcttagttactgatttcattttcaataaatgtaggtttgttacatgagtttcccaataaaaaaaaaaatgacttcttgtccagtg

SEQ ID NO: 443900 - DNA, 1184 bp, Homo sapiens
acgtggcgcggccggctgcggctgcgcaggcaggtggagcaagatggctgtggagctgggcgtgctgctcgtccggccccggcccggaaccgggctgggtagagtgatgcggaccctcctgctggtgctgtggctggcgacgcgcggaagcgcgctctactttcacatcggagagacggagaagaagtgctttattgaggagatcccggacgagaccatggtcataggaaactaccggacgcagctgtatgacaagcagcgggaggagtaccagccggccaccccggggcttggcatgtttgtggaggtgaaggacccagaggacaaggtcatcctggcccggcagtatggctccgagggcaggttcactttcacttcccatacccctggtgagcaccagatctgtcttcactccaattccaccaagttctccctctttgctggaggcatgctgagagttcacctggacatccaggtaggtgaacatgccaatgactatgcagaaattgctgctaaagacaagttgagtgagttgcagctacgagtgcgacagctggtggaacaagtggagcagatccagaaagagcagaactaccagcggtggcgagaggagcgcttccggcagaccagtgagagcaccaaccagcgggtgctgtggtggtccattctgcagaccctcatcctctgggccgtttggtagtaatcacccaggggctggtaaagcccctcctcttggcacctcagaatcacagtgttactgatcagggatgtgaggctgctgttgggggtggggggaggggaatgggcaggcaagccagtcttctgtcttcctttgctaacttagggttttgagcaggttggggtatggtgcctgtcatacccacctgccaccctgggaacctcactgttctctctttcagcctagacctgctgatccagggtgtgtgtgagttgagggtgggtggaggggtttgcagtgtgggaatgtggccctgcagttgacctgagctgcttcacatggttgtccattctggggcttaaagaactgggaccagaccaagtagaggccttggtgctggttggggtggggcctgcagagtcttagttactgatttcattttcaataaatgtaggtttgttacatgagtttcccaataaaaaaaaaaatgacttcttgtccagtg

SEQ ID NO: 443901 - DNA, 925 bp, Homo sapiens
  misc_feature (833)..(833): n is a, c, g, or t
  misc_feature (835)..(835): n is a, c, g, or t
acgtggcgcggccggctgcggctgcgcaggcaggtggagcaagatggctgtggagctgggcgtgctgctcgtccggccccggcccggaaccgggctgggtagagtgatgcggaccctcctgctggtgctgtggctggcgacgcgcggaagcgcgctctactttcacatcggagagacggagaagaagtgctttattgaggagatcccggacgagaccatggtcataggaaactaccggacgcagctgtatgacaagcagcgggaggagtaccagccggccaccccggggcttggcatgtttgtggaggtgaaggacccagaggacaaggtcatcctggcccggcagtatggctccgagggcaggttcactttcacttcccatacccctggtgagcaccagatctgtcttcactccaattccaccaagttctccctctttgctggaggcatgctgagagttcacctggacatccaggtaggtgaacatgccaatgactatgcagaaattgctgctaaagacaagttgagtgagttgcagctacgagtgcgacagctggtggaacaagtggagcagatccagaaagagcagaactaccagcggtggcgagaggagcgcttccggcagaccagtgagagcaccaaccagcgggtgctgtggtggtccattctgcagaccctcatcctcgtggccatcggtgtctggcagatgcggcacctcaagagcttctttgaagccaagaagcttgtgtagctgtcccaggcgtcacaacccatcctcccaggctgggggaggggaatgggcaggcaagccagtcttctgtcttctttgcccnangtccccacaaagccatgtaggagctgagttcttaaagactgaagacaggctattctctggagacaaacttaacatggaaaattgtacttt

SEQ ID NO: 443902 - DNA, 1354 bp, Homo sapiens
aatttattttttatttttttctattgctgctgcacaaattacctgtgttttaaatgttgacaaaagactgtgcactgtgtgaggccaacaaaacatacctaaaggccagatccagcccccagcctgccagtttacagcctgtgcccaccatcttcaaggagcagtgtgggagacctaggcagagggcttagagcaagtccactcctgtgtgctccaggacagctctgcctcgtggggtgataccacaactaccttacctctctcccaggcaccagggcaggactaggtgagggctatgcctgacagatgaagaaacagacttgggagaatgagtaggttgcctgagggtaaagatagtccccaggtagagtgacactttgcaggcacttggctggaacctgggcaaagctggctgaccttgggcatcctcttggtctgggaatcagcagttctagcagccccagccaactcaggctcaccttatattcccctgcagtggcgagaggagcgcttccggcagaccagtgagagcaccaaccagcgggtgctgtggtggtccattctgcagaccctcatcctcgtggccatcggtgtctggcagatgcggcacctcaagagcttctttgaagccaagaagcttgtgtagctgtcccaggcgtcacaacccatcctcccaggctgggggagaaaggacctcctggaactgacttcttctgtcaggaggactggtttccagccatacctgttctggaagggagaggggctggaggcacccacaggcacaagctgaaggcagcagcttggctaatactgagcaggtagtggggcaaattcctgccctctctctctggcctctgggccgtttggtagtaatcacccaggggctggtaaagcccctcctcttggcacctcagaatcacagtgttactgatcagggatgtgaggctgctgttgggggtggggggaggggaatgggcaggcaagccagtcttctgtcttcctttgctaacttagggttttgagcaggttggggtatggtgcctgtcatacccacctgccaccctgggaacctcactgttctctctttcagcctagacctgctgatccagggtgtgtgtgagttgagggtgggtggaggggtttgcagtgtgggaatgtggccctgcagttgacctgagctgcttcacatggttgtccattctggggcttaaagaactgggaccagaccaagtagaggccttggtgctggttggggtggggcctgcagagtcttagttactgatttcattttcaataaatgtaggtttgttacatgagtttcccaataaaaaaaaaaatgacttcttgtccagtg

SEQ ID NO: 443903 - DNA, 726 bp, Homo sapiens
acgtggcgcggccggctgcggctgcgcaggcaggtggagcaagatggctgtggagctgggcgtgctgctcgtccggccccggcccggaaccgggctgggtagagtgatgcggaccctcctgctggtgctgtggctggcgacgcgcggaagcgcgctctactttcacatcggagagacggagaagaagtgctttattgaggagatcccggacgagaccatggtcataggaaactaccggacgcagctgtatgacaagcagcgggaggagtaccagccggccaccccggggcttggcatgtttgtggaggtgaaggacccagaggacaaggtcatcctggcccggcagtatggctccgagggcaggttcactttcacttcccatacccctggtgagcaccagatctgtcttcactccaattccaccaagttctccctctttgctggaggcatgctgagagttcacctggacatccaggtaggtgaacatgccaatgactatgcagaaattgctgctaaagacaagttgagtgagttgcagctacgagtgcgacagctggtggaacaagtggagcagatccagaaagagcagaactaccagcggtggcgagaggagcgcttccggcagaccagtgagagcaccagagcaccagcacgaattcccttagcaccagcacgaattcccgtagcaccagcacgaattcccgtagcaccagcacgaattccctt

SEQ ID NO: 443904 - DNA, 403 bp, Homo sapiens
gcggccgcctactactactaaattcgcggccgctcgatcttctgtcttcctttgctaacttagggttttgagcaggttggggtatggtgcctgtcatacccacctgccaccctgggaacctcactgttctctctttcagcctagacctgctgatccagggtgtgtgtgagttgagggtgggtggaggggtttgcagtgtgggaatgtggccctgcagttgacctgagctgcttcacatggttgtccattctggggcttaaagaactgggaccagaccaagtagaggccttggtgctggttggggtggggcctgcagagtcttagttactgatttcattttcaataaatgtaggtttgttacatgagtttcccaataaaaaaaaaaatgacttcttgtccagtg

SEQ ID NO: 443905 - DNA, 664 bp, Homo sapiens
acgtggcgcggccggctgcggctgcgcaggcaggtggagcaagatggctgtggagctgggcgtgctgctcgtccggccccggcccggaaccgggctgggtagagtgatgcggaccctcctgctggtgctgtggctggcgacgcgcggaagcgcgctctactttcacatcggagagacggagaagaagtgctttattgaggagatcccggacgagaccatggtcataggaaactaccggacgcagctgtatgacaagcagcgggaggagtaccagccggccaccccggggcttggcatgtttgtggaggtgaaggacccagaggacaaggtcatcctggcccggcagtatggctccgagggcaggttcactttcacttcccatacccctggtgagcaccagatctgtcttcactccaattccaccaagttctccctctttgctggaggcatgctgagagttcacctggacatccaggtaggtgaacatgccaatgactatgcagaaattgctgctaaagacaagttgagtgagttgcagctacgagtgcgacagctggtggaacaagtggagcagatccagaaagagcagaactaccagcggacgagcaggagagcgcgcggcagaccagcgagagcacgacaagcgggcgcgtgctgtccaatc

SEQ ID NO: 443906 - DNA, 547 bp, Homo sapiens
aaagtcgtaacaaggttggggtaggtgaacctgcggaaggatcattaaggtggagcaagatggctgtggagctgggcgtgctgctcgtccggccccggcccggaaccgggctgggtagagtgatgcggaccctcctgctggtgctgtggctggcgacgcgcggaagcgcgctctactttcacatcggagagacggagaagaagtgctttattgaggagatcccggacgagaccatggtcataggaaactaccggacgcagctgtatgacaagcagcgggaggagtaccagccggccaccccggggcttggcatgtttgtggaggtgaaggacccagaggacaaggtcatcctggcccggcagtatggctccgagggcaggttcactttcacttcccatacccctggtgagcaccagatctgtcttcactccaattccaccaagttctccctctttgctggaggcatgctggtaagtgggcccatgtgagacttgcaggtttcagccttcatcctttggtgaggactgggggactggtggtgctgtgg

SEQ ID NO: 443907 - DNA, 1459 bp, Homo sapiens
acgtggcgcggccggctgcggctgcgcaggcaggtggagcaagatggctgtggagctgggcgtgctgctcgtccggccccggcccggaaccgggctgggtagagtgatgcggaccctcctgctggtgctgtggctggcgacgcgcggaagcgcgctctactttcacatcggagagacggagaagaagtgctttattgaggagatcccggacgagaccatggtcataggaaactaccggacgcagctgtatgacaagcagcgggaggagtaccagccggccaccccggggcttggcatgtttgtggaggtgaaggacccagaggacaaggtcatcctggcccggcagtatggctccgagggcaggttcactttcacttcccatacccctggtgagcaccagatctgtcttcactccaattccaccaagttctccctctttgctggaggcatgctgagagttcacctggacatccaggtaggtgaacatgccaatgactatgcagaaattgctgctaaagacaagttgagtgagttgcagctacgagtgcgacagctggtggaacaagtggagcagatccagaaagagcagaactaccagcggtggcgagaggagcgcttccggcagaccagtgagagcaccaaccagcgggtgctgtggtggtccattctgcagaccctcatcctcgtggccatcggtgtctggcagatgcggcacctcaagagcttctttgaagccaagaagcttgtgtagctgtcccaggcgtcacaacccatcctcccaggctgggggagaaaggacctcctggaactgacttcttctgtcaggaggactggtttccagccatacctgttctggaagggagaggggctggaggcacccacaggcacaagctgaaggcagcagcttggctaatactgagcaggtagtggggcaaattcctgccctctctctctggcctctgggccgtttggtagtaatcacccaggggctggtaaagcccctcctcttggcacctcagaatcacagtgttactgatcagggatgtgaggctgctgttgggggtggggggaggggaatgggcaggcaagccagtcttctgtcttcctttgctaacttagggttttgagcaggttggggtatggtgcctgtcatacccacctgccaccctgggaacctcactgttctctctttcagcctagacctgctgatccagggtgtgtgtgagttgagggtgggtggaggggtttgcagtgtgggaatgtggccctgcagttgacctgagctgcttcacatggttgtccattctggggcttaaagaactgggaccagaccaagtagaggccttggtgctggttggggtggggcctgcagagtcttagttactgatttcattttcaataaatgtaggtttgttacatgagtttcccaataaaaaaaaaaatgacttcttgtccagtg

SEQ ID NO: 443908 - DNA, 1620 bp, Homo sapiens
  misc_feature (1489)..(1489): n is a, c, g, or t
  misc_feature (1491)..(1491): n is a, c, g, or t
  misc_feature (1495)..(1495): n is a, c, g, or t
  misc_feature (1500)..(1501): n is a, c, g, or t
  misc_feature (1506)..(1506): n is a, c, g, or t
acgtggcgcggccggctgcggctgcgcaggcaggtggagcaagatggctgtggagctgggcgtgctgctcgtccggccccggcccggaaccgggctgggtagagtgatgcggaccctcctgctggtgctgtggctggcgacgcgcggaagcgcgctctactttcacatcggagagacggagaagaagtgctttattgaggagatcccggacgagaccatggtcataggaaactaccggacgcagctgtatgacaagcagcgggaggagtaccagccggccaccccggggcttggcatgtttgtggaggtgaaggacccagaggacaaggtcatcctggcccggcagtatggctccgagggcaggttcactttcacttcccatacccctggtgagcaccagatctgtcttcactccaattccaccaagttctccctctttgctggaggcatgctgagagttcacctggacatccaggtaggtgaacatgccaatgactatgcagaaattgctgctaaagacaagttgagtgagttgcagctacgagtgcgacagctggtggaacaagtggagcagatccagaaagagcagaactaccagcggtggcgagaggagcgcttccggcagaccagtgagagcaccaaccagcgggtgctgtggtggtccattctgcagaccctcatcctcgtggccatcggtgtctggcagatgcggcacctcaagagcttctttgaagccaagaagcttgtgtagctgtcccaggcgtcacaacccatcctcccaggctgggggagaaaggacctcctggaactgacttcttctgtcaggaggactggtttccagccatacctgttctggaagggagaggggctggaggcacccacaggcacaagctgaaggcagcagcttggctaatactgagcaggtagtggggcaaattcctgccctctctctctggcctctgggccgtttggtagtaatcacccaggggctggtaaagcccctcctcttggcacctcagaatcacagtgttactgatcagggatgtgaggctgctgttgggggtggggggaggggaatgggcaggcaagccagtcttctgtcttcctttgctaacttagggttttgagcaggttggggtatggtgcctgtcatacccacctgccaccctgggaacctcactgttctctctttcagcctagacctgctgatccagggtgtgtgtgagttgagggtgggtggaggggtttgcagtgtgggaatgtggccctgcagttgacctgagctgcttcacatggttgtccattctggggcttaaagaactgggaccagaccaagtagaggccttggtgctggttggggtggggcctgcagagtcttagttactgatttcattttcaataaatgtaggtttgttacatgagtttcccaataaaaaaaaaaatgacttcttgtccagtgaaaaaaaaaaaaaaaacaaaaaattttggngngccnggccnngaaanttttaaacaacttggggcggggccaagtttggagggcagcgggcaggaaaccgggagaggggggtcaccaaaagcggggacgaggggaaacagggtgggcaggtcaaggcggtt

SEQ ID NO: 443909 - DNA, 1071 bp, Homo sapiens
acgtggcgcggccggctgcggctgcgcaggcaggtggagcaagatggctgtggagctgggcgtgctgctcgtccggccccggcccggaaccgggctgggtagagtgatgcggaccctcctgctggtgctgtggctggcgacgcgcggaagcgcgctctactttcacatcggagagacggagaagaagtgctttattgaggagatcccggacgagaccatggtcataggaaactaccggacgcagctgtatgacaagcagcgggaggagtaccagccggccaccccggggcttggcatgtttgtggaggtgaaggacccagaggacaaggtcatcctggcccggcagtatggctccgagggcaggttcactttcacttcccatacccctggtgagcaccagatctgtcttcactccaattccaccaagttctccctctttgctggaggcatgctgagagttcacctggacatccaggtaggtgaacatgccaatgactatgcagaaattgctgctaaagacaagttgagtgagttgcagctacgagtgcgacagctggtggaacaagtggagcagatccagaaagagcagaactaccagcggtggcgagaggagcgcttccggcagaccagtgagagcaccaaccagcgggtgctgtggtggtccattctgcagaccctcatcctcgtggccatcggtgtctggcagatgcggcacctcaagagcttctttgaagccaagaagcttgtgtagctgtcccaggcgtcacaacccatcctcccaggctgggggagaaaggacctcctggaactgacttcttctgtcaggaggactggtttccagccatacctgttctggaagggagaggggctggaggcacccacaggcacaagctgaaggcagcagcttggctaatactgagcaggtagtggggcaaattcctgccctctctctctggcctctgggccgtttggtagtaatcacccaggggctggtaaagcccctcctcttggcacctcagaatcacagtgttactggttaggatgctgtcggtaccgagctcgagtcgtata

SEQ ID NO: 443910 - DNA, 1181 bp, Homo sapiens
acgtggcgcggccggctgcggctgcgcaggcaggtggagcaagatggctgtggagctgggcgtgctgctcgtccggccccggcccggaaccgggctgggtagagtgatgcggaccctcctgctggtgctgtggctggcgacgcgcggaagcgcgctctactttcacatcggagagacggagaagaagtgctttattgaggagatcccggacgagaccatggtcataggaaactaccggacgcagctgtatgacaagcagcgggaggagtaccagccggccaccccggggcttggcatgtttgtggaggtgaaggacccagaggacaaggtcatcctggcccggcagtatggctccgagggcaggttcactttcacttcccatacccctggtgagcaccagatctgtcttcactccaattccaccaagttctccctctttgctggaggcatgctgagagttcacctggacatccaggtaggtgaacatgccaatgactatgcagaaattgctgctaaagacaagttgagtgagttgcagctacgagtgcgacagctggtggaacaagtggagcagatccagaaagagcagaactaccagcggtggcgagaggagcgcttccggcagaccagtgagagcaccaaccagcgggtgctgtggtggtccattctgcagaccctcatcctcgtggccatcggtgtctggcagatgcggcacctcaagagcttctttgaagccaagaagcttgtgtagctgtcccaggcgtcacaacccatcctcccaggctgggggagaaaggacctcctggaactgactttcttctgtcttcctttgctaacttagggttttgagcaggttggggtatggtgcctgtcatacccacctgccaccctgggaacctcactgttctctctttcagcctagacctgctgatccagggtgtgtgtgagttgagggtgggtggaggggtttgcagtgtgggaatgtggccctgcagttgacctgagctgcttcacatggttgtccattctggggcttaaagaactgggaccagaccaagtagaggccttggtgctggttggggtggggcctgcagagtcttagttactgatttcattttcaataaatgtaggtttgttacatgagtttcccaataaaaaaaaaaatgacttcttgtccagtg

SEQ ID NO: 443911 - DNA, 1105 bp, Homo sapiens
gacacaccacctcatctgcccacctcatctgcgacaccaccaccagatctgtcttcactccaattccaccaagttctccctctttgctggaggcatgctgagagttcacctggacatccaggtaggtgaacatgccaatgactatgcagaaattgctgctaaagacaagttgagtgagttgcagctacgagtgcgacagctggtggaacaagtggagcagatccagaaagagcagaactaccagcggtggcgagaggagcgcttccggcagaccagtgagagcaccaaccagcgggtgctgtggtggtccattctgcagaccctcatcctcgtggccatcggtgtctggcagatgcggcacctcaagagcttctttgaagccaagaagcttgtgtagctgtcccaggcgtcacaacccatcctcccaggctgggggagaaaggacctcctggaactgacttcttctgtcaggaggactggtttccagccatacctgttctggaagggagaggggctggaggcacccacaggcacaagctgaaggcagcagcttggctaatactgagcaggtagtggggcaaattcctgccctctctctctggcctctgggccgtttggtagtaatcacccaggggctggtaaagcccctcctcttggcacctcagaatcacagtgttactgatcagggatgtgaggctgctgttgggggtggggggaggggaatgggcaggcaagccagtcttctgtcttcctttgctaacttagggttttgagcaggttggggtatggtgcctgtcatacccacctgccaccctgggaacctcactgttctctctttcagcctagacctgctgatccagggtgtgtgtgagttgagggtgggtggaggggtttgcagtgtgggaatgtggccctgcagttgacctgagctgcttcacatggttgtccattctggggcttaaagaactgggaccagaccaagtagaggccttggtgctggttggggtggggcctgcagagtcttagttactgatttcattttcaataaatgtaggtttgttacatgagtttcccaataaaaaaaaaaatgacttcttgtccagtg

SEQ ID NO: 443912 - DNA, 1123 bp, Homo sapiens
ggcccagtctgttggctaaatgaacagatgaaggaaagtcggggatgagctgtcagtctctggcaggaagatggagcagggctaccagatttcccttatctcctttgtctgtcctcagagagttcacctggacatccaggtaggtgaacatgccaatgactatgcagaaattgctgctaaagacaagttgagtgagttgcagctacgagtgcgacagctggtggaacaagtggagcagatccagaaagagcagaactaccagcggtggcgagaggagcgcttccggcagaccagtgagagcaccaaccagcgggtgctgtggtggtccattctgcagaccctcatcctcgtggccatcggtgtctggcagatgcggcacctcaagagcttctttgaagccaagaagcttgtgtagctgtcccaggcgtcacaacccatcctcccaggctgggggagaaaggacctcctggaactgacttcttctgtcaggaggactggtttccagccatacctgttctggaagggagaggggctggaggcacccacaggcacaagctgaaggcagcagcttggctaatactgagcaggtagtggggcaaattcctgccctctctctctggcctctgggccgtttggtagtaatcacccaggggctggtaaagcccctcctcttggcacctcagaatcacagtgttactgatcagggatgtgaggctgctgttgggggtggggggaggggaatgggcaggcaagccagtcttctgtcttcctttgctaacttagggttttgagcaggttggggtatggtgcctgtcatacccacctgccaccctgggaacctcactgttctctctttcagcctagacctgctgatccagggtgtgtgtgagttgagggtgggtggaggggtttgcagtgtgggaatgtggccctgcagttgacctgagctgcttcacatggttgtccattctggggcttaaagaactgggaccagaccaagtagaggccttggtgctggttggggtggggcctgcagagtcttagttactgatttcattttcaataaatgtaggtttgttacatgagtttcccaataaaaaaaaaaatgacttcttgtccagtg

SEQ ID NO: 443913 - DNA, 976 bp, Homo sapiens
acgtggcgcggccggctgcggctgcgcaggcaggtggagcaagatggctgtggagctgggcgtgctgctcgtccggccccggcccggaaccgggctgggtagagtgatgcggaccctcctgctggtgctgtggctggcgacgcgcggaagcgcgctctactttcacatcggagagacggagaagaagtgctttattgaggagatcccggacgagaccatggtcataggaaactaccggacgcagctgtatgacaagcagcgggaggagtaccagccggccaccccggggcttggcatgtttgtggaggtgaaggacccagaggacaaggtcatcctggcccggcagtatggctccgagggcaggttcactttcacttcccatacccctggtgagcaccagatctgtcttcactccaattccaccaagttctccctctttgctggaggcatgctgagagttcacctggacatccaggtaggtgaacatgccaatgactatgcagaaattgctgctaaagacaagttgagtgagttgcagctacgagtgcgacagctggtggaacaagtggagcagatccagaaagagcagaactaccagcgggtgagtgactgggccgggagcagtgggcttctccctagaagctgcccactggctcagccaggaatttcacattaaattcattctgagacccccaagggacttacctgcactgcattgtaggtcgtggggcgggtattactaactcgaccttgtaattgaggatacagactcgtaagaggctgtcattgccctaaatcacagttacacacagaatggcacagtagcatttgataccaacaccttgggtgctgtttcagtgggtccacatgctcccaggaccagggtctcaaacttaccggtgaccaggaaccagagattaccataagtgaatctgtgaccttaaggactagtagggcagtgacccatctaaacaag

SEQ ID NO: 443914 - DNA, 2110 bp, Homo sapiens
agcgcgggaggcggggccgcggcagccggctgggtgcgactgggcggcctcggagctcgcagacgctcgggggaacatggcggctgcggagccggcggtccttgcgctccccaacagcggcgccgggggcgcgggggcgccgtcgggcacagtcccggtgctcttctgtttctcagtcttcgcgcgaccctcgtcggtgccacacggggcgggctacgagctgctcatccagaagttcctcagcctgtacggcgaccagatcgacatgcaccgcaaattcgtggtgcagctgttcgccgaggagtggggccagtacgtggacttgcccaagggcttcgcggtgagcgagcgctgcaaggtgcgcctcgtgccgctgcagatccagctcactaccctgggaaatcttacaccttcaagcactgtgtttttctgctgtgatatgcaggaaaggttcagaccagccatcaagtattttggggatattattagcgtgggacagagattgttgcaaggggcccggattttaggaattcctgttattgtaacagaacaataccctaaaggtcttgggagcacggttcaagaaattgatttaacaggtgtaaaactggtacttccaaagaccaagttttcaatggtattaccagaagtagaagcggcattagcagagattcccggagtcaggagtgttgtattatttggagtagaaactcatgtgtgcatccaacaaactgccctggagctagttggccgaggagtcgaggttcacattgttgctgatgccacctcatcaagaagcatgatggacaggatgtttgccctcgagcgtctcgctcgaaccgggatcatagtgaccacgagtgaggctgttctgcttcagctggtagctgataaggaccatccaaaattcaaggaaattcagaatctaattaaggcgagtgctccagagtcgggtctgctttccaaagtataggacatttgaagaactggtatgctactcactggtgaaggacagtcaggtgaaggactgtaagcccacacaagctcttcttatctctactagaattaaaatgttaagtcaaaaacggctccttttttgcgcctcctagtgaaacttaaccagctagaccatttgagtaccagcatttagttacaaacgtcaaaggcttccggtgctgcttaccttccttttttgttaatgtgcttttatttattaaaaaaaattacaatgaagatgcctgttttgtctctactgtgtactctgatcgtatctttccaaagtgcagactcttgtgaagttttcttaaattgttcactttaaagaaaatgacgtaccaacaatgatttggcttttatattactgtaagatgttataatgttaatgtggatgtagtgcttttactttacagattgattggaataagattattgcatatgaatttacccacaggactctgaatcatgttacccactcccctcacaatgttgtccacttagtgagttgcattgatctatccgtaccaaatgatgttgaataattacatatctttcttgactatactgatttcttattttggtcactattactaaatctctgttaatattctctcttttaactgaaaagggatgggatagaagggtttgcaatgccatattattggtggagggctgttttaacatctttgaagtatggcttgctgaatatctttaccaacatcttgaatatatattctagtgtccacaagatttagcaaaaagataaagcttgggtggaatatcattttaaaatgttcatgttctgttctatattttcttcacctactctccaaatattgtaatgcaaaaagtctcagtaatgatttggtagtattaattttgtggtcattgtttctcttcgataaatttattttcattaaatacttattagagggttttgaaatgtttttcaaatatgtgaaatgtgaaactgctgtcttttatattaaagtaattaaagaaaatgtattgtgattgaaattattttggcctccacaagatggctctatgagtattcttccagggattctaatatttatttaaggtaataaaatcttgacatttataatctttc

SEQ ID NO: 443915 - DNA, 1508 bp, Homo sapiens
attcgttatggcggcgcgaggcaccattgaatgtaaagctagagacgatggatacatgagctcgtttctcaccatagagcacgaatccttgtgctcattggatcatatgatgcatagagatttcatcgaccgcgacaataaaacaacagcactctggccggcaaatccagaggacgttgtcggaatcaatatcgcagattggaagttctgtagtgtcgattactggatctatcaactgggagtccatagcggagctcggagtatcaaagattacgctccgctgtgccttgatgccacctcatcaagaagcatgatggacaggatgtttgccctcgagcgtctcgctcgaaccgggatcatagtgaccacgagtgaggctgttctgcttcagctggtagctgataaggaccatccaaaattcaaggaaattcagaatctaattaaggcgagtgctccagagtcgggtctgctttccaaagtataggacatttgaagaactggtatgctactcactggtgaaggacagtcaggtgaaggactgtaagcccacacaagctcttcttatctctactagaattaaaatgttaagtcaaaaacggctccttttttgcgcctcctagtgaaacttaaccagctagaccatttgagtaccagcatttagttacaaacgtcaaaggcttccggtgctgcttaccttccttttttgttaatgtgcttttatttattaaaaaaaattacaatgaagatgcctgttttgtctctactgtgtactctgatcgtatctttccaaagtgcagactcttgtgaagttttcttaaattgttcactttaaagaaaatgacgtaccaacaatgatttggcttttatattactgtaagatgttataatgttaatgtggatgtagtgcttttactttacagattgattggaataagattattgcatatgaatttacccacaggactctgaatcatgttacccactcccctcacaatgttgtccacttagtgagttgcattgatctatccgtaccaaatgatgttgaataattacatatctttcttgactatactgatttcttattttggtcactattactaaatctctgttaatattctctcttttaactgaaaagggatgggatagaagggtttgcaatgccatattattggtggagggctgttttaacatctttgaagtatggcttgctgaatatctttaccaacatcttgaatatatattctagtgtccacaagatttagcaaaaagataaagcttgggtggaatatcattttaaaatgttcatgttctgttctatattttcttcacctactctccaaatattgtaatgcaaaaagtctcagtaatgatttggtagtattaattttgtggtcattgtttctcttcgataaatttattttcattaaatacttattagagggttttgaaatgtttttcaaatatgtgaaatgtgaaactgctgtcttttatattaaagtaattaaaga

SEQ ID NO: 443916 - DNA, 1224 bp, Homo sapiens
  misc_feature (29)..(29): n is a, c, g, or t
  misc_feature (36)..(36): n is a, c, g, or t
aacatttaatgttctcaattttaatattnacaagcnagttcagggaaatctgacgtctcgctcgaaccgggatcatagtgaccacgagtgaggctgttctgcttcagctggtagctgataaggaccatccaaaattcaaggaaattcagaatctaattaaggcgagtgctccagagtcgggtctgctttccaaagtataggacatttgaagaactggtatgctactcactggtgaaggacagtcaggtgaaggactgtaagcccacacaagctcttcttatctctactagaattaaaatgttaagtcaaaaacggctccttttttgcgcctcctagtgaaacttaaccagctagaccatttgagtaccagcatttagttacaaacgtcaaaggcttccggtgctgcttaccttccttttttgttaatgtgcttttatttattaaaaaaaattacaatgaagatgcctgttttgtctctactgtgtactctgatcgtatctttccaaagtgcagactcttgtgaagttttcttaaattgttcactttaaagaaaatgacgtaccaacaatgatttggcttttatattactgtaagatgttataatgttaatgtggatgtagtgcttttactttacagattgattggaataagattattgcatatgaatttacccacaggactctgaatcatgttacccactcccctcacaatgttgtccacttagtgagttgcattgatctatccgtaccaaatgatgttgaataattacatatctttcttgactatactgatttcttattttggtcactattactaaatctctgttaatattctctcttttaactgaaaagggatgggatagaagggtttgcaatgccatattattggtggagggctgttttaacatctttgaagtatggcttgctgaatatctttaccaacatcttgaatatatattctagtgtccacaagatttagcaaaaagataaagcttgggtggaatatcattttaaaatgttcatgttctgttctatattttcttcacctactctccaaatattgtaatgcaaaaagtctcagtaatgatttggtagtattaattttgtggtcattgtttctcttcgataaatttattttcattaaatacttattagagggttttgaaatgtttttcaaatatgtgaaatgtgaaactgctgtcttttatattaaagtaattaaaga

SEQ ID NO: 443917 - DNA, 1997 bp, Homo sapiens
agcgcgggaggcggggccgcggcagccggctgggtgcgactgggcggcctcggagctcgcagacgctcgggggaacatggcggctgcggagccggcggtccttgcgctccccaacagcggcgccgggggcgcgggggcgccgtcgggcacagtcccggtgctcttctgtttctcagtcttcgcgcgaccctcgtcggtgccacacggggcgggctacgagctgctcatccagaagttcctcagcctgtacggcgaccagatcgacatgcaccgcaaattcgtggtgcagctgttcgccgaggagtggggccagtacgtggacttgcccaagggcttcgcggtgagcgagcgctgcaaggtgcgcctcgtgccgctgcagatccagctcactaccctgggaaatcttacaccttcaagcactgtgtttttctgctgtgatatgcaggaaaggttcagaccagccatcaagtattttggggatattattagcgtgggacagagattgttgcaaggggcccggattttaggaattcctgttattgtaacagaacaataccctaaaggtcttgggagcacggttcaagaaattgatttaacaggtgtaaaactggtacttccaaagaccaagttttcaatggtattaccagaagtagaagcggcattagcagagattcccggagtcaggagtgttgtattatttggagtagaaactcatgtgtgcatccaacaaactgccctggagctagttggccgaggagtcgaggttcacattgttgctgatgccacctcatcaagaagcatgatggacaggatgtttgccctcgagcgtctcgctcgaaccgggatcatagtgaccacgagtgaggctgttctgcttcagctggtagctgataaggaccatccaaaattcaaggaaattcagaatctaattaaggcgagtgctccagagtcgggtctgctttccaaagtataggacatttgaagaactggtatgctactcactggtgaaggacagtcaggtgaaggactgtaagcccacacaagctcttcttatctctactagaattaaaatgttaagtcaaaaacggctccttttttgcgcctcctagtgaaacttaaccagctagaccatttgagtaccagcatttagttacaaacgtcaaaggcttccggtgctgcttaccttccttttttgttaatgtgcttttatttattaaaaaaaattacaatgaagatgcctgttttgtctctactgtgtactctgatcgtatctttccaaagtgcagactcttgtgaagttttcttaaattgttcactttaaagaaaatgacgtaccaacaatgatttggcttttatattactgtaagatgttataatgttaatgtggatgtagtgcttttactttacagattgattggaataagattattgcatatgaatttacccacaggactctgaatcatgttacccactcccctcacaatgttgtccacttagtgagttgcattgatctatccgtaccaaatgatgttgaataattacatatctttcttgactatactgatttcttattttggtcactattactaaatctctgttaatattctctcttttaactgaaaagggatgggatagaagggtttgcaatgccatattattggtggagggctgttttaacatctttgaagtatggcttgctgaatatctttaccaacatcttgaatatatattctagtgtccacaagatttagcaaaaagataaagcttgggtggaatatcattttaaaatgttcatgttctgttctatattttcttcacctactctccaaatattgtaatgcaaaaagtctcagtaatgatttggtagtattaattttgtggtcattgtttctcttcgataaatttattttcattaaatacttattagagggttttgaaatgtttttcaaatatgtgaaatgtgaaactgctgtcttttatattaaagtaattaaaga

SEQ ID NO: 443918 - DNA, 1934 bp, Homo sapiens
agcgcgggaggcggggccgcggcagccggctgggtgcgactgggcggcctcggagctcgcagacgctcgggggaacatggcgggcacagtcccggtgctcttctgtttctcagtcttcgcgcgaccctcgtcggtgccacacggggcgggctacgagctgctcatccagaagttcctcagcctgtacggcgaccagatcgacatgcaccgcaaattcgtggtgcagctgttcgccgaggagtggggccagtacgtggacttgcccaagggcttcgcggtgagcgagcgctgcaaggtgcgcctcgtgccgctgcagatccagctcactaccctgggaaatcttacaccttcaagcactgtgtttttctgctgtgatatgcaggaaaggttcagaccagccatcaagtattttggggatattattagcgtgggacagagattgttgcaaggggcccggattttaggaattcctgttattgtaacagaacaataccctaaaggtcttgggagcacggttcaagaaattgatttaacaggtgtaaaactggtacttccaaagaccaagttttcaatggtattaccagaagtagaagcggcattagcagagattcccggagtcaggagtgttgtattatttggagtagaaactcatgtgtgcatccaacaaactgccctggagctagttggccgaggagtcgaggttcacattgttgctgatgccacctcatcaagaagcatgatggacaggatgtttgccctcgagcgtctcgctcgaaccgggatcatagtgaccacgagtgaggctgttctgcttcagctggtagctgataaggaccatccaaaattcaaggaaattcagaatctaattaaggcgagtgctccagagtcgggtctgctttccaaagtataggacatttgaagaactggtatgctactcactggtgaaggacagtcaggtgaaggactgtaagcccacacaagctcttcttatctctactagaattaaaatgttaagtcaaaaacggctccttttttgcgcctcctagtgaaacttaaccagctagaccatttgagtaccagcatttagttacaaacgtcaaaggcttccggtgctgcttaccttccttttttgttaatgtgcttttatttattaaaaaaaattacaatgaagatgcctgttttgtctctactgtgtactctgatcgtatctttccaaagtgcagactcttgtgaagttttcttaaattgttcactttaaagaaaatgacgtaccaacaatgatttggcttttatattactgtaagatgttataatgttaatgtggatgtagtgcttttactttacagattgattggaataagattattgcatatgaatttacccacaggactctgaatcatgttacccactcccctcacaatgttgtccacttagtgagttgcattgatctatccgtaccaaatgatgttgaataattacatatctttcttgactatactgatttcttattttggtcactattactaaatctctgttaatattctctcttttaactgaaaagggatgggatagaagggtttgcaatgccatattattggtggagggctgttttaacatctttgaagtatggcttgctgaatatctttaccaacatcttgaatatatattctagtgtccacaagatttagcaaaaagataaagcttgggtggaatatcattttaaaatgttcatgttctgttctatattttcttcacctactctccaaatattgtaatgcaaaaagtctcagtaatgatttggtagtattaattttgtggtcattgtttctcttcgataaatttattttcattaaatacttattagagggttttgaaatgtttttcaaatatgtgaaatgtgaaactgctgtcttttatattaaagtaattaaaga

SEQ ID NO: 443919 - DNA, 1264 bp, Homo sapiens
aaaggatcttttagaagatagtttgcagtttgaaaagaaacttaatattttacttgcctattcccacttcttaatcagcagtaatggaatacctcctgattctaggttacttaatactaggtttctattgaggtctatttttagagaagggaaaagaaacccagttttatgatatttaaaatgataccattatatacataagccacatatatttccctttttttcatgttcatgtaggatagttgaatgcaaaatagtgaatacattcattagtgtttttcctcataatttaaaaattttcattgttagatcctcaggatacctaaggttatagctaggaaggtaaagaataaaatctgcccttagttggaacaatgccctagtcttaattgaagctgccttagctaccttcctccaaccaataaataaatacatactctccagtttaatgtatatttttgccattaagaagagttgagactgggcatggtggctcatgcctgtaatcccagcactttgggaagctgaggcaggtggatcacttgacttcaggagttcgagaccagcgtggccaacatggcgaaaccccatctctagtaaaaatacaaaaattttaagtggctattaaatgaagagttctgtgggccagatgaaccaccgcatctgacgctcagaactctgtttcatagccgcttagctctaatcattagaaatgtatttctcatatttaggcccaaatctggttcccggtaactactacccattagttgtagttcttttcctcataatggccctaaggttattgaagacttgtaatcattctttgttctccccttcccaagataattcatttattttgatgatctaaacagttgtagtacagtgtgctactacatacttctctgcctttgagttttggatccagaagatttttagtactataaattcttcagtatgcaatgataatggtgtgaaattttagatagttttgcgtaaaatactttatgttgcagagtttttaggctaaataacagtaaactagcattttatctttaatgtgtcatccttaattctaaataatgactactaatctagaacatttgaattacctcccagttttccagatgatatcttaagaaagattctaaagttttacagcctgcctgcagaactatgatgagattttagaaataatccactactttagttttcagcctttttgagtatgacgtttctctttctaatgttaaaaaagttacatatt

SEQ ID NO: 443920 - DNA, 1179 bp, Homo sapiens
actcaacctcccccggaactcaacccccgtcgctcgagtttctttcgcttccgtcgggactctgcggagtggacccgagtgaacacaacttccggccccactgagcggtgtcctgagccgattacagctaggtagtggagcgccgctgcttacctgggtgcaggagacagccggagtcgctgggggagctccgcgccgccggacgcccgtgaccatgtggaggctgctggctcgcgctagtgcgccgctcctgcgggtgcccttgtcagattcctgggcactcctccccgccagtgctggcgtaaagacactgctcccagtaccaagttttgaagatgtttccattcctgaaaaacccaagcttagatttattgaaagggcaccacttgtgccaaaagtaagaagagaacctaaaaatttaagtgacatacggggaccttccactgaagctacggagtttacagaaggcaattttgcaatcttggcattgggtggtggctacctgcattggggccactttgaaatgatgcgcctgacaatcaaccgctctatggaccccaagaacatgtttgccatatggcgagtaccagcccctttcaagcccatcactcgcaaaagtgttgggcatcgcatggggggaggcaaaggtgctattgaccactacgtgacacctgtgaaggctggccgccttgttgtagagatgggtgggcgttgtgaatttgaagaagtgcaaggtttccttgaccaggttgcccacaagttgcccttcgcagcaaaggctgtgagccgcgggactctagagaagatgcgaaaagatcaagaggaaagagaacgtaacaaccagaacccctggacatttgagcgaatagccactgccaacatgctgggcatacggaaagtactgagcccatatgacttgacccacaaggggaaatactggggcaagttctacatgcccaaacgtgtgtagtgagtgtaggagataactgtatataggctactgaaagaaggattctgcatttctattcccctcagcctacccactgaagtctttgggtagctcttaagccataactaaggagcagcatttgagtagatttctgaaaaacaatgttatttgttgatttaaaaagaaaactgtatttttattaaataaaatttaaacatcacttcaggata

SEQ ID NO: 443921 - DNA, 1862 bp, Homo sapiens
actcaacctcccccggaactcaacccccgtcgctcgagtttctttcgcttccgtcgggactctgcggagtggacccgagtgaacacaacttccggccccactgagcggtgtcctgagccgattacagctaggtagtggagcgccgctgcttacctgggtgcaggagacagccggagtcgctgggggagctccgcgccgccggacgcccgtgaccatgtggaggctgctggctcgcgctagtgcgccgctcctgcgggtgcccttgtcaggtcagaagtcccttttggttcctaaagactttacccctcttcctcccccaccctccagtgctttttctccctaacccaaaaggcggctctgcatatgcttggtgaagcactggttaggaactacgctatcgcaccgccgacctccaccgtaggggttcgtgcaagagggtcacagctgcgtctgggagtcggcgcccagagatcccggctggccttttgcggagcctgagcctttgagtccatttagtggaatccgcatcccacacctcaagactcctccggcggaagtacttttgggcgggcgcggtggctcacgcctttaatagcagcactttgggaggccgaggcgggcgaatcacttgaggtcagtagtttgaaaccagcctggccaacatggtgaaaccctgtctctactgaaaatacaaaaaaaattagctgggcgtggtggtgggcgactgtaatcccagctagtccggaggctgaggcaggagaatctcttgaacccgggaggcggaggttgcagtgagccgagatcgcgccactgcactggatcctgggcgacagagtaagactccgtctcaaacaaataaaataaataaaaataagaagtagtacctttggcccaggttgtatcggggtcccggcctgttaccttcgtcgtttaacttgatttgtctttgtagattcctgggcactcctccccgccagtgctggcgtaaagacactgctcccagtaccaagttttgaagatgtttccattcctgaaaaacccaagcttagatttattgaaagggcaccacttgtgccaaaagtaagaagagaacctaaaaatttaagtgacatacggggaccttccactgaagctacggagtttacagaaggcaattttgcaatcttggcattgggtggtggctacctgcattggggccactttgaaatgatgcgcctgacaatcaaccgctctatggaccccaagaacatgtttgccatatggcgagtaccagcccctttcaagcccatcactcgcaaaagtgttgggcatcgcatggggggaggcaaaggtgctattgaccactacgtgacacctgtgaaggctggccgccttgttgtagagatgggtgggcgttgtgaatttgaagaagtgcaaggtttccttgaccaggttgcccacaagttgcccttcgcagcaaaggctgtgagccgcgggactctagagaagatgcgaaaagatcaagaggaaagagaacgtaacaaccagaacccctggacatttgagcgaatagccactgccaacatgctgggcatacggaaagtactgagcccatatgacttgacccacaaggggaaatactggggcaagttctacatgcccaaacgtgtgtagtgagtgtaggagataactgtatataggctactgaaagaaggattctgcatttctattcccctcagcctacccactgaagtctttgggtagctcttaagccataactaaggagcagcatttgagtagatttctgaaaaacaatgttatttgttgatttaaaaagaaaactgtatttttattaaataaaatttaaacatcacttcaggata

SEQ ID NO: 443922 - DNA, 1597 bp, Homo sapiens
gtatgtagctttgctgttgaactggatggcatagaccagattataaagtgtttttagccctcgggttcctcttctataaaatggagattaaaaatactacctgcctaatatcctgtttgttgatctgggtaatagtggtgtgtgttcatgtgttcactttctggtaattcactgagctgtatatttttaatttggccctttgatatagctgtgttaaactttgacaagtttaaaatttttaaaaagagagccctgaaagaataccaaggctataaagttattttaaagattaagtgaactagtggtttccaaacaatccctgttacagtgttaagcacagagttggtgattaataagtgcatttggattcagaggataaaactttgctatctttaaagttttagaaacatttgcattagccactgtcacagccagaagattccagtgtcactaaaagcatctgcaaaaatgtaatatacctttacagttactgttcagtggtaactttaagactttcaggctggatatggtggctcgcacttgtaatcccaacactttgggaggtaaaggcaggaaaatcacttgaggccaggagtttgaaaccaacctgggcaacatagtgagaccctgtctctaccaaaaaatgaagaagaaagaaattaagactttcacctgttataaatctttctaggaaaatagatcttttgagatgtatagttttactttatcctgggttgtctgtgcttcttttagatgtttccattcctgaaaaacccaagcttagatttattgaaagggcaccacttgtgccaaaagtaagaagagaacctaaaaatttaagtgacatacggggaccttccactgaagctacggagtttacagaaggcaattttgcaatcttggcattgggtggtggctacctgcattggggccactttgaaatgatgcgcctgacaatcaaccgctctatggaccccaagaacatgtttgccatatggcgagtaccagcccctttcaagcccatcactcgcaaaagtgttgggcatcgcatggggggaggcaaaggtgctattgaccactacgtgacacctgtgaaggctggccgccttgttgtagagatgggtgggcgttgtgaatttgaagaagtgcaaggtttccttgaccaggttgcccacaagttgcccttcgcagcaaaggctgtgagccgcgggactctagagaagatgcgaaaagatcaagaggaaagagaacgtaacaaccagaacccctggacatttgagcgaatagccactgccaacatgctgggcatacggaaagtactgagcccatatgacttgacccacaaggggaaatactggggcaagttctacatgcccaaacgtgtgtagtgagtgtaggagataactgtatataggctactgaaagaaggattctgcatttctattcccctcagcctacccactgaagtctttgggtagctcttaagccataactaaggagcagcatttgagtagatttctgaaaaacaatgttatttgttgatttaaaaagaaaactgtatttttattaaataaaatttaaacatcacttcaggata

SEQ ID NO: 443923 - DNA, 1140 bp, Homo sapiens
actcaacctcccccggaactcaacccccgtcgctcgagtttctttcgcttccgtcgggactctgcggagtggacccgagtgaacacaacttccggccccactgagcggtgtcctgagccgattacagctaggtagtggagcgccgctgcttacctgggtgcaggagacagccggagtcgctgggggagctccgcgccgccggacgcccgtgaccatgtggaggctgctggctcgcgctagtgcgccgctcctgcgggtgcccttgtcagatcctgggttgtctgtgcttcttttagatgtttccattcctgaaaaacccaagcttagatttattgaaagggcaccacttgtgccaaaagtaagaagagaacctaaaaatttaagtgacatacggggaccttccactgaagctacggagtttacagaaggcaattttgcaatcttggcattgggtggtggctacctgcattggggccactttgaaatgatgcgcctgacaatcaaccgctctatggaccccaagaacatgtttgccatatggcgagtaccagcccctttcaagcccatcactcgcaaaagtgttgggcatcgcatggggggaggcaaaggtgctattgaccactacgtgacacctgtgaaggctggccgccttgttgtagagatgggtgggcgttgtgaatttgaagaagtgcaaggtttccttgaccaggttgcccacaagttgcccttcgcagcaaaggctgtgagccgcgggactctagagaagatgcgaaaagatcaagaggaaagagaacgtaacaaccagaacccctggacatttgagcgaatagccactgccaacatgctgggcatacggaaagtactgagcccatatgacttgacccacaaggggaaatactggggcaagttctacatgcccaaacgtgtgtagtgagtgtaggagataactgtatataggctactgaaagaaggattctgcatttctattcccctcagcctacccactgaagtctttgggtagctcttaagccataactaaggagcagcatttgagtagatttctgaaaaacaatgttatttgttgatttaaaaagaaaactgtatttttattaaataaaatttaaacatcacttcaggata

SEQ ID NO: 443924 - DNA, 839 bp, Homo sapiens
accgctaaccaacttcaaagaaagtagttgagatccttgcacttccaagtgtgatggaaccaggctagggtttctttgtttgtttgggcctcttcaaaacgtttttattctgttataaggaatatgataccttaagcttcaattcacagggaagagaaacatgattataagcaaaagtttgtcaaggaataaggtgagtctttgtgtagaaatagaccgttcaatttctacacatcctcgcccacatatcttatttaaggtggtagtgtaatttacagcaaggacatcagctctgatgtttacaaagaaaaccagcaactctgatgtagcaacatacgtgtagaaattgaacacacagagatgggtgggcgttgtgaatttgaagaagtgcaaggtttccttgaccaggttgcccacaagttgcccttcgcagcaaaggctgtgagccgcgggactctagagaagatgcgaaaagatcaagaggaaagagaacgtaacaaccagaacccctggacatttgagcgaatagccactgccaacatgctgggcatacggaaagtactgagcccatatgacttgacccacaaggggaaatactggggcaagttctacatgcccaaacgtgtgtagtgagtgtaggagataactgtatataggctactgaaagaaggattctgcatttctattcccctcagcctacccactgaagtctttgggtagctcttaagccataactaaggagcagcatttgagtagatttctgaaaaacaatgttatttgttgatttaaaaagaaaactgtatttttattaaataaaatttaaacatcacttcaggata

SEQ ID NO: 443925 - DNA, 1175 bp, Homo sapiens
actcaacctcccccggaactcaacccccgtcgctcgagtttctttcgcttccgtcgggactctgcggagtggacccgagtgaacacaacttccggccccactgagcggtgtcctgagccgattacagctaggtagtggagcgccgctgcttacctgggtgcaggagacagccggagtcgctgggggagctccgcgccgccggacgcccgtgaccatgtggaggctgctggctcgcgctagtgcgccgctcctgcgggtgcccttgtcaggtcagaagtcccttttggttcctaaagactttacccctcttcctcccccaccctccagtgctttttctccctaacccaaaaggcggctctgcatatgcttggtgaagcactggttaggaactacgctatcgcaccgccgacctccaccgtaggggttcgtgcaagagggtcacagctgcgtctgggagtcggcgcccagagatcccggctggccttttgcggagcctgagcctttgagtccatttagtggaatccgcatcccacacctcaagactcctccggcggaagtacttttgggcgggcgcggtggctcacgcctttaatagcagcactttgggaggccgaggcgggcgaatcacttgaggtcagtagtttgaaaccagcctggccaacatggtgaaaccctgtctctactgaaaatacaaaaaaaattagctgggcgtggtggtgggcgactgtaatcccagctagtccggaggctgaggcaggagaatctcttgaacccgggaggcggaggttgcagtgagccgagatcgcgccactgcactggatcctgggcgacagagtaagactccgtctcaaacaaataaaataaataaaaataagaagtagtacctttggcccaggttgtatcggggtcccggcctgttaccttcgtcgtttaacttgatttgtctttgtagattcctgggcactcctccccgccagtgctggcgtaaagacactgctcccagtaccaagttttgaaggatgataaagaagatgtcacatgtctggcctgaagttttgcccacccaccaaaacctggcacactgacctgtgcaggtctcagcatgaaaagtccctgcatatatgagagaaagagcattgatcaaaggattcctaggttgtaagtttctcaacaag

SEQ ID NO: 443926 - DNA, 274 bp, Homo sapiens
ctggcgtaaagacactgctcccagtaccaagttttgaaggtgagagcttgtctttctcctgttcgtaaatcttttctctgatggaaaccaggagcgggtgggagatgacataggaatgttctcgtgtttcccatccccgttcactctttcaataaatatgtttttagagcttacagttttgccaactaatattctgagcactagaaataaatcaaagacaaaggaaaccaaaaaagttccttgctcttacggagcagcgtctaatgagatagct

SEQ ID NO: 443927 - DNA, 1649 bp, Homo sapiens
  misc_feature (1190)..(1190): n is a, c, g, or t
actcaacctcccccggaactcaacccccgtcgctcgagtttctttcgcttccgtcgggactctgcggagtggacccgagtgaacacaacttccggccccactgagcggtgtcctgagccgattacagctaggtagtggagcgccgctgcttacctgggtgcaggagacagccggagtcgctgggggagctccgcgccgccggacgcccgtgaccatgtggaggctgctggctcgcgctagtgcgccgctcctgcgggtgcccttgtcagattcctgggcactcctccccgccagtgctggcgtaaagacactgctcccagtaccaagttttgaagatgtttccattcctgaaaaacccaagcttagatttattgaaagggcaccacttgtgccaaaagtaagaagagaacctaaaaatttaagtgacatacggggaccttccactgaagctacggagtttacagaaggcaattttgcaatcttggcattgggtggtggctacctgcattggggccactttgaaatgatgcgcctgacaatcaaccgctctatggaccccaagaacatgtttgccatatggcgagtaccagcccctttcaagcccatcactcgcaaaagtgttgggcatcgcatggggggaggcaaaggtgctattgaccactacgtgacacctgtgaaggctggccgccttgttgtagagatgggtgggcgttgtgaatttgaagaagtgcaaggtttccttgaccaggttgcccacaagttgcccttcgcagcaaaggctgtgagccgcgggactctagagaagatgcgaaaagatcaagaggaaagagaacgtaacaaccagaacccctggacatttgagcgaatagccactgccaacatgctgggcatacggaaagtactgagcccatatgacttgacccacaaggggaaatactggggcaagttctacatgcccaaacgtgtgtagtgagtgtaggagataactgtatataggctactgaaagaaggattctgcatttctattcccctcagcctacccactgaagtctttgggtagctcttaagccataactaaggagcagcatttgagtagatttctgaaaaacaatgttatttgttgatttaaaaagaaaactgtatttttattaaataaaatttaaacatcacttcaggataaaaaaaaaaanaaaaaaaaaaaaaaaaaaaaaaaaaaaaaaaaaaaaaaaaaaaaaaaaaaaaaaaaaaaaagaaaaaaaaaaaaaaaaaaaaaaaaaaaaaccttgtggcccccttggcccaatcaactttaaaattggaaaagttttttaatggggccccaatttgggcctacttggccaatttccccttaagggggcgcgttaacaaataacggggccggtttttaaaaacttgggactgggaaaaccctggggttccccaatttaataccctttggaaaaaacccctttttccccactggggttaatgccaaaaggccccccccggagggcctttccaaaaaggggccaccccgaatgggaaatggaaattggacgcgtaaaatttgggtaaaaacccggtgaaattttggaaaacccgccattttttaacccaatggcccaaatcgggcccttttaacgtgcccc

SEQ ID NO: 443928 - DNA, 1543 bp, Homo sapiens
actcaacctcccccggaactcaacccccgtcgctcgagtttctttcgcttccgtcgggactctgcggagtggacccgagtgaacacaacttccggccccactgagcggtgtcctgagccgattacagctaggtagtggagcgccgctgcttacctgggtgcaggagacagccggagtcgctgggggagctccgcgccgccggacgcccgtgaccatgtggaggctgctggctcgcgctagtgcgccgctcctgcgggtgcccttgtcaggtcagaagtcccttttggttcctaaagactttacccctcttcctcccccaccctccagtgctttttctccctaacccaaaaggcggctctgcatatgcttggtgaagcactggttaggaactacgctatcgcaccgccgacctccaccgtaggggttcgtgcaagagggtcacagctgcgtctgggagtcggcgcccagagatcccggctggccttttgcggagcctgagcctttgagtccatttagtggaatccgcatcccacacctcaagactcctccggcggaagtacttttgggcgggcgcggtggctcacgcctttaatagcagcactttgggaggccgaggcgggcgaatcacttgagattcctgggcactcctccccgccagtgctggcgtaaagacactgctcccagtaccaagttttgaagatgtttccattcctgaaaaacccaagcttagatttattgaaagggcaccacttgtgccaaaagtaagaagagaacctaaaaatttaagtgacatacggggaccttccactgaagctacggagtttacagaaggcaattttgcaatcttggcattgggtggtggctacctgcattggggccactttgaaatgatgcgcctgacaatcaaccgctctatggaccccaagaacatgtttgccatatggcgagtaccagcccctttcaagcccatcactcgcaaaagtgttgggcatcgcatggggggaggcaaaggtgctattgaccactacgtgacacctgtgaaggctggccgccttgttgtagagatgggtgggcgttgtgaatttgaagaagtgcaaggtttccttgaccaggttgcccacaagttgcccttcgcagcaaaggctgtgagccgcgggactctagagaagatgcgaaaagatcaagaggaaagagaacgtaacaaccagaacccctggacatttgagcgaatagccactgccaacatgctgggcatacggaaagtactgagcccatatgacttgacccacaaggggaaatactggggcaagttctacatgcccaaacgtgtgtagtgagtgtaggagataactgtatataggctactgaaagaaggattctgcatttctattcccctcagcctacccactgaagtctttgggtagctcttaagccataactaaggagcagcatttgagtagatttctgaaaaacaatgttatttgttgatttaaaaagaaaactgtatttttattaaataaaatttaaacatcacttcaggata

SEQ ID NO: 443929 - DNA, 1125 bp, Homo sapiens
actcaacctcccccggaactcaacccccgtcgctcgagtttctttcgcttccgtcgggactctgcggagtggacccgagtgaacacaacttccggccccactgagcggtgtcctgagccgattacagctaggtagtggagcgccgctgcttacctgggtgcaggagacagccggagtcgctgggggagctccgcgccgccggacgcccgtgaccatgtggaggctgctggctcgcgctagtgcgccgctcctgcgggtgcccttgtcagattcctgggcactcctccccgccagtgctggcgtaaagacactgctcccagtaccaagttttgaagatgtttccattcctgaaaaacccaagcttagatttattgaaagggcaccacttgtgccaaaagtaagaagagaacctaaaaatttaagtgacatacggggaccttccactgaagctacggagtttacagaaggcaattttgcaatcttggcattgggtggtggctacctgcattggggccactttgaaatgatgcgcctgacaatcaaccgctctatggaccccaagaacatgtttgccatatggcgagtaccagcccctttcaagcccatcactcgcaaaactgtgaaggctggccgccttgttgtagagatgggtgggcgttgtgaatttgaagaagtgcaaggtttccttgaccaggttgcccacaagttgcccttcgcagcaaaggctgtgagccgcgggactctagagaagatgcgaaaagatcaagaggaaagagaacgtaacaaccagaacccctggacatttgagcgaatagccactgccaacatgctgggcatacggaaagtactgagcccatatgacttgacccacaaggggaaatactggggcaagttctacatgcccaaacgtgtgtagtgagtgtaggagataactgtatataggctactgaaagaaggattctgcatttctattcccctcagcctacccactgaagtctttgggtagctcttaagccataactaaggagcagcatttgagtagatttctgaaaaacaatgttatttgttgatttaaaaagaaaactgtatttttattaaataaaatttaaacatcacttcaggata

SEQ ID NO: 443930 - DNA, 474 bp, Homo sapiens
aattgtatcattgaagccacagttactagaagagacaaaataatgagcccatagatgatgtcgaagtccgcatgtgtttctaattctcccattcacttttaggcattgggtggtggctacctgcattggggccactttgaaatgatgcgcctgacaatcaaccgctctatggaccccaagaacatgtttgccatatggcgagtaccagcccctttcaagcccatcactcgcaaaagtgttgggcatcgcatggggggaggcaaaggtgctattgaccactacgtgacacctgtgaaggctggccgccttgttgtagagatgggtgggcgttgtgaatttgaagaagtgcaaggtttccttgaccaggttgcccacaagttgcccttcgcagcaaaggctgtgagccgcgggactctagagaagatgcgaaaagatcaagaggaaagagaacgtaacaaccagaacccctggaca

SEQ ID NO: 443931 - DNA, 3163 bp, Homo sapiens
ggcgactttccttttccggctacgggtccccaagcggagcgggaggccggaccggggagccgagcggcggcgtcggcggcgtcggcggcggcggcgacggcggcgggggcggtaatggcggagctggtgcaggggcagagcgctcctgtggggatgaaggccgagggcttcgtggatgccctgcaccgggtccggcagattgctgctaaaattgattcaattcctcacttgaataattccacacctctagtggacccctcagtatatggatacggagtacaaaaacggcccttggatgatggagtaggtaaccagttaggggccttggtacatcaaaggacggtaataacggaagaattcaaagtgcctgacaaaatggttggatttattatcggcaggggaggtgagcagatttcacggattcaagcagaatctggttgcaaaattcagattgcttcagagagttctgggattccagagaggccctgtgtacttaccggaaccccagaaagtattgaacaagccaaacggctcctgggacagattgtggaccgctgtcgaaatggacctggctttcataatgacatagacagcaacagcacaatccaggagattctcattcccgcatctaaagtgggtctggtcatcggcagaggaggggaaacaatcaagcagttgcaggagcggacaggggtgaagatggtcatgatccaggatggcccattgcccacgggagcagacaagcctcttcgtatcactggagatgcatttaaagtacagcaagcaagagaaatggtactagagattatccgagaaaaagaccaagctgactttcggggtgtacgcggcgatttcaactctcgaatgggaggaggcagtatagaggtatctgtgcctaggtttgctgtggggattgtaataggaagaaacggggaaatgatcaaaaagatccagaatgatgctggtgtgaggattcagtttaaaccagatgatgggattagtccagaaagagctgcccaggtcatgggccctccggatcggtgtcagcatgcagcgcatatcatcagcgagctgattcttacagcccaggaaagagacggctttggaggcctggcagcagccagaggaagaggtcgtggccgtggcgactggagcgtgggagcccctggtggcgtccaggagataacatacacggtgccagccgataagtgtggcctcgtcataggcaaagggggtgagaacatcaaaagcatcaaccagcagtcaggggcgcacgtggagcttcagaggaacccccctcccaacagcgaccccaacctgcggagattcaccatcaggggggttccccagcagatcgaggtggccaggcagctcatagatgagaaagttggcgggaccaatctcggagcacctggagccttcggacagagtccattcagccagccacctgccccacctcatcaaaatacctttcctccaaggagctccgggtgcttcccaaacatggctgccaaggtgaatgggaacccccacagcacccctgtgagtggtcctccggcctttctgacccagggctggggcagcacctaccaggcgtggcagcagcccacacagcaggtcccaagccagcagagccagccgcagagcagccagcccaactacagcaaggcctgggaagactattacaaaaaacagagtcacgccgccagcgctgctcctcaggccagctccccaccggactacacaatggcctgggcagaatattacagacagcaggtcgctttctacggacagacgttagggcaggcgcaggcccacagccaggagcagtaggacagcgtcctcgtggccaactctcccctcaaaatcattgtcaaagaaaacctatttgtaacagaggtttttacatttgcaaaccttttgatgaagaactgttgttttgttctgtgaaacactatatttagattaacggaatttttctaaaaatcaggaaaattagttactaaaaattgctgatcatttttgtttcattatttttgttatttcaaatgtataagctctgggattctttttggagcaatacctacaaagtcaggcaccagaatgtgcctcagagctgtgacatttcaacatgatggttttggtttggtttggttttgtgtcctttttatttgcagttttttctgttgcaacagaaagtggcttggaagtcttaggtggtatgtaacaaattctttttaaaaattttaaagcagtatttaagtattcttaaatgtgtaaattcatttaatgttttacttctaatttcttgtatcttggctgtctggttttattgcatttttaaaaaaactgaactattatgtattgtaatgaatgatgtgaattctgaactgagacagataattgtattgctgtccaacaggggttgggaggggcattttgtagggtttgtataatttctagagttcgaaaggggtaatataaaaatgtgctcgtgtgtttagcctacgtttttctcatgcctccattaccagttgcaattgtgtatctaagacctccaagcttgtttttaaaacaaaacaaaaaacctttctctattatctcagaaatataaatactgttatttttaatattaagaaattcaatataacttttaacacacactgtggaacattaaaccgtataaaaatgtagttataactatttttaattccaaggtgttgtttgcttttttcttttaaatattttcttaatattttgtcagattaactagatgaataaataaatctagtattaaccgcattatgaattaaataattttgatttaatgaaagggataatatgatttccagtgtttactgtagtgtatcttgtacagataacatgtatttttaaaggaaaaaaaacggaattgaagctattttttcttgcatttctaattgacctgagggacattccgtttgaaatgtactgaagttacagtttctggttttttctccttatttttcttataatgcttgaaatgtctaactattaaaaaagacaattggaaaatgttatgcatggggtttttaagaaaacaaagtgttctttttatttgactgacaattcattttacactctatataataaaatctccacaaggcatcttgtgggcaaagtc

SEQ ID NO: 443932 - DNA, 1132 bp, Homo sapiens
cgtctcctgctatcgtaccttacatactggacctacggccgttcgtaatggaagcatgtgctccccaccatatgcctacagtgacgttgtggcagtgcgtcctatctgactgtaaacatctggatctgcatacatatctccggagatatgcatgggccttgtacccatctaagacaaaaaaccatgcttgggtgggttactaacctcgtcaattgattattgagtatttgcattgggcaagaacggaatgttagaaatctgtaatactgtatgctgatggtaaacttactgtaaggatctcatttgggtatctggaaggtgatagttctgtttctttgttatatacacagcatgttacagagatgtgatttttctccccattaaacagaactaaaagacagtatatttatttaaacgcaaagctttttccccttttatgtctcctcataaactccagagacagtctggaaggccctcttaaatttgtcaaagagcagtaaagtgtctcacgctcagtttttctagcagatcgtaatactctcagttgaccctgctgggatttgaacctgcagtttctattaagtttggtgtgtgaagtccaacaccttatcaactaggctttccctctgacatcttgaagcctccgtgtatatcctttggactctgcagcaaagtgcatcagttgttagtttactctgagcatggtattcttagattgaaaagaagtctctgaagatgtcaaataaaatgtaaacattttctccagcagtgtgaagtctagtgagttaatgtttggcacaagcaggtaatttacatccattctatagggtagtagaaatgtgatctgggcaagtcacagtggctcatgcttgtaatctcagcactttgggaggctgaggtaggaggatggcttgagctcaggggtttgataccagcctgggcaacatagcgagaccttgtctctactaaaaattaaaaaaattagctggatgtggtggcccacccctgcagtctcagctgtttgggaggctgaagcaagaggctagcttgagcatggagatcaaggctgcagtgagctgtgattgctccgctgcattccagcctgagtgacagagtgagacactgtctcaaa

SEQ ID NO: 443933 - DNA, 475 bp, Homo sapiens
tccagcctgggcaacaagagcgaaactccgtctcaaaaaaaaaaaaaaaaaaaggatactaattttctggtagagacacatttttgaaagtactaaagacaagttattattaagaccaaaagaaaactcacttaacagtgaaaagtatttgtgcccttgcggtgctgccttccattaatcaaggtcaggggagaaatgggataatagccctttaaagaggacacttgtctttctccctcagatagagccatggtttgttactgagtgtttaaatctgattctctctgtagattgctgctaaaattgattcaattcctcacttgaataattccacacctctagtggacccctcagtatatggatacggagtacaaaaacggcccttggatgatggaggtaagttgccagaaatatctttgcctttcaggtggtagtgaacctgccagttaagtttgaatttgtcagccattacctt

SEQ ID NO: 443934 - DNA, 4018 bp, Homo sapiens
ggcgactttccttttccggctacgggtccccaagcggagcgggaggccggaccggggagccgagcggcggcgtcggcggcgtcggcggcggcggcgacggcggcgggggcggtaatggcggagctggtgcaggggcagagcgctcctgtggggatgaaggccgagggcttcgtggatgccctgcaccgggtccggcagaaagccacaggagtcattgtattagaagaaggtcttcactcgggcgcttgaagatatggtctttacatctctttccagtattccaggggagggaaccctacctgtttccctgataactgacttttcatgttatatattgatgctcctatagacattatattggatcccagaactttccaaacctgtggttccacctaaaattttatctgatgaattgttactttactgcctagctgccaaccagtacagtagtgagtatccatcttacttagacttcagatccacccatggctgtaatggatgaacatgccacccagctccccttccaccactctgcttgctggcgtgttacagtgctctcctctacagtacagggtcctgaaccttgtttctcactggctactaatatgtaatggctttcgctctgtgctgatgtgtgacagtcaccttgttggccttctatgtccgggaagaattatagtcactgccctaaagggctcagatcctcagtttgcagaaggcctgtagttgaacataaagtgaattttgaaccattgagaagacattccgcttctcttgagccagtggttgaactcatattcttggacaacctgctccagagggagaccctctggtaaatgctgacctaatgtggattgttgaagcagtggtgtttactactagcagtgaaaacttcattggaattgttctcagctctgaaatgcaccattgactggagcagtaataagcccaatggagacagggctgtaagtgtgttccttctgaatgttaacagctggaggtccatactatctccaaggatttgatggcctttaaaaactaaagaaaaaccagattgctgctaaaattgattcaattcctcacttgaataattccacacctctagtggacccctcagtatatggatacggagtacaaaaacggcccttggatgatggagtaggtaaccagttaggggccttggtacatcaaaggacggtaataacggaagaattcaaagtgcctgacaaaatggttggatttattatcggcaggggaggtgagcagatttcacggattcaagcagaatctggttgcaaaattcagattgcttcagagagttctgggattccagagaggccctgtgtacttaccggaaccccagaaagtattgaacaagccaaacggctcctgggacagattgtggaccgctgtcgaaatggacctggctttcataatgacatagacagcaacagcacaatccaggagattctcattcccgcatctaaagtgggtctggtcatcggcagaggaggggaaacaatcaagcagttgcaggagcggacaggggtgaagatggtcatgatccaggatggcccattgcccacgggagcagacaagcctcttcgtatcactggagatgcatttaaagtacagcaagcaagagaaatggtactagagattatccgagaaaaagaccaagctgactttcggggtgtacgcggcgatttcaactctcgaatgggaggaggcagtatagaggtatctgtgcctaggtttgctgtggggattgtaataggaagaaacggggaaatgatcaaaaagatccagaatgatgctggtgtgaggattcagtttaaaccagatgatgggattagtccagaaagagctgcccaggtcatgggccctccggatcggtgtcagcatgcagcgcatatcatcagcgagctgattcttacagcccaggaaagagacggctttggaggcctggcagcagccagaggaagaggtcgtggccgtggcgactggagcgtgggagcccctggtggcgtccaggagataacatacacggtgccagccgataagtgtggcctcgtcataggcaaagggggtgagaacatcaaaagcatcaaccagcagtcaggggcgcacgtggagcttcagaggaacccccctcccaacagcgaccccaacctgcggagattcaccatcaggggggttccccagcagatcgaggtggccaggcagctcatagatgagaaagttggcgggaccaatctcggagcacctggagccttcggacagagtccattcagccagccacctgccccacctcatcaaaatacctttcctccaaggagctccgggtgcttcccaaacatggctgccaaggtgaatgggaacccccacagcacccctgtgagtggtcctccggcctttctgacccagggctggggcagcacctaccaggcgtggcagcagcccacacagcaggtcccaagccagcagagccagccgcagagcagccagcccaactacagcaaggcctgggaagactattacaaaaaacagagtcacgccgccagcgctgctcctcaggccagctccccaccggactacacaatggcctgggcagaatattacagacagcaggtcgctttctacggacagacgttagggcaggcgcaggcccacagccaggagcagtaggacagcgtcctcgtggccaactctcccctcaaaatcattgtcaaagaaaacctatttgtaacagaggtttttacatttgcaaaccttttgatgaagaactgttgttttgttctgtgaaacactatatttagattaacggaatttttctaaaaatcaggaaaattagttactaaaaattgctgatcatttttgtttcattatttttgttatttcaaatgtataagctctgggattctttttggagcaatacctacaaagtcaggcaccagaatgtgcctcagagctgtgacatttcaacatgatggttttggtttggtttggttttgtgtcctttttatttgcagttttttctgttgcaacagaaagtggcttggaagtcttaggtggtatgtaacaaattctttttaaaaattttaaagcagtatttaagtattcttaaatgtgtaaattcatttaatgttttacttctaatttcttgtatcttggctgtctggttttattgcatttttaaaaaaactgaactattatgtattgtaatgaatgatgtgaattctgaactgagacagataattgtattgctgtccaacaggggttgggaggggcattttgtagggtttgtataatttctagagttcgaaaggggtaatataaaaatgtgctcgtgtgtttagcctacgtttttctcatgcctccattaccagttgcaattgtgtatctaagacctccaagcttgtttttaaaacaaaacaaaaaacctttctctattatctcagaaatataaatactgttatttttaatattaagaaattcaatataacttttaacacacactgtggaacattaaaccgtataaaaatgtagttataactatttttaattccaaggtgttgtttgcttttttcttttaaatattttcttaatattttgtcagattaactagatgaataaataaatctagtattaaccgcattatgaattaaataattttgatttaatgaaagggataatatgatttccagtgtttactgtagtgtatcttgtacagataacatgtatttttaaaggaaaaaaaacggaattgaagctattttttcttgcatttctaattgacctgagggacattccgtttgaaatgtactgaagttacagtttctggttttttctccttatttttcttataatgcttgaaatgtctaactattaaaaaagacaattggaaaatgttatgcatggggtttttaagaaaacaaagtgttctttttatttgactgacaattcattttacactctatataataaaatctccacaaggcatcttgtgggcaaagtc

SEQ ID NO: 443935 - DNA, 3237 bp, Homo sapiens
  misc_feature (445)..(445): n is a, c, g, or t
ggcgactttccttttccggctacgggtccccaagcggagcgggaggccggaccggggagccgagcggcggcgtcggcggcgtcggcggcggcggcgacggcggcgggggcggtaatggcggagctggtgcaggggcagagcgctcctgtggggatgaaggccgagggcttcgtggatgccctgcaccgggtccggcagattgctgctaaaattgattcaattcctcacttgaataattccacacctctagtggacccctcagtatatggatacggagtacaaaaacggcccttggatgatggagtaggtaaccagttaggggccttggtacatcaaaggacggtaataacggaagaattcaaagtgcctgacaaaatggttggatttattatcggcaggggagcgtgagcacgatttcacggcattcaagcacgacatcctgcgntttttggccccaaacaacaaaactttttccaaaaggaaacttctgggggccttttttcccaacgagaaaacgggaagggttttccttggggggaatttcacaggaagaaggccctgtgtacttaccggaaaccccagaaagtattgaacaagccaaacggctcctgggacagattgtggaccgctgtcgaaatggacctggctttcataatgacatagacagcaacagcacaatccaggagattctcattcccgcatctaaagtgggtctggtcatcggcagaggaggggaaacaatcaagcagttgcaggagcggacaggggtgaagatggtcatgatccaggatggcccattgcccacgggagcagacaagcctcttcgtatcactggagatgcatttaaagtacagcaagcaagagaaatggtactagagattatccgagaaaaagaccaagctgactttcggggtgtacgcggcgatttcaactctcgaatgggaggaggcagtatagaggtatctgtgcctaggtttgctgtggggattgtaataggaagaaacggggaaatgatcaaaaagatccagaatgatgctggtgtgaggattcagtttaaaccagatgatgggattagtccagaaagagctgcccaggtcatgggccctccggatcggtgtcagcatgcagcgcatatcatcagcgagctgattcttacagcccaggaaagagacggctttggaggcctggcagcagccagaggaagaggtcgtggccgtggcgactggagcgtgggagcccctggtggcgtccaggagataacatacacggtgccagccgataagtgtggcctcgtcataggcaaagggggtgagaacatcaaaagcatcaaccagcagtcaggggcgcacgtggagcttcagaggaacccccctcccaacagcgaccccaacctgcggagattcaccatcaggggggttccccagcagatcgaggtggccaggcagctcatagatgagaaagttggcgggaccaatctcggagcacctggagccttcggacagagtccattcagccagccacctgccccacctcatcaaaatacctttcctccaaggagctccgggtgcttcccaaacatggctgccaaggtgaatgggaacccccacagcacccctgtgagtggtcctccggcctttctgacccagggctggggcagcacctaccaggcgtggcagcagcccacacagcaggtcccaagccagcagagccagccgcagagcagccagcccaactacagcaaggcctgggaagactattacaaaaaacagagtcacgccgccagcgctgctcctcaggccagctccccaccggactacacaatggcctgggcagaatattacagacagcaggtcgctttctacggacagacgttagggcaggcgcaggcccacagccaggagcagtaggacagcgtcctcgtggccaactctcccctcaaaatcattgtcaaagaaaacctatttgtaacagaggtttttacatttgcaaaccttttgatgaagaactgttgttttgttctgtgaaacactatatttagattaacggaatttttctaaaaatcaggaaaattagttactaaaaattgctgatcatttttgtttcattatttttgttatttcaaatgtataagctctgggattctttttggagcaatacctacaaagtcaggcaccagaatgtgcctcagagctgtgacatttcaacatgatggttttggtttggtttggttttgtgtcctttttatttgcagttttttctgttgcaacagaaagtggcttggaagtcttaggtggtatgtaacaaattctttttaaaaattttaaagcagtatttaagtattcttaaatgtgtaaattcatttaatgttttacttctaatttcttgtatcttggctgtctggttttattgcatttttaaaaaaactgaactattatgtattgtaatgaatgatgtgaattctgaactgagacagataattgtattgctgtccaacaggggttgggaggggcattttgtagggtttgtataatttctagagttcgaaaggggtaatataaaaatgtgctcgtgtgtttagcctacgtttttctcatgcctccattaccagttgcaattgtgtatctaagacctccaagcttgtttttaaaacaaaacaaaaaacctttctctattatctcagaaatataaatactgttatttttaatattaagaaattcaatataacttttaacacacactgtggaacattaaaccgtataaaaatgtagttataactatttttaattccaaggtgttgtttgcttttttcttttaaatattttcttaatattttgtcagattaactagatgaataaataaatctagtattaaccgcattatgaattaaataattttgatttaatgaaagggataatatgatttccagtgtttactgtagtgtatcttgtacagataacatgtatttttaaaggaaaaaaaacggaattgaagctattttttcttgcatttctaattgacctgagggacattccgtttgaaatgtactgaagttacagtttctggttttttctccttatttttcttataatgcttgaaatgtctaactattaaaaaagacaattggaaaatgttatgcatggggtttttaagaaaacaaagtgttctttttatttgactgacaattcattttacactctatataataaaatctccacaaggcatcttgtgggcaaagtc

SEQ ID NO: 443936 - DNA, 3358 bp, Homo sapiens
ggcgactttccttttccggctacgggtccccaagcggagcgggaggccggaccggggagccgagcggcggcgtcggcggcgtcggcggcggcggcgacggcggcgggggcggtaatggcggagctggtgcaggggcagagcgctcctgtggggatgaaggccgagggcttcgtggatgccctgcaccgggtccggcagattgctgctaaaattgattcaattcctcacttgaataattccacacctctagtggacccctcagtatatggatacggagtacaaaaacggcccttggatgatggagtaggtaaccagttaggggccttggtacatcaaaggacggtaataacggaagaattcaaagtgcctgacaaaatggttggatttattatcggcaggggaggtgagcagatttcacggattcaagcagaatctggttgcaaaattcagattgcttcagagagttctgggattccagagaggccctgtgtacttaccggaaccccagaaagtattgaacaagccaaacggctcctgggacagattgtggaccgctgtcgaaatggacctggctttcataatgacatagacagcaacagcacaatccaggagattctcattcccgcatctaaagtgggtctggtcatcggcagaggaggggaaacaatcaagcagttgcaggagcggacaggggtgaagatggtcatgatccaggatggcccattgcccacgggagcagacaagcctcttcgtatcactggagatgcatttaaagtacagcaagcaagagaaatggtactagagattatccgagaaaaagaccaagctgactttcggggtgtacgcggcgatttcaactctcgaatgggaggaggcagtatagaggtatctgtgcctaggtttgctgtggggattgtaataggaagaaacggggaaatgatcaaaaagatccagaatgatgctggtgtgaggattcagtttaaaccagatgatgggattagtccagaaagagctgcccaggtcatgggccctccggatcggtgtcagcatgcagcgcatatcatcagcgagctgattcttacagcccaggaaagagacggctttggaggcctggcagcagccagaggaagaggtcgtggccgtggcgactggagcgtgggagcccctggtggcgtccaggagataacatacacggtgccagccgataagtgtggcctcgtcataggcaaagggggtgagaacatcaaaagcatcaaccagcagtcaggggcgcacgtggagcttcagaggaacccccctcccaacagcgaccccaacctgcggagattcaccatcaggggggttccccagcagatcgaggtggccaggcagctcatagatgagaaagttggcgggaccaatctcggagcacctggagccttcggacagagtccattcagccagccacctgccccacctcatcaaaatacctttcctccaaggagctccgggtgcttcccaaacatggctgccaaggtgaatgggaacccccacagcacccctgtgagtggtcctccggcctttctgacccagggctggggcagcacctaccaggcgtggcagcagcccacacagcaggtcccaagccagcagagccagccgcagagcagccagcccaactacagcaaggcctgggaagactattacaaaaaacagagtcacgccgccagcgctgctcctcaggccagctccccaccggactacacaatggcctgggcagaatattacagacagcaggtcgctttctacggacagacgttagggcaggcgcaggcccacagccaggagcagtaggacagcgtcctcgtggccaactctcccctcaaaatcattgtcaaagaaaacctatttgtaacagaggtttttacatttgcaaaccttttgatgaagaactgttgttttgttctgtgaaacactatatttagattaacggaatttttctaaaaatcaggaaaattagttactaaaaattgctgatcatttttgtttcattatttttgttatttcaaatgtataagctctgggattctttttggagcaatacctacaaagtcaggcaccagaatgtgcctcagagctgtgacatttcaacatgatggttttggtttggtttggttttgtgtcctttttatttgcagttttttctgttgcaacagaaagtggcttggaagtcttaggtggtatgtaacaaattctttttaaaaattttaaagcagtatttaagtattcttaaatgtgtaaattcatttaatgttttacttctaatttcttgtatcttggctgtctggttttattgcatttttaaaaaaactgaactattatgtattgtaatgaatgatgtgaattctgaactgagacagataattgtattgctgtccaacaggggttgggaggggcattttgtagggtttgtataatttctagagttcgaaaggggtaatataaaaatgtgctcgtgtgtttagcctacgtttttctcatgcctccattaccagttgcaattgtgtatctaagacctccaagcttgtttttaaaacaaaacaaaaaacctttctctattatctcagaaatataaatactgttatttttaatattaagaaattcaatataacttttaacacacactgtggaacattaaaccgtataaaaatgtagttataactatttttaattccaaggtgttgtttgcttttttcttttaaatattttcttaatattttgtcagattaactagatgaataaataaatctagtattaaccgcattatgaattaaataattttgatttaatgaaagggataatatgatttccagtgtttactgtagtgtatcttgtacagataacatgtatttttaaaggaaaaaaaacggaattgaagctattttttcttgcatttctaattgacctgagggacattccgtttgaaatgtactgaagttacagtttctggttttttctccttatttttcttataatgcttgaaatgtctaactattaaaaaagacaattggaaaatgttatgcatggggtttttaagaaaacaaagtgttctttttatttgactgacaattcattttacactctatataataaaatctccacaaggcatcttgtgggcaaagtccaaaaaaaaaaaagaaaacaacagtgttgggggcacctgagaccctgcaaaaaaggctttttggaaccatctcgggggggcgcgcgcccacgttgagacgcaaacggggtacaacgacgggtcccagaaaaacccggggcagaaaagggggggagtctccacaaaaaaaggcgcgggcaacggcgaggttgaaac

SEQ ID NO: 443937 - DNA, 2900 bp, Homo sapiens
ggcgactttccttttccggctacgggtccccaagcggagcgggaggccggaccggggagccgagcggcggcgtcggcggcgtcggcggcggcggcgacggcggcgggggcggtaatggcggagctggtgcaggggcagagcgctcctgtggggatgaaggccgagggcttcgtggatgccctgcaccgggtccggcagattgctgctaaaattgattcaattcctcacttgaataattccacacctctagtggacccctcagtatatggatacggagtacaaaaacggcccttggatgatggagtaggtaaccagttaggggccttggtacatcaaaggacggtaataacggaagaattcaaagtgcctgacaaaatggttggatttattatcggcaggggaggtgagcagatttcacggattcaagcagaatctggttgcaaaattcagattgcttcagagagttctgggattccagagaggccctgtgtacttaccggaaccccagaaagtattgaacaagccaaacggctcctgggacagattgtggaccgctgtcgaaatggacctggctttcataatgacatagacagcaacagcacaatccaggagattctcattcccgcatctaaagtgggtctggtcatcggcagaggaggggaaacaatcaagcagttgcaggagcggacaggggtgaagatggtcatgatccaggatggcccattgcccacgggagcagacaagcctcttcgtatcactggagatgcatttaaagtacagcaagcaagagaaatggtactagagattatccgagaaaaagaccaagctgactttcggggtgtacgcggcgatttcaactctcgaatgggaggaggcagtatagaggtatctgtgcctaggtttgctgtggggattgtaataggaagaaacggggaaatgatcaaaaagatccagaatgatgctggtgtgaggattcagtttaaaccagatgatgggattagtccagaaagagctgcccaggtcatgggccctccggatcggtgtcagcatgcagcgcatatcatcagcgagctgattcttacagcccaggaaagagacggctttggaggcctggcagcagccagaggaagaggtcgtggccgtggcgactggagccttcggacagagtccattcagccagccacctgccccacctcatcaaaatacctttcctccaaggagctccgggtgcttcccaaacatggctgccaaggtgaatgggaacccccacagcacccctgtgagtggtcctccggcctttctgacccagggctggggcagcacctaccaggcgtggcagcagcccacacagcaggtcccaagccagcagagccagccgcagagcagccagcccaactacagcaaggcctgggaagactattacaaaaaacagagtcacgccgccagcgctgctcctcaggccagctccccaccggactacacaatggcctgggcagaatattacagacagcaggtcgctttctacggacagacgttagggcaggcgcaggcccacagccaggagcagtaggacagcgtcctcgtggccaactctcccctcaaaatcattgtcaaagaaaacctatttgtaacagaggtttttacatttgcaaaccttttgatgaagaactgttgttttgttctgtgaaacactatatttagattaacggaatttttctaaaaatcaggaaaattagttactaaaaattgctgatcatttttgtttcattatttttgttatttcaaatgtataagctctgggattctttttggagcaatacctacaaagtcaggcaccagaatgtgcctcagagctgtgacatttcaacatgatggttttggtttggtttggttttgtgtcctttttatttgcagttttttctgttgcaacagaaagtggcttggaagtcttaggtggtatgtaacaaattctttttaaaaattttaaagcagtatttaagtattcttaaatgtgtaaattcatttaatgttttacttctaatttcttgtatcttggctgtctggttttattgcatttttaaaaaaactgaactattatgtattgtaatgaatgatgtgaattctgaactgagacagataattgtattgctgtccaacaggggttgggaggggcattttgtagggtttgtataatttctagagttcgaaaggggtaatataaaaatgtgctcgtgtgtttagcctacgtttttctcatgcctccattaccagttgcaattgtgtatctaagacctccaagcttgtttttaaaacaaaacaaaaaacctttctctattatctcagaaatataaatactgttatttttaatattaagaaattcaatataacttttaacacacactgtggaacattaaaccgtataaaaatgtagttataactatttttaattccaaggtgttgtttgcttttttcttttaaatattttcttaatattttgtcagattaactagatgaataaataaatctagtattaaccgcattatgaattaaataattttgatttaatgaaagggataatatgatttccagtgtttactgtagtgtatcttgtacagataacatgtatttttaaaggaaaaaaaacggaattgaagctattttttcttgcatttctaattgacctgagggacattccgtttgaaatgtactgaagttacagtttctggttttttctccttatttttcttataatgcttgaaatgtctaactattaaaaaagacaattggaaaatgttatgcatggggtttttaagaaaacaaagtgttctttttatttgactgacaattcattttacactctatataataaaatctccacaaggcatcttgtgggcaaagtc

SEQ ID NO: 443938 - DNA, 3104 bp, Homo sapiens
ggcgactttccttttccggctacgggtccccaagcggagcgggaggccggaccggggagccgagcggcggcgtcggcggcgtcggcggcggcggcgacggcggcgggggcggtaatggcggagctggtgcaggggcagagcgctcctgtggggatgaaggccgagggcttcgtggatgccctgcaccgggtccggcagattgctgctaaaattgattcaattcctcacttgaataattccacacctctagtggacccctcagtatatggatacggagtacaaaaacggcccttggatgatggagtaggtaaccagttaggggccttggtacatcaaaggacggtaataacggaagaattcaaagtgcctgacaaaatggttggatttattatcggcaggggaggtgagcagatttcacggattcaagcagaatctggttgcaaaattcagattgcttcagagagttctgggattccagagaggccctgtgtacttaccggaaccccagaaagtattgaacaagccaaacggctcctgggacagattgtggaccgctgtcgaaatggacctggctttcataatgacatagacagcaacagcacaatccaggagattctcattcccgcatctaaagtgggtctggtcatcggcagaggaggggaaacaatcaagcagttgcaggagcggacaggggtgaagatggtcatgatccaggatggcccattgcccacgggagcagacaagcctcttcgtatcactggagatgcatttaaagtacagcaagcaagagaaatggtactagagattatccgagaaaaagaccaagctgactttcggggtgtacgcggcgatttcaactctcgaatgggaggaggcagtatagaggtatctgtgcctaggtttgctgtggggattgtaataggaagaaacggggaaatgatcaaaaagatccagaatgatgctggtgtgaggattcagtttaaaccagatgatgggattagtccagaaagagctgcccaggtcatgggccctccggatcggtgtcagcatgcagcgcatatcatcagcgagctgattcttacagcccaggaaagagacggctttggaggcctggcagcagccagaggaagaggtcgtggccgtggcgactggagcgtgggagcccctggtggcgtccaggagataacatacacggtgccagccgataagtgtggcctcgtcataggcaaagggggtgagaacatcaaaagcatcaaccagcagtcaggggcgcacgtggagcttcagaggaacccccctcccaacagcgaccccaacctgcggagattcaccatcaggggggttccccagcagatcgaggtggccaggcagctcatagatgagaaagttggcgggaccaatctcggagcacctggagccttcggacagagtccattcagccagccacctgccccacctcatcaaaatacctttcctccaaggagctccgggtgcttcccaaacatggctgccaaggtgaatgggaacccccacagcacccctgtgagtggtcctccggcctttctgacccagggctggggcagcacctaccaggcgtggcagcagcccacacagcaggtcccaagccagcagagccagccgcagagcagccagcccaactacagcaaggcctgggaagactattacaaaaaacagagtcacgccgccagcgctgctcctcaggccagctccccaccggactacacaatggcctgggcagaatattacagacagcaggtcgctttctacggacagacgttagggcaggcgcaggcccacagccaggagcagtaggacagcgtcctcgtggccaactctcccctcaaaatcattgtcaaagaaaacctatttgtaacagaggtttttacatttgcaaaccttttgatgaagaactgttgttttgttctgtgaaacactatatttagattaacggaatttttctaaaaatcaggaaaattactctgggattctttttggagcaatacctacaaagtcaggcaccagaatgtgcctcagagctgtgacatttcaacatgatggttttggtttggtttggttttgtgtcctttttatttgcagttttttctgttgcaacagaaagtggcttggaagtcttaggtggtatgtaacaaattctttttaaaaattttaaagcagtatttaagtattcttaaatgtgtaaattcatttaatgttttacttctaatttcttgtatcttggctgtctggttttattgcatttttaaaaaaactgaactattatgtattgtaatgaatgatgtgaattctgaactgagacagataattgtattgctgtccaacaggggttgggaggggcattttgtagggtttgtataatttctagagttcgaaaggggtaatataaaaatgtgctcgtgtgtttagcctacgtttttctcatgcctccattaccagttgcaattgtgtatctaagacctccaagcttgtttttaaaacaaaacaaaaaacctttctctattatctcagaaatataaatactgttatttttaatattaagaaattcaatataacttttaacacacactgtggaacattaaaccgtataaaaatgtagttataactatttttaattccaaggtgttgtttgcttttttcttttaaatattttcttaatattttgtcagattaactagatgaataaataaatctagtattaaccgcattatgaattaaataattttgatttaatgaaagggataatatgatttccagtgtttactgtagtgtatcttgtacagataacatgtatttttaaaggaaaaaaaacggaattgaagctattttttcttgcatttctaattgacctgagggacattccgtttgaaatgtactgaagttacagtttctggttttttctccttatttttcttataatgcttgaaatgtctaactattaaaaaagacaattggaaaatgttatgcatggggtttttaagaaaacaaagtgttctttttatttgactgacaattcattttacactctatataataaaatctccacaaggcatcttgtgggcaaagtc

SEQ ID NO: 443939 - DNA, 1585 bp, Homo sapiens
tgtgaggagcccgtaaggcctgactgcttttgtgttcttcgcacaggccagcagagccagccgcagagcagccagcccaactacagcaaggcctgggaagactattacaaaaaacagagtcacgccgccagcgctgctcctcaggccagctccccaccggactacacaatggcctgggcagaatattacagacagcaggtcgctttctacggacagacgttagggcaggcgcaggcccacagccaggagcagtaggacagcgtcctcgtggccaactctcccctcaaaatcattgtcaaagaaaacctatttgtaacagaggtttttacatttgcaaaccttttgatgaagaactgttgttttgttctgtgaaacactatatttagattaacggaatttttctaaaaatcaggaaaattagttactaaaaattgctgatcatttttgtttcattatttttgttatttcaaatgtataagctctgggattctttttggagcaatacctacaaagtcaggcaccagaatgtgcctcagagctgtgacatttcaacatgatggttttggtttggtttggttttgtgtcctttttatttgcagttttttctgttgcaacagaaagtggcttggaagtcttaggtggtatgtaacaaattctttttaaaaattttaaagcagtatttaagtattcttaaatgtgtaaattcatttaatgttttacttctaatttcttgtatcttggctgtctggttttattgcatttttaaaaaaactgaactattatgtattgtaatgaatgatgtgaattctgaactgagacagataattgtattgctgtccaacaggggttgggaggggcattttgtagggtttgtataatttctagagttcgaaaggggtaatataaaaatgtgctcgtgtgtttagcctacgtttttctcatgcctccattaccagttgcaattgtgtatctaagacctccaagcttgtttttaaaacaaaacaaaaaacctttctctattatctcagaaatataaatactgttatttttaatattaagaaattcaatataacttttaacacacactgtggaacattaaaccgtataaaaatgtagttataactatttttaattccaaggtgttgtttgcttttttcttttaaatattttcttaatattttgtcagattaactagatgaataaataaatctagtattaaccgcattatgaattaaataattttgatttaatgaaagggataatatgatttccagtgtttactgtagtgtatcttgtacagataacatgtatttttaaaggaaaaaaaacggaattgaagctattttttcttgcatttctaattgacctgagggacattccgtttgaaatgtactgaagttacagtttctggttttttctccttatttttcttataatgcttgaaatgtctaactattaaaaaagacaattggaaaatgttatgcatggggtttttaagaaaacaaagtgttctttttatttgactgacaattcattttacactctatataataaaatctccacaaggcatcttgtgggcaaagtc

SEQ ID NO: 443940 - DNA, 2469 bp, Homo sapiens
ggcgactttccttttccggctacgggtccccaagcggagcgggaggccggaccggggagccgagcggcggcgtcggcggcgtcggcggcggcggcgacggcggcgggggcggtaatggcggagctggtgcaggggcagagcgctcctgtggggatgaaggccgagggcttcgtggatgccctgcaccgggtccggcagattgctgctaaaattgattcaattcctcacttgaataattccacacctctagtggacccctcagtatatggatacggagtacaaaaacggcccttggatgatggagtaggtaaccagttaggggccttggtacatcaaaggacggtaataacggaagaattcaaagtgcctgacaaaatggttggatttattatcggcaggggaggtgagcagatttcacggattcaagcagaatctggttgcaaaattcagattgcttcagagagttctgggattccagagaggccctgtgtacttaccggaaccccagaaagtattgaacaagccaaacggctcctgggacagattgtggaccgctgtcgaaatggacctggctttcataatgacatagacagcaacagcacaatccaggagattctcattcccgcatctaaagtgggtctggtcatcggcagaggaggggaaacaatcaagcagttgcaggagcggacaggggtgaagatggtcatgatccaggatggcccattgcccacgggagcagacaagcctcttcgtatcactggagatgcatttaaagtacagcaagcaagagaaatggtactagagattatccgagaaaaagaccaagctgactttcggggtgtacgcggcgatttcaactctcgaatgggaggaggcagtatagaggtatgcttaaattacaggttagtaggcaaatgagatgaggactaaagttgtaggtcacacttttgttagctctttaaccctgagcaagttagttaagttttgtctcaaaaccttaagaattctctggctccttagggtgggtgtgagggtggactggaacagcagcagcctgcagtgagggagctggctacacttcagggcgtggggccatttccctcggttttgaagctttgctttagaggttaaccagttgcccaggtaaaaaccaaagttcaggttttcttggtgatgtatatcatgattctgtcaaactcagcagcctgtgtttattgatgaggttgcaatggggtcagaatctatcctagagaatgaaattttgttgtatgcgacaacatggatgaaccttacaaacagtatgctcagtgcaataagacagatacagaacaaatattgtacgattccacttatctgaggcacctagaagaggcagatgcatacaggcagaaagtagcaaaagctgtcagatgctgggggaaggaggagtattgtttaatgggtacagagttgttggggatgatgaaatgttttggatatggatggtggtgatggttacacaacattgtgaatgtatgtaatgtcattgaattgtgtacttacaagtggttaaatgataaatattatgtatattttagccacaataaaagaaaaatgaaggaaaaaaatgcattttaaagaaccgctagggctatgcatggtggttcacgcctgtaatcccagtgctttgagaggcttaggcaggagtactgcttgaggccaggagattgagatctgtctgggcaatatagccagacaccacctctaccaaaacaaaaaaaaaagtattttaaattagcctagtgtggcacattcctatagtcccagctgttctagaggctaaggagggaggctcactcctcccaggagatcgaggctgtagtgtgctacagttaacaccactgtaacccagcctggataacaagtccagcccaggtaacagtgtgtatggtgtgtttattggaaggcaaaattactatttttcatcttttatctataaggcttattcatttttataaccattttgatcaaatctcaaattggatgcatttaacagttaagaatgcagttcaggccgggcatggtggctcacgcctgtaatcccagcactttgggaggcagaggcgggtggatcacaaggtcaggagttcgagaccagcctggccaatgtggtgaaaccctgtctctactaaaaatacaaaaattagccgggtgtggtgacgcgtgcctgtagtcccagctactcgggaggctgaggcaggagaatggcgtgaacctgggaggcggtgcttgcagtgagcgtagatggtgccactgtactccagcctgggcgacagagcaagactctgtctcaaaaaaaaagaaaaaaaaaagaacgcagttcaaccacagtattattcctaaaagggaaaaatgtcctttattatatcatttccaggaatgcactataataaaaactaagttgcgtgttaaaaaaaaatgtgtcctggg

SEQ ID NO: 443941 - DNA, 552 bp, Homo sapiens
aaagaggaaaacatggcaggctcttctctggaagctgttgccatagctctgctctgactcccttggcttttttaaagtcaagctttgttttagttctttaatgatacattttttaaatggctataattgcataagaattgagcattgacctgaaacatgcaaaacaatataatgacacacattttcctatcacccacatcactccaaaagagtccctgcagctggcagtattcctgttgccccttttggcaccgcgggtgagaatattgattgggaatcagattaatccttgtttccttctaacgttgggcttttttctaatcctgtctctcacctggctcctcagatgatgggattagtccagaaagagctgcccaggtcatgggccctccggatcggtgtcagcatgcagcgcatatcatcagcgagctgattcttacagcccaggtgggtccagctctgcagagtgtgagtgtttgggctgcagaagtggaaagtgctacccggggctctcggtgcagcaccatagagctgtcaccctgaggcgtctca

SEQ ID NO: 443942 - DNA, 2533 bp, Homo sapiens
ggcgactttccttttccggctacgggtccccaagcggagcgggaggccggaccggggagccgagcggcggcgtcggcggcgtcggcggcggcggcgacggcggcgggggcggtaatggcggagctggtgcaggggcagagcgctcctgtggggatgaaggccgagggcttcgtggatgccctgcaccgggtccggcagattgctgctaaaattgattcaattcctcacttgaataattccacacctctagtggacccctcagtatatggatacggagtacaaaaacggcccttggatgatggagcgatgggatcacactctgctcaggctagagtgcagtggcgccgttgaactcctgggctcgagtgatcctcccacctcggcttcccaagtagctgggactacaggcatgagccaccatgcctcctataggtaaccagttaggggccttggtacatcaaaggacggtaataacggaagaattcaaagtgcctgacaaaatggttggatttattatcggcaggggaggtgagcagatttcacggattcaagcagaatctggttgcaaaattcagattgcttcagagagttctgggattccagagaggccctgtgtacttaccggaaccccagaaagtattgaacaagccaaacggctcctgggacagattgtggaccgctgtcgaaatggacctggctttcataatgacatagacagcaacagcacaatccaggagattctcattcccgcatctaaagtgggtctggtcatcggcagaggaggggaaacaatcaagcagttgcaggagcggacaggggtgaagatggtcatgatccaggatggcccattgcccacgggagcagacaagcctcttcgtatcactggagatgcatttaaagtacagcaagcaagagaaatggtactagagattatccgagaaaaagaccaagctgactttcggggtgtacgcggcgatttcaactctcgaatgggaggaggcagtatagaggtatctgtgcctaggtttgctgtggggattgtaataggaagaaacggggaaatgatcaaaaagatccagaatgatgctggtgtgaggattcagtttaaaccagacaatggcctgggcagaatattacagacagcaggtcgctttctacggacagacgttagggcaggcgcaggcccacagccaggagcagtaggacagcgtcctcgtggccaactctcccctcaaaatcattgtcaaagaaaacctatttgtaacagaggtttttacatttgcaaaccttttgatgaagaactgttgttttgttctgtgaaacactatatttagattaacggaatttttctaaaaatcaggaaaattagttactaaaaattgctgatcatttttgtttcattatttttgttatttcaaatgtataagctctgggattctttttggagcaatacctacaaagtcaggcaccagaatgtgcctcagagctgtgacatttcaacatgatggttttggtttggtttggttttgtgtcctttttatttgcagttttttctgttgcaacagaaagtggcttggaagtcttaggtggtatgtaacaaattctttttaaaaattttaaagcagtatttaagtattcttaaatgtgtaaattcatttaatgttttacttctaatttcttgtatcttggctgtctggttttattgcatttttaaaaaaactgaactattatgtattgtaatgaatgatgtgaattctgaactgagacagataattgtattgctgtccaacaggggttgggaggggcattttgtagggtttgtataatttctagagttcgaaaggggtaatataaaaatgtgctcgtgtgtttagcctacgtttttctcatgcctccattaccagttgcaattgtgtatctaagacctccaagcttgtttttaaaacaaaacaaaaaacctttctctattatctcagaaatataaatactgttatttttaatattaagaaattcaatataacttttaacacacactgtggaacattaaaccgtataaaaatgtagttataactatttttaattccaaggtgttgtttgcttttttcttttaaatattttcttaatattttgtcagattaactagatgaataaataaatctagtattaaccgcattatgaattaaataattttgatttaatgaaagggataatatgatttccagtgtttactgtagtgtatcttgtacagataacatgtatttttaaaggaaaaaaaacggaattgaagctattttttcttgcatttctaattgacctgagggacattccgtttgaaatgtactgaagttacagtttctggttttttctccttatttttcttataatgcttgaaatgtctaactattaaaaaagacaattggaaaatgttatgcatggggtttttaagaaaacaaagtgttctttttatttgactgacaattcattttacactctatataataaaatctccacaaggcatcttgtgggcaaagtc

SEQ ID NO: 443943 - DNA, 3288 bp, Homo sapiens
ggcgactttccttttccggctacgggtccccaagcggagcgggaggccggaccggggagccgagcggcggcgtcggcggcgtcggcggcggcggcgacggcggcgggggcggtaatggcggagctggtgcaggggcagagcgctcctgtggggatgaaggccgagggcttcgtggatgccctgcaccgggtccggcagattgctgctaaaattgattcaattcctcacttgaataattccacacctctagtggacccctcagtatatggatacggagtacaaaaacggcccttggatgatggagcgatgggatcacactctgctcaggctagagtgcagtggcgccgttgaactcctgggctcgagtgatcctcccacctcggcttcccaagtagctgggactacaggcatgagccaccatgcctcctataggtaaccagttaggggccttggtacatcaaaggacggtaataacggaagaattcaaagtgcctgacaaaatggttggatttattatcggcaggggaggtgagcagatttcacggattcaagcagaatctggttgcaaaattcagattgcttcagagagttctgggattccagagaggccctgtgtacttaccggaaccccagaaagtattgaacaagccaaacggctcctgggacagattgtggaccgctgtcgaaatggacctggctttcataatgacatagacagcaacagcacaatccaggagattctcattcccgcatctaaagtgggtctggtcatcggcagaggaggggaaacaatcaagcagttgcaggagcggacaggggtgaagatggtcatgatccaggatggcccattgcccacgggagcagacaagcctcttcgtatcactggagatgcatttaaagtacagcaagcaagagaaatggtactagagattatccgagaaaaagaccaagctgactttcggggtgtacgcggcgatttcaactctcgaatgggaggaggcagtatagaggtatctgtgcctaggtttgctgtggggattgtaataggaagaaacggggaaatgatcaaaaagatccagaatgatgctggtgtgaggattcagtttaaaccagatgatgggattagtccagaaagagctgcccaggtcatgggccctccggatcggtgtcagcatgcagcgcatatcatcagcgagctgattcttacagcccaggaaagagacggctttggaggcctggcagcagccagaggaagaggtcgtggccgtggcgactggagcgtgggagcccctggtggcgtccaggagataacatacacggtgccagccgataagtgtggcctcgtcataggcaaagggggtgagaacatcaaaagcatcaaccagcagtcaggggcgcacgtggagcttcagaggaacccccctcccaacagcgaccccaacctgcggagattcaccatcaggggggttccccagcagatcgaggtggccaggcagctcatagatgagaaagttggcgggaccaatctcggagcacctggagccttcggacagagtccattcagccagccacctgccccacctcatcaaaatacctttcctccaaggagctccgggtgcttcccaaacatggctgccaaggtgaatgggaacccccacagcacccctgtgagtggtcctccggcctttctgacccagggctggggcagcacctaccaggcgtggcagcagcccacacagcaggtcccaagccagcagagccagccgcagagcagccagcccaactacagcaaggcctgggaagactattacaaaaaacagagtcacgccgccagcgctgctcctcaggccagctccccaccggactacacaatggcctgggcagaatattacagacagcaggtcgctttctacggacagacgttagggcaggcgcaggcccacagccaggagcagtaggacagcgtcctcgtggccaactctcccctcaaaatcattgtcaaagaaaacctatttgtaacagaggtttttacatttgcaaaccttttgatgaagaactgttgttttgttctgtgaaacactatatttagattaacggaatttttctaaaaatcaggaaaattagttactaaaaattgctgatcatttttgtttcattatttttgttatttcaaatgtataagctctgggattctttttggagcaatacctacaaagtcaggcaccagaatgtgcctcagagctgtgacatttcaacatgatggttttggtttggtttggttttgtgtcctttttatttgcagttttttctgttgcaacagaaagtggcttggaagtcttaggtggtatgtaacaaattctttttaaaaattttaaagcagtatttaagtattcttaaatgtgtaaattcatttaatgttttacttctaatttcttgtatcttggctgtctggttttattgcatttttaaaaaaactgaactattatgtattgtaatgaatgatgtgaattctgaactgagacagataattgtattgctgtccaacaggggttgggaggggcattttgtagggtttgtataatttctagagttcgaaaggggtaatataaaaatgtgctcgtgtgtttagcctacgtttttctcatgcctccattaccagttgcaattgtgtatctaagacctccaagcttgtttttaaaacaaaacaaaaaacctttctctattatctcagaaatataaatactgttatttttaatattaagaaattcaatataacttttaacacacactgtggaacattaaaccgtataaaaatgtagttataactatttttaattccaaggtgttgtttgcttttttcttttaaatattttcttaatattttgtcagattaactagatgaataaataaatctagtattaaccgcattatgaattaaataattttgatttaatgaaagggataatatgatttccagtgtttactgtagtgtatcttgtacagataacatgtatttttaaaggaaaaaaaacggaattgaagctattttttcttgcatttctaattgacctgagggacattccgtttgaaatgtactgaagttacagtttctggttttttctccttatttttcttataatgcttgaaatgtctaactattaaaaaagacaattggaaaatgttatgcatggggtttttaagaaaacaaagtgttctttttatttgactgacaattcattttacactctatataataaaatctccacaaggcatcttgtgggcaaagtc

SEQ ID NO: 443944 - DNA, 3187 bp, Homo sapiens
ggcgactttccttttccggctacgggtccccaagcggagcgggaggccggaccggggagccgagcggcggcgtcggcggcgtcggcggcggcggcgacggcggcgggggcggtaatggcggagctggtgcaggggcagagcgctcctgtggggatgaaggccgagggcttcgtggatgccctgcaccgggtccggcagattgctgctaaaattgattcaattcctcacttgaataattccacacctctagtggacccctcagtatatggatacggagtacaaaaacggcccttggatgatggagtaggtaaccagttaggggccttggtacatcaaaggacggtaataacggaagaattcaaagtgcctgacaaaatggttggatttattatcggcaggggaggtgagcagatttcacggattcaagcagaatctggttgcaaaattcagattgcttcagagagttctgggattccagagaggccctgtgtacttaccggaaccccagaaagtattgaacaagccaaacggctcctgggacagattgtggaccgctgtcgaaatggacctggctttcataatgacatagacagcaacagcacaatccaggagattctcattcccgcatctaaagtgggtctggtcatcggcagaggaggggaaacaatcaagcagttgcaggagcggacaggggtgaagatggtcatgatccaggatggcccattgcccacgggagcagacaagcctcttcgtatcactggagatgcatttaaagtacagcaagcaagagaaatggtactagagattatccgagaaaaagaccaagctgactttcggggtgtacgcggcgatttcaactctcgaatgggaggaggcagtatagaggtatctgtgcctaggtttgctgtggggattgtaataggaagaaacggggaaatgatcaaaaagatccagaatgatgctggtgtgaggattcagtttaaaccagatgatgggattagtccagaaagagctgcccaggtcatgggccctccggatcggtgtcagcatgcagcgcatatcatcagcgagctgattcttacagcccaggaaagagacggctttggaggcctggcagcagccagaggaagaggtcgtggccgtggcgactggagcgtgggagcccctggtggcgtccaggagataacatacacggtgccagccgataagtgtggcctcgtcataggcaaagggggtgagaacatcaaaagcatcaaccagcagtcaggggcgcacgtggagcttcagaggaacccccctcccaacagcgaccccaacctgcggagattcaccatcaggggggttccccagcagatcgaggtggccaggcagctcatagatgagaaagttggcgggaccaatctcggagcacctggagccttcggacagagtccattcagccagccacctgccccacctcatcaaaatacctttcctccaaggagctccgggtgcttcccaaacatggctgccaaggtgaatgggaacccccacagcacccctgtgagtggtcctccggcctttctgacccagggctggggcagcacctaccaggcgtggcagcagcccacacagcaggtcccaagccagcagagccagccgcagagcagccagcccaactacagcaaggcctgggaagactattacaaaaaacagagtcacgccgccagcgctgctcctcaggccagctccccaccggactacacaatggcctgggcagaatattacagacagcaggtcgctttctacggacagacgttagggcaggcgcaggcccacagccaggagcagtaggacagcgtcctcgtggccaactctcccctcaaaatcattgtcaaagaaaacctatttgtaacagaggtttttacatttgcaaaccttttgatgaagaactgttgttttgttctgtgaaacactatatttagattaacggaatttttctaaaaatcaggaaaattagttactaaaaattgctgatcatttttgtttcattatttttgttatttcaaatgtataagctctgggattctttttggagcaatacctacaaagtcaggcaccagaatgtgcctcagagctgtgacatttcaacatgatggttttggtttggtttggttttgtgtcctttttatttgcagttttttctgttgcaacagaaagtggcttggaagtcttaggtggtatgtaacaaattctttttaaaaattttaaagcagtatttaagtattcttaaatgtgtaaattcatttaatgttttacttctaatttcttgtatcttggctgtctggttttattgcatttttaaaaaaactgaactattatgtattgtaatgaatgatgtgaattctgaactgagacagataattgtattgctgtccaacaggggttgggaggggcattttgtagggtttgtataatttctagagttcgaaaggggtaatataaaaatgtgctcgtgtgtttagcctacgtttttctcatgcctccattaccagttgcaattgtgtatctaagacctccaagcttgtttttaaaacaaaacaaaaaacctttctctattatctcagaaatataaatactgttatttttaatattaagaaattcaatataacttttaacacacactgtggaacattaaaccgtataaaaatgtagttataactatttttaattccaaggtgttgtttgcttttttcttttaaatattttcttaatattttgtcagattaactagatgaataaataaatctagtattaaccgcattatgaattaaataattttgatttaatgaaagggataatatgatttccagtgtttactgtagtgtatcttgtacagataacatgtatttttaaaggaaaaaaaacggaattgaagctattttttcttgcatttctaattgacctgagggacattccgtttgaaatgtactgaagttacagtttctggttttttctccttatttttcttataatgcttgaaatgtctaactattaaaaaagacaattggaaaatgttatgcatggggtttttaagaaaacaaagtgttctttttatttgactgacaattcattttacactctatataataaaatctccacaaggcatcttgtgggcaaagtcaaaaaaaaaaaaaagacagaaaag

SEQ ID NO: 443945 - DNA, 3922 bp, Homo sapiens
  misc_feature (3540)..(3540): n is a, c, g, or t
  misc_feature (3637)..(3637): n is a, c, g, or t
  misc_feature (3866)..(3866): n is a, c, g, or t
  misc_feature (3911)..(3911): n is a, c, g, or t
ggcgactttccttttccggctacgggtccccaagcggagcgggaggccggaccggggagccgagcggcggcgtcggcggcgtcggcggcggcggcgacggcggcgggggcggtaatggcggagctggtgcaggggcagagcgctcctgtggggatgaaggccgagggcttcgtggatgccctgcaccgggtccggcagattgctgctaaaattgattcaattcctcacttgaataattccacacctctagtggacccctcagtatatggatacggagtacaaaaacggcccttggatgatggagtaggtaaccagttaggggccttggtacatcaaaggacggtaataacggaagaattcaaagtgcctgacaaaatggttggatttattatcggcaggggaggtgagcagatttcacggattcaagcagaatctggttgcaaaattcagattgcttcagagagttctgggattccagagaggccctgtgtacttaccggaaccccagaaagtattgaacaagccaaacggctcctgggacagattgtggaccgctgtcgaaatggacctggctttcataatgacatagacagcaacagcacaatccaggagattctcattcccgcatctaaagtgggtctggtcatcggcagaggaggggaaacaatcaagcagttgcaggagcggacaggggtgaagatggtcatgatccaggatggcccattgcccacgggagcagacaagcctcttcgtatcactggagatgcatttaaagtacagcaagcaagagaaatggtactagagattatccgagaaaaagaccaagctgactttcggggtgtacgcggcgatttcaactctcgaatgggaggaggcagtatagaggtatctgtgcctaggtttgctgtggggattgtaataggaagaaacggggaaatgatcaaaaagatccagaatgatgctggtgtgaggattcagtttaaaccagatgatgggattagtccagaaagagctgcccaggtcatgggccctccggatcggtgtcagcatgcagcgcatatcatcagcgagctgattcttacagcccaggaaagagacggctttggaggcctggcagcagccagaggaagaggtcgtggccgtggcgactggagcgtgggagcccctggtggcgtccaggagataacatacacggtgccagccgataagtgtggcctcgtcataggcaaagggggtgagaacatcaaaagcatcaaccagcagtcaggggcgcacgtggagcttcagaggaacccccctcccaacagcgaccccaacctgcggagattcaccatcaggggggttccccagcagatcgaggtggccaggcagctcatagatgagaaagttggcgggaccaatctcggagcacctggagccttcggacagagtccattcagccagccacctgccccacctcatcaaaatacctttcctccaaggagctccgggtgcttcccaaacatggctgccaaggtgaatgggaacccccacagcacccctgtgagtggtcctccggcctttctgacccagggctggggcagcacctaccaggcgtggcagcagcccacacagcaggtcccaagccagcagagccagccgcagagcagccagcccaactacagcaaggcctgggaagactattacaaaaaacagagtcacgccgccagcgctgctcctcaggccagctccccaccggactacacaatggcctgggcagaatattacagacagcaggtcgctttctacggacagacgttagggcaggcgcaggcccacagccaggagcagtaggacagcgtcctcgtggccaactctcccctcaaaatcattgtcaaagaaaacctatttgtaacagaggtttttacatttgcaaaccttttgatgaagaactgttgttttgttctgtgaaacactatatttagattaacggaatttttctaaaaatcaggaaaattagttactaaaaattgctgatcatttttgtttcattatttttgttatttcaaatgtataagctctgggattctttttggagcaatacctacaaagtcaggcaccagaatgtgcctcagagctgtgacatttcaacatgatggttttggtttggtttggttttgtgtcctttttatttgcagttttttctgttgcaacagaaagtggcttggaagtcttaggtggtatgtaacaaattctttttaaaaattttaaagcagtatttaagtattcttaaatgtgtaaattcatttaatgttttacttctaatttcttgtatcttggctgtctggttttattgcatttttaaaaaaactgaactattatgtattgtaatgaatgatgtgaattctgaactgagacagataattgtattgctgtccaacaggggttgggaggggcattttgtagggtttgtataatttctagagttcgaaaggggtaatataaaaatgtgctcgtgtgtttagcctacgtttttctcatgcctccattaccagttgcaattgtgtatctaagacctccaagcttgtttttaaaacaaaacaaaaaacctttctctattatctcagaaatataaatactgttatttttaatattaagaaattcaatataacttttaacacacactgtggaacattaaaccgtataaaaatgtagttataactatttttaattccaaggtgttgtttgcttttttcttttaaatattttcttaatattttgtcagattaactagatgaataaataaatctagtattaaccgcattatgaattaaataattttgatttaatgaaagggataatatgatttccagtgtttactgtagtgtatcttgtacagataacatgtatttttaaaggaaaaaaaacggaattgaagctattttttcttgcatttctaattgacctgagggacattccgtttgaaatgtactgaagttacagtttctggttttttctccttatttttcttataatgcttgaaatgtctaactattaaaaaagacaattggaaaaaaaaaaaaaaaaaaaaaaaaaaaaaaaaaaaaaaaaaaaaaaaaaaaaaaaaaaaaaaaaaaaaaaaaaaaaaaaaaaaaaaaaaaaagaacaaaaaacaagaagaagagagatgaccaaagatagcgcacgctaggacgagacgcgaaataaaaacgaaaagcagaggaggaccggcgagaaggaagagagaacatcgagaagagcagagatgcacaagaataggaacaactgagacgccatacgtgacacggagaaacgacgcgagctggtagaccgagaggaggcggtgaagagaacgtagtaggttagaagaacgagaatgcagatcgcgggagcgaagagctatgaatcagagcagaataaagttagaaatagagacaacggtacaacaagagacaagcaagacaggacaatctaataagaaaagagcagacagacaagccgacacagtaagagaaagacagcgaagagacagacgcaganacgatacacagcagatgacagcacaaaagagcacgcatcaacgcacgtcgagagcgacacgtagagactaagcaagcaaaagcacaagagcaacgtnagcaagttagaagcagagctacagaagacgaagtcaataccgcacgcgcgtcgatcgcagcgaagtaagaagggacgacagacctaacgcacactcagatacgtaaaaagcgagaaacagagacacaagtacgacgaacacagtaagcaagaccgaagaaggaaatagcaacatcaaggaaagcagaacacatagccagcacgagcgcaacagcacacgcgaacaaaanacatagaagtcaacgaccaagacaggaagacgaccctgacgcgangcaacgagagg

SEQ ID NO: 443946 - DNA, 2187 bp, Homo sapiens
tatctgaattttgcaaccagattctgcttgaatccgtgaaatctgctcacctcccctgccgataataaatccaaccattttgtcaggcactttgaattcttccgttattaccgtcctttgatgtaccaaggcccctaactggttacctactccatcatccagggccgtttttgtactccgtatccatatactgaggggtccaggagataacatacacggtgccagccgataagtgtggcctcgtcataggcaaagggggtgagaacatcaaaagcatcaaccagcagtcaggggcgcacgtggagcttcagaggaacccccctcccaacagcgaccccaacctgcggagattcaccatcaggggggttccccagcagatcgaggtggccaggcagctcatagatgagaaagttggcgggaccaatctcggagcacctggagccttcggacagagtccattcagccagccacctgccccacctcatcaaaatacctttcctccaaggagctccgggtgcttcccaaacatggctgccaaggtgaatgggaacccccacagcacccctgtgagtggtcctccggcctttctgacccagggctggggcagcacctaccaggcgtggcagcagcccacacagcaggtcccaagccagcagagccagccgcagagcagccagcccaactacagcaaggcctgggaagactattacaaaaaacagagtcacgccgccagcgctgctcctcaggccagctccccaccggactacacaatggcctgggcagaatattacagacagcaggtcgctttctacggacagacgttagggcaggcgcaggcccacagccaggagcagtaggacagcgtcctcgtggccaactctcccctcaaaatcattgtcaaagaaaacctatttgtaacagaggtttttacatttgcaaaccttttgatgaagaactgttgttttgttctgtgaaacactatatttagattaacggaatttttctaaaaatcaggaaaattagttactaaaaattgctgatcatttttgtttcattatttttgttatttcaaatgtataagctctgggattctttttggagcaatacctacaaagtcaggcaccagaatgtgcctcagagctgtgacatttcaacatgatggttttggtttggtttggttttgtgtcctttttatttgcagttttttctgttgcaacagaaagtggcttggaagtcttaggtggtatgtaacaaattctttttaaaaattttaaagcagtatttaagtattcttaaatgtgtaaattcatttaatgttttacttctaatttcttgtatcttggctgtctggttttattgcatttttaaaaaaactgaactattatgtattgtaatgaatgatgtgaattctgaactgagacagataattgtattgctgtccaacaggggttgggaggggcattttgtagggtttgtataatttctagagttcgaaaggggtaatataaaaatgtgctcgtgtgtttagcctacgtttttctcatgcctccattaccagttgcaattgtgtatctaagacctccaagcttgtttttaaaacaaaacaaaaaacctttctctattatctcagaaatataaatactgttatttttaatattaagaaattcaatataacttttaacacacactgtggaacattaaaccgtataaaaatgtagttataactatttttaattccaaggtgttgtttgcttttttcttttaaatattttcttaatattttgtcagattaactagatgaataaataaatctagtattaaccgcattatgaattaaataattttgatttaatgaaagggataatatgatttccagtgtttactgtagtgtatcttgtacagataacatgtatttttaaaggaaaaaaaacggaattgaagctattttttcttgcatttctaattgacctgagggacattccgtttgaaatgtactgaagttacagtttctggttttttctccttatttttcttataatgcttgaaatgtctaactattaaaaaagacaattggaaaatgttatgcatggggtttttaagaaaacaaagtgttctttttatttgactgacaattcattttacactctatataataaaatctccacaaggcatcttgtgggcaaagtc

SEQ ID NO: 443947 - DNA, 1610 bp, Homo sapiens
acaccagcctcacctcactgcctcccagacctccctgccttccagccgtccggagggagagcagatgcccagggcctttgggaagggtcctgcccagtgcacctccgctcccgataacctgtgtttcctcctttgtcaaccaggtcacgccgccagcgctgctcctcaggccagctccccaccggactacacaatggcctgggcagaatattacagacagcaggtcgctttctacggacagacgttagggcaggcgcaggcccacagccaggagcagtaggacagcgtcctcgtggccaactctcccctcaaaatcattgtcaaagaaaacctatttgtaacagaggtttttacatttgcaaaccttttgatgaagaactgttgttttgttctgtgaaacactatatttagattaacggaatttttctaaaaatcaggaaaattagttactaaaaattgctgatcatttttgtttcattatttttgttatttcaaatgtataagctctgggattctttttggagcaatacctacaaagtcaggcaccagaatgtgcctcagagctgtgacatttcaacatgatggttttggtttggtttggttttgtgtcctttttatttgcagttttttctgttgcaacagaaagtggcttggaagtcttaggtggtatgtaacaaattctttttaaaaattttaaagcagtatttaagtattcttaaatgtgtaaattcatttaatgttttacttctaatttcttgtatcttggctgtctggttttattgcatttttaaaaaaactgaactattatgtattgtaatgaatgatgtgaattctgaactgagacagataattgtattgctgtccaacaggggttgggaggggcattttgtagggtttgtataatttctagagttcgaaaggggtaatataaaaatgtgctcgtgtgtttagcctacgtttttctcatgcctccattaccagttgcaattgtgtatctaagacctccaagcttgtttttaaaacaaaacaaaaaacctttctctattatctcagaaatataaatactgttatttttaatattaagaaattcaatataacttttaacacacactgtggaacattaaaccgtataaaaatgtagttataactatttttaattccaaggtgttgtttgcttttttcttttaaatattttcttaatattttgtcagattaactagatgaataaataaatctagtattaaccgcattatgaattaaataattttgatttaatgaaagggataatatgatttccagtgtttactgtagtgtatcttgtacagataacatgtatttttaaaggaaaaaaaacggaattgaagctattttttcttgcatttctaattgacctgagggacattccgtttgaaatgtactgaagttacagtttctggttttttctccttatttttcttataatgcttgaaatgtctaactattaaaaaagacaattggaaaatgttatgcatggggtttttaagaaaacaaagtgttctttttatttgactgacaattcattttacactctatataataaaatctccacaaggcatcttgtgggcaaagtc

SEQ ID NO: 443948 - DNA, 1993 bp, Homo sapiens
ggcgactttccttttccggctacgggtccccaagcggagcgggaggccggaccggggagccgagcggcggcgtcggcggcgtcggcggcggcggcgacggcggcgggggcggtaatggcggagctggtgcaggggcagagcgctcctgtggggatgaaggccgagggcttcgtggatgccctgcaccgggtccggcagaaagccacaggagtcattgtattagaagaaggtcttcactcgggcgcttgaagatatggtctttacatctctttccagtattccaggggagggaaccctacctgtttccctgataactgacttttcatgttatatattgatgctcctatagacattatattggatcccagaactttccaaacctgtggttccacctaaaattttatctgatgaattgttactttactgcctagctgccaaccagtacagtagtgagtatccatcttacttagacttcagatccacccatggctgtaatggatgaacatgccacccagctccccttccaccactctgcttgctggcgtgttacagtgctctcctctacagtacagggtcctgaaccttgtttctcactggctactaatatgtaatggctttcgctctgtgctgatgtgtgacagtcaccttgttggccttctatgtccgggaagaattatagtcactgccctaaagggctcagatcctcagtttgcagaaggcctgtagttgaacataaagtgaattttgaaccattgagaagacattccgcttctcttgagccagtggttgaactcatattcttggacaacctgctccagagggagaccctctggtaaatgctgacctaatgtggattgttgaagcagtggtgtttactactagcagtgaaaacttcattggaattgttctcagctctgaaatgcaccattgactggagcagtaataagcccaatggagacagggctgtaagtgtgttccttctgaatgttaacagctggaggtccatactatctccaaggatttgatggcctttaaaaactaaagaaaaaccaggttggtgggtaattttaggtttattgtatatagatttgcattgggcaagaacggaatgttagaaatctgtaatactgtatgctgatggtaaacttactgtaaggatctcatttgggtatctggaaggtgatagttctgtttctttgttatatacacagcatgttacagagatgtgatttttctccccattaaacagaactaaaagacagtatatttatttaaacgcaaagctttttccccttttatgtctcctcataaactccagagacagtctggaaggccctcttaaatttgtcaaagagcagtaaagtgtctcacgctcagtttttctagcagatcgtaatactctcagttgaccctgctgggatttgaacctgcagtttctattaagtttggtgtgtgaagtccaacaccttatcaactaggctttccctctgacatcttgaagcctccgtgtatatcctttggactctgcagcaaagtgcatcagttgttagtttactctgagcatggtattcttagattgaaaagaagtctctgaagatgtcaaataaaatgtaaacattttctccagcagtgtgaagtctagtgagttaatgtttggcacaagcaggtaatttacatccattctatagggtagtagaaatgtgatctgggcaagtcacagtggctcatgcttgtaatctcagcactttgggaggctgaggtaggaggatggcttgagctcaggggtttgataccagcctgggcaacatagcgagaccttgtctctactaaaaattaaaaaaattagctggatgtggtggcccacccctgcagtctcagctgtttgggaggctgaagcaagaggctagcttgagcatggagatcaaggctgcagtgagctgtgattgctccgctgcattccagcctgagtgacagagtgagacactgtctcaaa

SEQ ID NO: 443949 - DNA, 452 bp, Homo sapiens
agcacctacctcgcagggctgaggtaagactcaccgagataatctagcaaagtacttagcagaggcctggcacacagtccatgtgcaatgggttggttcctagtactgtgctcactgaatctaaagagtttcagtaacttggggcttgaagggttattaagggaaataaaggggcttctctttacacctcagtgcctatgtgagacatggaatatttagccagatgtgatgctgatctgccccctgccgcaggacccatgccagggcacagggcacttgctatgtgtctctctcttgactaggggactagggagccaggagatgcacctgagtgagatggggactccagcaccttcttttaactggttacgccccgctagaccatctgcatgtcgagggtggggactgcatactctccacaaagcatggtgcctctggcaggcactctgtaa

SEQ ID NO: 443950 - DNA, 865 bp, Homo sapiens
gctgccttgcacttagggaaggttcacatgcctcaaggatctctctctctcagatttcttgactttccctcagtcttcagtatagtcctcctctgtgcctggtgaagacctgtggtaaagtgctggcagagctgccggcttccccttgaaggaataggagtagacctgctgaactatcacatgagagaagaggcccaaaagcttgcacactacagtcaagctggcccttaaagagatggacctagaagatgctgagccagatgtactcaattacttctccaaaattcatcaattaggaatacaacatgtttaagaccacagaacatctgcataggctgtaaatttcgttgaatgatggatgcaaagatggaagacagatggatagaggaaaagacagaatcagatactggatgagttagtactgctgcctgtgcttcagagctgtcttattaccacaaggccggcaagcatcaatgtccccacatccccctctgcctccccctgaaatgtaccgatttatatgaaaattaagattacaaattaaagcctggctatcctggagttttccagttcatcagccatccaataaaaatgatgtcaagcctgtatgcataattcccggaagattactttcgtccttacagctaagccctgtccctgatatgaaagatctctatccacttttattgaaataaagaactaacatcataatcccaatattgaggtataatcttcattatctcctgaccctcttgaggttcccccaatctatattacttcagatttggtttatgtgtaatccttatgtatttacttttattgagataggattaaaaactaaaaaaaaagcttcaaaaaatcctta

SEQ ID NO: 443951 - DNA, 679 bp, Homo sapiens
aggccacccacggctacccatggaccaatcagcacatactttctctcctctgaggcccataaaagccctgcgctcagccagaactaagcagatatctggatgaccagctgcagaaaggagctactcattccagggcctcctctctgctgagagcagcagacatcaggatgaccagctgcagagaggagctacccactccagggcctcctctttgatgagagctgcagagacagtgggacaacctgtctgcagagaaaaggaatacaacatgtttaagaccacagaacatctgcataggctgtaaatttcgttgaatgatggatgcaaagatggaagacagatggatagaggaaaagacagaatcagatactggatgagttagtactgctgcctgtgcttcagagctgtcttattaccacaaggccggcaagcatcaatgtccccacatccccctctgcctccccctgaaatgtaccgatttatatgaaaattaagattacaaattaaagcctggctatcctggagttttccagttcatcagccatccaataaaaatgatgtcaagcctgtatgcataattcccggaagattactttcgtccttacagctaagccctgtccctgatatgaaagatctctatccacttttattgaaataaagaactaacatcataatccca

SEQ ID NO: 443952 - DNA, 483 bp, Homo sapiens
atgtagagaatgctgccgggactgacccatgtcttttctgaatcacctctgacatatgaccaggaatacaacatgtttaagaccacagaacatctgcataggctgtaaatttcgttgaatgatggatgcaaagatggaagacagatggatagaggaaaagacagaatcagatactggatgagttagtactgctgcctgtgcttcagagctgtcttattaccacaaggccggcaagcatcaatgtccccacatccccctctgcctccccctgaaatgtaccgatttatatgaaaattaagattacaaattaaagcctggctatcctggagttttccagttcatcagccatccaataaaaatgatgtcaagcctgtatgcataattcccggaagattactttcgtccttacagctaagccctgtccctgatatgaaagatctctatccacttttattgaaataaagaactaacatcataatccca

SEQ ID NO: 443953 - DNA, 495 bp, Homo sapiens
  misc_feature (95)..(95): n is a, c, g, or t
ttccccgctcacgcttctaggttgggaaaggtggtattctgcctaagtgaagaaagcgggagcgtgatctgaaaggaatacaacatgtttaagancacagaacatctgcataggctgtaaatttcgttgaatgatggatgcaaagatggaagacagatggatagaggaaaagacagaatcagatactggatgagttagtactgctgcctgtgcttcagagctgtcttattaccacaaggccggcaagcatcaatgtccccacatccccctctgcctccccctgaaatgtaccgatttatatgaaaattaagattacaaattaaagcctggctatcctggagttttccagttcatcagccatccaataaaaatgatgtcaagcctgtatgcataattcccggaagattactttcgtccttacagctaagccctgtccctgatatgaaagatctctatccacttttattgaaataaagaactaacatcataatccca

SEQ ID NO: 443954 - DNA, 474 bp, Homo sapiens
  misc_feature (74)..(74): n is a, c, g, or t
tacaagagcagagcggtattcctaatataaagaaaataagcgagagggcgtggaggatacaacatgtttaagancacagaacatctgcataggctgtaaatttcgttgaatgatggatgcaaagatggaagacagatggatagaggaaaagacagaatcagatactggatgagttagtactgctgcctgtgcttcagagctgtcttattaccacaaggccggcaagcatcaatgtccccacatccccctctgcctccccctgaaatgtaccgatttatatgaaaattaagattacaaattaaagcctggctatcctggagttttccagttcatcagccatccaataaaaatgatgtcaagcctgtatgcataattcccggaagattactttcgtccttacagctaagccctgtccctgatatgaaagatctctatccacttttattgaaataaagaactaacatcataatccca

SEQ ID NO: 443955 - DNA, 370 bp, Homo sapiens
tgggaataatgtcaccaatagcataagaattaatgtctactatgatgctgaaataaataaactggtaaaactactctgctgtctaaatccccaagttacaaatttacagagctgccggcttccccttgaaggaataggagtagacctgctgaactatcacatgagagaagaggcccaaaagcttgcacactacagtcaagctggcccttaaagagatggacctagaagatgctgagccagatgtactcaattacttctccaaaattcatcaattagagcaagaaggcccttgccagatgccaccccctcaatcttagacttcctactctccagtacagtgagccaaataaatgtctgttcgttataaaaa

SEQ ID NO: 443956 - DNA, 1015 bp, Homo sapiens
gctgccttgcacttagggaaggttcacatgcctcaaggatctctctctctcagatttcttgactttccctcagtcttcagtatagtcctcctctgtgcctggtgaagacctgtggtaaagtgctggcagagaggaagctaaatcacgtaaaaattaagaaacagctcagcgtttcacagctaagctgccggcttccccttgaaggaataggagtagacctgctgaactatcacatgagagaagaggcccaaaagcttgcacactacagtcaagctggcccttaaagagatggacctagaagatgctgagccagatgtactcaattacttctccaaaattcatcaattagaactgcttcttgctgccgccatatgaagaaggacgtgttcgcttccccttcctccatgattgtaagtttcctgagacctcgccagccatgctgaactgaatacaacatgtttaagaccacagaacatctgcataggctgtaaatttcgttgaatgatggatgcaaagatggaagacagatggatagaggaaaagacagaatcagatactggatgagttagtactgctgcctgtgcttcagagctgtcttattaccacaaggccggcaagcatcaatgtccccacatccccctctgcctccccctgaaatgtaccgatttatatgaaaattaagattacaaattaaagcctggctatcctggagttttccagttcatcagccatccaataaaaatgatgtcaagcctgtatgcataattcccggaagattactttcgtccttacagctaagccctgtccctgatatgaaagatctctatccacttttattgaaataaagaactaacatcataatcccaatattgaggtataatcttcattatctcctgaccctcttgaggttcccccaatctatattacttcagatttggtttatgtgtaatccttatgtatttacttttattgagataggattaaaaactaaaaaaaaagcttcaaaaaatcctta

SEQ ID NO: 443957 - DNA, 866 bp, Homo sapiens
gctgccttgcacttagggaaggttcacatgcctcaaggatctctctctctcagatttcttgactttccctcagtcttcagtatagtcctcctctgtgcctggtgaagacctgtggtaaagtgctggcagagaggaagctaaatcacgtaaaaattaagaaacagctcagcgtttcacagctaagctgccggcttccccttgaaggaataggagtagacctgctgaactatcacatgagagaagaggcccaaaagcttgcacactacagtcaagctggcccttaaagagatggacctagaagatgctgagccagatgtactcaattacttctccaaaattcatcaattagaactgcttcttgctgccgccatatgaagaaggacgtgttcgcttccccttcctccatgattgtaagtttcctgagacctcgccagccatgctgaactgaatacaacatgtttaagaccacagaacatctgcataggctgtaaatttcgttgaatgatggatgcaaagatggaagacagatggatagaggaaaagacagaatcagatactggatgagttagtactgctgcctgtgcttcagagctgtcttattaccacaaggccggcaagcatcaatgtccccacatccccctctgcctccccctgaaatgtaccgatttatatgaaaattaagattacaaattaaagcctggctatcctggagttttccagttcatcagccatccaataaaaatgatgtcaagcctgtatgcataattcccggaagattactttcgtccttacagctaagccctgtccctgatatgaaagatctctatccacttttattgaaataaagaactaacatcataatccca

SEQ ID NO: 443958 - DNA, 1110 bp, Homo sapiens
tgggaataatgtcaccaatagcataagaattaatgtctactatgatgctgaaataaataaactggtaaaactactctgctgtctaaatccccaagttacaaatttacagagctgccggcttccccttgaaggaataggagtagacctgctgaactatcacatgagagaagaggcccaaaagcttgcacactacagtcaagctggcccttaaagagatggacctagaagatgctgagccagatgtactcaattacttctccaaaattcatcaattagaactgcttcttgctgccgccatatgaagaaggacgtgttcgcttccccttcctccatgattgtaagtttcctgagacctcgccagccatgctgaactgaatacaacatgtttaagaccacagaacatctgcatagataaatcccagttgacagaactgtttaagagatgaatgtgctcccaactgggattacggtcacagtatttatctatatcaactttcatgttacttcactggcaaattgggagctttggaggataagaggataacatatgatcgggagaatctattttctgctctgaaggctgtaaatttcgttgaatgatggatgcaaagatggaagacagatggatagaggaaaagacagaatcagatactggatgagttagtactgctgcctgtgcttcagagctgtcttattaccacaaggccggcaagcatcaatgtccccacatccccctctgcctccccctgaaatgtaccgatttatatgaaaattaagattacaaattaaagcctggctatcctggagttttccagttcatcagccatccaataaaaatgatgtcaagcctgtatgcataattcccggaagattactttcgtccttacagctaagccctgtccctgatatgaaagatctctatccacttttattgaaataaagaactaacatcataatcccaatattgaggtataatcttcattatctcctgaccctcttgaggttcccccaatctatattacttcagatttggtttatgtgtaatccttatgtatttacttttattgagataggattaaaaactaaaaaaaaagcttcaaaaaatcctta

SEQ ID NO: 443959 - DNA, 628 bp, Homo sapiens
catgaaggtcttcaccagatgtgggccccttgatcttggacttcccagcctccagagctgaatacaacatgtttaagaccacagaacatctgcataggctgtaaatttcgttgaatgatggatgcaaagatggaagacagatggatagaggaaaagacagaatcagatactggatgagttagtactgctgcctgtgcttcagagctgtcttattaccacaaggccggcaagcatcaatgtccccacatccccctctgcctccccctgaaatgtaccgatttatatgaaaattaagattacaaattaaagcctggctatcctggagttttccagttcatcagccatccaataaaaatgatgtcaagcctgtatgcataattcccggaagattactttcgtccttacagctaagccctgtccctgatatgaaagatctctatccacttttattgaaataaagaactaacatcataatcccaatattgaggtataatcttcattatctcctgaccctcttgaggttcccccaatctatattacttcagatttggtttatgtgtaatccttatgtatttacttttattgagataggattaaaaactaaaaaaaaagcttcaaaaaatcctta

SEQ ID NO: 443960 - DNA, 632 bp, Homo sapiens
atgtagagaatgctgccgggactgacccatgtcttttctgaatcacctctgacatatgaccaggaatacaacatgtttaagaccacagaacatctgcataggctgtaaatttcgttgaatgatggatgcaaagatggaagacagatggatagaggaaaagacagaatcagatactggatgagttagtactgctgcctgtgcttcagagctgtcttattaccacaaggccggcaagcatcaatgtccccacatccccctctgcctccccctgaaatgtaccgatttatatgaaaattaagattacaaattaaagcctggctatcctggagttttccagttcatcagccatccaataaaaatgatgtcaagcctgtatgcataattcccggaagattactttcgtccttacagctaagccctgtccctgatatgaaagatctctatccacttttattgaaataaagaactaacatcataatcccaatattgaggtataatcttcattatctcctgaccctcttgaggttcccccaatctatattacttcagatttggtttatgtgtaatccttatgtatttacttttattgagataggattaaaaactaaaaaaaaagcttcaaaaaatcctta

SEQ ID NO: 443961 - DNA, 847 bp, Homo sapiens
gctgccttgcacttagggaaggttcacatgcctcaaggatctctctctctcagatttcttgactttccctcagtcttcagtatagtcctcctctgtgcctggtgaagacctgtggtaaagtgctggcagagaggaagctaaatcacgtaaaaattaagaaacagctcagcgtttcacagctaagctgccggcttccccttgaaggaataggagtagacctgctgaactatcacatgagagaagaggcccaaaagcttgcacactacagtcaagctggcccttaaagagatggacctagaagatgctgagccagatgtactcaattacttctccaaaattcatcaattagaactgcttcttgctgccgccatatgaagaaggacgtgttcgcttccccttcctccatgattgtaagtttcctgagacctcgccagccatgctgaactgaatacaacatgtttaagaccacagaacatctgcataggctgtaaatttcgttgaatgatggatgcaaagatggaagacagatggatagaggaaaagacagaatcagatactggatgagttagtactgctgcctgtgcttcagagctgtcttattaccacaaggccggcaagcatcaatgtccccacatccccctctgcctccccctgaaatgtaccgatttatatgaaaattaagattacaaattaaagcctggctatcctggagttttccagttcatcagccatccaataaaaatgatgtcaagcctgtttaaaaaaagaaaaataaagagacaaaatcaaaataggaaaagaaataagaaaatttggcctccttggcctcaccggtggaactttcaac

SEQ ID NO: 443962 - DNA, 716 bp, Homo sapiens
gctgccttgcacttagggaaggttcacatgcctcaaggatctctctctctcagatttcttgactttccctcagtcttcagtatagtcctcctctgtgcctggtgaagacctgtggtaaagtgctggcagagctgccggcttccccttgaaggaataggagtagacctgctgaactatcacatgagagaagaggcccaaaagcttgcacactacagtcaagctggcccttaaagagatggacctagaagatgctgagccagatgtactcaattacttctccaaaattcatcaattaggaatacaacatgtttaagaccacagaacatctgcataggctgtaaatttcgttgaatgatggatgcaaagatggaagacagatggatagaggaaaagacagaatcagatactggatgagttagtactgctgcctgtgcttcagagctgtcttattaccacaaggccggcaagcatcaatgtccccacatccccctctgcctccccctgaaatgtaccgatttatatgaaaattaagattacaaattaaagcctggctatcctggagttttccagttcatcagccatccaataaaaatgatgtcaagcctgtatgcataattcccggaagattactttcgtccttacagctaagccctgtccctgatatgaaagatctctatccacttttattgaaataaagaactaacatcataatccca

SEQ ID NO: 443963 - DNA, 607 bp, Homo sapiens
tgggaataatgtcaccaatagcataagaattaatgtctactatgatgctgaaataaataaactggtaaaactactctgctgtctaaatccccaagttacaaatttacagagctgccggcttccccttgaaggaataggagtagacctgctgaactatcacatgagagaagaggcccaaaagcttgcacactacagtcaagctggcccttaaagagatggacctagaagatgctgagccagatgtactcaattacttctccaaaattcatcaattagattctcctgcctcagcctgccgagtgcctgggattgcaggcgcccgccgccacgcctgactggtttttgtatttttttggtggagacggggtttcgcggtgttggctgggctggtctcagctcctgacctcgagtgatctgcccgcctcggcctcccgaggtgccgggattgcagacgggagtctcgcttactcagtgctcaatgttgcccaggttggagtgcagtggcgtgatctcggctcgctaaaacctccacctcccagccacctgccttggcctcccaaagtgctgatgcatactctgcgccaggtcatcccagtcacgactaagt

SEQ ID NO: 443964 - DNA, 328 bp, Homo sapiens
tatcctttataaaaattaaaagaagaagaaggggaaaaaaatcctcattaatgtatgctggcaaaacaatggcagtcattttcctggctgaaaactaaattattgtgcattgtagtgtgcatgtctatgataagtagattactatagatcattccgagaggaggtagaaggaagattgcactaacattagcttctctggtatttgcaggctgtaaatttcgttgaatgatggatgcaaagatggaagacagatggatagaggaaaagacagaatcagatactggatgagttagtactgctgcctgtgcttcagagctgtcttattacc

SEQ ID NO: 443965 - DNA, 942 bp, Homo sapiens
tgggaataatgtcaccaatagcataagaattaatgtctactatgatgctgaaataaataaactggtaaaactactctgctgtctaaatccccaagttacaaatttacagagctgccggcttccccttgaaggaataggagtagacctgctgaactatcacatgagagaagaggcccaaaagcttgcacactacagtcaagctggcccttaaagagatggacctagaagatgctgagccagatgtactcaattacttctccaaaattcatcaattagaactgcttcttgctgccgccatatgaagaaggacgtgttcgcttccccttcctccatgattgtaagtttcctgagacctcgccagccatgctgaactgaatacaacatgtttaagaccacagaacatctgcataggctgtaaatttcgttgaatgatggatgcaaagatggaagacagatggatagaggaaaagacagaatcagatactggatgagttagtactgctgcctgtgcttcagagctgtcttattaccacaaggccggcaagcatcaatgtccccacatccccctctgcctccccctgaaatgtaccgatttatatgaaaattaagattacaaattaaagcctggctatcctggagttttccagttcatcagccatccaataaaaatgatgtcaagcctgtatgcataattcccggaagattactttcgtccttacagctaagccctgtccctgatatgaaagatctctatccacttttattgaaataaagaactaacatcataatcccaatattgaggtataatcttcattatctcctgaccctcttgaggttcccccaatctatattacttcagatttggtttatgtgtaatccttatgtatttacttttattgagataggattaaaaactaaaaaaaaagcttcaaaaaatcctta

SEQ ID NO: 443966 - DNA, 911 bp, Homo sapiens
aagaccctccaccaacaaaaagatgactcactgaaggctcaagtgaccattagcattatttagcaatgaagtatttttaattaaggtatgtatttttaagacataatgctattgcacacttaatagactacaatgtagtataaacataacttttatatgcaatgggaaatcaaaaaattcccgtgacttgctttattgcagtggtctggaagcaagcccacagtattttcaaagtatgcctgtattgtcttaaaatttttgcctcgtttactaaataaggttcttaagggccataatttcatcataacacctaaaatactctgtagaatatcactaacataatgtaggccatttgcattcagaaaccactgacattttgatgtatacgaatctcagatggtatctacagctatgaaacacaagtttttttctgttcgaaagagtttggtggagatacgagtaaggtcagtacccaaattatagtagttttccaaagattgttgtacataatacttctcacttccaaatcaaacagtatttctgcggtgatggtgtatttagagttccaatatgaggcgtccggaatagatctcttgtaataacagagatgaggtttcttccactacctcttccaaactgccttgcttaagagaagtgggaattccttcagctaagacatttggtgttgggacataggggctttcatgtggaaaggaaaaaagaaatagaagaaaagtctgcagggagaagggggaggaccttacacatagcaatctcagctgacacacctaattgccgttttccccttagctcagctgaactgacagtctcttaccttggtgtcagttaagtactgttcccaggtgcctttcaggcactttagcacttatctcgtacacacagacacacac

SEQ ID NO: 443967 - DNA, 4613 bp, Homo sapiens
ccctcgcgctactgcgggagcagcgtcctcccgggccacggcgcttcccggccccggcgtccccggaccatggcgctctccgggctcttctctagctctcagcggctgcgaagtctgtaaacctggtggccaagtgattgtaagtcaggagactttccttcggtttctgcctttgatggcaagaggtggagattgtggcggcgattacagaaaacatctgggaagacaagttgctgtttttatgggaatcgcaggcttggaagagacagaagcaattccagaaataaattggaaattgaagatttaaacaatgttgttttaaaatattctaacttcaaagaatgatgccagaaacttaaaaaggggctgcgcagagtagcaggggccctggagggcgcggcctgaatcctgattgcccttctgctgagaggacacacgcagctgaagatgaatttgggaaaagtagccgcttgctactttaactatggaagagcagggccacagtgagatggaaataatcccatcagagtctcacccccacattcaattactgaaaagcaatcgggaacttctggtcactcacatccgcaatactcagtgtctggtggacaacttgctgaagaatgactacttctcggccgaagatgcggagattgtgtgtgcctgccccacccagcctgacaaggtccgcaaaattctggacctggtacagagcaagggcgaggaggtgtccgagttcttcctctacttgctccagcaactcgcagatgcctacgtggacctcaggccttggctgctggagatcggcttctccccttccctgctcactcagagcaaagtcgtggtcaacactgacccagtgagcaggtatacccagcagctgcgacaccatctgggccgtgactccaagttcgtgctgtgctatgcccagaaggaggagctgctgctggaggagatctacatggacaccatcatggagctggttggcttcagcaatgagagcctgggcagcctgaacagcctggcctgcctcctggaccacaccaccggcatcctcaatgagcagggtgagaccatcttcatcctgggtgatgctggggtgggcaagtccatgctgctacagcggctgcagagcctctgggccacgggccggctagacgcaggggtcaaattcttcttccactttcgctgccgcatgttcagctgcttcaaggaaagtgacaggctgtgtctgcaggacctgctcttcaagcactactgctacccagagcgggaccccgaggaggtgtttgccttcctgctgcgcttcccccacgtggccctcttcaccttcgatggcctggacgagctgcactcggacttggacctgagccgcgtgcctgacagctcctgcccctgggagcctgcccaccccctggtcttgctggccaacctgctcagtgggaagctgctcaagggggctagcaagctgctcacagcccgcacaggcatcgaggtcccgcgccagttcctgcggaagaaggtgcttctccggggcttctcccccagccacctgcgcgcctatgccaggaggatgttccccgagcgggccctgcaggaccgcctgctgagccagctggaggccaaccccaacctctgcagcctgtgctctgtgcccctcttctgctggatcatcttccggtgcttccagcacttccgtgctgcctttgaaggctcaccacagctgcccgactgcacgatgaccctgacagatgtcttcctcctggtcactgaggtccatctgaacaggatgcagcccagcagcctggtgcagcggaacacacgcagcccagtggagaccctccacgccggccgggacactctgtgctcgctggggcaggtggcccaccggggcatggagaagagcctctttgtcttcacccaggaggaggtgcaggcctccgggctgcaggagagagacatgcagctgggcttcctgcgggctttgccggagctgggccccgggggtgaccagcagtcctatgagtttttccacctcaccctccaggccttctttacagccttcttcctcgtgctggacgacagggtgggcactcaggagctgctcaggttcttccaggagtggatgccccctgcgggggcagcgaccacgtcctgctatcctcccttcctcccgttccagtgcctgcagggcagtggtccggcgcgggaagacctcttcaagaacaaggatcacttccagttcaccaacctcttcctgtgcgggctgttgtccaaagccaaacagaaactcctgcggcatctggtgcccgcggcagccctgaggagaaagcgcaaggccctgtgggcacacctgttttccagcctgcggggctacctgaagagcctgccccgcgttcaggtcgaaagcttcaaccaggtgcaggccatgcccacgttcatctggatgctgcgctgcatctacgagacacagagccagaaggtggggcagctggcggccaggggcatctgcgccaactacctcaagctgacctactgcaacgcctgctcggccgactgcagcgccctctccttcgtcctgcatcacttccccaagcggctggccctagacctagacaacaacaatctcaacgactacggcgtgcgggagctgcagccctgcttcagccgcctcactgttctcagactcagcgtaaaccagatcactgacggtggggtaaaggtgctaagcgaagagctgaccaaatacaaaattgtgacctatttgggactttggaaatcagtagacaccatatgcttcaaaaaacaggggctattaaaatgacatcaggagccagaaagtctcatggctgtgctttctcttgaagtttatacaacaaccagatcaccgatgtcggagccagactgggaaaaaacaaaataacaagtgaaggagggaagtatctcgccctggctgtgaagaacagcaaatcaatctctgaggttgggatgtggggcaatcaagttggggatgaaggagcaaaagccttcgcagaggctctgcggaaccaccccagcttgaccaccctgagtcttgcgtccaacggcatctccacagaaggaggaaagagccttgcgagggccctgcagcagaacacgtctctagaaatactgtggctgacccaaaatgaactcaacgatgaagtggcagagagtttggcagaaatgttgaaagtcaaccagacgttaaagcatttatggcttatccagaatcagatcacagctaaggggactgcccagctggcagatgcgttacagagcaacactggcataacagagatttgaacttgtttggaacttgtcataaaatcgatcagtttggtgaattgcaaccaacaatatttaaaaagaaaacagaacagaacaaaatatcaggatgcaatgtgcatgcctaaatggaaacctgataaaaccagaggaggccaaagtctatgaagatgagaagcggattatctgtttctgagaggatgctttcctgttcatggggtttttgccctggagcctcagcagcaaatgccactctgggcagtcttttgtgtcagtgtcttaaaggggcctgcgcaggcgggactatcaggagtccactgcctccatgatgcaagccagcttcctgtgcagaaggtctggtcggcaaactccctaagtacccgctacaattctgcagaaaaagaatgtgtcttgcgagctgttgtagttacagtaaatacactgtgaagagactttattgcctattataattatttttatctgaagctagaggaataaagctgtgagcaaacagaggaggccagcctcacctcattccaacacctgccatagggaccaacgggagcgagttggtcaccgctcttttcattgaagagttgaggatgtggcacaaagttggtgccaagcttcttgaataaaacgtgtttgatggattagtattatacctgaaatattttcttccttctcagcactttcccatgtattgatactggtcccacttcacagctggagacaccggagtatgtgcagtgtgggatttgactcctccaaggttttgtggaaagttaatgtcaaggaaaggatgcaccacgggcttttaattttaatcctggagtctcactgtctgctggcaaagatagagaatgccctcagctcttagctggtctaagaatgacgatgccttcaaaatgctgcttccactcagggcttctcctctgctaggctaccctcctctagaaggctgagtaccatgggctacagtgtctggccttgggaagaagtgattctgtccctccaaagaaatagggcatggcttgcccctgtggccctggcatccaaatggctgcttttgtctcccttacctcgtgaagaggggaagtctcttcctgcctcccaagcagctgaagggtgactaaacgggcgccaagactcaggggatcggctgggaactgggccagcagagcatgttggacaccccccaccatggtgggcttgtggtggctgctccatgagggtgggggtgatactactagatcacttgtcctcttgccagctcatttgttaataaaatactgaaaacactctta

SEQ ID NO: 443968 - DNA, 299 bp, Homo sapiens
catgagctcaggctcctgggctgacagctctccgaagctcgtggtgaggctcggtctctaactgtgccacttgccgatggcctctgttcacaaggcttcccctgctcttcgatcttgcatcaccccttgaatttgaaatccagagcagcccactcagagaccagtgtgaggaattagtgtccaggccacagatccagggactgggcacaaacatctgcctgttgagtaggaactgagctgtggccattggcaaaaaaggaggggtgagcatggctgtttcttggggagctaacacttca

SEQ ID NO: 443969 - DNA, 4451 bp, Homo sapiens
tctagagcggccgctcgcgatctagaaccccggaccatggcgctctccgggctcttctctagctctcagcggctgcgaagtctgtaaacctggtggccaagattgtaagtcaggagactttccttcggtttctgcctttgatggcaatttccttcggtttctgcctttgatggcaagaggtggagattgtggcggcgattacagaaaacatctgggaagacaagttgctgtttttatgggaatcgcaggcttggaagagacagaagcaattccagaaataaattggaaattgaagatttaaacaatgttgttttaaaatattctaacttcaaagaatgatgccagaaacttaaaaaggggctgcgcagagtagcaggggccctggagggcgcggcctgaatcctgattgcccttctgctgagaggacacacgcagctgaagatgaatttgggaaaagtagccgcttgctactttaactatggaagagcagggccacagtgagatggaaataatcccatcagagtctcacccccacattcaattactgaaaagcaatcgggaacttctggtcactcacatccgcaatactcagtgtctggtggacaacttgctgaagaatgactacttctcggccgaagatgcggagattgtgtgtgcctgccccacccagcctgacaaggtccgcaaaattctggacctggtacagagcaagggcgaggaggtgtccgagttcttcctctacttgctccagcaactcgcagatgcctacgtggacctcaggccttggctgctggagatcggcttctccccttccctgctcactcagagcaaagtcgtggtcaacactgacccagtgagcaggtatacccagcagctgcgacaccatctgggccgtgactccaagttcgtgctgtgctatgcccagaaggaggagctgctgctggaggagatctacatggacaccatcatggagctggttggcttcagcaatgagagcctgggcagcctgaacagcctggcctgcctcctggaccacaccaccggcatcctcaatgagcagggtgagaccatcttcatcctgggtgatgctggggtgggcaagtccatgctgctacagcggctgcagagcctctgggccacgggccggctagacgcaggggtcaaattcttcttccactttcgctgccgcatgttcagctgcttcaaggaaagtgacaggctgtgtctgcaggacctgctcttcaagcactactgctacccagagcgggaccccgaggaggtgtttgccttcctgctgcgcttcccccacgtggccctcttcaccttcgatggcctggacgagctgcactcggacttggacctgagccgcgtgcctgacagctcctgcccctgggagcctgcccaccccctggtcttgctggccaacctgctcagtgggaagctgctcaagggggctagcaagctgctcacagcccgcacaggcatcgaggtcccgcgccagttcctgcggaagaaggtgcttctccggggcttctcccccagccacctgcgcgcctatgccaggaggatgttccccgagcgggccctgcaggaccgcctgctgagccagctggaggccaaccccaacctctgcagcctgtgctctgtgcccctcttctgctggatcatcttccggtgcttccagcacttccgtgctgcctttgaaggctcaccacagctgcccgactgcacgatgaccctgacagatgtcttcctcctggtcactgaggtccatctgaacaggatgcagcccagcagcctggtgcagcggaacacacgcagcccagtggagaccctccacgccggccgggacactctgtgctcgctggggcaggtggcccaccggggcatggagaagagcctctttgtcttcacccaggaggaggtgcaggcctccgggctgcaggagagagacatgcagctgggcttcctgcgggctttgccggagctgggccccgggggtgaccagcagtcctatgagtttttccacctcaccctccaggccttctttacagccttcttcctcgtgctggacgacagggtgggcactcaggagctgctcaggttcttccaggagtggatgccccctgcgggggcagcgaccacgtcctgctatcctcccttcctcccgttccagtgcctgcagggcagtggtccggcgcgggaagacctcttcaagaacaaggatcacttccagttcaccaacctcttcctgtgcgggctgttgtccaaagccaaacagaaactcctgcggcatctggtgcccgcggcagccctgaggagaaagcgcaaggccctgtgggcacacctgttttccagcctgcggggctacctgaagagcctgccccgcgttcaggtcgaaagcttcaaccaggtgcaggccatgcccacgttcatctggatgctgcgctgcatctacgagacacagagccagaaggtggggcagctggcggccaggggcatctgcgccaactacctcaagctgacctactgcaacgcctgctcggccgactgcagcgccctctccttcgtcctgcatcacttccccaagcggctggccctagacctagacaacaacaatctcaacgactacggcgtgcgggagctgcagccctgcttcagccgcctcactgttctcagactcagcgtaaaccagatcactgacggtggggtaaaggtgctaagcgaagagctgaccaaatacaaaattgtgacctatttgggtttatacaacaaccagatcaccgatgtcggagccaggtacgtcaccaaaatcctggatgaatgcaaaggcctcacgcatcttaaactgggaaaaaacaaaataacaagtgaaggagggaagtatctcgccctggctgtgaagaacagcaaatcaatctctgaggttgggatgtggggcaatcaagttggggatgaaggagcaaaagccttcgcagaggctctgcggaaccaccccagcttgaccaccctgagtcttgcgtccaacggcatctccacagaaggaggaaagagccttgcgagggccctgcagcagaacacgtctctagaaatactgtggctgacccaaaatgaactcaacgatgaagtggcagagagtttggcagaaatgttgaaagtcaaccagacgttaaagcatttatggcttatccagaatcagatcacagctaaggggactgcccagctggcagatgcgttacagagcaacactggcataacagagatttgcctaaatggaaacctgataaaaccagaggaggccaaagtctatgaagatgagaagcggattatctgtttctgagaggatgctttcctgttcatggggtttttgccctggagcctcagcagcaaatgccactctgggcagtcttttgtgtcagtgtcttaaaggggcctgcgcaggcgggactatcaggagtccactgcctccatgatgcaagccagcttcctgtgcagaaggtctggtcggcaaactccctaagtacccgctacaattctgcagaaaaagaatgtgtcttgcgagctgttgtagttacagtaaatacactgtgaagagactttattgcctattataattatttttatctgaagctagaggaataaagctgtgagcaaacagaggaggccagcctcacctcattccaacacctgccatagggaccaacgggagcgagttggtcaccgctcttttcattgaagagttgaggatgtggcacaaagttggtgccaagcttcttgaataaaacgtgtttgatggattagtattatacctgaaatattttcttccttctcagcactttcccatgtattgatactggtcccacttcacagctggagacaccggagtatgtgcagtgtgggatttgactcctccaaggttttgtggaaagttaatgtcaaggaaaggatgcaccacgggcttttaattttaatcctggagtctcactgtctgctggcaaagatagagaatgccctcagctcttagctggtctaagaatgacgatgccttcaaaatgctgcttccactcagggcttctcctctgctaggctaccctcctctagaaggctgagtaccatgggctacagtgtctggccttgggaagaagtgattctgtccctccaaagaaatagggcatggcttgcccctgtggccctggcatccaaatggctgcttttgtctcccttacctcgtgaagaggggaagtctcttcctgcctcccaagcagctgaagggtgactaaacgggcgccaagactcaggggatcggctgggaactgggccagcagagcatgttggacaccccccaccatggtgggcttgtggtggctgctccatgagggtgggggtgatactactagatcacttgtcctcttgccagctcatttgttaataaaatactgaaaacactctta

SEQ ID NO: 443970 - DNA, 4382 bp, Homo sapiens
caaggtcccctgggacagtgcaaggaaagaaagaagcctgcggtgaaagtgacactgagtgattgtaagtcaggagactttccttcggtttctgcctttgatggcaagaggtggagattgtggcggcgattacagaaaacatctgggaagacaagttgctgtttttatgggaatcgcaggcttggaagagacagaagcaattccagaaataaattggaaattgaagatttaaacaatgttgttttaaaatattctaacttcaaagaatgatgccagaaacttaaaaaggggctgcgcagagtagcaggggccctggagggcgcggcctgaatcctgattgcccttctgctgagaggacacacgcagctgaagatgaatttgggaaaagtagccgcttgctactttaactatggaagagcagggccacagtgagatggaaataatcccatcagagtctcacccccacattcaattactgaaaagcaatcgggaacttctggtcactcacatccgcaatactcagtgtctggtggacaacttgctgaagaatgactacttctcggccgaagatgcggagattgtgtgtgcctgccccacccagcctgacaaggtccgcaaaattctggacctggtacagagcaagggcgaggaggtgtccgagttcttcctctacttgctccagcaactcgcagatgcctacgtggacctcaggccttggctgctggagatcggcttctccccttccctgctcactcagagcaaagtcgtggtcaacactgacccagtgagcaggtatacccagcagctgcgacaccatctgggccgtgactccaagttcgtgctgtgctatgcccagaaggaggagctgctgctggaggagatctacatggacaccatcatggagctggttggcttcagcaatgagagcctgggcagcctgaacagcctggcctgcctcctggaccacaccaccggcatcctcaatgagcagggtgagaccatcttcatcctgggtgatgctggggtgggcaagtccatgctgctacagcggctgcagagcctctgggccacgggccggctagacgcaggggtcaaattcttcttccactttcgctgccgcatgttcagctgcttcaaggaaagtgacaggctgtgtctgcaggacctgctcttcaagcactactgctacccagagcgggaccccgaggaggtgtttgccttcctgctgcgcttcccccacgtggccctcttcaccttcgatggcctggacgagctgcactcggacttggacctgagccgcgtgcctgacagctcctgcccctgggagcctgcccaccccctggtcttgctggccaacctgctcagtgggaagctgctcaagggggctagcaagctgctcacagcccgcacaggcatcgaggtcccgcgccagttcctgcggaagaaggtgcttctccggggcttctcccccagccacctgcgcgcctatgccaggaggatgttccccgagcgggccctgcaggaccgcctgctgagccagctggaggccaaccccaacctctgcagcctgtgctctgtgcccctcttctgctggatcatcttccggtgcttccagcacttccgtgctgcctttgaaggctcaccacagctgcccgactgcacgatgaccctgacagatgtcttcctcctggtcactgaggtccatctgaacaggatgcagcccagcagcctggtgcagcggaacacacgcagcccagtggagaccctccacgccggccgggacactctgtgctcgctggggcaggtggcccaccggggcatggagaagagcctctttgtcttcacccaggaggaggtgcaggcctccgggctgcaggagagagacatgcagctgggcttcctgcgggctttgccggagctgggccccgggggtgaccagcagtcctatgagtttttccacctcaccctccaggccttctttacagccttcttcctcgtgctggacgacagggtgggcactcaggagctgctcaggttcttccaggagtggatgccccctgcgggggcagcgaccacgtcctgctatcctcccttcctcccgttccagtgcctgcagggcagtggtccggcgcgggaagacctcttcaagaacaaggatcacttccagttcaccaacctcttcctgtgcgggctgttgtccaaagccaaacagaaactcctgcggcatctggtgcccgcggcagccctgaggagaaagcgcaaggccctgtgggcacacctgttttccagcctgcggggctacctgaagagcctgccccgcgttcaggtcgaaagcttcaaccaggtgcaggccatgcccacgttcatctggatgctgcgctgcatctacgagacacagagccagaaggtggggcagctggcggccaggggcatctgcgccaactacctcaagctgacctactgcaacgcctgctcggccgactgcagcgccctctccttcgtcctgcatcacttccccaagcggctggccctagacctagacaacaacaatctcaacgactacggcgtgcgggagctgcagccctgcttcagccgcctcactgttctcagactcagcgtaaaccagatcactgacggtggggtaaaggtgctaagcgaagagctgaccaaatacaaaattgtgacctatttgggtttatacaacaaccagatcaccgatgtcggagccaggtacgtcaccaaaatcctggatgaatgcaaaggcctcacgcatcttaaactgggaaaaaacaaaataacaagtgaaggagggaagtatctcgccctggctgtgaagaacagcaaatcaatctctgaggttgggatgtggggcaatcaagttggggatgaaggagcaaaagccttcgcagaggctctgcggaaccaccccagcttgaccaccctgagtcttgcgtccaacggcatctccacagaaggaggaaagagccttgcgagggccctgcagcagaacacgtctctagaaatactgtggctgacccaaaatgaactcaacgatgaagtggcagagagtttggcagaaatgttgaaagtcaaccagacgttaaagcatttatggcttatccagaatcagatcacagctaaggggactgcccagctggcagatgcgttacagagcaacactggcataacagagatttgcctaaatggaaacctgataaaaccagaggaggccaaagtctatgaagatgagaagcggattatctgtttctgagaggatgctttcctgttcatggggtttttgccctggagcctcagcagcaaatgccactctgggcagtcttttgtgtcagtgtcttaaaggggcctgcgcaggcgggactatcaggagtccactgcctccatgatgcaagccagcttcctgtgcagaaggtctggtcggcaaactccctaagtacccgctacaattctgcagaaaaagaatgtgtcttgcgagctgttgtagttacagtaaatacactgtgaagagactttattgcctattataattatttttatctgaagctagaggaataaagctgtgagcaaacagaggaggccagcctcacctcattccaacacctgccatagggaccaacgggagcgagttggtcaccgctcttttcattgaagagttgaggatgtggcacaaagttggtgccaagcttcttgaataaaacgtgtttgatggattagtattatacctgaaatattttcttccttctcagcactttcccatgtattgatactggtcccacttcacagctggagacaccggagtatgtgcagtgtgggatttgactcctccaaggttttgtggaaagttaatgtcaaggaaaggatgcaccacgggcttttaattttaatcctggagtctcactgtctgctggcaaagatagagaatgccctcagctcttagctggtctaagaatgacgatgccttcaaaatgctgcttccactcagggcttctcctctgctaggctaccctcctctagaaggctgagtaccatgggctacagtgtctggccttgggaagaagtgattctgtccctccaaagaaatagggcatggcttgcccctgtggccctggcatccaaatggctgcttttgtctcccttacctcgtgaagaggggaagtctcttcctgcctcccaagcagctgaagggtgactaaacgggcgccaagactcaggggatcggctgggaactgggccagcagagcatgttggacaccccccaccatggtgggcttgtggtggctgctccatgagggtgggggtgatactactagatcacttgtcctcttgccagctcatttgttaataaaatactgaaaacactctta

SEQ ID NO: 443971 - DNA, 2224 bp, Homo sapiens
gctttggacatagccagatcccatctctaaattagccaggtggtgatagcaaacacctatggcccagctatccgggaggctgaggtgggaggaccctcgagacaaggaggttgaggctgcagtgagccgtgatcgtgcctgtgtactatagccagggcgaaagagtgagaccctgtttcaaaacataaaaagataaaataacagtagtacctacttttgagtcattgtgaggactgcaggacttaagaaatattaagtgaggccgggcacggtggctcacccctgtaatcctggcactttacagtgaggcggctgaagcagggctgcagcgccctctccttcgtcctgcatcacttccccaagcggctggccctagacctagacaacaacaatctcaacgactacggcgtgcgggagctgcagccctgcttcagccgcctcactgttctcagactcagcgtaaaccagatcactgacggtggggtaaaggtgctaagcgaagagctgaccaaatacaaaattgtgacctatttgggtttatacaacaaccagatcaccgatgtcggagccaggtacgtcaccaaaatcctggatgaatgcaaaggcctcacgcatcttaaactgggaaaaaacaaaataacaagtgaaggagggaagtatctcgccctggctgtgaagaacagcaaatcaatctctgaggttgggatgtggggcaatcaagttggggatgaaggagcaaaagccttcgcagaggctctgcggaaccaccccagcttgaccaccctgagtcttgcgtccaacggcatctccacagaaggaggaaagagccttgcgagggccctgcagcagaacacgtctctagaaatactgtggctgacccaaaatgaactcaacgatgaagtggcagagagtttggcagaaatgttgaaagtcaaccagacgttaaagcatttatggcttatccagaatcagatcacagctaaggggactgcccagctggcagatgcgttacagagcaacactggcataacagagatttgcctaaatggaaacctgataaaaccagaggaggccaaagtctatgaagatgagaagcggattatctgtttctgagaggatgctttcctgttcatggggtttttgccctggagcctcagcagcaaatgccactctgggcagtcttttgtgtcagtgtcttaaaggggcctgcgcaggcgggactatcaggagtccactgcctccatgatgcaagccagcttcctgtgcagaaggtctggtcggcaaactccctaagtacccgctacaattctgcagaaaaagaatgtgtcttgcgagctgttgtagttacagtaaatacactgtgaagagactttattgcctattataattatttttatctgaagctagaggaataaagctgtgagcaaacagaggaggccagcctcacctcattccaacacctgccatagggaccaacgggagcgagttggtcaccgctcttttcattgaagagttgaggatgtggcacaaagttggtgccaagcttcttgaataaaacgtgtttgatggattagtattatacctgaaatattttcttccttctcagcactttcccatgtattgatactggtcccacttcacagctggagacaccggagtatgtgcagtgtgggatttgactcctccaaggttttgtggaaagttaatgtcaaggaaaggatgcaccacgggcttttaattttaatcctggagtctcactgtctgctggcaaagatagagaatgccctcagctcttagctggtctaagaatgacgatgccttcaaaatgctgcttccactcagggcttctcctctgctaggctaccctcctctagaaggctgagtaccatgggctacagtgtctggccttgggaagaagtgattctgtccctccaaagaaatagggcatggcttgcccctgtggccctggcatccaaatggctgcttttgtctcccttacctcgtgaagaggggaagtctcttcctgcctcccaagcagctgaagggtgactaaacgggcgccaagactcaggggatcggctgggaactgggccagcagagcatgttggacaccccccaccatggtgggcttgtggtggctgctccatgagggtgggggtgatactactagatcacttgtcctcttgccagctcatttgttaataaaatactgaaaacactctta

SEQ ID NO: 443972 - DNA, 3616 bp, Homo sapiens
ccctcgcgctactgcgggagcagcgtcctcccgggccacggcgcttcccggccccggcgtccccggaccatggcgctctccgggctcttctctagctctcagcggctgcgaagtctgtaaacctggtggccaagtgattgtaagtcaggagactttccttcggtttctgcctttgatggcaagaggtggagattgtggcggcgattacagaaaacatctgggaagacaagttgctgtttttatgggaatcgcaggcttggaagagacagaagcaattccagaaataaattggaaattgaagatttaaacaatgttgttttaaaatattctaacttcaaagaatgatgccagaaacttaaaaaggggctgcgcagagtagcaggggccctggagggcgcggcctgaatcctgattgcccttctgctgagaggacacacgcagctgaagatgaatttgggaaaagtagccgcttgctactttaactatggaagagcagggccacagtgagatggaaataatcccatcagagtctcacccccacattcaattactgaaaagcaatcgggaacttctggtcactcacatccgcaatactcagtgtctggtggacaacttgctgaagaatgactacttctcggccgaagatgcggagattgtgtgtgcctgccccacccagcctgacaaggtccgcaaaattctggacctggtacagagcaagggcgaggaggtgtccgagttcttcctctacttgctccagcaactcgcagatgcctacgtggacctcaggccttggctgctggagatcggcttctccccttccctgctcactcagagcaaagtcgtggtcaacactgacccagtgagcaggtatacccagcagctgcgacaccatctgggccgtgactccaagttcgtgctgtgctatgcccagaaggaggagctgctgctggaggagatctacatggacaccatcatggagctggttggcttcagcaatgagagcctgggcagcctgaacagcctggcctgcctcctggaccacaccaccggcatcctcaatgagcagggtgagaccatcttcatcctgggtgatgctggggtgggcaagtccatgctgctacagcggctgcagagcctctgggccacgggccggctagacgcaggggtcaaattcttcttccactttcgctgccgcatgttcagctgcttcaaggaaagtgacaggctgtgtctgcaggacctgctcttcaagcactactgctacccagagcgggaccccgaggaggtgtttgccttcctgctgcgcttcccccacgtggccctcttcaccttcgatggcctggacgagctgcactcggacttggacctgagccgcgtgcctgacagctcctgcccctgggagcctgcccaccccctggtcttgctggccaacctgctcagtgggaagctgctcaagggggctagcaagctgctcacagcccgcacaggcatcgaggtcccgcgccagttcctgcggaagaaggtgcttctccggggcttctcccccagccacctgcgcgcctatgccaggaggatgttccccgagcgggccctgcaggaccgcctgctgagccagctggaggccaaccccaacctctgcagcctgtgctctgtgcccctcttctgctggatcatcttccggtgcttccagcacttccgtgctgcctttgaaggctcaccacagctgcccgactgcacgatgaccctgacagatgtcttcctcctggtcactgaggtccatctgaacaggatgcagcccagcagcctggtgcagcggaacacacgcagcccagtggagaccctccacgccggccgggacactctgtgctcgctggggcaggtggcccaccggggcatggagaagagcctctttgtcttcacccaggaggaggtgcaggcctccgggctgcaggagagagacatgcagctgggcttcctgcgggctttgccggagctgggccccgggggtgaccagcagtcctatgagtttttccacctcaccctccaggccttctttacagccttcttcctcgtgctggacgacagggtgggcactcaggagctgctcaggttcttccaggagtggatgccccctgcgggggcagcgaccacgtcctgctatcctcccttcctcccgttccagtgcctgcagggcagtggtccggcgcgggaagacctcttcaagaacaaggatcacttccagttcaccaacctcttcctgtgcgggctgttgtccaaagccaaacagaaactcctgcggcatctggtgcccgcggcagccctgaggagaaagcgcaaggccctgtgggcacacctgttttccagcctgcggggctacctgaagagcctgccccgcgttcaggtcgaaagcttcaaccaggtgcaggccatgcccacgttcatctggatgctgcgctgcatctacgagacacagagccagaaggtggggcagctggcggccaggggcatctgcgccaactacctcaagctgacctactgcaacgcctgctcggccgactgcagcgccctctccttcgtcctgcatcacttccccaagcggctggccctagacctagacaacaacaatctcaacgactacggcgtgcgggagctgcagccctgcttcagccgcctcactgttctcagactcagcgtaaaccagatcactgacggtggggtaaaggtgctaagcgaagagctgaccaaatacaaaattgtgacctatttgggtttatacaacaaccagatcaccgatgtcggagccaggtacgtcaccaaaatcctggatgaatgcaaaggcctcacgcatcttaaactgggaaaaaacaaaataacaagtgaaggagggaagtatctcgccctggctgtgaagaacagcaaatcaatctctgaggttgggatgtggggcaatcaagttggggatgaaggagcaaaagccttcgcagaggctctgcggaaccaccccagcttgaccaccctgagtcttgcgtccaacggcatctccacagaaggaggaaagagccttgcgagggccctgcagcagaacacgtctctagaaatactgtggctgacccaaaatgaactcaacgatgaagtggcagagagtttggcagaaatgttgaaagtcaaccagacgttaaagcatttatggcttatccagaatcagatcacagctaaggggactgcccagctggcagatgcgttacagagcaacactggcataacagagatttggtaagatcccagcgtttgtcacagtaataacaccagtgactgtttactcaccaccactgactgtgcaaggcacaacgcagggtggtttctgtttattcctccagcaaccctgcacagtaatggtattacctctgttttacagaggtagacagaggcccagaccagtgaaataaggttgcccaaggtcactacgagagaagctagaattcagcccagaatgcctgattccatattctgtgctctcctgccctgggcccccgccctcatctaccttcattgggtgggatgggggaagtggccagtgaaatgatttcctagtggaagtaaatccccctgggactca

SEQ ID NO: 443973 - DNA, 422 bp, Homo sapiens
aggtggggagggagggtgggctcctctacaggtagctgggctaagaaataggagcccaggtacaggatttgcattaaaaatgagtcccattgaccttctgtggggctgacaggctgggcttggagcctggctgttttctgggttctcagcaagtgatcatctgcatagctggagagccttgggctgagctcccgctcctgtgaactctaaaacaatgtctgccaagtaggctctcttgagtaaatacttccttttttttccttaggctgacccaaaatgaactcaacgatgaagtggcagagagtttggcagaaatgttgaaagtcaaccagacgttaaagcatttatggtaactcagagagccttacaatttcagactgtgctacttttcaaaagtattttttgagataaaatttacatac

SEQ ID NO: 443974 - DNA, 533 bp, Homo sapiens
cacctctgtgctccacaggagacatgcaggtgctttctctcatgagctcaggctcctgggctgacagctctccgaagctcgtggtgaggctcggtctctaactgtgccacttgccgatggcctctgttcacaaggcttcccctgctcttcgatcttgcatcaccccttgaatttgaaatccagagcagcccactcagagaccagtgtgaggaattagtgtccaggccacagatccagggactgggcacaaacatctgcctgttgagtaggaactgagctgtggccattggcaaaaaaggaggggtgagcatggctgtttcttggggagctaacacttcactatcttgtctcctccctcaggatgtggggcaatcaagttggggatgaaggagcaaaagccttcgcagaggctctgcggaaccaccccagcttgaccaccctgaggtaactgtggccctgctgtctccaggggccaacctggtccctcccagctgctctaggtttgctggggaagggtgattcgtgctcctaat

SEQ ID NO: 443975 - DNA, 3589 bp, Homo sapiens
tctagagcggccgctcgcgatctagaaccccggaccatggcgctctccgggctcttctctagctctcagcggctgcgaagtctgtaaacctggtggccaagtgattgtaagtcaggagactttccttcggtttctgcctttgatggcaagaggtggagattgtggcggcgattacagaaaacatctgggaagacaagttgctgtttttatgggaatcgcaggcttggaagagacagaagcaattccagaaataaattggaaattgaagatttaaacaatgttgttttaaaatattctaacttcaaagaatgatgccagaaacttaaaaaggggctgcgcagagtagcaggggccctggagggcgcggcctgaatcctgattgcccttctgctgagaggacacacgcagctgaagatgaatttgggaaaagtagccgcttgctactttaactatggaagagcagggccacagtgagatggaaataatcccatcagagtctcacccccacattcaattactgaaaagcaatcgggaacttctggtcactcacatccgcaatactcagtgtctggtggacaacttgctgaagaatgactacttctcggccgaagatgcggagattgtgtgtgcctgccccacccagcctgacaaggtccgcaaaattctggacctggtacagagcaagggcgaggaggtgtccgagttcttcctctacttgctccagcaactcgcagatgcctacgtggacctcaggccttggctgctggagatcggcttctccccttccctgctcactcagagcaaagtcgtggtcaacactgacccagtgagcaggtatacccagcagctgcgacaccatctgggccgtgactccaagttcgtgctgtgctatgcccagaaggaggagctgctgctggaggagatctacatggacaccatcatggagctggttggcttcagcaatgagagcctgggcagcctgaacagcctggcctgcctcctggaccacaccaccggcatcctcaatgagcagggtgagaccatcttcatcctgggtgatgctggggtgggcaagtccatgctgctacagcggctgcagagcctctgggccacgggccggctagacgcaggggtcaaattcttcttccactttcgctgccgcatgttcagctgcttcaaggaaagtgacaggctgtgtctgcaggacctgctcttcaagcactactgctacccagagcgggaccccgaggaggtgtttgccttcctgctgcgcttcccccacgtggccctcttcaccttcgatggcctggacgagctgcactcggacttggacctgagccgcgtgcctgacagctcctgcccctgggagcctgcccaccccctggtcttgctggccaacctgctcagtgggaagctgctcaagggggctagcaagctgctcacagcccgcacaggcatcgaggtcccgcgccagttcctgcggaagaaggtgcttctccggggcttctcccccagccacctgcgcgcctatgccaggaggatgttccccgagcgggccctgcaggaccgcctgctgagccagctggaggccaaccccaacctctgcagcctgtgctctgtgcccctcttctgctggatcatcttccggtgcttccagcacttccgtgctgcctttgaaggctcaccacagctgcccgactgcacgatgaccctgacagatgtcttcctcctggtcactgaggtccatctgaacaggatgcagcccagcagcctggtgcagcggaacacacgcagcccagtggagaccctccacgccggccgggacactctgtgctcgctggggcaggtggcccaccggggcatggagaagagcctctttgtcttcacccaggaggaggtgcaggcctccgggctgcaggagagagacatgcagctgggcttcctgcgggctttgccggagctgggccccgggggtgaccagcagtcctatgagtttttccacctcaccctccaggccttctttacagccttcttcctcgtgctggacgacagggtgggcactcaggagctgctcaggttcttccaggagtggatgccccctgcgggggcagcgaccacgtcctgctatcctcccttcctcccgttccagtgcctgcagggcagtggtccggcgcgggaagacctcttcaagaacaaggatcacttccagttcaccaacctcttcctgtgcgggctgttgtccaaagccaaacagaaactcctgcggcatctggtgcccgcggcagccctgaggagaaagcgcaaggccctgtgggcacacctgttttccagcctgcggggctacctgaagagcctgccccgcgttcaggtcgaaagcttcaaccaggtgcaggccatgcccacgttcatctggatgctgcgctgcatctacgagacacagagccagaaggtggggcagctggcggccaggggcatctgcgccaactacctcaagctgacctactgcaacgcctgctcggccgactgcagcgccctctccttcgtcctgcatcacttccccaagcggctggccctagacctagacaacaacaatctcaacgactacggcgtgcgggagctgcagccctgcttcagccgcctcactgttctcagactcagcgtaaaccagatcactgacggtggggtaaaggtgctaagcgaagagctgaccaaatacaaaattgtgacctatttgggtttatacaacaaccagatcaccgatgtcggagccaggtacgtcaccaaaatcctggatgaatgcaaaggcctcacgcatcttaaactgggaaaaaacaaaataacaagtgaaggagggaagtatctcgccctggctgtgaagaacagcaaatcaatctctgaggttgggatgtggggcaatcaagttggggatgaaggagcaaaagccttcgcagaggctctgcggaaccaccccagcttgaccaccctgagtcttgcgtccaacggcatctccacagaaggaggaaagagccttgcgagggccctgcagcagaacacgtctctagaaatactgtggctgacccaaaatgaactcaacgatgaagtggcagagagtttggcagaaatgttgaaagtcaaccagacgttaaagcatttatggcttatccagaatcagatcacagctaaggggactgcccagctggcagatgcgttacagagcaacactggcataacagagatttgcctaaatggaaacctgataaaaccagaggaggccaaagtctatgaagatgagaagcggattatctgtttctgagaggatgctttcctgttcatggggtttttgccctggagcctcagcagcaaatgccactctgggcagtcttttgtgtcagtgtcttaaaggggcctgcgcaggcgggactatcaggagtccactgcctccatgatgcaagccagcttcctgtgcagaaggtctggtcggcaaactccctaagtacccgctacaattctgcagaaaaagaatgtgtcttgcgagctgttgtagttacagtaaatacactgtgaagagaaaaaaaaaacggacgcgtgg

SEQ ID NO: 443976 - DNA, 4373 bp, Homo sapiens
ccctcgcgctactgcgggagcagcgtcctcccgggccacggcgcttcccggccccggcgtccccggaccatggcgctctccgggctcttctctagctctcagcggctgcgaagtctgtaaacctggtggccaagtgattgtaagtcaggagactttccttcggtttctgcctttgatggcaagaggtggagattgtggcggcgattacagaaaacatctgggaagacaagttgctgtttttatgggaatcgcaggcttggaagagacagaagcaattccagaaataaattggaaattgaagatttaaacaatgttgttttaaaatattctaacttcaaagaatgatgccagaaacttaaaaaggggctgcgcagagtagcaggggccctggagggcgcggcctgaatcctgattgcccttctgctgagaggacacacgcagctgaagatgaatttgggaaaagtagccgcttgctactttaactatggaagagcagggccacagtgagatggaaataatcccatcagagtctcacccccacattcaattactgaaaagcaatcgggaacttctggtcactcacatccgcaatactcagtgtctggtggacaacttgctgaagaatgactacttctcggccgaagatgcggagattgtgtgtgcctgccccacccagcctgacaaggtccgcaaaattctggacctggtacagagcaagggcgaggaggtgtccgagttcttcctctacttgctccagcaactcgcagatgcctacgtggacctcaggccttggctgctggagatcggcttctccccttccctgctcactcagagcaaagtcgtggtcaacactgacccagtgagcaggtatacccagcagctgcgacaccatctgggccgtgactccaagttcgtgctgtgctatgcccagaaggaggagctgctgctggaggagatctacatggacaccatcatggagctggttggcttcagcaatgagagcctgggcagcctgaacagcctggcctgcctcctggaccacaccaccggcatcctcaatgagcagggtgagaccatcttcatcctgggtgatgctggggtgggcaagtccatgctgctacagcggctgcagagcctctgggccacgggccggctagacgcaggggtcaaattcttcttccactttcgctgccgcatgttcagctgcttcaaggaaagtgacaggctgtgtctgcaggacctgctcttcaagcactactgctacccagagcgggaccccgaggaggtgtttgccttcctgctgcgcttcccccacgtggccctcttcaccttcgatggcctggacgagctgcactcggacttggacctgagccgcgtgcctgacagctcctgcccctgggagcctgcccaccccctggtcttgctggccaacctgctcagtgggaagctgctcaagggggctagcaagctgctcacagcccgcacaggcatcgaggtcccgcgccagttcctgcggaagaaggtgcttctccggggcttctcccccagccacctgcgcgcctatgccaggaggatgttccccgagcgggccctgcaggaccgcctgctgagccagctggaggccaaccccaacctctgcagcctgtgctctgtgcccctcttctgctggatcatcttccggtgcttccagcacttccgtgctgcctttgaaggctcaccacagctgcccgactgcacgatgaccctgacagatgtcttcctcctggtcactgaggtccatctgaacaggatgcagcccagcagcctggtgcagcggaacacacgcagcccagtggagaccctccacgccggccgggacactctgtgctcgctggggcaggtggcccaccggggcatggagaagagcctctttgtcttcacccaggaggaggtgcaggcctccgggctgcaggagagagacatgcagctgggcttcctgcgggctttgccggagctgggccccgggggtgaccagcagtcctatgagtttttccacctcaccctccaggccttctttacagccttcttcctcgtgctggacgacagggtgggcactcaggagctgctcaggttcttccaggagtggatgccccctgcgggggcagcgaccacgtcctgctatcctcccttcctcccgttccagtgcctgcagggcagtggtccggcgcgggaagacctcttcaagaacaaggatcacttccagttcaccaacctcttcctgtgcgggctgttgtccaaagccaaacagaaactcctgcggcatctggtgcccgcggcagccctgaggagaaagcgcaaggccctgtgggcacacctgttttccagcctgcggggctacctgaagagcctgccccgcgttcaggtcgaaagcttcaaccaggtgcaggccatgcccacgttcatctggatgctgcgctgcatctacgagacacagagccagaaggtggggcagctggcggccaggggcatctgcgccaactacctcaagctgacctactgcaacgcctgctcggccgactgcagcgccctctccttcgtcctgcatcacttccccaagcggctggccctagacctagacaacaacaatctcaacgactacggcgtgcgggagctgcagccctgcttcagccgcctcactgttctcagactcagcgtaaaccagatcactgacggtggggtaaaggtgctaagcgaagagctgaccaaatacaaaattgtgacctatttgggtttatacaacaaccagatcaccgatgtcggagccaggtacgtcaccaaaatcctggatgaatgcaaaggcctcacgcatcttaaactgggaaaaaacaaaataacaagtgaaggagggaagtatctcgccctggctgtgaagaacagcaaatcaatctctgaggttgggatgtggggcaatcaagttggggatgaaggagcaaaagccttcgcagaggctctgcggaaccaccccagcttgaccaccctgagtcttgcgtccaacggcatctccacagaaggaggaaagagccttgcgagggccctgcagcagaacacgtctctagaaatactgtggctgacccaaaatgaactcaacgatgaagtggcagagagtttggcagaaatgttgaaagtcaaccagacgttaaagcatttatgcctaaatggaaacctgataaaaccagaggaggccaaagtctatgaagatgagaagcggattatctgtttctgagaggatgctttcctgttcatggggtttttgccctggagcctcagcagcaaatgccactctgggcagtcttttgtgtcagtgtcttaaaggggcctgcgcaggcgggactatcaggagtccactgcctccatgatgcaagccagcttcctgtgcagaaggtctggtcggcaaactccctaagtacccgctacaattctgcagaaaaagaatgtgtcttgcgagctgttgtagttacagtaaatacactgtgaagagactttattgcctattataattatttttatctgaagctagaggaataaagctgtgagcaaacagaggaggccagcctcacctcattccaacacctgccatagggaccaacgggagcgagttggtcaccgctcttttcattgaagagttgaggatgtggcacaaagttggtgccaagcttcttgaataaaacgtgtttgatggattagtattatacctgaaatattttcttccttctcagcactttcccatgtattgatactggtcccacttcacagctggagacaccggagtatgtgcagtgtgggatttgactcctccaaggttttgtggaaagttaatgtcaaggaaaggatgcaccacgggcttttaattttaatcctggagtctcactgtctgctggcaaagatagagaatgccctcagctcttagctggtctaagaatgacgatgccttcaaaatgctgcttccactcagggcttctcctctgctaggctaccctcctctagaaggctgagtaccatgggctacagtgtctggccttgggaagaagtgattctgtccctccaaagaaatagggcatggcttgcccctgtggccctggcatccaaatggctgcttttgtctcccttacctcgtgaagaggggaagtctcttcctgcctcccaagcagctgaagggtgactaaacgggcgccaagactcaggggatcggctgggaactgggccagcagagcatgttggacaccccccaccatggtgggcttgtggtggctgctccatgagggtgggggtgatactactagatcacttgtcctcttgccagctcatttgttaataaaatactgaaaacactctta

SEQ ID NO: 443977 - DNA, 2614 bp, Homo sapiens
tattttgggtccataatccctcatccagagcctttggggcaagacccgaatggggattctgagtgcatgctatggcatgacgtggccgcaggggtctaaggcagtgccccattttcaaacactttcatatttctcccgcagaatgtatgaaacagtcaaaccaagtgtggtaagaaagactataagtagctccacatcagttgccaaaagaattgtgagaaactttgggcattcagagcctttgaggttttggagtctgagagaagggattgcgggccagccccacacaactggtggctctgcaagctggagcagttgttcagtttcttggggcctcagtggccttcgatgttaatgaggacatggacgcaaacgaccccgggccacactcggctccagggctctgtgtggctgtggaaccctggaagcctgagcttagctgcctttcaacttccatctgctgtactattgaattggcattgagcggtgagatggctgaaaggtagacatcgagaagttttaatattcagaatcttttcttctcaagacgctgaatgtaatcttagttgtaaatacccatcacctgccagtcaccgagcactcatgcaccagggctttgcgttatgtcctaagatcctcataaccaccctgcaaggggactatcatcattacctctgtattacagatggagaaactgaggcacagagaggtaacgtgacttgtctcaggccataaagctggggaaagtagtggagctggttttgaacctgagctgtgagacctcagagccctaaactctggtgcctgtgtgttcccctttcaacccagactttggaaatcagtagacaccatatgcttcaaaaaacaggggctattaaaatgacatcaggagccagaaagtctcatggctgtgctttctcttgaagtttatacaacaaccagatcaccgatgtcggagccaggtacgtcaccaaaatcctggatgaatgcaaaggcctcacgcatcttaaactgggaaaaaacaaaataacaagtgaaggagggaagtatctcgccctggctgtgaagaacagcaaatcaatctctgaggttgggatgtggggcaatcaagttggggatgaaggagcaaaagccttcgcagaggctctgcggaaccaccccagcttgaccaccctgagtcttgcgtccaacggcatctccacagaaggaggaaagagccttgcgagggccctgcagcagaacacgtctctagaaatactgtggctgacccaaaatgaactcaacgatgaagtggcagagagtttggcagaaatgttgaaagtcaaccagacgttaaagcatttatggcttatccagaatcagatcacagctaaggggactgcccagctggcagatgcgttacagagcaacactggcataacagagatttgcctaaatggaaacctgataaaaccagaggaggccaaagtctatgaagatgagaagcggattatctgtttctgagaggatgctttcctgttcatggggtttttgccctggagcctcagcagcaaatgccactctgggcagtcttttgtgtcagtgtcttaaaggggcctgcgcaggcgggactatcaggagtccactgcctccatgatgcaagccagcttcctgtgcagaaggtctggtcggcaaactccctaagtacccgctacaattctgcagaaaaagaatgtgtcttgcgagctgttgtagttacagtaaatacactgtgaagagactttattgcctattataattatttttatctgaagctagaggaataaagctgtgagcaaacagaggaggccagcctcacctcattccaacacctgccatagggaccaacgggagcgagttggtcaccgctcttttcattgaagagttgaggatgtggcacaaagttggtgccaagcttcttgaataaaacgtgtttgatggattagtattatacctgaaatattttcttccttctcagcactttcccatgtattgatactggtcccacttcacagctggagacaccggagtatgtgcagtgtgggatttgactcctccaaggttttgtggaaagttaatgtcaaggaaaggatgcaccacgggcttttaattttaatcctggagtctcactgtctgctggcaaagatagagaatgccctcagctcttagctggtctaagaatgacgatgccttcaaaatgctgcttccactcagggcttctcctctgctaggctaccctcctctagaaggctgagtaccatgggctacagtgtctggccttgggaagaagtgattctgtccctccaaagaaatagggcatggcttgcccctgtggccctggcatccaaatggctgcttttgtctcccttacctcgtgaagaggggaagtctcttcctgcctcccaagcagctgaagggtgactaaacgggcgccaagactcaggggatcggctgggaactgggccagcagagcatgttggacaccccccaccatggtgggcttgtggtggctgctccatgagggtgggggtgatactactagatcacttgtcctcttgccagctcatttgttaataaaatactgaaaacactctta

SEQ ID NO: 443978 - DNA, 787 bp, Homo sapiens
ccctcgcgctactgcgggagcagcgtcctcccgggccacggcgcttcccggccccggcgtccccggaccatggcgctctccgggctcttctctagctctcagcggctgcgaagtctgtaaacctggtggccaagtgattgtaagtcaggagactttccttcggtttctgcctttgatggcaagaggtggagattgtggcggcgattacagaaaacatctgggaagacaagttgctgtttttatgggaatcgcaggcttggaagagacagaagcaattccagaaataaattggaaattgaagatttaaacaatgttgttttaaaatattctaacttcaaagaatgatgccagaaacttaaaaaggggctgcgcagagtagcaggggccctggagggcgcggcctgaatcctgattgcccttctgctgagaggacacacgcagctgaagatgaatttgggaaaagtagccgcttgctactttaactatggaagagcagggccacagtgagatggaaataatcccatcagagtctcacccccacattcaattactgaaaagcaatcgggaacttctggtcactcacatccgcaatactcagtgtctggtggacaacttgctgaagaatgactacttctcggccgaagatgcggagattgtgtgtgcctgccccacccagcctgacaaggtgccccggggacagggacgggcatgggcattgtgtggaccccgggagctagaagaggcctctcctgctgatctgagtgaagagcgtgggagtttagtccag

SEQ ID NO: 443979 - DNA, 1598 bp, Homo sapiens
tgcggcgcgcggctgcgcgggactcggccttctgggcgcgcgcgacgtcagtttgagttctgtgttctccccgcccgtgtcccgcccgacccgcgcccgcgatgctggcgctgcgctgcggctcccgctggctcggcctgctctccgtcccgcgctccgtgccgctgcgcctccccgcggcccgcgcctgcagcaagggctccggcgacccgtcctcttcctcctcctccgggaacccgctcgtgtacctggacgtggacgccaacgggaagccgctcggccgcgtggtgctggagctgaaggcagatgtcgtcccaaagacagctgagaacttcagagccctgtgcactggtgagaagggcttcggctacaaaggctccaccttccacagggtgatcccttccttcatgtgccaggcgggcgacttcaccaaccacaatggcacaggcgggaagtccatctacggaagccgctttcctgacgagaactttacactgaagcacgtggggccaggtgtcctgtccatggctaatgctggtcctaacaccaacggctcccagttcttcatctgcaccataaagacagactggttggatggcaagcatgttgtgttcggtcacgtcaaagagggcatggacgtcgtgaagaaaatagaatctttcggctctaagagtgggaggacatccaagaagattgtcatcacagactgtggccagttgagctaatctgtggccagggtgctggcatggtggcagctgcaaatgtccatgcacccaggtggccgcgttgggctgtcagccaaggtgcctgaaacgatacgtgtgcccactccactgtcacagtgtgcctgaggaaggctgctagggatgttagacctcggccaggacccaccacattgcttcctaatacccacccttcctcacgacctcatttctgggcatctttgtggacatgatgtcacccaccccttgtcaagcattgcctgtgattgcccagcccagattcatctgtgccttggacatggtgatggtgatgggttgccatccaagtgaaagtcttttccttgaccaagggggacagtcagttttgcaaaaggactctaatacctgtttaatattgtcttcctaattgggataatttaattaacaagattgactagaagtgaaactgcaacactaacttccccgtgctgtggtgtgacctgagttggtgacacaggccacagaccccagagcttggcttttgaaacacaactcagggcttttgtgaaggttcccccgctgagatctttcctcctggttactgtgaagcctgttggtttgctgctgtcgtttttgaggagggcccatgggggtaggagcagttgaacctgggaacaaacctcacttgagctgtgcctagacaatgtgaattcctgtgttgctaacagaagtggcctgtaagctcctgtgctccggagggaagcatttcctggtaggctttgatttttctgtgtgttaaagaaattcaatctactcatgatgtgttatgcataaaacatttctggaacatggatttgtgttcaccttaaatgtgaaaataaatcctattttctatgg

SEQ ID NO: 443980 - DNA, 308 bp, Homo sapiens
aacgttggatccgaattcggatccaattcggatccaacgttggatccgaattcggatccaacggtaggagcagttgaacctgggaacaaacctcacttgagctgtgcctagacaatgtgaattcctgtgttgctaacagaagtggcctgtaagctcctgtgctccggagggaagcatttcctggtaggctttgatttttctgtgtgttaaagaaattcaatctactcatgatgtgttatgcataaaacatttctggaacatggatttgtgttcaccttaaatgtgaaaataaatcctattttctatgg

SEQ ID NO: 443981 - DNA, 2239 bp, Homo sapiens
tgcggcgcgcggctgcgcgggactcggccttctgggcgcgcgcgacgtcagtttgagttctgtgttctccccgcccgtgtcccgcccgacccgcgcccgcgatgctggcgctgcgctgcggctcccgctggctcggcctgctctccgtcccgcgctccgtgccgctgcgcctccccgcggcccgcgcctgcagcaagggctccggcgacccgtcctcttcctcctcctccgggaacccgctcgtgtacctggacgtggacgccaacgggaagccgctcggccgcgtggtgctggagctgaaggcagatgtcgtcccaaagacagctgagaacttcagagccctgtgcactggtgagaagggcttcggctacaaaggctccaccttccacagggtgatcccttccttcatgtgccaggcgggcgacttcaccaaccacaatggcacaggcgggaagtccatctacggaagccgctttcctgacgagaactttacactgaagcacgtggggccaggtgtcctgtccatggctaatgctggtcctaacaccaacggctcccagttcttcatctgcaccataaagacagactggttggatggcaagcatgttgtgttcggtcacgtcaaagagggcatggacgtcgtgaagaaaatagaatctttcggctctaagagtgggaggacatccaagaagattgtcatcacagactgtggccagttgagctaatctgtggccagggtgctggcatggtggcagctgcaaatgtccatgcacccaggtggccgcgttgggctgtcagccaaggtgcctgaaacgatacgtgtgcccactccactgtcacagtgtgcctgaggaaggctgctagggatgttagacctcggccaggacccaccacattgcttcctaatacccacccttcctcacgacctcatttctgggcatctttgtggacatgatgtcacccaccccttgtcaagcattgcctgtgattgcccagcccagattcatctgtgccttggacatggtgatggtgatgggttgccatccaagtgaaagtcttttccttgaccaagggggacagtcagttttgcaaaaggactctaatacctgtttaatattgtcttcctaattgggataatttaattaacaagattgactagaagtgaaactgcaacactaacttccccgtgctgtggtgtgacctgagttggtgacacaggccacagaccccagagcttggcttttgaaacacaactcagggcttttgtgaaggttcccccgctgagatctttcctcctggttactgtgaagcctgttggtttgctgctgtcgtttttgaggagggcccatgggggtaggagcagttgaacctgggaacaaacctcacttgagctgtgcctagacaatgtgaattcctgtgttgctaacagaagtggcctgtaagctcctgtgctccggagggaagcatttcctggtaggctttgatttttctgtgtgttaaagaaattcaatctactcatgatgtgttatgcataaaacatttctggaacatggatttgtgttcaccttaaatgtgaaaataaatcctattttctatggaagactggtacctggtttctggaagaggggtctgtgacttggagctgatctttactgagctcgccgtggcagatgccatgctcaggacgttcatgtggatggtttcatgtcatcgtgctggcaacttgtcctccctgccttagagatgaggctcagacaaacgaccttagcacccatagcctatgccatgagcactggctccaccctgaatcccagctcctccccttagtgaccccaagtctgtttccctcagctgcataaggaggcgatatagtttgaatatttgtccccagccaaatctcatgttgaactgtaatccccagtgctggaggtggggcctgctacgaggtgtttggatcatggggacgggtatttcatggcttggtgctgttttcttgatggtgaattattgcaagatacggtcatttaaaattgtgtggcacctccccctgcccccttcttgctcctgctttcaccatgtgacatgcctgatcccccttcaccttttgccatggtcataagcttcctgaggcctccctggaagctgagcagatgccagcaccatgcttcctgtacatcctgcagaaccataagccaattaaacctttttaataataaattactcagtctcaagtattttt

SEQ ID NO: 443982 - DNA, 2213 bp, Homo sapiens
tgcggcgcgcggctgcgcgggactcggccttctgggcgcgcgcgacgtcagtttgagttctgtgttctccccgcccgtgtcccgcccgacccgcgcccgcgatgctggcgctgcgctgcggctcccgctggctcggcctgctctccgtcccgcgctccgtgccgctgcgcctccccgcggcccgcgcctgcagcaagggctccggcgacccgtcctcttcctcctcctccgggaacccgctcgtgtacctggacgtggacgccaacgggaagccgctcggccgcgtggtgctggagctgaaggcagatgtcgtcccaaagacagctgagaacttcagagccctgtgcactggtgagaagggcttcggctacaaaggctccaccttccacagggtgatcccttccttcatgtgccaggcgggcgacttcaccaaccacaatggcacaggcgggaagtccatctacggaagccgctttcctgacgagaactttacactgaagcacgtggggccaggtgtcctgtccatggctaatgctggtcctaacaccaacggctcccagttcttcatctgcaccataaagacagactggttggatggcaagcatgttgtgttcggtcacgtcaaagagggcatggacgtcgtgaagaaaatagaatctttcggctctaagagtgggaggacatccaagaagattgtcatcacagactgtggccagttgagctaatctgtggccagggtgctggcatggtggcagctgcaaatgtccatgcacccaggtggccgcgttgggctgtcagccaaggtgcctgaaacgatacgtgtgcccactccactgtcacagtgtgcctgaggaaggctgctagggatgttagacctcggccaggacccaccacattgcttcctaatacccacccttcctcacgacctcatttctgggcatctttgtggacatgatgtcacccaccccttgtcaagcattgcctgtgattgcccagcccagattcatctgtgccttggacatggtgatggtgatgggttgccatccaagtgaaagtcttttccttgaccaagggggacagtcagttttgcaaaaggactctaatacctgtttaatattgtcttcctaattgggataatttaattaacaagattgactagaagtgaaactgcaacactaacttccccgtgctgtggtgtgacctgagttggtgacacaggccacagaccccagagcttggcttttgaaacacaactcagggcttttgtgaaggttcccccgctgagatctttcctcctggttactgtgaagcctgttggtttgctgctgtcgtttttgaggagggcccatgggggtaggagcagttgaacctgggaacaaacctcacttgagctgtgcctagacaatgtgaattcctgtgttgctaacagaagtggcctgtaagctcctgtgctccggagggaagcatttcctggtaggctttgatttttctgtgtgttaaagaaattcaatctactcatgatgtgttatgcataaaacatttctggaacatggatttgtgttcaccttaaatgtgaaaataaatcctattttctatggaagactggtacctggtttctggaagaggggtctgtgacttggagctgatctttactgagctcgccgtggcagatgccatgctcaggacgttcatgtggatggtttcatgtcatcgtgctggcaacttgtcctccctgccttagagatgaggctcagacaaacgaccttagcacccatagcctatgccatgagcactggctccaccctgaatcccagctcctccccttagtgaccccaagtctgtttccctcagctgcataaggaggcgatatagtttgaatatttgtccccagccaaatctcaagctggcatgcatgccgctgctgactgtagatggagtcccggaacgagttctttgactctactggagacgggatacttcatgccttcctgctcttttcatgacagtaatattatcacaaaatacggtctttggatagtgtggtgcacctccacccaccagcattcatcgctccggcatttaccagatgacacatgctagtcccgctctctaccactcaccaatgtcatcaccattcctgagcctccgtggagctgaccagagtcccagcaccactcttctgtacatcatgcaggacacatcccggggtaccg

SEQ ID NO: 443983 - DNA, 1770 bp, Homo sapiens
tgcggcgcgcggctgcgcgggactcggccttctgggcgcgcgcgacgtcagtttgagttctgtgttctccccgcccgtgtcccgcccgacccgcgcccgcgatgctggcgctgcgctgcggctcccgctggctcggcctgctctccgtcccgcgctccgtgccgctgcgcctccccgcggcccgcgcctgcagcaagggctccggcgacccgtcctcttcctcctcctccgggaacccgctcgtgtacctggacgtggacgccaacgggaagccgctcggccgcgtggtgctggagctgaaggcagatgtcgtcccaaagacagctgagaacttcagagccctgtgcactggtgagaagggcttcggctacaaaggctccaccttccacagggtgatcccttccttcatgtgccaggcgggcgacttcaccaaccacaatggcacaggcgggaagtccatctacggaagccgctttcctgacgagaactttacactgaagcacgtggggccaggtgtcctgtccatggctaatgctggtcctaacaccaacggctcccagttcttcatctgcaccataaagacagactggttggatggcaagcatgttgtgttcggtcacgtcaaagagggcatggacgtcgtgaagaaaatagaatctttcggctctaagagtgggaggacatccaagaagattgtcatcacagactgtggccagttgagctaatctgtggccagggtgctggcatggtggcagctgcaaatgtccatgcacccaggtggccgcgttgggctgtcagccaaggtgcctgaaacgatacgtgtgcccactccactgtcacagtgtgcctgaggaaggctgctagggatgttagacctcggccaggacccaccacattgcttcctaatacccacccttcctcacgacctcatttctgggcatctttgtggacatgatgtcacccaccccttgtcaagcattgcctgtgattgcccagcccagattcatctgtgccttggacatggtgatggtgatgggttgccatccaagtgaaagtcttttccttgaccaagggggacagtcagttttgcaaaaggactctaatacctgtttaatattgtcttcctaattgggataatttaattaacaagattgactagaagtgaaactgcaacactaacttccccgtgctgtggtgtgacctgagttggtgacacaggccacagaccccagagcttggcttttgaaacacaactcagggcttttgtgaaggttcccccgctgagatctttcctcctggttactgtgaagcctgttggtttgctgctgtcgtttttgaggagggcccatgggggtaggagcagttgaacctgggaacaaacctcacttgagctgtgcctagacaatgtgaattcctgtgttgctaacagaagtggcctgtaagctcctgtgctccggagggaagcatttcctggtaggctttgatttttctgtgtgttaaagaaattcaatctactcatgatgtgttatgcataaaacatttctggaacatggatttgtgttcaccttaaatgtgaaaataaatcctattttctatggaaaaaaaaaaaaaaaaaaaaaaacactttgttggcgccgcgccttgggcccttggaagaagagctttctttaaacacattcgggttgggcgcgcgcggggcgcccaggtagggtataagtgggacactgtgtggcctatatacgcgtgtgttcccatatgggaaaaattccg

SEQ ID NO: 443984 - DNA, 2219 bp, Homo sapiens
tgcggcgcgcggctgcgcgggactcggccttctgggcgcgcgcgacgtcagtttgagttctgtgttctccccgcccgtgtcccgcccgacccgcgcccgcgatgctggcgctgcgctgcggctcccgctggctcggcctgctctccgtcccgcgctccgtgccgctgcgcctccccgcggcccgcgcctgcagcaagggctccggcgacccgtcctcttcctcctcctccgggaacccgctcgtgtacctggacgtggacgccaacgggaagccgctcggccgcgtggtgctggagctgaaggcagatgtcgtcccaaagacagctgagaacttcagagccctgtgcactggtgagaagggcttcggctacaaaggctccaccttccacagggtgatcccttccttcatgtgccaggcgggcgacttcaccaaccacaatggcacaggcgggaagtccatctacggaagccgctttcctgacgagaactttacactgaagcacgtggggccaggtgtcctgtccatggctaatgctggtcctaacaccaacggctcccagttcttcatctgcaccataaagacagactggttggatggcaagcatgttgtgttcggtcacgtcaaagagggcatggacgtcgtgaagaaaatagaatctttcggctctaagagtgggaggacatccaagaagattgtcatcacagactgtggccagttgagctaatctgtggccagggtgctggcatggtggcagctgcaaatgtccatgcacccaggtggccgcgttgggctgtcagccaaggtgcctgaaacgatacgtgtgcccactccactgtcacagtgtgcctgaggaaggctgctagggatgttagacctcggccaggacccaccacattgcttcctaatacccacccttcctcacgacctcatttctgggcatctttgtggacatgatgtcacccaccccttgtcaagcattgcctgtgattgcccagcccagattcatctgtgccttggacatggtgatgtgaaagtcttttccttgaccaagggggacagtcagttttgcaaaaggactctaatacctgtttaatattgtcttcctaattgggataatttaattaacaagattgactagaagtgaaactgcaacactaacttccccgtgctgtggtgtgacctgagttggtgacacaggccacagaccccagagcttggcttttgaaacacaactcagggcttttgtgaaggttcccccgctgagatctttcctcctggttactgtgaagcctgttggtttgctgctgtcgtttttgaggagggcccatgggggtaggagcagttgaacctgggaacaaacctcacttgagctgtgcctagacaatgtgaattcctgtgttgctaacagaagtggcctgtaagctcctgtgctccggagggaagcatttcctggtaggctttgatttttctgtgtgttaaagaaattcaatctactcatgatgtgttatgcataaaacatttctggaacatggatttgtgttcaccttaaatgtgaaaataaatcctattttctatggaagactggtacctggtttctggaagaggggtctgtgacttggagctgatctttactgagctcgccgtggcagatgccatgctcaggacgttcatgtggatggtttcatgtcatcgtgctggcaacttgtcctccctgccttagagatgaggctcagacaaacgaccttagcacccatagcctatgccatgagcactggctccaccctgaatcccagctcctccccttagtgaccccaagtctgtttccctcagctgcataaggaggcgatatagtttgaatatttgtccccagccaaatctcatgttgaactgtaatccccagtgctggaggtggggcctgctacgaggtgtttggatcatggggacgggtatttcatggcttggtgctgttttcttgatggtgaattattgcaagatacggtcatttaaaattgtgtggcacctccccctgcccccttcttgctcctgctttcaccatgtgacatgcctgatcccccttcaccttttgccatggtcataagcttcctgaggcctccctggaagctgagcagatgccagcaccatgcttcctgtacatcctgcagaaccataagccaattaaacctttttaataataaattactcagtctcaagtattttt

SEQ ID NO: 443985 - DNA, 1268 bp, Homo sapiens
tgcggcgcgcggctgcgcgggactcggccttctgggcgcgcgcgacgtcagtttgagttctgtgttctccccgcccgtgtcccgcccgacccgcgcccgcgatgctggcgctgcgctgcggctcccgctggctcggcctgctctccgtcccgcgctccgtgccgctgcgcctccccgcggcccgcgcctgcagcaagggctccggcgacccgtcctcttcctcctcctccgggaacccgctcgtgtacctggacgtggacgccaacgggaagccgctcggccgcgtggtgctggagctgaaggcagatgtcgtcccaaagacagctgagaacttcagagccctgtgcactggtgagaagggcttcggctacaaaggctccaccttccacagggtgatcccttccttcatgtgccaggcgggcgacttcaccaaccacaatggcacaggcgggaagtccatctacggaagccgctttcctgacgagaactttacactgaagcacgtggggccaggtgtcctgtccatggctaatgctggtcctaacaccaacggctcccagttcttcatctgcaccataaagacagactggttggatggcaagcatgttgtgttcggtcacgtcaaagagggcatggacgtcgtgaagaaaatagaatctttcggctctaagagtgggaggacatccaagaagattgtcatcacagactgtggccagttgagctaatctgtggccagggtgctggcatggtggcagctgcaaatgtccatgcacccaggtggccgcgttgggctgtcagccaaggtgcctgaaacgatacgtgtgcccactccactgtcacagtgtgcctgaggaaggctgctagggatgttagacctcggccaggacccaccacattgcttcctaatacccacccttcctcacgacctcatttctgggcatctttgtggacatgatgtcacccaccccttgtcaagcattgcctgtgattgcccagcccagattcatctgtgccttggacatggtgatggtgatgggttgccatccaagtgaaagtcttttccttgaccaagggggacagtcagttttgcaaaaggactctaatacctgtttaatattgtcttcctaattgggataatttaattaacaagattgactagaagtgaaactgcaacactaacttccccgtgctgtggtgtgacctgagttggtgacacaggccacagaccccagagcttggcgatcgcccgaatcctgagatcacccagc

SEQ ID NO: 443986 - DNA, 2186 bp, Homo sapiens
tgccaggctggtaccggtccggagtcgtatggatgcgcgacgtcagtttgagttctgtgttctccccgcccgtgtcccgcccgacccgcgcccgcgatgctggcgctgcgctgcggctcccgctggctcggcctgctctccgtcccgcgctccgtgccgctgcgcctccccgcggcccgcgcctgcagcaagggctccggcgacccgtcctcttcctcctcctccgggaacccgctcgtgtacctggacgtggacgccaacgggaagccgctcggccgcgtggtgctggagctgaaggcagatgtcgtcccaaagacagctgagaacttcagagccctgtgcactggtgagaagggcttcggctacaaaggctccaccttccacaatggcacaggcgggaagtccatctacggaagccgctttcctgacgagaactttacactgaagcacgtggggccaggtgtcctgtccatggctaatgctggtcctaacaccaacggctcccagttcttcatctgcaccataaagacagactggttggatggcaagcatgttgtgttcggtcacgtcaaagagggcatggacgtcgtgaagaaaatagaatctttcggctctaagagtgggaggacatccaagaagattgtcatcacagactgtggccagttgagctaatctgtggccagggtgctggcatggtggcagctgcaaatgtccatgcacccaggtggccgcgttgggctgtcagccaaggtgcctgaaacgatacgtgtgcccactccactgtcacagtgtgcctgaggaaggctgctagggatgttagacctcggccaggacccaccacattgcttcctaatacccacccttcctcacgacctcatttctgggcatctttgtggacatgatgtcacccaccccttgtcaagcattgcctgtgattgcccagcccagattcatctgtgccttggacatggtgatggtgatgggttgccatccaagtgaaagtcttttccttgaccaagggggacagtcagttttgcaaaaggactctaatacctgtttaatattgtcttcctaattgggataatttaattaacaagattgactagaagtgaaactgcaacactaacttccccgtgctgtggtgtgacctgagttggtgacacaggccacagaccccagagcttggcttttgaaacacaactcagggcttttgtgaaggttcccccgctgagatctttcctcctggttactgtgaagcctgttggtttgctgctgtcgtttttgaggagggcccatgggggtaggagcagttgaacctgggaacaaacctcacttgagctgtgcctagacaatgtgaattcctgtgttgctaacagaagtggcctgtaagctcctgtgctccggagggaagcatttcctggtaggctttgatttttctgtgtgttaaagaaattcaatctactcatgatgtgttatgcataaaacatttctggaacatggatttgtgttcaccttaaatgtgaaaataaatcctattttctatggaagactggtacctggtttctggaagaggggtctgtgacttggagctgatctttactgagctcgccgtggcagatgccatgctcaggacgttcatgtggatggtttcatgtcatcgtgctggcaacttgtcctccctgccttagagatgaggctcagacaaacgaccttagcacccatagcctatgccatgagcactggctccaccctgaatcccagctcctccccttagtgaccccaagtctgtttccctcagctgcataaggaggcgatatagtttgaatatttgtccccagccaaatctcatgttgaactgtaatccccagtgctggaggtggggcctgctacgaggtgtttggatcatggggacgggtatttcatggcttggtgctgttttcttgatggtgaattattgcaagatacggtcatttaaaattgtgtggcacctccccctgcccccttcttgctcctgctttcaccatgtgacatgcctgatcccccttcaccttttgccatggtcataagcttcctgaggcctccctggaagctgagcagatgccagcaccatgcttcctgtacatcctgcagaaccataagccaattaaacctttttaataataaattactcagtctcaagtattttt

SEQ ID NO: 443987 - DNA, 1078 bp, Homo sapiens
tgcggcgcgcggctgcgcgggactcggccttctgggcgcgcgcgacgtcagtttgagttctgtgttctccccgcccgtgtcccgcccgacccgcgcccgcgatgctggcgctgcgctgcggctcccgctggctcggcctgctctccgtcccgcgctccgtgccgctgcgcctccccgcggcccgcgcctgcagcaagggctccggcgacccgtcctcttcctcctcctccgggaacccgctcgtgtacctggacgtggacgccaacgggaagccgctcggccgcgtggtgctggagctgaaggcagatgtcgtcccaaagacagctgagaacttcagagccctgtgcactggtgagaagggcttcggctacaaaggctccaccttccacagggtgatcccttccttcatgtgccaggcgggcgacttcaccaaccacaatggcacaggcgggaagtccatctacggaagccgctttcctgacgagaactttacactgaagcacgtggggccaggtgtcctgtccatggctaatgctggtcctaacaccaacggctcccagttcttcatctgcaccataaagacagactggttggatggcaagcatgttgtgttcggtcacgtcaaagagggcatggacgtcgtgaagaaaatagaatctttcggctctaagagtgggaggacatccaagaagattgtcatcacagactgtggccagttgagctaatctgtggccagggtgctggcatggtggcagctgcaaatgtccatgcacccaggtggccgcgttgggctgtcagccaaggtgcctgaaacgatacgtgtgcccactccactgtcacagtgtgcctgaggaaggctgctagggatgttagacctcggccaggacccaccacattgcttcctaatacccacccttcctcacgacctcatttctgggcatctttgtggacatgatgtcacccaccccttgtcaagcattgcctgtgattgcccagcccagattcatctgtgccttggacatggtgatggtgatgggttgccatccaagccgcggtggatcctcaagagtcaggcaga

SEQ ID NO: 443988 - DNA, 2661 bp, Homo sapiens
gtggatgcttcagctgggctggtcagttcccctctcttacccacggatcccatctcaggaaaacagcagccagccatggcctgggctgggcagcgctaggcataggggctgctaccaggctcttctggccatgggtgccccatgcaggtttggccacggctgcctgggccttagctgaggcctgaggaaagatgtcagccttgggcagactctgtcctgggtctgcaagggttgggaaagctgctgggctgggtaaggggcagtgcgcggacagtgaggggactcggcctggggagctggtctggaccagctgctggtactcccacagactagactcgggaactggggggcctctggcctcttccttgttgccctccaggaggagtgggttaaattctgggtcactaagtatcatctcagaatggcctttaggtcttttgaagattacttaaaaatttgctcagacaaaaagtaagtcatttggaaacaaaggtagttacggtgacaaaagatatttaagttttgtcttttttttttttgcttattattcttattattagctcttattttattggatgtttattgacccctttacctgaggggcgccaactgggtgggcttgggtgggctgaggctgctgccagcgccagggccgtggcccccgcctgctccatggtagccactcagaaggtgctttgtgctcacaggcgggcgacttcaccaaccacaatggcacaggcgggaagtccatctacggaagccgctttcctgacgagaactttacactgaagcacgtggggccaggtgagtgggggcctcctctagggtgagtgtccccacagctctgacctggcctggaagccccagcaggccctgagaggccacatgcagtcaccgtccagtatctgatgagtctccttcctccctgcgacactgtgtcctgtccatggctaatgctggtcctaacaccaacggctcccagttcttcatctgcaccataaagacagactggttggatggcaagcatgttgtgttcggtcacgtcaaagagggcatggacgtcgtgaagaaaatagaatctttcggctctaagagtgggaggacatccaagaagattgtcatcacagactgtggccagttgagctaatctgtggccagggtgctggcatggtggcagctgcaaatgtccatgcacccaggtggccgcgttgggctgtcagccaaggtgcctgaaacgatacgtgtgcccactccactgtcacagtgtgcctgaggaaggctgctagggatgttagacctcggccaggacccaccacattgcttcctaatacccacccttcctcacgacctcatttctgggcatctttgtggacatgatgtcacccaccccttgtcaagcattgcctgtgattgcccagcccagattcatctgtgccttggacatggtgatggtgatgggttgccatccaagtgaaagtcttttccttgaccaagggggacagtcagttttgcaaaaggactctaatacctgtttaatattgtcttcctaattgggataatttaattaacaagattgactagaagtgaaactgcaacactaacttccccgtgctgtggtgtgacctgagttggtgacacaggccacagaccccagagcttggcttttgaaacacaactcagggcttttgtgaaggttcccccgctgagatctttcctcctggttactgtgaagcctgttggtttgctgctgtcgtttttgaggagggcccatgggggtaggagcagttgaacctgggaacaaacctcacttgagctgtgcctagacaatgtgaattcctgtgttgctaacagaagtggcctgtaagctcctgtgctccggagggaagcatttcctggtaggctttgatttttctgtgtgttaaagaaattcaatctactcatgatgtgttatgcataaaacatttctggaacatggatttgtgttcaccttaaatgtgaaaataaatcctattttctatggaagactggtacctggtttctggaagaggggtctgtgacttggagctgatctttactgagctcgccgtggcagatgccatgctcaggacgttcatgtggatggtttcatgtcatcgtgctggcaacttgtcctccctgccttagagatgaggctcagacaaacgaccttagcacccatagcctatgccatgagcactggctccaccctgaatcccagctcctccccttagtgaccccaagtctgtttccctcagctgcataaggaggcgatatagtttgaatatttgtccccagccaaatctcatgttgaactgtaatccccagtgctggaggtggggcctgctacgaggtgtttggatcatggggacgggtatttcatggcttggtgctgttttcttgatggtgaattattgcaagatacggtcatttaaaattgtgtggcacctccccctgcccccttcttgctcctgctttcaccatgtgacatgcctgatcccccttcaccttttgccatggtcataagcttcctgaggcctccctggaagctgagcagatgccagcaccatgcttcctgtacatcctgcagaaccataagccaattaaacctttttaataataaattactcagtctcaagtattttt

SEQ ID NO: 443989 - DNA, 1029 bp, Homo sapiens
  misc_feature (1005)..(1005): n is a, c, g, or t
  misc_feature (1007)..(1007): n is a, c, g, or t
tgcggcgcgcggctgcgcgggactcggccttctgggcgcgcgcgacgtcagtttgagttctgtgttctccccgcccgtgtcccgcccgacccgcgcccgcgatgctggcgctgcgctgcggctcccgctggctcggcctgctctccgtcccgcgctccgtgccgctgcgcctccccgcggcccgcgcctgcagcaagggctccggcgacccgtcctcttcctcctcctccgggaacccgctcgtgtacctggacgtggacgccaacgggaagccgctcggccgcgtggtgctggagctgaaggcagatgtcgtcccaaagacagctgagaacttcagagccctgtgcactggtgagaagggcttcggctacaaaggctccaccttccacagggtgatcccttccttcatgtgccaggcgggcgacttcaccaaccacaatggcacaggcgggaagtccatctacggaagccgctttcctgacgagaactttacactgaagcacgtggggccaggtgtcctgtccatggctaatgctggtcctaacaccaacggctcccagttcttcatctgcaccataaagacagactggttggatggcaagcatgttgtgttcggtcacgtcaaagagggcatggacgtcgtgaagaaaatagaatctttcggctctaagagtgggaggacatccaagaagattgtcatcacagactgtggccagttgagctaatctgtggccagggtgctggcatggtggcagctgcaaatgtccatgcacccaggtggccgcgttgggctgtcagccaaggtgcctgaaacgatacgtgtgcccactccactgtcacagtgtgcctgaggaaggctgctagggatgttagacctcggccaggacccaccacattgcttcctaatacccacccttcctcacgacctcatttctgggcatctttgtggacatgatgtcacccaccccttgtcaagcattgcctgtgattgcccagccaatgagnanggtgggaatcctctgagattac

SEQ ID NO: 443990 - DNA, 1077 bp, Homo sapiens
tgcggcgcgcggctgcgcgggactcggccttctgggcgcgcgcgacgtcagtttgagttctgtgttctccccgcccgtgtcccgcccgacccgcgcccgcgatgctggcgctgcgctgcggctcccgctggctcggcctgctctccgtcccgcgctccgtgccgctgcgcctccccgcggcccgcgcctgcagcaagggctccggcgacccgtcctcttcctcctcctccgggaacccgctcgtgtacctggacgtggacgccaacgggaagccgctcggccgcgtggtgctggagctgaaggcagatgtcgtcccaaagacagctgagaacttcagagccctgtgcactggtgagaagggcttcggctacaaaggctccaccttccacagggtgatcccttccttcatgtgccaggcgggcgacttcaccaaccacaatggcacaggcgggaagtccatctacggaagccgctttcctgacgagaactttacactgaagcacgtggggccaggtgtcctgtccatggctaatgctggtcctaacaccaacggctcccagttcttcatctgcaccataaagacagactggttggatggcaagcatgttgtgttcggtcacgtcaaagagggcatggacgtcgtgaagaaaatagaatctttcggctctaagagtgggaggacatccaagaagattgtcatcacagactgtggccagttgagctaatctgtggccagggtgctggcatggtggcagctgcaaatgtccatgcacccaggtggccgcgttgggctgtcagccaaggtgcctgaaacgatacgtgtgcccactccactgtcacagtgtgcctgaggaaggctgctagggatgttagacctcggccaggacccaccacattgcttcctaatacccacccttcctcacgacctcatttctgggcatctttgtggacatgatgtcacccaccccttgtcaagcattgcctgtgattgcccagccttgtcaagcattgcctgtgattgcccagcccagattcatctgtgccttggacatgtgatggcaacccatcaccatccgg

SEQ ID NO: 443991 - DNA, 2163 bp, Homo sapiens
tgcggcgcgcggctgcgcgggactcggccttctgggcgcgcgcgacgtcagtttgagttctgtgttctccccgcccgtgtcccgcccgacccgcgcccgcgatgctggcgctgcgctgcggctcccgctggctcggcctgctctccgtcccgcgctccgtgccgctgcgcctccccgcggcccgcgcctgcagcaagggctccggcgacccgtcctcttcctcctcctccgggaacccgctcgtgtacctggacgtggacgccaacgggaagccgctcggccgcgtggtgctggagctgaaggcagatgtcgtcccaaagacagctgagaacttcagagccctgtgcactggtgagaagggcttcggctacaaaggctccaccttccacagggtgatcccttccttcatgtgccaggcgggcgacttcaccaaccacaatggcacaggcgggaagtccatctacggaagccgctttcctgacgagaactttacactgaagcacgtggggccaggttggatggcaagcatgttgtgttcggtcacgtcaaagagggcatggacgtcgtgaagaaaatagaatctttcggctctaagagtgggaggacatccaagaagattgtcatcacagactgtggccagttgagctaatctgtggccagggtgctggcatggtggcagctgcaaatgtccatgcacccaggtggccgcgttgggctgtcagccaaggtgcctgaaacgatacgtgtgcccactccactgtcacagtgtgcctgaggaaggctgctagggatgttagacctcggccaggacccaccacattgcttcctaatacccacccttcctcacgacctcatttctgggcatctttgtggacatgatgtcacccaccccttgtcaagcattgcctgtgattgcccagcccagattcatctgtgccttggacatggtgatggtgatgggttgccatccaagtgaaagtcttttccttgaccaagggggacagtcagttttgcaaaaggactctaatacctgtttaatattgtcttcctaattgggataatttaattaacaagattgactagaagtgaaactgcaacactaacttccccgtgctgtggtgtgacctgagttggtgacacaggccacagaccccagagcttggcttttgaaacacaactcagggcttttgtgaaggttcccccgctgagatctttcctcctggttactgtgaagcctgttggtttgctgctgtcgtttttgaggagggcccatgggggtaggagcagttgaacctgggaacaaacctcacttgagctgtgcctagacaatgtgaattcctgtgttgctaacagaagtggcctgtaagctcctgtgctccggagggaagcatttcctggtaggctttgatttttctgtgtgttaaagaaattcaatctactcatgatgtgttatgcataaaacatttctggaacatggatttgtgttcaccttaaatgtgaaaataaatcctattttctatggaagactggtacctggtttctggaagaggggtctgtgacttggagctgatctttactgagctcgccgtggcagatgccatgctcaggacgttcatgtggatggtttcatgtcatcgtgctggcaacttgtcctccctgccttagagatgaggctcagacaaacgaccttagcacccatagcctatgccatgagcactggctccaccctgaatcccagctcctccccttagtgaccccaagtctgtttccctcagctgcataaggaggcgatatagtttgaatatttgtccccagccaaatctcatgttgaactgtaatccccagtgctggaggtggggcctgctacgaggtgtttggatcatggggacgggtatttcatggcttggtgctgttttcttgatggtgaattattgcaagatacggtcatttaaaattgtgtggcacctccccctgcccccttcttgctcctgctttcaccatgtgacatgcctgatcccccttcaccttttgccatggtcataagcttcctgaggcctccctggaagctgagcagatgccagcaccatgcttcctgtacatcctgcagaaccataagccaattaaacctttttaataataaattactcagtctcaagtattttt

SEQ ID NO: 443992 - DNA, 1732 bp, Homo sapiens
cgcacttctgcacccaggcgcacttctgcacccaggcgcacttctgcacccaggcgcacttctgcaccataaagacagactggttggatggcaagcatgttgtgttcggtcacgtcaaagagggcatggacgtcgtgaagaaaatagaatctttcggctctaagagtgggaggacatccaagaagattgtcatcacagactgtggccagttgagctaatctgtggccagggtgctggcatggtggcagctgcaaatgtccatgcacccaggtggccgcgttgggctgtcagccaaggtgcctgaaacgatacgtgtgcccactccactgtcacagtgtgcctgaggaaggctgctagggatgttagacctcggccaggacccaccacattgcttcctaatacccacccttcctcacgacctcatttctgggcatctttgtggacatgatgtcacccaccccttgtcaagcattgcctgtgattgcccagcccagattcatctgtgccttggacatggtgatggtgatgggttgccatccaagtgaaagtcttttccttgaccaagggggacagtcagttttgcaaaaggactctaatacctgtttaatattgtcttcctaattgggataatttaattaacaagattgactagaagtgaaactgcaacactaacttccccgtgctgtggtgtgacctgagttggtgacacaggccacagaccccagagcttggcttttgaaacacaactcagggcttttgtgaaggttcccccgctgagatctttcctcctggttactgtgaagcctgttggtttgctgctgtcgtttttgaggagggcccatgggggtaggagcagttgaacctgggaacaaacctcacttgagctgtgcctagacaatgtgaattcctgtgttgctaacagaagtggcctgtaagctcctgtgctccggagggaagcatttcctggtaggctttgatttttctgtgtgttaaagaaattcaatctactcatgatgtgttatgcataaaacatttctggaacatggatttgtgttcaccttaaatgtgaaaataaatcctattttctatggaagactggtacctggtttctggaagaggggtctgtgacttggagctgatctttactgagctcgccgtggcagatgccatgctcaggacgttcatgtggatggtttcatgtcatcgtgctggcaacttgtcctccctgccttagagatgaggctcagacaaacgaccttagcacccatagcctatgccatgagcactggctccaccctgaatcccagctcctccccttagtgaccccaagtctgtttccctcagctgcataaggaggcgatatagtttgaatatttgtccccagccaaatctcatgttgaactgtaatccccagtgctggaggtggggcctgctacgaggtgtttggatcatggggacgggtatttcatggcttggtgctgttttcttgatggtgaattattgcaagatacggtcatttaaaattgtgtggcacctccccctgcccccttcttgctcctgctttcaccatgtgacatgcctgatcccccttcaccttttgccatggtcataagcttcctgaggcctccctggaagctgagcagatgccagcaccatgcttcctgtacatcctgcagaaccataagccaattaaacctttttaataataaattactcagtctcaagtattttt

SEQ ID NO: 443993 - DNA, 1741 bp, Homo sapiens
ccggacacacaccccattggcccgacacagtctggccctcggggtgtcagcaattcgagcgcaaggcactccttaacgtcgatcgtttaaagaagctctccaggccccaccgagaagcggtcggatcgacgacctcagagggaaggaagataatagaatctttcggctctaagagtgggaggacatccaagaagattgtcatcacagactgtggccagttgagctaatctgtggccagggtgctggcatggtggcagctgcaaatgtccatgcacccaggtggccgcgttgggctgtcagccaaggtgcctgaaacgatacgtgtgcccactccactgtcacagtgtgcctgaggaaggctgctagggatgttagacctcggccaggacccaccacattgcttcctaatacccacccttcctcacgacctcatttctgggcatctttgtggacatgatgtcacccaccccttgtcaagcattgcctgtgattgcccagcccagattcatctgtgccttggacatggtgatggtgatgggttgccatccaagtgaaagtcttttccttgaccaagggggacagtcagttttgcaaaaggactctaatacctgtttaatattgtcttcctaattgggataatttaattaacaagattgactagaagtgaaactgcaacactaacttccccgtgctgtggtgtgacctgagttggtgacacaggccacagaccccagagcttggcttttgaaacacaactcagggcttttgtgaaggttcccccgctgagatctttcctcctggttactgtgaagcctgttggtttgctgctgtcgtttttgaggagggcccatgggggtaggagcagttgaacctgggaacaaacctcacttgagctgtgcctagacaatgtgaattcctgtgttgctaacagaagtggcctgtaagctcctgtgctccggagggaagcatttcctggtaggctttgatttttctgtgtgttaaagaaattcaatctactcatgatgtgttatgcataaaacatttctggaacatggatttgtgttcaccttaaatgtgaaaataaatcctattttctatggaagactggtacctggtttctggaagaggggtctgtgacttggagctgatctttactgagctcgccgtggcagatgccatgctcaggacgttcatgtggatggtttcatgtcatcgtgctggcaacttgtcctccctgccttagagatgaggctcagacaaacgaccttagcacccatagcctatgccatgagcactggctccaccctgaatcccagctcctccccttagtgaccccaagtctgtttccctcagctgcataaggaggcgatatagtttgaatatttgtccccagccaaatctcatgttgaactgtaatccccagtgctggaggtggggcctgctacgaggtgtttggatcatggggacgggtatttcatggcttggtgctgttttcttgatggtgaattattgcaagatacggtcatttaaaattgtgtggcacctccccctgcccccttcttgctcctgctttcaccatgtgacatgcctgatcccccttcaccttttgccatggtcataagcttcctgaggcctccctggaagctgagcagatgccagcaccatgcttcctgtacatcctgcagaaccataagccaattaaacctttttaataataaattactcagtctcaagtattttt

SEQ ID NO: 443994 - DNA, 930 bp, Homo sapiens
agagagagagagagagagagagagagagagagagagagagagagagagagagagagagagagagagagagagctcacttgagctgtgcctagacaatgtgaattcctgtgttgctaacagaagtggcctgtaagctcctgtgctccggagggaagcatttcctggtaggctttgatttttctgtgtgttaaagaaattcaatctactcatgatgtgttatgcataaaacatttctggaacatggatttgtgttcaccttaaatgtgaaaataaatcctattttctatggaagactggtacctggtttctggaagaggggtctgtgacttggagctgatctttactgagctcgccgtggcagatgccatgctcaggacgttcatgtggatggtttcatgtcatcgtgctggcaacttgtcctccctgccttagagatgaggctcagacaaacgaccttagcacccatagcctatgccatgagcactggctccaccctgaatcccagctcctccccttagtgaccccaagtctgtttccctcagctgcataaggaggcgatatagtttgaatatttgtccccagccaaatctcatgttgaactgtaatccccagtgctggaggtggggcctgctacgaggtgtttggatcatggggacgggtatttcatggcttggtgctgttttcttgatggtgaattattgcaagatacggtcatttaaaattgtgtggcacctccccctgcccccttcttgctcctgctttcaccatgtgacatgcctgatcccccttcaccttttgccatggtcataagcttcctgaggcctccctggaagctgagcagatgccagcaccatgcttcctgtacatcctgcagaaccataagccaattaaacctttttaataataaattactcagtctcaagtattttt

SEQ ID NO: 443995 - DNA, 844 bp, Homo sapiens
tgccaggctggtaccggtccggagtcgtatggatgcgcgacgtcagtttgagttctgtgttctccccgcccgtgtcccgcccgacccgcgcccgcgatgctggcgctgcgctgcggctcccgctggctcggcctgctctccgtcccgcgctccgtgccgctgcgcctccccgcggcccgcgcctgcagcaagggctccggcgacccgtcctcttcctcctcctccgggaacccgctcgtgtacctggacgtggacgccaacgggaagccgctcggccgcgtggtgctggagctgaaggcagatgtcgtcccaaagacagctgagaacttcagagccctgtgcactggtgagaagggcttcggctacaaaggctccaccttccacagggtgatcccttccttcatgtgccaggtaatgtagtttcctcttctgtaaggggggatgagagcaggagctgccttgtgggtgtgtgaagatgcctggtatgaggaaggtgctgagcagagcagctgcagttgctctgtcagccaggctgccctccctgcattagccctgtatccaggcttcactgcacatggaagcccagccccaacccgctgccactccaggtcagtggcaggccctgcccgggggactgggaggtggagtctatcaagagagagctgggttgggagatggatgtgctgggggtggccttgaagactttgaagagccagcatattccagtggtctctgaccttgtcccctgtgtgcccctgagcactggtgtgggagataagagagggagagagagaagtggaggaggcggaggaggaagacaggtccagggcaggaacacacacgc

SEQ ID NO: 443996 - DNA, 2234 bp, Homo sapiens
tgccaggctggtaccggtccggagtcgtatggatgcgcgacgtcagtttgagttctgtgttctccccgcccgtgtcccgcccgacccgcgcccgcgatgctggcgctgcgctgcggctcccgctggctcggcctgctctccgtcccgcgctccgtgccgctgcgcctccccgcggcccgcgcctgcagcaagggctccggcgacccgtcctcttcctcctcctccgggaacccgctcgtgtacctggacgtggacgccaacgggaagccgctcggccgcgtggtgctggagctgaaggcagatgtcgtcccaaagacagctgagaacttcagagccctgtgcactggtgagaagggcttcggctacaaaggctccaccttccacagggtgatcccttccttcatgtgccaggcgggcgacttcaccaaccacaatggcacaggcgggaagtccatctacggaagccgctttcctgacgagaactttacactgaagcacgtggggccaggtgtcctgtccatggctaatgctggtcctaacaccaacggctcccagttcttcatctgcaccataaagacagactggttggatggcaagcatgttgtgttcggtcacgtcaaagagggcatggacgtcgtgaagaaaatagaatctttcggctctaagagtgggaggacatccaagaagattgtcatcacagactgtggccagttgagctaatctgtggccagggtgctggcatggtggcagctgcaaatgtccatgcacccaggtggccgcgttgggctgtcagccaaggtgcctgaaacgatacgtgtgcccactccactgtcacagtgtgcctgaggaaggctgctagggatgttagacctcggccaggacccaccacattgcttcctaatacccacccttcctcacgacctcatttctgggcatctttgtggacatgatgtcacccaccccttgtcaagcattgcctgtgattgcccagcccagattcatctgtgccttggacatggtgatggtgatgggttgccatccaagtgaaagtcttttccttgaccaagggggacagtcagttttgcaaaaggactctaatacctgtttaatattgtcttcctaattgggataatttaattaacaagattgactagaagtgaaactgcaacactaacttccccgtgctgtggtgtgacctgagttggtgacacaggccacagaccccagagcttggcttttgaaacacaactcagggcttttgtgaaggttcccccgctgagatctttcctcctggttactgtgaagcctgttggtttgctgctgtcgtttttgaggagggcccatgggggtaggagcagttgaacctgggaacaaacctcacttgagctgtgcctagacaatgtgaattcctgtgttgctaacagaagtggcctgtaagctcctgtgctccggagggaagcatttcctggtaggctttgatttttctgtgtgttaaagaaattcaatctactcatgatgtgttatgcataaaacatttctggaacatggatttgtgttcaccttaaatgtgaaaataaatcctattttctatggaagactggtacctggtttctggaagaggggtctgtgacttggagctgatctttactgagctcgccgtggcagatgccatgctcaggacgttcatgtggatggtttcatgtcatcgtgctggcaacttgtcctccctgccttagagatgaggctcagacaaacgaccttagcacccatagcctatgccatgagcactggctccaccctgaatcccagctcctccccttagtgaccccaagtctgtttccctcagctgcataaggaggcgatatagtttgaatatttgtccccagccaaatctcatgttgaactgtaatccccagtgctggaggtggggcctgctacgaggtgtttggatcatggggacgggtatttcatggcttggtgctgttttcttgatggtgaattattgcaagatacggtcatttaaaattgtgtggcacctccccctgcccccttcttgctcctgctttcaccatgtgacatgcctgatcccccttcaccttttgccatggtcataagcttcctgaggcctccctggaagctgagcagatgccagcaccatgcttcctgtacatcctgcagaaccataagccaattaaacctttttaataataaattactcagtctcaagtattttt

SEQ ID NO: 443997 - DNA, 1788 bp, Homo sapiens
tgcggcgcgcggctgcgcgggactcggccttctgggcgcgcgcgacgtcagtttgagttctgtgttctccccgcccgtgtcccgcccgacccgcgcccgcgatgctggcgctgcgctgcggctcccgctggctcggcctgctctccgtcccgcgctccgtgccgctgcgcctccccgcggcccgcgcctgcagcaagggctccggcgacccgtcctcttcctcctcctccgggaacccgctcgtgtacctggacgtggacgccaacgggaagccgctcggccgcgtggtgctggagctgaaggcagatgtcgtcccaaagacagctgagaacttcagagccctgtgcactggtgagaagggcttcggctacaaaggctccaccttccacagggtgatcccttccttcatgtgccaggcgggcgacttcaccaaccacaatggcacaggcgggaagtccatctacggaagccgctttcctgacgagaactttacactgaagcacgtggggccaggtgtcctgtccatggctaatgctggtcctaacaccaacggctcccagttcttcatctgcaccataaagacagactggttggatggcaagcatgttgtgttcggtcacgtcaaagagggcatggacgtcgtgaagaaaatagaatctttcggctctaagagtgggaggacatccaagaagattgtcatcacagactgtggccagttgagctaatctgtggccagggtgctggcatggtggcagctgcaaatgtccatgcacccaggtggccgcgttgggctgtcagccaaggtgcctgaaacgatacgtgtgcccactccactgtcacagtgtgcctgaggaaggctgctagggatgttagacctcggccaggacccaccacattgcttcctaatacccacccttcctcacgacctcatttctgggcatctttgtggacatgatgtcacccaccccttgtcaagcattgcctgtgattgcccagcccagattcatctgtgccttggacatggtgatggtgatgggttgccatccaagtgaaagtcttttccttgaccaagggggacagtcagttttgcaaaaggactctaatacctgtttaatattgtcttcctaattgggataatttaattaacaagattgactagaagtgaaactgcaacactaacttccccgtgctgtggtgtgacctgagttggtgacacaggccacagaccccagagcttggcttttgaaacacaactcagggcttttgtgaaggttcccccgctgagatctttcctcctggttactgtgaagcctgttggtttgctgctgtcgtttttgaggagggcccatgggggtaggagcagttgaacctgggaacaaacctcacttgagctgtgcctagacaatgtgaattcctgtgttgctaacagaagtggcctgtaagctcctgtgctccggagggaagcatttcctggtaggctttgatttttctgtgtgttaaagaaattcaatctactcatgatgtgttatgcataaaacatttctggaacatggatttgtgttcaccttaaatgtgaaaataaatcctattttctatggaaaaaaaaaaaaaaaaaaaaaaaaaaaaaaaaaaaaaaaaaaaaaaaaaaaaaaaaaaaaaaaaaaaaaaaaaaaaaagaagggggggcgcgcgccctacatatatacctcctccccgggggggccccatccgccccccccgcatcttttttgcacaagggggcgcccccaaagaggcgtcttctttacc

SEQ ID NO: 443998 - DNA, 2210 bp, Homo sapiens
tgcggcgcgcggctgcgcgggactcggccttctgggcgcgcgcgacgtcagtttgagttctgtgttctccccgcccgtgtcccgcccgacccgcgcccgcgatgctggcgctgcgctgcggctcccgctggctcggcctgctctccgtcccgcgctccgtgccgctgcgcctccccgcggcccgcgcctgcagcaagggctccggcgacccgtcctcttcctcctcctccgggaacccgctcgtgtacctggacgtggacgccaacgggaagccgctcggccgcgtggtgctggagctgaaggcagatgtcgtcccaaagacagctgagaacttcagagccctgtgcactggtgagaagggcttcggctacaaaggctccaccttccacagggtgatcccttccttcatgtgccaggcgggcgacttcaccaaccacaatggcacaggcgggaagtccatctacggaagccgctttcctgacgagaactttacactgaagcacgtggggccaggtgtcctgtccatggctaatgctggtcctaacaccaacggctcccagttcttcatctgcaccataaagacagactggttggatggcaagcatgttgtgttcggtcacgtcaaagagggcatggacgtcgtgaagaaaatagaatctttcggctctaagagtgggaggacatccaagaagattgtcatcacagactgtggccagttgagctaatctgtggccagggtgctggcatggtggcagctgcaaatgtccatgcacccaggtggccgcgttgggctgtcagccaaggtgcctgaaacgatacgtgtgcccactccactgtcacagtgtgcctgaggaaggctgctagggatgttagacctcggccaggacccaccacattgcttcctaatacccacccttcctcacgacctcatttctgggcatctttgtggacatgatgtcacccaccccttgtcaagcattgcctgtgattgcccagcccagattcatctgtgccttggacatggtgatggtgatgggttgccatccaagtgaaagtcttttccttgaccaagggggacagtcagttttgcaaaaggactctaataccttttaattaacaagattgactagaagtgaaactgcaacactaacttccccgtgctgtggtgtgacctgagttggtgacacaggccacagaccccagagcttggcttttgaaacacaactcagggcttttgtgaaggttcccccgctgagatctttcctcctggttactgtgaagcctgttggtttgctgctgtcgtttttgaggagggcccatgggggtaggagcagttgaacctgggaacaaacctcacttgagctgtgcctagacaatgtgaattcctgtgttgctaacagaagtggcctgtaagctcctgtgctccggagggaagcatttcctggtaggctttgatttttctgtgtgttaaagaaattcaatctactcatgatgtgttatgcataaaacatttctggaacatggatttgtgttcaccttaaatgtgaaaataaatcctattttctatggaagactggtacctggtttctggaagaggggtctgtgacttggagctgatctttactgagctcgccgtggcagatgccatgctcaggacgttcatgtggatggtttcatgtcatcgtgctggcaacttgtcctccctgccttagagatgaggctcagacaaacgaccttagcacccatagcctatgccatgagcactggctccaccctgaatcccagctcctccccttagtgaccccaagtctgtttccctcagctgcataaggaggcgatatagtttgaatatttgtccccagccaaatctcatgttgaactgtaatccccagtgctggaggtggggcctgctacgaggtgtttggatcatggggacgggtatttcatggcttggtgctgttttcttgatggtgaattattgcaagatacggtcatttaaaattgtgtggcacctccccctgcccccttcttgctcctgctttcaccatgtgacatgcctgatcccccttcaccttttgccatggtcataagcttcctgaggcctccctggaagctgagcagatgccagcaccatgcttcctgtacatcctgcagaaccataagccaattaaacctttttaataataaattactcagtctcaagtattttt

SEQ ID NO: 443999 - DNA, 1971 bp, Homo sapiens
cgacgtcgcgcgcgcccagaaggccgagctgaaggcagatgtcgtcccaaagacagctgagaacttcagagccctgtgcactggtgagaagggcttcggctacaaaggctccaccttccacagggtgatcccttccttcatgtgccaggcgggcgacttcaccaaccacaatggcacaggcgggaagtccatctacggaagccgctttcctgacgagaactttacactgaagcacgtggggccaggtgtcctgtccatggctaatgctggtcctaacaccaacggctcccagttcttcatctgcaccataaagacagactggttggatggcaagcatgttgtgttcggtcacgtcaaagagggcatggacgtcgtgaagaaaatagaatctttcggctctaagagtgggaggacatccaagaagattgtcatcacagactgtggccagttgagctaatctgtggccagggtgctggcatggtggcagctgcaaatgtccatgcacccaggtggccgcgttgggctgtcagccaaggtgcctgaaacgatacgtgtgcccactccactgtcacagtgtgcctgaggaaggctgctagggatgttagacctcggccaggacccaccacattgcttcctaatacccacccttcctcacgacctcatttctgggcatctttgtggacatgatgtcacccaccccttgtcaagcattgcctgtgattgcccagcccagattcatctgtgccttggacatggtgatggtgatgggttgccatccaagtgaaagtcttttccttgaccaagggggacagtcagttttgcaaaaggactctaatacctgtttaatattgtcttcctaattgggataatttaattaacaagattgactagaagtgaaactgcaacactaacttccccgtgctgtggtgtgacctgagttggtgacacaggccacagaccccagagcttggcttttgaaacacaactcagggcttttgtgaaggttcccccgctgagatctttcctcctggttactgtgaagcctgttggtttgctgctgtcgtttttgaggagggcccatgggggtaggagcagttgaacctgggaacaaacctcacttgagctgtgcctagacaatgtgaattcctgtgttgctaacagaagtggcctgtaagctcctgtgctccggagggaagcatttcctggtaggctttgatttttctgtgtgttaaagaaattcaatctactcatgatgtgttatgcataaaacatttctggaacatggatttgtgttcaccttaaatgtgaaaataaatcctattttctatggaagactggtacctggtttctggaagaggggtctgtgacttggagctgatctttactgagctcgccgtggcagatgccatgctcaggacgttcatgtggatggtttcatgtcatcgtgctggcaacttgtcctccctgccttagagatgaggctcagacaaacgaccttagcacccatagcctatgccatgagcactggctccaccctgaatcccagctcctccccttagtgaccccaagtctgtttccctcagctgcataaggaggcgatatagtttgaatatttgtccccagccaaatctcatgttgaactgtaatccccagtgctggaggtggggcctgctacgaggtgtttggatcatggggacgggtatttcatggcttggtgctgttttcttgatggtgaattattgcaagatacggtcatttaaaattgtgtggcacctccccctgcccccttcttgctcctgctttcaccatgtgacatgcctgatcccccttcaccttttgccatggtcataagcttcctgaggcctccctggaagctgagcagatgccagcaccatgcttcctgtacatcctgcagaaccataagccaattaaacctttttaataataaattactcagtctcaagtattttt

SEQ ID NO: 444000 - DNA, 2530 bp, Homo sapiens
gtggatgcttcagctgggctggtcagttcccctctcttacccacggatcccatctcaggaaaacagcagccagccatggcctgggctgggcagcgctaggcataggggctgctaccaggctcttctggccatgggtgccccatgcaggtttggccacggctgcctgggccttagctgaggcctgaggaaagatgtcagccttgggcagactctgtcctgggtctgcaagggttgggaaagctgctgggctgggtaaggggcagtgcgcggacagtgaggggactcggcctggggagctggtctggaccagctgctggtactcccacagactagactcgggaactggggggcctctggcctcttccttgttgccctccaggaggagtgggttaaattctgggtcactaagtatcatctcagaatggcctttaggtcttttgaagattacttaaaaatttgctcagacaaaaagtaagtcatttggaaacaaaggtagttacggtgacaaaagatatttaagttttgtcttttttttttttgcttattattcttattattagctcttattttattggatgtttattgacccctttacctgaggggcgccaactgggtgggcttgggtgggctgaggctgctgccagcgccagggccgtggcccccgcctgctccatggtagccactcagaaggtgctttgtgctcacaggcgggcgacttcaccaaccacaatggcacaggcgggaagtccatctacggaagccgctttcctgacgagaactttacactgaagcacgtggggccaggtgtcctgtccatggctaatgctggtcctaacaccaacggctcccagttcttcatctgcaccataaagacagactggttggatggcaagcatgttgtgttcggtcacgtcaaagagggcatggacgtcgtgaagaaaatagaatctttcggctctaagagtgggaggacatccaagaagattgtcatcacagactgtggccagttgagctaatctgtggccagggtgctggcatggtggcagctgcaaatgtccatgcacccaggtggccgcgttgggctgtcagccaaggtgcctgaaacgatacgtgtgcccactccactgtcacagtgtgcctgaggaaggctgctagggatgttagacctcggccaggacccaccacattgcttcctaatacccacccttcctcacgacctcatttctgggcatctttgtggacatgatgtcacccaccccttgtcaagcattgcctgtgattgcccagcccagattcatctgtgccttggacatggtgatggtgatgggttgccatccaagtgaaagtcttttccttgaccaagggggacagtcagttttgcaaaaggactctaatacctgtttaatattgtcttcctaattgggataatttaattaacaagattgactagaagtgaaactgcaacactaacttccccgtgctgtggtgtgacctgagttggtgacacaggccacagaccccagagcttggcttttgaaacacaactcagggcttttgtgaaggttcccccgctgagatctttcctcctggttactgtgaagcctgttggtttgctgctgtcgtttttgaggagggcccatgggggtaggagcagttgaacctgggaacaaacctcacttgagctgtgcctagacaatgtgaattcctgtgttgctaacagaagtggcctgtaagctcctgtgctccggagggaagcatttcctggtaggctttgatttttctgtgtgttaaagaaattcaatctactcatgatgtgttatgcataaaacatttctggaacatggatttgtgttcaccttaaatgtgaaaataaatcctattttctatggaagactggtacctggtttctggaagaggggtctgtgacttggagctgatctttactgagctcgccgtggcagatgccatgctcaggacgttcatgtggatggtttcatgtcatcgtgctggcaacttgtcctccctgccttagagatgaggctcagacaaacgaccttagcacccatagcctatgccatgagcactggctccaccctgaatcccagctcctccccttagtgaccccaagtctgtttccctcagctgcataaggaggcgatatagtttgaatatttgtccccagccaaatctcatgttgaactgtaatccccagtgctggaggtggggcctgctacgaggtgtttggatcatggggacgggtatttcatggcttggtgctgttttcttgatggtgaattattgcaagatacggtcatttaaaattgtgtggcacctccccctgcccccttcttgctcctgctttcaccatgtgacatgcctgatcccccttcaccttttgccatggtcataagcttcctgaggcctccctggaagctgagcagatgccagcaccatgcttcctgtacatcctgcagaaccataagccaattaaacctttttaataataaattactcagtctcaagtattttt

SEQ ID NO: 444001 - DNA, 2370 bp, Homo sapiens
tgcggcgcgcggctgcgcgggactcggccttctgggcgcgcgcgacgtcagtttgagttctgtgttctccccgcccgtgtcccgcccgacccgcgcccgcgatgctggcgctgcgctgcggctcccgctggctcggcctgctctccgtcccgcgctccgtgccgctgcgcctccccgcggcccgcgcctgcagcaagggctccggcgacccgtcctcttcctcctcctccgggaacccgctcgtgtacctggacgtggacgccaacgggaagccgctcggccgcgtggtgctggagctgaaggcagatgtcgtcccaaagacagctgagaacttcagagccctgtgcactggtgagaagggcttcggctacaaaggctccaccttccacagggtgatcccttccttcatgtgccaggcgggcgacttcaccaaccacaatggcacaggcgggaagtccatctacggaagccgctttcctgacgagaactttacactgaagcacgtggggccaggtgagtgggggcctcctctagggtgagtgtccccacagctctgacctggcctggaagccccagcaggccctgagaggccacatgcagtcaccgtccagtatctgatgagtctccttcctccctgcgacactgtgtcctgtccatggctaatgctggtcctaacaccaacggctcccagttcttcatctgcaccataaagacagactggttggatggcaagcatgttgtgttcggtcacgtcaaagagggcatggacgtcgtgaagaaaatagaatctttcggctctaagagtgggaggacatccaagaagattgtcatcacagactgtggccagttgagctaatctgtggccagggtgctggcatggtggcagctgcaaatgtccatgcacccaggtggccgcgttgggctgtcagccaaggtgcctgaaacgatacgtgtgcccactccactgtcacagtgtgcctgaggaaggctgctagggatgttagacctcggccaggacccaccacattgcttcctaatacccacccttcctcacgacctcatttctgggcatctttgtggacatgatgtcacccaccccttgtcaagcattgcctgtgattgcccagcccagattcatctgtgccttggacatggtgatggtgatgggttgccatccaagtgaaagtcttttccttgaccaagggggacagtcagttttgcaaaaggactctaatacctgtttaatattgtcttcctaattgggataatttaattaacaagattgactagaagtgaaactgcaacactaacttccccgtgctgtggtgtgacctgagttggtgacacaggccacagaccccagagcttggcttttgaaacacaactcagggcttttgtgaaggttcccccgctgagatctttcctcctggttactgtgaagcctgttggtttgctgctgtcgtttttgaggagggcccatgggggtaggagcagttgaacctgggaacaaacctcacttgagctgtgcctagacaatgtgaattcctgtgttgctaacagaagtggcctgtaagctcctgtgctccggagggaagcatttcctggtaggctttgatttttctgtgtgttaaagaaattcaatctactcatgatgtgttatgcataaaacatttctggaacatggatttgtgttcaccttaaatgtgaaaataaatcctattttctatggaagactggtacctggtttctggaagaggggtctgtgacttggagctgatctttactgagctcgccgtggcagatgccatgctcaggacgttcatgtggatggtttcatgtcatcgtgctggcaacttgtcctccctgccttagagatgaggctcagacaaacgaccttagcacccatagcctatgccatgagcactggctccaccctgaatcccagctcctccccttagtgaccccaagtctgtttccctcagctgcataaggaggcgatatagtttgaatatttgtccccagccaaatctcatgttgaactgtaatccccagtgctggaggtggggcctgctacgaggtgtttggatcatggggacgggtatttcatggcttggtgctgttttcttgatggtgaattattgcaagatacggtcatttaaaattgtgtggcacctccccctgcccccttcttgctcctgctttcaccatgtgacatgcctgatcccccttcaccttttgccatggtcataagcttcctgaggcctccctggaagctgagcagatgccagcaccatgcttcctgtacatcctgcagaaccataagccaattaaacctttttaataataaattactcagtctcaagtattttt

SEQ ID NO: 444002 - DNA, 2301 bp, Homo sapiens
tgcggcgcgcggctgcgcgggactcggccttctgggcgcgcgcgacgtcagtttgagttctgtgttctccccgcccgtgtcccgcccgacccgcgcccgcgatgctggcgctgcgctgcggctcccgctggctcggcctgctctccgtcccgcgctccgtgccgctgcgcctccccgcggcccgcgcctgcagcaagggctccggcgacccgtcctcttcctcctcctccgggaacccgctcgtgtacctggacgtggacgccaacgggaagccgctcggccgcgtggtgctggagctgaaggcagatgtcgtcccaaagacagctgagaacttcagagccctgtgcactggtgagaagggcttcggctacaaaggctccaccttccacagggtgatcccttccttcatgtgccaggcgggcgacttcaccaaccacaatggcacaggcgggaagtccatctacggaagccgctttcctgacgagaactttacactgaagcacgtggggccaggtgtcctgtccatggctaatgctggtcctaacaccaacggctcccagttcttcatctgcaccataaagacagactggtccatggcattggatgacattgcgctacactgttgctcacccgggtcacccgtcctcacaggttggatggcaagcatgttgtgttcggtcacgtcaaagagggcatggacgtcgtgaagaaaatagaatctttcggctctaagagtgggaggacatccaagaagattgtcatcacagactgtggccagttgagctaatctgtggccagggtgctggcatggtggcagctgcaaatgtccatgcacccaggtggccgcgttgggctgtcagccaaggtgcctgaaacgatacgtgtgcccactccactgtcacagtgtgcctgaggaaggctgctagggatgttagacctcggccaggacccaccacattgcttcctaatacccacccttcctcacgacctcatttctgggcatctttgtggacatgatgtcacccaccccttgtcaagcattgcctgtgattgcccagcccagattcatctgtgccttggacatggtgatggtgatgggttgccatccaagtgaaagtcttttccttgaccaagggggacagtcagttttgcaaaaggactctaatacctgtttaatattgtcttcctaattgggataatttaattaacaagattgactagaagtgaaactgcaacactaacttccccgtgctgtggtgtgacctgagttggtgacacaggccacagaccccagagcttggcttttgaaacacaactcagggcttttgtgaaggttcccccgctgagatctttcctcctggttactgtgaagcctgttggtttgctgctgtcgtttttgaggagggcccatgggggtaggagcagttgaacctgggaacaaacctcacttgagctgtgcctagacaatgtgaattcctgtgttgctaacagaagtggcctgtaagctcctgtgctccggagggaagcatttcctggtaggctttgatttttctgtgtgttaaagaaattcaatctactcatgatgtgttatgcataaaacatttctggaacatggatttgtgttcaccttaaatgtgaaaataaatcctattttctatggaagactggtacctggtttctggaagaggggtctgtgacttggagctgatctttactgagctcgccgtggcagatgccatgctcaggacgttcatgtggatggtttcatgtcatcgtgctggcaacttgtcctccctgccttagagatgaggctcagacaaacgaccttagcacccatagcctatgccatgagcactggctccaccctgaatcccagctcctccccttagtgaccccaagtctgtttccctcagctgcataaggaggcgatatagtttgaatatttgtccccagccaaatctcatgttgaactgtaatccccagtgctggaggtggggcctgctacgaggtgtttggatcatggggacgggtatttcatggcttggtgctgttttcttgatggtgaattattgcaagatacggtcatttaaaattgtgtggcacctccccctgcccccttcttgctcctgctttcaccatgtgacatgcctgatcccccttcaccttttgccatggtcataagcttcctgaggcctccctggaagctgagcagatgccagcaccatgcttcctgtacatcctgcagaaccataagccaattaaacctttttaataataaattactcagtctcaagtattttt

SEQ ID NO: 444003 - DNA, 1942 bp, Homo sapiens
gcagaacaaagaatactccacttttgatagatggggttaccaggattcaggctacatggcctgaggcaaggtcacaacatgagtgacagaatgtgtcctggaagccaggcatcctctggggtgtatttggggcgctcaacaaggcttgatcgagctttgggggtagatctagctattccatggggattcttttcagaattgctgttttcggtaactaattccatgaccaggtccatggcattggatgacattgcgctacactgttgctcacccgggtcacccgtcctcacaggttggatggcaagcatgttgtgttcggtcacgtcaaagagggcatggacgtcgtgaagaaaatagaatctttcggctctaagagtgggaggacatccaagaagattgtcatcacagactgtggccagttgagctaatctgtggccagggtgctggcatggtggcagctgcaaatgtccatgcacccaggtggccgcgttgggctgtcagccaaggtgcctgaaacgatacgtgtgcccactccactgtcacagtgtgcctgaggaaggctgctagggatgttagacctcggccaggacccaccacattgcttcctaatacccacccttcctcacgacctcatttctgggcatctttgtggacatgatgtcacccaccccttgtcaagcattgcctgtgattgcccagcccagattcatctgtgccttggacatggtgatggtgatgggttgccatccaagtgaaagtcttttccttgaccaagggggacagtcagttttgcaaaaggactctaatacctgtttaatattgtcttcctaattgggataatttaattaacaagattgactagaagtgaaactgcaacactaacttccccgtgctgtggtgtgacctgagttggtgacacaggccacagaccccagagcttggcttttgaaacacaactcagggcttttgtgaaggttcccccgctgagatctttcctcctggttactgtgaagcctgttggtttgctgctgtcgtttttgaggagggcccatgggggtaggagcagttgaacctgggaacaaacctcacttgagctgtgcctagacaatgtgaattcctgtgttgctaacagaagtggcctgtaagctcctgtgctccggagggaagcatttcctggtaggctttgatttttctgtgtgttaaagaaattcaatctactcatgatgtgttatgcataaaacatttctggaacatggatttgtgttcaccttaaatgtgaaaataaatcctattttctatggaagactggtacctggtttctggaagaggggtctgtgacttggagctgatctttactgagctcgccgtggcagatgccatgctcaggacgttcatgtggatggtttcatgtcatcgtgctggcaacttgtcctccctgccttagagatgaggctcagacaaacgaccttagcacccatagcctatgccatgagcactggctccaccctgaatcccagctcctccccttagtgaccccaagtctgtttccctcagctgcataaggaggcgatatagtttgaatatttgtccccagccaaatctcatgttgaactgtaatccccagtgctggaggtggggcctgctacgaggtgtttggatcatggggacgggtatttcatggcttggtgctgttttcttgatggtgaattattgcaagatacggtcatttaaaattgtgtggcacctccccctgcccccttcttgctcctgctttcaccatgtgacatgcctgatcccccttcaccttttgccatggtcataagcttcctgaggcctccctggaagctgagcagatgccagcaccatgcttcctgtacatcctgcagaaccataagccaattaaacctttttaataataaattactcagtctcaagtattttt

SEQ ID NO: 444004 - DNA, 2185 bp, Homo sapiens
tgcggcgcgcggctgcgcgggactcggccttctgggcgcgcgcgacgtcagtttgagttctgtgttctccccgcccgtgtcccgcccgacccgcgcccgcgatgctggcgctgcgctgcggctcccgctggctcggcctgctctccgtcccgcgctccgtgccgctgcgcctccccgcggcccgcgcctgcagcaagggctccggcgacccgtcctcttcctcctcctccgggaacccgctcgtgtacctggacgtggacgccaacgggaagccgctcggccgcgtggtgctggagctgaaggcagatgtcgtcccaaagacagctgagaacttcagagccctgtgcactggtgagaagggcttcggctacaaaggctccaccttccacagggtgatcccttccttcatgtgccaggcgggcgacttcaccaaccacaatggcacaggcgggaagtccatctacggaagccgctttcctgacgagaactttacactgaagcacgtggggccaggtgtcctgtccatggctaatgctggtcctaacaccaacggctcccagttcttcatctgcaccataaagacagactggttggatggcaagcatgttgtgttcggtcacgtcaaagagggcatggacgtcgtgaagaaagactgtggccagttgagctaatctgtggccagggtgctggcatggtggcagctgcaaatgtccatgcacccaggtggccgcgttgggctgtcagccaaggtgcctgaaacgatacgtgtgcccactccactgtcacagtgtgcctgaggaaggctgctagggatgttagacctcggccaggacccaccacattgcttcctaatacccacccttcctcacgacctcatttctgggcatctttgtggacatgatgtcacccaccccttgtcaagcattgcctgtgattgcccagcccagattcatctgtgccttggacatggtgatggtgatgggttgccatccaagtgaaagtcttttccttgaccaagggggacagtcagttttgcaaaaggactctaatacctgtttaatattgtcttcctaattgggataatttaattaacaagattgactagaagtgaaactgcaacactaacttccccgtgctgtggtgtgacctgagttggtgacacaggccacagaccccagagcttggcttttgaaacacaactcagggcttttgtgaaggttcccccgctgagatctttcctcctggttactgtgaagcctgttggtttgctgctgtcgtttttgaggagggcccatgggggtaggagcagttgaacctgggaacaaacctcacttgagctgtgcctagacaatgtgaattcctgtgttgctaacagaagtggcctgtaagctcctgtgctccggagggaagcatttcctggtaggctttgatttttctgtgtgttaaagaaattcaatctactcatgatgtgttatgcataaaacatttctggaacatggatttgtgttcaccttaaatgtgaaaataaatcctattttctatggaagactggtacctggtttctggaagaggggtctgtgacttggagctgatctttactgagctcgccgtggcagatgccatgctcaggacgttcatgtggatggtttcatgtcatcgtgctggcaacttgtcctccctgccttagagatgaggctcagacaaacgaccttagcacccatagcctatgccatgagcactggctccaccctgaatcccagctcctccccttagtgaccccaagtctgtttccctcagctgcataaggaggcgatatagtttgaatatttgtccccagccaaatctcatgttgaactgtaatccccagtgctggaggtggggcctgctacgaggtgtttggatcatggggacgggtatttcatggcttggtgctgttttcttgatggtgaattattgcaagatacggtcatttaaaattgtgtggcacctccccctgcccccttcttgctcctgctttcaccatgtgacatgcctgatcccccttcaccttttgccatggtcataagcttcctgaggcctccctggaagctgagcagatgccagcaccatgcttcctgtacatcctgcagaaccataagccaattaaacctttttaataataaattactcagtctcaagtattttt

SEQ ID NO: 444005 - DNA, 789 bp, Homo sapiens
  misc_feature (748)..(748): n is a, c, g, or t
  misc_feature (757)..(757): n is a, c, g, or t
tgcggcgcgcggctgcgcgggactcggccttctgggcgcgcgcgacgtcagtttgagttctgtgttctccccgcccgtgtcccgcccgacccgcgcccgcgatgctggcgctgcgctgcggctcccgctggctcggcctgctctccgtcccgcgctccgtgccgctgcgcctccccgcggcccgcgcctgcagcaagggctccggcgacccgtcctcttcctcctcctccgggaacccgctcgtgtacctggacgtggacgccaacgggaagccgctcggccgcgtggtgctggagctgaaggcagatgtcgtcccaaagacagctgagaacttcagagccctgtgcactggtgagaagggcttcggctacaaaggctccaccttccacagggtgatcccttccttcatgtgccaggcgggcgacttcaccaaccacaatggcacaggcgggaagtccatctacggaagccgctttcctgacgagaactttacactgaagcacgtggggccaggtgtcctgtccatggctaatgctggtcctaacaccaacggctcccagttcttcatctgcaccataaagacagactggttggatggcaagcatgttgtgttcggtcacgtcaaagagggcatggacgtcgtgaagaaaatagaatctttcggctctaagagtgggaggacatccaagaagattgtcatcacagactgtggccagttgagctaatctgtggccagggtgctggggcntcatgtctncccgggcggtggctgcgcgggcgacattttcc

SEQ ID NO: 444006 - DNA, 666 bp, Homo sapiens
ccaggctggagtgcagtggcgcgatctcagctcactgcaagctccacctcccgggttcacaccattctcctgcctcagcctcctgagtagctgtgacttcaggcgcccgccaccacgcccggctaatttttttgtatttttagtagagatggggtttcactgtgttagccaggatggtctcgatcgcctgacctcatgatctacctacgtcggcctcccaaagtgctgggattacaggcatgagccaccgtgcccagccctgaggattcctttctagaaatcactccttattacctgaatcagtgtaggtcttcctatgaggattctatccattgagaattccttttcgagaaatcactccgtatcacctccaaatgccttaaggtcttgacttgcctctagcctgatgttcttgaaccaacccttccttgagtggtttatcaagctacccaggctgcaattatagtcttcatggtgtcaaagaactttccccaatccttagctgtctgtatcctctgttccttaaacctttttcttgatgtcctttccaactccaaaatttgcatttttaacagccaactcaatgtcattctttggttccttcgtagcatgccctataccagctcttgcggtcttacttttgacaattacaaggcaaatctgtat

SEQ ID NO: 444007 - DNA, 1921 bp, Homo sapiens
caggcgccatcgtgactggcaaggggctggaccgcgagacggccggctggcacaacatcacagtgctggccatggaggcggacaatcatgcacagctatcccgggcatccctaaggatccgaatcctggatgtgaacgacaatcccccagaactggccacaccctacgaggcagctgtatgcgaggatgccaagccaggccagctcatccagaccatcagcgtggtggacagagacgagccccaaggcgggcaccgcttctatttccgcctggtgcctgaagctcccagcaaccctcatttctctctgcttgacatccaagacaacaccgctgcagtgcacacgcagcacgtgggcttcaaccggcaggagcaggacgtgttcttcctgcccatcctggtggtagacagtgggccgcccacactgagcagcacaggcacgctcaccatccgcatctgtggctgcgacagctccggcaccatccagtcctgcaacaccacggcctttgtcatggccgcctccctcagccccggcgccctcatcgccctcttggtctgcgttctcatcctggttgtgctggtgctgctgatcctcaccctcaggcgccaccacaagagccacctgagctcggacgaggatgaagacatgcgggacaacgtcatcaaatacaacgacgaaggcggcggcgagcaggacaccgaagcctacgacatgtcggcgctgcggagcctctacgacttcggcgagctcaagggcggcgacgggggcggcagcgcgggcgggggagcgggcgggggctcgggcgggggcgcgggcagccccccgcaggcccacctgccctccgagcgccactcgctgccgcaggggccgccgagccccgagccagacttctcagtgttcagggacttcatcagccgcaaggtggcactggcggacggggacctgtcggtgccgccctacgacgccttccagacctacgccttcgagggcgcggactcgccggccgcctcgctcagctccctgcacagcggctcgtcgggctccgagcaggacttcgcctatctcagcagctggggtccgcgcttccggcccctggccgcgctctacgccggccaccgcggggacgacgaggcccaggcctcctagcccctcgccctgccgtcggggcgcggctgctcacccgcccagcacacgccggggccccaggacaacgcgtttcccccgcggaccccctttcctgccctcccccaaccctcccttggcggctggacggaggggggacttgctaggagcggactcttccattcctcctcctctaggggtgcagctttggagcccagaggtgcgggattctgaccaacggcattaaaactgaggcgagaccgggcacggtgtggctctggggttagaatgggagatgggggtggcgttgcagagtcgggaaggggcgggtcactcaatcctggcctgggggagaatgctggagggagcacgccgctgagatgcccccaccccaggtttcccccatcagagttaagaggaaagaaggctgttcacttactaagcacctactgtgtgctgggacgctgtacagagaccagctcagtcgtcagagaaaccatgaggtggtgtcctgcacggaatagaaggggaaaggaccccagagaagtggctgtgacccgtccaagggcacctggccagtgaatggcagagcctctggcactgaccagctgcctggcctcgggcaagtcacttcacttctctggtcctcagtttcctcatctgtcaaatggggttaataacagaacctacctcgaagagttgtgaggctaaaaagggttcatatgtgtcaagtggttaggacagtgcctggcacatagtaggtgttcaataaatgctagcctttgttactattcttatct

SEQ ID NO: 444008 - DNA, 966 bp, Homo sapiens
agagtccggaggcaggggtggagtgactgaagaccattaagtgtctttcatagaaagaatggcagaggagaccccagttccttcctgagtcccctctccttgggaaaaagtgttcctactctctgggtgagcgtctggtccgaatcgttggcttggagatgattttacggtctctttctggagaacaaaagtaaaaccttacagtgttccgatgagacacagtaggcagtacttgggagggtcttatagaccccaccctgtggaagtgggtctcaacattacacaaccccctctcgggcccgtggacagttgctgtcttctctgttttctctctttgtgcctgtgccaccctcagagaagaagaaaggagctgaggaggagaagccaaagaggaggaggcaggagaagcaggcagcctgccccttctacaaccacgagcagatgggccttctccgggatgaggccctggcagaggtgaaggacatggagcagctgctggcccttgggaaggaggcccgggcctgtccctattacaggagccgccttgccatccctgcagcccagctggtggtgctgccctatcagatgctgctgcatgcggccactcggcaggccgcgggcatccggctgcaggaccaggtggtgatcatcgacgaggcgcacaacctgatcgacaccatcacgggcatgcacagcgtggaggtcagcggctcccagctctgccaggcccattcccagctgctgcagtacatggagcgatacgggaagcgtttgaaggccaagaacctgatgtacctgaagcagatcctgtatttgctggagaaattcgtggctgtgctaggggggaacattaaggcaaaatcccatacacagagtctgtcacagaccggacgggactgaaacatccaacgatttctctttccagagccgatcgaacatcactgttcaaggtccggaactggggaa

SEQ ID NO: 444009 - DNA, 3300 bp, Homo sapiens
  misc_feature (1254)..(1254): n is a, c, g, or t
  misc_feature (1396)..(1396): n is a, c, g, or t
gtctgcctcctgtaggtggagcaggccaggaggaagcagcgagaagaacgcctgcagcagctgcagcacagggtgcagctcaagtatgcagccaagcgcctgaggcaggaagaagaagaaacagagaatctcctccgcctcagcagggagatgctagagacaggcccggaggccgagcggctggagcagctggagtctggggaggaggagctggtcctcgccgaatacgagagtgatgaggagaaaaaggtggcgagcggagtggatgaggatgaggatgacctggaggaagaacacataactaagatttattactgtagtcggacacactcccagctggcccagtttgtgcatgaggtgaagaagagcccctttggcaaggatgttcggctggtctccctcggctcccagcagaacctttgtgtaaatgaagacgtgagaagcctaggttctgtgcagcttatcaacgaccgctgcgtggacatgcagagaagcaggcacgagaagaagaaaggagctgaggaggagaagccaaagaggaggaggcaggagaagcaggcagcctgccccttctacaaccacgagcagatgggccttctccgggatgaggccctggcagaggtgaaggacatggagcagctgctggcccttgggaaggaggcccgggcctgtccctattacaggagccgccttgccatccctgcagcccagctggtggtgctgccctatcagatgctgctgcatgcggccactcggcaggccgcgggcatccggctgcaggaccaggtggtgatcatcgacgaggcgcacaacctgatcgacaccatcacgggcatgcacagcgtggaggtcagcggctcccagctctgccaggcccattcccagctgctgcagtacatggagcgatacgggaagcgtttgaaggccaagaacctgatgtacctgaagcagatcctgtatttgctggagaaattcgtggctgtgctaggggggaacattaagcaaaatcccaatacacagagtctgtcacagacagggacggagctgaagaccatcaacgactttctcttccagagccagatcgacaacatcaacctgttcaaggtgcagcgatactgtgagaagagcatgatcagcagaaagctctttggcttcactgaacggtacggagcagtgttctcatcccgggagcagcccaaactggctgggtttcagcaattcctgcagagcctgcagcccaggacgactgaagcncttgcagcccctgcagacgagagtcaggccagcgtcccgcaaccagcttccccactgatgcacatcgaaggcttcctggcagctctcactacggccaaccaggacggcagggtcatcctgagccgccaaggcagcctcagtnagagcaccctgaagtttttgctcctgaatccagctgtgcactttgcccaagtggtgaaggaatgccgggcagtggtcattgcgggggggaccatgcagccggtgtctgacttccggcagcagctgctggcctgtgctggggtggaagctgagcgcgtggtggagttttcctgtggtcacgtgatccctccagacaacatctgccccttgtcatctgcagcgggatctccaaccagccgctggaattcacgttccagaaaagagacctgcctcagatgatggacgaggtgggtcgcatcctctgtaacctgtgcggtgtggtttctggaggggtggtctgtttcttcccctcctacgagtacctgcgccaggtccatgcccactgggagaagggtggcctgctgggccgtctggctgccaggaagaagatattccaggaacctaagagcgcacaccaggtggagcaggtgctgctggcgtattccaggtgcatccaggcctgtggccaggagagaggccaggtgacagaggccctgctcctctctgtggttggaggaaagatgagtgaagggatcaacttctctgacaacctaggccggtgtgtggtgatggtgggcatgcccttccccaacatcaggtctgcagagctgcaggagaagatggcctacttggatcaaaccctccccagagcccccggccaggcacccccagggaaggctctggtggagaacctgtgcatgaaggccgtcaagccagcagggccatcaggcaccagaaggattttgccagcatagtgctcctggaccagcgatacgcccggccccctgtcctggccaagctgccggcctggatccgagcccgcgtggaggtcaaagctacctttggccccgccattgctgctgtgcagaagtttcaccgggagaagtcggcctcttcctgatgggcaaccacaccaccgcccggcgccgtgcccttcctttgtcctgccctctggagacagtgtttgtcgtgggcgtggtctgcagggatcctgttacaaaggtgaaacccaggaggagagtgtggagtccagagcgctgccaggacccaggcacaggcgttagctcccgtaggagaaaatgcgggaatcctgaatgaacagtgggtcctggctgtccttggggcgttccagggcagctcccctcctggaatagaatctttctttccatcctgcatggctgagagccaggcttcctgcttggagtccgcaggaggctgtggcagcagtggcatccactgtggcatctccgtcctgcccaccttaagaggcgagatggagcaggcccatctgcctctgccctttctagccaaggttatagctgccctggactgctcactctctggtctcaatttaaaatgatcccatggccacagggctcctgcccaggggcttgtcaccttcccctcctccttcctgagtcactccttcagtagaaggccctgctctctatcctgccccacagccctgcctggatttgtatccttggcttcgtgccagttcctccaagtctatggcacctccctccctctcaaccacttgagcaaactccaagacaccttctaccccgacaccagcaattatgccaagggccattaggctctcaacatgactatagagaccccgtatcatcatggagacctttgttcctgtgggaaaataaccctcccacctgcaacagctgcccctgctgactgcgcctgtcttctccctctgaccccagagaaaggggccgtggtcagctgggatcttctgccaccatcagggacaaaccgggggcaggaggaaagtcactgatgcccagctgtttgcatcctgcacagctacaggtccttaattaaaagtgtactgttggttaaaaatgaaat

SEQ ID NO: 444010 - DNA, 3308 bp, Homo sapiens
  misc_feature (1187)..(1187): n is a, c, g, or t
  misc_feature (1329)..(1329): n is a, c, g, or t
agaaaagttaagtgactcatattttctcaccaagcgtgggtgatggagccattcagttttccgatattttattttttatatgagtattcctttaactggaaactttcctaacaacaaacacctaaagacctgcagagttgcttttatttttgttaccccagctccacgccttaaccctcactttgaaataggatgtatcaaccctattttgcagatgaggaaagcaagggtcagagaggttagacaactcttccagagtcacacagctgggaagtagcagctccaggagcagaagctggggccgcttcctggtgcaccgatggtcttcaggtgttttgtggaaactcgggggcctccggggcgaccttgaggacatggacaaggctaagcaggggttcccttcacccagccctgcccttggtttactcaggagtcagaccagccctagtttcctgtgtttcatgtattggcttttcatgtgaaactcgaggagagcttgtccgttgtcagaagctgttttttgaacgtctctacacagtccaggcaggaaatagaagcactcacatcaggagctcagtgtcaggcaggcaagcctcctgcaggggagccccgccctgctcaggtggcctcatctcccctcccagctggtggtgctgccctatcagatgctgctgcatgcggccactcggcaggccgcgggcatccggctgcaggaccaggtggtgatcatcgacgaggcgcacaacctgatcgacaccatcacgggcatgcacagcgtggaggtcagcggctcccagctctgccaggcccattcccagctgctgcagtacatggagcgatacgggaagcgtttgaaggccaagaacctgatgtacctgaagcagatcctgtatttgctggagaaattcgtggctgtgctaggggggaacattaagcaaaatcccaatacacagagtctgtcacagacagggacggagctgaagaccatcaacgactttctcttccagagccagatcgacaacatcaacctgttcaaggtgcagcgatactgtgagaagagcatgatcagcagaaagctctttggcttcactgaacggtacggagcagtgttctcatcccgggagcagcccaaactggctgggtttcagcaattcctgcagagcctgcagcccaggacgactgaagcncttgcagcccctgcagacgagagtcaggccagcgtcccgcaaccagcttccccactgatgcacatcgaaggcttcctggcagctctcactacggccaaccaggacggcagggtcatcctgagccgccaaggcagcctcagtnagagcaccctgaagtttttgctcctgaatccagctgtgcactttgcccaagtggtgaaggaatgccgggcagtggtcattgcgggggggaccatgcagccggccagacttctcgcttcctttctgctgggcctctgaggggtcatggggccatgacgccgtggccttggtctacaggtgtctgacttccggcagcagctgctggcctgtgctggggtggaagctgagcgcgtggtggagttttcctgtggtcacgtgatccctccagacaacatctgccccttgtcatctgcagcgggatctccaaccagccgctggaattcacgttccagaaaagagacctgcctcagatgatggacgaggtgggtcgcatcctctgtaacctgtgcggtgtggtttctggaggggtggtctgtttcttcccctcctacgagtacctgcgccaggtccatgcccactgggagaagggtggcctgctgggccgtctggctgccaggaagaagatattccaggaacctaagagcgcacaccaggtggagcaggtgctgctggcgtattccaggtgcatccaggcctgtggccaggagagaggccaggtgacagaggccctgctcctctctgtggttggaggaaagatgagtgaagggatcaacttctctgacaacctaggccggtgtgtggtgatggtgggcatgcccttccccaacatcaggtctgcagagctgcaggagaagatggcctacttggatcaaaccctccccagagcccccggccaggcacccccagggaaggctctggtggagaacctgtgcatgaaggccgtcaagccagcagggccatcaggcaccagaaggattttgccagcatagtgctcctggaccagcgatacgcccggccccctgtcctggccaagctgccggcctggatccgagcccgcgtggaggtcaaagctacctttggccccgccattgctgctgtgcagaagtttcaccgggagaagtcggcctcttcctgatgggcaaccacaccaccgcccggcgccgtgcccttcctttgtcctgccctctggagacagtgtttgtcgtgggcgtggtctgcagggatcctgttacaaaggtgaaacccaggaggagagtgtggagtccagagcgctgccaggacccaggcacaggcgttagctcccgtaggagaaaatgcgggaatcctgaatgaacagtgggtcctggctgtccttggggcgttccagggcagctcccctcctggaatagaatctttctttccatcctgcatggctgagagccaggcttcctgcttggagtccgcaggaggctgtggcagcagtggcatccactgtggcatctccgtcctgcccaccttaagaggcgagatggagcaggcccatctgcctctgccctttctagccaaggttatagctgccctggactgctcactctctggtctcaatttaaaatgatcccatggccacagggctcctgcccaggggcttgtcaccttcccctcctccttcctgagtcactccttcagtagaaggccctgctctctatcctgccccacagccctgcctggatttgtatccttggcttcgtgccagttcctccaagtctatggcacctccctccctctcaaccacttgagcaaactccaagacaccttctaccccgacaccagcaattatgccaagggccattaggctctcaacatgactatagagaccccgtatcatcatggagacctttgttcctgtgggaaaataaccctcccacctgcaacagctgcccctgctgactgcgcctgtcttctccctctgaccccagagaaaggggccgtggtcagctgggatcttctgccaccatcagggacaaaccgggggcaggaggaaagtcactgatgcccagctgtttgcatcctgcacagctacaggtccttaattaaaagtgtactgttggttaaaaatgaaat

SEQ ID NO: 444011 - DNA, 3228 bp, Homo sapiens
  misc_feature (1107)..(1107): n is a, c, g, or t
  misc_feature (1249)..(1249): n is a, c, g, or t
agagtccggaggcaggggtggagtgactgaagaccattaagtgtctttcatagaaagaatggcagaggagaccccagttccttcctgagtcccctctccttgggaaaaagtgttcctactctctgggtgagcgtctggtccgaatcgttggcttggagatgattttacggtctctttctggagaacaaaagtaaaaccttacagtgttccgatgagacacagtaggcagtacttgggagggtcttatagaccccaccctgtggaagtgggtctcaacattacacaaccccctctcgggcccgtggacagttgctgtcttctctgttttctctctttgtgcctgtgccaccctcagagaagaagaaaggagctgaggaggagaagccaaagaggaggaggcaggagaagcaggcagcctgccccttctacaaccacgagcagatgggccttctccgggatgaggccctggcagaggtgaaggacatggagcagctgctggcccttgggaaggaggcccgggcctgtccctattacaggagccgccttgccatccctgcagcccagctggtggtgctgccctatcagatgctgctgcatgcggccactcggcaggccgcgggcatccggctgcaggaccaggtggtgatcatcgacgaggcgcacaacctgatcgacaccatcacgggcatgcacagcgtggaggtcagcggctcccagctctgccaggcccattcccagctgctgcagtacatggagcgatacgggaagcgtttgaaggccaagaacctgatgtacctgaagcagatcctgtatttgctggagaaattcgtggctgtgctaggggggaacattaagcaaaatcccaatacacagagtctgtcacagacagggacggagctgaagaccatcaacgactttctcttccagagccagatcgacaacatcaacctgttcaaggtgcagcgatactgtgagaagagcatgatcagcagaaagctctttggcttcactgaacggtacggagcagtgttctcatcccgggagcagcccaaactggctgggtttcagcaattcctgcagagcctgcagcccaggacgactgaagcncttgcagcccctgcagacgagagtcaggccagcgtcccgcaaccagcttccccactgatgcacatcgaaggcttcctggcagctctcactacggccaaccaggacggcagggtcatcctgagccgccaaggcagcctcagtnagagcaccctgaagtttttgctcctgaatccagctgtgcactttgcccaagtggtgaaggaatgccgggcagtggtcattgcgggggggaccatgcagccggccagacttctcgcttcctttctgctgggcctctgaggggtcatggggccatgacgccgtggccttggtctacaggtgtctgacttccggcagcagctgctggcctgtgctggggtggaagctgagcgcgtggtggagttttcctgtggtcacgtgatccctccagacaacatctgccccttgtcatctgcagcgggatctccaaccagccgctggaattcacgttccagaaaagagacctgcctcagatgatggacgaggtgggtcgcatcctctgtaacctgtgcggtgtggtttctggaggggtggtctgtttcttcccctcctacgagtacctgcgccaggtccatgcccactgggagaagggtggcctgctgggccgtctggctgccaggaagaagatattccaggaacctaagagcgcacaccaggtggagcaggtgctgctggcgtattccaggtgcatccaggcctgtggccaggagagaggccaggtgacagaggccctgctcctctctgtggttggaggaaagatgagtgaagggatcaacttctctgacaacctaggccggtgtgtggtgatggtgggcatgcccttccccaacatcaggtctgcagagctgcaggagaagatggcctacttggatcaaaccctccccagagcccccggccaggcacccccagggaaggctctggtggagaacctgtgcatgaaggccgtcaagccagcagggccatcaggcaccagaaggattttgccagcatagtgctcctggaccagcgatacgcccggccccctgtcctggccaagctgccggcctggatccgagcccgcgtggaggtcaaagctacctttggccccgccattgctgctgtgcagaagtttcaccgggagaagtcggcctcttcctgatgggcaaccacaccaccgcccggcgccgtgcccttcctttgtcctgccctctggagacagtgtttgtcgtgggcgtggtctgcagggatcctgttacaaaggtgaaacccaggaggagagtgtggagtccagagcgctgccaggacccaggcacaggcgttagctcccgtaggagaaaatgcgggaatcctgaatgaacagtgggtcctggctgtccttggggcgttccagggcagctcccctcctggaatagaatctttctttccatcctgcatggctgagagccaggcttcctgcttggagtccgcaggaggctgtggcagcagtggcatccactgtggcatctccgtcctgcccaccttaagaggcgagatggagcaggcccatctgcctctgccctttctagccaaggttatagctgccctggactgctcactctctggtctcaatttaaaatgatcccatggccacagggctcctgcccaggggcttgtcaccttcccctcctccttcctgagtcactccttcagtagaaggccctgctctctatcctgccccacagccctgcctggatttgtatccttggcttcgtgccagttcctccaagtctatggcacctccctccctctcaaccacttgagcaaactccaagacaccttctaccccgacaccagcaattatgccaagggccattaggctctcaacatgactatagagaccccgtatcatcatggagacctttgttcctgtgggaaaataaccctcccacctgcaacagctgcccctgctgactgcgcctgtcttctccctctgaccccagagaaaggggccgtggtcagctgggatcttctgccaccatcagggacaaaccgggggcaggaggaaagtcactgatgcccagctgtttgcatcctgcacagctacaggtccttaattaaaagtgtactgttggttaaaaatgaaat

SEQ ID NO: 444012 - DNA, 3257 bp, Homo sapiens
  misc_feature (1187)..(1187): n is a, c, g, or t
  misc_feature (1329)..(1329): n is a, c, g, or t
agaaaagttaagtgactcatattttctcaccaagcgtgggtgatggagccattcagttttccgatattttattttttatatgagtattcctttaactggaaactttcctaacaacaaacacctaaagacctgcagagttgcttttatttttgttaccccagctccacgccttaaccctcactttgaaataggatgtatcaaccctattttgcagatgaggaaagcaagggtcagagaggttagacaactcttccagagtcacacagctgggaagtagcagctccaggagcagaagctggggccgcttcctggtgcaccgatggtcttcaggtgttttgtggaaactcgggggcctccggggcgaccttgaggacatggacaaggctaagcaggggttcccttcacccagccctgcccttggtttactcaggagtcagaccagccctagtttcctgtgtttcatgtattggcttttcatgtgaaactcgaggagagcttgtccgttgtcagaagctgttttttgaacgtctctacacagtccaggcaggaaatagaagcactcacatcaggagctcagtgtcaggcaggcaagcctcctgcaggggagccccgccctgctcaggtggcctcatctcccctcccagctggtggtgctgccctatcagatgctgctgcatgcggccactcggcaggccgcgggcatccggctgcaggaccaggtggtgatcatcgacgaggcgcacaacctgatcgacaccatcacgggcatgcacagcgtggaggtcagcggctcccagctctgccaggcccattcccagctgctgcagtacatggagcgatacgggaagcgtttgaaggccaagaacctgatgtacctgaagcagatcctgtatttgctggagaaattcgtggctgtgctaggggggaacattaagcaaaatcccaatacacagagtctgtcacagacagggacggagctgaagaccatcaacgactttctcttccagagccagatcgacaacatcaacctgttcaaggtgcagcgatactgtgagaagagcatgatcagcagaaagctctttggcttcactgaacggtacggagcagtgttctcatcccgggagcagcccaaactggctgggtttcagcaattcctgcagagcctgcagcccaggacgactgaagcncttgcagcccctgcagacgagagtcaggccagcgtcccgcaaccagcttccccactgatgcacatcgaaggcttcctggcagctctcactacggccaaccaggacggcagggtcatcctgagccgccaaggcagcctcagtnagagcaccctgaagtttttgctcctgaatccagctgtgcactttgcccaagtggtgaaggaatgccgggcagtggtcattgcgggggggaccatgcagccggtgtctgacttccggcagcagctgctggcctgtgctggggtggaagctgagcgcgtggtggagttttcctgtggtcacgtgatccctccagacaacatctgccccttgtcatctgcagcgggatctccaaccagccgctggaattcacgttccagaaaagagacctgcctcagatgatggacgaggtgggtcgcatcctctgtaacctgtgcggtgtggtttctggaggggtggtctgtttcttcccctcctacgagtacctgcgccaggtccatgcccactgggagaagggtggcctgctgggccgtctggctgccaggaagaagatattccaggaacctaagagcgcacaccaggtggagcaggtgctgctggcgtattccaggtgcatccaggtgcgggcgtcatgctgagcttgggcctgtggccaggagagaggccaggtgacagaggccctgctcctctctgtggttggaggaaagatgagtgaagggatcaacttctctgacaacctaggccggtgtgtggtgatggtgggcatgcccttccccaacatcaggtctgcagagctgcaggagaagatggcctacttggatcaaaccctccccagagcccccggccaggcacccccagggaaggctctggtggagaacctgtgcatgaaggccgtcaagccagcagggccatcaggcaccagaaggattttgccagcatagtgctcctggaccagcgatacgcccggccccctgtcctggccaagctgccggcctggatccgagcccgcgtggaggtcaaagctacctttggccccgccattgctgctgtgcagaagtttcaccgggagaagtcggcctcttcctgatgggcaaccacaccaccgcccggcgccgtgcccttcctttgtcctgccctctggagacagtgtttgtcgtgggcgtggtctgcagggatcctgttacaaaggtgaaacccaggaggagagtgtggagtccagagcgctgccaggacccaggcacaggcgttagctcccgtaggagaaaatgcgggaatcctgaatgaacagtgggtcctggctgtccttggggcgttccagggcagctcccctcctggaatagaatctttctttccatcctgcatggctgagagccaggcttcctgcttggagtccgcaggaggctgtggcagcagtggcatccactgtggcatctccgtcctgcccaccttaagaggcgagatggagcaggcccatctgcctctgccctttctagccaaggttatagctgccctggactgctcactctctggtctcaatttaaaatgatcccatggccacagggctcctgcccaggggcttgtcaccttcccctcctccttcctgagtcactccttcagtagaaggccctgctctctatcctgccccacagccctgcctggatttgtatccttggcttcgtgccagttcctccaagtctatggcacctccctccctctcaaccacttgagcaaactccaagacaccttctaccccgacaccagcaattatgccaagggccattaggctctcaacatgactatagagaccccgtatcatcatggagacctttgttcctgtgggaaaataaccctcccacctgcaacagctgcccctgctgactgcgcctgtcttctccctctgaccccagagaaaggggccgtggtcagctgggatcttctgccaccatcagggacaaaccgggggcaggaggaaagtcactgatgcccagctgtttgcatcctgcacagctacaggtccttaattaaaagtgtactgttggttaaaaatgaaat

SEQ ID NO: 444013 - DNA, 3419 bp, Homo sapiens
  misc_feature (1187)..(1187): n is a, c, g, or t
  misc_feature (1329)..(1329): n is a, c, g, or t
agaaaagttaagtgactcatattttctcaccaagcgtgggtgatggagccattcagttttccgatattttattttttatatgagtattcctttaactggaaactttcctaacaacaaacacctaaagacctgcagagttgcttttatttttgttaccccagctccacgccttaaccctcactttgaaataggatgtatcaaccctattttgcagatgaggaaagcaagggtcagagaggttagacaactcttccagagtcacacagctgggaagtagcagctccaggagcagaagctggggccgcttcctggtgcaccgatggtcttcaggtgttttgtggaaactcgggggcctccggggcgaccttgaggacatggacaaggctaagcaggggttcccttcacccagccctgcccttggtttactcaggagtcagaccagccctagtttcctgtgtttcatgtattggcttttcatgtgaaactcgaggagagcttgtccgttgtcagaagctgttttttgaacgtctctacacagtccaggcaggaaatagaagcactcacatcaggagctcagtgtcaggcaggcaagcctcctgcaggggagccccgccctgctcaggtggcctcatctcccctcccagctggtggtgctgccctatcagatgctgctgcatgcggccactcggcaggccgcgggcatccggctgcaggaccaggtggtgatcatcgacgaggcgcacaacctgatcgacaccatcacgggcatgcacagcgtggaggtcagcggctcccagctctgccaggcccattcccagctgctgcagtacatggagcgatacgggaagcgtttgaaggccaagaacctgatgtacctgaagcagatcctgtatttgctggagaaattcgtggctgtgctaggggggaacattaagcaaaatcccaatacacagagtctgtcacagacagggacggagctgaagaccatcaacgactttctcttccagagccagatcgacaacatcaacctgttcaaggtgcagcgatactgtgagaagagcatgatcagcagaaagctctttggcttcactgaacggtacggagcagtgttctcatcccgggagcagcccaaactggctgggtttcagcaattcctgcagagcctgcagcccaggacgactgaagcncttgcagcccctgcagacgagagtcaggccagcgtcccgcaaccagcttccccactgatgcacatcgaaggcttcctggcagctctcactacggccaaccaggacggcagggtcatcctgagccgccaaggcagcctcagtnagagcaccctgaagtttttgctcctgaatccagctgtgcactttgcccaagtggtgaaggaatgccgggcagtggtcattgcgggggggaccatgcagccggccagacttctcgcttcctttctgctgggcctctgaggggtcatggggccatgacgccgtggccttggtctacaggtgtctgacttccggcagcagctgctggcctgtgctggggtggaagctgagcgcgtggtggagttttcctgtggtcacgtgatccctccagacaacatctgccccttgtcatctgcagcgggatctccaaccagccgctggaattcacgttccagaaaagagacctgcctcagatgatggacgaggtgggtcgcatcctctgtaacctgtgcggtgtggtttctggaggggtggtctgtttcttcccctcctacgagtacctgcgccaggtccatgcccactgggagaagggtggcctgctgggccgtctggctgccaggaagaagatattccaggaacctaagagcgcacaccaggtggagcaggtgctgctggcgtattccaggtgcatccaggcctgtggccaggagagaggccaggtgacagaggccctgctcctctctgtggttggaggaaagatgagtgaagggatcaacttctctgacaacctaggccggtgtgtggtgatggtgggcatgcccttccccaacatcaggtctgcagagctgcaggagaagatggcctacttggatcaaaccctccccagagcccccggccaggcacccccagggaaggctctggtggagaacctgtgcatgaaggccgtcaagccagtccataggtgagcctggctgcctccagctgggtggacagatgggggctggagaaggggagaacaggaaagaggggttgcctgccctgtttcctatataagtctgaggaaggcagggccatcaggcaccagaaggattttgccagcatagtgctcctggaccagcgatacgcccggccccctgtcctggccaagctgccggcctggatccgagcccgcgtggaggtcaaagctacctttggccccgccattgctgctgtgcagaagtttcaccgggagaagtcggcctcttcctgatgggcaaccacaccaccgcccggcgccgtgcccttcctttgtcctgccctctggagacagtgtttgtcgtgggcgtggtctgcagggatcctgttacaaaggtgaaacccaggaggagagtgtggagtccagagcgctgccaggacccaggcacaggcgttagctcccgtaggagaaaatgcgggaatcctgaatgaacagtgggtcctggctgtccttggggcgttccagggcagctcccctcctggaatagaatctttctttccatcctgcatggctgagagccaggcttcctgcttggagtccgcaggaggctgtggcagcagtggcatccactgtggcatctccgtcctgcccaccttaagaggcgagatggagcaggcccatctgcctctgccctttctagccaaggttatagctgccctggactgctcactctctggtctcaatttaaaatgatcccatggccacagggctcctgcccaggggcttgtcaccttcccctcctccttcctgagtcactccttcagtagaaggccctgctctctatcctgccccacagccctgcctggatttgtatccttggcttcgtgccagttcctccaagtctatggcacctccctccctctcaaccacttgagcaaactccaagacaccttctaccccgacaccagcaattatgccaagggccattaggctctcaacatgactatagagaccccgtatcatcatggagacctttgttcctgtgggaaaataaccctcccacctgcaacagctgcccctgctgactgcgcctgtcttctccctctgaccccagagaaaggggccgtggtcagctgggatcttctgccaccatcagggacaaaccgggggcaggaggaaagtcactgatgcccagctgtttgcatcctgcacagctacaggtccttaattaaaagtgtactgttggttaaaaatgaaat

SEQ ID NO: 444014 - DNA, 2575 bp, Homo sapiens
  misc_feature (454)..(454): n is a, c, g, or t
  misc_feature (596)..(596): n is a, c, g, or t
ggctgtactggctggaatttttgggatcacgggcatgcacagcgtggatgtcagcggctcccagctctgccaggcccattcccagctgctgcagtacatggagcgatacgggaagcgtttgaaggccaagaacctgatgtacctgaagcagatcctgtatttgctggagaaattcgtggctgtgctaggggggaacattaagcaaaatcccaatacacagagtctgtcacagacagggacggagctgaagaccatcaacgactttctcttccagagccagatcgacaacatcaacctgttcaaggtgcagcgatactgtgagaagagcatgatcagcagaaagctctttggcttcactgaacggtacggagcagtgttctcatcccgggagcagcccaaactggctgggtttcagcaattcctgcagagcctgcagcccaggacgactgaagcncttgcagcccctgcagacgagagtcaggccagcgtcccgcaaccagcttccccactgatgcacatcgaaggcttcctggcagctctcactacggccaaccaggacggcagggtcatcctgagccgccaaggcagcctcagtnagagcaccctgaagtttttgctcctgaatccagctgtgcactttgcccaagtggtgaaggaatgccgggcagtggtcattgcgggggggaccatgcagccggccagacttctcgcttcctttctgctgggcctctgaggggtcatggggccatgacgccgtggccttggtctacaggtgtctgacttccggcagcagctgctggcctgtgctggggtggaagctgagcgcgtggtggagttttcctgtggtcacgtgatccctccagacaacatctgccccttgtcatctgcagcgggatctccaaccagccgctggaattcacgttccagaaaagagacctgcctcagatgatggacgaggtgggtcgcatcctctgtaacctgtgcggtgtggtttctggaggggtggtctgtttcttcccctcctacgagtacctgcgccaggtccatgcccactgggagaagggtggcctgctgggccgtctggctgccaggaagaagatattccaggaacctaagagcgcacaccaggtggagcaggtgctgctggcgtattccaggtgcatccaggcctgtggccaggagagaggccaggtgacagaggccctgctcctctctgtggttggaggaaagatgagtgaagggatcaacttctctgacaacctaggccggtgtgtggtgatggtgggcatgcccttccccaacatcaggtctgcagagctgcaggagaagatggcctacttggatcaaaccctccccagagcccccggccaggcacccccagggaaggctctggtggagaacctgtgcatgaaggccgtcaagccagcagggccatcaggcaccagaaggattttgccagcatagtgctcctggaccagcgatacgcccggccccctgtcctggccaagctgccggcctggatccgagcccgcgtggaggtcaaagctacctttggccccgccattgctgctgtgcagaagtttcaccgggagaagtcggcctcttcctgatgggcaaccacaccaccgcccggcgccgtgcccttcctttgtcctgccctctggagacagtgtttgtcgtgggcgtggtctgcagggatcctgttacaaaggtgaaacccaggaggagagtgtggagtccagagcgctgccaggacccaggcacaggcgttagctcccgtaggagaaaatgcgggaatcctgaatgaacagtgggtcctggctgtccttggggcgttccagggcagctcccctcctggaatagaatctttctttccatcctgcatggctgagagccaggcttcctgcttggagtccgcaggaggctgtggcagcagtggcatccactgtggcatctccgtcctgcccaccttaagaggcgagatggagcaggcccatctgcctctgccctttctagccaaggttatagctgccctggactgctcactctctggtctcaatttaaaatgatcccatggccacagggctcctgcccaggggcttgtcaccttcccctcctccttcctgagtcactccttcagtagaaggccctgctctctatcctgccccacagccctgcctggatttgtatccttggcttcgtgccagttcctccaagtctatggcacctccctccctctcaaccacttgagcaaactccaagacaccttctaccccgacaccagcaattatgccaagggccattaggctctcaacatgactatagagaccccgtatcatcatggagacctttgttcctgtgggaaaataaccctcccacctgcaacagctgcccctgctgactgcgcctgtcttctccctctgaccccagagaaaggggccgtggtcagctgggatcttctgccaccatcagggacaaaccgggggcaggaggaaagtcactgatgcccagctgtttgcatcctgcacagctacaggtccttaattaaaagtgtactgttggttaaaaatgaaat

SEQ ID NO: 444015 - DNA, 2469 bp, Homo sapiens
  misc_feature (1187)..(1187): n is a, c, g, or t
  misc_feature (1329)..(1329): n is a, c, g, or t
agaaaagttaagtgactcatattttctcaccaagcgtgggtgatggagccattcagttttccgatattttattttttatatgagtattcctttaactggaaactttcctaacaacaaacacctaaagacctgcagagttgcttttatttttgttaccccagctccacgccttaaccctcactttgaaataggatgtatcaaccctattttgcagatgaggaaagcaagggtcagagaggttagacaactcttccagagtcacacagctgggaagtagcagctccaggagcagaagctggggccgcttcctggtgcaccgatggtcttcaggtgttttgtggaaactcgggggcctccggggcgaccttgaggacatggacaaggctaagcaggggttcccttcacccagccctgcccttggtttactcaggagtcagaccagccctagtttcctgtgtttcatgtattggcttttcatgtgaaactcgaggagagcttgtccgttgtcagaagctgttttttgaacgtctctacacagtccaggcaggaaatagaagcactcacatcaggagctcagtgtcaggcaggcaagcctcctgcaggggagccccgccctgctcaggtggcctcatctcccctcccagctggtggtgctgccctatcagatgctgctgcatgcggccactcggcaggccgcgggcatccggctgcaggaccaggtggtgatcatcgacgaggcgcacaacctgatcgacaccatcacgggcatgcacagcgtggaggtcagcggctcccagctctgccaggcccattcccagctgctgcagtacatggagcgatacgggaagcgtttgaaggccaagaacctgatgtacctgaagcagatcctgtatttgctggagaaattcgtggctgtgctaggggggaacattaagcaaaatcccaatacacagagtctgtcacagacagggacggagctgaagaccatcaacgactttctcttccagagccagatcgacaacatcaacctgttcaaggtgcagcgatactgtgagaagagcatgatcagcagaaagctctttggcttcactgaacggtacggagcagtgttctcatcccgggagcagcccaaactggctgggtttcagcaattcctgcagagcctgcagcccaggacgactgaagcncttgcagcccctgcagacgagagtcaggccagcgtcccgcaaccagcttccccactgatgcacatcgaaggcttcctggcagctctcactacggccaaccaggacggcagggtcatcctgagccgccaaggcagcctcagtnagagcaccctgaagtttttgctcctgaatccagctgtgcactttgcccaagtggtgaaggaatgccgggcagtggtcattgcgggggggaccatgcagccggccagacttctcgcttcctttctgctgggcctctgaggggtcatggggccatgacgccgtggccttggtctacaggtgtctgacttccggcagcagctgctggcctgtgctggggtggaagctgagcgcgtggtggagttttcctgtggtcacgtgatccctccagacaacatctgccccttgtcatctgcagcgggatctccaaccagccgctggaattcacgttccagaaaagagacctgcctcagatgatggacgaggtgggtcgcatcctctgtaacctgtgcggtgtggtttctggaggggtggtctgtttcttcccctcctacgagtacctgcgccaggtccatgcccactgggagaagggtggcctgctgggccgtctggctgccaggaagaagatattccaggaacctaagagcgcacaccaggtggagcaggtgctgctggcgtattccaggtgcatccaggcctgtggccaggagagaggccaggtgacagaggccctgctcctctctgtggttggaggaaagatgagtgaagggatcaacttctctgacaacctaggccgcccagagcccccggccaggcacccccagggaaggctctggtggagaacctgtgcatgaaggccgtcaagccatggatttgtatccttggcttcgtgccagttcctccaagtctatggcacctccctccctctcaaccacttgagcaaactccaagacaccttctaccccgacaccagcaattatgccaagggccattaggctctcaacatgactatagagaccccgtatcatcatggagacctttgttcctgtgggaaaataaccctcccacctgcaacagctgcccctgctgactgcgcctgtcttctccctctgaccccagagaaaggggccgtggtcagctgggatcttctgccaccatcagggacaaaccgggggcaggaggaaagtcactgatgcccagctgtttgcatcctgcacagctacaggtccttaattaaaagtgtactgttggttaaaaatgaaat

SEQ ID NO: 444016 - DNA, 338 bp, Homo sapiens
acagagtaggcagtgggtgggagtggcatcacccccagggctgatacagccaggccttccccactgcgctggtgtctcctgccccctccggaagcttggatgcccctccacaccctcttgatcttccctgtgatgtcacctggacccctgctgctggcattggccacaaagcctcctggtctggctccaaagcctggcagggtcttttccccgggggagctgcaggcagggaacagtcctgatgggtcatccccttcactcccagccccagagcccccggccaggcacccccagggaaggctctggtggagaacctgtgcatgaaggccgtcaagcca

SEQ ID NO: 444017 - DNA, 343 bp, Homo sapiens
aaatacagatgctcttcttacttgatgtgcagtgtggagggagagaagatagggaagggttggggggcctgagaaccaccattgtgacctatttccattctcttttttagggaacattaagcaaaatcccaatacacagagtctgtcacagacaggtaagagagttgccctcagagggcccagagctgatctgagccacttccgagcttaaccctgggactgaaacctgaggcttagggtgaagctcccaaggcccttcatgtgtttgttctcagggacggagctgaagaccatcaacgactttctcttccagagccagatcgacaacatcaacctgttcaag

SEQ ID NO: 444018 - DNA, 451 bp, Homo sapiens
cccgccattgctgctgtgcagaaggtcagtcctacctttttctttctgagagcctcccaaccccgagatcacatttctcactgccttctgtctgcccagtttcaccgggagaagtcggcctcttcctgatgggcaaccacaccaccgcccggcgccgtgcccttcctttgtcctgccctctggagacagtgtttgtcgtgggcgtggtctgcagggatcctgttacaaaggtgaaacccaggaggagagtgtggagtccagagcgctgccaggacccaggcacaggcgttagctcccgtaggagaaaatgcgggaatcctgaatgaacagtgggtcctggctgtccttggggcgttccagggcagctcccctcctggaatagaatctttctttccatcctgcatggctgagagccaggcttcctgcttggagtccgcaggaggctgtggca

SEQ ID NO: 444019 - DNA, 312 bp, Homo sapiens
aggtggcacctaccaccccgtggttcccacccaggggagccaagtcctcttcatgactatagagaccccgtatcatcatggagacctttgttcctgtgggaaaataaccctcccacctgcaacagctgcccctgctgactgcgcctgtcttctccctctgaccccagagaaaggggccgtggtcagctgggatcttctgccaccatcagggacaaaccgggggcaggaggaaagtcactgatgcccagctgtttgcatcctgcacagctacaggtccttaattaaaagtgtactgttggttaaaaatgaaat

SEQ ID NO: 444020 - DNA, 3484 bp, Homo sapiens
  misc_feature (1254)..(1254): n is a, c, g, or t
  misc_feature (1396)..(1396): n is a, c, g, or t
gtctgcctcctgtaggtggagcaggccaggaggaagcagcgagaagaacgcctgcagcagctgcagcacagggtgcagctcaagtatgcagccaagcgcctgaggcaggaagaagaagaaacagagaatctcctccgcctcagcagggagatgctagagacaggcccggaggccgagcggctggagcagctggagtctggggaggaggagctggtcctcgccgaatacgagagtgatgaggagaaaaaggtggcgagcggagtggatgaggatgaggatgacctggaggaagaacacataactaagatttattactgtagtcggacacactcccagctggcccagtttgtgcatgaggtgaagaagagcccctttggcaaggatgttcggctggtctccctcggctcccagcagaacctttgtgtaaatgaagacgtgagaagcctaggttctgtgcagcttatcaacgaccgctgcgtggacatgcagagaagcaggcacgagaagaagaaaggagctgaggaggagaagccaaagaggaggaggcaggagaagcaggcagcctgccccttctacaaccacgagcagatgggccttctccgggatgaggccctggcagaggtgaaggacatggagcagctgctggcccttgggaaggaggcccgggcctgtccctattacaggagccgccttgccatccctgcagcccagctggtggtgctgccctatcagatgctgctgcatgcggccactcggcaggccgcgggcatccggctgcaggaccaggtggtgatcatcgacgaggcgcacaacctgatcgacaccatcacgggcatgcacagcgtggaggtcagcggctcccagctctgccaggcccattcccagctgctgcagtacatggagcgatacgggaagcgtttgaaggccaagaacctgatgtacctgaagcagatcctgtatttgctggagaaattcgtggctgtgctaggggggaacattaagcaaaatcccaatacacagagtctgtcacagacagggacggagctgaagaccatcaacgactttctcttccagagccagatcgacaacatcaacctgttcaaggtgcagcgatactgtgagaagagcatgatcagcagaaagctctttggcttcactgaacggtacggagcagtgttctcatcccgggagcagcccaaactggctgggtttcagcaattcctgcagagcctgcagcccaggacgactgaagcncttgcagcccctgcagacgagagtcaggccagcgtcccgcaaccagcttccccactgatgcacatcgaaggcttcctggcagctctcactacggccaaccaggacggcagggtcatcctgagccgccaaggcagcctcagtnagagcaccctgaagtttttgctcctgaatccagctgtgcactttgcccaagtggtgaaggaatgccgggcagtggtcattgcgggggggaccatgcagccggtgtctgacttccggcagcagctgctggcctgtgctggggtggaagctgagcgcgtggtggagttttcctgtggtcacgtgatccctccagacaacatctgccccttgtcatctgcagcgggatctccaaccagccgctggaattcacgttccagaaaagagacctgcctcagatgatggacgaggtgggtcgcatcctctgtaacctgtgcggtgtggtttctggaggggtggtctgtttcttcccctcctacgagtacctgcgccaggtccatgcccactgggagaagggtggcctgctgggccgtctggctgccaggaagaagatattccaggaacctaagagcgcacaccaggtggagcaggtgctgctggcgtattccaggtgcatccaggcctgtggccaggagagaggccaggtgacagaggccctgctcctctctgtggttggaggaaagatgagtgaagggatcaacttctctgacaacctaggccggtgtgtggtgatggtgggcatgcccttccccaacatcaggtctgcagagctgcaggagaagatggcctacttggatcaaaccctccccagagcccccggccaggcacccccagggaaggctctggtggagaacctgtgcatgaaggccgtcaagccagcagggccatcaggcaccagaaggattttgccagcatagtgctcctggaccagcgatacgcccggccccctgtcctggccaagctgccggcctggatccgagcccgcgtggaggtcaaagctacctttggccccgccattgctgctgtgcagaagtttcaccgggagaagtcggcctcttcctgatgggcaaccacaccaccgcccggcgccgtgcccttcctttgtcctgccctctggagacagtgtttgtcgtgggcgtggtctgcagggatcctgttacaaaggtgaaacccaggaggagagtgtggagtccagagcgctgccaggacccaggcacaggcgttagctcccgtaggagaaaatgcgggaatcctgaatgaacagtgggtcctggctgtccttggggcgttccagggcagctcccctcctggaatagaatctttctttccatcctgcatggctgagagccaggcttcctgcttggagtccgcaggaggctgtggcagcagtggcatccactgtggcatctccgtcctgcccaccttaagaggcgagatggagcaggcccatctgcctctgccctttctagccaaggttatagctgccctggactgctcactctctggtctcaatttaaaatgatcccatggccacagggctcctgcccaggggcttgtcaccttcccctcctccttcctgagtcactccttcagtagaaggccctgctctctatcctgccccacagccctgcctggatttgtatccttggcttcgtgccagttcctccaagtctatggcacctccctccctctcaaccacttgagcaaactccaagacaccttctaccccgacaccagcaattatgccaagggccattaggctctcaacatgactatagagaccccgtatcatcatggagacctttgttcctgtgggaaaataaccctcccacctgcaacagctgcccctgctgactgcgcctgtcttctccctctgaccccagagaaaggggccgtggtcagctgggatcttctgccaccatcagggacaaaccgggggcaggaggaaagtcactgatgcccagctgtttgcatcctgcacaacgaatctcgacaagttgtgcttaaaagaccacatatggtatgattctatttaaatgaaatgtccagaataagcaattccatagagacagaaagtagacgagtagttgtcgggggctggtaggaggggataatagggagtgatagctagggatatggggttccttaacgggagggagcttaaaaacgttctgcaattagtgatgattgctgcacaacttgtcgagattcg

SEQ ID NO: 444021 - DNA, 3197 bp, Homo sapiens
  misc_feature (1187)..(1187): n is a, c, g, or t
  misc_feature (1329)..(1329): n is a, c, g, or t
agaaaagttaagtgactcatattttctcaccaagcgtgggtgatggagccattcagttttccgatattttattttttatatgagtattcctttaactggaaactttcctaacaacaaacacctaaagacctgcagagttgcttttatttttgttaccccagctccacgccttaaccctcactttgaaataggatgtatcaaccctattttgcagatgaggaaagcaagggtcagagaggttagacaactcttccagagtcacacagctgggaagtagcagctccaggagcagaagctggggccgcttcctggtgcaccgatggtcttcaggtgttttgtggaaactcgggggcctccggggcgaccttgaggacatggacaaggctaagcaggggttcccttcacccagccctgcccttggtttactcaggagtcagaccagccctagtttcctgtgtttcatgtattggcttttcatgtgaaactcgaggagagcttgtccgttgtcagaagctgttttttgaacgtctctacacagtccaggcaggaaatagaagcactcacatcaggagctcagtgtcaggcaggcaagcctcctgcaggggagccccgccctgctcaggtggcctcatctcccctcccagctggtggtgctgccctatcagatgctgctgcatgcggccactcggcaggccgcgggcatccggctgcaggaccaggtggtgatcatcgacgaggcgcacaacctgatcgacaccatcacgggcatgcacagcgtggaggtcagcggctcccagctctgccaggcccattcccagctgctgcagtacatggagcgatacgggaagcgtttgaaggccaagaacctgatgtacctgaagcagatcctgtatttgctggagaaattcgtggctgtgctaggggggaacattaagcaaaatcccaatacacagagtctgtcacagacagggacggagctgaagaccatcaacgactttctcttccagagccagatcgacaacatcaacctgttcaaggtgcagcgatactgtgagaagagcatgatcagcagaaagctctttggcttcactgaacggtacggagcagtgttctcatcccgggagcagcccaaactggctgggtttcagcaattcctgcagagcctgcagcccaggacgactgaagcncttgcagcccctgcagacgagagtcaggccagcgtcccgcaaccagcttccccactgatgcacatcgaaggcttcctggcagctctcactacggccaaccaggacggcagggtcatcctgagccgccaaggcagcctcagtnagagcaccctgaagtttttgctcctgaatccagctgtgcactttgcccaagtggtgaaggaatgccgggcagtggtcattgcgggggggaccatgcagccggccagacttctcgcttcctttctgctgggcctctgaggggtcatggggccatgacgccgtggccttggtctacaggtgtctgacttccggcagcagctgctggcctgtgctggggtggaagctgagcgcgtggtggagttttcctgtggtcacgtgatccctccagacaacatctgccccttgtcatctgcagcgggatctccaaccagccgctggaattcacgttccagaaaagagacctgcctcagatgatggacgaggtgggtcgcatcctctgtaacctgtgcggtgtggtttctggaggggtggtctgtttcttcccctcctacgagtacctgcgccaggtccatgcccactgggagaagggtggcctgctgggccgtctggctgccaggaagaagatattccaggaacctaagagcgcacaccaggtggagcaggtgctgctggcgtattccaggtgcatccaggcctgtggccaggagagaggccaggtgacagaggccctgctcctctctgtggttggaggaaagatgagtgaagggatcaacttctctgacaacctaggccggtctgcagagctgcaggagaagatggcctacttggatcaaaccctcgcagggccatcaggcaccagaaggattttgccagcatagtgctcctggaccagcgatacgcccggccccctgtcctggccaagctgccggcctggatccgagcccgcgtggaggtcaaagctacctttggccccgccattgctgctgtgcagaagtttcaccgggagaagtcggcctcttcctgatgggcaaccacaccaccgcccggcgccgtgcccttcctttgtcctgccctctggagacagtgtttgtcgtgggcgtggtctgcagggatcctgttacaaaggtgaaacccaggaggagagtgtggagtccagagcgctgccaggacccaggcacaggcgttagctcccgtaggagaaaatgcgggaatcctgaatgaacagtgggtcctggctgtccttggggcgttccagggcagctcccctcctggaatagaatctttctttccatcctgcatggctgagagccaggcttcctgcttggagtccgcaggaggctgtggcagcagtggcatccactgtggcatctccgtcctgcccaccttaagaggcgagatggagcaggcccatctgcctctgccctttctagccaaggttatagctgccctggactgctcactctctggtctcaatttaaaatgatcccatggccacagggctcctgcccaggggcttgtcaccttcccctcctccttcctgagtcactccttcagtagaaggccctgctctctatcctgccccacagccctgcctggatttgtatccttggcttcgtgccagttcctccaagtctatggcacctccctccctctcaaccacttgagcaaactccaagacaccttctaccccgacaccagcaattatgccaagggccattaggctctcaacatgactatagagaccccgtatcatcatggagacctttgttcctgtgggaaaataaccctcccacctgcaacagctgcccctgctgactgcgcctgtcttctccctctgaccccagagaaaggggccgtggtcagctgggatcttctgccaccatcagggacaaaccgggggcaggaggaaagtcactgatgcccagctgtttgcatcctgcacagctacaggtccttaattaaaagtgtactgttggttaaaaatgaaat

SEQ ID NO: 444022 - DNA, 3190 bp, Homo sapiens
  misc_feature (1069)..(1069): n is a, c, g, or t
  misc_feature (1211)..(1211): n is a, c, g, or t
agagtccggaggcaggggtggagtgactgaagaccattaagtgtctttcatagaaagaatggcagaggagaccccagttccttcctgagtcccctctccttgggaaaaagtgttcctactctctgggtgagcgtctggtccgaatcgttggcttggagatgattttacggtctctttctggagaacaaaagtaaaaccttacagtgttccgatgagacacagtaggcagtacttgggagggtcttatagaccccaccctgtggaagtgggtctcaacattacacaaccccctctcgggcccgtggacagttgctgtcttctctgttttctctctttgtgcctgtgccaccctcagagaagaagaaaggagctgaggaggagaagccaaagaggaggaggcaggagaagcaggcagcctgccccttctacaaccacgagcagatgggccttctccgggatgaggccctggcagaggtgaaggacatggagcagctgctggcccttgggaaggaggcccgggcctgtccctattacaggagccgccttgccatccctgcagcccagctggtggtgctgccctatcagatgctgctgcatgcggccactcggcaggccgcgggcatccggctgcaggaccaggtggtgatcatcgacgaggcgcacaacctgatcgacaccatcacgggcatgcacagcgtggaggtcagcggctcccagctctgccaggcccattcccagctgctgcagtacatggagcgatacgggaagcgtttgaaggccaagaacctgatgtacctgaagcagatcctgtatttgctggagaaattcgtggctgtgctaggggggaacattaagcaaaatcccaatacacagagtctgtcacagacagagccagatcgacaacatcaacctgttcaaggtgcagcgatactgtgagaagagcatgatcagcagaaagctctttggcttcactgaacggtacggagcagtgttctcatcccgggagcagcccaaactggctgggtttcagcaattcctgcagagcctgcagcccaggacgactgaagcncttgcagcccctgcagacgagagtcaggccagcgtcccgcaaccagcttccccactgatgcacatcgaaggcttcctggcagctctcactacggccaaccaggacggcagggtcatcctgagccgccaaggcagcctcagtnagagcaccctgaagtttttgctcctgaatccagctgtgcactttgcccaagtggtgaaggaatgccgggcagtggtcattgcgggggggaccatgcagccggccagacttctcgcttcctttctgctgggcctctgaggggtcatggggccatgacgccgtggccttggtctacaggtgtctgacttccggcagcagctgctggcctgtgctggggtggaagctgagcgcgtggtggagttttcctgtggtcacgtgatccctccagacaacatctgccccttgtcatctgcagcgggatctccaaccagccgctggaattcacgttccagaaaagagacctgcctcagatgatggacgaggtgggtcgcatcctctgtaacctgtgcggtgtggtttctggaggggtggtctgtttcttcccctcctacgagtacctgcgccaggtccatgcccactgggagaagggtggcctgctgggccgtctggctgccaggaagaagatattccaggaacctaagagcgcacaccaggtggagcaggtgctgctggcgtattccaggtgcatccaggcctgtggccaggagagaggccaggtgacagaggccctgctcctctctgtggttggaggaaagatgagtgaagggatcaacttctctgacaacctaggccggtgtgtggtgatggtgggcatgcccttccccaacatcaggtctgcagagctgcaggagaagatggcctacttggatcaaaccctccccagagcccccggccaggcacccccagggaaggctctggtggagaacctgtgcatgaaggccgtcaagccagcagggccatcaggcaccagaaggattttgccagcatagtgctcctggaccagcgatacgcccggccccctgtcctggccaagctgccggcctggatccgagcccgcgtggaggtcaaagctacctttggccccgccattgctgctgtgcagaagtttcaccgggagaagtcggcctcttcctgatgggcaaccacaccaccgcccggcgccgtgcccttcctttgtcctgccctctggagacagtgtttgtcgtgggcgtggtctgcagggatcctgttacaaaggtgaaacccaggaggagagtgtggagtccagagcgctgccaggacccaggcacaggcgttagctcccgtaggagaaaatgcgggaatcctgaatgaacagtgggtcctggctgtccttggggcgttccagggcagctcccctcctggaatagaatctttctttccatcctgcatggctgagagccaggcttcctgcttggagtccgcaggaggctgtggcagcagtggcatccactgtggcatctccgtcctgcccaccttaagaggcgagatggagcaggcccatctgcctctgccctttctagccaaggttatagctgccctggactgctcactctctggtctcaatttaaaatgatcccatggccacagggctcctgcccaggggcttgtcaccttcccctcctccttcctgagtcactccttcagtagaaggccctgctctctatcctgccccacagccctgcctggatttgtatccttggcttcgtgccagttcctccaagtctatggcacctccctccctctcaaccacttgagcaaactccaagacaccttctaccccgacaccagcaattatgccaagggccattaggctctcaacatgactatagagaccccgtatcatcatggagacctttgttcctgtgggaaaataaccctcccacctgcaacagctgcccctgctgactgcgcctgtcttctccctctgaccccagagaaaggggccgtggtcagctgggatcttctgccaccatcagggacaaaccgggggcaggaggaaagtcactgatgcccagctgtttgcatcctgcacagctacaggtccttaattaaaagtgtactgttggttaaaaatgaaat

SEQ ID NO: 444023 - DNA, 3170 bp, Homo sapiens
  misc_feature (1254)..(1254): n is a, c, g, or t
  misc_feature (1396)..(1396): n is a, c, g, or t
gtctgcctcctgtaggtggagcaggccaggaggaagcagcgagaagaacgcctgcagcagctgcagcacagggtgcagctcaagtatgcagccaagcgcctgaggcaggaagaagaagaaacagagaatctcctccgcctcagcagggagatgctagagacaggcccggaggccgagcggctggagcagctggagtctggggaggaggagctggtcctcgccgaatacgagagtgatgaggagaaaaaggtggcgagcggagtggatgaggatgaggatgacctggaggaagaacacataactaagatttattactgtagtcggacacactcccagctggcccagtttgtgcatgaggtgaagaagagcccctttggcaaggatgttcggctggtctccctcggctcccagcagaacctttgtgtaaatgaagacgtgagaagcctaggttctgtgcagcttatcaacgaccgctgcgtggacatgcagagaagcaggcacgagaagaagaaaggagctgaggaggagaagccaaagaggaggaggcaggagaagcaggcagcctgccccttctacaaccacgagcagatgggccttctccgggatgaggccctggcagaggtgaaggacatggagcagctgctggcccttgggaaggaggcccgggcctgtccctattacaggagccgccttgccatccctgcagcccagctggtggtgctgccctatcagatgctgctgcatgcggccactcggcaggccgcgggcatccggctgcaggaccaggtggtgatcatcgacgaggcgcacaacctgatcgacaccatcacgggcatgcacagcgtggaggtcagcggctcccagctctgccaggcccattcccagctgctgcagtacatggagcgatacgggaagcgtttgaaggccaagaacctgatgtacctgaagcagatcctgtatttgctggagaaattcgtggctgtgctaggggggaacattaagcaaaatcccaatacacagagtctgtcacagacagggacggagctgaagaccatcaacgactttctcttccagagccagatcgacaacatcaacctgttcaaggtgcagcgatactgtgagaagagcatgatcagcagaaagctctttggcttcactgaacggtacggagcagtgttctcatcccgggagcagcccaaactggctgggtttcagcaattcctgcagagcctgcagcccaggacgactgaagcncttgcagcccctgcagacgagagtcaggccagcgtcccgcaaccagcttccccactgatgcacatcgaaggcttcctggcagctctcactacggccaaccaggacggcagggtcatcctgagccgccaaggcagcctcagtnagagcaccctgaagtttttgctcctgaatccagctgtgcactttgcccaagtggtgaaggaatgccgggcagtggtcattgcgggggggaccatgcagccggtgtctgacttccggcagcagctgctggcctgtgctggggtggaagctgagcgcgtggtggagttttcctgtggtcacgtgatccctccagacaacatctgccccttgtcatctgcagcgggatctccaaccagccgctggaattcacgttccagaaaagagacctgcctcagatgatggacgaggtgggtcgcatcctctgtaacctgtgcggtgtggtttctggaggggtggtctgtttcttcccctcctacgagtacctgcgccaggtccatgcccactgggagaagggtggcctgctgggccgtctggctgccaggaagaagatattccaggaacctaagagcgcacaccaggtggagcaggtgctgctggcgtattccaggtgcatccaggcctgtggccaggagagaggccaggtgacagaggccctgctcctctctgtggttggaggaaagatgagtgaagggatcaacttctctgacaacctaggccggtgtgtggtgatggtgggcatgcccttccccaacatcaggtctgcagagctgcaggagaagatggcctacttggatcaaaccctccccagagcccccggccaggcacccccagggaaggctctggtggagaacctgtgcatgaaggccgtcaagccagcagggccatcaggcaccagaaggattttgccagcatagtgctcctggaccagcgatacgcccggccccctgtcctggccaagctgccggcctggatccgagcccgcgtggaggtcaaagctacctttggccccgccattgctgctgtgcagaagtttcaccgggagaagtcggcctcttcctgatgggcaaccacaccaccgcccggcgccgtgcccttcctttgtcctgccctctggagacagtgtttgtcgtgggcgtggtctgcagggatcctgttacaaaggtgaaacccaggaggagagtgtggagtccagagcgctgccaggacccaggcacaggcgttagctcccgtaggagaaaatgcgggaatcctgaatgaacagtgggtcctggctgtccttggggcgttccagggcagctcccctcctggaatagaatctttctttccatcctgcatggctgagagccaggcttcctgcttggagtccgcaggaggctgtggcagcagtggcatccactgtggcatctccgtcctgcccaccttaagaggcgagatggagcaggcccatctgcctctgccctttctagccaaggttatagctgccctggactgctcactctctggtctcaatttaaaatgatcccatggccacagggctcctgcccaggggcttgtcaccttcccctcctccttcctgagtcactccttcagtagaaggccctgctctctatcctgccccacagccctgcctggatttgtatccttggcttcgtgccagttcctccaagtctatggcacctccctccctctcaaccacttgagcaaactccaagacaccttctaccccgacaccagcaattatgccaagggccattaggctctcaacatgactatagagaccccgtgtctgtcactgaaacctattttgtgggagactattcctctcatctgccactcatgacctgctaaacgacggccctcctccctctcactaccccgacagaccgattactatg

SEQ ID NO: 444024 - DNA, 212 bp, Homo sapiens
ggtgggtcgcatcctctgtaacctgtgcggtgtggtttctggaggggtggtctgtttcttcccctcctacgagtacctgcgccaggtccatgcccactgggagaagggtggcctgctgggccgtctggctgccaggaagaaggtgagtggcctgtcggcagccttgccacttgtgaggacagtgccactgagtcctcctgggagctcttgtg

SEQ ID NO: 444025 - DNA, 2074 bp, Homo sapiens
atacaggtctgtgaagcaggcaggttgctcagctgcccccggagcggttcctccacctgaggcagactccacgtcggctggcatgagccggcgcccctgcagctgcgccctacggccaccccgctgctcctgcagcgccagccccagcgcagtgacagccgccgggcgccctcgaccctcggatagttgtaaagaagaaagttctaccctttctgtcaaaatgaagtgtgattttaattgtaaccatgttcattccggacttaaactggtaaaacctgatgacattggaagactagtttcctacacccctgcatatttggaaggttcctgtaaagactgcattaaagactatgaaaggctgtcatgtattgggtcaccgattgtgagccctaggattgtagaacttgaaactgaaagcaagcgcttgcataacaaggaaaatcaacatgtgcaacagacacttaatagtacaaatgaaatagaagcactagagaccagtagactttatgaagacagtggctattcctcattttctctacaaagtggcctcagtgaacatgaagaaggtagcctcctggaggagaatttcggtgacagtctacaatcctgcctgctacaaatacaaagcccagaccaatatcccaacaaaaacttgctgccagttcttcattttgaaaaagtggtttgttcaacattaaaaaagaatgcaaaacgaaatcctaaagtagatcgggagatgctgaaggaaattatagccagaggaaattttagactgcagaatataattggcagaaaaatgggcctagaatgtgtagatattctcagcgaactctttcgaaggggactcagacatgtcttagcaactattttagcacaactcagtgacatggacttaatcaatgtgtctaaagtgagcacaacttggaagaagatcctagaagatgataagggggcattccagttgtacagtaaagcaatacaaagagttaccgaaaacaacaataaattttcacctcatgcttcaaccagagaatatgttatgttcagaaccccactggcttctgttcagaaatcagcagcccagacttctctcaaaaaagatgctcaaaccaagttatccaatcaaggtgatcagaaaggttctacttatagtcgacacaatgaattctctgaggttgccaagacattgaaaaagaacgaaagcctcaaagcctgtattcgctgtaattcacctgcaaaatatgattgctatttacaacgggcaacctgcaaacgagaaggctgtggatttgattattgtacgaagtgtctctgtaattatcatactactaaagactgttcagatggcaagctcctcaaagccagttgtaaaataggtcccctgcctggtacaaagaaaagcaaaaagaatttacgaagattgtgatctcttattaaatcaattgttactgatcatgaatgttagttagaaaatgttaggttttaacttaaaaaaaattgtattgtgattttcaattttatgttgaaatcggtgtagtatcctgaggtttttttccccccagaagataaagaggatagacaacctcttaaaatatttttacaatttaatgagaaaaagtttaaaattctcaatacaaatcaaacaatttaaatattttaagaaaaaaggaaaagtagatagtgatactgagggtaaaaaaaaattgattcaattttatggtaaaggaaacccatgcaattttacctagacagtcttaaatatgtctggttttccatctgttagcatttcagacattttatgttcctcttactcaattgataccaacagaaatatcaacttctggagtctattaaatgtgttgtcacctttctaaagctttttttcattgtgtgtatttcccaagaaagtatcctttgtaaaaacttgcttgttttccttatttctgaaatctgttttaatatttttgtatacatgtaaatatttctgtattttttatatgtcaaagaatatgtctcttgtatgtacatataaaaataaattttgctcaataaaattgtaagcttaatgtatacc

SEQ ID NO: 444026 - DNA, 2601 bp, Homo sapiens
  misc_feature (1315)..(1315): n is a, c, g, or t
ggctttttgaaaaattatctagaggtactctttgcaagtgtgagtttacactggtctttatgaaacagagctaaagcaaaacagatataaacagcttctttttttttaattttttttggggacggagtctcgccctgtcaccaggttggagtgcagtggcacgatctcagctcactgcaacctctgcctcccgggctcaagtgattcttctgcctcctgagtagctgggactacaggcgtgtgccaccacgcccagctaatttttgtatttttagtagacacagggtttcaccatgttggccaggagggtatctcgatatcttgacctcgtgatctgcctgcttcagccttccaaagtgctgggattacaggcatgagcctaaacagcttcttgagggacagtcaaatcagtaccacagattctactttttctgttaacatagtgagtttctaaagttgatttctaatagcagtgtgcctagagtactttgaaatttgtctattacttttaccagatagctaacatggtatcatatatacagtgggggctactatttgatgtttgcagatattgtgaaaaaatactgtacaaagcagtggttcttaagcctcaatgcactcagaattacttaatgaggagggagctttttaaaaatacagagccctgagcttcattttagaccagttaaaaccgccaggcaattgtaatgtggtcaggtttgagaagcactaataatataaaatatctttttgcactgctgatgtttttctactgtattcatcttagctctttgtgatgctttaattatttcatttatggtgatttacttttccagtgtgtctaaagtgagcacaacttggaagaagatcctagaagatgataagggggcattccagttgtacagtaaagcaatacaaagagttaccgtaagtgtttgcagatgatgtttttagttaaaaatgcactgttagtgctcttctagaaatagaaaagaaaagaggtaatctggaaacccttctttacagtcataaagtatttcagccttatactggaacttagaaaccacattcaaaaataaagaaatctcaactcaacatttatttcttggattcttcctagaaatagaatgtctaaagtaacaaagggaaaattactcatttctcagatagagtcgaccatttagtcaatcttagttgccagttgtgtgtatgtgtattttataacatctggaaaatttggaaaagctgttttactttttaggtattaagtaccatatagactgcatctaaagtgatttcccatagtatttggttnacagtttctgtctataagttaggcttgatatgtgtgagtatttaggttttgctttgtttaagtacgtgcaggtaaattgcatgtagggataagtctcttacctaatcttgtttgtcatttcttatatgtacaaacataaaaatgtctcattgaggatacaggaaataatttctaaattctattaaaacttttttttaaattaggaaaacaacaataaattttcacctcatgcttcaaccagagaatatgttatgttcagaaccccactggcttctgttcagaaatcagcagcccagacttctctcaaaaaagatgctcaaaccaagttatccaatcaaggtgatcagaaaggttctacttatagtcgacacaatgaattctctgaggttgccaagacattgaaaaagaacgaaagcctcaaagcctgtattcgctgtaattcacctgcaaaatatgattgctatttacaacgggcaacctgcaaacgagaaggctgtggatttgattattgtacgaagtgtctctgtaattatcatactactaaagactgttcagatggcaagctcctcaaagccagttgtaaaataggtcccctgcctggtacaaagaaaagcaaaaagaatttacgaagattgtgatctcttattaaatcaattgttactgatcatgaatgttagttagaaaatgttaggttttaacttaaaaaaaattgtattgtgattttcaattttatgttgaaatcggtgtagtatcctgaggtttttttccccccagaagataaagaggatagacaacctcttaaaatatttttacaatttaatgagaaaaagtttaaaattctcaatacaaatcaaacaatttaaatattttaagaaaaaaggaaaagtagatagtgatactgagggtaaaaaaaaattgattcaattttatggtaaaggaaacccatgcaattttacctagacagtcttaaatatgtctggttttccatctgttagcatttcagacattttatgttcctcttactcaattgataccaacagaaatatcaacttctggagtctattaaatgtgttgtcacctttctaaagctttttttcattgtgtgtatttcccaagaaagtatcctttgtaaaaacttgcttgttttccttatttctgaaatctgttttaatatttttgtatacatgtaaatatttctgtattttttatatgtcaaagaatatgtctcttgtatgtacatataaaaataaattttgctcaataaaattgtaagcttaatgtatacc

SEQ ID NO: 444027 - DNA, 2015 bp, Homo sapiens
atacaggtctgtgaagcaggcaggttgctcagctgcccccggagcggttcctccacctgaggcagactccacgtcggctggcatgagccggcgcccctgcagctgcgccctacggccaccccgctggttgtaaagaagaaagttctaccctttctgtcaaaatgaagtgtgattttaattgtaaccatgttcattccggacttaaactggtaaaacctgatgacattggaagactagtttcctacacccctgcatatttggaaggttcctgtaaagactgcattaaagactatgaaaggctgtcatgtattgggtcaccgattgtgagccctaggattgtagaacttgaaactgaaagcaagcgcttgcataacaaggaaaatcaacatgtgcaacagacacttaatagtacaaatgaaatagaagcactagagaccagtagactttatgaagacagtggctattcctcattttctctacaaagtggcctcagtgaacatgaagaaggtagcctcctggaggagaatttcggtgacagtctacaatcctgcctgctacaaatacaaagcccagaccaatatcccaacaaaaacttgctgccagttcttcattttgaaaaagtggtttgttcaacattaaaaaagaatgcaaaacgaaatcctaaagtagatcgggagatgctgaaggaaattatagccagaggaaattttagactgcagaatataattggcagaaaaatgggcctagaatgtgtagatattctcagcgaactctttcgaaggggactcagacatgtcttagcaactattttagcacaactcagtgacatggacttaatcaatgtgtctaaagtgagcacaacttggaagaagatcctagaagatgataagggggcattccagttgtacagtaaagcaatacaaagagttaccgaaaacaacaataaattttcacctcatgcttcaaccagagaatatgttatgttcagaaccccactggcttctgttcagaaatcagcagcccagacttctctcaaaaaagatgctcaaaccaagttatccaatcaaggtgatcagaaaggttctacttatagtcgacacaatgaattctctgaggttgccaagacattgaaaaagaacgaaagcctcaaagcctgtattcgctgtaattcacctgcaaaatatgattgctatttacaacgggcaacctgcaaacgagaaggctgtggatttgattattgtacgaagtgtctctgtaattatcatactactaaagactgttcagatggcaagctcctcaaagccagttgtaaaataggtcccctgcctggtacaaagaaaagcaaaaagaatttacgaagattgtgatctcttattaaatcaattgttactgatcatgaatgttagttagaaaatgttaggttttaacttaaaaaaaattgtattgtgattttcaattttatgttgaaatcggtgtagtatcctgaggtttttttccccccagaagataaagaggatagacaacctcttaaaatatttttacaatttaatgagaaaaagtttaaaattctcaatacaaatcaaacaatttaaatattttaagaaaaaaggaaaagtagatagtgatactgagggtaaaaaaaaattgattcaattttatggtaaaggaaacccatgcaattttacctagacagtcttaaatatgtctggttttccatctgttagcatttcagacattttatgttcctcttactcaattgataccaacagaaatatcaacttctggagtctattaaatgtgttgtcacctttctaaagctttttttcattgtgtgtatttcccaagaaagtatcctttgtaaaaacttgcttgttttccttatttctgaaatctgttttaatatttttgtatacatgtaaatatttctgtattttttatatgtcaaagaatatgtctcttgtatgtacatataaaaataaattttgctcaataaaattgtaagcttaatgtatacc

SEQ ID NO: 444028 - DNA, 2206 bp, Homo sapiens
ttaggagggagagcagagcgcgcgcgtaaatcctagagaggcgggctaagctggactggggggagggtccgtcttccggaaagtctggattcccggacgagccgagttgctgctcaccgaactcccgttcgagagatgatcgaagaaagtcggctaccatttgtacccatcaaagatctccagatggaagccagcgctgaatttgggctgagattaggacttgcaggaggccggtccagaagacggcggaaggaatcttggcgggcgcacgcatgcgtgatagaccctccacacgtgtggccgggccgcggcctccccgtgctcggaggtcccgcccccggccgtagcatctttccggacgtggggagccggttgtaaagaagaaagttctaccctttctgtcaaaatgaagtgtgattttaattgtaaccatgttcattccggacttaaactggtaaaacctgatgacattggaagactagtttcctacacccctgcatatttggaaggttcctgtaaagactgcattaaagactatgaaaggctgtcatgtattgggtcaccgattgtgagccctaggattgtagaacttgaaactgaaagcaagcgcttgcataacaaggagaccagtagactttatgaagacagtggctattcctcattttctctacaaagtggcctcagtgaacatgaagaaggtagcctcctggaggagaatttcggtgacagtctacaatcctgcctgctacaaatacaaagcccagaccaatatcccaacaaaaacttgctgccagttcttcattttgaaaaagtggtttgttcaacattaaaaaagaatgcaaaacgaaatcctaaagtagatcgggagatgctgaaggaaattatagccagaggaaattttagactgcagaatataattggcagaaaaatgggcctagaatgtgtagatattctcagcgaactctttcgaaggggactcagacatgtcttagcaactattttagcacaactcagtgacatggacttaatcaatgtgtctaaagtgagcacaacttggaagaagatcctagaagatgataagggggcattccagttgtacagtaaagcaatacaaagagttaccgaaaacaacaataaattttcacctcatgcttcaaccagagaatatgttatgttcagaaccccactggcttctgttcagaaatcagcagcccagacttctctcaaaaaagatgctcaaaccaagttatccaatcaaggtgatcagaaaggttctacttatagtcgacacaatgaattctctgaggttgccaagacattgaaaaagaacgaaagcctcaaagcctgtattcgctgtaattcacctgcaaaatatgattgctatttacaacgggcaacctgcaaacgagaaggctgtggatttgattattgtacgaagtgtctctgtaattatcatactactaaagactgttcagatggcaagctcctcaaagccagttgtaaaataggtcccctgcctggtacaaagaaaagcaaaaagaatttacgaagattgtgatctcttattaaatcaattgttactgatcatgaatgttagttagaaaatgttaggttttaacttaaaaaaaattgtattgtgattttcaattttatgttgaaatcggtgtagtatcctgaggtttttttccccccagaagataaagaggatagacaacctcttaaaatatttttacaatttaatgagaaaaagtttaaaattctcaatacaaatcaaacaatttaaatattttaagaaaaaaggaaaagtagatagtgatactgagggtaaaaaaaaattgattcaattttatggtaaaggaaacccatgcaattttacctagacagtcttaaatatgtctggttttccatctgttagcatttcagacattttatgttcctcttactcaattgataccaacagaaatatcaacttctggagtctattaaatgtgttgtcacctttctaaagctttttttcattgtgtgtatttcccaagaaagtatcctttgtaaaaacttgcttgttttccttatttctgaaatctgttttaatatttttgtatacatgtaaatatttctgtattttttatatgtcaaagaatatgtctcttgtatgtacatataaaaataaattttgctcaataaaattgtaagcttaatgtatacc

SEQ ID NO: 444029 - DNA, 403 bp, Homo sapiens
ttttgggagcaggactactgtctcctacacctggccctttaaggaaaggaacaaaaacccaggggagcgtagctgcacactcagtaaacttaacgttcctataaaccagtagcgtctgaagtgtggttgaaaatacaaataaacgcgcttgcaaggaagaagtgcctcggtcctaccctcggccccgccggaaggccctgggagatgcagccgcaggtctcctgctacagccgctggggaaggccgcacagcctcctcgcccaccccggaggaaaaaatcgcgggggactccagtgcgcaggcgccgacccgccaactccgcagccacagcccgccaaggcgcctgcgcagaggcgtgggtcaaggggagggtcgagttaggagggagagcagagcgcgcgcg

SEQ ID NO: 444030 - DNA, 2260 bp, Homo sapiens
ttaggagggagagcagagcgcgcgcgtaaatcctagagaggcgggctaagctggactggggggagggtccgtcttccggaaagtctggattcccggacgagccgagttgctgctcaccgaactcccgttcgagagatgatcgaagaaagtcggctaccatttgtacccatcaaagatctccagatggaagccagcgctgaatttgggctgagattaggacttgcaggaggccggtccagaagacggcggaaggaatcttggcgggcgcacgcatgcgtgatagaccctccacacgtgtggccgggccgcggcctccccgtgctcggaggtcccgcccccggccgtagcatctttccggacgtggggagccggttgtaaagaagaaagttctaccctttctgtcaaaatgaagtgtgattttaattgtaaccatgttcattccggacttaaactggtaaaacctgatgacattggaagactagtttcctacacccctgcatatttggaaggttcctgtaaagactgcattaaagactatgaaaggctgtcatgtattgggtcaccgattgtgagccctaggattgtagaacttgaaactgaaagcaagcgcttgcataacaaggaaaatcaacatgtgcaacagacacttaatagtacaaatgaaatagaagcactagagaccagtagactttatgaagacagtggctattcctcattttctctacaaagtggcctcagtgaacatgaagaaggtagcctcctggaggagaatttcggtgacagtctacaatcctgcctgctacaaatacaaagcccagaccaatatcccaacaaaaacttgctgccagttcttcattttgaaaaagtggtttgttcaacattaaaaaagaatgcaaaacgaaatcctaaagtagatcgggagatgctgaaggaaattatagccagaggaaattttagactgcagaatataattggcagaaaaatgggcctagaatgtgtagatattctcagcgaactctttcgaaggggactcagacatgtcttagcaactattttagcacaactcagtgacatggacttaatcaatgtgtctaaagtgagcacaacttggaagaagatcctagaagatgataagggggcattccagttgtacagtaaagcaatacaaagagttaccgaaaacaacaataaattttcacctcatgcttcaaccagagaatatgttatgttcagaaccccactggcttctgttcagaaatcagcagcccagacttctctcaaaaaagatgctcaaaccaagttatccaatcaaggtgatcagaaaggttctacttatagtcgacacaatgaattctctgaggttgccaagacattgaaaaagaacgaaagcctcaaagcctgtattcgctgtaattcacctgcaaaatatgattgctatttacaacgggcaacctgcaaacgagaaggctgtggatttgattattgtacgaagtgtctctgtaattatcatactactaaagactgttcagatggcaagctcctcaaagccagttgtaaaataggtcccctgcctggtacaaagaaaagcaaaaagaatttacgaagattgtgatctcttattaaatcaattgttactgatcatgaatgttagttagaaaatgttaggttttaacttaaaaaaaattgtattgtgattttcaattttatgttgaaatcggtgtagtatcctgaggtttttttccccccagaagataaagaggatagacaacctcttaaaatatttttacaatttaatgagaaaaagtttaaaattctcaatacaaatcaaacaatttaaatattttaagaaaaaaggaaaagtagatagtgatactgagggtaaaaaaaaattgattcaattttatggtaaaggaaacccatgcaattttacctagacagtcttaaatatgtctggttttccatctgttagcatttcagacattttatgttcctcttactcaattgataccaacagaaatatcaacttctggagtctattaaatgtgttgtcacctttctaaagctttttttcattgtgtgtatttcccaagaaagtatcctttgtaaaaacttgcttgttttccttatttctgaaatctgttttaatatttttgtatacatgtaaatatttctgtattttttatatgtcaaagaatatgtctcttgtatgtacatataaaaataaattttgctcaataaaattgtaagcttaatgtatacc

SEQ ID NO: 444031 - DNA, 320 bp, Homo sapiens
gcggccgcctactactactactactgctcgaattcaagcttctagtacggggacatgaaatgccacacacatagaactccaacaacatcaatttcattgcacagactgactgtagttaattttgtcacagaatctatggactgaatctaatgcttccaaaaatgttgtttgtttgcaaatatcaaacattgttatgcaagaaattattaattacaaaatgaagatttataccattgtggtttaagctgtactgaactaaatctgtggaatgcattgtgaactgtaaaagcaaagtatcaataaagcttatagacttaaaa

SEQ ID NO: 444032 - DNA, 1074 bp, Homo sapiens
tgactcatttctggctgcaacataaagagtagttggaagtaaggttggaaagatttaggaggatgtccctggttgaaaagttggagtcatagaatcacagaatgtttgagcctgaaggaactgaggaaagtctgtttctcaaatttacagagttggagcacttacccagagaagttaaatgccttttgcaatgttgtatagctaggtagtggcaggtcttctaactcttgcttgagttcagcctagacagcactatctaagatagctcacataaggttattctggcattggctgacggaatggatttggatgcaggcagatcagagattggtttggagagtgatagaatattccagctcgtaaatagtaagtgcttaaaatagagtgatggcactgtgaataaaaaccaggagacatatttggggcatgttgcagaggtaaaactatgggacaaggagttgtctaagatgttatttccactgtaagaaactggcatcctgagacatagggaggttatgaggactacttccaacagatacgagggaacactcagcacttctgagttggttgtaccctgccaagataaaatggcttctttgaaacagtaatgaaactgtttcttacattcctgtggacttgactttttccccagtatagtatttttatttatttatttatttatttatttatttattaccaatacaatacttttaaatttaacaattttagccatctcggtatggattaaaacatctagatgatgtaactcttatgttttgctaggattgctactgtgcttttggcagccactttacaatctggtgcttgacatattgaacaatttcccctaaaggttagtctgagagagtttaggatttggaaatgaaaaagatctttgttaggaaaacgtgatgagacaacatagtgtcaactttaagaaaaaaaaaaaaacaaccatagtcataactaccatttactgagtgcatccttgtgctcagttgcattaggcacttttctcactgaattctcatgataatctccactttataaatgaggaaactaagtttagaggga

SEQ ID NO: 444033 - DNA, 322 bp, Homo sapiens
tatctttttttccgataatttttccgcattttggccaatttcgcgagattgttgggggttggtaaattataaatattaagtttcagtttgtgcactgtgtatggtccgtgtagattgatgcagattttctgaaatgaaatgtttgtttagacgagatcataccggtaaagcaggaatgacaaagcttgcttttctggtatgttctaggtgtattgtgacttttactgttatattaattgccaatataagtaaatatagattatatatgtctaatgggttcactaagagtcggcaagggctttccaacacgagaacggtgctt

SEQ ID NO: 444034 - DNA, 1727 bp, Homo sapiens
agcctagttacagattgcactgcgtcagactgttccacacccagaagacgtcaggtgacttcagtcctgctgcagttgtgcagcagaggagactgcagacttcggttgaggaaacgggtatttcatgtctcagggagtaggtttgtgcagttacagcttttctgttggtatgcataattaataattggagctgcaaagcagatcgtgacaagagatggacggtcagaagaaaaattggaaggacaaggttgttgacctcctgtactggagagacattaagaagactggagtggtgtttggtgccagcctattcctgctgctttcattgacagtattcagcattgtgagcgtaacagcctacattgccttggccctgctctctgtgaccatcagctttaggatatacaagggtgtgatccaagctatccagaaatcagatgaaggccacccattcagggcatatctggaatctgaagttgctatatctgaggagttggttcagaagtacagtaattctgctcttggtcatgtgaactgcacgataaaggaactcaggcgcctcttcttagttgatgatttagttgattctctgaagtttgcagtgttgatgtgggtatttacctatgttggtgccttgtttaatggtctgacactactgattttggctctcatttcactcttcagtgttcctgttatttatgaacggcatcaggcacagatagatcattatctaggacttgcaaataagaatgttaaagatgctatggctaaaatccaagcaaaaatccctggattgaagcgcaaagctgaatgaaaacgcccaaaataattagtaggagttcatctttaaaggggatattcatttgattatacgggggagggtcagggttagccatgcactgttgtgaggaaaaattacctgtcttgactgccatgtgttcatcatcttaagtattgtaagctgctatgtatggatttaaaccgtaatcatatctttttcctatctatctgaggcactggtggaataaaaaacctgtatattttactttgttgcagatagtcttgccgcatcttggcaagttgcagagatggtggagctagaaaaaaaaaaaaaaaagcccttttcagtttgtgcactgtgtatggtccgtgtagattgatgcagattttctgaaatgaaatgtttgtttagacgagatcataccggtaaagcaggaatgacaaagcttgcttttctggtatgttctaggtgtattgtgacttttactgttatattaattgccaatataagtaaatatagattatatatgtatagtgtttcacaaagcttagacctttaccttccagccaccccacagtgcttgatatttcagagtcagtcattggttatacatgtgtagttccaaagcacataagctagaagaagaaatatttctaggagcactaccatctgttttcaacatgaaatgccacacacatagaactccaacaacatcaatttcattgcacagactgactgtagttaattttgtcacagaatctatggactgaatctaatgcttccaaaaatgttgtttgtttgcaaatatcaaacattgttatgcaagaaattattaattacaaaatgaagatttataccattgtggtttaagctgtactgaactaaatctgtggaatgcattgtgaactgtaaaagcaaagtatcaataaagcttatagacttaaaa

SEQ ID NO: 444035 - DNA, 816 bp, Homo sapiens
cagaaggagagggcggggggaacgtgagaggctatattttcagcagagctgagtaaacttcattgttgacctcctgtactggagagacattaagaagactggagtggtgtttggtgccagcctattcctgctgctttcattgacagtattcagcattgtgagcgtaacagcctacattgccttggccctgctctctgtgaccatcagctttaggatatacaagggtgtgatccaagctatccagaaatcagatgaaggccacccattcagggcatatctggaatctgaagttgctatatctgaggagttggttcagaagtacagtaattctgctcttggtcatgtgaactgcacgataaaggaactcaggcgcctcttcttagttgatgatttagttgattctctgaagtttgcagtgttgatgtgggtatttacctatgttggtgccttgtttaatggtctgacactactgattttggctctcatttcactcttcagtgttcctgttatttatgaacggcatcaggcacagatagatcattatctaggacttgcaaataagaatgttaaagatgctatggctaaaatccaagcaaaaatccctggattgaagcgcaaagctgaatgaaaacgcccaaaataattagtaggagttcatctttaaaggggatattcatttgattatacgggggagggtcagggttgtagttcaggaggtcccaaacggggacgacctcatttaacccgccgggggggaaaaaccgctggagcgggggcaccccactagggggagtaggtaaaagacatctccacgag

SEQ ID NO: 444036 - DNA, 615 bp, Homo sapiens
agcctagttacagattgcactgcgtcagactgttccacacccagaagacgtcaggtgacttcagtcctgctgcagttgtgcagcagaggagactgcagacttcggttgaggaaacgggtatttcatgtctcagggagtaggtttgtgcagttacagcttttctgttggtatgcataattaataattggagctgcaaagcagatcgtgacaagagatggacggtcagggagtggtgtttggtgccagcctattcctgctgctttcattgacagtattcagcattgtgagcgtaacagcctacattgccttggccctgctctctgtgaccatcagctttaggatatacaagggtgtgatccaagctatccagaaatcagatgaaggccacccattcagggcatatctggaatctgaagttgctatatctgaggagttggttcagaagtacagtaattctgctcttggtcatgtgaactgcacgataaaggaactcaggcgcctcttcttagttgatgatttagttgattctctgaaggtaagtttattttgcctttcatttttgatatacccagaatttagtatcaagagagttgagtgtaaaattctgttcttcta

SEQ ID NO: 444037 - DNA, 4025 bp, Homo sapiens
ataggctaggtcgggactggggtgtgaatcggccgaaggacagtaggtccctcggctcagtcggcccagcccctctcagtcctccccaacccccacaaccgcccgcggctctgagacgcggccccggcggcggcggcagcagctgcagcatcatctccaccctccagccatggaagacctggaccagtctcctctggtctcgtcctcggacagcccaccccggccgcagcccgcgttcaagtaccagttcgtgagggagcccgaggacgaggaggaagaagaggaggaggaagaggaggacgaggacgaagacctggaggagctggaggtgctggagaggaagccagagttttcagaattagaatactcagaaatgggatcatcgttcagtgtctctccaaaagcagaatctgccgtaatagtagcaaatcctagggaagaaataatcgtgaaaaataaagatgaagaagagaagttagttagtaataacatccttcataatcaacaagagttacctacagctcttactaaattggttaaagaggatgaagttgtgtcttcagaaaaagcaaaagacagttttaatgaaaagagagttgcagtggaagctcctatgagggaggaatatgcagacttcaaaccatttgagcgagtatgggaagtgaaagatagtaaggaagatagtgatatgttggctgctggaggtaaaatcgagagcaacttggaaagtaaagtggataaaaaatgttttgcagatagccttgagcaaactaatcacgaaaaagatagtgagagtagtaatgatgatacttctttccccagtacgccagaaggtataaaggatcgttcaggagcatatatcacatgtgctccctttaacccagcagcaactgagagcattgcaacaaacatttttcctttgttaggagatcctacttcagaaaataagaccgatgaaaaaaaaatagaagaaaagaaggcccaaatagtaacagagaagaatactagcaccaaaacatcaaacccttttcttgtagcagcacaggattctgagacagattatgtcacaacagataatttaacaaaggtgactgaggaagtcgtggcaaacatgcctgaaggcctgactccagatttagtacaggaagcatgtgaaagtgaattgaatgaagttactggtacaaagattgcttatgaaacaaaaatggacttggttcaaacatcagaagttatgcaagagtcactctatcctgcagcacagctttgcccatcatttgaagagtcagaagctactccttcaccagttttgcctgacattgttatggaagcaccattgaattctgcagttcctagtgctggtgcttccgtgatacagcccagctcatcaccattagaagcttcttcagttaattatgaaagcataaaacatgagcctgaaaaccccccaccatatgaagaggccatgagtgtatcactaaaaaaagtatcaggaataaaggaagaaattaaagagcctgaaaatattaatgcagctcttcaagaaacagaagctccttatatatctattgcatgtgatttaattaaagaaacaaagctttctgctgaaccagctccggatttctctgattattcagaaatggcaaaagttgaacagccagtgcctgatcattctgagctagttgaagattcctcacctgattctgaaccagttgacttatttagtgatgattcaatacctgacgttccacaaaaacaagatgaaactgtgatgcttgtgaaagaaagtctcactgagacttcatttgagtcaatgatagaatatgaaaataaggaaaaactcagtgctttgccacctgagggaggaaagccatatttggaatcttttaagctcagtttagataacacaaaagataccctgttacctgatgaagtttcaacattgagcaaaaaggagaaaattcctttgcagatggaggagctcagtactgcagtttattcaaatgatgacttatttatttctaaggaagcacagataagagaaactgaaacgttttcagattcatctccaattgaaattatagatgagttccctacattgatcagttctaaaactgattcattttctaaattagccagggaatatactgacctagaagtatcccacaaaagtgaaattgctaatgccccggatggagctgggtcattgccttgcacagaattgccccatgacctttctttgaagaacatacaacccaaagttgaagagaaaatcagtttctcagatgacttttctaaaaatgggtctgctacatcaaaggtgctcttattgcctccagatgtttctgctttggccactcaagcagagatagagagcatagttaaacccaaagttcttgtgaaagaagctgagaaaaaacttccttccgatacagaaaaagaggacagatcaccatctgctatattttcagcagagctgagtaaaacttcagttgttgacctcctgtactggagagacattaagaagactggagtggtgtttggtgccagcctattcctgctgctttcattgacagtattcagcattgtgagcgtaacagcctacattgccttggccctgctctctgtgaccatcagctttaggatatacaagggtgtgatccaagctatccagaaatcagatgaaggccacccattcagggcatatctggaatctgaagttgctatatctgaggagttggttcagaagtacagtaattctgctcttggtcatgtgaactgcacgataaaggaactcaggcgcctcttcttagttgatgatttagttgattctctgaagtttgcagtgttgatgtgggtatttacctatgttggtgccttgtttaatggtctgacactactgattttggctctcatttcactcttcagtgttcctgttatttatgaacggcatcaggcacagatagatcattatctaggacttgcaaataagaatgttaaagatgctatggctaaaatccaagcaaaaatccctggattgaagcgcaaagctgaatgaaaacgcccaaaataattagtaggagttcatctttaaaggggatattcatttgattatacgggggagggtcagggaagaacgaaccttgacgttgcagtgcagtttcacagatcgttgttagatctttatttttagccatgcactgttgtgaggaaaaattacctgtcttgactgccatgtgttcatcatcttaagtattgtaagctgctatgtatggatttaaaccgtaatcatatctttttcctatctatctgaggcactggtggaataaaaaacctgtatattttactttgttgcagatagtcttgccgcatcttggcaagttgcagagatggtggagctagaaaaaaaaaaaaaaaagcccttttcagtttgtgcactgtgtatggtccgtgtagattgatgcagattttctgaaatgaaatgtttgtttagacgagatcataccggtaaagcaggaatgacaaagcttgcttttctggtatgttctaggtgtattgtgacttttactgttatattaattgccaatataagtaaatatagattatatatgtatagtgtttcacaaagcttagacctttaccttccagccaccccacagtgcttgatatttcagagtcagtcattggttatacatgtgtagttccaaagcacataagctagaagaagaaatatttctaggagcactaccatctgttttcaacatgaaatgccacacacatagaactccaacaacatcaatttcattgcacagactgactgtagttaattttgtcacagaatctatggactgaatctaatgcttccaaaaatgttgtttgtttgcaaatatcaaacattgttatgcaagaaattattaattacaaaatgaagatttataccattgtggtttaagctgtactgaactaaatctgtggaatgcattgtgaactgtaaaagcaaagtatcaataaagcttatagacttaaaa

SEQ ID NO: 444038 - DNA, 4680 bp, Homo sapiens
ataggctaggtcgggactggggtgtgaatcggccgaaggacagtaggtccctcggctcagtcggcccagcccctctcagtcctccccaacccccacaaccgcccgcggctctgagacgcggccccggcggcggcggcagcagctgcagcatcatctccaccctccagccatggaagacctggaccagtctcctctggtctcgtcctcggacagcccaccccggccgcagcccgcgttcaagtaccagttcgtgagggagcccgaggacgaggaggaagaagaggaggaggaagaggaggacgaggacgaagacctggaggagctggaggtgctggagaggaagcccgccgccgggctgtccgcggccccagtgcccaccgcccctgccgccggcgcgcccctgatggacttcggaaatgacttcgtgccgccggcgccccggggacccctgccggccgctccccccgtcgccccggagcggcagccgtcttgggacccgagcccggtgtcgtcgaccgtgcccgcgccatccccgctgtctgctgccgcagtctcgccctccaagctccctgaggacgacgagcctccggcccggcctccccctcctcccccggccagcgtgagcccccaggcagagcccgtgtggaccccgccagccccggctcccgccgcgcccccctccaccccggccgcgcccaagcgcaggggctcctcgggctcagtggatgagaccctttttgctcttcctgctgcatctgagcctgtgatacgctcctctgcagaaaatatggacttgaaggagcagccaggtaacactatttcggctggtcaagaggatttcccatctgtcctgcttgaaactgctgcttctcttccttctctgtctcctctctcagccgcttctttcaaagaacatgaataccttggtaatttgtcaacagtattacccactgaaggaacacttcaagaaaatgtcagtgaagcttctaaagaggtctcagagaaggcaaaaactctactcatagatagagatttaacagagttttcagaattagaatactcagaaatgggatcatcgttcagtgtctctccaaaagcagaatctgccgtaatagtagcaaatcctagggaagaaataatcgtgaaaaataaagatgaagaagagaagttagttagtaataacatccttcataatcaacaagagttacctacagctcttactaaattggttaaagaggatgaagttgtgtcttcagaaaaagcaaaagacagttttaatgaaaagagagttgcagtggaagctcctatgagggaggaatatgcagacttcaaaccatttgagcgagtatgggaagtgaaagatagtaaggaagatagtgatatgttggctgctggaggtaaaatcgagagcaacttggaaagtaaagtggataaaaaatgttttgcagatagccttgagcaaactaatcacgaaaaagatagtgagagtagtaatgatgatacttctttccccagtacgccagaaggtataaaggatcgttcaggagcatatatcacatgtgctccctttaacccagcagcaactgagagcattgcaacaaacatttttcctttgttaggagatcctacttcagaaaataagaccgatgaaaaaaaaatagaagaaaagaaggcccaaatagtaacagagaagaatactagcaccaaaacatcaaacccttttcttgtagcagcacaggattctgagacagattatgtcacaacagataatttaacaaaggtgactgaggaagtcgtggcaaacatgcctgaaggcctgactccagatttagtacaggaagcatgtgaaagtgaattgaatgaagttactggtacaaagattgcttatgaaacaaaaatggacttggttcaaacatcagaagttatgcaagagtcactctatcctgcagcacagctttgcccatcatttgaagagtcagaagctactccttcaccagttttgcctgacattgttatggaagcaccattgaattctgcagttcctagtgctggtgcttccgtgatacagcccagctcatcaccattagaagcttcttcagttaattatgaaagcataaaacatgagcctgaaaaccccccaccatatgaagaggccatgagtgtatcactaaaaaaagtatcaggaataaaggaagaaattaaagagcctgaaaatattaatgcagctcttcaagaaacagaagctccttatatatctattgcatgtgatttaattaaagaaacaaagctttctgctgaaccagctccggatttctctgattattcagaaatggcaaaagttgaacagccagtgcctgatcattctgagctagttgaagattcctcacctgattctgaaccagttgacttatttagtgatgattcaatacctgacgttccacaaaaacaagatgaaactgtgatgcttgtgaaagaaagtctcactgagacttcatttgagtcaatgatagaatatgaaaataaggaaaaactcagtgctttgccacctgagggaggaaagccatatttggaatcttttaagctcagtttagataacacaaaagataccctgttacctgatgaagtttcaacattgagcaaaaaggagaaaattcctttgcagatggaggagctcagtactgcagtttattcaaatgatgacttatttatttctaaggaagcacagataagagaaactgaaacgttttcagattcatctccaattgaaattatagatgagttccctacattgatcagttctaaaactgattcattttctaaattagccagggaatatactgacctagaagtatcccacaaaagtgaaattgctaatgccccggatggagctgggtcattgccttgcacagaattgccccatgacctttctttgaagaacatacaacccaaagttgaagagaaaatcagtttctcagatgacttttctaaaaatgggtctgctacatcaaaggtgctcttattgcctccagatgtttctgctttggccactcaagcagagatagagagcatagttaaacccaaagttcttgtgaaagaagctgagaaaaaacttccttccgatacagaaaaagaggacagatcaccatctgctatattttcagcagagctgagtaaaacttcagggagtggtgtttggtgccagcctattcctgctgctttcattgacagtattcagcattgtgagcgtaacagcctacattgccttggccctgctctctgtgaccatcagctttaggatatacaagggtgtgatccaagctatccagaaatcagatgaaggccacccattcagggcatatctggaatctgaagttgctatatctgaggagttggttcagaagtacagtaattctgctcttggtcatgtgaactgcacgataaaggaactcaggcgcctcttcttagttgatgatttagttgattctctgaagtttgcagtgttgatgtgggtatttacctatgttggtgccttgtttaatggtctgacactactgattttggctctcatttcactcttcagtgttcctgttatttatgaacggcatcaggcacagatagatcattatctaggacttgcaaataagaatgttaaagatgctatggctaaaatccaagcaaaaatccctggattgaagcgcaaagctgaatgaaaacgcccaaaataattagtaggagttcatctttaaaggggatattcatttgattatacgggggagggtcagggaagaacgaaccttgacgttgcagtgcagtttcacagatcgttgttagatctttatttttagccatgcactgttgtgaggaaaaattacctgtcttgactgccatgtgttcatcatcttaagtattgtaagctgctatgtatggatttaaaccgtaatcatatctttttcctatctatctgaggcactggtggaataaaaaacctgtatattttactttgttgcagatagtcttgccgcatcttggcaagttgcagagatggtggagctagaaaaaaaaaaaaaaaagcccttttcagtttgtgcactgtgtatggtccgtgtagattgatgcagattttctgaaatgaaatgtttgtttagacgagatcataccggtaaagcaggaatgacaaagcttgcttttctggtatgttctaggtgtattgtgacttttactgttatattaattgccaatataagtaaatatagattatatatgtatagtgtttcacaaagcttagacctttaccttccagccaccccacagtgcttgatatttcagagtcagtcattggttatacatgtgtagttccaaagcacataagctagaagaagaaatatttctaggagcactaccatctgttttcaacatgaaatgccacacacatagaactccaacaacatcaatttcattgcacagactgactgtagttaattttgtcacagaatctatggactgaatctaatgcttccaaaaatgttgtttgtttgcaaatatcaaacattgttatgcaagaaattattaattacaaaatgaagatttataccattgtggtttaagctgtactgaactaaatctgtggaatgcattgtgaactgtaaaagcaaagtatcaataaagcttatagacttaaaa

SEQ ID NO: 444039 - DNA, 4794 bp, Homo sapiens
ataggctaggtcgggactggggtgtgaatcggccgaaggacagtaggtccctcggctcagtcggcccagcccctctcagtcctccccaacccccacaaccgcccgcggctctgagacgcggccccggcggcggcggcagcagctgcagcatcatctccaccctccagccatggaagacctggaccagtctcctctggtctcgtcctcggacagcccaccccggccgcagcccgcgttcaagtaccagttcgtgagggagcccgaggacgaggaggaagaagaggaggaggaagaggaggacgaggacgaagacctggaggagctggaggtgctggagaggaagcccgccgccgggctgtccgcggccccagtgcccaccgcccctgccgccggcgcgcccctgatggacttcggaaatgacttcgtgccgccggcgccccggggacccctgccggccgctccccccgtcgccccggagcggcagccgtcttgggacccgagcccggtgtcgtcgaccgtgcccgcgccatccccgctgtctgctgccgcagtctcgccctccaagctccctgaggacgacgagcctccggcccggcctccccctcctcccccggccagcgtgagcccccaggcagagcccgtgtggaccccgccagccccggctcccgccgcgcccccctccaccccggccgcgcccaagcgcaggggctcctcgggctcagtggatgagaccctttttgctcttcctgctgcatctgagcctgtgatacgctcctctgcagaaaatatggacttgaaggagcagccaggtaacactatttcggctggtcaagaggatttcccatctgtcctgcttgaaactgctgcttctcttccttctctgtctcctctctcagccgcttctttcaaagaacatgaataccttggtaatttgtcaacagtattacccactgaaggaacacttcaagaaaatgtcagtgaagcttctaaagaggtctcagagaaggcaaaaactctactcatagatagagatttaacagagttttcagaattagaatactcagaaatgggatcatcgttcagtgtctctccaaaagcagaatctgccgtaatagtagcaaatcctagggaagaaataatcgtgaaaaataaagatgaagaagagaagttagttagtaataacatccttcataatcaacaagagttacctacagctcttactaaattggttaaagaggatgaagttgtgtcttcagaaaaagcaaaagacagttttaatgaaaagagagttgcagtggaagctcctatgagggaggaatatgcagacttcaaaccatttgagcgagtatgggaagtgaaagatagtaaggaagatagtgatatgttggctgctggaggtaaaatcgagagcaacttggaaagtaaagtggataaaaaatgttttgcagatagccttgagcaaactaatcacgaaaaagatagtgagagtagtaatgatgatacttctttccccagtacgccagaaggtataaaggatcgttcaggagcatatatcacatgtgctccctttaacccagcagcaactgagagcattgcaacaaacatttttcctttgttaggagatcctacttcagaaaataagaccgatgaaaaaaaaatagaagaaaagaaggcccaaatagtaacagagaagaatactagcaccaaaacatcaaacccttttcttgtagcagcacaggattctgagacagattatgtcacaacagataatttaacaaaggtgactgaggaagtcgtggcaaacatgcctgaaggcctgactccagatttagtacaggaagcatgtgaaagtgaattgaatgaagttactggtacaaagattgcttatgaaacaaaaatggacttggttcaaacatcagaagttatgcaagagtcactctatcctgcagcacagctttgcccatcatttgaagagtcagaagctactccttcaccagttttgcctgacattgttatggaagcaccattgaattctgcagttcctagtgctggtgcttccgtgatacagcccagctcatcaccattagaagcttcttcagttaattatgaaagcataaaacatgagcctgaaaaccccccaccatatgaagaggccatgagtgtatcactaaaaaaagtatcaggaataaaggaagaaattaaagagcctgaaaatattaatgcagctcttcaagaaacagaagctccttatatatctattgcatgtgatttaattaaagaaacaaagctttctgctgaaccagctccggatttctctgattattcagaaatggcaaaagttgaacagccagtgcctgatcattctgagctagttgaagattcctcacctgattctgaaccagttgacttatttagtgatgattcaatacctgacgttccacaaaaacaagatgaaactgtgatgcttgtgaaagaaagtctcactgagacttcatttgagtcaatgatagaatatgaaaataaggaaaaactcagtgctttgccacctgagggaggaaagccatatttggaatcttttaagctcagtttagataacacaaaagataccctgttacctgatgaagtttcaacattgagcaaaaaggagaaaattcctttgcagatggaggagctcagtactgcagtttattcaaatgatgacttatttatttctaaggaagcacagataagagaaactgaaacgttttcagattcatctccaattgaaattatagatgagttccctacattgatcagttctaaaactgattcattttctaaattagccagggaatatactgacctagaagtatcccacaaaagtgaaattgctaatgccccggatggagctgggtcattgccttgcacagaattgccccatgacctttctttgaagaacatacaacccaaagttgaagagaaaatcagtttctcagatgacttttctaaaaatgggtctgctacatcaaaggtgctcttattgcctccagatgtttctgctttggccactcaagcagagatagagagcatagttaaacccaaagttcttgtgaaagaagctgagaaaaaacttccttccgatacagaaaaagaggacagatcaccatctgctatattttcagcagagctgagtaaaacttcagttgttgacctcctgtactggagagacattaagaagactggagtggtgtttggtgccagcctattcctgctgctttcattgacagtattcagcattgtgagcgtaacagcctacattgccttggccctgctctctgtgaccatcagctttaggatatacaagggtgtgatccaagctatccagaaatcagatgaaggccacccattcagggcatatctggaatctgaagttgctatatctgaggagttggttcagaagtacagtaattctgctcttggtcatgtgaactgcacgataaaggaactcaggcgcctcttcttagttgatgatttagttgattctctgaagtttgcagtgttgatgtgggtatttacctatgttggtgccttgtttaatggtctgacactactgattttggctctcatttcactcttcagtgttcctgttatttatgaacggcatcaggcacagatagatcattatctaggacttgcaaataagaatgttaaagatgctatggctaaaatccaagcaaaaatccctggattgaagcgcaaagctgaatgaaaacgcccaaaataattagtaggagttcatctttaaaggggatattcatttgattatacgggggagggtcagggaagaacgaaccttgacgttgcagtgcagtttcacagatcgttgttagatctttatttttagccatgcactgttgtgaggaaaaattacctgtcttgactgccatgtgttcatcatcttaagtattgtaagctgctatgtatggatttaaaccgtaatcatatctttttcctatctatctgaggcactggtggaataaaaaacctgtatattttactttgttgcagatagtcttgccgcatcttggcaagttgcagagatggtggagctagaaaaaaaaaaaaaaaagcccttttcagtttgtgcactgtgtatggtccgtgtagattgatgcagattttctgaaatgaaatgtttgtttagacgagatcataccggtaaagcaggaatgacaaagcttgcttttctggtatgttctaggtgtattgtgacttttactgttatattaattgccaatataagtaaatatagattatatatgtatagtgtttcacaaagcttagacctttaccttccagccaccccacagtgcttgatatttcagagtcagtcattggttatacatgtgtagttccaaagcacataagctagaagaagaaatatttctaggagcactaccatctgttttcaacatgaaatgccacacacatagaactccaacaacatcaatttcattgcacagactgactgtagttaattttgtcacagaatctatggactgaatctaatgcttccaaaaatgttgtttgtttgcaaatatcaaacattgttatgcaagaaattattaattacaaaatgaagatttataccattgtggtttaagctgtactgaactaaatctgtggaatgcattgtgaactgtaaaagcaaagtatcaataaagcttatagacttaaaaaaacaaccaagtttttcatgcgggccaaattgagctcatttgcccatccccctttaggggggggttaccaatccga

SEQ ID NO: 444040 - DNA, 4755 bp, Homo sapiens
ataggctaggtcgggactggggtgtgaatcggccgaaggacagtaggtccctcggctcagtcggcccagcccctctcagtcctccccaacccccacaaccgcccgcggctctgagacgcggccccggcggcggcggcagcagctgcagcatcatctccaccctccagccatggaagacctggaccagtctcctctggtctcgtcctcggacagcccaccccggccgcagcccgcgttcaagtaccagttcgtgagggagcccgaggacgaggaggaagaagaggaggaggaagaggaggacgaggacgaagacctggaggagctggaggtgctggagaggaagcccgccgccgggctgtccgcggccccagtgcccaccgcccctgccgccggcgcgcccctgatggacttcggaaatgacttcgtgccgccggcgccccggggacccctgccggccgctccccccgtcgccccggagcggcagccgtcttgggacccgagcccggtgtcgtcgaccgtgcccgcgccatccccgctgtctgctgccgcagtctcgccctccaagctccctgaggacgacgagcctccggcccggcctccccctcctcccccggccagcgtgagcccccaggcagagcccgtgtggaccccgccagccccggctcccgccgcgcccccctccaccccggccgcgcccaagcgcaggggctcctcgggctcagtggatgagaccctttttgctcttcctgctgcatctgagcctgtgatacgctcctctgcagaaaatatggacttgaaggagcagccaggtaacactatttcggctggtcaagaggatttcccatctgtcctgcttgaaactgctgcttctcttccttctctgtctcctctctcagccgcttctttcaaagaacatgaataccttggtaatttgtcaacagtattacccactgaaggaacacttcaagaaaatgtcagtgaagcttctaaagaggtctcagagaaggcaaaaactctactcatagatagagatttaacagagttttcagaattagaatactcagaaatgggatcatcgttcagtgtctctccaaaagcagaatctgccgtaatagtagcaaatcctagggaagaaataatcgtgaaaaataaagatgaagaagagaagttagttagtaataacatccttcataatcaacaagagttacctacagctcttactaaattggttaaagaggatgaagttgtgtcttcagaaaaagcaaaagacagttttaatgaaaagagagttgcagtggaagctcctatgagggaggaatatgcagacttcaaaccatttgagcgagtatgggaagtgaaagatagtaaggaagatagtgatatgttggctgctggaggtaaaatcgagagcaacttggaaagtaaagtggataaaaaatgttttgcagatagccttgagcaaactaatcacgaaaaagatagtgagagtagtaatgatgatacttctttccccagtacgccagaaggtataaaggatcgttcaggagcatatatcacatgtgctccctttaacccagcagcaactgagagcattgcaacaaacatttttcctttgttaggagatcctacttcagaaaataagaccgatgaaaaaaaaatagaagaaaagaaggcccaaatagtaacagagaagaatactagcaccaaaacatcaaacccttttcttgtagcagcacaggattctgagacagattatgtcacaacagataatttaacaaaggtgactgaggaagtcgtggcaaacatgcctgaaggcctgactccagatttagtacaggaagcatgtgaaagtgaattgaatgaagttactggtacaaagattgcttatgaaacaaaaatggacttggttcaaacatcagaagttatgcaagagtcactctatcctgcagcacagctttgcccatcatttgaagagtcagaagctactccttcaccagttttgcctgacattgttatggaagcaccattgaattctgcagttcctagtgctggtgcttccgtgatacagcccagctcatcaccattagaagcttcttcagttaattatgaaagcataaaacatgagcctgaaaaccccccaccatatgaagaggccatgagtgtatcactaaaaaaagtatcaggaataaaggaagaaattaaagagcctgaaaatattaatgcagctcttcaagaaacagaagctccttatatatctattgcatgtgatttaattaaagaaacaaagctttctgctgaaccagctccggatttctctgattattcagaaatggcaaaagttgaacagccagtgcctgatcattctgagctagttgaagattcctcacctgattctgaaccagttgacttatttagtgatgattcaatacctgacgttccacaaaaacaagatgaaactgtgatgcttgtgaaagaaagtctcactgagacttcatttgagtcaatgatagaatatgaaaataaggaaaaactcagtgctttgccacctgagggaggaaagccatatttggaatcttttaagctcagtttagataacacaaaagataccctgttacctgatgaagtttcaacattgagcaaaaaggagaaaattcctttgcagatggaggagctcagtactgcagtttattcaaatgatgacttatttatttctaaggaagcacagataagagaaactgaaacgttttcagattcatctccaattgaaattatagatgagttccctacattgatcagttctaaaactgattcattttctaaattagccagggaatatactgacctagaagtatcccacaaaagtgaaattgctaatgccccggatggagctgggtcattgccttgcacagaattgccccatgacctttctttgaagaacatacaacccaaagttgaagagaaaatcagtttctcagatgacttttctaaaaatgggtctgctacatcaaaggtgctcttattgcctccagatgtttctgctttggccactcaagcagagatagagagcatagttaaacccaaagttcttgtgaaagaagctgagaaaaaacttccttccgatacagaaaaagaggacagatcaccatctgctatattttcagcagagctgagtaaaacttcagttgttgacctcctgtactggagagacattaagaagactggagtggtgtttggtgccagcctattcctgctgctttcattgacagtattcagcattgtgagcgtaacagcctacattgccttggccctgctctctgtgaccatcagctttaggatatacaagggtgtgatccaagctatccagaaatcagatgaaggccacccattcagggcatatctggaatctgaagttgctatatctgaggagttggttcagaagtacagtaattctgctcttggtcatgtgaactgcacgataaaggaactcaggcgcctcttcttagttgatgatttagttgattctctgaagtttgcagtgttgatgtgggtatttacctatgttggtgccttgtttaatggtctgacactactgattttggctctcatttcactcttcagtgttcctgttatttatgaacggcatcaggcacagatagatcattatctaggacttgcaaataagaatgttaaagatgctatggctaaaatccaagcaaaaatccctggattgaagcgcaaagctgaatgaaaacgcccaaaataattagtaggagttcatctttaaaggggatattcatttgattatacgggggagggtcagggaagaacgaaccttgacgttgcagtgcagtttcacagatcgttgttagatctttatttttagccatgcactgttgtgaggaaaaattacctgtcttgactgccatgtgttcatcatcttaagtattgtaagctgctatgtatggatttaaaccgtaatcatatctttttcctatctatctgaggcactggtggaataaaaaacctgtatattttactttgttgcagatagtcttgccgcatcttggcaagttgcagagatggtggagctagaaaaaaaaaaaaaaaagcccttttcagtttgtgcactgtgtatggtccgtgtagattgatgcagattttctgaaatgaaatgtttgtttagacgagatcataccggtaaagcaggaatgacaaagcttgcttttctggtatgttctaggtgtattgtgacttttactgttatattaattgccaatataagtaaatatagattatatatgtatagtgtttcacaaagcttagacctttaccttccagccaccccacagtgcttgatatttcagagtcagtcattggttatacatgtgtagttccaaagcacataagctagaagaagaaatatttctaggagcactaccatctgttttcaacatgaaatgccacacacatagaactccaacaacatcaatttcattgcacagactgactgtagttaattttgtcacagaatctatggactgaatctaatgcttccaaaaatgttgtttgtttgcaaatatcaaacattgttatgcaagaaattattaattacaaaatgaagatttataccattgtggtttaagctgtactgaactaaatctgtggaatgcattgtgaactgtaaaagcaaagtatcaataaagcttatagacttaaaaaaaaaaaaaaaaaagggcgcgccgcctaaagataccc

SEQ ID NO: 444041 - DNA, 5002 bp, Homo sapiens
ataggctaggtcgggactggggtgtgaatcggccgaaggacagtaggtccctcggctcagtcggcccagcccctctcagtcctccccaacccccacaaccgcccgcggctctgagacgcggccccggcggcggcggcagcagctgcagcatcatctccaccctccagccatggaagacctggaccagtctcctctggtctcgtcctcggacagcccaccccggccgcagcccgcgttcaagtaccagttcgtgagggagcccgaggacgaggaggaagaagaggaggaggaagaggaggacgaggacgaagacctggaggagctggaggtgctggagaggaagcccgccgccgggctgtccgcggccccagtgcccaccgcccctgccgccggcgcgcccctgatggacttcggaaatgacttcgtgccgccggcgccccggggacccctgccggccgctccccccgtcgccccggagcggcagccgtcttgggacccgagcccggtgtcgtcgaccgtgcccgcgccatccccgctgtctgctgccgcagtctcgccctccaagctccctgaggacgacgagcctccggcccggcctccccctcctcccccggccagcgtgagcccccaggcagagcccgtgtggaccccgccagccccggctcccgccgcgcccccctccaccccggccgcgcccaagcgcaggggctcctcgggctcagtggatgagaccctttttgctcttcctgctgcatctgagcctgtgatacgctcctctgcagaaaatatggacttgaaggagcagccaggtaacactatttcggctggtcaagaggatttcccatctgtcctgcttgaaactgctgcttctcttccttctctgtctcctctctcagccgcttctttcaaagaacatgaataccttggtaatttgtcaacagtattacccactgaaggaacacttcaagaaaatgtcagtgaagcttctaaagaggtctcagagaaggcaaaaactctactcatagatagagatttaacagagttttcagaattagaatactcagaaatgggatcatcgttcagtgtctctccaaaagcagaatctgccgtaatagtagcaaatcctagggaagaaataatcgtgaaaaataaagatgaagaagagaagttagttagtaataacatccttcataatcaacaagagttacctacagctcttactaaattggttaaagaggatgaagttgtgtcttcagaaaaagcaaaagacagttttaatgaaaagagagttgcagtggaagctcctatgagggaggaatatgcagacttcaaaccatttgagcgagtatgggaagtgaaagatagtaaggaagatagtgatatgttggctgctggaggtaaaatcgagagcaacttggaaagtaaagtggataaaaaatgttttgcagatagccttgagcaaactaatcacgaaaaagatagtgagagtagtaatgatgatacttctttccccagtacgccagaaggtataaaggatcgttcaggagcatatatcacatgtgctccctttaacccagcagcaactgagagcattgcaacaaacatttttcctttgttaggagatcctacttcagaaaataagaccgatgaaaaaaaaatagaagaaaagaaggcccaaatagtaacagagaagaatactagcaccaaaacatcaaacccttttcttgtagcagcacaggattctgagacagattatgtcacaacagataatttaacaaaggtgactgaggaagtcgtggcaaacatgcctgaaggcctgactccagatttagtacaggaagcatgtgaaagtgaattgaatgaagttactggtacaaagattgcttatgaaacaaaaatggacttggttcaaacatcagaagttatgcaagagtcactctatcctgcagcacagctttgcccatcatttgaagagtcagaagctactccttcaccagttttgcctgacattgttatggaagcaccattgaattctgcagttcctagtgctggtgcttccgtgatacagcccagctcatcaccattagaagcttcttcagttaattatgaaagcataaaacatgagcctgaaaaccccccaccatatgaagaggccatgagtgtatcactaaaaaaagtatcaggaataaaggaagaaattaaagagcctgaaaatattaatgcagctcttcaagaaacagaagctccttatatatctattgcatgtgatttaattaaagaaacaaagctttctgctgaaccagctccggatttctctgattattcagaaatggcaaaagttgaacagccagtgcctgatcattctgagctagttgaagattcctcacctgattctgaaccagttgacttatttagtgatgattcaatacctgacgttccacaaaaacaagatgaaactgtgatgcttgtgaaagaaagtctcactgagacttcatttgagtcaatgatagaatatgaaaataaggaaaaactcagtgctttgccacctgagggaggaaagccatatttggaatcttttaagctcagtttagataacacaaaagataccctgttacctgatgaagtttcaacattgagcaaaaaggagaaaattcctttgcagatggaggagctcagtactgcagtttattcaaatgatgacttatttatttctaaggaagcacagataagagaaactgaaacgttttcagattcatctccaattgaaattatagatgagttccctacattgatcagttctaaaactgattcattttctaaattagccagggaatatactgacctagaagtatcccacaaaagtgaaattgctaatgccccggatggagctgggtcattgccttgcacagaattgccccatgacctttctttgaagaacatacaacccaaagttgaagagaaaatcagtttctcagatgacttttctaaaaatgggtctgctacatcaaaggtgctcttattgcctccagatgtttctgctttggccactcaagcagagatagagagcatagttaaacccaaagttcttgtgaaagaagctgagaaaaaacttccttccgatacagaaaaagaggacagatcaccatctgctatattttcagcagagctgagtaaaacttcagttgttgacctcctgtactggagagacattaagaagactggagtggtgtttggtgccagcctattcctgctgctttcattgacagtattcagcattgtgagcgtaacagcctacattgccttggccctgctctctgtgaccatcagctttaggatatacaagggtgtgatccaagctatccagaaatcagatgaaggccacccattcagggcatatctggaatctgaagttgctatatctgaggagttggttcagaagtacagtaattctgctcttggtcatgtgaactgcacgataaaggaactcaggcgcctcttcttagttgatgatttagttgattctctgaagtttgcagtgttgatgtgggtatttacctatgttggtgccttgtttaatggtctgacactactgattttggctctcatttcactcttcagtgttcctgttatttatgaacggcatcaggcacagatagatcattatctaggacttgcaaataagaatgttaaagatgctatggctaaaatccaagcaaaaatccctggattgaagcgcaaagctgaatgaaaacgcccaaaataattagtaggagttcatctttaaaggggatattcatttgattatacgggggagggtcagggaagaacgaaccttgacgttgcagtgcagtttcacagatcgttgttagatctttatttttagccatgcactgttgtgaggaaaaattacctgtcttgactgccatgtgttcatcatcttaagtattgtaagctgctatgtatggatttaaaccgtaatcatatctttttcctatctatctgaggcactggtggaataaaaaacctgtatattttactttgttgcagatagtcttgccgcatcttggcaagttgcagagatggtggagctagaaaaaaaaaaaaaaaagcccttttcagtttgtgcactgtgtatggtccgtgtagattgatgcagattttctgaaatgaaatgtttgtttagacgagatcataccggtaaagcaggaatgacaaagcttgcttttctggtatgttctaggtgtattgtgacttttactgttatattaattgccaatataagtaaatatagattatatatgtatagtgtttcacaaagcttagacctttaccttccagccaccccacagtgcttgatatttcagagtcagtcattggttatacatgtgtagttccaaagcacataagctagaagaagaaatatttctaggagcactaccatctgttttcaacatgaaatgccacacacatagaactccaacaacatcaatttcattgcacagactgactgtagttaattttgtcacagaatctatggactgaatctaatgcttccaaaaatgttgtttgtttgcaaatatcaaacattgttatgcaagaaattattaattacaaaatgaagatttataccattgtggtttaagctgtactgaactaaatctgtggaatgcattgtgaactgtaaaagcaaagtatcaataaagcttatagacttaaaagaaaaaaaaaaaaaaaaaaaaaaatttggggggggtaggcccctggaaaaaagcttctgaacccattacgttgtggggcgcgcgggccccaagcaggttaaggtgaaaagtgtggccataaagggttgccagaggaaaaatccggacaaggaacgctaaggtggtgtgatttctccaccattaaaaaaaggcccgggggggaacacgcaggtttcgtcaacaaacccaacagggagtcagaggccaaccgggtccacaacgaggatccagcgcaccgcattaaa

SEQ ID NO: 444042 - DNA, 4570 bp, Homo sapiens
ataggctaggtcgggactggggtgtgaatcggccgaaggacagtaggtccctcggctcagtcggcccagcccctctcagtcctccccaacccccacaaccgcccgcggctctgagacgcggccccggcggcggcggcagcagctgcagcatcatctccaccctccagccatggaagacctggaccagtctcctctggtctcgtcctcggacagcccaccccggccgcagcccgcgttcaagtaccagttcgtgagggagcccgaggacgaggaggaagaagaggaggaggaagaggaggacgaggacgaagacctggaggagctggaggtgctggagaggaagcccgccgccgggctgtccgcggccccagtgcccaccgcccctgccgccggcgcgcccctgatggacttcggaaatgacttcgtgccgccggcgccccggggacccctgccggccgctccccccgtcgccccggagcggcagccgtcttgggacccgagcccggtgtcgtcgaccgtgcccgcgccatccccgctgtctgctgccgcagtctcgccctccaagctccctgaggacgacgagcctccggcccggcctccccctcctcccccggccagcgtgagcccccaggcagagcccgtgtggaccccgccagccccggctcccgccgcgcccccctccaccccggccgcgcccaagcgcaggggctcctcgggctcagtggatgagaccctttttgctcttcctgctgcatctgagcctgtgatacgctcctctgcagaaaatatggacttgaaggagcagccaggtaacactatttcggctggtcaagaggatttcccatctgtcctgcttgaaactgctgcttctcttccttctctgtctcctctctcagccgcttctttcaaagaacatgaataccttggtaatttgtcaacagtattacccactgaaggaacacttcaagaaaatgtcagtgaagcttctaaagaggtctcagagaaggcaaaaactctactcatagatagagatttaacagagttttcagaattagaatactcagaaatgggatcatcgttcagtgtctctccaaaagcagaatctgccgtaatagtagcaaatcctagggaagaaataatcgtgaaaaataaagatgaagaagagaagttagttagtaataacatccttcataatcaacaagagttacctacagctcttactaaattggttaaagaggatgaagttgtgtcttcagaaaaagcaaaagacagttttaatgaaaagagagttgcagtggaagctcctatgagggaggaatatgcagacttcaaaccatttgagcgagtatgggaagtgaaagatagtaaggaagatagtgatatgttggctgctggaggtaaaatcgagagcaacttggaaagtaaagtggataaaaaatgttttgcagatagccttgagcaaactaatcacgaaaaagatagtgagagtagtaatgatgatacttctttccccagtacgccagaaggtataaaggatcgttcaggagcatatatcacatgtgctccctttaacccagcagcaactgagagcattgcaacaaacatttttcctttgttaggagatcctacttcagaaaataagaccgatgaaaaaaaaatagaagaaaagaaggcccaaatagtaacagagaagaatactagcaccaaaacatcaaacccttttcttgtagcagcacaggattctgagacagattatgtcacaacagataatttaacaaaggtgactgaggaagtcgtggcaaacatgcctgaaggcctgactccagatttagtacaggaagcatgtgaaagtgaattgaatgaagttactggtacaaagattgcttatgaaacaaaaatggacttggttcaaacatcagaagttatgcaagagtcactctatcctgcagcacagctttgcccatcatttgaagagtcagaagctactccttcaccagttttgcctgacattgttatggaagcaccattgaattctgcagttcctagtgctggtgcttccgtgatacagcccagctcatcaccattagaagcttcttcagttaattatgaaagcataaaacatgagcctgaaaaccccccaccatatgaagaggccatgagtgtatcactaaaaaaagtatcaggaataaaggaagaaattaaagagcctgaaaatattaatgcagctcttcaagaaacagaagctccttatatatctattgcatgtgatttaattaaagaaacaaagctttctgctgaaccagctccggatttctctgattattcagaaatggcaaaagttgaacagccagtgcctgatcattctgagctagttgaagattcctcacctgattctgaaccagttgacttatttagtgatgattcaatacctgacgttccacaaaaacaagatgaaactgtgatgcttgtgaaagaaagtctcactgagacttcatttgagtcaatgatagaatatgaaaataaggaaaaactcagtgctttgccacctgagggaggaaagccatatttggaatcttttaagctcagtttagataacacaaaagataccctgttacctgatgaagtttcaacattgagcaaaaaggagaaaattcctttgcagatggaggagctcagtactgcagtttattcaaatgatgacttatttatttctaaggaagcacagataagagaaactgaaacgttttcagattcatctccaattgaaattatagatgagttccctacattgatcagttctaaaactgattcattttctaaattagccagggaatatactgacctagaagtatcccacaaaagtgaaattgctaatgccccggatggagctgggtcattgccttgcacagaattgccccatgacctttctttgaagaacatacaacccaaagttgaagagaaaatcagtttctcagatgacttttctaaaaatgggtctgctacatcaaaggtgctcttattgcctccagatgtttctgctttggccactcaagcagagatagagagcatagttaaacccaaagttcttgtgaaagaagctgagaaaaaacttccttccgatacagaaaaagaggacagatcaccatctgctatattttcagcagagctgagtaaaacttcagttgttgacctcctgtactggagagacattaagaagactggagtggtgtttggtgccagcctattcctgctgctttcattgacagtattcagcattgtgagcgtaacagcctacattgccttggccctgctctctgtgaccatcagctttaggatatacaagggtgtgatccaagctatccagaaatcagatgaaggccacccattcagggcatatctggaatctgaagttgctatatctgaggagttggttcagaagtacagtaattctgctcttggtcatgtgaactgcacgataaaggaactcaggcgcctcttcttagttgatgatttagttgattctctgaagtttgcagtgttgatgtgggtatttacctatgttggtgccttgtttaatggtctgacactactgattttggctctcatttcactcttcagtgttcctgttatttatgaacggcatcaggcacagatagatcattatctaggacttgcaaataagaatgttaaagatgctatggctaaaatccaagcaaaaatccctggattgaagcgcaaagctgaatgaaaacgcccaaaataattagtaggagttcatctttaaaggggatattcatttgattatacgggggagggtcagggaagaacgaaccttgacgttgcagtgcagtttcacagatcgttgttagatctttatttttagccatgcactgttgtgaggaaaaattacctgtcttgactgccatgtgttcatcatcttaagtattgtaagctgctatgtatggatttaaaccgtaatcatatctttttcctatctatctgaggcactggtggaataaaaaacctgtatattttactttgttgcagatagtcttgccgcatcttggcaagttgcagagatggtggagctagaaaaaaaaaaaaaaaagcccttttcagtttgtgcactgtgtatggtccgtgtagattgatgcagattttctgaaatgaaatgtttgtttagacgagatcataccggtaaagcaggaatgacaaagcttgcttttctggtatgttctaggtgtattgtgacttttactgttatattaattgccaatataagtaaatatagattatatatgtatagtgtttcacaaagcttagacctttaccttccagccaccccacagtgcttgatatttcagagtcagtcattggttatacatgtgtagttccaaagcacataagctagaagaagaaatatttctaggagcactaccatctgttttcaacatgaaatgccacacacatagaactccaacaacatcaatttcattgcacagactgactgtagttaattttgtcacagaatctatggactgatgagccgtggacctcagagcagcgagac

SEQ ID NO: 444043 - DNA, 5545 bp, Homo sapiens
ataggctaggtcgggactggggtgtgaatcggccgaaggacagtaggtccctcggctcagtcggcccagcccctctcagtcctccccaacccccacaaccgcccgcggctctgagacgcggccccggcggcggcggcagcagctgcagcatcatctccaccctccagccatggaagacctggaccagtctcctctggtctcgtcctcggacagcccaccccggccgcagcccgcgttcaagtaccagttcgtgagggagcccgaggacgaggaggaagaagaggaggaggaagaggaggacgaggacgaagacctggaggagctggaggtgctggagaggaagcccgccgccgggctgtccgcggccccagtgcccaccgcccctgccgccggcgcgcccctgatggacttcggaaatgacttcgtgccgccggcgccccggggacccctgccggccgctccccccgtcgccccggagcggcagccgtcttgggacccgagcccggtgtcgtcgaccgtgcccgcgccatccccgctgtctgctgccgcagtctcgccctccaagctccctgaggacgacgagcctccggcccggcctccccctcctcccccggccagcgtgagcccccaggcagagcccgtgtggaccccgccagccccggctcccgccgcgcccccctccaccccggccgcgcccaagcgcaggggctcctcgggctcagtggatgagaccctttttgctcttcctgctgcatctgagcctgtgatacgctcctctgcagaaaatatggacttgaaggagcagccaggtaacactatttcggctggtcaagaggatttcccatctgtcctgcttgaaactgctgcttctcttccttctctgtctcctctctcagccgcttctttcaaagaacatgaataccttggtaatttgtcaacagtattacccactgaaggaacacttcaagaaaatgtcagtgaagcttctaaagaggtctcagagaaggcaaaaactctactcatagatagagatttaacagagttttcagaattagaatactcagaaatgggatcatcgttcagtgtctctccaaaagcagaatctgccgtaatagtagcaaatcctagggaagaaataatcgtgaaaaataaagatgaagaagagaagttagttagtaataacatccttcataatcaacaagagttacctacagctcttactaaattggttaaagaggatgaagttgtgtcttcagaaaaagcaaaagacagttttaatgaaaagagagttgcagtggaagctcctatgagggaggaatatgcagacttcaaaccatttgagcgagtatgggaagtgaaagatagtaaggaagatagtgatatgttggctgctggaggtaaaatcgagagcaacttggaaagtaaagtggataaaaaatgttttgcagatagccttgagcaaactaatcacgaaaaagatagtgagagtagtaatgatgatacttctttccccagtacgccagaaggtataaaggatcgttcaggagcatatatcacatgtgctccctttaacccagcagcaactgagagcattgcaacaaacatttttcctttgttaggagatcctacttcagaaaataagaccgatgaaaaaaaaatagaagaaaagaaggcccaaatagtaacagagaagaatactagcaccaaaacatcaaacccttttcttgtagcagcacaggattctgagacagattatgtcacaacagataatttaacaaaggtgactgaggaagtcgtggcaaacatgcctgaaggcctgactccagatttagtacaggaagcatgtgaaagtgaattgaatgaagttactggtacaaagattgcttatgaaacaaaaatggacttggttcaaacatcagaagttatgcaagagtcactctatcctgcagcacagctttgcccatcatttgaagagtcagaagctactccttcaccagttttgcctgacattgttatggaagcaccattgaattctgcagttcctagtgctggtgcttccgtgatacagcccagctcatcaccattagaagcttcttcagttaattatgaaagcataaaacatgagcctgaaaaccccccaccatatgaagaggccatgagtgtatcactaaaaaaagtatcaggaataaaggaagaaattaaagagcctgaaaatattaatgcagctcttcaagaaacagaagctccttatatatctattgcatgtgatttaattaaagaaacaaagctttctgctgaaccagctccggatttctctgattattcagaaatggcaaaagttgaacagccagtgcctgatcattctgagctagttgaagattcctcacctgattctgaaccagttgacttatttagtgatgattcaatacctgacgttccacaaaaacaagatgaaactgtgatgcttgtgaaagaaagtctcactgagacttcatttgagtcaatgatagaatatgaaaataaggaaaaactcagtgctttgccacctgagggaggaaagccatatttggaatcttttaagctcagtttagataacacaaaagataccctgttacctgatgaagtttcaacattgagcaaaaaggagaaaattcctttgcagatggaggagctcagtactgcagtttattcaaatgatgacttatttatttctaaggaagcacagataagagaaactgaaacgttttcagattcatctccaattgaaattatagatgagttccctacattgatcagttctaaaactgattcattttctaaattagccagggaatatactgacctagaagtatcccacaaaagtgaaattgctaatgccccggatggagctgggtcattgccttgcacagaattgccccatgacctttctttgaagaacatacaacccaaagttgaagagaaaatcagtttctcagatgacttttctaaaaatgggtctgctacatcaaaggtgctcttattgcctccagatgtttctgctttggccactcaagcagagatagagagcatagttaaacccaaagttcttgtgaaagaagctgagaaaaaacttccttccgatacagaaaaagaggacagatcaccatctgctatattttcagcagagctgagtaaaacttcagttgttgacctcctgtactggagagacattaagaagactggagtggtgtttggtgccagcctattcctgctgctttcattgacagtattcagcattgtgagcgtaacagcctacattgccttggccctgctctctgtgaccatcagctttaggatatacaagggtgtgatccaagctatccagaaatcagatgaaggccacccattcagggcatatctggaatctgaagttgctatatctgaggagttggttcagaagtacagtaattctgctcttggtcatgtgaactgcacgataaaggaactcaggcgcctcttcttagttgatgatttagttgattctctgaagtttgcagtgttgatgtgggtatttacctatgttggtgccttgtttaatggtctgacactactgattttgggtaagtctacaaagccattgggatgaaaaattgctggaaagattgtgtgccaggagcttagacattttagtggagaatattctcattgtatgaaaagtaggggatgaaaatgtgggccgggcgcggtagctcatgcctgtaatcccagcactttgggaggccaaggtgggcggatcacctggggccaggagttcgagaccagcctggctaacatggtgaaaccccatttctactaaaaatagaaaaaattagctgggcgtggtggcgcacgcctgtaaatcccagctactccggaggctgaggcaggagaatcacttgagcccaagaggcagaggttgcagtgagcggagatcgtgccattgcactccaggttgggcaacaagagtgaaactccatctcaaaataagtttgaggttgtattctctttaaataagttggtgatactgcttcccggtttattgaaatgctaccttagttgctgaagacagctcctactaacaaacagtgataaaccagataaagggtggctttatatgatggtgcagtcataaatctaaccagggatacctttattttatgaaatctcactgtgatatgatttgaagctagaaatggttcctagctctaataactgcagcctcacacagttcattcattcctctggagtggctcctcaacagcagatgcatccagagatccttatgtttttattcattcattaggaacactgcttggttatcttgagttgccagtttaatagttttttgagtgtttattcctcccaaatcattccattctttttgaaaagttgtatatttcccttttcactctcatttcactcttcagtgttcctgttatttatgaacggcatcaggcacagatagatcattatctaggacttgcaaataagaatgttaaagatgctatggctaaaatccaagcaaaaatccctggattgaagcgcaaagctgaatgaaaacgcccaaaataattagtaggagttcatctttaaaggggatattcatttgattatacgggggagggtcagggaagaacgaaccttgacgttgcagtgcagtttcacagatcgttgttagatctttatttttagccatgcactgttgtgaggaaaaattacctgtcttgactgccatgtgttcatcatcttaagtattgtaagctgctatgtatggatttaaaccgtaatcatatctttttcctatctatctgaggcactggtggaataaaaaacctgtatattttactttgttgcagatagtcttgccgcatcttggcaagttgcagagatggtggagctagaaaaaaaaaaaaaaaagcccttttcagtttgtgcactgtgtatggtccgtgtagattgatgcagattttctgaaatgaaatgtttgtttagacgagatcataccggtaaagcaggaatgacaaagcttgcttttctggtatgttctaggtgtattgtgacttttactgttatattaattgccaatataagtaaatatagattatatatgtatagtgtttcacaaagcttagacctttaccttccagccaccccacagtgcttgatatttcagagtcagtcattggttatacatgtgtagttccaaagcacataagctagaagaagaaatatttctaggagcactaccatctgttttcaacatgaaatgccacacacatagaactccaacaacatcaatttcattgcacagactgactgtagttaattttgtcacagaatctatggactgaatctaatgcttccaaaaatgttgtttgtttgcaaatatcaaacattgttatgcaagaaattattaattacaaaatgaagatttataccattgtggtttaagctgtactgaactaaatctgtggaatgcattgtgaactgtaaaagcaaagtatcaataaagcttatagacttaaaa

SEQ ID NO: 444044 - DNA, 2025 bp, Homo sapiens
tctagctccaccatctctgcaacttgccaagatgcggcaagactatctgcaacaaagtaaaatatacaggttttttattccaccagtgcctcagataggaaaaagatatgattacggtttaaatccatacatagcagctctactactccccttttcatttatagtgttacataagcctaaataatcactgtagctggtggcatcatgtttgttacctactaagtaggtcaaagtgattgccagacatacacatgaaggccttgaattagaaagcaaaggaactgatgatgaccaatgtttaacaaaattcagactgactttgtgcctgatccttcaaaggctagaggtgatatttttggtacctgaaacgtaatttccctgataagtactctttgcccaattattgcttatcagctgagatattaatgtctgaattattcagctcatatatcttcaagcactcaactagttcatactttgaaatcaattctaatagacaattctcataacacctttatagtcttcccatttaaaaggtaaatgttgttagggctggaggggtaagatgcacccttggtatattgtctgatctcagcagaatcaactacttggtagtgtagtccagagaaaatgggtcaaatctattaattattttaggattttgaaattcataattgagactcgtgacttaatagtgaactgctcatggtactttacccagtcttcaagttgtatgccttttgtaggtaggcatttagatgggatgcttttgaaagcataattaagaaactttacttgaattttgtttataatgggctaatgttattttcttatagtttgcagtgttgatgtgggtatttacctatgttggtgccttgtttaatggtctgacactactgattttggctctcatttcactcttcagtgttcctgttatttatgaacggcatcaggcacagatagatcattatctaggacttgcaaataagaatgttaaagatgctatggctaaaatccaagcaaaaatccctggattgaagcgcaaagctgaatgaaaacgcccaaaataattagtaggagttcatctttaaaggggatattcatttgattatacgggggagggtcagggaagaacgaaccttgacgttgcagtgcagtttcacagatcgttgttagatctttatttttagccatgcactgttgtgaggaaaaattacctgtcttgactgccatgtgttcatcatcttaagtattgtaagctgctatgtatggatttaaaccgtaatcatatctttttcctatctatctgaggcactggtggaataaaaaacctgtatattttactttgttgcagatagtcttgccgcatcttggcaagttgcagagatggtggagctagaaaaaaaaaaaaaaaagcccttttcagtttgtgcactgtgtatggtccgtgtagattgatgcagattttctgaaatgaaatgtttgtttagacgagatcataccggtaaagcaggaatgacaaagcttgcttttctggtatgttctaggtgtattgtgacttttactgttatattaattgccaatataagtaaatatagattatatatgtatagtgtttcacaaagcttagacctttaccttccagccaccccacagtgcttgatatttcagagtcagtcattggttatacatgtgtagttccaaagcacataagctagaagaagaaatatttctaggagcactaccatctgttttcaacatgaaatgccacacacatagaactccaacaacatcaatttcattgcacagactgactgtagttaattttgtcacagaatctatggactgaatctaatgcttccaaaaatgttgtttgtttgcaaatatcaaacattgttatgcaagaaattattaattacaaaatgaagatttataccattgtggtttaagctgtactgaactaaatctgtggaatgcattgtgaactgtaaaagcaaagtatcaataaagcttatagacttaaaa

SEQ ID NO: 444045 - DNA, 4566 bp, Homo sapiens
ataggctaggtcgggactggggtgtgaatcggccgaaggacagtaggtccctcggctcagtcggcccagcccctctcagtcctccccaacccccacaaccgcccgcggctctgagacgcggccccggcggcggcggcagcagctgcagcatcatctccaccctccagccatggaagacctggaccagtctcctctggtctcgtcctcggacagcccaccccggccgcagcccgcgttcaagtaccagttcgtgagggagcccgaggacgaggaggaagaagaggaggaggaagaggaggacgaggacgaagacctggaggagctggaggtgctggagaggaagcccgccgccgggctgtccgcggccccagtgcccaccgcccctgccgccggcgcgcccctgatggacttcggaaatgacttcgtgccgccggcgccccggggacccctgccggccgctccccccgtcgccccggagcggcagccgtcttgggacccgagcccggtgtcgtcgaccgtgcccgcgccatccccgctgtctgctgccgcagtctcgccctccaagctccctgaggacgacgagcctccggcccggcctccccctcctcccccggccagcgtgagcccccaggcagagcccgtgtggaccccgccagccccggctcccgccgcgcccccctccaccccggccgcgcccaagcgcaggggctcctcgggctcagtggatgagaccctttttgctcttcctgctgcatctgagcctgtgatacgctcctctgcagaaaatatggacttgaaggagcagccaggtaacactatttcggctggtcaagaggatttcccatctgtcctgcttgaaactgctgcttctcttccttctctgtctcctctctcagccgcttctttcaaagaacatgaataccttggtaatttgtcaacagtattacccactgaaggaacacttcaagaaaatgtcagtgaagcttctaaagaggtctcagagaaggcaaaaactctactcatagatagagatttaacagagttttcagaattagaatactcagaaatgggatcatcgttcagtgtctctccaaaagcagaatctgccgtaatagtagcaaatcctagggaagaaataatcgtgaaaaataaagatgaagaagagaagttagttagtaataacatccttcataatcaacaagagttacctacagctcttactaaattggttaaagaggatgaagttgtgtcttcagaaaaagcaaaagacagttttaatgaaaagagagttgcagtggaagctcctatgagggaggaatatgcagacttcaaaccatttgagcgagtatgggaagtgaaagatagtaaggaagatagtgatatgttggctgctggaggtaaaatcgagagcaacttggaaagtaaagtggataaaaaatgttttgcagatagccttgagcaaactaatcacgaaaaagatagtgagagtagtaatgatgatacttctttccccagtacgccagaaggtataaaggatcgttcaggagcatatatcacatgtgctccctttaacccagcagcaactgagagcattgcaacaaacatttttcctttgttaggagatcctacttcagaaaataagaccgatgaaaaaaaaatagaagaaaagaaggcccaaatagtaacagagaagaatactagcaccaaaacatcaaacccttttcttgtagcagcacaggattctgagacagattatgtcacaacagataatttaacaaaggtgactgaggaagtcgtggcaaacatgcctgaaggcctgactccagatttagtacaggaagcatgtgaaagtgaattgaatgaagttactggtacaaagattgcttatgaaacaaaaatggacttggttcaaacatcagaagttatgcaagagtcactctatcctgcagcacagctttgcccatcatttgaagagtcagaagctactccttcaccagttttgcctgacattgttatggaagcaccattgaattctgcagttcctagtgctggtgcttccgtgatacagcccagctcatcaccattagaagcttcttcagttaattatgaaagcataaaacatgagcctgaaaaccccccaccatatgaagaggccatgagtgtatcactaaaaaaagtatcaggaataaaggaagaaattaaagagcctgaaaatattaatgcagctcttcaagaaacagaagctccttatatatctattgcatgtgatttaattaaagaaacaaagctttctgctgaaccagctccggatttctctgattattcagaaatggcaaaagttgaacagccagtgcctgatcattctgagctagttgaagattcctcacctgattctgaaccagttgacttatttagtgatgattcaatacctgacgttccacaaaaacaagatgaaactgtgatgcttgtgaaagaaagtctcactgagacttcatttgagtcaatgatagaatatgaaaataaggaaaaactcagtgctttgccacctgagggaggaaagccatatttggaatcttttaagctcagtttagataacacaaaagataccctgttacctgatgaagtttcaacattgagcaaaaaggagaaaattcctttgcagatggaggagctcagtactgcagtttattcaaatgatgacttatttatttctaaggaagcacagataagagaaactgaaacgttttcagattcatctccaattgaaattatagatgagttccctacattgatcagttctaaaactgattcattttctaaattagccagggaatatactgacctagaagtatcccacaaaagtgaaattgctaatgccccggatggagctgggtcattgccttgcacagaattgccccatgacctttctttgaagaacatacaacccaaagttgaagagaaaatcagtttctcagatgacttttctaaaaatgggtctgctacatcaaaggtgctcttattgcctccagatgtttctgctttggccactcaagcagagatagagagcatagttaaacccaaagttcttgtgaaagaagctgagaaaaaacttccttccgatacagaaaaagaggacagatcaccatctgctatattttcagcagagctgagtaaaacttcagttgttgacctcctgtactggagagacattaagaagactggagtggtgtttggtgccagcctattcctgctgctttcattgacagtattcagcattgtgagcgtaacagcctacattgccttggccctgctctctgtgaccatcagctttaggatatacaagggtgtgatccaagctatccagaaatcagatgaaggccacccattcagggcatatctggaatctgaagttgctatatctgaggagttggttcagaagtacagtaattctgctcttggtcatgtgaactgcacgataaaggaactcaggcgcctcttcttagttgatgatttagttgattctctgaagtttgcagtgttgatgtgggtatttacctatgttggtgccttgtttaatggtctgacactactgattttggctctcatttcactcttcagtgttcctgttatttatgaacggcatcaggcacagatagatcattatctaggacttgcaaataagaatgttaaagatgctatggctaaaatccaagcaaaaatccctggattgaagcgcaaagctgaatgaaaacgcccaaaataattagtaggagttcatctttaaaggggatattcatttgattatacgggggagggtcagggaagaacgaaccttgacgttgcagtgcagtttcacagatcgttgttagatctttatttttagccatgcactgttgtgaggaaaaattacctgtcttgactgccatgtgttcatcatcttaagtattgtaagctgctatgtatggatttaaaccgtaatcatatctttttcctatctatctgaggcactggtggaataaaaaacctgtatattttactttgttgcagatagtcttgccgcatcttggcaagttgcagagatggtggagctagaaaaaaaaaaaaaaaagcccttttcagtttgtgcactgtgtatggtccgtgtagattgatgcagattttctgaaatgaaatgtttgtttagacgagatcataccggtaaagcaggaatgacaaagcttgcttttctggtatgttctaggtgtattgtgacttttactgttatattaattgccaatataagtaaatatagattatatatgtatagtgtttcacaaagcttagacctttaccttccagccaccccacagtgcttgatatttcagagtcagtcattggttatacatgtgtagttccaaagcacataagttattaatgctccttgaagcttgctgatctgatttgttagctttctgtggattctccaggatcttctgcacccaaatccatgcccactctgaatgatgttattttctgcccagcgtccataaattagactgagaccctctagatccagactcaaccgta

SEQ ID NO: 444046 - DNA, 4680 bp, Homo sapiens
ataggctaggtcgggactggggtgtgaatcggccgaaggacagtaggtccctcggctcagtcggcccagcccctctcagtcctccccaacccccacaaccgcccgcggctctgagacgcggccccggcggcggcggcagcagctgcagcatcatctccaccctccagccatggaagacctggaccagtctcctctggtctcgtcctcggacagcccaccccggccgcagcccgcgttcaagtaccagttcgtgagggagcccgaggacgaggaggaagaagaggaggaggaagaggaggacgaggacgaagacctggaggagctggaggtgctggagaggaagcccgccgccgggctgtccgcggccccagtgcccaccgcccctgccgccggcgcgcccctgatggacttcggaaatgacttcgtgccgccggcgccccggggacccctgccggccgctccccccgtcgccccggagcggcagccgtcttgggacccgagcccggtgtcgtcgaccgtgcccgcgccatccccgctgtctgctgccgcagtctcgccctccaagctccctgaggacgacgagcctccggcccggcctccccctcctcccccggccagcgtgagcccccaggcagagcccgtgtggaccccgccagccccggctcccgccgcgcccccctccaccccggccgcgcccaagcgcaggggctcctcgggctcagtggatgagaccctttttgctcttcctgctgcatctgagcctgtgatacgctcctctgcagaaaatatggacttgaaggagcagccaggtaacactatttcggctggtcaagaggatttcccatctgtcctgcttgaaactgctgcttctcttccttctctgtctcctctctcagccgcttctttcaaagaacatgaataccttggtaatttgtcaacagtattacccactgaaggaacacttcaagaaaatgtcagtgaagcttctaaagaggtctcagagaaggcaaaaactctactcatagatagagatttaacagagttttcagaattagaatactcagaaatgggatcatcgttcagtgtctctccaaaagcagaatctgccgtaatagtagcaaatcctagggaagaaataatcgtgaaaaataaagatgaagaagagaagttagttagtaataacatccttcataatcaacaagagttacctacagctcttactaaattggttaaagaggatgaagttgtgtcttcagaaaaagcaaaagacagttttaatgaaaagagagttgcagtggaagctcctatgagggaggaatatgcagacttcaaaccatttgagcgagtatgggaagtgaaagatagtaaggaagatagtgatatgttggctgctggaggtaaaatcgagagcaacttggaaagtaaagtggataaaaaatgttttgcagatagccttgagcaaactaatcacgaaaaagatagtgagagtagtaatgatgatacttctttccccagtacgccagaaggtataaaggatcgttcaggagcatatatcacatgtgctccctttaacccagcagcaactgagagcattgcaacaaacatttttcctttgttaggagatcctacttcagaaaataagaccgatgaaaaaaaaatagaagaaaagaaggcccaaatagtaacagagaagaatactagcaccaaaacatcaaacccttttcttgtagcagcacaggattctgagacagattatgtcacaacagataatttaacaaaggtgactgaggaagtcgtggcaaacatgcctgaaggcctgactccagatttagtacaggaagcatgtgaaagtgaattgaatgaagttactggtacaaagattgcttatgaaacaaaaatggacttggttcaaacatcagaagttatgcaagagtcactctatcctgcagcacagctttgcccatcatttgaagagtcagaagctactccttcaccagttttgcctgacattgttatggaagcaccattgaattctgcagttcctagtgctggtgcttccgtgatacagcccagctcatcaccattagaagcttcttcagttaattatgaaagcataaaacatgagcctgaaaaccccccaccatatgaagaggccatgagtgtatcactaaaaaaagtatcaggaataaaggaagaaattaaagagcctgaaaatattaatgcagctcttcaagaaacagaagctccttatatatctattgcatgtgatttaattaaagaaacaaagctttctgctgaaccagctccggatttctctgattattcagaaatggcaaaagttgaacagccagtgcctgatcattctgagctagttgaagattcctcacctgattctgaaccagttgacttatttagtgatgattcaatacctgacgttccacaaaaacaagatgaaactgtgatgcttgtgaaagaaagtctcactgagacttcatttgagtcaatgatagaatatgaaaataaggaaaaactcagtgctttgccacctgagggaggaaagccatatttggaatcttttaagctcagtttagataacacaaaagataccctgttacctgatgaagtttcaacattgagcaaaaaggagaaaattcctttgcagatggaggagctcagtactgcagtttattcaaatgatgacttatttatttctaaggaagcacagataagagaaactgaaacgttttcagattcatctccaattgaaattatagatgagttccctacattgatcagttctaaaactgattcattttctaaattagccagggaatatactgacctagaagtatcccacaaaagtgaaattgctaatgccccggatggagctgggtcattgccttgcacagaattgccccatgacctttctttgaagaacatacaacccaaagttgaagagaaaatcagtttctcagatgacttttctaaaaatgggtctgctacatcaaaggtgctcttattgcctccagatgtttctgctttggccactcaagcagagatagagagcatagttaaacccaaagttcttgtgaaagaagctgagaaaaaacttccttccgatacagaaaaagaggacagatcaccatctgctatattttcagcagagctgagtaaaacttcagttgttgacctcctgtactggagagacattaagaagactggagtggtgtttggtgccagcctattcctgctgctttcattgacagtattcagcattgtgagcgtaacagcctacattgccttggccctgctctctgtgaccatcagctttaggatatacaagggtgtgatccaagctatccagaaatcagatgaaggccacccattcagggcatatctggaatctgaagttgctatatctgaggagttggttcagaagtacagtaattctgctcttggtcatgtgaactgcacgataaaggaactcaggcgcctcttcttagttgatgatttagttgattctctgaagtttgcagtgttgatgtgggtatttacctatgttggtgccttgtttaatggtctgacactactgattttggctctcatttcactcttcagtgttcctgttatttatgaacggcatcaggcacagatagatcattatctaggacttgcaaataagaatgttaaagatgctatggctaaaatccaagcaaaaatccctggattgaagcgcaaagctgaatgaaaacgcccaaaataattagtaggagttcatctttaaaggggatattcatttgattatacgggggagggtcagggaagaacgaaccttgacgttgcagtgcagtttcacagatcgttgttagatctttatttttagccatgcactgttgtgaggaaaaattacctgtcttgactgccatgtgttcatcatcttaagtattgtaagctgctatgtatggatttaaaccgtaatcatatctttttcctatctatctgaggcactggtggaataaaaaacctgtatattttactttgttgcagatagtcttgccgcatcttggcaagttgcagagatggtggagctagaaaaaaaaaaaaaaaagcccttttcagtttgtgcactgtgtatggtccgtgtagattgatgcagattttctgaaatgaaatgtttgtttagacgagatcataccggtaaagcaggaatgacaaagcttgcttttctggtatgttctaggtgtattgtgacttttactgttatattaattgccaatataagtaaatatagattatatatgtatagtgtttcacaaagcttagacctttaccttccagccaccccacagtgcttgatatttcagagtcagtcattggttatacatgtgtagttccaaagcacataagaatggtgtagatggggaatagtggcaagtatttaggtcatggaggggcagagatctcattaatggcttggtgccatccttgcagtgagtgaagttcttaattactttctgtgagagatgggtgaaaaaacaatattcagttctatttaattaaaatttagttcttcatttacactagccacatctcaagtgctcataaccacacacagtacctacatcattggacagcaccactctaaacaatgaaaaaattaagaaaaaagggagttttttg

SEQ ID NO: 444047 - DNA, 5744 bp, Homo sapiens
ataggctaggtcgggactggggtgtgaatcggccgaaggacagtaggtccctcggctcagtcggcccagcccctctcagtcctccccaacccccacaaccgcccgcggctctgagacgcggccccggcggcggcggcagcagctgcagcatcatctccaccctccagccatggaagacctggaccagtctcctctggtctcgtcctcggacagcccaccccggccgcagcccgcgttcaagtaccagttcgtgagggagcccgaggacgaggaggaagaagaggaggaggaagaggaggacgaggacgaagacctggaggagctggaggtgctggagaggaagcccgccgccgggctgtccgcggccccagtgcccaccgcccctgccgccggcgcgcccctgatggacttcggaaatgacttcgtgccgccggcgccccggggacccctgccggccgctccccccgtcgccccggagcggcagccgtcttgggacccgagcccggtgtcgtcgaccgtgcccgcgccatccccgctgtctgctgccgcagtctcgccctccaagctccctgaggacgacgagcctccggcccggcctccccctcctcccccggccagcgtgagcccccaggcagagcccgtgtggaccccgccagccccggctcccgccgcgcccccctccaccccggccgcgcccaagcgcaggggctcctcgggctcagtggatgagaccctttttgctcttcctgctgcatctgagcctgtgatacgctcctctgcagaaaatatggacttgaaggagcagccaggtaacactatttcggctggtcaagaggatttcccatctgtcctgcttgaaactgctgcttctcttccttctctgtctcctctctcagccgcttctttcaaagaacatgaataccttggtaatttgtcaacagtattacccactgaaggaacacttcaagaaaatgtcagtgaagcttctaaagaggtctcagagaaggcaaaaactctactcatagatagagatttaacagagttttcagaattagaatactcagaaatgggatcatcgttcagtgtctctccaaaagcagaatctgccgtaatagtagcaaatcctagggaagaaataatcgtgaaaaataaagatgaagaagagaagttagttagtaataacatccttcataatcaacaagagttacctacagctcttactaaattggttaaagaggatgaagttgtgtcttcagaaaaagcaaaagacagttttaatgaaaagagagttgcagtggaagctcctatgagggaggaatatgcagacttcaaaccatttgagcgagtatgggaagtgaaagatagtaaggaagatagtgatatgttggctgctggaggtaaaatcgagagcaacttggaaagtaaagtggataaaaaatgttttgcagatagccttgagcaaactaatcacgaaaaagatagtgagagtagtaatgatgatacttctttccccagtacgccagaaggtataaaggatcgttcaggagcatatatcacatgtgctccctttaacccagcagcaactgagagcattgcaacaaacatttttcctttgttaggagatcctacttcagaaaataagaccgatgaaaaaaaaatagaagaaaagaaggcccaaatagtaacagagaagaatactagcaccaaaacatcaaacccttttcttgtagcagcacaggattctgagacagattatgtcacaacagataatttaacaaaggtgactgaggaagtcgtggcaaacatgcctgaaggcctgactccagatttagtacaggaagcatgtgaaagtgaattgaatgaagttactggtacaaagattgcttatgaaacaaaaatggacttggttcaaacatcagaagttatgcaagagtcactctatcctgcagcacagctttgcccatcatttgaagagtcagaagctactccttcaccagttttgcctgacattgttatggaagcaccattgaattctgcagttcctagtgctggtgcttccgtgatacagcccagctcatcaccattagaagcttcttcagttaattatgaaagcataaaacatgagcctgaaaaccccccaccatatgaagaggccatgagtgtatcactaaaaaaagtatcaggaataaaggaagaaattaaagagcctgaaaatattaatgcagctcttcaagaaacagaagctccttatatatctattgcatgtgatttaattaaagaaacaaagctttctgctgaaccagctccggatttctctgattattcagaaatggcaaaagttgaacagccagtgcctgatcattctgagctagttgaagattcctcacctgattctgaaccagttgacttatttagtgatgattcaatacctgacgttccacaaaaacaagatgaaactgtgatgcttgtgaaagaaagtctcactgagacttcatttgagtcaatgatagaatatgaaaataaggaaaaactcagtgctttgccacctgagggaggaaagccatatttggaatcttttaagctcagtttagataacacaaaagataccctgttacctgatgaagtttcaacattgagcaaaaaggagaaaattcctttgcagatggaggagctcagtactgcagtttattcaaatgatgacttatttatttctaaggaagcacagataagagaaactgaaacgttttcagattcatctccaattgaaattatagatgagttccctacattgatcagttctaaaactgattcattttctaaattagccagggaatatactgacctagaagtatcccacaaaagtgaaattgctaatgccccggatggagctgggtcattgccttgcacagaattgccccatgacctttctttgaagaacatacaacccaaagttgaagagaaaatcagtttctcagatgacttttctaaaaatgggtctgctacatcaaaggtgctcttattgcctccagatgtttctgctttggccactcaagcagagatagagagcatagttaaacccaaagttcttgtgaaagaagctgagaaaaaacttccttccgatacagaaaaagaggacagatcaccatctgctatattttcagcagagctgagtaaaacttcagttgttgacctcctgtactggagagacattaagaagactggagtggtgtttggtgccagcctattcctgctgctttcattgacagtattcagcattgtgagcgtaacagcctacattgccttggccctgctctctgtgaccatcagctttaggatatacaagggtgtgatccaagctatccagaaatcagatgaaggccacccattcagggcatatctggaatctgaagttgctatatctgaggagttggttcagaagtacagtaattctgctcttggtcatgtgaactgcacgataaaggaactcaggcgcctcttcttagttgatgatttagttgattctctgaagtttgcagtgttgatgtgggtatttacctatgttggtgccttgtttaatggtctgacactactgattttgggtaagtctacaaagccattgggatgaaaaattgctggaaagattgtgtgccaggagcttagacattttagtggagaatattctcattgtatgaaaagtaggggatgaaaatgtgggccgggcgcggtagctcatgcctgtaatcccagcactttgggaggccaaggtgggcggatcacctggggccaggagttcgagaccagcctggctaacatggtgaaaccccatttctactaaaaatagaaaaaattagctgggcgtggtggcgcacgcctgtaaatcccagctactccggaggctgaggcaggagaatcacttgagcccaagaggcagaggttgcagtgagcggagatcgtgccattgcactccaggttgggcaacaagagtgaaactccatctcaaaataagtttgaggttgtattctctttaaataagttggtgatactgcttcccggtttattgaaatgctaccttagttgctgaagacagctcctactaacaaacagtgataaaccagataaagggtggctttatatgatggtgcagtcataaatctaaccagggatacctttattttatgaaatctcactgtgatatgatttgaagctagaaatggttcctagctctaataactgcagcctcacacagttcattcattcctctggagtggctcctcaacagcagatgcatccagagatccttatgtttttattcattcattaggaacactgcttggttatcttgagttgccagtttaatagttttttgagtgtttattcctcccaaatcattccattctttttgaaaagttgtatatttcccttttcactctcatttcactcttcagtgttcctgttatttatgaacggcatcaggtaatttcctaactaactgctgacttcagaatagagcactcactctattacatgggatttacggatgtattagtgcccattttcaatgtcttacaaaaatgagaagtgtgatggtttcttaagcctttagcttgacacatagtagtggttaataagattctttagcaacggtaataattcctttatacctctctttcaggcacagatagatcattatctaggacttgcaaataagaatgttaaagatgctatggctaaaatccaagcaaaaatccctggattgaagcgcaaagctgaatgaaaacgcccaaaataattagtaggagttcatctttaaaggggatattcatttgattatacgggggagggtcagggaagaacgaaccttgacgttgcagtgcagtttcacagatcgttgttagatctttatttttagccatgcactgttgtgaggaaaaattacctgtcttgactgccatgtgttcatcatcttaagtattgtaagctgctatgtatggatttaaaccgtaatcatatctttttcctatctatctgaggcactggtggaataaaaaacctgtatattttactttgttgcagatagtcttgccgcatcttggcaagttgcagagatggtggagctagaaaaaaaaaaaaaaaagcccttttcagtttgtgcactgtgtatggtccgtgtagattgatgcagattttctgaaatgaaatgtttgtttagacgagatcataccggtaaagcaggaatgacaaagcttgcttttctggtatgttctaggtgtattgtgacttttactgttatattaattgccaatataagtaaatatagattatatatgtatagtgtttcacaaagcttagacctttaccttccagccaccccacagtgcttgatatttcagagtcagtcattggttatacatgtgtagttccaaagcacataagctagaagaagaaatatttctaggagcactaccatctgttttcaacatgaaatgccacacacatagaactccaacaacatcaatttcattgcacagactgactgtagttaattttgtcacagaatctatggactgaatctaatgcttccaaaaatgttgtttgtttgcaaatatcaaacattgttatgcaagaaattattaattacaaaatgaagatttataccattgtggtttaagctgtactgaactaaatctgtggaatgcattgtgaactgtaaaagcaaagtatcaataaagcttatagacttaaaa

SEQ ID NO: 444048 - DNA, 2852 bp, Homo sapiens
tctagctccaccatctctgcaacttgccaagatgcggcaagactatctgcaacaaagtaaaatatacaggttttttattccaccagtgcctcagataggaaaaagatatgattacggtttaaatccatacatagcagctctactactccccttttcatttatagtgttacataagcctaaataatcactgtagctggtggcatcatgtttgttacctactaagtaggtcaaagtgattgccagacatacacatgaaggccttgaattagaaagcaaaggaactgatgatgaccaatgtttaacaaaattcagactgactttgtgcctgatccttcaaaggctagaggtgatatttttggtacctgaaacgtaatttccctgataagtactctttgcccaattattgcttatcagctgagatattaatgtctgaattattcagctcatatatcttcaagcactcaactagttcatactttgaaatcaattctaatagacaattctcataacacctttatagtcttcccatttaaaaggtaaatgttgttagggctggaggggtaagatgcacccttggtatattgtctgatctcagcagaatcaactacttggtagtgtagtccagagaaaatgggtcaaatctattaattattttaggattttgaaattcataattgagactcgtgacttaatagtgaactgctcatggtactttacccagtcttcaagttgtatgccttttgtaggtaggcatttagatgggatgcttttgaaagcataattaagaaactttacttgaattttgtttataatgggctaatgttattttcttatagtttgcagtgttgatgtgggtatttacctatgttggtgccttgtttaatggtctgacactactgattttgggtaagtctacaaagccattgggatgaaaaattgctggaaagattgtgtgccaggagcttagacattttagtggagaatattctcattgtatgaaaagtaggggatgaaaatgtgggccgggcgcggtagctcatgcctgtaatcccagcactttgggaggccaaggtgggcggatcacctggggccaggagttcgagaccagcctggctaacatggtgaaaccccatttctactaaaaatagaaaaaattagctgggcgtggtggcgcacgcctgtaaatcccagctactccggaggctgaggcaggagaatcacttgagcccaagaggcagaggttgcagtgagcggagatcgtgccattgcactccaggttgggcaacaagagtgaaactccatctcaaaataagtttgaggttgtattctctttaaataagttggtgatactgcttcccggtttattgaaatgctaccttagttgctgaagacagctcctactaacaaacagtgataaaccagataaagggtggctttatatgatggtgcagtcataaatctaaccagggatacctttattttatgaaatctcactgtgatatgatttgaagctagaaatggttcctagctctaataactgcagcctcacacagttcattcattcctctggagtggctcctcaacagcagatgcatccagagatccttatgtttttattcattcattaggaacactgcttggttatcttgagttgccagtttaatagttttttgagtgtttattcctcccaaatcattccattctttttgaaaagttgtatatttcccttttcactctcatttcactcttcagtgttcctgttatttatgaacggcatcaggcacagatagatcattatctaggacttgcaaataagaatgttaaagatgctatggctaaaatccaagcaaaaatccctggattgaagcgcaaagctgaatgaaaacgcccaaaataattagtaggagttcatctttaaaggggatattcatttgattatacgggggagggtcagggaagaacgaaccttgacgttgcagtgcagtttcacagatcgttgttagatctttatttttagccatgcactgttgtgaggaaaaattacctgtcttgactgccatgtgttcatcatcttaagtattgtaagctgctatgtatggatttaaaccgtaatcatatctttttcctatctatctgaggcactggtggaataaaaaacctgtatattttactttgttgcagatagtcttgccgcatcttggcaagttgcagagatggtggagctagaaaaaaaaaaaaaaaagcccttttcagtttgtgcactgtgtatggtccgtgtagattgatgcagattttctgaaatgaaatgtttgtttagacgagatcataccggtaaagcaggaatgacaaagcttgcttttctggtatgttctaggtgtattgtgacttttactgttatattaattgccaatataagtaaatatagattatatatgtatagtgtttcacaaagcttagacctttaccttccagccaccccacagtgcttgatatttcagagtcagtcattggttatacatgtgtagttccaaagcacataagctagaagaagaaatatttctaggagcactaccatctgttttcaacatgaaatgccacacacatagaactccaacaacatcaatttcattgcacagactgactgtagttaattttgtcacagaatctatggactgaatctaatgcttccaaaaatgttgtttgtttgcaaatatcaaacattgttatgcaagaaattattaattacaaaatgaagatttataccattgtggtttaagctgtactgaactaaatctgtggaatgcattgtgaactgtaaaagcaaagtatcaataaagcttatagacttaaaa

SEQ ID NO: 444049 - DNA, 4800 bp, Homo sapiens
ataggctaggtcgggactggggtgtgaatcggccgaaggacagtaggtccctcggctcagtcggcccagcccctctcagtcctccccaacccccacaaccgcccgcggctctgagacgcggccccggcggcggcggcagcagctgcagcatcatctccaccctccagccatggaagacctggaccagtctcctctggtctcgtcctcggacagcccaccccggccgcagcccgcgttcaagtaccagttcgtgagggagcccgaggacgaggaggaagaagaggaggaggaagaggaggacgaggacgaagacctggaggagctggaggtgctggagaggaagcccgccgccgggctgtccgcggccccagtgcccaccgcccctgccgccggcgcgcccctgatggacttcggaaatgacttcgtgccgccggcgccccggggacccctgccggccgctccccccgtcgccccggagcggcagccgtcttgggacccgagcccggtgtcgtcgaccgtgcccgcgccatccccgctgtctgctgccgcagtctcgccctccaagctccctgaggacgacgagcctccggcccggcctccccctcctcccccggccagcgtgagcccccaggcagagcccgtgtggaccccgccagccccggctcccgccgcgcccccctccaccccggccgcgcccaagcgcaggggctcctcgggctcagtggatgagaccctttttgctcttcctgctgcatctgagcctgtgatacgctcctctgcagaaaatatggacttgaaggagcagccaggtaacactatttcggctggtcaagaggatttcccatctgtcctgcttgaaactgctgcttctcttccttctctgtctcctctctcagccgcttctttcaaagaacatgaataccttggtaatttgtcaacagtattacccactgaaggaacacttcaagaaaatgtcagtgaagcttctaaagaggtctcagagaaggcaaaaactctactcatagatagagatttaacagagttttcagaattagaatactcagaaatgggatcatcgttcagtgtctctccaaaagcagaatctgccgtaatagtagcaaatcctagggaagaaataatcgtgaaaaataaagatgaagaagagaagttagttagtaataacatccttcataatcaacaagagttacctacagctcttactaaattggttaaagaggatgaagttgtgtcttcagaaaaagcaaaagacagttttaatgaaaagagagttgcagtggaagctcctatgagggaggaatatgcagacttcaaaccatttgagcgagtatgggaagtgaaagatagtaaggaagatagtgatatgttggctgctggaggtaaaatcgagagcaacttggaaagtaaagtggataaaaaatgttttgcagatagccttgagcaaactaatcacgaaaaagatagtgagagtagtaatgatgatacttctttccccagtacgccagaaggtataaaggatcgttcaggagcatatatcacatgtgctccctttaacccagcagcaactgagagcattgcaacaaacatttttcctttgttaggagatcctacttcagaaaataagaccgatgaaaaaaaaatagaagaaaagaaggcccaaatagtaacagagaagaatactagcaccaaaacatcaaacccttttcttgtagcagcacaggattctgagacagattatgtcacaacagataatttaacaaaggtgactgaggaagtcgtggcaaacatgcctgaaggcctgactccagatttagtacaggaagcatgtgaaagtgaattgaatgaagttactggtacaaagattgcttatgaaacaaaaatggacttggttcaaacatcagaagttatgcaagagtcactctatcctgcagcacagctttgcccatcatttgaagagtcagaagctactccttcaccagttttgcctgacattgttatggaagcaccattgaattctgcagttcctagtgctggtgcttccgtgatacagcccagctcatcaccattagaagcttcttcagttaattatgaaagcataaaacatgagcctgaaaaccccccaccatatgaagaggccatgagtgtatcactaaaaaaagtatcaggaataaaggaagaaattaaagagcctgaaaatattaatgcagctcttcaagaaacagaagctccttatatatctattgcatgtgatttaattaaagaaacaaagctttctgctgaaccagctccggatttctctgattattcagaaatggcaaaagttgaacagccagtgcctgatcattctgagctagttgaagattcctcacctgattctgaaccagttgacttatttagtgatgattcaatacctgacgttccacaaaaacaagatgaaactgtgatgcttgtgaaagaaagtctcactgagacttcatttgagtcaatgatagaatatgaaaataaggaaaaactcagtgctttgccacctgagggaggaaagccatatttggaatcttttaagctcagtttagataacacaaaagataccctgttacctgatgaagtttcaacattgagcaaaaaggagaaaattcctttgcagatggaggagctcagtactgcagtttattcaaatgatgacttatttatttctaaggaagcacagataagagaaactgaaacgttttcagattcatctccaattgaaattatagatgagttccctacattgatcagttctaaaactgattcattttctaaattagccagggaatatactgacctagaagtatcccacaaaagtgaaattgctaatgccccggatggagctgggtcattgccttgcacagaattgccccatgacctttctttgaagaacatacaacccaaagttgaagagaaaatcagtttctcagatgacttttctaaaaatgggtctgctacatcaaaggtgctcttattgcctccagatgtttctgctttggccactcaagcagagatagagagcatagttaaacccaaagttcttgtgaaagaagctgagaaaaaacttccttccgatacagaaaaagaggacagatcaccatctgctatattttcagcagagctgagtaaaacttcagttgttgacctcctgtactggagagacattaagaagactggagtggtgtttggtgccagcctattcctgctgctttcattgacagtattcagcattgtgagcgtaacagcctacattgccttggccctgctctctgtgaccatcagctttaggatatacaagggtgtgatccaagctatccagaaatcagatgaaggccacccattcagggcatatctggaatctgaagttgctatatctgaggagttggttcagaagtacagtaattctgctcttggtcatgtgaactgcacgataaaggaactcaggcgcctcttcttagttgatgatttagttgattctctgaagtttgcagtgttgatgtgggtatttacctatgttggtgccttgtttaatggtctgacactactgattttggctctcatttcactcttcagtgttcctgttatttatgaacggcatcaggcacagatagatcattatctaggacttgcaaataagaatgttaaagatgctatggctaaaatccaagcaaaaatccctggattgaagcgcaaagctgaatgaaaacgcccaaaataattagtaggagttcatctttaaaggggatattcatttgattatacgggggagggtcagggaagaacgaaccttgacgttgcagtgcagtttcacagatcgttgttagatctttatttttagccatgcactgttgtgaggaaaaattacctgtcttgactgccatgtgttcatcatcttaagtattgtaagctgctatgtatggatttaaaccgtaatcatatctttttcctatctatctgaggcactggtggaataaaaaacctgtatattttactttgttgcagatagtcttgccgcatcttggcaagttgcagagatggtggagctagaaaaaaaaaaaaaaaagccctgtgccccgtggtgttattggccccggtgttaaatggattgccaaatttttctgaaaatctgcaaaatgttgtttgtgttttgaaaacgaaaaactcatcccggttaaaggcaggaattgaccaaagcctttggctttttccgtgggatagtgtcccataggggtggtacttcggtggcacctttaaccgtggtcgattattttaatgtgcgcccaaattattaagcgtaaacattattactgattctactactcttcgtatctcgcgtggtctccaccaaaagcgcttttaagacctttttaccttttccacgccacccccccacaaggtgtgctggaataatctccagagagcggtcaaggccaatgggggtttaatcatcctgtttgttgtacgttccccaaagagcgcacatttaaggcttaaagaaaccgacaggacacattatttttccttaagggaggcccatctaacccattttctggtgtcttccccacacctattggaaaattgggcccaccacacctattttagaacatctccccaaagctttgcaatattgtccctatttgggccacccaaggaactgggacactgggtaaggtttaaacaattttcgtggcgcccaccaaagaaaattccctaatgggggacccttggggaaattcctagaaatgggctctccca

SEQ ID NO: 444050 - DNA, 6108 bp, Homo sapiens
ataggctaggtcgggactggggtgtgaatcggccgaaggacagtaggtccctcggctcagtcggcccagcccctctcagtcctccccaacccccacaaccgcccgcggctctgagacgcggccccggcggcggcggcagcagctgcagcatcatctccaccctccagccatggaagacctggaccagtctcctctggtctcgtcctcggacagcccaccccggccgcagcccgcgttcaagtaccagttcgtgagggagcccgaggacgaggaggaagaagaggaggaggaagaggaggacgaggacgaagacctggaggagctggaggtgctggagaggaagcccgccgccgggctgtccgcggccccagtgcccaccgcccctgccgccggcgcgcccctgatggacttcggaaatgacttcgtgccgccggcgccccggggacccctgccggccgctccccccgtcgccccggagcggcagccgtcttgggacccgagcccggtgtcgtcgaccgtgcccgcgccatccccgctgtctgctgccgcagtctcgccctccaagctccctgaggacgacgagcctccggcccggcctccccctcctcccccggccagcgtgagcccccaggcagagcccgtgtggaccccgccagccccggctcccgccgcgcccccctccaccccggccgcgcccaagcgcaggggctcctcgggctcagtggatgagaccctttttgctcttcctgctgcatctgagcctgtgatacgctcctctgcagaaaatatggacttgaaggagcagccaggtaacactatttcggctggtcaagaggatttcccatctgtcctgcttgaaactgctgcttctcttccttctctgtctcctctctcagccgcttctttcaaagaacatgaataccttggtaatttgtcaacagtattacccactgaaggaacacttcaagaaaatgtcagtgaagcttctaaagaggtctcagagaaggcaaaaactctactcatagatagagatttaacagagttttcagaattagaatactcagaaatgggatcatcgttcagtgtctctccaaaagcagaatctgccgtaatagtagcaaatcctagggaagaaataatcgtgaaaaataaagatgaagaagagaagttagttagtaataacatccttcataatcaacaagagttacctacagctcttactaaattggttaaagaggatgaagttgtgtcttcagaaaaagcaaaagacagttttaatgaaaagagagttgcagtggaagctcctatgagggaggaatatgcagacttcaaaccatttgagcgagtatgggaagtgaaagatagtaaggaagatagtgatatgttggctgctggaggtaaaatcgagagcaacttggaaagtaaagtggataaaaaatgttttgcagatagccttgagcaaactaatcacgaaaaagatagtgagagtagtaatgatgatacttctttccccagtacgccagaaggtataaaggatcgttcaggagcatatatcacatgtgctccctttaacccagcagcaactgagagcattgcaacaaacatttttcctttgttaggagatcctacttcagaaaataagaccgatgaaaaaaaaatagaagaaaagaaggcccaaatagtaacagagaagaatactagcaccaaaacatcaaacccttttcttgtagcagcacaggattctgagacagattatgtcacaacagataatttaacaaaggtgactgaggaagtcgtggcaaacatgcctgaaggcctgactccagatttagtacaggaagcatgtgaaagtgaattgaatgaagttactggtacaaagattgcttatgaaacaaaaatggacttggttcaaacatcagaagttatgcaagagtcactctatcctgcagcacagctttgcccatcatttgaagagtcagaagctactccttcaccagttttgcctgacattgttatggaagcaccattgaattctgcagttcctagtgctggtgcttccgtgatacagcccagctcatcaccattagaagcttcttcagttaattatgaaagcataaaacatgagcctgaaaaccccccaccatatgaagaggccatgagtgtatcactaaaaaaagtatcaggaataaaggaagaaattaaagagcctgaaaatattaatgcagctcttcaagaaacagaagctccttatatatctattgcatgtgatttaattaaagaaacaaagctttctgctgaaccagctccggatttctctgattattcagaaatggcaaaagttgaacagccagtgcctgatcattctgagctagttgaagattcctcacctgattctgaaccagttgacttatttagtgatgattcaatacctgacgttccacaaaaacaagatgaaactgtgatgcttgtgaaagaaagtctcactgagacttcatttgagtcaatgatagaatatgaaaataaggaaaaactcagtgctttgccacctgagggaggaaagccatatttggaatcttttaagctcagtttagataacacaaaagataccctgttacctgatgaagtttcaacattgagcaaaaaggagaaaattcctttgcagatggaggagctcagtactgcagtttattcaaatgatgacttatttatttctaaggaagcacagataagagaaactgaaacgttttcagattcatctccaattgaaattatagatgagttccctacattgatcagttctaaaactgattcattttctaaattagccagggaatatactgacctagaagtatcccacaaaagtgaaattgctaatgccccggatggagctgggtcattgccttgcacagaattgccccatgacctttctttgaagaacatacaacccaaagttgaagagaaaatcagtttctcagatgacttttctaaaaatgggtctgctacatcaaaggtgctcttattgcctccagatgtttctgctttggccactcaagcagagatagagagcatagttaaacccaaagttcttgtgaaagaagctgagaaaaaacttccttccgatacagaaaaagaggacagatcaccatctgctatattttcagcagagctgagtaaaacttcagttgttgacctcctgtactggagagacattaagaagactggagtggtgtttggtgccagcctattcctgctgctttcattgacagtattcagcattgtgagcgtaacagcctacattgccttggccctgctctctgtgaccatcagctttaggatatacaagggtgtgatccaagctatccagaaatcagatgaaggccacccattcagggcatatctggaatctgaagttgctatatctgaggagttggttcagaagtacagtaattctgctcttggtcatgtgaactgcacgataaaggaactcaggcgcctcttcttagttgatgatttagttgattctctgaagtttgcagtgttgatgtgggtatttacctatgttggtgccttgtttaatggtctgacactactgattttgggtaagtctacaaagccattgggatgaaaaattgctggaaagattgtgtgccaggagcttagacattttagtggagaatattctcattgtatgaaaagtaggggatgaaaatgtgggccgggcgcggtagctcatgcctgtaatcccagcactttgggaggccaaggtgggcggatcacctggggccaggagttcgagaccagcctggctaacatggtgaaaccccatttctactaaaaatagaaaaaattagctgggcgtggtggcgcacgcctgtaaatcccagctactccggaggctgaggcaggagaatcacttgagcccaagaggcagaggttgcagtgagcggagatcgtgccattgcactccaggttgggcaacaagagtgaaactccatctcaaaataagtttgaggttgtattctctttaaataagttggtgatactgcttcccggtttattgaaatgctaccttagttgctgaagacagctcctactaacaaacagtgataaaccagataaagggtggctttatatgatggtgcagtcataaatctaaccagggatacctttattttatgaaatctcactgtgatatgatttgaagctagaaatggttcctagctctaataactgcagcctcacacagttcattcattcctctggagtggctcctcaacagcagatgcatccagagatccttatgtttttattcattcattaggaacactgcttggttatcttgagttgccagtttaatagttttttgagtgtttattcctcccaaatcattccattctttttgaaaagttgtatatttcccttttcactctcatttcactcttcagtgttcctgttatttatgaacggcatcaggtaatttcctaactaactgctgacttcagaatagagcactcactctattacatgggatttacggatgtattagtgcccattttcaatgtcttacaaaaatgagaagtgtgatggtttcttaagcctttagcttgacacatagtagtggttaataagattctttagcaacggtaataattcctttatacctctctttcaggcacagatagatcattatctaggacttgcaaataagaatgttaaagatgctatggctaagtaagtatttaaaatctgcagtgtttttactaggataaggtgtgctggattgtgagaacagtattttcatattgcaggcataatgagtaacaaatctctatcagaccttaagtgtgacttcagagttgccaaaagattgtttttctaacatttggaccattcgtttctgggtttattatgtgtttaaggctttgtttaaatctaattcatgaggccaaggtggcaaaattatagcttagaattaggcagctttaaggatttcatttattgtattagctgaataacatacaagtagttcttggaagatggtattttaagcagcagcaaacaaaactgatatttacattgactttttcattttcagaatccaagcaaaaatccctggattgaagcgcaaagctgaatgaaaacgcccaaaataattagtaggagttcatctttaaaggggatattcatttgattatacgggggagggtcagggaagaacgaaccttgacgttgcagtgcagtttcacagatcgttgttagatctttatttttagccatgcactgttgtgaggaaaaattacctgtcttgactgccatgtgttcatcatcttaagtattgtaagctgctatgtatggatttaaaccgtaatcatatctttttcctatctatctgaggcactggtggaataaaaaacctgtatattttactttgttgcagatagtcttgccgcatcttggcaagttgcagagatggtggagctagaaaaaaaaaaaaaaaagcccttttcagtttgtgcactgtgtatggtccgtgtagattgatgcagattttctgaaatgaaatgtttgtttagacgagatcataccggtaaagcaggaatgacaaagcttgcttttctggtatgttctaggtgtattgtgacttttactgttatattaattgccaatataagtaaatatagattatatatgtatagtgtttcacaaagcttagacctttaccttccagccaccccacagtgcttgatatttcagagtcagtcattggttatacatgtgtagttccaaagcacataagctagaagaagaaatatttctaggagcactaccatctgttttcaacatgaaatgccacacacatagaactccaacaacatcaatttcattgcacagactgactgtagttaattttgtcacagaatctatggactgaatctaatgcttccaaaaatgttgtttgtttgcaaatatcaaacattgttatgcaagaaattattaattacaaaatgaagatttataccattgtggtttaagctgtactgaactaaatctgtggaatgcattgtgaactgtaaaagcaaagtatcaataaagcttatagacttaaaa

SEQ ID NO: 444051 - DNA, 4661 bp, Homo sapiens
ataggctaggtcgggactggggtgtgaatcggccgaaggacagtaggtccctcggctcagtcggcccagcccctctcagtcctccccaacccccacaaccgcccgcggctctgagacgcggccccggcggcggcggcagcagctgcagcatcatctccaccctccagccatggaagacctggaccagtctcctctggtctcgtcctcggacagcccaccccggccgcagcccgcgttcaagtaccagttcgtgagggagcccgaggacgaggaggaagaagaggaggaggaagaggaggacgaggacgaagacctggaggagctggaggtgctggagaggaagcccgccgccgggctgtccgcggccccagtgcccaccgcccctgccgccggcgcgcccctgatggacttcggaaatgacttcgtgccgccggcgccccggggacccctgccggccgctccccccgtcgccccggagcggcagccgtcttgggacccgagcccggtgtcgtcgaccgtgcccgcgccatccccgctgtctgctgccgcagtctcgccctccaagctccctgaggacgacgagcctccggcccggcctccccctcctcccccggccagcgtgagcccccaggcagagcccgtgtggaccccgccagccccggctcccgccgcgcccccctccaccccggccgcgcccaagcgcaggggctcctcgggctcagtggatgagaccctttttgctcttcctgctgcatctgagcctgtgatacgctcctctgcagaaaatatggacttgaaggagcagccaggtaacactatttcggctggtcaagaggatttcccatctgtcctgcttgaaactgctgcttctcttccttctctgtctcctctctcagccgcttctttcaaagaacatgaataccttggtaatttgtcaacagtattacccactgaaggaacacttcaagaaaatgtcagtgaagcttctaaagaggtctcagagaaggcaaaaactctactcatagatagagatttaacagagttttcagaattagaatactcagaaatgggatcatcgttcagtgtctctccaaaagcagaatctgccgtaatagtagcaaatcctagggaagaaataatcgtgaaaaataaagatgaagaagagaagttagttagtaataacatccttcataatcaacaagagttacctacagctcttactaaattggttaaagaggatgaagttgtgtcttcagaaaaagcaaaagacagttttaatgaaaagagagttgcagtggaagctcctatgagggaggaatatgcagacttcaaaccatttgagcgagtatgggaagtgaaagatagtaaggaagatagtgatatgttggctgctggaggtaaaatcgagagcaacttggaaagtaaagtggataaaaaatgttttgcagatagccttgagcaaactaatcacgaaaaagatagtgagagtagtaatgatgatacttctttccccagtacgccagaaggtataaaggatcgttcaggagcatatatcacatgtgctccctttaacccagcagcaactgagagcattgcaacaaacatttttcctttgttaggagatcctacttcagaaaataagaccgatgaaaaaaaaatagaagaaaagaaggcccaaatagtaacagagaagaatactagcaccaaaacatcaaacccttttcttgtagcagcacaggattctgagacagattatgtcacaacagataatttaacaaaggtgactgaggaagtcgtggcaaacatgcctgaaggcctgactccagatttagtacaggaagcatgtgaaagtgaattgaatgaagttactggtacaaagattgcttatgaaacaaaaatggacttggttcaaacatcagaagttatgcaagagtcactctatcctgcagcacagctttgcccatcatttgaagagtcagaagctactccttcaccagttttgcctgacattgttatggaagcaccattgaattctgcagttcctagtgctggtgcttccgtgatacagcccagctcatcaccattagaagcttcttcagttaattatgaaagcataaaacatgagcctgaaaaccccccaccatatgaagaggccatgagtgtatcactaaaaaaagtatcaggaataaaggaagaaattaaagagcctgaaaatattaatgcagctcttcaagaaacagaagctccttatatatctattgcatgtgatttaattaaagaaacaaagctttctgctgaaccagctccggatttctctgattattcagaaatggcaaaagttgaacagccagtgcctgatcattctgagctagttgaagattcctcacctgattctgaaccagttgacttatttagtgatgattcaatacctgacgttccacaaaaacaagatgaaactgtgatgcttgtgaaagaaagtctcactgagacttcatttgagtcaatgatagaatatgaaaataaggaaaaactcagtgctttgccacctgagggaggaaagccatatttggaatcttttaagctcagtttagataacacaaaagataccctgttacctgatgaagtttcaacattgagcaaaaaggagaaaattcctttgcagatggaggagctcagtactgcagtttattcaaatgatgacttatttatttctaaggaagcacagataagagaaactgaaacgttttcagattcatctccaattgaaattatagatgagttccctacattgatcagttctaaaactgattcattttctaaattagccagggaatatactgacctagaagtatcccacaaaagtgaaattgctaatgccccggatggagctgggtcattgccttgcacagaattgccccatgacctttctttgaagaacatacaacccaaagttgaagagaaaatcagtttctcagatgacttttctaaaaatgggtctgctacatcaaaggtgctcttattgcctccagatgtttctgctttggccactcaagcagagatagagagcatagttaaacccaaagttcttgtgaaagaagctgagaaaaaacttccttccgatacagaaaaagaggacagatcaccatctgctatattttcagcagagctgagtaaaacttcagttgttgacctcctgtactggagagacattaagaagactggagtggtgtttggtgccagcctattcctgctgctttcattgacagtattcagcattgtgagcgtaacagcctacattgccttggccctgctctctgtgaccatcagctttaggatatacaagggtgtgatccaagctatccagaaatcagatgaaggccacccattcagggcatatctggaatctgaagttgctatatctgaggagttggttcagaagtacagtaattctgctcttggtcatgtgaactgcacgataaaggaactcaggcgcctcttcttagttgatgatttagttgattctctgaagtttgcagtgttgatgtgggtatttacctatgttggtgccttgtttaatggtctgacactactgattttggctctcatttcactcttcagtgttcctgttatttatgaacggcatcaggcacagatagatcattatctaggacttgcaaataagaatgttaaagatgctatggctaaaatccaagcaaaaatccctggattgaagcgcaaagctgaatgaaaacgcccaaaataattagtaggagttcatctttaaaggggatattcatttgattatacgggggagggtcagggttagccatgcactgttgtgaggaaaaattacctgtcttgactgccatgtgttcatcatcttaagtattgtaagctgctatgtatggatttaaaccgtaatcatatctttttcctatctatctgaggcactggtggaataaaaaacctgtatattttactttgttgcagatagtcttgccgcatcttggcaagttgcagagatggtggagctagaaaaaaaaaaaaaaaagcccttttcagtttgtgcactgtgtatggtccgtgtagattgatgcagattttctgaaatgaaatgtttgtttagacgagatcataccggtaaagcaggaatgacaaagcttgcttttctggtatgttctaggtgtattgtgacttttactgttatattaattgccaatataagtaaatatagattatatatgtatagtgtttcacaaagcttagacctttaccttccagccaccccacagtgcttgatatttcagagtcagtcattggttatacatgtgtagttccaaagcacataagctagaagaagaaatatttctaggagcactaccatctgttttcaacatgaaatgccacacacatagaactccaacaacatcaatttcattgcacagactgactgtagttaattttgtcacagaatctatggactgaatctaatgcttccaaaaatgttgtttgtttgcaaatatcaaacattgttatgcaagaaattattaattacaaaatgaagatttataccattgtggtttaagctgtactgaactaaatctgtggaatgcattgtgaactgtaaaagcaaagtatcaataaagcttatagacttaaaa

SEQ ID NO: 444052 - DNA, 4834 bp, Homo sapiens
ataggctaggtcgggactggggtgtgaatcggccgaaggacagtaggtccctcggctcagtcggcccagcccctctcagtcctccccaacccccacaaccgcccgcggctctgagacgcggccccggcggcggcggcagcagctgcagcatcatctccaccctccagccatggaagacctggaccagtctcctctggtctcgtcctcggacagcccaccccggccgcagcccgcgttcaagtaccagttcgtgagggagcccgaggacgaggaggaagaagaggaggaggaagaggaggacgaggacgaagacctggaggagctggaggtgctggagaggaagcccgccgccgggctgtccgcggccccagtgcccaccgcccctgccgccggcgcgcccctgatggacttcggaaatgacttcgtgccgccggcgccccggggacccctgccggccgctccccccgtcgccccggagcggcagccgtcttgggacccgagcccggtgtcgtcgaccgtgcccgcgccatccccgctgtctgctgccgcagtctcgccctccaagctccctgaggacgacgagcctccggcccggcctccccctcctcccccggccagcgtgagcccccaggcagagcccgtgtggaccccgccagccccggctcccgccgcgcccccctccaccccggccgcgcccaagcgcaggggctcctcgggctcagtggatgagaccctttttgctcttcctgctgcatctgagcctgtgatacgctcctctgcagaaaatatggacttgaaggagcagccaggtaacactatttcggctggtcaagaggatttcccatctgtcctgcttgaaactgctgcttctcttccttctctgtctcctctctcagccgcttctttcaaagaacatgaataccttggtaatttgtcaacagtattacccactgaaggaacacttcaagaaaatgtcagtgaagcttctaaagaggtctcagagaaggcaaaaactctactcatagatagagatttaacagagttttcagaattagaatactcagaaatgggatcatcgttcagtgtctctccaaaagcagaatctgccgtaatagtagcaaatcctagggaagaaataatcgtgaaaaataaagatgaagaagagaagttagttagtaataacatccttcataatcaacaagagttacctacagctcttactaaattggttaaagaggatgaagttgtgtcttcagaaaaagcaaaagacagttttaatgaaaagagagttgcagtggaagctcctatgagggaggaatatgcagacttcaaaccatttgagcgagtatgggaagtgaaagatagtaaggaagatagtgatatgttggctgctggaggtaaaatcgagagcaacttggaaagtaaagtggataaaaaatgttttgcagatagccttgagcaaactaatcacgaaaaagatagtgagagtagtaatgatgatacttctttccccagtacgccagaaggtataaaggatcgttcaggagcatatatcacatgtgctccctttaacccagcagcaactgagagcattgcaacaaacatttttcctttgttaggagatcctacttcagaaaataagaccgatgaaaaaaaaatagaagaaaagaaggcccaaatagtaacagagaagaatactagcaccaaaacatcaaacccttttcttgtagcagcacaggattctgagacagattatgtcacaacagataatttaacaaaggtgactgaggaagtcgtggcaaacatgcctgaaggcctgactccagatttagtacaggaagcatgtgaaagtgaattgaatgaagttactggtacaaagattgcttatgaaacaaaaatggacttggttcaaacatcagaagttatgcaagagtcactctatcctgcagcacagctttgcccatcatttgaagagtcagaagctactccttcaccagttttgcctgacattgttatggaagcaccattgaattctgcagttcctagtgctggtgcttccgtgatacagcccagctcatcaccattagaagcttcttcagttaattatgaaagcataaaacatgagcctgaaaaccccccaccatatgaagaggccatgagtgtatcactaaaaaaagtatcaggaataaaggaagaaattaaagagcctgaaaatattaatgcagctcttcaagaaacagaagctccttatatatctattgcatgtgatttaattaaagaaacaaagctttctgctgaaccagctccggatttctctgattattcagaaatggcaaaagttgaacagccagtgcctgatcattctgagctagttgaagattcctcacctgattctgaaccagttgacttatttagtgatgattcaatacctgacgttccacaaaaacaagatgaaactgtgatgcttgtgaaagaaagtctcactgagacttcatttgagtcaatgatagaatatgaaaataaggaaaaactcagtgctttgccacctgagggaggaaagccatatttggaatcttttaagctcagtttagataacacaaaagataccctgttacctgatgaagtttcaacattgagcaaaaaggagaaaattcctttgcagatggaggagctcagtactgcagtttattcaaatgatgacttatttatttctaaggaagcacagataagagaaactgaaacgttttcagattcatctccaattgaaattatagatgagttccctacattgatcagttctaaaactgattcattttctaaattagccagggaatatactgacctagaagtatcccacaaaagtgaaattgctaatgccccggatggagctgggtcattgccttgcacagaattgccccatgacctttctttgaagaacatacaacccaaagttgaagagaaaatcagtttctcagatgacttttctaaaaatgggtctgctacatcaaaggtgctcttattgcctccagatgtttctgctttggccactcaagcagagatagagagcatagttaaacccaaagttcttgtgaaagaagctgagaaaaaacttccttccgatacagaaaaagaggacagatcaccatctgctatattttcagcagagctgagtaaaacttcagttgttgacctcctgtactggagagacattaagaagactggagtggtgtttggtgccagcctattcctgctgctttcattgacagtattcagcattgtgagcgtaacagcctacattgccttggccctgctctctgtgaccatcagctttaggatatacaagggtgtgatccaagctatccagaaatcagatgaaggccacccattcagggcatatctggaatctgaagttgctatatctgaggagttggttcagaagtacagtaattctgctcttggtcatgtgaactgcacgataaaggaactcaggcgcctcttcttagttgatgatttagttgattctctgaagtttgcagtgttgatgtgggtatttacctatgttggtgccttgtttaatggtctgacactactgattttggctctcatttcactcttcagtgttcctgttatttatgaacggcatcaggcacagatagatcattatctaggacttgcaaataagaatgttaaagatgctatggctaaaatccaagcaaaaatccctggattgaagcgcaaagctgaatgaaaacgcccaaaataattagtaggagttcatctttaaaggggatattcatttgattatacgggggagggtcagggttagccatgcactgttgtgaggaaaaattacctgtcttgactgccatgtgttcatcatcttaagtattgtaagctgctatgtatggatttaaaccgtaatcatatctttttcctatctatctgaggcactggtggaataaaaaacctgtatattttactttgttgcagatagtcttgccgcatcttggcaagttgcagagatggtggagctagaaaaaaaaaaaaaaaagcccttttcagtttgtgcactgtgtatggtccgtgtagattgatgcagattttctgaaatgaaatgtttgtttagacgagatcataccggtaaagcaggaatgacaaagcttgcttttctggtatgttctaggtgtattgtgacttttactgttatattaattgccaatataagtaaatatagattatatatgtatagtgtttcacaaagcttagacctttaccttccagccaccccacagtgcttgatatttcagagtcagtcattggttatacatgtgtagttccaaagcacataagctagaagaagaaatatttctaggagcactaccatctgttttcaacatgaaatgccacacacatagaactccaacaacatcaatttcattgcacagactgactgtagttaattttgtcacagaatctatggactgaatctaatgcttccaaaaatgttgtttgtttgcaaatatcaaacattgttatgcaagaaattattaattacaaaatgaagatttataccattgtggtttaagctgtactgaactaaatctgtggaatgcattgtgaactgtaaaagcaaagtatcaataaagcttatagacttaaaaaaaaaaaaaggggggggttaaatatcccgagggccaacttagcgtaccgtttttgtcaagggcccaaggggcggttataaaggcggcggttaccgttctggaagccgggactggagaccccctgggtcatggcaccccattgctgaataaggtagtccaatggaattgataca

SEQ ID NO: 444053 - DNA, 629 bp, Homo sapiens
atggctgactctagaggatcacggtttcagtttgtgcactgtgtatggtccgtgtagattgatgcagattttctgaaatgaaatgtttgtttagacgagatcataccggtaaagcaggaatgacaaagcttgcttttctggtatgttctaggtgtattgtgacttttactgttatattaattgccaatataagtaaatatagattatatatgtatagtgtttcacaaagcttagacctttaccttccagccaccccacagtgcttgatatttcagagtcagtcattggttatacatgtgtagttccaaagcacataagctagaagaagaaatatttctaggagcactaccatctgttttcaacatgaaatgccacacacatagaactccaacaacatcaatttcattgcacagactgactgtagttaattttgtcacagaatctatggactgaatctaatgcttccaaaaatgttgtttgtttgcaaatatcaaacattgttatgcaagaaattattaattacaaaatgaagatttataccattgtggtttaagctgtactgaactaaatctgtggaatgcattgtgaactgtaaaagcaaagtatcaataaagcttatagacttaaaa

SEQ ID NO: 444054 - DNA, 4241 bp, Homo sapiens
ataggctaggtcgggactggggtgtgaatcggccgaaggacagtaggtccctcggctcagtcggcccagcccctctcagtcctccccaacccccacaaccgcccgcggctctgagacgcggccccggcggcggcggcagcagctgcagcatcatctccaccctccagccatggaagacctggaccagtctcctctggtctcgtcctcggacagcccaccccggccgcagcccgcgttcaagtaccagttcgtgagggagcccgaggacgaggaggaagaagaggaggaggaagaggaggacgaggacgaagacctggaggagctggaggtgctggagaggaagcccgccgccgggctgtccgcggccccagtgcccaccgcccctgccgccggcgcgcccctgatggacttcggaaatgacttcgtgccgccggcgccccggggacccctgccggccgctccccccgtcgccccggagcggcagccgtcttgggacccgagcccggtgtcgtcgaccgtgcccgcgccatccccgctgtctgctgccgcagtctcgccctccaagctccctgaggacgacgagcctccggcccggcctccccctcctcccccggccagcgtgagcccccaggcagagcccgtgtggaccccgccagccccggctcccgccgcgcccccctccaccccggccgcgcccaagcgcaggggctcctcgggctcagtggatgagaccctttttgctcttcctgctgcatctgagcctgtgatacgctcctctgcagaaaatatggacttgaaggagcagccaggtaacactatttcggctggtcaagaggatttcccatctgtcctgcttgaaactgctgcttctcttccttctctgtctcctctctcagccgcttctttcaaagaacatgaataccttggtaatttgtcaacagtattacccactgaaggaacacttcaagaaaatgtcagtgaagcttctaaagaggtctcagagaaggcaaaaactctactcatagatagagatttaacagagttttcagaattagaatactcagaaatgggatcatcgttcagtgtctctccaaaagcagaatctgccgtaatagtagcaaatcctagggaagaaataatcgtgaaaaataaagatgaagaagagaagttagttagtaataacatccttcataatcaacaagagttacctacagctcttactaaattggttaaagaggatgaagttgtgtcttcagaaaaagcaaaagacagttttaatgaaaagagagttgcagtggaagctcctatgagggaggaatatgcagacttcaaaccatttgagcgagtatgggaagtgaaagatagtaaggaagatagtgatatgttggctgctggaggtaaaatcgagagcaacttggaaagtaaagtggataaaaaatgttttgcagatagccttgagcaaactaatcacgaaaaagatagtgagagtagtaatgatgatacttctttccccagtacgccagaaggtataaaggatcgttcaggagcatatatcacatgtgctccctttaacccagcagcaactgagagcattgcaacaaacatttttcctttgttaggagatcctacttcagaaaataagaccgatgaaaaaaaaatagaagaaaagaaggcccaaatagtaacagagaagaatactagcaccaaaacatcaaacccttttcttgtagcagcacaggattctgagacagattatgtcacaacagataatttaacaaaggtgactgaggaagtcgtggcaaacatgcctgaaggcctgactccagatttagtacaggaagcatgtgaaagtgaattgaatgaagttactggtacaaagattgcttatgaaacaaaaatggacttggttcaaacatcagaagttatgcaagagtcactctatcctgcagcacagctttgcccatcatttgaagagtcagaagctactccttcaccagttttgcctgacattgttatggaagcaccattgaattctgcagttcctagtgctggtgcttccgtgatacagcccagctcatcaccattagaagcttcttcagttaattatgaaagcataaaacatgagcctgaaaaccccccaccatatgaagaggccatgagtgtatcactaaaaaaagtatcaggaataaaggaagaaattaaagagcctgaaaatattaatgcagctcttcaagaaacagaagctccttatatatctattgcatgtgatttaattaaagaaacaaagctttctgctgaaccagctccggatttctctgattattcagaaatggcaaaagttgaacagccagtgcctgatcattctgagctagttgaagattcctcacctgattctgaaccagttgacttatttagtgatgattcaatacctgacgttccacaaaaacaagatgaaactgtgatgcttgtgaaagaaagtctcactgagacttcatttgagtcaatgatagaatatgaaaataaggaaaaactcagtgctttgccacctgagggaggaaagccatatttggaatcttttaagctcagtttagataacacaaaagataccctgttacctgatgaagtttcaacattgagcaaaaaggagaaaattcctttgcagatggaggagctcagtactgcagtttattcaaatgatgacttatttatttctaaggaagcacagataagagaaactgaaacgttttcagattcatctccaattgaaattatagatgagttccctacattgatcagttctaaaactgattcattttctaaattagccagggaatatactgacctagaagtatcccacaaaagtgaaattgctaatgccccggatggagctgggtcattgccttgcacagaattgccccatgacctttctttgaagaacatacaacccaaagttgaagagaaaatcagtttctcagatgacttttctaaaaatgggtctgctacatcaaaggtgctcttattgcctccagatgtttctgctttggccactcaagcagagatagagagcatagttaaacccaaagttcttgtgaaagaagctgagaaaaaacttccttccgatacagaaaaagaggacagatcaccatctgctatattttcagcagagctgagtaaaacttcagttgttgacctcctgtactggagagacattaagaagactggagtggtgtttggtgccagcctattcctgctgctttcattgacagtattcagcattgtgagcgtaacagcctacattgccttggccctgctctctgtgaccatcagctttaggatatacaagggtgtgatccaagctatccagaaatcagatgaaggccacccattcagggcatatctggaatctgaagttgctatatctgaggagttggttcagaagtacagtaattctgctcttggtcatgtgaactgcacgataaaggaactcaggcgcctcttcttagttgatgatttagttgattctctgaagtttgcagtgttgatgtgggtatttacctatgttggtgccttgtttaatggtctgacactactgattttggctctcatttcactcttcagtgttcctgttatttatgaacggcatcaggcacagatagatcattatctaggacttgcaaataagaatgttaaagatgctatggctaaaatccaagcaaaaatccctggattgaagcgcaaagctgaatgaaaacgcccaaaataattagtaggagttcatctttaaaggggatattcatttgattatacgggggagggtcagggaagaacgaaccttgacgttgcagtgcagtttcacagatcgttgttagatctttattttgaactgcacgatacaaggaactcaggcgcctcttcttagttcgatgatttacgttgattctctgaagtttgcagtgttgactgtgggtatttagctatgtcggtgcctctgtttcatggtctgacacttactgatgtcggctctcatttcactcttcagtgttcctgtgtttacacaaatgctggatgatagtctttctaggatgtttcataagcactcctttattgggcccaaagtttagactaagtgctttacaaaggttctttaaacaaaaacaaaaacagaaacatttattggctgggcacagtggctcatgcctgttatcccagcacagaaccaccaacaagatcagatcctctag

SEQ ID NO: 444055 - DNA, 3767 bp, Homo sapiens
ataggctaggtcgggactggggtgtgaatcggccgaaggacagtaggtccctcggctcagtcggcccagcccctctcagtcctccccaacccccacaaccgcccgcggctctgagacgcggccccggcggcggcggcagcagctgcagcatcatctccaccctccagccatggaagacctggaccagtctcctctggtctcgtcctcggacagcccaccccggccgcagcccgcgttcaagtaccagttcgtgagggagcccgaggacgaggaggaagaagaggaggaggaagaggaggacgaggacgaagacctggaggagctggaggtgctggagaggaagcccgccgccgggctgtccgcggccccagtgcccaccgcccctgccgccggcgcgcccctgatggacttcggaaatgacttcgtgccgccggcgccccggggacccctgccggccgctccccccgtcgccccggagcggcagccgtcttgggacccgagcccggtgtcgtcgaccgtgcccgcgccatccccgctgtctgctgccgcagtctcgccctccaagctccctgaggacgacgagcctccggcccggcctccccctcctcccccggccagcgtgagcccccaggcagagcccgtgtggaccccgccagccccggctcccgccgcgcccccctccaccccggccgcgcccaagcgcaggggctcctcgggctcagtggatgagaccctttttgctcttcctgctgcatctgagcctgtgatacgctcctctgcagaaaatatggacttgaaggagcagccaggtaacactatttcggctggtcaagaggatttcccatctgtcctgcttgaaactgctgcttctcttccttctctgtctcctctctcagccgcttctttcaaagaacatgaataccttggtaatttgtcaacagtattacccactgaaggaacacttcaagaaaatgtcagtgaagcttctaaagaggtctcagagaaggcaaaaactctactcatagatagagatttaacagagttttcagaattagaatactcagaaatgggatcatcgttcagtgtctctccaaaagcagaatctgccgtaatagtagcaaatcctagggaagaaataatcgtgaaaaataaagatgaagaagagaagttagttagtaataacatccttcataatcaacaagagttacctacagctcttactaaattggttaaagaggatgaagttgtgtcttcagaaaaagcaaaagacagttttaatgaaaagagagttgcagtggaagctcctatgagggaggaatatgcagacttcaaaccatttgagcgagtatgggaagtgaaagatagtaaggaagatagtgatatgttggctgctggaggtaaaatcgagagcaacttggaaagtaaagtggataaaaaatgttttgcagatagccttgagcaaactaatcacgaaaaagatagtgagagtagtaatgatgatacttctttccccagtacgccagaaggtataaaggatcgttcaggagcatatatcacatgtgctccctttaacccagcagcaactgagagcattgcaacaaacatttttcctttgttaggagatcctacttcagaaaataagaccgatgaaaaaaaaatagaagaaaagaaggcccaaatagtaacagagaagaatactagcaccaaaacatcaaacccttttcttgtagcagcacaggattctgagacagattatgtcacaacagataatttaacaaaggtgactgaggaagtcgtggcaaacatgcctgaaggcctgactccagatttagtacaggaagcatgtgaaagtgaattgaatgaagttactggtacaaagattgcttatgaaacaaaaatggacttggttcaaacatcagaagttatgcaagagtcactctatcctgcagcacagctttgcccatcatttgaagagtcagaagctactccttcaccagttttgcctgacattgttatggaagcaccattgaattctgcagttcctagtgctggtgcttccgtgatacagcccagctcatcaccattagaagcttcttcagttaattatgaaagcataaaacatgagcctgaaaaccccccaccatatgaagaggccatgagtgtatcactaaaaaaagtatcaggaataaaggaagaaattaaagagcctgaaaatattaatgcagctcttcaagaaacagaagctccttatatatctattgcatgtgatttaattaaagaaacaaagctttctgctgaaccagctccggatttctctgattattcagaaatggcaaaagttgaacagccagtgcctgatcattctgagctagttgaagattcctcacctgattctgaaccagttgacttatttagtgatgattcaatacctgacgttccacaaaaacaagatgaaactgtgatgcttgtgaaagaaagtctcactgagacttcatttgagtcaatgatagaatatgaaaataaggaaaaactcagtgctttgccacctgagggaggaaagccatatttggaatcttttaagctcagtttagataacacaaaagataccctgttacctgatgaagtttcaacattgagcaaaaaggagaaaattcctttgcagatggaggagctcagtactgcagtttattcaaatgatgacttatttatttctaaggaagcacagataagagaaactgaaacgttttcagattcatctccaattgaaattatagatgagttccctacattgatcagttctaaaactgattcattttctaaattagccagggaatatactgacctagaagtatcccacaaaagtgaaattgctaatgccccggatggagctgggtcattgccttgcacagaattgccccatgacctttctttgaagaacatacaacccaaagttgaagagaaaatcagtttctcagatgacttttctaaaaatgggtctgctacatcaaaggtgctcttattgcctccagatgtttctgctttggccactcaagcagagatagagagcatagttaaacccaaagttcttgtgaaagaagctgagaaaaaacttccttccgatacagaaaaagaggacagatcaccatctgctatattttcagcagagctgagtaaaacttcagttgttgacctcctgtactggagagacattaagaagactggagtggtgtttggtgccagcctattcctgctgctttcattgacagtattcagcattgtgagcgtaacagcctacattgccttggccctgctctctgtgaccatcagctttaggatatacaagggtgtgatccaagctatccagaaatcagatgaaggccacccattcagggcatatctggaatctgaagttgctatatctgaggagttggttcagaagtacagtaattctgctcttggtcatgtgaactgcacgataaaggaactcaggcgcctcttcttagttgatgatttagttgattctctgaagtttgcagtgttgatgtgggtatttacctatgttggtgccttgtttaatggtctgacactactgattttggctctcatttcactcttcagtgttcctgttatttatgaacggcatcaggcacagatagatcattatctaggacttgcaaataagaatgttaaagatgctatggctaaatccaagctaaaatcgctggattgaaggcaagctgaatgtaacaccccaccctatgcttaat

SEQ ID NO: 444056 - DNA, 4702 bp, Homo sapiens
  misc_feature (4426)..(4426): n is a, c, g, or t
  misc_feature (4558)..(4558): n is a, c, g, or t
  misc_feature (4610)..(4610): n is a, c, g, or t
ataggctaggtcgggactggggtgtgaatcggccgaaggacagtaggtccctcggctcagtcggcccagcccctctcagtcctccccaacccccacaaccgcccgcggctctgagacgcggccccggcggcggcggcagcagctgcagcatcatctccaccctccagccatggaagacctggaccagtctcctctggtctcgtcctcggacagcccaccccggccgcagcccgcgttcaagtaccagttcgtgagggagcccgaggacgaggaggaagaagaggaggaggaagaggaggacgaggacgaagacctggaggagctggaggtgctggagaggaagcccgccgccgggctgtccgcggccccagtgcccaccgcccctgccgccggcgcgcccctgatggacttcggaaatgacttcgtgccgccggcgccccggggacccctgccggccgctccccccgtcgccccggagcggcagccgtcttgggacccgagcccggtgtcgtcgaccgtgcccgcgccatccccgctgtctgctgccgcagtctcgccctccaagctccctgaggacgacgagcctccggcccggcctccccctcctcccccggccagcgtgagcccccaggcagagcccgtgtggaccccgccagccccggctcccgccgcgcccccctccaccccggccgcgcccaagcgcaggggctcctcgggctcagtggatgagaccctttttgctcttcctgctgcatctgagcctgtgatacgctcctctgcagaaaatatggacttgaaggagcagccaggtaacactatttcggctggtcaagaggatttcccatctgtcctgcttgaaactgctgcttctcttccttctctgtctcctctctcagccgcttctttcaaagaacatgaataccttggtaatttgtcaacagtattacccactgaaggaacacttcaagaaaatgtcagtgaagcttctaaagaggtctcagagaaggcaaaaactctactcatagatagagatttaacagagttttcagaattagaatactcagaaatgggatcatcgttcagtgtctctccaaaagcagaatctgccgtaatagtagcaaatcctagggaagaaataatcgtgaaaaataaagatgaagaagagaagttagttagtaataacatccttcataatcaacaagagttacctacagctcttactaaattggttaaagaggatgaagttgtgtcttcagaaaaagcaaaagacagttttaatgaaaagagagttgcagtggaagctcctatgagggaggaatatgcagacttcaaaccatttgagcgagtatgggaagtgaaagatagtaaggaagatagtgatatgttggctgctggaggtaaaatcgagagcaacttggaaagtaaagtggataaaaaatgttttgcagatagccttgagcaaactaatcacgaaaaagatagtgagagtagtaatgatgatacttctttccccagtacgccagaaggtataaaggatcgttcaggagcatatatcacatgtgctccctttaacccagcagcaactgagagcattgcaacaaacatttttcctttgttaggagatcctacttcagaaaataagaccgatgaaaaaaaaatagaagaaaagaaggcccaaatagtaacagagaagaatactagcaccaaaacatcaaacccttttcttgtagcagcacaggattctgagacagattatgtcacaacagataatttaacaaaggtgactgaggaagtcgtggcaaacatgcctgaaggcctgactccagatttagtacaggaagcatgtgaaagtgaattgaatgaagttactggtacaaagattgcttatgaaacaaaaatggacttggttcaaacatcagaagttatgcaagagtcactctatcctgcagcacagctttgcccatcatttgaagagtcagaagctactccttcaccagttttgcctgacattgttatggaagcaccattgaattctgcagttcctagtgctggtgcttccgtgatacagcccagctcatcaccattagaagcttcttcagttaattatgaaagcataaaacatgagcctgaaaaccccccaccatatgaagaggccatgagtgtatcactaaaaaaagtatcaggaataaaggaagaaattaaagagcctgaaaatattaatgcagctcttcaagaaacagaagctccttatatatctattgcatgtgatttaattaaagaaacaaagctttctgctgaaccagctccggatttctctgattattcagaaatggcaaaagttgaacagccagtgcctgatcattctgagctagttgaagattcctcacctgattctgaaccagttgacttatttagtgatgattcaatacctgacgttccacaaaaacaagatgaaactgtgatgcttgtgaaagaaagtctcactgagacttcatttgagtcaatgatagaatatgaaaataaggaaaaactcagtgctttgccacctgagggaggaaagccatatttggaatcttttaagctcagtttagataacacaaaagataccctgttacctgatgaagtttcaacattgagcaaaaaggagaaaattcctttgcagatggaggagctcagtactgcagtttattcaaatgatgacttatttatttctaaggaagcacagataagagaaactgaaacgttttcagattcatctccaattgaaattatagatgagttccctacattgatcagttctaaaactgattcattttctaaattagccagggaatatactgacctagaagtatcccacaaaagtgaaattgctaatgccccggatggagctgggtcattgccttgcacagaattgccccatgacctttctttgaagaacatacaacccaaagttgaagagaaaatcagtttctcagatgacttttctaaaaatgggtctgctacatcaaaggtgctcttattgcctccagatgtttctgctttggccactcaagcagagatagagagcatagttaaacccaaagttcttgtgaaagaagctgagaaaaaacttccttccgatacagaaaaagaggacagatcaccatctgctatattttcagcagagctgagtaaaacttcagttgttgacctcctgtactggagagacattaagaagactggagtggtgtttggtgccagcctattcctgctgctttcattgacagtattcagcattgtgagcgtaacagcctacattgccttggccctgctctctgtgaccatcagctttaggatatacaagggtgtgatccaagctatccagaaatcagatgaaggccacccattcagggcatatctggaatctgaagttgctatatctgaggagttggttcagaagtacagtaattctgctcttggtcatgtgaactgcacgataaaggaactcaggcgcctcttcttagttgatgatttagttgattctctgaagtttgcagtgttgatgtgggtatttacctatgttggtgccttgtttaatggtctgacactactgattttgggtaagtctacaaagccattgggatgaaaaattgctggaaagattgtgtgccaggagcttagacattttagtggagaatattctcattgtatgaaaagtaggggatgaaaatgtgggccgggcgcggtagctcatgcctgtaatcccagcactttgggaggccaaggtgggcggatcacctggggccaggagttcgagaccagcctggctaacatggtgaaaccccatttctactaaaaatagaaaaaattagctgggcgtggtggcgcacgcctgtaaatcccagctactccggaggctgaggcaggagaatcacttgagcccaagaggcagaggttgcagtgagcggagatcgtgccattgcactccaggttgggcaacaagagtgaaactccatctcaaaataagtttgaggttgtattctctttaaataagttggtgatactgcttcccggtttattgaaatgctaccttagttgctgaagacagctcctactaacaaacagtgataaaccagataaagggtggctttatatgatggtgcagtcataaatctaaccagggatacctttattttatgaaatctcactgtgatatgatttgaagctagaaatggttcctagctctaataactgcagcctcacacagttcattcattcctctggagtggctcctcaacagcagatgcatccagagatccttatgtttttattcattcattaggaacactgcttggttatcttgagttgccagtttaatagttttttgagtgtttattcctcccagagtgctgggattacaggtgtgagccaccgtgcccagcctacnattatgactatttccatttgaaaccatcttcctcagaaattgaaattttagagccgctcttgctagcatgtgaaccttttccttgcttattgccttttggcgggggcagtgaaggaggagcctggcctttcnaaatgtgatcaaaaaaataaccgaactccagggctcattagtccttttatanacgccggtgtgaaatgatgggtatccgtgtgcctgtccatttcctggtgttgacttggcgaataaaaataagacattcctgctattcctctg

SEQ ID NO: 444057 - DNA, 3729 bp, Homo sapiens
ataggctaggtcgggactggggtgtgaatcggccgaaggacagtaggtccctcggctcagtcggcccagcccctctcagtcctccccaacccccacaaccgcccgcggctctgagacgcggccccggcggcggcggcagcagctgcagcatcatctccaccctccagccatggaagacctggaccagtctcctctggtctcgtcctcggacagcccaccccggccgcagcccgcgttcaagtaccagttcgtgagggagcccgaggacgaggaggaagaagaggaggaggaagaggaggacgaggacgaagacctggaggagctggaggtgctggagaggaagcccgccgccgggctgtccgcggccccagtgcccaccgcccctgccgccggcgcgcccctgatggacttcggaaatgacttcgtgccgccggcgccccggggacccctgccggccgctccccccgtcgccccggagcggcagccgtcttgggacccgagcccggtgtcgtcgaccgtgcccgcgccatccccgctgtctgctgccgcagtctcgccctccaagctccctgaggacgacgagcctccggcccggcctccccctcctcccccggccagcgtgagcccccaggcagagcccgtgtggaccccgccagccccggctcccgccgcgcccccctccaccccggccgcgcccaagcgcaggggctcctcgggctcagtggatgagaccctttttgctcttcctgctgcatctgagcctgtgatacgctcctctgcagaaaatatggacttgaaggagcagccaggtaacactatttcggctggtcaagaggatttcccatctgtcctgcttgaaactgctgcttctcttccttctctgtctcctctctcagccgcttctttcaaagaacatgaataccttggtaatttgtcaacagtattacccactgaaggaacacttcaagaaaatgtcagtgaagcttctaaagaggtctcagagaaggcaaaaactctactcatagatagagatttaacagagttttcagaattagaatactcagaaatgggatcatcgttcagtgtctctccaaaagcagaatctgccgtaatagtagcaaatcctagggaagaaataatcgtgaaaaataaagatgaagaagagaagttagttagtaataacatccttcataatcaacaagagttacctacagctcttactaaattggttaaagaggatgaagttgtgtcttcagaaaaagcaaaagacagttttaatgaaaagagagttgcagtggaagctcctatgagggaggaatatgcagacttcaaaccatttgagcgagtatgggaagtgaaagatagtaaggaagatagtgatatgttggctgctggaggtaaaatcgagagcaacttggaaagtaaagtggataaaaaatgttttgcagatagccttgagcaaactaatcacgaaaaagatagtgagagtagtaatgatgatacttctttccccagtacgccagaaggtataaaggatcgttcaggagcatatatcacatgtgctccctttaacccagcagcaactgagagcattgcaacaaacatttttcctttgttaggagatcctacttcagaaaataagaccgatgaaaaaaaaatagaagaaaagaaggcccaaatagtaacagagaagaatactagcaccaaaacatcaaacccttttcttgtagcagcacaggattctgagacagattatgtcacaacagataatttaacaaaggtgactgaggaagtcgtggcaaacatgcctgaaggcctgactccagatttagtacaggaagcatgtgaaagtgaattgaatgaagttactggtacaaagattgcttatgaaacaaaaatggacttggttcaaacatcagaagttatgcaagagtcactctatcctgcagcacagctttgcccatcatttgaagagtcagaagctactccttcaccagttttgcctgacattgttatggaagcaccattgaattctgcagttcctagtgctggtgcttccgtgatacagcccagctcatcaccattagaagcttcttcagttaattatgaaagcataaaacatgagcctgaaaaccccccaccatatgaagaggccatgagtgtatcactaaaaaaagtatcaggaataaaggaagaaattaaagagcctgaaaatattaatgcagctcttcaagaaacagaagctccttatatatctattgcatgtgatttaattaaagaaacaaagctttctgctgaaccagctccggatttctctgattattcagaaatggcaaaagttgaacagccagtgcctgatcattctgagctagttgaagattcctcacctgattctgaaccagttgacttatttagtgatgattcaatacctgacgttccacaaaaacaagatgaaactgtgatgcttgtgaaagaaagtctcactgagacttcatttgagtcaatgatagaatatgaaaataaggaaaaactcagtgctttgccacctgagggaggaaagccatatttggaatcttttaagctcagtttagataacacaaaagataccctgttacctgatgaagtttcaacattgagcaaaaaggagaaaattcctttgcagatggaggagctcagtactgcagtttattcaaatgatgacttatttatttctaaggaagcacagataagagaaactgaaacgttttcagattcatctccaattgaaattatagatgagttccctacattgatcagttctaaaactgattcattttctaaattagccagggaatatactgacctagaagtatcccacaaaagtgaaattgctaatgccccggatggagctgggtcattgccttgcacagaattgccccatgacctttctttgaagaacatacaacccaaagttgaagagaaaatcagtttctcagatgacttttctaaaaatgggtctgctacatcaaaggtgctcttattgcctccagatgtttctgctttggccactcaagcagagatagagagcatagttaaacccaaagttcttgtgaaagaagctgagaaaaaacttccttccgatacagaaaaagaggacagatcaccatctgctatattttcagcagagctgagtaaaacttcagttgttgacctcctgtactggagagacattaagaagactggagtggtgtttggtgccagcctattcctgctgctttcattgacagtattcagcattgtgagcgtaacagcctacattgccttggccctgctctctgtgaccatcagctttaggatatacaagggtgtgatccaagctatccagaaatcagatgaaggccacccattcagggcatatctggaatctgaagttgctatatctgaggagttggttcagaagtacagtaattctgctcttggtcatgtgaactgcacgataaaggaactcaggcgcctcttcttagttgatgatttagttgattctctgaagttgttgacctcctgtactggagagacattaagaagactggagtggtgtttggtgccagcctattcctgctgctttcattgacagtattcagcattgtgagcgtaacagcctacattgccttggccctgctctctgtgaccatcagctttaggatatacaagggtgtgatccaagctatccagaaatcagatgaagggcag

SEQ ID NO: 444058 - DNA, 1107 bp, Homo sapiens
ataggctaggtcgggactggggtgtgaatcggccgaaggacagtaggtccctcggctcagtcggcccagcccctctcagtcctccccaacccccacaaccgcccgcggctctgagacgcggccccggcggcggcggcagcagctgcagcatcatctccaccctccagccatggaagacctggaccagtctcctctggtctcgtcctcggacagcccaccccggccgcagcccgcgttcaagtaccagttcgtgagggagcccgaggacgaggaggaagaagaggaggaggaagaggaggacgaggacgaagacctggaggagctggaggtgctggagaggaagcccgccgccgggctgtccgcggccccagtgcccaccgcccctgccgccggcgcgcccctgatggacttcggaaatgacttcgtgccgccggcgccccggggacccctgccggccgctccccccgtcgccccggagcggcagccgtcttgggacccgagcccggtgtcgtcgaccgtgcccgcgccatccccgctgtctgctgccgcagtctcgccctccaagctccctgaggacgacgagcctccggcccggcctccccctcctcccccggccagcgtgagcccccaggcagagcccgtgtggaccccgccagccccggctcccgccgcgcccccctccaccccggccgcgcccaagcgcaggggctcctcgggctcagtggttaacctcctgaactggacagactttgccacagactgaattgctcttgtgtgacacactgatgcttgaactcacgttgtccagtgttatgattgcaatctggacctttataatttccatgggcctttgatggaaaccctcaactttggcatcaaatggggccctgatagctgtcgctcatcatgctaaaggcacccttccctggcctctctgcaaccgtaaatgtgtatctaagggctggttcttaagccctttaatcctcacgttggctctcaacttgaacggcttctgggacctagtcatcctgcctaatcgtctattcgctcatttctctaatattacatgcgtttcgggtgctcaaccttgctgggccttcccaatct

SEQ ID NO: 444059 - DNA, 438 bp, Homo sapiens
agactgcagacttcggttgaggaaacgggtatttcatgtctcagggagtaggtttgtgcagttacagcttttctgttggtatgcataattaataattggagctgcaaagcagatcgtgacaagagatggacggtcagaagaaaaattggaaggacaagggtatatctgctttttaatttcttattcagtttttatatgtgaccactaatatatttctatgaataagctttggaatttagatattttggattgaaagtgaaacctctgaagagttgaagtctaaaggattaaaacggctatctcacgtgtttttacatttggttgtataccagaaaatgtcatgctgttctgtttcactggcattcggtttagtcttttcagtcctgccgtttaggttctgttctctaatcttgcacattgtaaacaatatagatctaa

SEQ ID NO: 444060 - DNA, 1784 bp, Homo sapiens
agcctagttacagattgcactgcgtcagactgttccacacccagaagacgtcaggtgacttcagtcctgctgcagttgtgcagcagaggagactgcagacttcggttgaggaaacgggtatttcatgtctcagggagtaggtttgtgcagttacagcttttctgttggtatgcataattaataattggagctgcaaagcagatcgtgacaagagatggacggtcagaagaaaaattggaaggacaaggttgttgacctcctgtactggagagacattaagaagactggagtggtgtttggtgccagcctattcctgctgctttcattgacagtattcagcattgtgagcgtaacagcctacattgccttggccctgctctctgtgaccatcagctttaggatatacaagggtgtgatccaagctatccagaaatcagatgaaggccacccattcagggcatatctggaatctgaagttgctatatctgaggagttggttcagaagtacagtaattctgctcttggtcatgtgaactgcacgataaaggaactcaggcgcctcttcttagttgatgatttagttgattctctgaagtttgcagtgttgatgtgggtatttacctatgttggtgccttgtttaatggtctgacactactgattttggctctcatttcactcttcagtgttcctgttatttatgaacggcatcaggcacagatagatcattatctaggacttgcaaataagaatgttaaagatgctatggctaaaatccaagcaaaaatccctggattgaagcgcaaagctgaatgaaaacgcccaaaataattagtaggagttcatctttaaaggggatattcatttgattatacgggggagggtcagggaagaacgaaccttgacgttgcagtgcagtttcacagatcgttgttagatctttatttttagccatgcactgttgtgaggaaaaattacctgtcttgactgccatgtgttcatcatcttaagtattgtaagctgctatgtatggatttaaaccgtaatcatatctttttcctatctatctgaggcactggtggaataaaaaacctgtatattttactttgttgcagatagtcttgccgcatcttggcaagttgcagagatggtggagctagaaaaaaaaaaaaaaaagcccttttcagtttgtgcactgtgtatggtccgtgtagattgatgcagattttctgaaatgaaatgtttgtttagacgagatcataccggtaaagcaggaatgacaaagcttgcttttctggtatgttctaggtgtattgtgacttttactgttatattaattgccaatataagtaaatatagattatatatgtatagtgtttcacaaagcttagacctttaccttccagccaccccacagtgcttgatatttcagagtcagtcattggttatacatgtgtagttccaaagcacataagctagaagaagaaatatttctaggagcactaccatctgttttcaacatgaaatgccacacacatagaactccaacaacatcaatttcattgcacagactgactgtagttaattttgtcacagaatctatggactgaatctaatgcttccaaaaatgttgtttgtttgcaaatatcaaacattgttatgcaagaaattattaattacaaaatgaagatttataccattgtggtttaagctgtactgaactaaatctgtggaatgcattgtgaactgtaaaagcaaagtatcaataaagcttatagacttaaaa

SEQ ID NO: 444061 - DNA, 4718 bp, Homo sapiens
ataggctaggtcgggactggggtgtgaatcggccgaaggacagtaggtccctcggctcagtcggcccagcccctctcagtcctccccaacccccacaaccgcccgcggctctgagacgcggccccggcggcggcggcagcagctgcagcatcatctccaccctccagccatggaagacctggaccagtctcctctggtctcgtcctcggacagcccaccccggccgcagcccgcgttcaagtaccagttcgtgagggagcccgaggacgaggaggaagaagaggaggaggaagaggaggacgaggacgaagacctggaggagctggaggtgctggagaggaagcccgccgccgggctgtccgcggccccagtgcccaccgcccctgccgccggcgcgcccctgatggacttcggaaatgacttcgtgccgccggcgccccggggacccctgccggccgctccccccgtcgccccggagcggcagccgtcttgggacccgagcccggtgtcgtcgaccgtgcccgcgccatccccgctgtctgctgccgcagtctcgccctccaagctccctgaggacgacgagcctccggcccggcctccccctcctcccccggccagcgtgagcccccaggcagagcccgtgtggaccccgccagccccggctcccgccgcgcccccctccaccccggccgcgcccaagcgcaggggctcctcgggctcagtggatgagaccctttttgctcttcctgctgcatctgagcctgtgatacgctcctctgcagaaaatatggacttgaaggagcagccaggtaacactatttcggctggtcaagaggatttcccatctgtcctgcttgaaactgctgcttctcttccttctctgtctcctctctcagccgcttctttcaaagaacatgaataccttggtaatttgtcaacagtattacccactgaaggaacacttcaagaaaatgtcagtgaagcttctaaagaggtctcagagaaggcaaaaactctactcatagatagagatttaacagagttttcagaattagaatactcagaaatgggatcatcgttcagtgtctctccaaaagcagaatctgccgtaatagtagcaaatcctagggaagaaataatcgtgaaaaataaagatgaagaagagaagttagttagtaataacatccttcataatcaacaagagttacctacagctcttactaaattggttaaagaggatgaagttgtgtcttcagaaaaagcaaaagacagttttaatgaaaagagagttgcagtggaagctcctatgagggaggaatatgcagacttcaaaccatttgagcgagtatgggaagtgaaagatagtaaggaagatagtgatatgttggctgctggaggtaaaatcgagagcaacttggaaagtaaagtggataaaaaatgttttgcagatagccttgagcaaactaatcacgaaaaagatagtgagagtagtaatgatgatacttctttccccagtacgccagaaggtataaaggatcgttcaggagcatatatcacatgtgctccctttaacccagcagcaactgagagcattgcaacaaacatttttcctttgttaggagatcctacttcagaaaataagaccgatgaaaaaaaaatagaagaaaagaaggcccaaatagtaacagagaagaatactagcaccaaaacatcaaacccttttcttgtagcagcacaggattctgagacagattatgtcacaacagataatttaacaaaggtgactgaggaagtcgtggcaaacatgcctgaaggcctgactccagatttagtacaggaagcatgtgaaagtgaattgaatgaagttactggtacaaagattgcttatgaaacaaaaatggacttggttcaaacatcagaagttatgcaagagtcactctatcctgcagcacagctttgcccatcatttgaagagtcagaagctactccttcaccagttttgcctgacattgttatggaagcaccattgaattctgcagttcctagtgctggtgcttccgtgatacagcccagctcatcaccattagaagcttcttcagttaattatgaaagcataaaacatgagcctgaaaaccccccaccatatgaagaggccatgagtgtatcactaaaaaaagtatcaggaataaaggaagaaattaaagagcctgaaaatattaatgcagctcttcaagaaacagaagctccttatatatctattgcatgtgatttaattaaagaaacaaagctttctgctgaaccagctccggatttctctgattattcagaaatggcaaaagttgaacagccagtgcctgatcattctgagctagttgaagattcctcacctgattctgaaccagttgacttatttagtgatgattcaatacctgacgttccacaaaaacaagatgaaactgtgatgcttgtgaaagaaagtctcactgagacttcatttgagtcaatgatagaatatgaaaataaggaaaaactcagtgctttgccacctgagggaggaaagccatatttggaatcttttaagctcagtttagataacacaaaagataccctgttacctgatgaagtttcaacattgagcaaaaaggagaaaattcctttgcagatggaggagctcagtactgcagtttattcaaatgatgacttatttatttctaaggaagcacagataagagaaactgaaacgttttcagattcatctccaattgaaattatagatgagttccctacattgatcagttctaaaactgattcattttctaaattagccagggaatatactgacctagaagtatcccacaaaagtgaaattgctaatgccccggatggagctgggtcattgccttgcacagaattgccccatgacctttctttgaagaacatacaacccaaagttgaagagaaaatcagtttctcagatgacttttctaaaaatgggtctgctacatcaaaggtgctcttattgcctccagatgtttctgctttggccactcaagcagagatagagagcatagttaaacccaaagttcttgtgaaagaagctgagaaaaaacttccttccgatacagaaaaagaggacagatcaccatctgctatattttcagcagagctgagtaaaacttcagttgttgacctcctgtactggagagacattaagaagactggagtggtgtttggtgccagcctattcctgctgctttcattgacagtattcagcattgtgagcgtaacagcctacattgccttggccctgctctctgtgaccatcagctttaggatatacaagggtgtgatccaagctatccagaaatcagatgaaggccacccattcagggcatatctggaatctgaagttgctatatctgaggagttggttcagaagtacagtaattctgctcttggtcatgtgaactgcacgataaaggaactcaggcgcctcttcttagttgatgatttagttgattctctgaagtttgcagtgttgatgtgggtatttacctatgttggtgccttgtttaatggtctgacactactgattttggctctcatttcactcttcagtgttcctgttatttatgaacggcatcaggcacagatagatcattatctaggacttgcaaataagaatgttaaagatgctatggctaaaatccaagcaaaaatccctggattgaagcgcaaagctgaatgaaaacgcccaaaataattagtaggagttcatctttaaaggggatattcatttgattatacgggggagggtcagggaagaacgaaccttgacgttgcagtgcagtttcacagatcgttgttagatctttatttttagccatgcactgttgtgaggaaaaattacctgtcttgactgccatgtgttcatcatcttaagtattgtaagctgctatgtatggatttaaaccgtaatcatatctttttcctatctatctgaggcactggtggaataaaaaacctgtatattttactttgttgcagatagtcttgccgcatcttggcaagttgcagagatggtggagctagaaaaaaaaaaaaaaaagcccttttcagtttgtgcactgtgtatggtccgtgtagattgatgcagattttctgaaatgaaatgtttgtttagacgagatcataccggtaaagcaggaatgacaaagcttgcttttctggtatgttctaggtgtattgtgacttttactgttatattaattgccaatataagtaaatatagattatatatgtatagtgtttcacaaagcttagacctttaccttccagccaccccacagtgcttgatatttcagagtcagtcattggttatacatgtgtagttccaaagcacataagctagaagaagaaatatttctaggagcactaccatctgttttcaacatgaaatgccacacacatagaactccaacaacatcaatttcattgcacagactgactgtagttaattttgtcacagaatctatggactgaatctaatgcttccaaaaatgttgtttgtttgcaaatatcaaacattgttatgcaagaaattattaattacaaaatgaagatttataccattgtggtttaagctgtactgaactaaatctgtggaatgcattgtgaactgtaaaagcaaagtatcaataaagcttatagacttaaaa

SEQ ID NO: 444062 - DNA, 2261 bp, Homo sapiens
ataggctaggtcgggactggggtgtgaatcggccgaaggacagtaggtccctcggctcagtcggcccagcccctctcagtcctccccaacccccacaaccgcccgcggctctgagacgcggccccggcggcggcggcagcagctgcagcatcatctccaccctccagccatggaagacctggaccagtctcctctggtctcgtcctcggacagcccaccccggccgcagcccgcgttcaagtaccagttcgtgagggagcccgaggacgaggaggaagaagaggaggaggaagaggaggacgaggacgaagacctggaggagctggaggtgctggagaggaagcccgccgccgggctgtccgcggccccagtgcccaccgcccctgccgccggcgcgcccctgatggacttcggaaatgacttcgtgccgccggcgccccggggacccctgccggccgctccccccgtcgccccggagcggcagccgtcttgggacccgagcccggtgtcgtcgaccgtgcccgcgccatccccgctgtctgctgccgcagtctcgccctccaagctccctgaggacgacgagcctccggcccggcctccccctcctcccccggccagcgtgagcccccaggcagagcccgtgtggaccccgccagccccggctcccgccgcgcccccctccaccccggccgcgcccaagcgcaggggctcctcgggctcagtggttgttgacctcctgtactggagagacattaagaagactggagtggtgtttggtgccagcctattcctgctgctttcattgacagtattcagcattgtgagcgtaacagcctacattgccttggccctgctctctgtgaccatcagctttaggatatacaagggtgtgatccaagctatccagaaatcagatgaaggccacccattcagggcatatctggaatctgaagttgctatatctgaggagttggttcagaagtacagtaattctgctcttggtcatgtgaactgcacgataaaggaactcaggcgcctcttcttagttgatgatttagttgattctctgaagtttgcagtgttgatgtgggtatttacctatgttggtgccttgtttaatggtctgacactactgattttggctctcatttcactcttcagtgttcctgttatttatgaacggcatcaggcacagatagatcattatctaggacttgcaaataagaatgttaaagatgctatggctaaaatccaagcaaaaatccctggattgaagcgcaaagctgaatgaaaacgcccaaaataattagtaggagttcatctttaaaggggatattcatttgattatacgggggagggtcagggaagaacgaaccttgacgttgcagtgcagtttcacagatcgttgttagatctttatttttagccatgcactgttgtgaggaaaaattacctgtcttgactgccatgtgttcatcatcttaagtattgtaagctgctatgtatggatttaaaccgtaatcatatctttttcctatctatctgaggcactggtggaataaaaaacctgtatattttactttgttgcagatagtcttgccgcatcttggcaagttgcagagatggtggagctagaaaaaaaaaaaaaaaagcccttttcagtttgtgcactgtgtatggtccgtgtagattgatgcagattttctgaaatgaaatgtttgtttagacgagatcataccggtaaagcaggaatgacaaagcttgcttttctggtatgttctaggtgtattgtgacttttactgttatattaattgccaatataagtaaatatagattatatatgtatagtgtttcacaaagcttagacctttaccttccagccaccccacagtgcttgatatttcagagtcagtcattggttatacatgtgtagttccaaagcacataagctagaagaagaaatatttctaggagcactaccatctgttttcaacatgaaatgccacacacatagaactccaacaacatcaatttcattgcacagactgactgtagttaattttgtcacagaatctatggactgaatctaatgcttccaaaaatgttgtttgtttgcaaatatcaaacattgttatgcaagaaattattaattacaaaatgaagatttataccattgtggtttaagctgtactgaactaaatctgtggaatgcattgtgaactgtaaaagcaaagtatcaataaagcttatagacttaaaa

SEQ ID NO: 444063 - DNA, 2462 bp, Homo sapiens
ataggctaggtcgggactggggtgtgaatcggccgaaggacagtaggtccctcggctcagtcggcccagcccctctcagtcctccccaacccccacaaccgcccgcggctctgagacgcggccccggcggcggcggcagcagctgcagcatcatctccaccctccagccatggaagacctggaccagtctcctctggtctcgtcctcggacagcccaccccggccgcagcccgcgttcaagtaccagttcgtgagggagcccgaggacgaggaggaagaagaggaggaggaagaggaggacgaggacgaagacctggaggagctggaggtgctggagaggaagcccgccgccgggctgtccgcggccccagtgcccaccgcccctgccgccggcgcgcccctgatggacttcggaaatgacttcgtgccgccggcgccccggggacccctgccggccgctccccccgtcgccccggagcggcagccgtcttgggacccgagcccggtgtcgtcgaccgtgcccgcgccatccccgctgtctgctgccgcagtctcgccctccaagctccctgaggacgacgagcctccggcccggcctccccctcctcccccggccagcgtgagcccccaggcagagcccgtgtggaccccgccagccccggctcccgccgcgcccccctccaccccggccgcgcccaagcgcaggggctcctcgggctcagtggatgagaccctttttgctcttcctgctgcatctgagcctgtgatacgctcctctgcagaaaatatggacttgaaggagcagccaggtaacactatttcggctggtcaagaggatttcccatctgtcctgcttgaaactgctgcttctcttccttctctgtctcctctctcagccgcttctttcaaagaacatgaataccttgttgttgacctcctgtactggagagacattaagaagactggagtggtgtttggtgccagcctattcctgctgctttcattgacagtattcagcattgtgagcgtaacagcctacattgccttggccctgctctctgtgaccatcagctttaggatatacaagggtgtgatccaagctatccagaaatcagatgaaggccacccattcagggcatatctggaatctgaagttgctatatctgaggagttggttcagaagtacagtaattctgctcttggtcatgtgaactgcacgataaaggaactcaggcgcctcttcttagttgatgatttagttgattctctgaagtttgcagtgttgatgtgggtatttacctatgttggtgccttgtttaatggtctgacactactgattttggctctcatttcactcttcagtgttcctgttatttatgaacggcatcaggcacagatagatcattatctaggacttgcaaataagaatgttaaagatgctatggctaaaatccaagcaaaaatccctggattgaagcgcaaagctgaatgaaaacgcccaaaataattagtaggagttcatctttaaaggggatattcatttgattatacgggggagggtcagggaagaacgaaccttgacgttgcagtgcagtttcacagatcgttgttagatctttatttttagccatgcactgttgtgaggaaaaattacctgtcttgactgccatgtgttcatcatcttaagtattgtaagctgctatgtatggatttaaaccgtaatcatatctttttcctatctatctgaggcactggtggaataaaaaacctgtatattttactttgttgcagatagtcttgccgcatcttggcaagttgcagagatggtggagctagaaaaaaaaaaaaaaaagcccttttcagtttgtgcactgtgtatggtccgtgtagattgatgcagattttctgaaatgaaatgtttgtttagacgagatcataccggtaaagcaggaatgacaaagcttgcttttctggtatgttctaggtgtattgtgacttttactgttatattaattgccaatataagtaaatatagattatatatgtatagtgtttcacaaagcttagacctttaccttccagccaccccacagtgcttgatatttcagagtcagtcattggttatacatgtgtagttccaaagcacataagctagaagaagaaatatttctaggagcactaccatctgttttcaacatgaaatgccacacacatagaactccaacaacatcaatttcattgcacagactgactgtagttaattttgtcacagaatctatggactgaatctaatgcttccaaaaatgttgtttgtttgcaaatatcaaacattgttatgcaagaaattattaattacaaaatgaagatttataccattgtggtttaagctgtactgaactaaatctgtggaatgcattgtgaactgtaaaagcaaagtatcaataaagcttatagacttaaaa

SEQ ID NO: 444064 - DNA, 4891 bp, Homo sapiens
ataggctaggtcgggactggggtgtgaatcggccgaaggacagtaggtccctcggctcagtcggcccagcccctctcagtcctccccaacccccacaaccgcccgcggctctgagacgcggccccggcggcggcggcagcagctgcagcatcatctccaccctccagccatggaagacctggaccagtctcctctggtctcgtcctcggacagcccaccccggccgcagcccgcgttcaagtaccagttcgtgagggagcccgaggacgaggaggaagaagaggaggaggaagaggaggacgaggacgaagacctggaggagctggaggtgctggagaggaagcccgccgccgggctgtccgcggccccagtgcccaccgcccctgccgccggcgcgcccctgatggacttcggaaatgacttcgtgccgccggcgccccggggacccctgccggccgctccccccgtcgccccggagcggcagccgtcttgggacccgagcccggtgtcgtcgaccgtgcccgcgccatccccgctgtctgctgccgcagtctcgccctccaagctccctgaggacgacgagcctccggcccggcctccccctcctcccccggccagcgtgagcccccaggcagagcccgtgtggaccccgccagccccggctcccgccgcgcccccctccaccccggccgcgcccaagcgcaggggctcctcgggctcagtggatgagaccctttttgctcttcctgctgcatctgagcctgtgatacgctcctctgcagaaaatatggacttgaaggagcagccaggtaacactatttcggctggtcaagaggatttcccatctgtcctgcttgaaactgctgcttctcttccttctctgtctcctctctcagccgcttctttcaaagaacatgaataccttggtaatttgtcaacagtattacccactgaaggaacacttcaagaaaatgtcagtgaagcttctaaagaggtctcagagaaggcaaaaactctactcatagatagagatttaacagagttttcagaattagaatactcagaaatgggatcatcgttcagtgtctctccaaaagcagaatctgccgtaatagtagcaaatcctagggaagaaataatcgtgaaaaataaagatgaagaagagaagttagttagtaataacatccttcataatcaacaagagttacctacagctcttactaaattggttaaagaggatgaagttgtgtcttcagaaaaagcaaaagacagttttaatgaaaagagagttgcagtggaagctcctatgagggaggaatatgcagacttcaaaccatttgagcgagtatgggaagtgaaagatagtaaggaagatagtgatatgttggctgctggaggtaaaatcgagagcaacttggaaagtaaagtggataaaaaatgttttgcagatagccttgagcaaactaatcacgaaaaagatagtgagagtagtaatgatgatacttctttccccagtacgccagaaggtataaaggatcgttcaggagcatatatcacatgtgctccctttaacccagcagcaactgagagcattgcaacaaacatttttcctttgttaggagatcctacttcagaaaataagaccgatgaaaaaaaaatagaagaaaagaaggcccaaatagtaacagagaagaatactagcaccaaaacatcaaacccttttcttgtagcagcacaggattctgagacagattatgtcacaacagataatttaacaaaggtgactgaggaagtcgtggcaaacatgcctgaaggcctgactccagatttagtacaggaagcatgtgaaagtgaattgaatgaagttactggtacaaagattgcttatgaaacaaaaatggacttggttcaaacatcagaagttatgcaagagtcactctatcctgcagcacagctttgcccatcatttgaagagtcagaagctactccttcaccagttttgcctgacattgttatggaagcaccattgaattctgcagttcctagtgctggtgcttccgtgatacagcccagctcatcaccattagaagcttcttcagttaattatgaaagcataaaacatgagcctgaaaaccccccaccatatgaagaggccatgagtgtatcactaaaaaaagtatcaggaataaaggaagaaattaaagagcctgaaaatattaatgcagctcttcaagaaacagaagctccttatatatctattgcatgtgatttaattaaagaaacaaagctttctgctgaaccagctccggatttctctgattattcagaaatggcaaaagttgaacagccagtgcctgatcattctgagctagttgaagattcctcacctgattctgaaccagttgacttatttagtgatgattcaatacctgacgttccacaaaaacaagatgaaactgtgatgcttgtgaaagaaagtctcactgagacttcatttgagtcaatgatagaatatgaaaataaggaaaaactcagtgctttgccacctgagggaggaaagccatatttggaatcttttaagctcagtttagataacacaaaagataccctgttacctgatgaagtttcaacattgagcaaaaaggagaaaattcctttgcagatggaggagctcagtactgcagtttattcaaatgatgacttatttatttctaaggaagcacagataagagaaactgaaacgttttcagattcatctccaattgaaattatagatgagttccctacattgatcagttctaaaactgattcattttctaaattagccagggaatatactgacctagaagtatcccacaaaagtgaaattgctaatgccccggatggagctgggtcattgccttgcacagaattgccccatgacctttctttgaagaacatacaacccaaagttgaagagaaaatcagtttctcagatgacttttctaaaaatgggtctgctacatcaaaggtgctcttattgcctccagatgtttctgctttggccactcaagcagagatagagagcatagttaaacccaaagttcttgtgaaagaagctgagaaaaaacttccttccgatacagaaaaagaggacagatcaccatctgctatattttcagcagagctgagtaaaacttcagttgttgacctcctgtactggagagacattaagaagactggagtggtgtttggtgccagcctattcctgctgctttcattgacagtattcagcattgtgagcgtaacagcctacattgccttggccctgctctctgtgaccatcagctttaggatatacaagggtgtgatccaagctatccagaaatcagatgaaggccacccattcagggcatatctggaatctgaagttgctatatctgaggagttggttcagaagtacagtaattctgctcttggtcatgtgaactgcacgataaaggaactcaggcgcctcttcttagttgatgatttagttgattctctgaagtttgcagtgttgatgtgggtatttacctatgttggtgccttgtttaatggtctgacactactgattttggctctcatttcactcttcagtgttcctgttatttatgaacggcatcaggcacagatagatcattatctaggacttgcaaataagaatgttaaagatgctatggctaaaatccaagcaaaaatccctggattgaagcgcaaagctgaatgaaaacgcccaaaataattagtaggagttcatctttaaaggggatattcatttgattatacgggggagggtcagggaagaacgaaccttgacgttgcagtgcagtttcacagatcgttgttagatctttatttttagccatgcactgttgtgaggaaaaattacctgtcttgactgccatgtgttcatcatcttaagtattgtaagctgctatgtatggatttaaaccgtaatcatatctttttcctatctatctgaggcactggtggaataaaaaacctgtatattttactttgttgcagatagtcttgccgcatcttggcaagttgcagagatggtggagctagaaaaaaaaaaaaaaaagcccttttcagtttgtgcactgtgtatggtccgtgtagattgatgcagattttctgaaatgaaatgtttgtttagacgagatcataccggtaaagcaggaatgacaaagcttgcttttctggtatgttctaggtgtattgtgacttttactgttatattaattgccaatataagtaaatatagattatatatgtatagtgtttcacaaagcttagacctttaccttccagccaccccacagtgcttgatatttcagagtcagtcattggttatacatgtgtagttccaaagcacataagctagaagaagaaatatttctaggagcactaccatctgttttcaacatgaaatgccacacacatagaactccaacaacatcaatttcattgcacagactgactgtagttaattttgtcacagaatctatggactgaatctaatgcttccaaaaatgttgtttgtttgcaaatatcaaacattgttatgcaagaaattattaattacaaaatgaagatttataccattgtggtttaagctgtactgaactaaatctgtggaatgcattgtgaactgtaaaagcaaagtatcaataaagcttatagacttaaaaaaaaaaaaaggggggggttaaatatcccgagggccaacttagcgtaccgtttttgtcaagggcccaaggggcggttataaaggcggcggttaccgttctggaagccgggactggagaccccctgggtcatggcaccccattgctgaataaggtagtccaatggaattgataca

SEQ ID NO: 444065 - DNA, 4668 bp, Homo sapiens
ataggctaggtcgggactggggtgtgaatcggccgaaggacagtaggtccctcggctcagtcggcccagcccctctcagtcctccccaacccccacaaccgcccgcggctctgagacgcggccccggcggcggcggcagcagctgcagcatcatctccaccctccagccatggaagacctggaccagtctcctctggtctcgtcctcggacagcccaccccggccgcagcccgcgttcaagtaccagttcgtgagggagcccgaggacgaggaggaagaagaggaggaggaagaggaggacgaggacgaagacctggaggagctggaggtgctggagaggaagcccgccgccgggctgtccgcggccccagtgcccaccgcccctgccgccggcgcgcccctgatggacttcggaaatgacttcgtgccgccggcgccccggggacccctgccggccgctccccccgtcgccccggagcggcagccgtcttgggacccgagcccggtgtcgtcgaccgtgcccgcgccatccccgctgtctgctgccgcagtctcgccctccaagctccctgaggacgacgagcctccggcccggcctccccctcctcccccggccagcgtgagcccccaggcagagcccgtgtggaccccgccagccccggctcccgccgcgcccccctccaccccggccgcgcccaagcgcaggggctcctcgggctcagtggatgagaccctttttgctcttcctgctgcatctgagcctgtgatacgctcctctgcagaaaatatggacttgaaggagcagccaggtaacactatttcggctggtcaagaggatttcccatctgtcctgcttgaaactgctgcttctcttccttctctgtctcctctctcagccgcttctttcaaagaacatgaataccttggtaatttgtcaacagtattacccactgaaggaacacttcaagaaaatgtcagtgaagcttctaaagaggtctcagagaaggcaaaaactctactcatagatagagatttaacagagttttcagaattagaatactcagaaatgggatcatcgttcagtgtctctccaaaagcagaatctgccgtaatagtagcaaatcctagggaagaaataatcgtgaaaaataaagatgaagaagagaagttagttagtaataacatccttcataatcaacaagagttacctacagctcttactaaattggttaaagaggatgaagttgtgtcttcagaaaaagcaaaagacagttttaatgaaaagagagttgcagtggaagctcctatgagggaggaatatgcagacttcaaaccatttgagcgagtatgggaagtgaaagatagtaaggaagatagtgatatgttggctgctggaggtaaaatcgagagcaacttggaaagtaaagtggataaaaaatgttttgcagatagccttgagcaaactaatcacgaaaaagatagtgagagtagtaatgatgatacttctttccccagtacgccagaaggtataaaggatcgttcaggagcatatatcacatgtgctccctttaacccagcagcaactgagagcattgcaacaaacatttttcctttgttaggagatcctacttcagaaaataagaccgatgaaaaaaaaatagaagaaaagaaggcccaaatagtaacagagaagaatactagcaccaaaacatcaaacccttttcttgtagcagcacaggattctgagacagattatgtcacaacagataatttaacaaaggtgactgaggaagtcgtggcaaacatgcctgaaggcctgactccagatttagtacaggaagcatgtgaaagtgaattgaatgaagttactggtacaaagattgcttatgaaacaaaaatggacttggttcaaacatcagaagttatgcaagagtcactctatcctgcagcacagctttgcccatcatttgaagagtcagaagctactccttcaccagttttgcctgacattgttatggaagcaccattgaattctgcagttcctagtgctggtgcttccgtgatacagcccagctcatcaccattagaagcttcttcagttaattatgaaagcataaaacatgagcctgaaaaccccccaccatatgaagaggccatgagtgtatcactaaaaaaagtatcaggaataaaggaagaaattaaagagcctgaaaatattaatgcagctcttcaagaaacagaagctccttatatatctattgcatgtgatttaattaaagaaacaaagctttctgctgaaccagctccggatttctctgattattcagaaatggcaaaagttgaacagccagtgcctgatcattctgagctagttgaagattcctcacctgattctgaaccagttgacttatttagtgatgattcaatacctgacgttccacaaaaacaagatgaaactgtgatgcttgtgaaagaaagtctcactgagacttcatttgagtcaatgatagaatatgaaaataaggaaaaactcagtgctttgccacctgagggaggaaagccatatttggaatcttttaagctcagtttagataacacaaaagataccctgttacctgatgaagtttcaacattgagcaaaaaggagaaaattcctttgcagatggaggagctcagtactgcagtttattcaaatgatgacttatttatttctaaggaagcacagataagagaaactgaaacgttttcagattcatctccaattgaaattatagatgagttccctacattgatcagttctaaaactgattcattttctaaattagccagggaatatactgacctagaagtatcccacaaaagtgaaattgctaatgccccggatggagctgggtcattgccttgcacagaattgccccatgacctttctttgaagaacatacaacccaaagttgaagagaaaatcagtttctcagatgacttttctaaaaatgggtctgctacatcaaaggtgctcttattgcctccagatgtttctgctttggccactcaagcagagatagagagcatagttaaacccaaagttcttgtgaaagaagctgagaaaaaacttccttccgatacagaaaaagaggacagatcaccatctgctatattttcagcagagctgagtaaaacttcagttgttgacctcctgtactggagagacattaagaagactggagtggtgtttggtgccagcctattcctgctgctttcattgacagtattcagcattgtgagcgtaacagcctacattgccttggccctgctctctgtgaccatcagctttaggatatacaagggtgtgatccaagctatccagaaatcagatgaaggccacccattcagggcatatctggaatctgaagttgctatatctgaggagttggttcagaagtacagtaattctgctcttggtcatgtgaactgcacgataaaggaactcaggcgcctcttcttagttgatgatttagttgattctctgaagtttgcagtgttgatgtgggtatttacctatgttggtgccttgtttaatggtctgacactactgattttggctctcatttcactcttcagtgttcctgttatttatgaacggcatcaggcacagatagatcattatctaggacttgcaaataagaatgttaaagatgctatggctaaaatccaagcaaaaatccctggattgaagcgcaaagctgaatgaaaacgcccaaaataattagtaggagttcatctttaaaggggatattcatttgattatacgggggagggtcagggaagaacgaaccttgacgttgcagtgcagtttcacagatcgttgttagatctttatttttagccatgcactgttgtgaggaaaaattacctgtcttgactgccatgtgttcatcatcttaagtattgtaagctgctatgtatggatttaaaccgtaatcatatctttttcctatctatctgaggcactggtggaataaaaaacctgtatattttactttgttgcagatagtcttgccgcatcttggcaagttgcagagatggtggagctagaaaaaaaaaaaaaaaagccctgaaatgaaatgtttgtttagacgagatcataccggtaaagcaggaatgacaaagcttgcttttctggtatgttctaggtgtattgtgacttttactgttatattaattgccaatataagtaaatatagattatatatgtatagtgtttcacaaagcttagacctttaccttccagccaccccacagtgcttgatatttcagagtcagtcattggttatacatgtgtagttccaaagcacataagctagaagaagaaatatttctaggagcactaccatctgttttcaacatgaaatgccacacacatagaactccaacaacatcaatttcattgcacagactgactgtagttaattttgtcacagaatctatggactgaatctaatgcttccaaaaatgttgtttgtttgcaaatatcaaacattgttatgcaagaaattattaattacaaaatgaagatttataccattgtggtttaagctgtactgaactaaatctgtggaatgcattgtgaactgtaaaagcaaagtatcaataaagcttatagacttaaaa

SEQ ID NO: 444066 - DNA, 4648 bp, Homo sapiens
ataggctaggtcgggactggggtgtgaatcggccgaaggacagtaggtccctcggctcagtcggcccagcccctctcagtcctccccaacccccacaaccgcccgcggctctgagacgcggccccggcggcggcggcagcagctgcagcatcatctccaccctccagccatggaagacctggaccagtctcctctggtctcgtcctcggacagcccaccccggccgcagcccgcgttcaagtaccagttcgtgagggagcccgaggacgaggaggaagaagaggaggaggaagaggaggacgaggacgaagacctggaggagctggaggtgctggagaggaagcccgccgccgggctgtccgcggccccagtgcccaccgcccctgccgccggcgcgcccctgatggacttcggaaatgacttcgtgccgccggcgccccggggacccctgccggccgctccccccgtcgccccggagcggcagccgtcttgggacccgagcccggtgtcgtcgaccgtgcccgcgccatccccgctgtctgctgccgcagtctcgccctccaagctccctgaggacgacgagcctccggcccggcctccccctcctcccccggccagcgtgagcccccaggcagagcccgtgtggaccccgccagccccggctcccgccgcgcccccctccaccccggccgcgcccaagcgcaggggctcctcgggctcagtggatgagaccctttttgctcttcctgctgcatctgagcctgtgatacgctcctctgcagaaaatatggacttgaaggagcagccaggtaacactatttcggctggtcaagaggatttcccatctgtcctgcttgaaactgctgcttctcttccttctctgtctcctctctcagccgcttctttcaaagaacatgaataccttggtaatttgtcaacagtattacccactgaaggaacacttcaagaaaatgtcagtgaagcttctaaagaggtctcagagaaggcaaaaactctactcatagatagagatttaacagagttttcagaattagaatactcagaaatgggatcatcgttcagtgtctctccaaaagcagaatctgccgtaatagtagcaaatcctagggaagaaataatcgtgaaaaataaagatgaagaagagaagttagttagtaataacatccttcataatcaacaagagttacctacagctcttactaaattggttaaagaggatgaagttgtgtcttcagaaaaagcaaaagacagttttaatgaaaagagagttgcagtggaagctcctatgagggaggaatatgcagacttcaaaccatttgagcgagtatgggaagtgaaagatagtaaggaagatagtgatatgttggctgctggaggtaaaatcgagagcaacttggaaagtaaagtggataaaaaatgttttgcagatagccttgagcaaactaatcacgaaaaagatagtgagagtagtaatgatgatacttctttccccagtacgccagaaggtataaaggatcgttcaggagcatatatcacatgtgctccctttaacccagcagcaactgagagcattgcaacaaacatttttcctttgttaggagatcctacttcagaaaataagaccgatgaaaaaaaaatagaagaaaagaaggcccaaatagtaacagagaagaatactagcaccaaaacatcaaacccttttcttgtagcagcacaggattctgagacagattatgtcacaacagataatttaacaaaggtgactgaggaagtcgtggcaaacatgcctgaaggcctgactccagatttagtacaggaagcatgtgaaagtgaattgaatgaagttactggtacaaagattgcttatgaaacaaaaatggacttggttcaaacatcagaagttatgcaagagtcactctatcctgcagcacagctttgcccatcatttgaagagtcagaagctactccttcaccagttttgcctgacattgttatggaagcaccattgaattctgcagttcctagtgctggtgcttccgtgatacagcccagctcatcaccattagaagcttcttcagttaattatgaaagcataaaacatgagcctgaaaaccccccaccatatgaagaggccatgagtgtatcactaaaaaaagtatcaggaataaaggaagaaattaaagagcctgaaaatattaatgcagctcttcaagaaacagaagctccttatatatctattgcatgtgatttaattaaagaaacaaagctttctgctgaaccagctccggatttctctgattattcagaaatggcaaaagttgaacagccagtgcctgatcattctgagctagttgaagattcctcacctgattctgaaccagttgacttatttagtgatgattcaatacctgacgttccacaaaaacaagatgaaactgtgatgcttgtgaaagaaagtctcactgagacttcatttgagtcaatgatagaatatgaaaataaggaaaaactcagtgctttgccacctgagggaggaaagccatatttggaatcttttaagctcagtttagataacacaaaagataccctgttacctgatgaagtttcaacattgagcaaaaaggagaaaattcctttgcagatggaggagctcagtactgcagtttattcaaatgatgacttatttatttctaaggaagcacagataagagaaactgaaacgttttcagattcatctccaattgaaattatagatgagttccctacattgatcagttctaaaactgattcattttctaaattagccagggaatatactgacctagaagtatcccacaaaagtgaaattgctaatgccccggatggagctgggtcattgccttgcacagaattgccccatgacctttctttgaagaacatacaacccaaagttgaagagaaaatcagtttctcagatgacttttctaaaaatgggtctgctacatcaaaggtgctcttattgcctccagatgtttctgctttggccactcaagcagagatagagagcatagttaaacccaaagttcttgtgaaagaagctgagaaaaaacttccttccgatacagaaaaagaggacagatcaccatctgctatattttcagcagagctgagtaaaacttcagttgttgacctcctgtactggagagacattaagaagactggagtggtgtttggtgccagcctattcctgctgctttcattgacagtattcagcattgtgagcgtaacagcctacattgccttggccctgctctctgtgaccatcagctttaggatatacaagggtgtgatccaagctatccagaaatcagatgaaggccacccattcagggcatatctggaatctgaagttgctatatctgaggagttggttcagaagtacagtaattctgctcttggtcatgtgaactgcacgataaaggaactcaggcgcctcttcttagttgatgatttagttgattctctgaagctctcatttcactcttcagtgttcctgttatttatgaacggcatcaggcacagatagatcattatctaggacttgcaaataagaatgttaaagatgctatggctaaaatccaagcaaaaatccctggattgaagcgcaaagctgaatgaaaacgcccaaaataattagtaggagttcatctttaaaggggatattcatttgattatacgggggagggtcagggaagaacgaaccttgacgttgcagtgcagtttcacagatcgttgttagatctttatttttagccatgcactgttgtgaggaaaaattacctgtcttgactgccatgtgttcatcatcttaagtattgtaagctgctatgtatggatttaaaccgtaatcatatctttttcctatctatctgaggcactggtggaataaaaaacctgtatattttactttgttgcagatagtcttgccgcatcttggcaagttgcagagatggtggagctagaaaaaaaaaaaaaaaagcccttttcagtttgtgcactgtgtatggtccgtgtagattgatgcagattttctgaaatgaaatgtttgtttagacgagatcataccggtaaagcaggaatgacaaagcttgcttttctggtatgttctaggtgtattgtgacttttactgttatattaattgccaatataagtaaatatagattatatatgtatagtgtttcacaaagcttagacctttaccttccagccaccccacagtgcttgatatttcagagtcagtcattggttatacatgtgtagttccaaagcacataagctagaagaagaaatatttctaggagcactaccatctgttttcaacatgaaatgccacacacatagaactccaacaacatcaatttcattgcacagactgactgtagttaattttgtcacagaatctatggactgaatctaatgcttccaaaaatgttgtttgtttgcaaatatcaaacattgttatgcaagaaattattaattacaaaatgaagatttataccattgtggtttaagctgtactgaactaaatctgtggaatgcattgtgaactgtaaaagcaaagtatcaataaagcttatagacttaaaa

SEQ ID NO: 444067 - DNA, 2176 bp, Homo sapiens
ataggctaggtcgggactggggtgtgaatcggccgaaggacagtaggtccctcggctcagtcggcccagcccctctcagtcctccccaacccccacaaccgcccgcggctctgagacgcggccccggcggcggcggcagcagctgcagcatcatctccaccctccagccatggaagacctggaccagtctcctctggtctcgtcctcggacagcccaccccggccgcagcccgcgttcaagtaccagttcgtgagggagcccgaggacgaggaggaagaagaggaggaggaagaggaggacgaggacgaagacctggaggagctggaggtgctggagaggaagcccgccgccgggctgtccgcggccccagtgcccaccgcccctgccgccggcgcgcccctgatggacttcggaaatgacttcgtgccgccggcgccccggggacccctgccggccgctccccccgtcgccccggagcggcagccgtcttgggacccgagcccggtgtcgtcgaccgtgcccgcgccatccccgctgtctgctgccgcagtctcgccctccaagctccctgaggacgacgagcctccggcccggcctccccctcctcccccggccagcgtgagcccccaggcagagcccgtgtggaccccgccagccccggctcccgccgcgcccccctccaccccggccgcgcccaagcgcaggggctcctcgggctcagtggttgttgacctcctgtactggagagacattaagaagactggagtggtgtttggtgccagcctattcctgctgctttcattgacagtattcagcattgtgagcgtaacagcctacattgccttggccctgctctctgtgaccatcagctttaggatatacaagggtgtgatccaagctatccagaaatcagatgaaggccacccattcagggcatatctggaatctgaagttgctatatctgaggagttggttcagaagtacagtaattctgctcttggtcatgtgaactgcacgataaaggaactcaggcgcctcttcttagttgatgatttagttgattctctgaagtttgcagtgttgatgtgggtatttacctatgttggtgccttgtttaatggtctgacactactgattttggctctcatttcactcttcagtgttcctgttatttatgaacggcatcaggcacagatagatcattatctaggacttgcaaataagaatgttaaagatgctatggctaaaatccaagcaaaaatccctggattgaagcgcaaagctgaatgaaaacgcccaaaataattagtaggagttcatctttaaaggggatattcatttgattatacgggggagggtcagggaagaacgaaccttgacgttgcagtgcagtttcacagatcgttgttagatctttatttttagccatgcactgttgtgaggaaaaattacctgtcttgactgccatgtgttcatcatcttaagtattgtaagctgctatgtatggatttaaaccgtaatcatatctttttcctatctatctgaggcactggtggaataaaaaacctgtatattttactttgttgcagatagtcttgccgcatcttggcaagttgcagagatggtggagctagaaaaaaaaaaaaaaaagcccttttcagtttgtgcactgtgtatggtccgtgtagattgatgcagattttctgaaatgaaatgtttgtttagacgagatcataccggtaaagcaggaatgacaaagatagtgtttcacaaagcttagacctttaccttccagccaccccacagtgcttgatatttcagagtcagtcattggttatacatgtgtagttccaaagcacataagctagaagaagaaatatttctaggagcactaccatctgttttcaacatgaaatgccacacacatagaactccaacaacatcaatttcattgcacagactgactgtagttaattttgtcacagaatctatggactgaatctaatgcttccaaaaatgttgtttgtttgcaaatatcaaacattgttatgcaagaaattattaattacaaaatgaagatttataccattgtggtttaagctgtactgaactaaatctgtggaatgcattgtgaactgtaaaagcaaagtatcaataaagcttatagacttaaaa

SEQ ID NO: 444068 - DNA, 4733 bp, Homo sapiens
  misc_feature (4307)..(4307): n is a, c, g, or t
  misc_feature (4310)..(4310): n is a, c, g, or t
  misc_feature (4322)..(4322): n is a, c, g, or t
  misc_feature (4333)..(4333): n is a, c, g, or t
  misc_feature (4340)..(4340): n is a, c, g, or t
  misc_feature (4346)..(4346): n is a, c, g, or t
  misc_feature (4357)..(4357): n is a, c, g, or t
  misc_feature (4362)..(4362): n is a, c, g, or t
  misc_feature (4393)..(4393): n is a, c, g, or t
  misc_feature (4401)..(4401): n is a, c, g, or t
  misc_feature (4403)..(4404): n is a, c, g, or t
  misc_feature (4407)..(4408): n is a, c, g, or t
  misc_feature (4419)..(4419): n is a, c, g, or t
  misc_feature (4431)..(4433): n is a, c, g, or t
  misc_feature (4453)..(4453): n is a, c, g, or t
  misc_feature (4459)..(4459): n is a, c, g, or t
  misc_feature (4470)..(4470): n is a, c, g, or t
  misc_feature (4475)..(4475): n is a, c, g, or t
  misc_feature (4486)..(4486): n is a, c, g, or t
  misc_feature (4492)..(4492): n is a, c, g, or t
  misc_feature (4495)..(4495): n is a, c, g, or t
  misc_feature (4498)..(4499): n is a, c, g, or t
  misc_feature (4503)..(4503): n is a, c, g, or t
  misc_feature (4521)..(4521): n is a, c, g, or t
  misc_feature (4531)..(4531): n is a, c, g, or t
  misc_feature (4535)..(4535): n is a, c, g, or t
  misc_feature (4548)..(4548): n is a, c, g, or t
  misc_feature (4555)..(4555): n is a, c, g, or t
ataggctaggtcgggactggggtgtgaatcggccgaaggacagtaggtccctcggctcagtcggcccagcccctctcagtcctccccaacccccacaaccgcccgcggctctgagacgcggccccggcggcggcggcagcagctgcagcatcatctccaccctccagccatggaagacctggaccagtctcctctggtctcgtcctcggacagcccaccccggccgcagcccgcgttcaagtaccagttcgtgagggagcccgaggacgaggaggaagaagaggaggaggaagaggaggacgaggacgaagacctggaggagctggaggtgctggagaggaagcccgccgccgggctgtccgcggccccagtgcccaccgcccctgccgccggcgcgcccctgatggacttcggaaatgacttcgtgccgccggcgccccggggacccctgccggccgctccccccgtcgccccggagcggcagccgtcttgggacccgagcccggtgtcgtcgaccgtgcccgcgccatccccgctgtctgctgccgcagtctcgccctccaagctccctgaggacgacgagcctccggcccggcctccccctcctcccccggccagcgtgagcccccaggcagagcccgtgtggaccccgccagccccggctcccgccgcgcccccctccaccccggccgcgcccaagcgcaggggctcctcgggctcagtggatgagaccctttttgctcttcctgctgcatctgagcctgtgatacgctcctctgcagaaaatatggacttgaaggagcagccaggtaacactatttcggctggtcaagaggatttcccatctgtcctgcttgaaactgctgcttctcttccttctctgtctcctctctcagccgcttctttcaaagaacatgaataccttggtaatttgtcaacagtattacccactgaaggaacacttcaagaaaatgtcagtgaagcttctaaagaggtctcagagaaggcaaaaactctactcatagatagagatttaacagagttttcagaattagaatactcagaaatgggatcatcgttcagtgtctctccaaaagcagaatctgccgtaatagtagcaaatcctagggaagaaataatcgtgaaaaataaagatgaagaagagaagttagttagtaataacatccttcataatcaacaagagttacctacagctcttactaaattggttaaagaggatgaagttgtgtcttcagaaaaagcaaaagacagttttaatgaaaagagagttgcagtggaagctcctatgagggaggaatatgcagacttcaaaccatttgagcgagtatgggaagtgaaagatagtaaggaagatagtgatatgttggctgctggaggtaaaatcgagagcaacttggaaagtaaagtggataaaaaatgttttgcagatagccttgagcaaactaatcacgaaaaagatagtgagagtagtaatgatgatacttctttccccagtacgccagaaggtataaaggatcgttcaggagcatatatcacatgtgctccctttaacccagcagcaactgagagcattgcaacaaacatttttcctttgttaggagatcctacttcagaaaataagaccgatgaaaaaaaaatagaagaaaagaaggcccaaatagtaacagagaagaatactagcaccaaaacatcaaacccttttcttgtagcagcacaggattctgagacagattatgtcacaacagataatttaacaaaggtgactgaggaagtcgtggcaaacatgcctgaaggcctgactccagatttagtacaggaagcatgtgaaagtgaattgaatgaagttactggtacaaagattgcttatgaaacaaaaatggacttggttcaaacatcagaagttatgcaagagtcactctatcctgcagcacagctttgcccatcatttgaagagtcagaagctactccttcaccagttttgcctgacattgttatggaagcaccattgaattctgcagttcctagtgctggtgcttccgtgatacagcccagctcatcaccattagaagcttcttcagttaattatgaaagcataaaacatgagcctgaaaaccccccaccatatgaagaggccatgagtgtatcactaaaaaaagtatcaggaataaaggaagaaattaaagagcctgaaaatattaatgcagctcttcaagaaacagaagctccttatatatctattgcatgtgatttaattaaagaaacaaagctttctgctgaaccagctccggatttctctgattattcagaaatggcaaaagttgaacagccagtgcctgatcattctgagctagttgaagattcctcacctgattctgaaccagttgacttatttagtgatgattcaatacctgacgttccacaaaaacaagatgaaactgtgatgcttgtgaaagaaagtctcactgagacttcatttgagtcaatgatagaatatgaaaataaggaaaaactcagtgctttgccacctgagggaggaaagccatatttggaatcttttaagctcagtttagataacacaaaagataccctgttacctgatgaagtttcaacattgagcaaaaaggagaaaattcctttgcagatggaggagctcagtactgcagtttattcaaatgatgacttatttatttctaaggaagcacagataagagaaactgaaacgttttcagattcatctccaattgaaattatagatgagttccctacattgatcagttctaaaactgattcattttctaaattagccagggaatatactgacctagaagtatcccacaaaagtgaaattgctaatgccccggatggagctgggtcattgccttgcacagaattgccccatgacctttctttgaagaacatacaacccaaagttgaagagaaaatcagtttctcagatgacttttctaaaaatgggtctgctacatcaaaggtgctcttattgcctccagatgtttctgctttggccactcaagcagagatagagagcatagttaaacccaaagttcttgtgaaagaagctgagaaaaaacttccttccgatacagaaaaagaggacagatcaccatctgctatattttcagcagagctgagtaaaacttcagttgttgacctcctgtactggagagacattaagaagactggagtggtgtttggtgccagcctattcctgctgctttcattgacagtattcagcattgtgagcgtaacagcctacattgccttggccctgctctctgtgaccatcagctttaggatatacaagggtgtgatccaagctatccagaaatcagatgaaggccacccattcagggcatatctggaatctgaagttgctatatctgaggagttggttcagaagtacagtaattctgctcttggtcatgtgaactgcacgataaaggaactcaggcgcctcttcttagttgatgatttagttgattctctgaagtttgcagtgttgatgtgggtatttacctatgttggtgccttgtttaatggtctgacactactgattttggctctcatttcactcttcagtgttcctgttatttatgaacggcatcaggcacagatagatcattatctaggacttgcaaataagaatgttaaagatgctatggctaaaatccaagcaaaaatccctggattgaagcgcaaagctgaatgaaaacgcccaaaataattagtaggagttcatctttaaaggggatattcatttgattatacgggggagggtcagggaagaacgaaccttgacgttgcagtgcagtttcacagatcgttgttagatctttatttttagccatgcactgttgtgaggaaaaattacctgtcttgactgccatgtgttcatcatcttaagtattgtaagctgctatgtatggatttaaaccgtaatcatatctttttcctatctatctgaggcactggtggaataaaaaacctgtatattttactttgttgcagatagtcttgccgcatcttggcaagttgcagagatggtggagctagaaaaaaaaaaaaaaaagcccttttcagtttgtgcactgtgtatggtccgtgtagattgatgcagattttctgaaatgaaatgtttgtttagacgagatcataccggtaaagcaggaatgacaaagcttgcttttctggtatgttctaggtgtattgtgacttttactgttatattaattgccaatataagtaaatatagattatatatgtaaaanaanaaaaaagaaaantgaaccacaanacctagncccccnccccccacccnccccncagcccccaacaacccaaacccacccaccgncaacaccncnncanncccaaagcacnaaagccagaagnnnaaacacccccaggagcaccnccatcngtttacaacangaaancccacacacanagaacnccnacnncacnaattgcatggcacagacngggggtaggngatngcgtgagcggggnggagggncaatctaatgcttccaaaaatgttgtttgtttgcaaatatcaaacattgttatgcaagaaattattaattacaaaatgaagatttataccattgtggtttaagctgtactgaactaaatctgtggaatgcattgtgaactgtaaaagcaaagtatcaataaagcttatagacttaaaa

SEQ ID NO: 444069 - DNA, 4601 bp, Homo sapiens
ataggctaggtcgggactggggtgtgaatcggccgaaggacagtaggtccctcggctcagtcggcccagcccctctcagtcctccccaacccccacaaccgcccgcggctctgagacgcggccccggcggcggcggcagcagctgcagcatcatctccaccctccagccatggaagacctggaccagtctcctctggtctcgtcctcggacagcccaccccggccgcagcccgcgttcaagtaccagttcgtgagggagcccgaggacgaggaggaagaagaggaggaggaagaggaggacgaggacgaagacctggaggagctggaggtgctggagaggaagcccgccgccgggctgtccgcggccccagtgcccaccgcccctgccgccggcgcgcccctgatggacttcggaaatgacttcgtgccgccggcgccccggggacccctgccggccgctccccccgtcgccccggagcggcagccgtcttgggacccgagcccggtgtcgtcgaccgtgcccgcgccatccccgctgtctgctgccgcagtctcgccctccaagctccctgaggacgacgagcctccggcccggcctccccctcctcccccggccagcgtgagcccccaggcagagcccgtgtggaccccgccagccccggctcccgccgcgcccccctccaccccggccgcgcccaagcgcaggggctcctcgggctcagtggatgagaccctttttgctcttcctgctgcatctgagcctgtgatacgctcctctgcagaaaatatggacttgaaggagcagccaggtaacactatttcggctggtcaagaggatttcccatctgtcctgcttgaaactgctgcttctcttccttctctgtctcctctctcagccgcttctttcaaagaacatgaataccttggtaatttgtcaacagtattacccactgaaggaacacttcaagaaaatgtcagtgaagcttctaaagaggtctcagagaaggcaaaaactctactcatagatagagatttaacagagttttcagaattagaatactcagaaatgggatcatcgttcagtgtctctccaaaagcagaatctgccgtaatagtagcaaatcctagggaagaaataatcgtgaaaaataaagatgaagaagagaagttagttagtaataacatccttcataatcaacaagagttacctacagctcttactaaattggttaaagaggatgaagttgtgtcttcagaaaaagcaaaagacagttttaatgaaaagagagttgcagtggaagctcctatgagggaggaatatgcagacttcaaaccatttgagcgagtatgggaagtgaaagatagtaaggaagatagtgatatgttggctgctggaggtaaaatcgagagcaacttggaaagtaaagtggataaaaaatgttttgcagatagccttgagcaaactaatcacgaaaaagatagtgagagtagtaatgatgatacttctttccccagtacgccagaaggtataaaggatcgttcaggagcatatatcacatgtgctccctttaacccagcagcaactgagagcattgcaacaaacatttttcctttgttaggagatcctacttcagaaaataagaccgatgaaaaaaaaatagaagaaaagaaggcccaaatagtaacagagaagaatactagcaccaaaacatcaaacccttttcttgtagcagcacaggattctgagacagattatgtcacaacagataatttaacaaaggtgactgaggaagtcgtggcaaacatgcctgaaggcctgactccagatttagtacaggaagcatgtgaaagtgaattgaatgaagttactggtacaaagattgcttatgaaacaaaaatggacttggttcaaacatcagaagttatgcaagagtcactctatcctgcagcacagctttgcccatcatttgaagagtcagaagctactccttcaccagttttgcctgacattgttatggaagcaccattgaattctgcagttcctagtgctggtgcttccgtgatacagcccagctcatcaccattagaagcttcttcagttaattatgaaagcataaaacatgagcctgaaaaccccccaccatatgaagaggccatgagtgtatcactaaaaaaagtatcaggaataaaggaagaaattaaagagcctgaaaatattaatgcagctcttcaagaaacagaagctccttatatatctattgcatgtgatttaattaaagaaacaaagctttctgctgaaccagctccggatttctctgattattcagaaatggcaaaagttgaacagccagtgcctgatcattctgagctagttgaagattcctcacctgattctgaaccagttgacttatttagtgatgattcaatacctgacgttccacaaaaacaagatgaaactgtgatgcttgtgaaagaaagtctcactgagacttcatttgagtcaatgatagaatatgaaaataaggaaaaactcagtgctttgccacctgagggaggaaagccatatttggaatcttttaagctcagtttagataacacaaaagataccctgttacctgatgaagtttcaacattgagcaaaaaggagaaaattcctttgcagatggaggagctcagtactgcagtttattcaaatgatgacttatttatttctaaggaagcacagataagagaaactgaaacgttttcagattcatctccaattgaaattatagatgagttccctacattgatcagttctaaaactgattcattttctaaattagccagggaatatactgacctagaagtatcccacaaaagtgaaattgctaatgccccggatggagctgggtcattgccttgcacagaattgccccatgacctttctttgaagaacatacaacccaaagttgaagagaaaatcagtttctcagatgacttttctaaaaatgggtctgctacatcaaaggtgctcttattgcctccagatgtttctgctttggccactcaagcagagatagagagcatagttaaacccaaagttcttgtgaaagaagctgagaaaaaacttccttccgatacagaaaaagaggacagatcaccatctgctatattttcagcagagctgagtaaaacttcagttgttgacctcctgtactggagagacattaagaagactggagtggtgtttggtgccagcctattcctgctgctttcattgacagtattcagcattgtgagcgtaacagcctacattgccttggccctgctctctgtgaccatcagctttaggatatacaagggtgtgatccaagctatccagaaatcagatgaaggccacccattcagggcatatctggaatctgaagttgctatatctgaggagttggttcagaagtacagtaattctgctcttggtcatgtgaactgcacgataaaggaactcaggcgcctcttcttagttgatgatttagttgattctctgaaggcacagatagatcattatctaggacttgcaaataagaatgttaaagatgctatggctaaaatccaagcaaaaatccctggattgaagcgcaaagctgaatgaaaacgcccaaaataattagtaggagttcatctttaaaggggatattcatttgattatacgggggagggtcagggaagaacgaaccttgacgttgcagtgcagtttcacagatcgttgttagatctttatttttagccatgcactgttgtgaggaaaaattacctgtcttgactgccatgtgttcatcatcttaagtattgtaagctgctatgtatggatttaaaccgtaatcatatctttttcctatctatctgaggcactggtggaataaaaaacctgtatattttactttgttgcagatagtcttgccgcatcttggcaagttgcagagatggtggagctagaaaaaaaaaaaaaaaagcccttttcagtttgtgcactgtgtatggtccgtgtagattgatgcagattttctgaaatgaaatgtttgtttagacgagatcataccggtaaagcaggaatgacaaagcttgcttttctggtatgttctaggtgtattgtgacttttactgttatattaattgccaatataagtaaatatagattatatatgtatagtgtttcacaaagcttagacctttaccttccagccaccccacagtgcttgatatttcagagtcagtcattggttatacatgtgtagttccaaagcacataagctagaagaagaaatatttctaggagcactaccatctgttttcaacatgaaatgccacacacatagaactccaacaacatcaatttcattgcacagactgactgtagttaattttgtcacagaatctatggactgaatctaatgcttccaaaaatgttgtttgtttgcaaatatcaaacattgttatgcaagaaattattaattacaaaatgaagatttataccattgtggtttaagctgtactgaactaaatctgtggaatgcattgtgaactgtaaaagcaaagtatcaataaagcttatagacttaaaa

SEQ ID NO: 444070 - DNA, 5082 bp, Homo sapiens
ataggctaggtcgggactggggtgtgaatcggccgaaggacagtaggtccctcggctcagtcggcccagcccctctcagtcctccccaacccccacaaccgcccgcggctctgagacgcggccccggcggcggcggcagcagctgcagcatcatctccaccctccagccatggaagacctggaccagtctcctctggtctcgtcctcggacagcccaccccggccgcagcccgcgttcaagtaccagttcgtgagggagcccgaggacgaggaggaagaagaggaggaggaagaggaggacgaggacgaagacctggaggagctggaggtgctggagaggaagcccgccgccgggctgtccgcggccccagtgcccaccgcccctgccgccggcgcgcccctgatggacttcggaaatgacttcgtgccgccggcgccccggggacccctgccggccgctccccccgtcgccccggagcggcagccgtcttgggacccgagcccggtgtcgtcgaccgtgcccgcgccatccccgctgtctgctgccgcagtctcgccctccaagctccctgaggacgacgagcctccggcccggcctccccctcctcccccggccagcgtgagcccccaggcagagcccgtgtggaccccgccagccccggctcccgccgcgcccccctccaccccggccgcgcccaagcgcaggggctcctcgggctcagtggatgagaccctttttgctcttcctgctgcatctgagcctgtgatacgctcctctgcagaaaatatggacttgaaggagcagccaggtaacactatttcggctggtcaagaggatttcccatctgtcctgcttgaaactgctgcttctcttccttctctgtctcctctctcagccgcttctttcaaagaacatgaataccttggtaatttgtcaacagtattacccactgaaggaacacttcaagaaaatgtcagtgaagcttctaaagaggtctcagagaaggcaaaaactctactcatagatagagatttaacagagttttcagaattagaatactcagaaatgggatcatcgttcagtgtctctccaaaagcagaatctgccgtaatagtagcaaatcctagggaagaaataatcgtgaaaaataaagatgaagaagagaagttagttagtaataacatccttcataatcaacaagagttacctacagctcttactaaattggttaaagaggatgaagttgtgtcttcagaaaaagcaaaagacagttttaatgaaaagagagttgcagtggaagctcctatgagggaggaatatgcagacttcaaaccatttgagcgagtatgggaagtgaaagatagtaaggaagatagtgatatgttggctgctggaggtaaaatcgagagcaacttggaaagtaaagtggataaaaaatgttttgcagatagccttgagcaaactaatcacgaaaaagatagtgagagtagtaatgatgatacttctttccccagtacgccagaaggtataaaggatcgttcaggagcatatatcacatgtgctccctttaacccagcagcaactgagagcattgcaacaaacatttttcctttgttaggagatcctacttcagaaaataagaccgatgaaaaaaaaatagaagaaaagaaggcccaaatagtaacagagaagaatactagcaccaaaacatcaaacccttttcttgtagcagcacaggattctgagacagattatgtcacaacagataatttaacaaaggtgactgaggaagtcgtggcaaacatgcctgaaggcctgactccagatttagtacaggaagcatgtgaaagtgaattgaatgaagttactggtacaaagattgcttatgaaacaaaaatggacttggttcaaacatcagaagttatgcaagagtcactctatcctgcagcacagctttgcccatcatttgaagagtcagaagctactccttcaccagttttgcctgacattgttatggaagcaccattgaattctgcagttcctagtgctggtgcttccgtgatacagcccagctcatcaccattagaagcttcttcagttaattatgaaagcataaaacatgagcctgaaaaccccccaccatatgaagaggccatgagtgtatcactaaaaaaagtatcaggaataaaggaagaaattaaagagcctgaaaatattaatgcagctcttcaagaaacagaagctccttatatatctattgcatgtgatttaattaaagaaacaaagctttctgctgaaccagctccggatttctctgattattcagaaatggcaaaagttgaacagccagtgcctgatcattctgagctagttgaagattcctcacctgattctgaaccagttgacttatttagtgatgattcaatacctgacgttccacaaaaacaagatgaaactgtgatgcttgtgaaagaaagtctcactgagacttcatttgagtcaatgatagaatatgaaaataaggaaaaactcagtgctttgccacctgagggaggaaagccatatttggaatcttttaagctcagtttagataacacaaaagataccctgttacctgatgaagtttcaacattgagcaaaaaggagaaaattcctttgcagatggaggagctcagtactgcagtttattcaaatgatgacttatttatttctaaggaagcacagataagagaaactgaaacgttttcagattcatctccaattgaaattatagatgagttccctacattgatcagttctaaaactgattcattttctaaattagccagggaatatactgacctagaagtatcccacaaaagtgaaattgctaatgccccggatggagctgggtcattgccttgcacagaattgccccatgacctttctttgaagaacatacaacccaaagttgaagagaaaatcagtttctcagatgacttttctaaaaatgggtctgctacatcaaaggtgctcttattgcctccagatgtttctgctttggccactcaagcagagatagagagcatagttaaacccaaagttcttgtgaaagaagctgagaaaaaacttccttccgatacagaaaaagaggacagatcaccatctgctatattttcagcagagctgagtaaaacttcagttgttgacctcctgtactggagagacattaagaagactggagtggtgtttggtgccagcctattcctgctgctttcattgacagtattcagcattgtgagcgtaacagcctacattgccttggccctgctctctgtgaccatcagctttaggatatacaagggtgtgatccaagctatccagaaatcagatgaaggccacccattcagggcatatctggaatctgaagttgctatatctgaggagttggttcagaagtacagtaattctgctcttggtcatgtgaactgcacgataaaggaactcaggcgcctcttcttagttgatgatttagttgattctctgaagtttgcagtgttgatgtgggtatttacctatgttggtgccttgtttaatggtctgacactactgattttggctctcatttcactcttcagtgttcctgttatttatgaacggcatcaggcacagatagatcattatctaggacttgcaaataagaatgttaaagatgctatggctaagtaagtatttaaaatctgcagtgtttttactaggataaggtgtgctggattgtgagaacagtattttcatattgcaggcataatgagtaacaaatctctatcagaccttaagtgtgacttcagagttgccaaaagattgtttttctaacatttggaccattcgtttctgggtttattatgtgtttaaggctttgtttaaatctaattcatgaggccaaggtggcaaaattatagcttagaattaggcagctttaaggatttcatttattgtattagctgaataacatacaagtagttcttggaagatggtattttaagcagcagcaaacaaaactgatatttacattgactttttcattttcagaatccaagcaaaaatccctggattgaagcgcaaagctgaatgaaaacgcccaaaataattagtaggagttcatctttaaaggggatattcatttgattatacgggggagggtcagggaagaacgaaccttgacgttgcagtgcagtttcacagatcgttgttagatctttatttttagccatgcactgttgtgaggaaaaattacctgtcttgactgccatgtgttcatcatcttaagtattgtaagctgctatgtatggatttaaaccgtaatcatatctttttcctatctatctgaggcactggtggaataaaaaacctgtatattttactttgttgcagatagtcttgccgcatcttggcaagttgcagagatggtggagctagaaaaaaaaaaaaaaaagcccttttcagtttgtgcactgtgtatggtccgtgtagattgatgcagattttctgaaatgaaatgtttgtttagacgagatcataccggtaaagcaggaatgacaaagcttgcttttctggtatgttctaggtgtattgtgacttttactgttatattaattgccaatataagtaaatatagattatatatgtatagtgtttcacaaagcttagacctttaccttccagccaccccacagtgcttgatatttcagagtcagtcattggttatacatgtgtagttccaaagcacataagctagaagaagaaatatttctaggagcactaccatctgttttcaacatgaaatgccacacacatagaactccaacaacatcaatttcattgcacagactgactgtagttaattttgtcacagaatctatggactgaatctaatgcttccaaaaatgttgtttgtttgcaaatatcaaacattgttatgcaagaaattattaattacaaaatgaagatttataccattgtggtttaagctgtactgaactaaatctgtggaatgcattgtgaactgtaaaagcaaagtatcaataaagcttatagacttaaaa

SEQ ID NO: 444071 - DNA, 4437 bp, Homo sapiens
ataggctaggtcgggactggggtgtgaatcggccgaaggacagtaggtccctcggctcagtcggcccagcccctctcagtcctccccaacccccacaaccgcccgcggctctgagacgcggccccggcggcggcggcagcagctgcagcatcatctccaccctccagccatggaagacctggaccagtctcctctggtctcgtcctcggacagcccaccccggccgcagcccgcgttcaagtaccagttcgtgagggagcccgaggacgaggaggaagaagaggaggaggaagaggaggacgaggacgaagacctggaggagctggaggtgctggagaggaagcccgccgccgggctgtccgcggccccagtgcccaccgcccctgccgccggcgcgcccctgatggacttcggaaatgacttcgtgccgccggcgccccggggacccctgccggccgctccccccgtcgccccggagcggcagccgtcttgggacccgagcccggtgtcgtcgaccgtgcccgcgccatccccgctgtctgctgccgcagtctcgccctccaagctccctgaggacgacgagcctccggcccggcctccccctcctcccccggccagcgtgagcccccaggcagagcccgtgtggaccccgccagccccggctcccgccgcgcccccctccaccccggccgcgcccaagcgcaggggctcctcgggctcagtggatgagaccctttttgctcttcctgctgcatctgagcctgtgatacgctcctctgcagaaaatatggacttgaaggagcagccaggtaacactatttcggctggtcaagaggatttcccatctgtcctgcttgaaactgctgcttctcttccttctctgtctcctctctcagccgcttctttcaaagaacatgaataccttggtaatttgtcaacagtattacccactgaaggaacacttcaagaaaatgtcagtgaagcttctaaagaggtctcagagaaggcaaaaactctactcatagatagagatttaacagagttttcagaattagaatactcagaaatgggatcatcgttcagtgtctctccaaaagcagaatctgccgtaatagtagcaaatcctagggaagaaataatcgtgaaaaataaagatgaagaagagaagttagttagtaataacatccttcataatcaacaagagttacctacagctcttactaaattggttaaagaggatgaagttgtgtcttcagaaaaagcaaaagacagttttaatgaaaagagagttgcagtggaagctcctatgagggaggaatatgcagacttcaaaccatttgagcgagtatgggaagtgaaagatagtaaggaagatagtgatatgttggctgctggaggtaaaatcgagagcaacttggaaagtaaagtggataaaaaatgttttgcagatagccttgagcaaactaatcacgaaaaagatagtgagagtagtaatgatgatacttctttccccagtacgccagaaggtataaaggatcgttcaggagcatatatcacatgtgctccctttaacccagcagcaactgagagcattgcaacaaacatttttcctttgttaggagatcctacttcagaaaataagaccgatgaaaaaaaaatagaagaaaagaaggcccaaatagtaacagagaagaatactagcaccaaaacatcaaacccttttcttgtagcagcacaggattctgagacagattatgtcacaacagataatttaacaaaggtgactgaggaagtcgtggcaaacatgcctgaaggcctgactccagatttagtacaggaagcatgtgaaagtgaattgaatgaagttactggtacaaagattgcttatgaaacaaaaatggacttggttcaaacatcagaagttatgcaagagtcactctatcctgcagcacagctttgcccatcatttgaagagtcagaagctactccttcaccagttttgcctgacattgttatggaagcaccattgaattctgcagttcctagtgctggtgcttccgtgatacagcccagctcatcaccattagaagcttcttcagttaattatgaaagcataaaacatgagcctgaaaaccccccaccatatgaagaggccatgagtgtatcactaaaaaaagtatcaggaataaaggaagaaattaaagagcctgaaaatattaatgcagctcttcaagaaacagaagctccttatatatctattgcatgtgatttaattaaagaaacaaagctttctgctgaaccagctccggatttctctgattattcagaaatggcaaaagttgaacagccagtgcctgatcattctgagctagttgaagattcctcacctgattctgaaccagttgacttatttagtgatgattcaatacctgacgttccacaaaaacaagatgaaactgtgatgcttgtgaaagaaagtctcactgagacttcatttgagtcaatgatagaatatgaaaataaggaaaaactcagtgctttgccacctgagggaggaaagccatatttggaatcttttaagctcagtttagataacacaaaagataccctgttacctgatgaagtttcaacattgagcaaaaaggagaaaattcctttgcagatggaggagctcagtactgcagtttattcaaatgatgacttatttatttctaaggaagcacagataagagaaactgaaacgttttcagattcatctccaattgaaattatagatgagttccctacattgatcagttctaaaactgattcattttctaaattagccagggaatatactgacctagaagtatcccacaaaagtgaaattgctaatgccccggatggagctgggtcattgccttgcacagaattgccccatgacctttctttgaagaacatacaacccaaagttgaagagaaaatcagtttctcagatgacttttctaaaaatgggtctgctacatcaaaggtgctcttattgcctccagatgtttctgctttggccactcaagcagagatagagagcatagttaaacccaaagttcttgtgaaagaagctgagaaaaaacttccttccgatacagaaaaagaggacagatcaccatctgctatattttcagcagagctgagtaaaacttcagttgttgacctcctgtactggagagacattaagaagactggagtggtgtttggtgccagcctattcctgctgctttcattgacagtattcagcattgtgagcgtaacagcctacattgccttggccctgctctctgtgaccatcagctttaggatatacaagggtgtgatccaagctatccagaaatcagatgaaggccacccattcagggcatatctggaatctgaagttgctatatctgaggagttggttcagaagtacagtaattctgctcttggtcatgtgaactgcacgataaaggaactcaggcgcctcttcttagttgatgatttagttgattctctgaagtttgcagtgttgatgtgggtatttacctatgttggtgccttgtttaatggtctgacactactgattttggctctcatttcactcttcagtgttcctgttatttatgaacggcatcaggcacagatagatcattatctaggacttgcaaataagaatgttaaagatgctatggctaaaatccaagcaaaaatccctggattgaagcgcaaagctgaatgaaaacgcccaaaataattaatagtcttgccgcatcttggcaagttgcagagatggtggagctagaaaaaaaaaaaaaaaagcccttttcagtttgtgcactgtgtatggtccgtgtagattgatgcagattttctgaaatgaaatgtttgtttagacgagatcataccggtaaagcaggaatgacaaagcttgcttttctggtatgttctaggtgtattgtgacttttactgttatattaattgccaatataagtaaatatagattatatatgtatagtgtttcacaaagcttagacctttaccttccagccaccccacagtgcttgatatttcagagtcagtcattggttatacatgtgtagttccaaagcacataagctagaagaagaaatatttctaggagcactaccatctgttttcaacatgaaatgccacacacatagaactccaacaacatcaatttcattgcacagactgactgtagttaattttgtcacagaatctatggactgaatctaatgcttccaaaaatgttgtttgtttgcaaatatcaaacattgttatgcaagaaattattaattacaaaatgaagatttataccattgtggtttaagctgtactgaactaaatctgtggaatgcattgtgaactgtaaaagcaaagtatcaataaagcttatagacttaaaa

SEQ ID NO: 444072 - DNA, 4690 bp, Homo sapiens
  misc_feature (4022)..(4022): n is a, c, g, or t
ataggctaggtcgggactggggtgtgaatcggccgaaggacagtaggtccctcggctcagtcggcccagcccctctcagtcctccccaacccccacaaccgcccgcggctctgagacgcggccccggcggcggcggcagcagctgcagcatcatctccaccctccagccatggaagacctggaccagtctcctctggtctcgtcctcggacagcccaccccggccgcagcccgcgttcaagtaccagttcgtgagggagcccgaggacgaggaggaagaagaggaggaggaagaggaggacgaggacgaagacctggaggagctggaggtgctggagaggaagcccgccgccgggctgtccgcggccccagtgcccaccgcccctgccgccggcgcgcccctgatggacttcggaaatgacttcgtgccgccggcgccccggggacccctgccggccgctccccccgtcgccccggagcggcagccgtcttgggacccgagcccggtgtcgtcgaccgtgcccgcgccatccccgctgtctgctgccgcagtctcgccctccaagctccctgaggacgacgagcctccggcccggcctccccctcctcccccggccagcgtgagcccccaggcagagcccgtgtggaccccgccagccccggctcccgccgcgcccccctccaccccggccgcgcccaagcgcaggggctcctcgggctcagtggatgagaccctttttgctcttcctgctgcatctgagcctgtgatacgctcctctgcagaaaatatggacttgaaggagcagccaggtaacactatttcggctggtcaagaggatttcccatctgtcctgcttgaaactgctgcttctcttccttctctgtctcctctctcagccgcttctttcaaagaacatgaataccttggtaatttgtcaacagtattacccactgaaggaacacttcaagaaaatgtcagtgaagcttctaaagaggtctcagagaaggcaaaaactctactcatagatagagatttaacagagttttcagaattagaatactcagaaatgggatcatcgttcagtgtctctccaaaagcagaatctgccgtaatagtagcaaatcctagggaagaaataatcgtgaaaaataaagatgaagaagagaagttagttagtaataacatccttcataatcaacaagagttacctacagctcttactaaattggttaaagaggatgaagttgtgtcttcagaaaaagcaaaagacagttttaatgaaaagagagttgcagtggaagctcctatgagggaggaatatgcagacttcaaaccatttgagcgagtatgggaagtgaaagatagtaaggaagatagtgatatgttggctgctggaggtaaaatcgagagcaacttggaaagtaaagtggataaaaaatgttttgcagatagccttgagcaaactaatcacgaaaaagatagtgagagtagtaatgatgatacttctttccccagtacgccagaaggtataaaggatcgttcaggagcatatatcacatgtgctccctttaacccagcagcaactgagagcattgcaacaaacatttttcctttgttaggagatcctacttcagaaaataagaccgatgaaaaaaaaatagaagaaaagaaggcccaaatagtaacagagaagaatactagcaccaaaacatcaaacccttttcttgtagcagcacaggattctgagacagattatgtcacaacagataatttaacaaaggtgactgaggaagtcgtggcaaacatgcctgaaggcctgactccagatttagtacaggaagcatgtgaaagtgaattgaatgaagttactggtacaaagattgcttatgaaacaaaaatggacttggttcaaacatcagaagttatgcaagagtcactctatcctgcagcacagctttgcccatcatttgaagagtcagaagctactccttcaccagttttgcctgacattgttatggaagcaccattgaattctgcagttcctagtgctggtgcttccgtgatacagcccagctcatcaccattagaagcttcttcagttaattatgaaagcataaaacatgagcctgaaaaccccccaccatatgaagaggccatgagtgtatcactaaaaaaagtatcaggaataaaggaagaaattaaagagcctgaaaatattaatgcagctcttcaagaaacagaagctccttatatatctattgcatgtgatttaattaaagaaacaaagctttctgctgaaccagctccggatttctctgattattcagaaatggcaaaagttgaacagccagtgcctgatcattctgagctagttgaagattcctcacctgattctgaaccagttgacttatttagtgatgattcaatacctgacgttccacaaaaacaagatgaaactgtgatgcttgtgaaagaaagtctcactgagacttcatttgagtcaatgatagaatatgaaaataaggaaaaactcagtgctttgccacctgagggaggaaagccatatttggaatcttttaagctcagtttagataacacaaaagataccctgttacctgatgaagtttcaacattgagcaaaaaggagaaaattcctttgcagatggaggagctcagtactgcagtttattcaaatgatgacttatttatttctaaggaagcacagataagagaaactgaaacgttttcagattcatctccaattgaaattatagatgagttccctacattgatcagttctaaaactgattcattttctaaattagccagggaatatactgacctagaagtatcccacaaaagtgaaattgctaatgccccggatggagctgggtcattgccttgcacagaattgccccatgacctttctttgaagaacatacaacccaaagttgaagagaaaatcagtttctcagatgacttttctaaaaatgggtctgctacatcaaaggtgctcttattgcctccagatgtttctgctttggccactcaagcagagatagagagcatagttaaacccaaagttcttgtgaaagaagctgagaaaaaacttccttccgatacagaaaaagaggacagatcaccatctgctatattttcagcagagctgagtaaaacttcagttgttgacctcctgtactggagagacattaagaagactggagtggtgtttggtgccagcctattcctgctgctttcattgacagtattcagcattgtgagcgtaacagcctacattgccttggccctgctctctgtgaccatcagctttaggatatacaagggtgtgatccaagctatccagaaatcagatgaaggccacccattcagggcatatctggaatctgaagttgctatatctgaggagttggttcagaagtacagtaattctgctcttggtcatgtgaactgcacgataaaggaactcaggcgcctcttcttagttgatgatttagttgattctctgaagtttgcagtgttgatgtgggtatttacctatgttggtgccttgtttaatggtctgacactactgattttggctctcatttcactcttcagtgttcctgttatttatgaacggcatcaggcacagatagatcattatctaggacttgcaaataagaatgttaaagatgctatggctaaaatccaagcaaaaatccctggattgaagcgcaaagctgaatgaaaacgcccaaaataattagtaggagttcatctttaaaggggatattcatttgattatacgggggagggtcagggaagaacgaaccttgacgttgcagtgcagtttcacagatcgttgttagatctttatttttagccatgcactgttgtgaggaaaaattacctgtcttgactgccatgtgttcatcatcttaagtattgtaagctgctatgtatggatttaaaccgtaatcatatctttttcctatctatctgaggcactggtggaataaganatgattacggtttaaatccaagcaaaaatccctggattgaagcgcaaagctgaatgaaaacgcccaaaataattagtaggagttcatcttttaaaggggatattcatttgattatacgggggagggtcaggaaagaaacgaaccttgacgtagcagtgcagtatcacagatcgtagtagatcttataatagccatgcaatgtagtgaggaaaaattagctgtacttgatgacatgtgttcatcatctaaagtattgtaagctgctatgtatggatttaagcgtaatcatatctaatcctaatctgaggcactggtggataaaaactgtatatatacatagagagataggcatagccgacatggcaagatgacgagagtgggagcacaagaagaaaaaaaagcccaaaaggagaaagagaagagcaagaaaagaagaaatagaaagagacagagagcaaaacacaaacagaaaacaaagagaaaaagagtacgcaacgcaggaagaaaaacaggaaaagagaaatagcaagaaacaactggagaaacgagaatatcacacacaaaagaaacacaaaagataacgttgcaagaaaacagaatagaacaacaatacaacaaataaaagaaaagaacaccgcaaagaaaagagggcacaacaaccgacagaa

SEQ ID NO: 444073 - DNA, 3766 bp, Homo sapiens
  misc_feature (3709)..(3709): n is a, c, g, or t
  misc_feature (3731)..(3731): n is a, c, g, or t
ataggctaggtcgggactggggtgtgaatcggccgaaggacagtaggtccctcggctcagtcggcccagcccctctcagtcctccccaacccccacaaccgcccgcggctctgagacgcggccccggcggcggcggcagcagctgcagcatcatctccaccctccagccatggaagacctggaccagtctcctctggtctcgtcctcggacagcccaccccggccgcagcccgcgttcaagtaccagttcgtgagggagcccgaggacgaggaggaagaagaggaggaggaagaggaggacgaggacgaagacctggaggagctggaggtgctggagaggaagcccgccgccgggctgtccgcggccccagtgcccaccgcccctgccgccggcgcgcccctgatggacttcggaaatgacttcgtgccgccggcgccccggggacccctgccggccgctccccccgtcgccccggagcggcagccgtcttgggacccgagcccggtgtcgtcgaccgtgcccgcgccatccccgctgtctgctgccgcagtctcgccctccaagctccctgaggacgacgagcctccggcccggcctccccctcctcccccggccagcgtgagcccccaggcagagcccgtgtggaccccgccagccccggctcccgccgcgcccccctccaccccggccgcgcccaagcgcaggggctcctcgggctcagtggatgagaccctttttgctcttcctgctgcatctgagcctgtgatacgctcctctgcagaaaatatggacttgaaggagcagccaggtaacactatttcggctggtcaagaggatttcccatctgtcctgcttgaaactgctgcttctcttccttctctgtctcctctctcagccgcttctttcaaagaacatgaataccttggtaatttgtcaacagtattacccactgaaggaacacttcaagaaaatgtcagtgaagcttctaaagaggtctcagagaaggcaaaaactctactcatagatagagatttaacagagttttcagaattagaatactcagaaatgggatcatcgttcagtgtctctccaaaagcagaatctgccgtaatagtagcaaatcctagggaagaaataatcgtgaaaaataaagatgaagaagagaagttagttagtaataacatccttcataatcaacaagagttacctacagctcttactaaattggttaaagaggatgaagttgtgtcttcagaaaaagcaaaagacagttttaatgaaaagagagttgcagtggaagctcctatgagggaggaatatgcagacttcaaaccatttgagcgagtatgggaagtgaaagatagtaaggaagatagtgatatgttggctgctggaggtaaaatcgagagcaacttggaaagtaaagtggataaaaaatgttttgcagatagccttgagcaaactaatcacgaaaaagatagtgagagtagtaatgatgatacttctttccccagtacgccagaaggtataaaggatcgttcaggagcatatatcacatgtgctccctttaacccagcagcaactgagagcattgcaacaaacatttttcctttgttaggagatcctacttcagaaaataagaccgatgaaaaaaaaatagaagaaaagaaggcccaaatagtaacagagaagaatactagcaccaaaacatcaaacccttttcttgtagcagcacaggattctgagacagattatgtcacaacagataatttaacaaaggtgactgaggaagtcgtggcaaacatgcctgaaggcctgactccagatttagtacaggaagcatgtgaaagtgaattgaatgaagttactggtacaaagattgcttatgaaacaaaaatggacttggttcaaacatcagaagttatgcaagagtcactctatcctgcagcacagctttgcccatcatttgaagagtcagaagctactccttcaccagttttgcctgacattgttatggaagcaccattgaattctgcagttcctagtgctggtgcttccgtgatacagcccagctcatcaccattagaagcttcttcagttaattatgaaagcataaaacatgagcctgaaaaccccccaccatatgaagaggccatgagtgtatcactaaaaaaagtatcaggaataaaggaagaaattaaagagcctgaaaatattaatgcagctcttcaagaaacagaagctccttatatatctattgcatgtgatttaattaaagaaacaaagctttctgctgaaccagctccggatttctctgattattcagaaatggcaaaagttgaacagccagtgcctgatcattctgagctagttgaagattcctcacctgattctgaaccagttgacttatttagtgatgattcaatacctgacgttccacaaaaacaagatgaaactgtgatgcttgtgaaagaaagtctcactgagacttcatttgagtcaatgatagaatatgaaaataaggaaaaactcagtgctttgccacctgagggaggaaagccatatttggaatcttttaagctcagtttagataacacaaaagataccctgttacctgatgaagtttcaacattgagcaaaaaggagaaaattcctttgcagatggaggagctcagtactgcagtttattcaaatgatgacttatttatttctaaggaagcacagataagagaaactgaaacgttttcagattcatctccaattgaaattatagatgagttccctacattgatcagttctaaaactgattcattttctaaattagccagggaatatactgacctagaagtatcccacaaaagtgaaattgctaatgccccggatggagctgggtcattgccttgcacagaattgccccatgacctttctttgaagaacatacaacccaaagttgaagagaaaatcagtttctcagatgacttttctaaaaatgggtctgctacatcaaaggtgctcttattgcctccagatgtttctgctttggccactcaagcagagatagagagcatagttaaacccaaagttcttgtgaaagaagctgagaaaaaacttccttccgatacagaaaaagaggacagatcaccatctgctatattttcagcagagctgagtaaaacttcagttgttgacctcctgtactggagagacattaagaagactggagtggtgtttggtgccagcctattcctgctgctttcattgacagtattcagcattgtgagcgtaacagcctacattgccttggccctgctctctgtgaccatcagctttaggatatacaagggtgtgatccaagctatccagaaatcagatgaaggccacccattcagggcatatctggaatctgaagttgctatatctgaggagttggttcagaagtacagtaattctgctcttggtcatgtgaactgcacgataaaggaactcaggcgcctcttcttagttgatgatttagttgattctctgaagtttgcagtgttgatgtgggtatttacctatgttggtgccttgtttaatggtctgacactactgattttggctctcatttcactcttcagtgttcctgttatttatgaacggcatcaggcacagatagatcattatctaggacttgcaaataagaatgttaaagatgctatggctaaaatncaacaaaaatcctggaatgaanccaaagcttaatgacgcctttagtaggagtctttt

SEQ ID NO: 444074 - DNA, 3820 bp, Homo sapiens
ataggctaggtcgggactggggtgtgaatcggccgaaggacagtaggtccctcggctcagtcggcccagcccctctcagtcctccccaacccccacaaccgcccgcggctctgagacgcggccccggcggcggcggcagcagctgcagcatcatctccaccctccagccatggaagacctggaccagtctcctctggtctcgtcctcggacagcccaccccggccgcagcccgcgttcaagtaccagttcgtgagggagcccgaggacgaggaggaagaagaggaggaggaagaggaggacgaggacgaagacctggaggagctggaggtgctggagaggaagcccgccgccgggctgtccgcggccccagtgcccaccgcccctgccgccggcgcgcccctgatggacttcggaaatgacttcgtgccgccggcgccccggggacccctgccggccgctccccccgtcgccccggagcggcagccgtcttgggacccgagcccggtgtcgtcgaccgtgcccgcgccatccccgctgtctgctgccgcagtctcgccctccaagctccctgaggacgacgagcctccggcccggcctccccctcctcccccggccagcgtgagcccccaggcagagcccgtgtggaccccgccagccccggctcccgccgcgcccccctccaccccggccgcgcccaagcgcaggggctcctcgggctcagtggatgagaccctttttgctcttcctgctgcatctgagcctgtgatacgctcctctgcagaaaatatggacttgaaggagcagccaggtaacactatttcggctggtcaagaggatttcccatctgtcctgcttgaaactgctgcttctcttccttctctgtctcctctctcagccgcttctttcaaagaacatgaataccttggtaatttgtcaacagtattacccactgaaggaacacttcaagaaaatgtcagtgaagcttctaaagaggtctcagagaaggcaaaaactctactcatagatagagatttaacagagttttcagaattagaatactcagaaatgggatcatcgttcagtgtctctccaaaagcagaatctgccgtaatagtagcaaatcctagggaagaaataatcgtgaaaaataaagatgaagaagagaagttagttagtaataacatccttcataatcaacaagagttacctacagctcttactaaattggttaaagaggatgaagttgtgtcttcagaaaaagcaaaagacagttttaatgaaaagagagttgcagtggaagctcctatgagggaggaatatgcagacttcaaaccatttgagcgagtatgggaagtgaaagatagtaaggaagatagtgatatgttggctgctggaggtaaaatcgagagcaacttggaaagtaaagtggataaaaaatgttttgcagatagccttgagcaaactaatcacgaaaaagatagtgagagtagtaatgatgatacttctttccccagtacgccagaaggtataaaggatcgttcaggagcatatatcacatgtgctccctttaacccagcagcaactgagagcattgcaacaaacatttttcctttgttaggagatcctacttcagaaaataagaccgatgaaaaaaaaatagaagaaaagaaggcccaaatagtaacagagaagaatactagcaccaaaacatcaaacccttttcttgtagcagcacaggattctgagacagattatgtcacaacagataatttaacaaaggtgactgaggaagtcgtggcaaacatgcctgaaggcctgactccagatttagtacaggaagcatgtgaaagtgaattgaatgaagttactggtacaaagattgcttatgaaacaaaaatggacttggttcaaacatcagaagttatgcaagagtcactctatcctgcagcacagctttgcccatcatttgaagagtcagaagctactccttcaccagttttgcctgacattgttatggaagcaccattgaattctgcagttcctagtgctggtgcttccgtgatacagcccagctcatcaccattagaagcttcttcagttaattatgaaagcataaaacatgagcctgaaaaccccccaccatatgaagaggccatgagtgtatcactaaaaaaagtatcaggaataaaggaagaaattaaagagcctgaaaatattaatgcagctcttcaagaaacagaagctccttatatatctattgcatgtgatttaattaaagaaacaaagctttctgctgaaccagctccggatttctctgattattcagaaatggcaaaagttgaacagccagtgcctgatcattctgagctagttgaagattcctcacctgattctgaaccagttgacttatttagtgatgattcaatacctgacgttccacaaaaacaagatgaaactgtgatgcttgtgaaagaaagtctcactgagacttcatttgagtcaatgatagaatatgaaaataaggaaaaactcagtgctttgccacctgagggaggaaagccatatttggaatcttttaagctcagtttagataacacaaaagataccctgttacctgatgaagtttcaacattgagcaaaaaggagaaaattcctttgcagatggaggagctcagtactgcagtttattcaaatgatgacttatttatttctaaggaagcacagataagagaaactgaaacgttttcagattcatctccaattgaaattatagatgagttccctacattgatcagttctaaaactgattcattttctaaattagccagggaatatactgacctagaagtatcccacaaaagtgaaattgctaatgccccggatggagctgggtcattgccttgcacagaattgccccatgacctttctttgaagaacatacaacccaaagttgaagagaaaatcagtttctcagatgacttttctaaaaatgggtctgctacatcaaaggtgctcttattgcctccagatgtttctgctttggccactcaagcagagatagagagcatagttaaacccaaagttcttgtgaaagaagctgagaaaaaacttccttccgatacagaaaaagaggacagatcaccatctgctatattttcagcagagctgagtaaaacttcagttgttgacctcctgtactggagagacattaagaagactggagtggtgtttggtgccagcctattcctgctgctttcattgacagtattcagcattgtgagcgtaacagcctacattgccttggccctgctctctgtgaccatcagctttaggatatacaagggtgtgatccaagctatccagaaatcagatgaaggccacccattcagggcatatctggaatctgaagttgctatatctgaggagttggttcagaagtacagtaattctgctcttggtcatgtgaactgcacgataaaggaactcaggcgcctcttcttagttgatgatttagttgattctctgaagtttgcagtgttgatgtgggtatttacctatgttggtgccttgtttaatggtctgacactactgattttggctctcatttcactcttcagtgttcctgtgtttacacaaatgctggatgatagtctttctaggatgtttcataagcactcctttattgggcccaaagtttagactaagtgctttacaaaggttctttaaacaaaaacaaaaacagaaacatttattggctgggcacagtggctcatgcctgttatcccagcacagaaccaccaacaagatcagatcctctag

SEQ ID NO: 444075 - DNA, 2303 bp, Homo sapiens
ataggctaggtcgggactggggtgtgaatcggccgaaggacagtaggtccctcggctcagtcggcccagcccctctcagtcctccccaacccccacaaccgcccgcggctctgagacgcggccccggcggcggcggcagcagctgcagcatcatctccaccctccagccatggaagacctggaccagtctcctctggtctcgtcctcggacagcccaccccggccgcagcccgcgttcaagtaccagttcgtgagggagcccgaggacgaggaggaagaagaggaggaggaagaggaggacgaggacgaagacctggaggagctggaggtgctggagaggaagcccgccgccgggctgtccgcggccccagtgcccaccgcccctgccgccggcgcgcccctgatggacttcggaaatgacttcgtgccgccggcgccccggggacccctgccggccgctccccccgtcgccccggagcggcagccgtcttgggacccgagcccggtgtcgtcgaccgtgcccgcgccatccccgctgtctgctgccgcagtctcgccctccaagctccctgaggacgacgagcctccggcccggcctccccctcctcccccggccagcgtgagcccccaggcagagcccgtgtggaccccgccagccccggctcccgccgcgcccccctccaccccggccgcgcccaagcgcaggggctcctcgggctcagtggatgagaccctttttgctcttcctgctgcatctgagcctgtgatacgctcctctgcagaaaatatggacttgaaggagcagccaggtaacactatttcggctggtcaagaggatttcccatctgtcctgcttgaaactgctgcttctcttccttctctgtctcctctctcagccgcttctttcaaagaacatgaataccttggtaatttgtcaacagtattacccactgaaggaacacttcaagaaaatgtcagtgaagcttctaaagaggtctcagagaaggcaaaaactctactcatagatagagatttaacagagttttcagaattagaatactcagaaatgggatcatcgttcagtgtctctccaaaagcagaatctgccgtaatagtagcaaatcctagggaagaaataatcgtgaaaaataaagatgaagaagagaagttagttagtaataacatccttcataatcaacaagagttacctacagctcttactaaattggttaaagaggatgaagttgtgtcttcagaaaaagcaaaagacagttttaatgaaaagagagttgcagtggaagctcctatgagggaggaatatgcagacttcaaaccatttgagcgagtatgggaagtgaaagatagtaaggaagatagtgatatgttggctgctggaggtaaaatcgagagcaacttggaaagtaaagtggataaaaaatgttttgcagatagccttgagcaaactaatcacgaaaaagatagtgagagtagtaatgatgatacttctttccccagtacgccagaaggtataaaggatcgttcaggagcatatatcacatgtgctccctttaacccagcagcaactgagagcattgcaacaaacatttttcctttgttaggagatcctacttcagaaaataagaccgatgaaaaaaaaatagaagaaaagaaggcccaaatagtaacagagaagaatactagcaccaaaacatcaaacccttttcttgtagcagcacaggattctgagacagattatgtcacaacagataatttaacaaaggtgactgaggaagtcgtggcaaacatgcctgaaggcctgactccagatttagtacaggaagcatgtgaaagtgaattgaatgaagttactggtacaaagattgcttatgaaacaaaaatggacttggttcaaacatcagaagttatgcaagagtcactctatcctgcagcacagctttgcccatcatttgaagagtcagaagctactccttcaccagttttgcctgacattgttatggaagcaccattgaattctgcagttcctagtgctggtgcttccgtgatacagcccagctcatcaccattagaagcttcttcattaattttgtcacagaatctatggactgaatctaatgcttccaaaaatgttgtttgtttgcaaatatcaaacattgttatgcaagaaattattaattacaaaatgaagatttataccattgtggtttaagctgtactgaactaaatctgtggaatgcattgtgaactgtaaaagcaaagtatcaataaagcttatagacttaaaa

SEQ ID NO: 444076 - DNA, 1146 bp, Homo sapiens
tcgacccacgcgtcggagcgaagcgcacgctgaggaggatcggctgggggttgggggagtcagcatgattatattttaatgtagaaaatgtgacatctggatataaaatgaaaataaatgttaaattaaatggaaaaaaaaaaaaaaaaaaaaaaaaaaaaaaaaaaaaaaaaaagaaaaaaaaaaaaaaaaaaaatataaaaaaaaaaaaaaaaaaaaaaaagggggggggcggagcgtacagataatagataatagaagaggagaggacgaggtgtagacgcacaacgagtctgaattgtgtggagataaataagtgggcacctaggagagatgatgcgatatataggagatagagaggagggaaatgctacgtgagtattaaacaaactcgagggcaaggaagaggagatagtacatcagttgatcagggaaaaaatatatatatggagggaggaaaaacggatagaataaagataaggggtggtgtaaagtactaagagtatgacaaagtataataaaacagaaaagtagagaaaagcacacagaagaaagagagaaagcaaagcccgacagacgcagcaaaacagagaacaaaaacaaaaaaaaaaaaagaaggaaagagcacagagaggagagaacagacgggagcagaagaaaaagaacacaaaagaacgaaagaacggcgagtagagaggaagagacgaaaaaagaggagaaaagggggcaggggcggaagaagcgaacggaaagggaaagaagagaccgacgcgagacggcgagcgaaagcccgaaagacgacagaagggacaggaacgagaaacaaaacagaggcgaaagaaggggaggcggcggagggcgaggagcggccggaggagaagagggaggagacgccgaggcgagaggaaggagaaggagggagggacaggaggagggagggagaggcgggggcagaggagcagagcggacggcggggaaagaggaaaaagggaaaagagacaacggagaagccgaacaaaggacagacaaagagaagcaggagcaagaaaagagaaacagagaaagaaagaagagcagaagagagccaggacgaaccaggaaaggaccaaaagaagaaaggaggacaagagcgaaagcgaacaaaaa

SEQ ID NO: 444077 - DNA, 379 bp, Homo sapiens
tgcaacgttttaaactgctaacagaccttaaaatatccccctacctgggtcctcagagcaccctcagcgaattttaccctcgagactctgcaaagcattagctgctgcttctgcattgctccgcgctcttgtgaaatactggttctgttttctttattccttttgcactctcggttcccacctttgtgttggagtttaccatgttaccttgggtgcaatagcaacttccctaccccgtgcattccatctttcatgttgtgtaaagttcttcacttttttctctgagggctgggggttgggggagtcagcatgattatattttaatgtagaaaatgtgacatctggatataaaatgaaaataaatgttaaattaaatgga

SEQ ID NO: 444078 - DNA, 387 bp, Homo sapiens
gccaactgtcttcctctggtagatatcactcaccccatcccagacttgactggctacattacagaggggcagatctatgtggacagacagctgcacaacagacaggtactggacgggagcagtgctgggaagcttgcagacctgctcatccgttattctttagtgacttggattttgctcttaggaattgctttgcttagaaagtatcaacttgaattgtttttaatatggttataaaattgtcatttctattatcttaaattctggtgtcggcagagcgccagaattaagaatcttcttaacactttcctttattgtgtcttaaaacagagtcacttgtctccaagaacttttttgggaattctgttccataatggtatcatctac

SEQ ID NO: 444079 - DNA, 2881 bp, Homo sapiens
agggagaacaacataggttaggtgcaggcctgggtggctcgggacagaggagacaagatggcgctgcgggcgatgcgggggattgtcaacggggccgcacccgagctacccgtgcccaccggtgggccggcggtgggagctcgggagcaggcgctggcagtcagtcggaactacctctcccagcctcgcctcacatacaagacagtatctggagtcaatggtccactagtgatcttagatcatgttaagtttcccaggtatgctgaaattgtccatttgaccttaccggatggcacaaagagaagtgggcaagttctggaagttagtggttccaaggcagtagttcaggtatttgaagggacttcaggtatagatgctaagaaaacgtcctgtgagtttactggggatattctccgaacaccggtgtctgaggatatgcttggtcgggtattcaatggatcgggaaaacccattgacagaggtcctgttgtactggccgaagacttccttgatatcatgggtcagccaatcaaccctcaatgtcgaatctacccagaggaaatgattcagactggcatttcggccatcgatgggatgaacagtattgctagggggcagaaaattcctatcttctctgctgctgggctaccacacaatgagattgcagctcagatctgtcgccaggctggtttggtaaagaaatccaaagatgtagtagactacagtgaggaaaattttgcaattgtatttgctgctatgggtgtaaacatggaaactgcccggttcttcaaatctgactttgaagaaaatggctcaatggacaatgtctgcctctttttgaacttggctaatgacccaaccattgagcgaattatcactcctcgcctggctctaaccacagctgaatttctggcgtaccaatgtgagaaacatgtattggttattctaacagacatgagttcttatgctgaagcacttcgagaggtttcagcagccagggaagaggtacctggtcgacgaggttttccaggttacatgtatacagatttagccacgatatatgaacgcgctgggcgagtggaagggagaaacggctcgattactcaaatccctattctaaccatgcctaatgatgatatcactcaccccatcccagacttgactggctacattacagaggggcagatctatgtggacagacagctgcacaacagacagatttatccacctatcaatgtgctgccctcactatcacggttaatgaagtctgctattggagaagggatgaccaggaaggatcatgccgatgtatctaaccagctatatgcgtgctatgctattggaaaggatgtgcaagccatgaaagctgtcgttggagaagaagcccttacctcagatgatcttctctacttggaatttctgcagaagtttgagaggaacttcattgctcagggtccttacgaaaatcgcactgtctttgagactttggacattggctggcagctactccgaatcttccccaaagaaatgctgaagagaatccctcagagcaccctcagcgaattttaccctcgagactctgcaaagcattagctgctgcttctgcattgctccgcgctcttgtgaaatactggttctgttttctttattccttttgcactctcggttcccacctttgtgttggagtttaccatgttaccctgtaattaaaaacaaagaataggtaacatattgtgccagtgttgcaacgttttaaactgctaacagaccttaaaatatccccctacctgggtcctcagtgctatgtttaaagtgctgcagggatggagtggcgttttcttattgctgtatgtattgtacatagtggagtagttagttacctgataacagtcttgttatttgggtctcttagaccttacctctcaactccctcaagagtaccagtctctgaagttataatgctttggtctctacattaggggcaagatccagtctgagagaagtctcctttgagaagggccaagaggctctttcctgagtgtttgctttcggtttgttggtatgcctgtattgctgggctgtgctgctgctcgaagcagatggttttgactgtctttttgctctttcctatataatgaatagatgagtgaaaggagttttctttttctctttagtacttacgtattgggattcctgtgtcttacagctctccctctccaaataatacacagaatcctgcaactttttgcacagctggtatctgtctggtagcagtgagaccccttgtcttggtgatccttactgggtttccaagcagaggagtcacatgattacaattgccagtagagttgttgtttggggtacaagatgagaagaaagaaaaacctacagcctttctacattctgacatgctaacagtggtttaagtttctaaagtgtttaccagatgctgaaggcaaggggagggagcagaagcacttatgtttacggatattttaaactctgttagagagcagcctttgaaaatccccaatttggttctgctttttgacctctctctaccttttcagggtaatctttgtggcacaaacgatagcatttccaagctttagagttttctgaattcctgcgccttcctgacgtgagccctgagcgatcttctatgcagttctgccatgcgtcctgttggtctctctgtgttctttgttacttgggtgcaatagcaacttccctaccccgtgcattccatctttcatgttgtgtaaagttcttcacttttttctctgagggctgggggttgggggagtcagcatgattatattttaatgtagaaaatgtgacatctggatataaaatgaaaataaatgttaaattaaatgga

SEQ ID NO: 444080 - DNA, 2812 bp, Homo sapiens
gcgcggcgtcgctgctgggccagtcgggacagaggagacaagatggcgctgcgggcgatgcgggggattgtcaacggggccgcacccgagctacccgtgcccaccggtgggccggcggtgggagctcgggagcaggcgctggcagtcagtcggaactacctctcccagcctcgcctcacatacaagacagtatctggagtcaatggtccactagtgatcttagatcatgttaagtttcccaggtatgctgaaattgtccatttgaccttaccggatggcacaaagagaagtgggcaagttctggaagttagtggttccaaggcagtagttcaggtatttgaagggacttcaggtatagatgctaagaaaacgtcctgtgagtttactggggatattctccgaacaccggtgtctgaggatatgcttggtcgggtattcaatggatcgggaaaacccattgacagaggtcctgttgtactggccgaagacttccttgatatcatgggtcagccaatcaaccctcaatgtcgaatctacccagaggaaatgattcagactggcatttcggccatcgatgggatgaacagtattgctagggggcagaaaattcctatcttctctgctgctgggctaccacacaatgagattgcagctcagatctgtcgccaggctggtttggtaaagaaatccaaagatgtagtagactacagtgaggaaaattttgcaattgtatttgctgctatgggtgtaaacatggaaactgcccggttcttcaaatctgactttgaagaaaatggctcaatggacaatgtctgcctctttttgaacttggctaatgacccaaccattgagcgaattatcactcctcgcctggctctaaccacagctgaatttctggcgtaccaatgtgagaaacatgtattggttattctaacagacatgagttcttatgctgaagcacttcgagaggtttcagcagccagggaagaggtacctggtcgacgaggttttccaggttacatgtatacagatttagccacgatatatgaacgcgctgggcgagtggaagggagaaacggctcgattactcaaatccctattctaaccatgcctaatgatgatatcactcaccccatcccagacttgactggctacattacagaggggcagatctatgtggacagacagctgcacaacagacagatttatccacctatcaatgtgctgccctcactatcacggttaatgaagtctgctattggagaagggatgaccaggaaggatcatgccgatgtatctaaccagctatatgcgtgctatgctattggaaaggatgtgcaagccatgaaagctgtcgttggagaagaagcccttacctcagatgatcttctctacttggaatttctgcagaagtttgagaggaacttcattgctcagggtccttacgaaaatcgcactgtctttgagactttggacattggctggcagctactccgaatcttccccaaagaaatgctgaagagaatccctcagagcaccctcagcgaattttaccctcgagactctgcaaagcattagctgctgcttctgcattgctccgcgctcttgtgaaatactggttctgttttctttattccttttgcactctcggttcccacctttgtgttggagtttaccatgttaccctgtaattaaaaacaaagaataggtaacatattgtgccagtgttgcaacgttttaaactgctaacagaccttgagtggcgttttcttattgctgtatgtattgtacatagtggagtagttagttacctgataacagtcttgttatttgggtctcttagaccttacctctcaactccctcaagagtaccagtctctgaagttataatgctttggtctctacattaggggcaagatccagtctgagagaagtctcctttgagaagggccaagaggctctttcctgagtgtttgctttcggtttgttggtatgcctgtattgctgggctgtgctgctgctcgaagcagatggttttgactgtctttttgctctttcctatataatgaatagatgagtgaaaggagttttctttttctctttagtacttacgtattgggattcctgtgtcttacagctctccctctccaaataatacacagaatcctgcaactttttgcacagctggtatctgtctggtagcagtgagaccccttgtcttggtgatccttactgggtttccaagcagaggagtcacatgattacaattgccagtagagttgttgtttggggtacaagatgagaagaaagaaaaacctacagcctttctacattctgacatgctaacagtggtttaagtttctaaagtgtttaccagatgctgaaggcaaggggagggagcagaagcacttatgtttacggatattttaaactctgttagagagcagcctttgaaaatccccaatttggttctgctttttgacctctctctaccttttcagggtaatctttgtggcacaaacgatagcatttccaagctttagagttttctgaattcctgcgccttcctgacgtgagccctgagcgatcttctatgcagttctgccatgcgtcctgttggtctctctgtgttctttgttacttgggtgcaatagcaacttccctaccccgtgcattccatctttcatgttgtgtaaagttcttcacttttttctctgagggctgggggttgggggagtcagcatgattatattttaatgtagaaaatgtgacatctggatataaaatgaaaataaatgttaaattaaatgga

SEQ ID NO: 444081 - DNA, 2807 bp, Homo sapiens
gcgcggcgtcgctgctgggccagtcgggacagaggagacaagatggcgctgcgggcgatgcgggggattgtcaacggggccgcacccgagctacccgtgcccaccggtgggccggcggtgggagctcgggagcaggcgctggcagtcagtcggaactacctctcccagcctcgcctcacatacaagacagtatctggagtcaatggtccactagtgatcttagatcatgttaagtttcccaggtatgctgaaattgtccatttgaccttaccggatggcacaaagagaagtgggcaagttctggaagttagtggttccaaggcagtagttcaggtatttgaagggacttcaggtatagatgctaagaaaacgtcctgtgagtttactggggatattctccgaacaccggtgtctgaggatatgcttggtcgggtattcaatggatcgggaaaacccattgacagaggtcctgttgtactggccgaagacttccttgatatcatgggtcagccaatcaaccctcaatgtcgaatctacccagaggaaatgattcagactggcatttcggccatcgatgggatgaacagtattgctagggggcagaaaattcctatcttctctgctgctgggctaccacacaatgagattgcagctcagatctgtcgccaggctggtttggtaaagaaatccaaagatgtagtagactacagtgaggaaaattttgcaattgtatttgctgctatgggtgtaaacatggaaactgcccggttcttcaaatctgactttgaagaaaatggctcaatggacaatgtctgcctctttttgaacttggctaatgacccaaccattgagcgaattatcactcctcgcctggctctaaccacagctgaatttctggcgtaccaatgtgagaaacatgtattggttattctaacagacatgagttcttatgctgaagcacttcgagaggtttcagcagccagggaagaggtacctggtcgacgaggttttccaggttacatgtatacagatttagccacgatatatgaacgcgctgggcgagtggaagggagaaacggctcgattactcaaatccctattctaaccatgcctaatgatgatatcactcaccccatcccagacttgactggctacattacagaggggcagatctatgtggacagacagctgcacaacagacagatttatccacctatcaatgtgctgccctcactatcacggttaatgaagtctgctattggagaagggatgaccaggaaggatcatgccgatgtatctaaccagctatatgcgtgctatgctattggaaaggatgtgcaagccatgaaagctgtcgttggagaagaagcccttacctcagatgatcttctctacttggaatttctgcagaagtttgagaggaacttcattgctcagggtccttacgaaaatcgcactgtctttgagactttggacattggctggcagctactccgaatcttccccaaagaaatgctgaagagaatccctcagagcaccctcagcgaattttaccctcgagactctgcaaagcattagctgctgcttctgcattgctccgcgctcttgtgaaatactggttctgttttctttattccttttgcactctcggttcccacctttgtgttggagtttaccatgttaccctgtaattaaaaacaaagaataggtaacatattgtgccagtgttgcaacgttttaaactgctaacagaccttaaaatatccccctacctgggtcctcagtgctatgtttaaagtgctgcagggatggagtggcgttttcttattgctgtatgtattgtacatagtggagtagttagttacctgataacagtcttttataatgctttggtctctacattaggggcaagatccagtctgagagaagtctcctttgagaagggccaagaggctctttcctgagtgtttgctttcggtttgttggtatgcctgtattgctgggctgtgctgctgctcgaagcagatggttttgactgtctttttgctctttcctatataatgaatagatgagtgaaaggagttttctttttctctttagtacttacgtattgggattcctgtgtcttacagctctccctctccaaataatacacagaatcctgcaactttttgcacagctggtatctgtctggtagcagtgagaccccttgtcttggtgatccttactgggtttccaagcagaggagtcacatgattacaattgccagtagagttgttgtttggggtacaagatgagaagaaagaaaaacctacagcctttctacattctgacatgctaacagtggtttaagtttctaaagtgtttaccagatgctgaaggcaaggggagggagcagaagcacttatgtttacggatattttaaactctgttagagagcagcctttgaaaatccccaatttggttctgctttttgacctctctctaccttttcagggtaatctttgtggcacaaacgatagcatttccaagctttagagttttctgaattcctgcgccttcctgacgtgagccctgagcgatcttctatgcagttctgccatgcgtcctgttggtctctctgtgttctttgttacttgggtgcaatagcaacttccctaccccgtgcattccatctttcatgttgtgtaaagttcttcacttttttctctgagggctgggggttgggggagtcagcatgattatattttaatgtagaaaatgtgacatctggatataaaatgaaaataaatgttaaattaaatgga

SEQ ID NO: 444082 - DNA, 2039 bp, Homo sapiens
gcgcggcgtcgctgctgggccagtcgggacagaggagacaagatggcgctgcgggcgatgcgggggattgtcaacggggccgcacccgagctacccgtgcccaccggtgggccggcggtgggagctcgggagcaggcgctggcagtcagtcggaactacctctcccagcctcgcctcacatacaagacagtatctggagtcaatggtccactagtgatcttagatcatgttaagtttcccaggtatgctgaaattgtccatttgaccttaccggatggcacaaagagaagtgggcaagttctggaagttagtggttccaaggcagtagttcaggtatttgaagggacttcaggtatagatgctaagaaaacgtcctgtgagtttactggggatattctccgaacaccggtgtctgaggatatgcttggtcgggtattcaatggatcgggaaaacccattgacagaggtcctgttgtactggccgaagacttccttgatatcatgggtcagccaatcaaccctcaatgtcgaatctacccagaggaaatgattcagactggcatttcggccatcgatgggatgaacagtattgctagggggcagaaaattcctatcttctctgctgctgggctaccacacaatgagattgcagctcagatctgtcgccaggctggtttggtaaagaaatccaaagatgtagtagactacagtgaggaaaattttgcaattgtatttgctgctatgggtgtaaacatggaaactgcccggttcttcaaatctgactttgaagaaaatggctcaatggacaatgtctgcctctttttgaacttggctaatgacccaaccattgagcgaattatcactcctcgcctggctctaaccacagctgaatttctggcgtaccaatgtgagaaacatgtattggttattctaacagacatgagttcttatgctgaagcacttcgagaggtttcagcagccagggaagaggtacctggtcgacgaggttttccaggttacatgtatacagatttagccacgatatatgaacgcgctgggcgagtggaagggagaaacggctcgattactcaaatccctattctaaccatgcctaatgatgatatcactcaccccatcccagacttgactggctacattacagaggggcagatctatgtggacagacagctgcacaacagacagatttatccacctatcaatgtgctgccctcactatcacggttaatgaagtctgctattggagaagggatgaccaggaaggatcatgccgatgtatctaaccagctatatgcgtgctatgctattggaaaggatgtgcaagccatgaaagctgtcgttggagaagaagcccttacctcagatgatcttctctacttggaatttctgcagaagtttgagaggaacttcattgctcagggtccttacgaaaatcgcactgtctttgagactttggacattggctggcagctactccgaatcttccccaaagaaatgctgaagagaatccctcagagcaccctcagcgaattttaccctcgagactctgcaaagcattagctgctgcttctgcattgctccgcgctcttgtgaaatactggttctgttttctttattccttttgcactctcggttcccacctttgtgttggagtttaccatgttaccctgtaattaaaaacaaagaataggtaacatattgtgccagtgttgcaacgttttaaactgctaacagaccttaaaatatccccctacctgggtccttacgaaaatcgcactgtctttgagactttggacattggctggcagttctgccatgcgtcctgttggtctctctgtgttctttgttacttgggtgcaatagcaacttccctaccccgtgcattccatctttcatgttgtgtaaagttcttcacttttttctctgagggctgggggttgggggagtcagcatgattatattttaatgtagaaaatgtgacatctggatataaaatgaaaataaatgttaaattaaatgga

SEQ ID NO: 444083 - DNA, 676 bp, Homo sapiens
gtcgatggaagctcactcacagacagaatcctgcaactttttgcacagctggtatctgtctggtagcagtgagaccccttgtcttggtgatccttactgggtttccaagcagaggagtcacatgattacaattgccagtagagttgttgtttggggtacaagatgagaagaaagaaaaacctacagcctttctacattctgacatgctaacagtggtttaagtttctaaagtgtttaccagatgctgaaggcaaggggagggagcagaagcacttatgtttacggatattttaaactctgttagagagcagcctttgaaaatccccaatttggttctgctttttgacctctctctaccttttcagggtaatctttgtggcacaaacgatagcatttccaagctttagagttttctgaattcctgcgccttcctgacgtgagccctgagcgatcttctatgcagttctgccatgcgtcctgttggtctctctgtgttctttgttacttgggtgcaatagcaacttccctaccccgtgcattccatctttcatgttgtgtaaagttcttcacttttttctctgagggctgggggttgggggagtcagcatgattatattttaatgtagaaaatgtgacatctggatataaaatgaaaataaatgttaaattaaatgga

SEQ ID NO: 444084 - DNA, 743 bp, Homo sapiens
gcgcggcgtcgctgctgggccagtcgggacagaggagacaagatggcgctgcgggcgatgcgggggattgtcaacggggccgcacccgagctacccgtgcccaccggtgggccggcggtgggagctcgggagcaggcgctggcagtcagtcggaactacctctcccagcctcgcctcacatacaagacagtatctggagtcaatggtccactagtgatcttagatcatgttaagtttcccaggtatgctgaaattgtccatttgaccttaccggatggcacaaagagaagtgggcaagttctggaagttagtggttccaaggcagtagttcaggtatttgaagggacttcaggtatagatgctaagaaaacgtcctgtgagtttactggggatattctccgaacaccggtgtctgaggatatgcttggtcgggtattcaatggatcgggaaaacccattgacagaggtcctgttgtactggccgaagacttccttgatatcatgggtcagccaatcaaccctcaatgtcgaatctacccagaggaaatgattcagactggcatttcggccatcgatgggatgaacagtattgctagggggcagaaaattcctatcttctctgctgctgggctaccacacaatgaggtgaggactgggatcggtttgctatgaagtttagcagacaagaatttctataatgcatcactgttactgagaaaccgaataaagggttttcaaaataa

SEQ ID NO: 444085 - DNA, 346 bp, Homo sapiens
tgtgtgagtgggtgtgtatttaacagctttactgcaatataattcacataccatctaattcacccactgaaagtgccattcagtgatttttagtatagtcacagagtgtgcaaccatcacaatcaatgttacaacattttcatattctctccccacccccaaaagactgtacccattagaagccactctccatttctccccaaccctaccagtcccgggcggctactgatctttctctgtccatggatttgcctgttctggattttctttttttttctttcagacggagtctcattctgtcgcccaggctggagtgagtggcgtgatctcagctcactgcaacctc

SEQ ID NO: 444086 - DNA, 2866 bp, Homo sapiens
gcgcggcgtcgctgctgggccagtcgggacagaggagacaagatggcgctgcgggcgatgcgggggattgtcaacggggccgcacccgagctacccgtgcccaccggtgggccggcggtgggagctcgggagcaggcgctggcagtcagtcggaactacctctcccagcctcgcctcacatacaagacagtatctggagtcaatggtccactagtgatcttagatcatgttaagtttcccaggtatgctgaaattgtccatttgaccttaccggatggcacaaagagaagtgggcaagttctggaagttagtggttccaaggcagtagttcaggtatttgaagggacttcaggtatagatgctaagaaaacgtcctgtgagtttactggggatattctccgaacaccggtgtctgaggatatgcttggtcgggtattcaatggatcgggaaaacccattgacagaggtcctgttgtactggccgaagacttccttgatatcatgggtcagccaatcaaccctcaatgtcgaatctacccagaggaaatgattcagactggcatttcggccatcgatgggatgaacagtattgctagggggcagaaaattcctatcttctctgctgctgggctaccacacaatgagattgcagctcagatctgtcgccaggctggtttggtaaagaaatccaaagatgtagtagactacagtgaggaaaattttgcaattgtatttgctgctatgggtgtaaacatggaaactgcccggttcttcaaatctgactttgaagaaaatggctcaatggacaatgtctgcctctttttgaacttggctaatgacccaaccattgagcgaattatcactcctcgcctggctctaaccacagctgaatttctggcgtaccaatgtgagaaacatgtattggttattctaacagacatgagttcttatgctgaagcacttcgagaggtttcagcagccagggaagaggtacctggtcgacgaggttttccaggttacatgtatacagatttagccacgatatatgaacgcgctgggcgagtggaagggagaaacggctcgattactcaaatccctattctaaccatgcctaatgatgatatcactcaccccatcccagacttgactggctacattacagaggggcagatctatgtggacagacagctgcacaacagacagatttatccacctatcaatgtgctgccctcactatcacggttaatgaagtctgctattggagaagggatgaccaggaaggatcatgccgatgtatctaaccagctatatgcgtgctatgctattggaaaggatgtgcaagccatgaaagctgtcgttggagaagaagcccttacctcagatgatcttctctacttggaatttctgcagaagtttgagaggaacttcattgctcagggtccttacgaaaatcgcactgtctttgagactttggacattggctggcagctactccgaatcttccccaaagaaatgctgaagagaatccctcagagcaccctcagcgaattttaccctcgagactctgcaaagcattagctgctgcttctgcattgctccgcgctcttgtgaaatactggttctgttttctttattccttttgcactctcggttcccacctttgtgttggagtttaccatgttaccctgtaattaaaaacaaagaataggtaacatattgtgccagtgttgcaacgttttaaactgctaacagaccttaaaatatccccctacctgggtcctcagtgctatgtttaaagtgctgcagggatggagtggcgttttcttattgctgtatgtattgtacatagtggagtagttagttacctgataacagtcttgttatttgggtctcttagaccttacctctcaactccctcaagagtaccagtctctgaagttataatgctttggtctctacattaggggcaagatccagtctgagagaagtctcctttgagaagggccaagaggctctttcctgagtgtttgctttcggtttgttggtatgcctgtattgctgggctgtgctgctgctcgaagcagatggttttgactgtctttttgctctttcctatataatgaatagatgagtgaaaggagttttctttttctctttagtacttacgtattgggattcctgtgtcttacagctctccctctccaaataatacacagaatcctgcaactttttgcacagctggtatctgtctggtagcagtgagaccccttgtcttggtgatccttactgggtttccaagcagaggagtcacatgattacaattgccagtagagttgttgtttggggtacaagatgagaagaaagaaaaacctacagcctttctacattctgacatgctaacagtggtttaagtttctaaagtgtttaccagatgctgaaggcaaggggagggagcagaagcacttatgtttacggatattttaaactctgttagagagcagcctttgaaaatccccaatttggttctgctttttgacctctctctaccttttcagggtaatctttgtggcacaaacgatagcatttccaagctttagagttttctgaattcctgcgccttcctgacgtgagccctgagcgatcttctatgcagttctgccatgcgtcctgttggtctctctgtgttctttgttacttgggtgcaatagcaacttccctaccccgtgcattccatctttcatgttgtgtaaagttcttcacttttttctctgagggctgggggttgggggagtcagcatgattatattttaatgtagaaaatgtgacatctggatataaaatgaaaataaatgttaaattaaatgga

SEQ ID NO: 444087 - DNA, 3142 bp, Homo sapiens
gcgcggcgtcgctgctgggccagtcgggacagaggagacaagatggcgctgcgggcgatgcgggggattgtcaacggggccgcacccgagctacccgtgcccaccggtgggccggcggtgggagctcgggagcaggcgctggcagtcagtcggaactacctctcccagcctcgcctcacatacaagacagtatctggagtcaatggtccactagtgatcttagatcatgttaagtttcccaggtatgctgaaattgtccatttgaccttaccggatggcacaaagagaagtgggcaagttctggaagttagtggttccaaggcagtagttcaggtatttgaagggacttcaggtatagatgctaagaaaacgtcctgtgagtttactggggatattctccgaacaccggtgtctgaggatatgcttggtcgggtattcaatggatcgggaaaacccattgacagaggtcctgttgtactggccgaagacttccttgatatcatgggtcagccaatcaaccctcaatgtcgaatctacccagaggaaatgattcagactggcatttcggccatcgatgggatgaacagtattgctagggggcagaaaattcctatcttctctgctgctgggctaccacacaatgagattgcagctcagatctgtcgccaggctggtttggtaaagaaatccaaagatgtagtagactacagtgaggaaaattttgcaattgtatttgctgctatgggtgtaaacatggaaactgcccggttcttcaaatctgactttgaagaaaatggctcaatggacaatgtctgcctctttttgaacttggctaatgacccaaccattgagcgaattatcactcctcgcctggctctaaccacagctgaatttctggcgtaccaatgtgagaaacatgtattggttattctaacagacatgagttcttatgctgaagcacttcgagaggtttcagcagccagggaagaggtacctggtcgacgaggttttccaggttacatgtatacagatttagccacgatatatgaacgcgctgggcgagtggaagggagaaacggctcgattactcaaatccctattctaaccatgcctaatgatgatatcactcaccccatcccagacttgactggctacattacagaggggcagatctatgtggacagacagctgcacaacagacagatttatccacctatcaatgtgctgccctcactatcacggttaatgaagtctgctattggagaagggatgaccaggaaggatcatgccgatgtatctaaccagctatatgcgtgctatgctattggaaaggatgtgcaagccatgaaagctgtcgttggagaagaagcccttacctcagatgatcttctctacttggaatttctgcagaagtttgagaggaacttcattgctcagggtccttacgaaaatcgcactgtctttgagactttggacattggctggcagctactccgaatcttccccaaagaaatgctgaagagaatccctcagagcaccctcagcgaattttaccctcgagactctgcaaagcattagctgctgcttctgcattgctccgcgctcttgtgaaatactggttctgttttctttattccttttgcactctcggttcccacctttgtgttggagtttaccatgttaccctgtaattaaaaacaaagaataggtaacatattgtgccagtgttgcaacgttttaaactgctaacagaccttaaaatatccccctacctgggtcctcagtgctatgtttaaagtgctgcagggatggagtggcgttttcttattgctgtatgtattgtacatagtggagtagttagttacctgataacagtcttgttatttgggtctcttagaccttacctctcaactccctcaagagtaccagtctctgaagttataatgctttggtctctacattaggggcaagatccagtctgagagaagtctcctttgagaagggccaagaggctctttcctgagtgtttgctttcggtttgttggtatgcctgtattgctgggctgtgctgctgctcgaagcagatggttttgactgtctttttgctctttcctatataatgaatagatgagtgaaaggagttttctttttctctttagtacttacgtattgggattcctgtgtcttacagctctccctctccaaataatacacagaatcctgcaactttttgcacagctggtatctgtctggtagcagtgagaccccttgtcttggtgatccttactgggtttccaagcagaggagtcacatgattacaattgccagtagagttgttgtttggggtacaagatgagaagaaagaaaaacctacagcctttctacattctgacatgctaacagtggtttaagtttctaaagtgtttaccagatgctgaaggcaaggggagggagcagaagcacttatgtttacggatattttaaactctgttagagagcagcctttgaaaatccccaatttggttctgctttttgacctctctctaccttttcagggtaatctttgtggcacaaacgatagcatttccaagctttagagttttctgaattcctgcgccttcctgacgtgagccctgagcgatcttctatgcagttctgccatgcgtcctgttggtctctctgtgttctttgttacttgggtgcaatagcaacttccctaccccgtgcattccatctttcatgttgtgtaaagttcttcacttttttctctgagggctgggggttgggggagtcagcatgattatattttaatgtagaaaatgtgacatctggatataaaatgaaaataaatgttaaattaaatggaaaaaaaaaaaacgaacaaaacactaaagcactcacatggttgtttggagcgccatgagcgccaccgaaaaaagtgttaagaccacatcggtgggggcagcgggccccagtaggtaagtagaccatggcccaatagctggttcacaaagagcgacccgcgggccagcacaacggggtgattcccccaaagaaaacgcgcggggaaccggaccgcttgaacaaccacaggagaccgaggcaagggggtccaagggcacgaggcgacaataccccggtg

SEQ ID NO: 444088 - DNA, 3006 bp, Homo sapiens
agggagaacaacataggttaggtgcaggcctgggtggctcgggacagaggagacaagatggcgctgcgggcgatgcgggggattgtcaacggggccgcacccgagctacccgtgcccaccggtgggccggcggtgggagctcgggagcaggcgctggcagtcagtcggaactacctctcccagcctcgcctcagctataccatttctccaatttcctttgtgacttttgtcacttctgcgtaacattaaggattccctttcctcatctacttagctaaatgctgcgtcctctataaagtttttacttttctccctgagcatacaagacagtatctggagtcaatggtccactagtgatcttagatcatgttaagtttcccaggtatgctgaaattgtccatttgaccttaccggatggcacaaagagaagtgggcaagttctggaagttagtggttccaaggcagtagttcaggtatttgaagggacttcaggtatagatgctaagaaaacgtcctgtgagtttactggggatattctccgaacaccggtgtctgaggatatgcttggtcgggtattcaatggatcgggaaaacccattgacagaggtcctgttgtactggccgaagacttccttgatatcatgggtcagccaatcaaccctcaatgtcgaatctacccagaggaaatgattcagactggcatttcggccatcgatgggatgaacagtattgctagggggcagaaaattcctatcttctctgctgctgggctaccacacaatgagattgcagctcagatctgtcgccaggctggtttggtaaagaaatccaaagatgtagtagactacagtgaggaaaattttgcaattgtatttgctgctatgggtgtaaacatggaaactgcccggttcttcaaatctgactttgaagaaaatggctcaatggacaatgtctgcctctttttgaacttggctaatgacccaaccattgagcgaattatcactcctcgcctggctctaaccacagctgaatttctggcgtaccaatgtgagaaacatgtattggttattctaacagacatgagttcttatgctgaagcacttcgagaggtttcagcagccagggaagaggtacctggtcgacgaggttttccaggttacatgtatacagatttagccacgatatatgaacgcgctgggcgagtggaagggagaaacggctcgattactcaaatccctattctaaccatgcctaatgatgatatcactcaccccatcccagacttgactggctacattacagaggggcagatctatgtggacagacagctgcacaacagacagatttatccacctatcaatgtgctgccctcactatcacggttaatgaagtctgctattggagaagggatgaccaggaaggatcatgccgatgtatctaaccagctatatgcgtgctatgctattggaaaggatgtgcaagccatgaaagctgtcgttggagaagaagcccttacctcagatgatcttctctacttggaatttctgcagaagtttgagaggaacttcattgctcagggtccttacgaaaatcgcactgtctttgagactttggacattggctggcagctactccgaatcttccccaaagaaatgctgaagagaatccctcagagcaccctcagcgaattttaccctcgagactctgcaaagcattagctgctgcttctgcattgctccgcgctcttgtgaaatactggttctgttttctttattccttttgcactctcggttcccacctttgtgttggagtttaccatgttaccctgtaattaaaaacaaagaataggtaacatattgtgccagtgttgcaacgttttaaactgctaacagaccttaaaatatccccctacctgggtcctcagtgctatgtttaaagtgctgcagggatggagtggcgttttcttattgctgtatgtattgtacatagtggagtagttagttacctgataacagtcttgttatttgggtctcttagaccttacctctcaactccctcaagagtaccagtctctgaagttataatgctttggtctctacattaggggcaagatccagtctgagagaagtctcctttgagaagggccaagaggctctttcctgagtgtttgctttcggtttgttggtatgcctgtattgctgggctgtgctgctgctcgaagcagatggttttgactgtctttttgctctttcctatataatgaatagatgagtgaaaggagttttctttttctctttagtacttacgtattgggattcctgtgtcttacagctctccctctccaaataatacacagaatcctgcaactttttgcacagctggtatctgtctggtagcagtgagaccccttgtcttggtgatccttactgggtttccaagcagaggagtcacatgattacaattgccagtagagttgttgtttggggtacaagatgagaagaaagaaaaacctacagcctttctacattctgacatgctaacagtggtttaagtttctaaagtgtttaccagatgctgaaggcaaggggagggagcagaagcacttatgtttacggatattttaaactctgttagagagcagcctttgaaaatccccaatttggttctgctttttgacctctctctaccttttcagggtaatctttgtggcacaaacgatagcatttccaagctttagagttttctgaattcctgcgccttcctgacgtgagccctgagcgatcttctatgcagttctgccatgcgtcctgttggtctctctgtgttctttgttacttgggtgcaatagcaacttccctaccccgtgcattccatctttcatgttgtgtaaagttcttcacttttttctctgagggctgggggttgggggagtcagcatgattatattttaatgtagaaaatgtgacatctggatataaaatgaaaataaatgttaaattaaatgga

SEQ ID NO: 444089 - DNA, 2118 bp, Homo sapiens
gcgcggcgtcgctgctgggccagtcgggacagaggagacaagatggcgctgcgggcgatgcgggggattgtcaacggggccgcacccgagctacccgtgcccaccggtgggccggcggtgggagctcgggagcaggcgctggcagtcagtcggaactacctctcccagcctcgcctcacatacaagacagtatctggagtcaatggtccactagtgatcttagatcatgttaagtttcccaggtatgctgaaattgtccatttgaccttaccggatggcacaaagagaagtgggcaagttctggaagttagtggttccaaggcagtagttcaggtatttgaagggacttcaggtatagatgctaagaaaacgtcctgtgagtttactggggatattctccgaacaccggtgtctgaggatatgcttggtcgggtattcaatggatcgggaaaacccattgacagaggtcctgttgtactggccgaagacttccttgatatcatgggtcagccaatcaaccctcaatgtcgaatctacccagaggaaatgattcagactggcatttcggccatcgatgggatgaacagtattgctagggggcagaaaattcctatcttctctgctgctgggctaccacacaatgagattgcagctcagatctgtcgccaggctggtttggtaaagaaatccaaagatgtagtagactacagtgaggaaaattttgcaattgtatttgctgctatgggtgtaaacatggaaactgcccggttcttcaaatctgactttgaagaaaatggctcaatggacaatgtctgcctctttttgaacttggctaatgacccaaccattgagcgaattatcactcctcgcctggctctaaccacagctgaatttctggcgtaccaatgtgagaaacatgtattggttattctaacagacatgagttcttatgctgaagcacttcgagaggtttcagcagccagggaagaggtacctggtcgacgaggttttccaggttacatgtatacagatttagccacgatatatgaacgcgctgggcgagtggaagggagaaacggctcgattactcaaatccctattctaaccatgcctaatgatgatatcactcaccccatcccagacttgactggctacattacagaggggcagatctatgtggacagacagctgcacaacagacagatttatccacctatcaatgtgctgccctcactatcacggttaatgaagtctgctattggagaagggatgaccaggaaggatcatgccgatgtatctaaccagctatatgcgtgctatgctattggaaaggatgtgcaagccatgaaagctgtcgttggagaagaagcccttacctcagatgatcttctctacttggaatttctgcagaagtttgagaggaacttcattgctcagggtgtctcactttgtcgcccaggctggagtacagtggtgcgatcttgactgactgcaacctgcaacctctgcctccggactcaagcgattctcttgccttagcctcctgagtagctgggattacaggagaccccaggaactgaagtggcaagggtgaatcctgtgagacgatgaggaatgagaccaggctgaagtgtgagatgcagtagccctcctccacctccaccagaaggcaggggtggaataagagctgaaagacggagtctcattctgtcgcccaggctggagtgagtggcgtgatctcagctcactgcaacctccatctcccaggttcaagtgattctcatgcctcagcctctcgagtagctggaatgataggcgcgcaccgccatgcctggcgaatttttgtgtttttagtagagacggggtttcaccatgttggccaggctggtcttgaattcctgacctcaagtgatccactcttctcgacctcccaaagtgttgggattataggcgtgagccaccgcgcccggcctgttctggatatttcttataaatggaatcatacagtgcttctttcagttagcataatgtttcccaggttcatccaggtcataacacataatcaggcttcatttctttttattaccaaataatattatatgaatatactactttgtg

SEQ ID NO: 444090 - DNA, 2468 bp, Homo sapiens
tgtttgaacgtaaggaggaagtcaaacagattcatggggatacggtccagaaccagctggtggtccaaggagtggagctcccatcttacctccccttgtacccgcctgccatggactggatcttccagtgcatctcctaccatgcccccgaggctctgctgaccgagatgatggaaaggtgtaagaaactaggaaacaatgccttgctgttgaattctgtgatgtctgccttccgggctgagttcatcgccacaaggtctatggatttcattggcatgattaaagagtgtgatgaatctggtttccccaagcatcttctttttcgatcactgggattaaacttggccttggctgatcctcctgagagtgaccgacttcagattctcaacgaagcttggaaagtcatcactaagctgaagaacccacaggactacattaattgtgccgaagtgtgggtggaatacacctgcaagcatttcacgaaacgagaggtgaataccgttttggcagatgtcatcaagcacatgactccagatcgtgcatttgaagattcctacccccagcttcagttaataattaagaaagttattgcccacttccatgacttctcagttcttttctcagtggaaaaatttctgccgtttctggacatgttccaaaaagagagtgtgcgggtggaggtttgcaaatgcatcatggacgcctttatcaagcatcaacaagagcccaccaaggacccggtcatcttgaatgcccttttgcatgtttgcaagaccatgcatgactctgtgaatgcactcactcttgaggatgagaaaagaatgctgtcatatttgattaatggatttataaaaatggtttcctttggccgtgattttgaacaacagctgagtttttatgttgagtccaggtcgatgttttgcaatctggagcctgttcttgtgcagttgattcatagtgtgaaccggttggcaatggagacaagaaaagtaatgaaaggaaatcattccagaaagacagctgcatttgtccgggcctgtgttgcctactgcttcatcaccatcccctccctggcgggcatcttcacacgtctcaatctctacctgcattctggtcaggtggccttggccaaccagtgcctctcccaagctgatgcttttttcaaagccgctataagccttgttccggaagttccaaagatgattaatattgatgggaagatgcggccatcggaatcgttccttctggaattcctctgcaatttcttttctactttattaatagttccggatcatcctgaacatggggtcctgtttcttgttcgagagcttctcaacgtgatccaggactacacctgggaggacaacagcgatgagaaaatccgcatctacacctgcgtcctgcatctcctctccgccatgagccaggagacgtacctttaccacatagacaaagtggactccaacgacagcctctacgggggagactccaagttcctggcagaaaacaacaagctgtgtgagacggtgatggctcagatcctagagcatctgaaaaccctggccaaggacgaggccctgaagcgccagagctcgttgggcctttccttctttaacagcatcttggcccatggggacctacgcaacaacaagctcaaccagctctccgtcaacctgtggcacctggcacagaggcacggctgtgcagacaccaggaccatggtgaaaacgctagaatacatcaagaagcaaagcaaacaaccagacatgactcatctgacggagctggccctcagactccctctgcaaacaaggacctgacccccgggcccatccccaggctcagggactctggtgccaaatccagaaagatctgctctgctgccctgaactcttacggcaatttaggtttctcatttttcttttctttttacatatgtacaaattgttttaagctttggcctctatccaggttattctgacaatgaagaaatgggagttgtcagagcattaaaatgcaatcttcactaagaagcagtctctgtgttgtctttgcacaagtggccttcggtctactcagcccgatctgatgggcctttttagcaagagagaaacaagaatgcaagtaacatctttcttctctggaaggtgtttgttttttcatagtttagaaataaggactttaaaagtggactgcttttcaaagtgccactgttccagacccattccattccagactttgtaccttaaagttagagcacacccaaagtctggaactgtgttacctgaacccctatggaggatttataaaaggcagaaatagcactccattaactctttttcctatcaaaagcagctcttgattggacttagaatctgtgttggtggatcaaaggagaaagcgaggtcaaatttgagattctctgtggcttcagtatacagtaactgaataaatgtcctgaaggagca

SEQ ID NO: 444091 - DNA, 646 bp, Homo sapiens
cccatcttcgccccatcagtattgcacatccttagagagggatcattgcacctgataagccccagacttccttgaggacaaagctgcagttagagcctcccccatgagtttgcaccttattaaatcagaaggcgagaacatgtagcctgtgatttgcctcttctgcatgacagccagcaaatgtcggaagccctgtggtctctcaagtttcacgaaaaactaagtcagtgccctcagagtgaggagcagatatccattaggaagggcactttttataggtctgtttcttgatactgagaatgaaagaaaaagcctttcgtttaagggcatcctcttccctctttgcagcagaggccaaagtgtgtatgcatcgcccactgcttgaaacctgggggggattttccatccagagatatcaggtgtgtttccaaggacaacttttgaatatattaaagcttgaatactcctcccaagtcagtgtttgctgaggccctactgtgcacagaacacaatgccacatcctctgggagaagactgggcccatcagggccaactagtagctgattcttctcttcatcagcttgtccttcttagtcactccgaataaattagagaaaattagttcacatactgatgggagagtctg

SEQ ID NO: 444092 - DNA, 534 bp, Homo sapiens
  misc_feature (69)..(69): n is a, c, g, or t
  misc_feature (71)..(71): n is a, c, g, or t
cgccgtcatcgtaaggcgcgttctgtaacttggccataaacctgtttccgtcaagattgcctccatcangnaactcattccaagattttacgtggaggcatccatcctgaaatgtaacaaattcctctccaaaacgggaatttcagagtgcctgccccggttgacatgcatgatcagagggatcggagacccactagtgtcggtgtatgcccgtgcctacctgtgccgggctctgctgaccgagatgatggaaaggtgtaagaaactaggaaacaatgccttgctgttgaattctgtgatgtctgccttccgggctgagttcatcgccacaaggtctatggatttcattggcatgattaaagagtgtgatgaatctggtttccccaagcatcttctttttcgatcactgggattaaacttggccttgccatatgcaattgcatatggcaaggccaagaatcgtttcttattgtatcttttatttaggtgccaaggtataacccactgcttgaacttgtgccagatgattcttcc

SEQ ID NO: 444093 - DNA, 447 bp, Homo sapiens
ggctaatttttgtgtttttggtacagagggagtttcgccatgttgaccgggctggtctcgggctcctagcctcaagtgattggcccgcctgggcctcccagggtgctgggattacaggtgtgagccactgcagcccagcctacgaagttgtttttgcggttaagcagcaatttggaaacgaagcatttctgaggagctcagtttaagaaacactgtgatgttgtgttttaaacctatgaactcccctccgtagctcatccctctacttttccatctaaccccagtactggcaccttctctatgattagtaaatttcttcagctagaaatgttacagtctgttttttaacaatgaagtcaggacccagtggattatagcattgttacacttcatgctcatgttatataaaattgcataaaatgtattaaaatttatgtctgctcttat

SEQ ID NO: 444094 - DNA, 441 bp, Homo sapiens
tttttgatttttggcatccttatctggactgcctttctttaggaataaacagatgatacagagcaaagtttgtaaatctcaaatgcagcggttaacctctttgaggctggcccactgggtcccaggggcagcttctaagtgggaaatgtttcgatggaattctggttacataaggaagttgctttgaaaatctgggatagttttctataatggaatcattcccttgtgtctttattcacgatgaagtgtagagtgaaagatgcctccactgggggtattggtgcacgagaaaagccacctgtgtgacgtaaattcattctgtttaggcaaagctgggactgccacattggcaatgtcagagaaggtgcggacccggctggaggagctggatgactttgaggaggtgagcaagtcatttgtggaatacagggagtgggagag

SEQ ID NO: 444095 - DNA, 96 bp, Homo sapiens
aaaaaagttttatgtgatatgattctgatgtttgattcagttggagctgctatttcttagattgtggatagacgtagaaataaaatacatatttag

SEQ ID NO: 444096 - DNA, 3144 bp, Homo sapiens
gcggccgctgcggggcggccagctgcccttcacaaacatggcggccgaggggtgcggggagtggcggggtaaggatgggaagccgagcagacggccccagaacaagcggtcatgtgactgggaagatggccgtctttccttggcactccaggaataggaactacaaagctgaatttgcatcatgccgactggaggctgtaccattggagtttggggactatcaccctctgaaacccataactgtcacagagtcaaagacaaagaaagtgaaccggaaaggaagcacttcttccacgtcctcctcctcctccagctccgtggtggacccgctgagcagcgtcctcgatgggactgaccccctctccatgtttgcagccactgctgaccccgcagccttggcagctgccatggacagctccagaaggaaacgtgatagagatgataactccgttgtaggatcggattttgagccttggaccaacaaacggggagaaatccttgcccggtacaccactaccgaaaagctgtctattaatctgtttatgggatctgaaaaaggcaaagctgggactgccacattggcaatgtcagagaaggtgcggacccggctggaggagctggatgactttgaggagggttcccaaaaggagctgttgaacttgactcagcaggattacgtgaaccgcatagaggagctcaaccaatcgctgaaggatgcctgggcctcagaccagaaagtgaaggctctaaaaatagtcatccaggaaagctcgtgtacgagcgcatcttttccatgtgtgtggatagccgcagcgtcttaccagatcacttttctccagagaatgcaaatgacacggccaaggaaacatgcctaaattggtttttcaagattgcctccatcagggaactcattccaagattttacgtggaggcatccatcctgaaatgtaacaaattcctctccaaaacgggaatttcagagtgcctgccccggttgacatgcatgatcagagggatcggagacccactagtgtcggtgtatgcccgtgcctacctgtgccgggtgggaatggaagtggccccacatctcaaagaaaccctaaataagaacttttttgacttcctccttacgttcaaacagattcatggggatacggtccagaaccagctggtggtccaaggagtggagctcccatcttacctccccttgtacccgcctgccatggactggatcttccagtgcatctcctaccatgcccccgaggctctgctgaccgagatgatggaaaggtgtaagaaactaggaaacaatgccttgctgttgaattctgtgatgtctgccttccgggctgagttcatcgccacaaggtctatggatttcattggcatgattaaagagtgtgatgaatctggtttccccaagcatcttctttttcgatcactgggattaaacttggccttggctgatcctcctgagagtgaccgacttcagattctcaacgaagcttggaaagtcatcactaagctgaagaacccacaggactacattaattgtgccgaagtgtgggtggaatacacctgcaagcatttcacgaaacgagaggtgaataccgttttggcagatgtcatcaagcacatgactccagatcgtgcatttgaagattcctacccccagcttcagttaataattaagaaagttattgcccacttccatgacttctcagttcttttctcagtggaaaaatttctgccgtttctggacatgttccaaaaagagagtgtgcgggtggaggtttgcaaatgcatcatggacgcctttatcaagcatcaacaagagcccaccaaggacccggtcatcttgaatgcccttttgcatgtttgcaagaccatgcatgactctgtgaatgcactcactcttgaggatgagaaaagaatgctgtcatatttgattaatggatttataaaaatggtttcctttggccgtgattttgaacaacagctgagtttttatgttgagtccaggtcgatgttttgcaatctggagcctgttcttgtgcagttgattcatagtgtgaaccggttggcaatggagacaagaaaagtaatgaaaggaaatcattccagaaagacagctgcatttgtccgggcctgtgttgcctactgcttcatcaccatcccctccctggcgggcatcttcacacgtctcaatctctacctgcattctggtcaggtggccttggccaaccagtgcctctcccaagctgatgcttttttcaaagccgctataagccttgttccggaagttccaaagatgattaatattgatgggaagatgcggccatcggaatcgttccttctggaattcctctgcaatttcttttctactttattaatagttccggatcatcctgaacatggggtcctgtttcttgttcgagagcttctcaacgtgatccaggactacacctgggaggacaacagcgatgagaaaatccgcatctacacctgcgtcctgcatctcctctccgccatgagccaggagacgtacctttaccacatagacaaagtggactccaacgacagcctctacgggggagactccaagttcctggcagaaaacaacaagctgtgtgagacggtgatggctcagatcctagagcatctgaaaaccctggccaaggacgaggccctgaagcgccagagctcgttgggcctttccttctttaacagcatcttggcccatggggacctacgcaacaacaagctcaaccagctctccgtcaacctgtggcacctggcacagaggcacggctgtgcagacaccaggaccatggtgaaaacgctagaatacatcaagaagcaaagcaaacaaccagacatgactcatctgacggagctggccctcagactccctctgcaaacaaggacctgacccccgggcccatccccaggctcagggactctggtgccaaatccagaaagatctgctctgctgccctgaactcttacggcaatttaggtttctcatttttcttttctttttacatatgtacaaattgttttaagctttggcctctatccaggttattctgacaatgaagaaatgggagttgtcagagcattaaaatgcaatcttcactaaga

SEQ ID NO: 444097 - DNA, 2323 bp, Homo sapiens
  misc_feature (9)..(9): n is a, c, g, or t
atatacgantcgagccgtacctgtcatatggcaaggccaaggaaacatgcctaaattggtttttcaagattgcctccatcagggaactcattccaagattttacgtggaggcatccatcctgaaatgtaacaaattcctctccaaaacgggaatttcagagtgcctgccccggttgacatgcatgatcagagggatcggagacccactagtgtcggtgtatgcccgtgcctacctgtgccgggtgggaatggaagtggccccacatctcaaagaaaccctaaataagaacttttttgacttcctccttacgttcaaacagattcatggggatacggtccagaaccagctggtggtccaaggagtggagctcccatcttacctccccttgtacccgcctgccatggactggatcttccagtgcatctcctaccatgcccccgaggctctgctgaccgagatgatggaaaggtgtaagaaactaggaaacaatgccttgctgttgaattctgtgatgtctgccttccgggctgagttcatcgccacaaggtctatggatttcattggcatgattaaagagtgtgatgaatctggtttccccaagcatcttctttttcgatcactgggattaaacttggccttggctgatcctcctgagagtgaccgacttcagattctcaacgaagcttggaaagtcatcactaagctgaagaacccacaggactacattaattgtgccgaagtgtgggtggaatacacctgcaagcatttcacgaaacgagaggtgaataccgttttggcagatgtcatcaagcacatgactccagatcgtgcatttgaagattcctacccccagcttcagttaataattaagaaagttattgcccacttccatgacttctcagttcttttctcagtggaaaaatttctgccgtttctggacatgttccaaaaagagagtgtgcgggtggaggtttgcaaatgcatcatggacgcctttatcaagcatcaacaagagcccaccaaggacccggtcatcttgaatgcccttttgcatgtttgcaagaccatgcatgactctgtgaatgcactcactcttgaggatgagaaaagaatgctgtcatatttgattaatggatttataaaaatggtttcctttggccgtgattttgaacaacagctgagtttttatgttgagtccaggtcgatgttttgcaatctggagcctgttcttgtgcagttgattcatagtgtgaaccggttggcaatggagacaagaaaagtaatgaaaggaaatcattccagaaagacagctgcatttgtccgggcctgtgttgcctactgcttcatcaccatcccctccctggcgggcatcttcacacgtctcaatctctacctgcattctggtcaggtggccttggccaaccagtgcctctcccaagctgatgcttttttcaaagccgctataagccttgttccggaagttccaaagatgattaatattgatgggaagatgcggccatcggaatcgttccttctggaattcctctgcaatttcttttctactttattaatagttccggatcatcctgaacatggggtcctgtttcttgttcgagagcttctcaacgtgatccaggactacacctgggaggacaacagcgatgagaaaatccgcatctacacctgcgtcctgcatctcctctccgccatgagccaggagacgtacctttaccacatagacaaagtggactccaacgacagcctctacgggggagactccaagttcctggcagaaaacaacaagctgtgtgagacggtgatggctcagatcctagagcatctgaaaaccctggccaaggacgaggccctgaagcgccagagctcgttgggcctttccttctttaacagcatcttggcccatggggacctacgcaacaacaagctcaaccagctctccgtcaacctgtggcacctggcacagaggcacggctgtgcagacaccaggaccatggtgaaaacgctagaatacatcaagaagcaaagcaaacaaccagacatgactcatctgacggagctggccctcagactccctctgcaaacaaggacctgacccccgggcccatccccaggctcagggactctggtgccaaatccagaaagatctgctctgctgccctgaactcttacggcaatttaggtttctcatttttcttttctttttacatatgtacaaattgttttaagctttggcctctatccaggttattctgacaatgaagaaatgggagttgtcagagcattaaaatgcaatcttcactaaga

SEQ ID NO: 444098 - DNA, 3035 bp, Homo sapiens
gcggccgctgcggggcggccagctgcccttcacaaacatggcggccgaggggtgcggggagtggcggggtaaggatgggaagccgagcagacggccccagaacaagcggtcatgtgactgggaagatggccgtctttccttggcactccaggaataggaactacaaagctgaatttgcatcatgccgactggaggctgtaccattggagtttggggactatcaccctctgaaacccataactgtcacagagtcaaagacaaagaaagtgaaccggaaaggaagcacttcttccacgtcctcctcctcctccagctccgtggtggacccgctgagcagcgtcctcgatgggactgaccccctctccatgtttgcagccactgctgaccccgcagccttggcagctgccatggacagctccagaaggaaacgtgatagagatgataactccgttgtaggatcggattttgagccttggaccaacaaacggggagaaatccttgcccggtacaccactaccgaaaagctgtctattaatctgtttatgggatctgaaaaaggcaaagctgggactgccacattggcaatgtcagagaaggtgcggacccggctggaggagctggatgactttgaggagggttcccaaaaggagctgttgaacttgactcagcaggattacgtgaaccgcatagaggagctcaaccaatcgctgaaggatgcctgggcctcagaccagaaagtgaaggctctaaaaatagtcatccagtgttcaaagcttctttcagacaccagtgttattcagttctacccaagcaaatttgtccttatcaccgacatacttgatacatttggaaagctcgtgtacgagcgcatcttttccatgtgtgtggatagccgcagcgtcttaccagatcacttttctccagagaatgcaaatgacacggccaaggaaacatgcctaaattggtttttcaagattgcctccatcagggaactcattccaagattttacgtggaggcatccatcctgaaatgtaacaaattcctctccaaaacgggaatttcagagtgcctgccccggttgacatgcatgatcagagggatcggagacccactagtgtcggtgtatgcccgtgcctacctgtgccgggtgggaatggaagtggccccacatctcaaagaaaccctaaataagaacttttttgacttcctccttacgttcaaacagattcatggggatacggtccagaaccagctggtggtccaaggagtggagctcccatcttacctccccttgtacccgcctgccatggactggatcttccagtgcatctcctaccatgcccccgaggctctgctgaccgagatgatggaaaggtgtaagaaactaggaaacaatgccttgctgttgaattctgtgatgtctgccttccgggctgagttcatcgccacaaggtctatggatttcattggcatgattaaagagtgtgatgaatctggtttccccaagcatcttctttttcgatcactgggattaaacttggccttggctgatcctcctgagagtgaccgacttcagattctcaacgaagcttggaaagtcatcactaagctgaagaacccacaggactacattaattgtgccgaagtgtgggtggaatacacctgcaagcatttcacgaaacgagaggtgaataccgttttggcagatgtcatcaagcacatgactccagatcgtgcatttgaagattcctacccccagcttcagttaataattaagaaagttattgcccacttccatgacttctcagttcttttctcagtggaaaaatttctgccgtttctggacatgttccaaaaagagagtgtgcgggtggaggtttgcaaatgcatcatggacgcctttatcaagcatcaacaagagcccaccaaggacccggtcatcttgaatgcccttttgcatgtttgcaagaccatgcatgactctgtgaatgcactcactcttgaggatgagaaaagaatgctgtcatatttgattaatggatttataaaaatggtttcctttggccgtgattttgaacaacagctgagtttttatgttgagtccaggtcgatgttttgcaatctggagcctgttcttgtgcagttgattcatagtgtgaaccggttggcaatggagacaagaaaagtaatgaaaggaaatcattccagaaagacagctgcatttgtccgggcctgtgttgcctactgcttcatcaccatcccctccctggcgggcatcttcacacgtctcaatctctacctgcattctggtcaggtggccttggccaaccagtgcctctcccaagctgatgcttttttcaaagccgctataagccttgttccggaagttccaaagatgattaatattgatgggaagatgcggccatcggaatcgttccttctggaattcctctgcaatttcttttctactttattaatagttccggatcatcctgaacatggggtcctgtttcttgttcgagagcttctcaacgtgatccaggactacacctgggaggacaacagcgatgagaaaatccgcatctacacctgcgtcctgcatctcctctccgccatgagccaggagacgtacctttaccacatagacaaagtggactccaacgacagcctctacgggggagactccaagttcctggcagaaaacaacaagctgtgtgagacggtgatggctcagatcctagagcatctgaaaaccctggccaaggacgaggccctgaagcgccagagctcgttgggcctttccttctttaacagcatcttggcccatggggacctacgcaacaacaagctcaaccagctctccgtcaacctgtggcacctggcacagaggcacggctgtgcagacaccaggaccatggtgaaaacgctagaatacatcaagaagcaaagcaaacaaccagacatgactcatctgacggctgagaaacggctaccacatccaaatccagaaagatctgctctgctgcccttgact

SEQ ID NO: 444099 - DNA, 3168 bp, Homo sapiens
gcggccgctgcggggcggccagctgcccttcacaaacatggcggccgaggggtgcggggagtggcggggtaaggatgggaagccgagcagacggccccagaacaagcggtcatgtgactgggaagatggccgtctttccttggcactccaggaataggaactacaaagctgaatttgcatcatgccgactggaggctgtaccattggagtttggggactatcaccctctgaaacccataactgtcacagagtcaaagacaaagaaagtgaaccggaaaggaagcacttcttccacgtcctcctcctcctccagctccgtggtggacccgctgagcagcgtcctcgatgggactgaccccctctccatgtttgcagccactgctgaccccgcagccttggcagctgccatggacagctccagaaggaaacgtgatagagatgataactccgttgtaggatcggattttgagccttggaccaacaaacggggagaaatccttgcccggtacaccactaccgaaaagctgtctattaatctgtttatgggatctgaaaaaggcaaagctgggactgccacattggcaatgtcagagaaggtgcggacccggctggaggagctggatgactttgaggagggttcccaaaaggagctgttgaacttgactcagcaggattacgtgaaccgcatagaggagctcaaccaatcgctgaaggatgcctgggcctcagaccagaaagtgaaggctctaaaaatagtcatccagtgttcaaagcttctttcagacaccagtgttattcagttctacccaagcaaatttgtccttatcaccgacatacttgatacatttggaaagctcgtgtacgagcgcatcttttccatgtgtgtggatagccgcagcgtcttaccagatcacttttctccagagaatgcaaatgacacggccaaggaaacatgcctaaattggtttttcaagattgcctccatcagggaactcattccaagattttacgtggaggcatccatcctgaaatgtaacaaattcctctccaaaacgggaatttcagagtgcctgccccggttgacatgcatgatcagagggatcggagacccactagtgtcggtgtatgcccgtgcctacctgtgccgggtgggaatggaagtggccccacatctcaaagaaaccctaaataagaacttttttgacttcctccttacgttcaaacagattcatggggatacggtccagaaccagctggtggtccaaggagtggagctcccatcttacctccccttgtacccgcctgccatggactggatcttccagtgcatctcctaccatgcccccgaggctctgctgaccgagatgatggaaaggtgtaagaaactaggaaacaatgccttgctgttgaattctgtgatgtctgccttccgggctgagttcatcgccacaaggtctatggatttcattggcatgattaaagagtgtgatgaatctggtttccccaagcatcttctttttcgatcactgggattaaacttggccttggctgatcctcctgagagtgaccgacttcagattctcaacgaagcttggaaagtcatcactaagctgaagaacccacaggactacattaattgtgccgaagtgtgggtggaatacacctgcaagcatttcacgaaacgagaggtgaataccgttttggcagatgtcatcaagcacatgactccagatcgtgcatttgaagattcctacccccagcttcagttaataattaagaaagttattgcccacttccatgacttctcagttcttttctcagtggaaaaatttctgccgtttctggacatgttccaaaaagagagtgtgcgggtggaggtttgcaaatgcatcatggacgcctttatcaagcatcaacaagagcccaccaaggacccggtcatcttgaatgcccttttgcatgtttgcaagaccatgcatgactctgtgaatgcactcactcttgaggatgagaaaagaatgctgtcatatttgattaatggatttataaaaatggtttcctttggccgtgattttgaacaacagctgagtttttatgttgagtccaggtcgatgttttgcaatctggagcctgttcttgtgcagttgattcatagtgtgaaccggttggcaatggagacaagaaaagtaatgaaaggaaatcattccagaaagacagctgcatttgtccgggcctgtgttgcctactgcttcatcaccatcccctccctggcgggcatcttcacacgtctcaatctctacctgcattctggtcaggtggccttggccaaccagtgcctctcccaagctgatgcttttttcaaagccgctataagccttgttccggaagttccaaagatgattaatattgatgggaagatgcggccatcggaatcgttccttctggaattcctctgcaatttcttttctactttattaatagttccggatcatcctgaacatggggtcctgtttcttgttcgagagcttctcaacgtgatccaggactacacctgggaggacaacagcgatgagaaaatccgcatctacacctgcgtcctgcatctcctctccgccatgagccaggagacgtacctttaccacatagacaaagtggactccaacgacagcctctacgggggagactccaagttcctggcagaaaacaacaagctgtgtgagacggtgatggctcagatcctagagcatctgaaaaccctggccaaggacgaggccctgaagcgccagagctcgttgggcctttccttctttaacagcatcttggcccatggggacctacgcaacaacaagctcaaccagctctccgtcaacctgtggcacctggcacagaggcacggctgtgcagacaccaggaccatgagctggccctcagactccctctgcaaacaaggacctgacccccgggcccatccccaggctcagggactctggtgccaaatccagaaagatctgctctgctgccctgaactcttacggcaatttaggtttctcatttttcttttctttttacatatgtacaaattgttttaagctttggcctctatccaggttattctgacaatgaagaaatgggagttgtcagagcattaaaatgcaatcttcactaaga

SEQ ID NO: 444100 - DNA, 2500 bp, Homo sapiens
cccatcttcgccccatcagtattgcacatccttagagagggatcattgcacctgataagccccagacttccttgaggacaaagctgcagttagagcctcccccatgagtttgcaccttattaaatcagaaggcgagaacatgtagcctgtgatttgcctcttctgcatgacagccagcaaatgtcggaagccctgtggtctctcaagtttcacgaaaaactaagtcagtgccctcagagtgaggagcagatatccattaggaagggcactttttataggtctgtttcttgatactgagaatgaaagaaaaagcctttcgtttaagggcatcctcttccctctttgcagcagaggccaaagtgtgtatgcatcgcccactgcttgaaacctgggggggattttccatccagagatatcaggtgggaatggaagtggccccacatctcaaagaaaccctaaataagaacttttttgacttcctccttacgttcaaacagattcatggggatacggtccagaaccagctggtggtccaaggagtggagctcccatcttacctccccttgtacccgcctgccatggactggatcttccagtgcatctcctaccatgcccccgaggctctgctgaccgagatgatggaaaggtgtaagaaactaggaaacaatgccttgctgttgaattctgtgatgtctgccttccgggctgagttcatcgccacaaggtctatggatttcattggcatgattaaagagtgtgatgaatctggtttccccaagcatcttctttttcgatcactgggattaaacttggccttggctgatcctcctgagagtgaccgacttcagattctcaacgaagcttggaaagtcatcactaagctgaagaacccacaggactacattaattgtgccgaagtgtgggtggaatacacctgcaagcatttcacgaaacgagaggtgaataccgttttggcagatgtcatcaagcacatgactccagatcgtgcatttgaagattcctacccccagcttcagttaataattaagaaagttattgcccacttccatgacttctcagttcttttctcagtggaaaaatttctgccgtttctggacatgttccaaaaagagagtgtgcgggtggaggtttgcaaatgcatcatggacgcctttatcaagcatcaacaagagcccaccaaggacccggtcatcttgaatgcccttttgcatgtttgcaagaccatgcatgactctgtgaatgcactcactcttgaggatgagaaaagaatgctgtcatatttgattaatggatttataaaaatggtttcctttggccgtgattttgaacaacagctgagtttttatgttgagtccaggtcgatgttttgcaatctggagcctgttcttgtgcagttgattcatagtgtgaaccggttggcaatggagacaagaaaagtaatgaaaggaaatcattccagaaagacagctgcatttgtccgggcctgtgttgcctactgcttcatcaccatcccctccctggcgggcatcttcacacgtctcaatctctacctgcattctggtcaggtggccttggccaaccagtgcctctcccaagctgatgcttttttcaaagccgctataagccttgttccggaagttccaaagatgattaatattgatgggaagatgcggccatcggaatcgttccttctggaattcctctgcaatttcttttctactttattaatagttccggatcatcctgaacatggggtcctgtttcttgttcgagagcttctcaacgtgatccaggactacacctgggaggacaacagcgatgagaaaatccgcatctacacctgcgtcctgcatctcctctccgccatgagccaggagacgtacctttaccacatagacaaagtggactccaacgacagcctctacgggggagactccaagttcctggcagaaaacaacaagctgtgtgagacggtgatggctcagatcctagagcatctgaaaaccctggccaaggacgaggccctgaagcgccagagctcgttgggcctttccttctttaacagcatcttggcccatggggacctacgcaacaacaagctcaaccagctctccgtcaacctgtggcacctggcacagaggcacggctgtgcagacaccaggaccatggtgaaaacgctagaatacatcaagaagcaaagcaaacaaccagacatgactcatctgacggagctggccctcagactccctctgcaaacaaggacctgacccccgggcccatccccaggctcagggactctggtgccaaatccagaaagatctgctctgctgccctgaactcttacggcaatttaggtttctcatttttcttttctttttacatatgtacaaattgttttaagctttggcctctatccaggttattctgacaatgaagaaatgggagttgtcagagcattaaaatgcaatcttcactaaga

SEQ ID NO: 444101 - DNA, 2342 bp, Homo sapiens
ggattatattagaggcagtggctaagaatgtcggccgcagggccagagtgcctgggttgaattctaactcttacatttgcttgctgtgtgccttgggggaatttcagagtgcctgccccggttgacatgcatgatcagagggatcggagacccactagtgtcggtgtatgcccgtgcctacctgtgccggcagaggccaaagtgtgtatgcatcgcccactgcttgaaacctgggggggattttccatccagagatatcaggtgggaatggaagtggccccacatctcaaagaaaccctaaataagaacttttttgacttcctccttacgttcaaacagattcatggggatacggtccagaaccagctggtggtccaaggagtggagctcccatcttacctccccttgtacccgcctgccatggactggatcttccagtgcatctcctaccatgcccccgaggctctgctgaccgagatgatggaaaggtgtaagaaactaggaaacaatgccttgctgttgaattctgtgatgtctgccttccgggctgagttcatcgccacaaggtctatggatttcattggcatgattaaagagtgtgatgaatctggtttccccaagcatcttctttttcgatcactgggattaaacttggccttggctgatcctcctgagagtgaccgacttcagattctcaacgaagcttggaaagtcatcactaagctgaagaacccacaggactacattaattgtgccgaagtgtgggtggaatacacctgcaagcatttcacgaaacgagaggtgaataccgttttggcagatgtcatcaagcacatgactccagatcgtgcatttgaagattcctacccccagcttcagttaataattaagaaagttattgcccacttccatgacttctcagttcttttctcagtggaaaaatttctgccgtttctggacatgttccaaaaagagagtgtgcgggtggaggtttgcaaatgcatcatggacgcctttatcaagcatcaacaagagcccaccaaggacccggtcatcttgaatgcccttttgcatgtttgcaagaccatgcatgactctgtgaatgcactcactcttgaggatgagaaaagaatgctgtcatatttgattaatggatttataaaaatggtttcctttggccgtgattttgaacaacagctgagtttttatgttgagtccaggtcgatgttttgcaatctggagcctgttcttgtgcagttgattcatagtgtgaaccggttggcaatggagacaagaaaagtaatgaaaggaaatcattccagaaagacagctgcatttgtccgggcctgtgttgcctactgcttcatcaccatcccctccctggcgggcatcttcacacgtctcaatctctacctgcattctggtcaggtggccttggccaaccagtgcctctcccaagctgatgcttttttcaaagccgctataagccttgttccggaagttccaaagatgattaatattgatgggaagatgcggccatcggaatcgttccttctggaattcctctgcaatttcttttctactttattaatagttccggatcatcctgaacatggggtcctgtttcttgttcgagagcttctcaacgtgatccaggactacacctgggaggacaacagcgatgagaaaatccgcatctacacctgcgtcctgcatctcctctccgccatgagccaggagacgtacctttaccacatagacaaagtggactccaacgacagcctctacgggggagactccaagttcctggcagaaaacaacaagctgtgtgagacggtgatggctcagatcctagagcatctgaaaaccctggccaaggacgaggccctgaagcgccagagctcgttgggcctttccttctttaacagcatcttggcccatggggacctacgcaacaacaagctcaaccagctctccgtcaacctgtggcacctggcacagaggcacggctgtgcagacaccaggaccatggtgaaaacgctagaatacatcaagaagcaaagcaaacaaccagacatgactcatctgacggagctggccctcagactccctctgcaaacaaggacctgacccccgggcccatccccaggctcagggactctggtgccaaatccagaaagatctgctctgctgccctgaactcttacggcaatttaggtttctcatttttcttttctttttacatatgtacaaattgttttaagctttggcctctatccaggttattctgacaatgaagaaatgggagttgtcagagcattaaaatgcaatcttcactaaga

SEQ ID NO: 444102 - DNA, 1571 bp, Homo sapiens
tggttcctttttcctgcttagaaacgagaggtgaataccgttttggcagatgtcatcaagcacatgactccagatcgtgcatttgaagattcctacccccagcttcagttaataattaagaaagttattgcccacttccatgacttctcagttcttttctcagtggaaaaatttctgccgtttctggacatgttccaaaaagagagtgtgcgggtggaggtttgcaaatgcatcatggacgcctttatcaagcatcaacaagagcccaccaaggacccggtcatcttgaatgcccttttgcatgtttgcaagaccatgcatgactctgtgaatgcactcactcttgaggatgagaaaagaatgctgtcatatttgattaatggatttataaaaatggtttcctttggccgtgattttgaacaacagctgagtttttatgttgagtccaggtcgatgttttgcaatctggagcctgttcttgtgcagttgattcatagtgtgaaccggttggcaatggagacaagaaaagtaatgaaaggaaatcattccagaaagacagctgcatttgtccgggcctgtgttgcctactgcttcatcaccatcccctccctggcgggcatcttcacacgtctcaatctctacctgcattctggtcaggtggccttggccaaccagtgcctctcccaagctgatgcttttttcaaagccgctataagccttgttccggaagttccaaagatgattaatattgatgggaagatgcggccatcggaatcgttccttctggaattcctctgcaatttcttttctactttattaatagttccggatcatcctgaacatggggtcctgtttcttgttcgagagcttctcaacgtgatccaggactacacctgggaggacaacagcgatgagaaaatccgcatctacacctgcgtcctgcatctcctctccgccatgagccaggagacgtacctttaccacatagacaaagtggactccaacgacagcctctacgggggagactccaagttcctggcagaaaacaacaagctgtgtgagacggtgatggctcagatcctagagcatctgaaaaccctggccaaggacgaggccctgaagcgccagagctcgttgggcctttccttctttaacagcatcttggcccatggggacctacgcaacaacaagctcaaccagctctccgtcaacctgtggcacctggcacagaggcacggctgtgcagacaccaggaccatggtgaaaacgctagaatacatcaagaagcaaagcaaacaaccagacatgactcatctgacggagctggccctcagactccctctgcaaacaaggacctgacccccgggcccatccccaggctcagggactctggtgccaaatccagaaagatctgctctgctgccctgaactcttacggcaatttaggtttctcatttttcttttctttttacatatgtacaaattgttttaagctttggcctctatccaggttattctgacaatgaagaaatgggagttgtcagagcattaaaatgcaatcttcactaaga

SEQ ID NO: 444103 - DNA, 1128 bp, Homo sapiens
ctcgcactacttatcaccacacgcatacacaacgcacactaaaaaactttatagtgtgaaccggttggcaatggagacaagaaaagtaatgaaaggaaatcattccagaaagacagctgcatttgtccgggcctgtgttgcctactgcttcatcaccatcccctccctggcgggcatcttcacacgtctcaatctctacctgcattctggtcaggtggccttggccaaccagtgcctctcccaagctgatgcttttttcaaagccgctataagccttgttccggaagttccaaagatgattaatattgatgggaagatgcggccatcggaatcgttccttctggaattcctctgcaatttcttttctactttattaatagttccggatcatcctgaacatggggtcctgtttcttgttcgagagcttctcaacgtgatccaggactacacctgggaggacaacagcgatgagaaaatccgcatctacacctgcgtcctgcatctcctctccgccatgagccaggagacgtacctttaccacatagacaaagtggactccaacgacagcctctacgggggagactccaagttcctggcagaaaacaacaagctgtgtgagacggtgatggctcagatcctagagcatctgaaaaccctggccaaggacgaggccctgaagcgccagagctcgttgggcctttccttctttaacagcatcttggcccatggggacctacgcaacaacaagctcaaccagctctccgtcaacctgtggcacctggcacagaggcacggctgtgcagacaccaggaccatggtgaaaacgctagaatacatcaagaagcaaagcaaacaaccagacatgactcatctgacggagctggccctcagactccctctgcaaacaaggacctgacccccgggcccatccccaggctcagggactctggtgccaaatccagaaagatctgctctgctgccctgaactcttacggcaatttaggtttctcatttttcttttctttttacatatgtacaaattgttttaagctttggcctctatccaggttattctgacaatgaagaaatgggagttgtcagagcattaaaatgcaatcttcactaaga

SEQ ID NO: 444104 - DNA, 1555 bp, Homo sapiens
  misc_feature (1524)..(1524): n is a, c, g, or t
  misc_feature (1527)..(1527): n is a, c, g, or t
  misc_feature (1531)..(1531): n is a, c, g, or t
gcggccgctgcggggcggccagctgcccttcacaaacatggcggccgaggggtgcggggagtggcggggtaaggatgggaagccgagcagacggccccagaacaagcggtcatgtgactgggaagatggccgtctttccttggcactccaggaataggaactacaaagctgaatttgcatcatgccgactggaggctgtaccattggagtttggggactatcaccctctgaaacccataactgtcacagagtcaaagacaaagaaagtgaaccggaaaggaagcacttcttccacgtcctcctcctcctccagctccgtggtggacccgctgagcagcgtcctcgatgggactgaccccctctccatgtttgcagccactgctgaccccgcagccttggcagctgccatggacagctccagaaggaaacgtgatagagatgataactccgttgtaggatcggattttgagccttggaccaacaaacggggagaaatccttgcccggtacaccactaccgaaaagctgtctattaatctgtttatgggatctgaaaaaggcaaagctgggactgccacattggcaatgtcagagaaggtgcggacccggctggaggagctggatgactttgaggagggttcccaaaaggagctgttgaacttgactcagcaggattacgtgaaccgcatagaggagctcaaccaatcgctgaaggatgcctgggcctcagaccagaaagtgaaggctctaaaaatagtcatccagtgttcaaagcttctttcagacaccagtgttattcagttctacccaagcaaatttgtccttatcaccgacatacttgatacatttggaaagctcgtgtacgagcgcatcttttccatgtgtgtggatagccgcagcgtcttaccagatcacttttctccagagaatgcaaatgacacggccaaggaaacatgcctaaattggtttttcaagattgcctccatcagggaactcattccaagattttacgtggaggcatccatcctgaaatgtaacaaattcctctccaaaacgggaatttcagagtgcctgccccggttgacatgcatgatcagagggatcggagacccactagtgtcggtgtatgcccgtgcctacctgtgccgggtgggaatggaagtggccccacatctcaaagaaaccctaaataagaacttttttgacttcctccttacgttcaaacagattcatggggatacggtccagaaccagctggtggtccaaggagtggagctcccatcttacctccccttgtacccgcctgccatggactggatcttccagtgcatctcctaccatgcccccgaggctctgctgaccgagatgatggaaaggtgtaagaaactaggaaacaatgccttgctgttgaattctgtgatgtctgccttccgggctgagttcatcgccacaaggtctatggatttcattggcatgattaaagagtgtgatgaatctggtttccccaagcatcttcttgttaggncantggnattaaaaaaggccttgcgatatag

SEQ ID NO: 444105 - DNA, 1538 bp, Homo sapiens
gcggccgctgcggggcggccagctgcccttcacaaacatggcggccgaggggtgcggggagtggcggggtaaggatgggaagccgagcagacggccccagaacaagcggtcatgtgactgggaagatggccgtctttccttggcactccaggaataggaactacaaagctgaatttgcatcatgccgactggaggctgtaccattggagtttggggactatcaccctctgaaacccataactgtcacagagtcaaagacaaagaaagtgaaccggaaaggaagcacttcttccacgtcctcctcctcctccagctccgtggtggacccgctgagcagcgtcctcgatgggactgaccccctctccatgtttgcagccactgctgaccccgcagccttggcagctgccatggacagctccagaaggaaacgtgatagagatgataactccgttgtaggatcggattttgagccttggaccaacaaacggggagaaatccttgcccggtacaccactaccgaaaagctgtctattaatctgtttatgggatctgaaaaaggcaaagctgggactgccacattggcaatgtcagagaaggtgcggacccggctggaggagctggatgactttgaggagggttcccaaaaggagctgttgaacttgactcagcaggattacgtgaaccgcatagaggagctcaaccaatcgctgaaggatgcctgggcctcagaccagaaagtgaaggctctaaaaatagtcatccagtgttcaaagcttctttcagacaccagtgttattcagttctacccaagcaaatttgtccttatcaccgacatacttgatacatttggaaagctcgtgtacgagcgcatcttttccatgtgtgtggatagccgcagcgtcttaccagatcacttttctccagagaatgcaaatgacacggccaaggaaacatgcctaaattggtttttcaagattgcctccatcagggaactcattccaagattttacgtggaggcatccatcctgaaatgtaacaaattcctctccaaaacgggaatttcagagtgcctgccccggttgacatgcatgatcagagggatcggagacccactagtgtcggtgtatgcccgtgcctacctgtgccgggctctgctgaccgagatgatggaaaggtgtaagaaactaggaaacaatgccttgctgttgaattctgtgatgtctgccttccgggctgagttcatcgccacaaggtctatggatttcattggcatgattaaagagtgtgatgaatctggtttccccaagcatcttctttttcgatcactgggattaaacttggccttggctgatcctcctgagagtgaccgacttcagattctcaacgaagcttggaaagtcatcactaagctgaagaacccacaggactacatttatttgtgccgaagtgtgggtgggaattcaccctggagcatttcacgaacgagaagggaatccggtgggggatggttcagcctgatccgaatccggttggaaatc

SEQ ID NO: 444106 - DNA, 1532 bp, Homo sapiens
  misc_feature (1487)..(1487): n is a, c, g, or t
  misc_feature (1510)..(1510): n is a, c, g, or t
gcggccgctgcggggcggccagctgcccttcacaaacatggcggccgaggggtgcggggagtggcggggtaaggatgggaagccgagcagacggccccagaacaagcggtcatgtgactgggaagatggccgtctttccttggcactccaggaataggaactacaaagctgaatttgcatcatgccgactggaggctgtaccattggagtttggggactatcaccctctgaaacccataactgtcacagagtcaaagacaaagaaagtgaaccggaaaggaagcacttcttccacgtcctcctcctcctccagctccgtggtggacccgctgagcagcgtcctcgatgggactgaccccctctccatgtttgcagccactgctgaccccgcagccttggcagctgccatggacagctccagaaggaaacgtgatagagatgataactccgttgtaggatcggattttgagccttggaccaacaaacggggagaaatccttgcccggtacaccactaccgaaaagctgtctattaatctgtttatgggatctgaaaaaggcaaagctgggactgccacattggcaatgtcagagaaggtgcggacccggctggaggagctggatgactttgaggagggttcccaaaaggagctgttgaacttgactcagcaggattacgtgaaccgcatagaggagctcaaccaatcgctgaaggatgcctgggcctcagaccagaaagtgaaggctctaaaaatagtcatccagtgttcaaagcttctttcagacaccagtgttattcagttctacccaagcaaatttgtccttatcaccgacatacttgatacatttggaaagctcgtgtacgagcgcatcttttccatgtgtgtggatagccgcagcgtcttaccagatcacttttctccagagaatgcaaatgacacggccaaggaaacatgcctaaattggtttttcaagattgcctccatcagggaactcattccaagattttacgtggaggcatccatcctgaaatgtaacaaattcctctccaaaacgggaatttcagagtgcctgccccggttgacatgcatgatcagagggatcggagacccactagtgtcggtattcatggggatacggtccagaaccagctggtggtccaaggagtggagctcccatcttacctccccttgtacccgcctgccatggactggatcttccagtgcatctcctaccatgcccccgaggctctgctgaccgagatgatggaaaggtgtaagaaactaggaaacaatgccttgctgttgaattctgtgatgtctgccttccgggctgagttcatcgccacaaggtctatggatttcattggcatgattaaagagtgtgatgaatctggtttccccaagcatcttctttttcgatcactgggattaaacttggccttgccatatgcaagcaggccaaggtcagaagatgaaccacgtgcgnaatagaaaaagctacctatggantgtgcccgagatcctctagagt

SEQ ID NO: 444107 - DNA, 1244 bp, Homo sapiens
gcggccgctgcggggcggccagctgcccttcacaaacatggcggccgaggggtgcggggagtggcggggtaaggatgggaagccgagcagacggccccagaacaagcggtcatgtgactgggaagatggccgtctttccttggcactccaggaataggaactacaaagctgaatttgcatcatgccgactggaggctgtaccattggagtttggggactatcaccctctgaaacccataactgtcacagagtcaaagacaaagaaagtgaaccggaaaggaagcacttcttccacgtcctcctcctcctccagctccgtggtggacccgctgagcagcgtcctcgatgggactgaccccctctccatgtttgcagccactgctgaccccgcagccttggcagctgccatggacagctccagaaggaaacgtgatagagatgataactccgttgtaggatcggattttgagccttggaccaacaaacggggagaaatccttgcccggtacaccactaccgaaaagctgtctattaatctgtttatgggatctgaaaaaggcaaagctgggactgccacattggcaatgtcagagaaggtgcggacccggctggaggagctggatgactttgaggagggttcccaaaaggagctgttgaacttgactcagcaggattacgtgaaccgcatagaggagctcaaccaatcgctgaaggatgcctgggcctcagaccagaaagtgaaggctctaaaaatagtcatccagtgttcaaagcttctttcagacaccagtgttattcagttctacccaagcaaatttgtccttatcaccgacatacttgatacatttggaaagctcgtgtacgagcgcatcttttccatgtgtgtggatagccgcagcgtcttaccaggtaatgtcgcagctgttcctggggtgtcattctgccctggagtcaggactagaaggcttttattgagtcaggattcattgaagcttgataaaggttttaattttgggtgtgttaaagtaaaagaaacacctttgaagatttctgatcacctcagtcttctaaaaacattagaaggtttctaaatggcccgtgtaggaactcaggcaagtcatttgaatctgcaaaggcctcacagttagattcagccaaactttcacacgaacatattttcctctgctgcttgactttaatatttttcctatgtatcgttccctcctaagaagcaacttgcttgg

SEQ ID NO: 444108 - DNA, 574 bp, Homo sapiens
gagtagaaatttgaatctccagtggtttttagtgactgtatttttcttctttgaatatatatttctttctcttgggtatgtaaatggctctgttggaaaacaatgaacatactgccttcgatttttaaaatattaatgaattttatgtctctgcagaatctgtttatgggatctgaaaaaggtaagatgagtttgttgttgttttgatgggaaaattctggcattacttttagtataattttacaaaggaaaaaagttttatgtgatatgattctgatgtttgattcagttggagctgctatttcttagattgtggatagacgtagaaataaaatacatatttagagcatgaattaaaaaaataccaaataccagcactttgggaggccaaggtgggtggatcatctgaggtcaggaagtttggtaccagcctggccaacatggtgaaatctcgtctctattaaaaatacaaaaatttgctgggcgtggtggcgcacgcccgtaatcccagctactcaggaggctgaagcaggagaatcacttgaacctgagaggcggaggtttcagtgagcca

SEQ ID NO: 444109 - DNA, 496 bp, Homo sapiens
agcctgtctgggcgatgatagctctgggtccctaattaacaaacatttatttactgtttgctcctgaagagtgtgatactaacaccatctgtccttttcctcccaggaaagctcgtgtacgagcgcatcttttccatgtgtgtggatagccgcagcgtcttaccaggtaatgtcgcagctgttcctggggtgtcattctgccctggagtcaggactagaaggcttttattgagtcaggattcattgaagcttgataaaggttttaattttgggtgtgttaaagtaaaagaaacacctttgaagatttctgatcacctcagtcttctaaaaacattagaaggtttctaaatggcccgtgtaggaactcaggcaagtcatttgaatctgcaaaggcctcacagttagattcagccaaactttcacacgaacatattttcctctgctgcttgactttaatatttttcctatgtatcgttccctcctaagaagcaacttg

SEQ ID NO: 444110 - DNA, 3229 bp, Homo sapiens
gcggccgctgcggggcggccagctgcccttcacaaacatggcggccgaggggtgcggggagtggcggggtaaggatgggaagccgagcagacggccccagaacaagcggtcatgtgactgggaagatggccgtctttccttggcactccaggaataggaactacaaagctgaatttgcatcatgccgactggaggctgtaccattggagtttggggactatcaccctctgaaacccataactgtcacagagtcaaagacaaagaaagtgaaccggaaaggaagcacttcttccacgtcctcctcctcctccagctccgtggtggacccgctgagcagcgtcctcgatgggactgaccccctctccatgtttgcagccactgctgaccccgcagccttggcagctgccatggacagctccagaaggaaacgtgatagagatgataactccgttgtaggatcggattttgagccttggaccaacaaacggggagaaatccttgcccggtacaccactaccgaaaagctgtctattaatctgtttatgggatctgaaaaaggcaaagctgggactgccacattggcaatgtcagagaaggtgcggacccggctggaggagctggatgactttgaggagggttcccaaaaggagctgttgaacttgactcagcaggattacgtgaaccgcatagaggagctcaaccaatcgctgaaggatgcctgggcctcagaccagaaagtgaaggctctaaaaatagtcatccagtgttcaaagcttctttcagacaccagtgttattcagttctacccaagcaaatttgtccttatcaccgacatacttgatacatttggaaagctcgtgtacgagcgcatcttttccatgtgtgtggatagccgcagcgtcttaccagatcacttttctccagagaatgcaaatgacacggccaaggaaacatgcctaaattggtttttcaagattgcctccatcagggaactcattccaagattttacgtggaggcatccatcctgaaatgtaacaaattcctctccaaaacgggaatttcagagtgcctgccccggttgacatgcatgatcagagggatcggagacccactagtgtcggtgtatgcccgtgcctacctgtgccgggtgggaatggaagtggccccacatctcaaagaaaccctaaataagaacttttttgacttcctccttacgttcaaacagattcatggggatacggtccagaaccagctggtggtccaaggagtggagctcccatcttacctccccttgtacccgcctgccatggactggatcttccagtgcatctcctaccatgcccccgaggctctgctgaccgagatgatggaaaggtgtaagaaactaggaaacaatgccttgctgttgaattctgtgatgtctgccttccgggctgagttcatcgccacaaggtctatggatttcattggcatgattaaagagtgtgatgaatctggtttccccaagcatcttctttttcgatcactgggattaaacttggccttggctgatcctcctgagagtgaccgacttcagattctcaacgaagcttggaaagtcatcactaagctgaagaacccacaggactacattaattgtgccgaagtgtgggtggaatacacctgcaagcatttcacgaaacgagaggtgaataccgttttggcagatgtcatcaagcacatgactccagatcgtgcatttgaagattcctacccccagcttcagttaataattaagaaagttattgcccacttccatgacttctcagttcttttctcagtggaaaaatttctgccgtttctggacatgttccaaaaagagagtgtgcgggtggaggtttgcaaatgcatcatggacgcctttatcaagcatcaacaagagcccaccaaggacccggtcatcttgaatgcccttttgcatgtttgcaagaccatgcatgactctgtgaatgcactcactcttgaggatgagaaaagaatgctgtcatatttgattaatggatttataaaaatggtttcctttggccgtgattttgaacaacagctgagtttttatgttgagtccaggtcgatgttttgcaatctggagcctgttcttgtgcagttgattcatagtgtgaaccggttggcaatggagacaagaaaagtaatgaaaggaaatcattccagaaagacagctgcatttgtccgggcctgtgttgcctactgcttcatcaccatcccctccctggcgggcatcttcacacgtctcaatctctacctgcattctggtcaggtggccttggccaaccagtgcctctcccaagctgatgcttttttcaaagccgctataagccttgttccggaagttccaaagatgattaatattgatgggaagatgcggccatcggaatcgttccttctggaattcctctgcaatttcttttctactttattaatagttccggatcatcctgaacatggggtcctgtttcttgttcgagagcttctcaacgtgatccaggactacacctgggaggacaacagcgatgagaaaatccgcatctacacctgcgtcctgcatctcctctccgccatgagccaggagacgtacctttaccacatagacaaagtggactccaacgacagcctctacgggggagactccaagttcctggcagaaaacaacaagctgtgtgagacggtgatggctcagatcctagagcatctgaaaaccctggccaaggacgaggccctgaagcgccagagctcgttgggcctttccttctttaacagcatcttggcccatggggacctacgcaacaacaagctcaaccagctctccgtcaacctgtggcacctggcacagaggcacggctgtgcagacaccaggaccatggtgaaaacgctagaatacatcaagaagcaaagcaaacaaccagacatgactcatctgacggagctggccctcagactccctctgcaaacaaggacctgacccccgggcccatccccaggctcagggactctggtgccaaatccagaaagatctgctctgctgccctgaactcttacggcaatttaggtttctcatttttcttttctttttacatatgtacaaattgttttaagctttggcctctatccaggttattctgacaatgaagaaatgggagttgtcagagcattaaaatgcaatcttcactaaga
